United States Patent Application Publication US 2021/0199660 A1 - sequence listing, part 29

SEQ ID NO: 408027 - DNA, 120 bp, Artificial Sequence
  ENSG00000147852_31 (sequence is synthesized)
cttgatgttgtataactaagcctgtaattgggctggtttctcttacaccctagcacagttaaaaaatgaagtactgtttaacatttgctcccgaaatatttcttactgtgtaaaagaagc

SEQ ID NO: 408028 - DNA, 120 bp, Artificial Sequence
  ENSG00000147852_32 (sequence is synthesized)
tagcttagtctgtacctagaattcctcttggttagaggagtgagtttcttttttttccattaacttgtttcctgatcgagaaacacgtgctaagatttctatgaattctgcttctttata

SEQ ID NO: 408029 - DNA, 120 bp, Artificial Sequence
  ENSG00000147852_33 (sequence is synthesized)
gttaagtctctgttttccatgttctgtcatttatataggtcaaggacaagtgccttctaaggcatggataagggctttcttcttatgaaagtctagactgtcttactgtgaagatggcca

SEQ ID NO: 408030 - DNA, 120 bp, Artificial Sequence
  ENSG00000147852_34 (sequence is synthesized)
gggaggatagcaagcaatggcattcttgaacagtctaaggcaggtttctcagtgtggtcctgagaacagaagcatctgcatcacctgggaatgtattagaaatgcaagttcccagcccca

SEQ ID NO: 408031 - DNA, 120 bp, Artificial Sequence
  ENSG00000147852_35 (sequence is synthesized)
tcccagacctactgaatcagaaactctgggggcgagggctgaaacctgctttcataagcccttcaggcgatactgatgtaaactaaagcttaaaaaccaccgttttactgtgacttcatg

SEQ ID NO: 408032 - DNA, 120 bp, Artificial Sequence
  ENSG00000147852_36 (sequence is synthesized)
aagaatataattgcaatatcacctaaatttttatcctggctgggatggggcagattcttactatggacaatttctggaacttacagtatgaagagcagatgaggagtttgagacaaagaa

SEQ ID NO: 408033 - DNA, 120 bp, Artificial Sequence
  ENSG00000147852_37 (sequence is synthesized)
aaaattgtacagggagtttagtgaattttccatcaggttggccattactttctttctctaaagtctcaggatgtctggaagcaaggaaagacaaaagacttgaagcaccgggtgcatgct

SEQ ID NO: 408034 - DNA, 120 bp, Artificial Sequence
  ENSG00000147852_38 (sequence is synthesized)
gagaagatgttttgcgttgctacgtgaatcagtggatgactcatatttcacttgcatatgaaatataaggcagttaacatcttgtttgtggcttaagcaaggacattaatcctactagat

SEQ ID NO: 408035 - DNA, 120 bp, Artificial Sequence
  ENSG00000147852_39 (sequence is synthesized)
gaaggggaagttggttctgttgtcttaagggatgcccccttgtgattttggtcaactgaatgaaaaagaaaagatagccttggacttttttttcatgggaggtttggaggtcaagcatgt

SEQ ID NO: 408036 - DNA, 120 bp, Artificial Sequence
  ENSG00000147852_40 (sequence is synthesized)
agaaggaaaaggctgtagtcatgaatatagaactgtctgctctccaccttttcctcactctacatttagtcatcacactgaacaggatgtggcctgctgacagtgagtagctgaagtgcc

SEQ ID NO: 408037 - DNA, 120 bp, Artificial Sequence
  ENSG00000147852_41 (sequence is synthesized)
tgtttggtaagtaggttagcattcatcatgaactctgaaagccatttcagagtttggctgctgctctgaccctgctgtggtacaaaaaacatggatttttttttttttaactggagtaat

SEQ ID NO: 408038 - DNA, 120 bp, Artificial Sequence
  ENSG00000147852_42 (sequence is synthesized)
accaaattccctttagaagcttgaagtttgatactattgctttccccattataaggattatacagtattaattaattataaggcccaaagtttgttttggcaaataaagtattattctct

SEQ ID NO: 408039 - DNA, 120 bp, Artificial Sequence
  ENSG00000147852_43 (sequence is synthesized)
atcatcatcttttgaattcctgtccctagtatgttctttcatgttctgggtaaaatttccaaccctcaaagagtctaaaacgtctcatttttttttaccacgtcctccccagtaagaagc

SEQ ID NO: 408040 - DNA, 120 bp, Artificial Sequence
  ENSG00000147852_44 (sequence is synthesized)
caaggtacaactcattgtacctacgaggtacaaactcatttgtagaaacaaagtaactagatattcctattgaaataagaatagatatattggtgggccaggcatggtggctcacgccta

SEQ ID NO: 408041 - DNA, 120 bp, Artificial Sequence
  ENSG00000147852_45 (sequence is synthesized)
aaaaaaatagttatatgactaaactactagtcaatacagcttgcaataatagtgcatgaatgataacaggcctcggctttatcacccaaaaaataacttgaattctatgtgaaatgtgtt

SEQ ID NO: 408042 - DNA, 120 bp, Artificial Sequence
  ENSG00000147852_46 (sequence is synthesized)
aggataagtttgctctgtctctagagttcaatgtagaagataattaagaggtaaaatatgaagcttatcatacactaaaggagaatatttggagttagatgagcctgtcacacaaagtga

SEQ ID NO: 408043 - DNA, 120 bp, Artificial Sequence
  ENSG00000147852_47 (sequence is synthesized)
aagtggaccctccagaaattttaggaattgccacaaagattgatgatagatgaataaacagatttgtggcctctggtaaagaaatccagccaagttcctctgtccaaatttttaagtgcc

SEQ ID NO: 408044 - DNA, 120 bp, Artificial Sequence
  ENSG00000147852_48 (sequence is synthesized)
ctttgcaagctaatctatttggcaaaaaaatagtcccagttgttcaactagctcccttaaaacattctagtaggtgttttaaagcctaggtatcgctgcctctttagttcttgatgaata

SEQ ID NO: 408045 - DNA, 120 bp, Artificial Sequence
  ENSG00000147852_49 (sequence is synthesized)
aaaaaaaaaaaaaaaaaaaaaattgaggctttcactttggcatttgcttctgttccttgtatctgtggaagtcaagtagcccttctcaaaaatgagaagccaagctttaaatagcaaact

SEQ ID NO: 408046 - DNA, 120 bp, Artificial Sequence
  ENSG00000147852_50 (sequence is synthesized)
aaatagcaaactacagggtattaaaagactaactcttcagttaagaacactgtagaaatggtagaccaacttaaagtctaccttttaacaatctttaccccaaacctaaagattctaggg

SEQ ID NO: 408047 - DNA, 120 bp, Artificial Sequence
  ENSG00000147852_51 (sequence is synthesized)
gtcacttatctctattacgtaatctaactggaataatttcctagaattcttactagtgaaatcttacccaagtaaaacaatttattattttgaatccaaatgaaagctatactgtttgct

SEQ ID NO: 408048 - DNA, 120 bp, Artificial Sequence
  ENSG00000147852_52 (sequence is synthesized)
ttcaatggtggcaaaaacttgcaaaaagcagatatacttttgctaatttaagttgaagtactatgaatacaacctgctaatcttgatccccaaatctgagcccttcagtttcataattgt

SEQ ID NO: 408049 - DNA, 120 bp, Artificial Sequence
  ENSG00000147852_53 (sequence is synthesized)
tttatcctgaacgtagttgtgacatagacatttctcaaaagggtctgatacatcaaactcctaacaagtaggagcagcaactagctaaagagtagaaagaagcttcccttattgtgggtg

SEQ ID NO: 408050 - DNA, 120 bp, Artificial Sequence
  ENSG00000147852_54 (sequence is synthesized)
atgaggcggtgcctaaaaaccacatatatataatcccctgggtattacatattctgcaagccctgttagtggggagatggtagtggcaatagcagcgatagttgcgtcagtgctaactgc

SEQ ID NO: 408051 - DNA, 120 bp, Artificial Sequence
  ENSG00000147852_55 (sequence is synthesized)
tgctgctgcccgttctgttggcggctgctggccaagtgtgcacacttagccctggttgaggtgcattgtctgctgtcgtctgttaagcatctaaccggagtgggagggcacatcaagcga

SEQ ID NO: 408052 - DNA, 120 bp, Artificial Sequence
  ENSG00000147852_56 (sequence is synthesized)
tttcactctcttaaagaaaaggtttttaggtatttttggtattatatagtctctaaggccagaaggggcttataatgacttctcttctagaattgtaatactaaaaaactactcgagtaa

SEQ ID NO: 408053 - DNA, 120 bp, Artificial Sequence
  ENSG00000147852_57 (sequence is synthesized)
atatcctaacaagtatgatttttcttgggaaaactaaaaattgtacatccatgcttcagccatatcatgggcctaaactatgagagttcagaaatatataaaagtacaaaaatcttcaaa

SEQ ID NO: 408054 - DNA, 120 bp, Artificial Sequence
  ENSG00000147852_58 (sequence is synthesized)
ggtacttatttccaaatatggagggaatgaatctgaagagggaacaatggcgtttttcgaacttatttctctctaatccagcctggaggatttttagccgaaacagttgcatgtgaagga

SEQ ID NO: 408055 - DNA, 120 bp, Artificial Sequence
  ENSG00000147852_59 (sequence is synthesized)
ttatcagccatctttgcatatccctttcacatctaccttcacacaggaaagctgaatgcattttaccagtgaggctctagatatgaaacttagggatccatagataaataagctactaac

SEQ ID NO: 408056 - DNA, 120 bp, Artificial Sequence
  ENSG00000147852_60 (sequence is synthesized)
aaactgataacagtggtgttccatctctctatcatgtctcctgagtccgtttcacgtttttgagcctggctaatgagaaaaagaacaaagtaggaccatgacccagtgttctcctgtaaa

SEQ ID NO: 408057 - DNA, 120 bp, Artificial Sequence
  ENSG00000147852_61 (sequence is synthesized)
tctcactgtaaaaatctcaatgcaaaaacactgagacaggagtgagaccagctgcgggtggggagtttgtgctccgcaggttacctcatggcatatcaaaaatggcttttttcttcactg

SEQ ID NO: 408058 - DNA, 120 bp, Artificial Sequence
  ENSG00000147852_62 (sequence is synthesized)
cgctcaaggaaaaagtcagatgggtgacaaggtggttctgtttagaagcagcaggcaatgtagttaacagcatagacttccgtgtcttgtgtgtggtaccttgggcaagttactaactcc

SEQ ID NO: 408059 - DNA, 120 bp, Artificial Sequence
  ENSG00000147852_63 (sequence is synthesized)
ctctgtaaagtagagacgatggggactgtctcactgtgacaaggtaagatttaagtgagatgcacacaaaaagctcagcacagtgtctggcatctaatatgtgcagggcagatgtcacta

SEQ ID NO: 408060 - DNA, 120 bp, Artificial Sequence
  ENSG00000147852_64 (sequence is synthesized)
ctgaatatcacatcaatgctagggctgtatttactgtcacacacaggcaccggtaagtgactttaccggtgaaagtcacaggtacctttatctatgatgaatgtaatgtgttagatggtg

SEQ ID NO: 408061 - DNA, 120 bp, Artificial Sequence
  ENSG00000147852_65 (sequence is synthesized)
accgaagtgttctccactacacctgtctgaagagatctaagtctgatatttaaggagtgatagcatcttgcatacttaagaaggcttaaaagactgcatggtttaaaccctagaaacata

SEQ ID NO: 408062 - DNA, 120 bp, Artificial Sequence
  ENSG00000147852_66 (sequence is synthesized)
aatggaatgtttctgcctcagttcttttgactacctcctaggacatggaaacaaatatttgggagcctgcatagtctttagatggctgccaaagcacttaaaatctcctttaaattctta

SEQ ID NO: 408063 - DNA, 120 bp, Artificial Sequence
  ENSG00000147852_67 (sequence is synthesized)
ccatatgcttacttttgtactaagtaagtgctcccaagtcttttacttgctcttcacagcaaccctaataggtatctccattttacataggtaaaaactgaggctacaaacaatctatgg

SEQ ID NO: 408064 - DNA, 120 bp, Artificial Sequence
  ENSG00000147852_68 (sequence is synthesized)
ttccaaatcctatgtgcttactgccgtcttctcttagaaggggatgcagtactgtacaaagattgagctggatgtcgcattgcatgtttgctgagtcctcctcattgctgatgttaggat

SEQ ID NO: 408065 - DNA, 120 bp, Artificial Sequence
  ENSG00000147852_69 (sequence is synthesized)
ccttcaacagtttctcagatgccagctatggctggcatccagtatggtggtgtaatggaagtgtactactagcactactacatcaggtcagcacagattaactcagttacgtgttatacc

SEQ ID NO: 408066 - DNA, 120 bp, Artificial Sequence
  ENSG00000147852_70 (sequence is synthesized)
ttcaagacgctagacattccagaattattttccttggccatccaagtgaagtagaagtagattgttggattgcaaagaaaatgataaagattccctaaaggaatttataagcaggcaact

SEQ ID NO: 408067 - DNA, 120 bp, Artificial Sequence
  ENSG00000147852_71 (sequence is synthesized)
tcattcctatgtataagatattgggagaaaacaaactgtaccacaacaaatcttaagtttcaaggctctcctatagggagaaacatggccaaaaagacaggaagaactgtggcttgtaac

SEQ ID NO: 408068 - DNA, 120 bp, Artificial Sequence
  ENSG00000147852_72 (sequence is synthesized)
tcaatgatgctataactccagcactggatcttaagtattctggaatataccagattggtagaactaccagacttgggtatttctcagttaacacacatgcaaggaggaagagagtttttt

SEQ ID NO: 408069 - DNA, 120 bp, Artificial Sequence
  ENSG00000147852_73 (sequence is synthesized)
tgaacaaaatgactggctttgacaaaactatcttgctctttttaaatgtcacttgatactagaatgcgatttaaaagcatgtaatgcctcaggagtccggcatatacaaccaaattatca

SEQ ID NO: 408070 - DNA, 120 bp, Artificial Sequence
  ENSG00000147852_74 (sequence is synthesized)
tgctcaggatcttcagaattctaaaggcacatgttagaatgcagagtcctgatgacctgtcaataaacttttttttactaatgaactgtacatttaaataaaagtttatttttgggataa

SEQ ID NO: 408071 - DNA, 120 bp, Artificial Sequence
  ENSG00000147852_75 (sequence is synthesized)
ttatctccatggtgaattctggactagcagatgactctactgcttccgcctaaattctagcaggaattttcaatgggagtaactgaacaacacaagtaaaatggtggattaacaaattac

SEQ ID NO: 408072 - DNA, 120 bp, Artificial Sequence
  ENSG00000147853_0 (sequence is synthesized)
agtagccgcctgctagtggcgctgctagccggccggcgcaggctgccgagcgggtgagcgcgcaggccaggccaaagccctggtacccgcgcggtgcgggcctcagtctgcggccatggg

SEQ ID NO: 408073 - DNA, 120 bp, Artificial Sequence
  ENSG00000147853_1 (sequence is synthesized)
ggcgtccgcgcggctgctgcgagcggtgatcatgggggccccgggctcgggcaagggcaccgtgtcgtcgcgcatcactacacacttcgagctgaagcacctctccagcggggacctgct

SEQ ID NO: 408074 - DNA, 120 bp, Artificial Sequence
  ENSG00000147853_2 (sequence is synthesized)
ccgggacaacatgctgcggggcacagaaattggcgtgttagccaaggctttcattgaccaagggaaactcatcccagatgatgtcatgactcggctggcccttcatgagctgaaaaatct

SEQ ID NO: 408075 - DNA, 120 bp, Artificial Sequence
  ENSG00000147853_3 (sequence is synthesized)
cacccagtatagctggctgttggatggttttccaaggacacttccacaggcagaagccctagatagagcttatcagatcgacacagtgattaacctgaatgtgccctttgaggtcattaa

SEQ ID NO: 408076 - DNA, 120 bp, Artificial Sequence
  ENSG00000147853_4 (sequence is synthesized)
acaacgccttactgctcgctggattcatcccgccagtggccgagtctataacattgaattcaaccctcccaaaactgtgggcattgatgacctgactggggagcctctcattcagcgtga

SEQ ID NO: 408077 - DNA, 120 bp, Artificial Sequence
  ENSG00000147853_5 (sequence is synthesized)
ggatgataaaccagagacggttatcaagagactaaaggcttatgaagaccaaacaaagccagtcctggaatattaccagaaaaaaggggtgctggaaacattctccggaacagaaaccaa

SEQ ID NO: 408078 - DNA, 120 bp, Artificial Sequence
  ENSG00000147853_6 (sequence is synthesized)
caagatttggccctatgtatatgctttcctacaaactaaagttccacaaagaagccagaaagcttcagttactccatgaggagaaatgtgtgtaactattaatagtaagatgggcaaacc

SEQ ID NO: 408079 - DNA, 120 bp, Artificial Sequence
  ENSG00000147853_7 (sequence is synthesized)
tcctagtccttgcatttagaagctgcttttcctaagacttctagtatgtatgaattctttgaaaattatattacttttatttctactgattttattttggatactaaggatgtgccaaat

SEQ ID NO: 408080 - DNA, 120 bp, Artificial Sequence
  ENSG00000147853_8 (sequence is synthesized)
gattcggatactaagatgcatcgtttgaaatcatctagtgtgttgtatgcagttatcctcaaaaacatcagcgatgtctgaacctttaaaacatctgttagagcaaaattaaaagagcat

SEQ ID NO: 408081 - DNA, 120 bp, Artificial Sequence
  ENSG00000147853_9 (sequence is synthesized)
ttggtagtaatctaactttttgttcagttaataagtggttgataaagtttccatatttttctggaaaagttaaaaaaagttacatgtcatttggagaaaatacgtaatcagaaatttgtg

SEQ ID NO: 408082 - DNA, 120 bp, Artificial Sequence
  ENSG00000147853_10 (sequence is synthesized)
catagattgatgccaaaaaagacatttccagcattgtggaacatggtgagacactatataaaattccagaaagaaagcaactggatttacagatttattgtgagacacaaattcactgct

SEQ ID NO: 408083 - DNA, 120 bp, Artificial Sequence
  ENSG00000147853_11 (sequence is synthesized)
gcctttacactaagaaatgtatatgttaaccatatatgctgtatttattttgtcgttaagcatactttcagtttactcagaattttcaatttgctataaagatgtatcaattagcatata

SEQ ID NO: 408084 - DNA, 120 bp, Artificial Sequence
  ENSG00000147853_12 (sequence is synthesized)
gaaaaatattactttaagatgacttgtttcctttgaaaatacctgtgtactgagggttatgatttgtgtcaaaaattgacataagtgcttttacaagcaccaaagttgaatgaattttca

SEQ ID NO: 408085 - DNA, 120 bp, Artificial Sequence
  ENSG00000147853_13 (sequence is synthesized)
acaaaatgtaattaaagtctatgttttcagttatgactcaggttaagaaatgtgttttaggatctacttgctggtttttctttttgatccaaatgtgtgatctgccctgataaataacaa

SEQ ID NO: 408086 - DNA, 120 bp, Artificial Sequence
  ENSG00000147853_14 (sequence is synthesized)
gttatagtaccatctcccccgccaataaaaaagagaagaaaaaagagaaacccgtggcactatgtaaataaagtaagcatactttgttgttagtaaatagatgaggcatgcctgggaaat

SEQ ID NO: 408087 - DNA, 120 bp, Artificial Sequence
  ENSG00000147853_15 (sequence is synthesized)
gctcccttggcataaatagcaatcaatcataattagtaaacaggtgtaccaataaaaagaatttacatgataggttaacaaggaccaggaaagtgagtttcctgaaggagttctttgttc

SEQ ID NO: 408088 - DNA, 120 bp, Artificial Sequence
  ENSG00000147853_16 (sequence is synthesized)
ctgatcaaagaaattgatacctgttagcattcactgccaccatattttaaggagaaagaactctattggtgtcgtctgagcagccatttaaaaattggaatctaaaggatggttgctgat

SEQ ID NO: 408089 - DNA, 120 bp, Artificial Sequence
  ENSG00000147853_17 (sequence is synthesized)
aagtggggaaatatgagagatggaggaaaaacttgattatgtcttccatggcatatttactcttactttacttcgtgccaaatcaaatgaaacaagccgtcttacaagtcgttattgcct

SEQ ID NO: 408090 - DNA, 120 bp, Artificial Sequence
  ENSG00000147853_18 (sequence is synthesized)
ttaaaaatctgttccgtttttttcccaggtacttaaaatacaagtgccagtaagtggttcttatgtgttttggggggaaaattttatttcccttttcttctgatatttaaaaaattcatc

SEQ ID NO: 408091 - DNA, 120 bp, Artificial Sequence
  ENSG00000147853_19 (sequence is synthesized)
gatctttcaagatgaaccaaggttttttaaaagaaatataggaaacacttcattctttataaaactttctataatgccttatttgaatgttaatcttatgtgctttctaaaaaatgttgt

SEQ ID NO: 408092 - DNA, 120 bp, Artificial Sequence
  ENSG00000147853_20 (sequence is synthesized)
gaaataccaaacttatggattatcactaggttatcaagcatatattagtctttatcagaataaaatgaaatttcataactgtggctattactttgttcttggtccttcacagggcctgct

SEQ ID NO: 408093 - DNA, 120 bp, Artificial Sequence
  ENSG00000147853_21 (sequence is synthesized)
ccatcccaccttcctttctgctgcctgatgtctcaatggcttctgaatgactgttctaataaatgatcttaaaacagtccataggctggtttcagtttatgcaatacttcatctcctgct

SEQ ID NO: 408094 - DNA, 120 bp, Artificial Sequence
  ENSG00000147853_22 (sequence is synthesized)
atggtagccataccggccttcataatacccttaggggatttggaaatcaaagtgagcagtggaagaacatggctatgagaattaagactcttatttcctgtgaccattccctccccaccc

SEQ ID NO: 408095 - DNA, 120 bp, Artificial Sequence
  ENSG00000147853_23 (sequence is synthesized)
gcaaacacttagcccaaagttttgcacatacattcattactttaggaatgaatatgactgtaatacaacttttttctttatttttttttagacagggcctcactctgttgcccagactag

SEQ ID NO: 408096 - DNA, 90 bp, Artificial Sequence
  ENSG00000147853_24 (sequence is synthesized)
tttttttttagacagggcctcactctgttgcccagactagagtgcagtggcataattgggtcactgtaacgttgaactcctgggctcacg

SEQ ID NO: 408097 - DNA, 120 bp, Artificial Sequence
  ENSG00000147853_25 (sequence is synthesized)
tggctaattttatttttttgtagagacggcgtctcgatatgttgcccaggctagtctcctggcctcaaacagtcttcctgattcagcttcccaagtgctgagattacaggtgtaagccac

SEQ ID NO: 408098 - DNA, 120 bp, Artificial Sequence
  ENSG00000147853_26 (sequence is synthesized)
aaaaaataattctgtaatgaccatcattaagatttatgtaccacatggaaatacatgtatggagctgaatgccatggctaggagaaactactatacttttgttaaaagccaatgagaggc

SEQ ID NO: 408099 - DNA, 120 bp, Artificial Sequence
  ENSG00000147853_27 (sequence is synthesized)
agagggagactccgtctcaaaaaaaaaagccagggagaacagcacctcaactgatttattttatagagtaaaagttattttgctataccttttgtaagcagcgtgtactgtgggaaatgc

SEQ ID NO: 408100 - DNA, 120 bp, Artificial Sequence
  ENSG00000147853_28 (sequence is synthesized)
cttttgtaagcagcgtgtactgtgggaaatgcaaactagcagttgttagcaccatccagaaatttctgtcagttccatttcaaatagtttaaatactggctcaaatctctaaaccccacc

SEQ ID NO: 408101 - DNA, 120 bp, Artificial Sequence
  ENSG00000147853_29 (sequence is synthesized)
ctatggctacttttcccccagctatatataatggcattctagcaagatattttggatcctcataacttgtgacaaaactgccctatactaacaacaaatcattgtaattatagatctcaa

SEQ ID NO: 408102 - DNA, 120 bp, Artificial Sequence
  ENSG00000147853_30 (sequence is synthesized)
attatgttaaattgctatagttgcaaccaacagcaagaatttgtattttagaatatgttgtgtcttctcattgaccaaaaaataaaaataaaaataaaaataaatcctcaggccctgata

SEQ ID NO: 408103 - DNA, 120 bp, Artificial Sequence
  ENSG00000147853_31 (sequence is synthesized)
aactgtagaaatagcttttctatctttgcagttaaagattttcatcttggaagttatggttaaaaaatttttaaacagttaaaatagtgtagctgtgcttaaagcttctggtaaaagcca

SEQ ID NO: 408104 - DNA, 120 bp, Artificial Sequence
  ENSG00000147853_32 (sequence is synthesized)
gtatgctttgtagagcccttatccccctcctgctttttatttgtttttagctcactaaataatataaacactgatttttccatatatagcactgaataaactgtcatgcctaagtgtaaa

SEQ ID NO: 408105 - DNA, 120 bp, Artificial Sequence
  ENSG00000147854_0 (sequence is synthesized)
ataagtaaacactctgcgcggcgcagacatggcctcttcctatctttgaggcggtgtctgcggcagcgcctcagagtggttccggtcgtctctcctcaagtcggctagtcgggcgcgcgc

SEQ ID NO: 408106 - DNA, 120 bp, Artificial Sequence
  ENSG00000147854_1 (sequence is synthesized)
caagtcggctagtcgggcgcgcgcgctgagagtcgtcgccgcctgtcgggcccggcgtccggtcggtccggtgggcgcgctcgcccgcctgccgctgagggcccgagccgcagggaaagc

SEQ ID NO: 408107 - DNA, 120 bp, Artificial Sequence
  ENSG00000147854_2 (sequence is synthesized)
gcccagagctcagggggagacaaaggggaccggttcctctctaggcgccaagatgtggatacaggttcgcaccattgatggctccaagacgtgcaccattgaggacgtgtctcgcaaagc

SEQ ID NO: 408108 - DNA, 120 bp, Artificial Sequence
  ENSG00000147854_3 (sequence is synthesized)
cacgattgaggagctgcgcgagcgggtgtgggcgctgttcgacgtgcggcccgaatgccagcgcctcttctaccggggcaagcagttggaaaatggatataccttatttgattatgatgt

SEQ ID NO: 408109 - DNA, 120 bp, Artificial Sequence
  ENSG00000147854_4 (sequence is synthesized)
tggactgaatgatataattcagctgctagttcgcccagaccctgatcatcttcctggcacatctacacagattgaggctaaaccctgttctaatagtccacctaaagtaaagaaagctcc

SEQ ID NO: 408110 - DNA, 120 bp, Artificial Sequence
  ENSG00000147854_5 (sequence is synthesized)
gagggtaggaccttccaatcagccatctacatcagctcgtgcccgtcttattgatcctggctttggaatatataaggtaaatgaattggtggatgccagagatgtcggccttggtgcttg

SEQ ID NO: 408111 - DNA, 120 bp, Artificial Sequence
  ENSG00000147854_6 (sequence is synthesized)
gtttgaagcacacatacatagtgttactagagcttctgatggacagtcacgtggcaaaactccactgaagaatggcagttcttgtaaaaggactaatggaaatataaagcataaatccaa

SEQ ID NO: 408112 - DNA, 120 bp, Artificial Sequence
  ENSG00000147854_7 (sequence is synthesized)
agagaacacaaataaattggacagtgtaccctctacgtctaattcagactgtgttgctgctgatgaagacgttatttaccatatccagtatgatgaatacccagaaagcggtactctaga

SEQ ID NO: 408113 - DNA, 120 bp, Artificial Sequence
  ENSG00000147854_8 (sequence is synthesized)
aatgaatgtcaaggatcttagaccacgagctagaaccattttgaaatggaatgaactaaatgttggtgatgtggtaatggttaattataatgtagaaagtcctggacaaagaggattctg

SEQ ID NO: 408114 - DNA, 120 bp, Artificial Sequence
  ENSG00000147854_9 (sequence is synthesized)
gtttgatgcagaaattaccacattgaagacaatctcaaggaccaaaaaagaacttcgtgtgaaaattttcctggggggttctgaaggaacattaaatgactgcaagataatatctgtaga

SEQ ID NO: 408115 - DNA, 120 bp, Artificial Sequence
  ENSG00000147854_10 (sequence is synthesized)
tgaaatcttcaagattgagagacctggagcccatcccctttcatttgcagatggaaagtttttaaggcgaaatgaccctgaatgtgacctgtgtggtggagacccagaaaagaaatgtca

SEQ ID NO: 408116 - DNA, 120 bp, Artificial Sequence
  ENSG00000147854_11 (sequence is synthesized)
ttcttgctcctgtcgtgtatgtggtgggaaacatgaacccaacatgcagcttctgtgtgatgaatgtaatgtggcttatcatatttactgtctgaatccacctttggataaagtcccaga

SEQ ID NO: 408117 - DNA, 120 bp, Artificial Sequence
  ENSG00000147854_12 (sequence is synthesized)
agaggaatactggtattgtccttcttgtaaaactgattccagtgaagttgtaaaggctggtgaaagactcaagatgagtaaaaagaaagcaaagatgccgtcagctagtactgaaagccg

SEQ ID NO: 408118 - DNA, 120 bp, Artificial Sequence
  ENSG00000147854_13 (sequence is synthesized)
aagagactggggcaggggaatggcttgtgttggtcgtacgagagaatgtactattgtcccttctaatcattatggacccattcctggtattcctgttggatcaacttggagatttagagt

SEQ ID NO: 408119 - DNA, 120 bp, Artificial Sequence
  ENSG00000147854_14 (sequence is synthesized)
tgcggatgaagtcgaccgaggtgatgagttcacatacactggaagcggtggtaaaaatcttgctggtaacaaaagaattggtgcaccttcagctgatcaaacattaacaaacatgaacag

SEQ ID NO: 408120 - DNA, 120 bp, Artificial Sequence
  ENSG00000147854_15 (sequence is synthesized)
ggcattggccctaaactgtgatgctccattggatgataaaattggagcagagtctcggaattggagagctggtaagccagtcagagtgatacgcagttttaaagggaggaagatcagcaa

SEQ ID NO: 408121 - DNA, 120 bp, Artificial Sequence
  ENSG00000147854_16 (sequence is synthesized)
atatgctcctgaagaaggcaacagatatgatggcatttataaggtggtgaaatactggccagagatttcatcaagccatggattcttggtttggcgctatcttttaagaagagatgatgt

SEQ ID NO: 408122 - DNA, 120 bp, Artificial Sequence
  ENSG00000147854_17 (sequence is synthesized)
tgaacctgctccttggacctctgaaggaatagaacggtcaaggagattatgtctacgtttacagtatccagcaggttacccttcagataaagaagggaagaagcctaaaggacagtcaaa

SEQ ID NO: 408123 - DNA, 120 bp, Artificial Sequence
  ENSG00000147854_18 (sequence is synthesized)
gaagcagcccagtggaaccacaaaaaggccaatttcagatgatgactgtccaagtgcctccaaagtgtacaaagcatcagattcagcagaagcaattgaggcttttcaactaactcctca

SEQ ID NO: 408124 - DNA, 120 bp, Artificial Sequence
  ENSG00000147854_19 (sequence is synthesized)
acagcaacatctcatcagagaagattgtcaaaaccagaagctgtgggatgaagtgctttcacatcttgtggaaggaccaaattttctgaaaaaattggaacaatcttttatgtgcgtttg

SEQ ID NO: 408125 - DNA, 120 bp, Artificial Sequence
  ENSG00000147854_20 (sequence is synthesized)
ctgtcaggagctagtttaccagcctgtgacaactgagtgcttccacaatgtctgtaaagattgcctacagcgctcctttaaggcacaggttttctcctgccctgcttgccggcatgatct

SEQ ID NO: 408126 - DNA, 120 bp, Artificial Sequence
  ENSG00000147854_21 (sequence is synthesized)
tggccagaattacatcatgattcccaatgagattctgcagactctacttgaccttttcttccctggctacagcaaaggacgatgatctgcctgctttcactgtgttgttcatggtggctt

SEQ ID NO: 408127 - DNA, 120 bp, Artificial Sequence
  ENSG00000147854_22 (sequence is synthesized)
tttggacaataaagaatctaaaatgggtggggagggtggaagaaatggtggactgtatctctcacgttctgaagcagctaatcctctttcccacatagccatcatcttgtgtgtgtagta

SEQ ID NO: 408128 - DNA, 120 bp, Artificial Sequence
  ENSG00000147854_23 (sequence is synthesized)
agaggcccatttctcaactgtcttttaaatatctaaaggtagttcctgtaacaactagttttaatgagtaaaaagtcaaagcctcagctctagttgatatccaagttatgatttattttg

SEQ ID NO: 408129 - DNA, 120 bp, Artificial Sequence
  ENSG00000147854_24 (sequence is synthesized)
caactacctcaggacagaaaagatttatggggattttaaaaatcattgaataactagttaaatgaaattttagctacacactgcctcccaaatattagttgtgcctggttcttgtaattt

SEQ ID NO: 408130 - DNA, 120 bp, Artificial Sequence
  ENSG00000147854_25 (sequence is synthesized)
gattttacagaaaaggaaatgacacttgagatccttggaatgaacacagcttctaaagtgtgcatatacttttttaacgtctcttcttccattacaatgtgtgttttgcaaggacaggtt

SEQ ID NO: 408131 - DNA, 120 bp, Artificial Sequence
  ENSG00000147854_26 (sequence is synthesized)
cattttttttagcccactttgtgaactccattgtgcttttttctggtgttttatgcaagttgactactaatgactaatgagaacaataatgaatgcattgttgctgcattagtgtaatgt

SEQ ID NO: 408132 - DNA, 120 bp, Artificial Sequence
  ENSG00000147854_27 (sequence is synthesized)
ggtgtggttttgcacttaaaagaggtattcatatgctctagttgtaaatgttcatgaaaatccacttctctactagtcgaactgcttttagtgtctcaccagtggttttacatctgcaga

SEQ ID NO: 408133 - DNA, 120 bp, Artificial Sequence
  ENSG00000147854_28 (sequence is synthesized)
gttttgagggctgtgctgacctttgagaggatttgaaattgcttcatattgtgatcctaaattttatattcactatattccctaaagtataccttaataaatattttatgatcagaaaaa

SEQ ID NO: 408134 - DNA, 120 bp, Artificial Sequence
  ENSG00000147854_29 (sequence is synthesized)
ctgaaacatttttattgctaaataatagatggatatattttgggatacatgtgaaattttgatatgttcatataacatataataaatcagggtaattggaatgttcatcactataaacat

SEQ ID NO: 408135 - DNA, 120 bp, Artificial Sequence
  ENSG00000147854_30 (sequence is synthesized)
gccttctatttcaagattattttaaatagtctttctgaagaaatcctttagaggttatgttcatttgttactttttggttttggtggttgtactctaatttaaaggtccttttagctctc

SEQ ID NO: 408136 - DNA, 120 bp, Artificial Sequence
  ENSG00000147854_31 (sequence is synthesized)
tcttgtactggctggtggatttgcggatgaagtcttgacagagttatgaatatgaatattgtggagtctgtccagataccgggtggaagactggttttgatcagtttaagaagtattcta

SEQ ID NO: 408137 - DNA, 120 bp, Artificial Sequence
  ENSG00000147854_32 (sequence is synthesized)
aacattaacaaacatgaacagctcttcaaactttaagaaactgaagagggcagcaaagtaacctggccatcttttatcagggcagtcagaggcacctgactggctgagtggcagatagat

SEQ ID NO: 408138 - DNA, 120 bp, Artificial Sequence
  ENSG00000147854_33 (sequence is synthesized)
taatggaggagctttgttgctgtattgcctagtttcatcctcttggactcttttcatatacttgaatagcctaattatctgaagccagaagtgagttgacagtgccagttagtggtggca

SEQ ID NO: 408139 - DNA, 120 bp, Artificial Sequence
  ENSG00000147854_34 (sequence is synthesized)
gtaattatgactgaaggtatctgtgagcattaaagcattccattcagtgacatgaatgaaacttaccctagctctttaagataaaataggtgtaatatctcaataggtattctgtaagac

SEQ ID NO: 408140 - DNA, 120 bp, Artificial Sequence
  ENSG00000147854_35 (sequence is synthesized)
gtaatagtagccctagagttgatggctgtgtttttttctacctctcagaattttaatgcatcttccttttagattaaaaaaaaaaggtaacttgggaagcttcaactctttgaccacagc

SEQ ID NO: 408141 - DNA, 120 bp, Artificial Sequence
  ENSG00000147854_36 (sequence is synthesized)
cagctatataagttattttttaaaacaaaatactttcaagtttatttactcactaaaaatataattatggtcaagacatttcttttcaataggttagtcattttcttgacgtctattttt

SEQ ID NO: 408142 - DNA, 120 bp, Artificial Sequence
  ENSG00000147854_37 (sequence is synthesized)
acttgagcctgcataaaaagaattaaaccctgaagaagtattttatgtcatatctgctttcaccagattgggtatagttctgttttttgtttgttttttaaaccttaagtgttctcagtg

SEQ ID NO: 408143 - DNA, 120 bp, Artificial Sequence
  ENSG00000147854_38 (sequence is synthesized)
ttttcttttcacttaagacgtaggtgtcctagaggaaaatgctaattttaaactgattctaaaattgttattttaaaatagtaaaaataacttaaatacagattttggtacaactaggtt

SEQ ID NO: 408144 - DNA, 120 bp, Artificial Sequence
  ENSG00000147854_39 (sequence is synthesized)
ctcccaagagtaaggtcttctaacatctaataagctcattgatttactactattaggtgaatgcatatactaaataagttccagctaagtcaggtactacttccaattcagtgttcttct

SEQ ID NO: 408145 - DNA, 120 bp, Artificial Sequence
  ENSG00000147854_40 (sequence is synthesized)
ttgaccatgcattaatgcattatcagtaaaatgtagtgatctcaagcagccagaagtcttcattgtcattagcacaggcatttggatgcttcaggcttattgaaatttatctttttatgg

SEQ ID NO: 408146 - DNA, 120 bp, Artificial Sequence
  ENSG00000147854_41 (sequence is synthesized)
agacctttaaagaacattctcatacaccacttattcttaatatcttttaaactttaaggattctctattgtctggaatgtggaaagtagacctgggaaggtcatttgtaccttgctgaca

SEQ ID NO: 408147 - DNA, 120 bp, Artificial Sequence
  ENSG00000147854_42 (sequence is synthesized)
aatttatatttctggatttctttctacattattccagcaattcaccttacacccttaccaaagatcactattgaaaaaatcatttgctttagttttccaacgttctcccttcccccaaca

SEQ ID NO: 408148 - DNA, 120 bp, Artificial Sequence
  ENSG00000147854_43 (sequence is synthesized)
aacgttatttaaagaaaaattccatgtatttctagttgttttctattatacgtggcacagatgttattactttcagaagaaccctacaggctatctgagaaccaatcccctggcttgggg

SEQ ID NO: 408149 - DNA, 120 bp, Artificial Sequence
  ENSG00000147854_44 (sequence is synthesized)
tgagcgttcgcctggcttccgcggctcttccgcgtcttcggctctcaaacaggggaaactcgggcattgagctctcaagaataagaaccctaactctgcttcctgactgtgttggaaaat

SEQ ID NO: 408150 - DNA, 120 bp, Artificial Sequence
  ENSG00000147854_45 (sequence is synthesized)
tttggaatatataagggtctggctctgtcacccaggctgtagtgcagtgacgtgaacacggctcgctgtagccttgacctgctggggtcaagtgatcttcctgctcggcctcccaaagtg

SEQ ID NO: 408151 - DNA, 120 bp, Artificial Sequence
  ENSG00000147854_46 (sequence is synthesized)
ctgggatacaggcgtgagccaccatgcccggctaacttagatctttgatatcttgattagttctttctttacatatttaatattttgctttatttctggtagctttgtttttgatgcaat

SEQ ID NO: 408152 - DNA, 120 bp, Artificial Sequence
  ENSG00000147854_47 (sequence is synthesized)
tattatatatggttatcttctaaaatagtaatctgtttgctgatatagagaaatgaaattgatttatttggcttttgtaaccagcaaccttttcaaatctaataaattgtgtagaaataa

SEQ ID NO: 408153 - DNA, 120 bp, Artificial Sequence
  ENSG00000147854_48 (sequence is synthesized)
tgaataaaagtttcattataggactgtaaattgtaacttacgttgcagaggagaatttcaaactgggagttaaagatctgaaattaaaattccagtgcctgattatgtaattgtttttca

SEQ ID NO: 408154 - DNA, 120 bp, Artificial Sequence
  ENSG00000147854_49 (sequence is synthesized)
gcatcctaacatatctttatactgttattttttaaatgccataatttctagtcttactgaatacatgtgatatgcatttgaaaatgttaacaactttgaaggaaaggagcctgtgtaatt

SEQ ID NO: 408155 - DNA, 120 bp, Artificial Sequence
  ENSG00000147854_50 (sequence is synthesized)
taagtgaaattgagaataaggtggcttgtctactactccattggtcaaagctaaaagtgacaaactcctttttagagtaaactcagtaatttgaaataaagttatgtttgggagccacat

SEQ ID NO: 408156 - DNA, 120 bp, Artificial Sequence
  ENSG00000147854_51 (sequence is synthesized)
agttacaaaagtgatcttttctaactaaatccccttaagacattacaaaagagccaccgtgtgctgatctttattctatagaaatactaatgacatctcagctcccgtgggtacagaaaa

SEQ ID NO: 408157 - DNA, 120 bp, Artificial Sequence
  ENSG00000147854_52 (sequence is synthesized)
tttattaatttcaaaatgttttattttataaatgcatgctaataccaatattaataagtaacccagaccaccagatagcaaaaatcacattatagtttgtcctgctgaaatttttgtgaa

SEQ ID NO: 408158 - DNA, 120 bp, Artificial Sequence
  ENSG00000147854_53 (sequence is synthesized)
catttcataaagttaacagtttttatatcctgttactaagggtattttgtcgattgagtaaaagtgagtgtttttcactttgagtctaaatcactcagttttaagtagtgtccccttaat

SEQ ID NO: 408159 - DNA, 120 bp, Artificial Sequence
  ENSG00000147854_54 (sequence is synthesized)
ttctgattactgtgtgatgtaaagaatataccagtatgatttcaagactttcatgcgtatcaatttacatagaatctctgtttttatgtgttctatattgtttctgatagtaggattatt

SEQ ID NO: 408160 - DNA, 120 bp, Artificial Sequence
  ENSG00000147854_55 (sequence is synthesized)
tttactgaaccagcagaggagacaggtcagatttgctggtgaaaacattcttgagacaggagcttagctattcttttctagcaagaaagcagtccttcaagaagagtgtcttaaaataaa

SEQ ID NO: 408161 - DNA, 120 bp, Artificial Sequence
  ENSG00000147854_56 (sequence is synthesized)
tattttgatgtgtttttgtcaatgaaaatgtatctcaaatttgcaaaaggactctttcaagttgtcaaatctgaaaattatttttccctttaataatcgataattttgcttgaaaggaac

SEQ ID NO: 408162 - DNA, 120 bp, Artificial Sequence
  ENSG00000147854_57 (sequence is synthesized)
ttccttcataactacccaccattgtaatgtacatgttaagattcctttcacacttttggacaatctgataagtaccgctacaatctcattagaaaataattgacaagcagtaaacatgtt

SEQ ID NO: 408163 - DNA, 120 bp, Artificial Sequence
  ENSG00000147854_58 (sequence is synthesized)
ttctataaagaggagatagtgaaaatgaaatatcaactgaaaacaatttaggattgaattatcagagagactttaacatctggtcagtttatacgttaagttgtgaatacgccttgtgat

SEQ ID NO: 408164 - DNA, 120 bp, Artificial Sequence
  ENSG00000147854_59 (sequence is synthesized)
tgtaaaagtgcttgggcaaaggtacctgtatgtcttacaaacatgaaaactgaggtgaaaggcactttgctctgacccatagtatactctttgcccagtagtgtatggttgaattcattt

SEQ ID NO: 408165 - DNA, 120 bp, Artificial Sequence
  ENSG00000147854_60 (sequence is synthesized)
caagggttgtgcttgggaaaagttggacctgttaattaaaagtaaaatatttccaaatcaatttggaaatgacttgaagtgtgagggaaagggattcataaaatttaggtataggaggcc

SEQ ID NO: 408166 - DNA, 120 bp, Artificial Sequence
  ENSG00000147854_61 (sequence is synthesized)
ctggaaaaggacatttatcctagagggcacagggggtgtctctctggtaggggaagggtggggaggtggctttataagagtggtctgccttctccctttctcacttttcctcaccccttt

SEQ ID NO: 408167 - DNA, 120 bp, Artificial Sequence
  ENSG00000147854_62 (sequence is synthesized)
tctctcttcccccgcaaagctgcttccctgccctgccaccacctttagtgctttgtcttttttcccctttgcccatgctcagctgttaacccataaagacttcgttgattttgtgtgcat

SEQ ID NO: 408168 - DNA, 120 bp, Artificial Sequence
  ENSG00000147854_63 (sequence is synthesized)
agtggatggtatggctgcattaatcccttcactgcctgtataccctagaatttgtccctgacactgacttcagagcatggtttgagttcatctcccatcattccccattgttgtgcttcc

SEQ ID NO: 408169 - DNA, 120 bp, Artificial Sequence
  ENSG00000147854_64 (sequence is synthesized)
cgtaaaaactgccagctttatcatttcccctggctctgcccacactgcatgtgtaggggctgaactatgggcaagtgtctgaccacccaggcaggtgagtgtgtgtcttctaatgcaagt

SEQ ID NO: 408170 - DNA, 120 bp, Artificial Sequence
  ENSG00000147854_65 (sequence is synthesized)
ctgtttctgtttttgttgtctttttaaactcatagaattgattgttgaaaataaggccatcaactgctaaaacaactactaaaataattctttttaatataaaaataactttgtcaaatt

SEQ ID NO: 408171 - DNA, 120 bp, Artificial Sequence
  ENSG00000147854_66 (sequence is synthesized)
cactttcagaagatttttcagatgtccctgttgagagcattgttctagataggttatatttgaaactgtgagcagaagcatgtgagcccatctgctatgatgagtaatagtcattgaggc

SEQ ID NO: 408172 - DNA, 120 bp, Artificial Sequence
  ENSG00000147854_67 (sequence is synthesized)
ctgaaacatacagtgctttaagcatgactgttattacaaagcatgcttctcccaccccacccaccccctcaaagaaggtagccattgaaacataaggatgatagatagaatgtattactt

SEQ ID NO: 408173 - DNA, 120 bp, Artificial Sequence
  ENSG00000147854_68 (sequence is synthesized)
caaatctaactcttagctggtggaggatttagtaatttagttgctttaggtcttgtaaaagctcctgccgctaactttaggagatgagaagtttgacccttaatgttcttgatatttttt

SEQ ID NO: 408174 - DNA, 120 bp, Artificial Sequence
  ENSG00000147854_69 (sequence is synthesized)
tagatcaactccacaatttactgtgatccaatccatctgctttctatctgttgtgctctatgattggttctcatttaccttcatttctgtattctactttccttaaactttaaggaaatc

SEQ ID NO: 408175 - DNA, 120 bp, Artificial Sequence
  ENSG00000147854_70 (sequence is synthesized)
taatcacaactcctgaagacttacctttcttagatctgaaacttaagatcagtgtattataaaatggaatctcttagcagtcacagctacataaattgggattttaatagttgtctgtgc

SEQ ID NO: 408176 - DNA, 120 bp, Artificial Sequence
  ENSG00000147854_71 (sequence is synthesized)
ctaaaccccccttctctgtgaagcttaaatctgcattgtactctccctcctccccccccatcagtatccagcaggttacccttcagataaagaagggaagaagcctaaaggacagtcaaa

SEQ ID NO: 408177 - DNA, 120 bp, Artificial Sequence
  ENSG00000147854_72 (sequence is synthesized)
cgcgaggcgcggggtgcggggcccagtcccgccgaatggtggggagtgggtccctgccagccccaactggaggtgcgccgcgcggggtcagaagtgagggcgtccggagcgcaaatatct

SEQ ID NO: 408178 - DNA, 120 bp, Artificial Sequence
  ENSG00000147854_73 (sequence is synthesized)
acccattcctggtattcctgttggatcaacttggagatttagagttcagagtctgggtttcaccatattgcccagactgatcttgaatccctggggtcaatttctcctgccttagtttcc

SEQ ID NO: 408179 - DNA, 120 bp, Artificial Sequence
  ENSG00000147854_74 (sequence is synthesized)
cttaatattggattaacaaaaggtgaaagtaaatttaagggttttggaccaataacactttaagaccatgagatgtttatttgtggcttttaatccaagggaaaaacaaagtataaataa

SEQ ID NO: 408180 - DNA, 120 bp, Artificial Sequence
  ENSG00000147854_75 (sequence is synthesized)
ttgacttctataatacgaatttagtagacacaaaacatcattgtctaagttgtctaaactaattaaaatgatcttgcattaaagaatcactattttgctagtgttagtaggattaattgt

SEQ ID NO: 408181 - DNA, 120 bp, Artificial Sequence
  ENSG00000147854_76 (sequence is synthesized)
gcactgatagttacttttcttaatttgtttcaagtactgaatcagatagagacaataatatccatataaatttgtagctgctatagaagtaattggagagcttttggctttttttttttt

SEQ ID NO: 408182 - DNA, 120 bp, Artificial Sequence
  ENSG00000147854_77 (sequence is synthesized)
ctgttctaatagtccacctaaagtaaagaaagctccgagggtaggaccttccaatcagccatctacatcagctcgtgcccgtcttattgatcctggctttggaatatataagatacccag

SEQ ID NO: 408183 - DNA, 120 bp, Artificial Sequence
  ENSG00000147862_0 (sequence is synthesized)
aagcaagagagggagggaaaaaaaagagcctagagcagaaaagagaggagtttggagccgagcgggagagcgggatttatcgtttggaatttttcaggagatcgttttgatacccctggg

SEQ ID NO: 408184 - DNA, 120 bp, Artificial Sequence
  ENSG00000147862_1 (sequence is synthesized)
ggagatcgttttgatacccctgggctctgggcagcggcggcaacagcagcctccacgctcggccgggtcagacgcggggcgaggcgggcgggcgggcggccgggcgccgaagacccggcg

SEQ ID NO: 408185 - DNA, 120 bp, Artificial Sequence
  ENSG00000147862_2 (sequence is synthesized)
ctgctgccggggaccacgcgccgcgagcctcttccgccccagagatcagcgctcgcgccccctccctcaccccggcctctcccttctcccccatcccaccccgcccccaccccggccctc

SEQ ID NO: 408186 - DNA, 120 bp, Artificial Sequence
  ENSG00000147862_3 (sequence is synthesized)
gcgccccgccacccgcgcgcactcgctcacgctgcccctcgcgcacacacatggtcggctcgcggcaaagtttcgcctgcgatcaccactccgggatcctgccgcagtgcttggggctgt

SEQ ID NO: 408187 - DNA, 120 bp, Artificial Sequence
  ENSG00000147862_4 (sequence is synthesized)
aaccttgaactttcccagcgcggtgacacattctccccgctctccctcccgcccgcccgctcgccctcctgcgccctcccgcgcccccctccccgccttttttgaaaaagcattttacca

SEQ ID NO: 408188 - DNA, 120 bp, Artificial Sequence
  ENSG00000147862_5 (sequence is synthesized)
ccaaccaccaccccaatccaacccacaccgaaccttcgcgcaccccctacaccccaacaacaacaacaactgcaaaatagaaaacaaatccccaaacccaggcgaaaagcagccaacacc

SEQ ID NO: 408189 - DNA, 120 bp, Artificial Sequence
  ENSG00000147862_6 (sequence is synthesized)
ggcggcggcggcggcctcggcaagcacggccagcgcgctcggactgcaagagggttaaaagtgtagattggatttcacccctggaaatctagcacgccgagtgaacttgaatctttggct

SEQ ID NO: 408190 - DNA, 120 bp, Artificial Sequence
  ENSG00000147862_7 (sequence is synthesized)
atttaaggaggactgggtttgttgtgaagttgcggtgatccagcgcagagccccgtcctgattgatcgcatcgcggggctcagatgactgtaaaatgaatagatgaaattcttgcttctc

SEQ ID NO: 408191 - DNA, 120 bp, Artificial Sequence
  ENSG00000147862_8 (sequence is synthesized)
gaagattttcttgggcatctcccggaaagtgcgttttaaggcgaagtcatgatgtattctcccatctgtctcactcaggatgaatttcacccattcatcgaggcacttcttccacatgtc

SEQ ID NO: 408192 - DNA, 120 bp, Artificial Sequence
  ENSG00000147862_9 (sequence is synthesized)
cgtgcaattgcctatacttggttcaacctgcaggctcgaaaacgcaagtactttaaaaagcatgagaagcgaatgtcaaaggatgaagaaagagcagtcaaagatgagcttctcagtgaa

SEQ ID NO: 408193 - DNA, 120 bp, Artificial Sequence
  ENSG00000147862_10 (sequence is synthesized)
aagcctgaaatcaaacagaagtgggcatccaggctccttgccaaactgcgcaaagatattcgccaggagtatcgagaggactttgtgctcaccgtgactggcaagaagcacccgtgctgt

SEQ ID NO: 408194 - DNA, 120 bp, Artificial Sequence
  ENSG00000147862_11 (sequence is synthesized)
gtcttatccaatcccgaccagaagggtaagattaggagaatcgactgcctgcgacaggcagacaaagtctggcgtctggatctagtcatggtgatcctgttcaaaggcatccccttggaa

SEQ ID NO: 408195 - DNA, 120 bp, Artificial Sequence
  ENSG00000147862_12 (sequence is synthesized)
agtaccgatggagagcggctcatgaaatccccacattgcacaaacccagcactttgtgtccagccacatcatatcacagtatcagttaaggagcttgatttgtttttggcatactacgtg

SEQ ID NO: 408196 - DNA, 120 bp, Artificial Sequence
  ENSG00000147862_13 (sequence is synthesized)
agttttgtaaaatctggagtcttcaatgtatcagaacttgtaagagtatccagaacgcccataacccagggaactggagtcaacttcccaattggagaaatcccaagccaaccatactat

SEQ ID NO: 408197 - DNA, 120 bp, Artificial Sequence
  ENSG00000147862_14 (sequence is synthesized)
catgacatgaactcgggggtcaatcttcagaggtctctgtcttctccaccaagcagcaaaagacccaaaactatatccatagatgaaaatatggaaccaagtcctacaggagacttttac

SEQ ID NO: 408198 - DNA, 120 bp, Artificial Sequence
  ENSG00000147862_15 (sequence is synthesized)
ccctctccaagttcaccagctgctggaagtcgaacatggcacgaaagagatcaagatatgtcttctccgactactatgaagaagcctgaaaagccattgttcagctctgcatctccacag

SEQ ID NO: 408199 - DNA, 120 bp, Artificial Sequence
  ENSG00000147862_16 (sequence is synthesized)
gattcttccccaagactgagcactttcccccagcaccaccatcccggaatacctggagttgcacacagtgtcatctcaactcgaactccacctccaccttcaccgttgccatttccaaca

SEQ ID NO: 408200 - DNA, 120 bp, Artificial Sequence
  ENSG00000147862_17 (sequence is synthesized)
caagctatccttcctccagccccatcgagctacttttctcatccaacaatcagatatcctccccacctgaatcctcaggatactctgaagaactatgtaccttcttatgacccatccagt

SEQ ID NO: 408201 - DNA, 120 bp, Artificial Sequence
  ENSG00000147862_18 (sequence is synthesized)
ccacaaaccagccagcctaacggcagtggtcaagtagtagggaaagtgcctggccatttcactcctgtcttggcaccctctccccatcccagtgcagtgcgacctgtgaccctgagcatg

SEQ ID NO: 408202 - DNA, 120 bp, Artificial Sequence
  ENSG00000147862_19 (sequence is synthesized)
acagatactaaacccatcactacatccactgaaggtgaggcagcttcacctacagcaaccacctacacagcctcaggcacatctcaagccaatcgatatgtgggactaagcccaagagac

SEQ ID NO: 408203 - DNA, 120 bp, Artificial Sequence
  ENSG00000147862_20 (sequence is synthesized)
ccatccttcctacatcagcaacagctgaggatttgtgactggaccatgaatcaaaacggcaggcatttataccccagtaccagtgaggatacattgggaattacttggcaaagtcctggt

SEQ ID NO: 408204 - DNA, 120 bp, Artificial Sequence
  ENSG00000147862_21 (sequence is synthesized)
acctgggctagcttggttcctttccaagtgtcaaataggacacccatcttaccggccaatgtccaaaattacggtttgaacataattggagaacctttccttcaagcagaaacaagcaac

SEQ ID NO: 408205 - DNA, 120 bp, Artificial Sequence
  ENSG00000147862_22 (sequence is synthesized)
tgagggaaaaagaaacacaacaatagtttaagaaattttttttttaaataaaaaaaaaggaaaagaggaagactggacaaaacaacacaaaggcagaaaggaaagaaactgaagaaagaa

SEQ ID NO: 408206 - DNA, 120 bp, Artificial Sequence
  ENSG00000147862_23 (sequence is synthesized)
gataatagaccagcaattgcagcacttacaatcactaattcccttaaggttgaaactgtaatgacataaaaagggtcgatgatatttcactgatggtagatcgcagcccctgcaacgtag

SEQ ID NO: 408207 - DNA, 120 bp, Artificial Sequence
  ENSG00000147862_24 (sequence is synthesized)
cctttgttacatgaagtccgctgggaaatagatgttctgtctctatgacaatatattttaactgactttctagatgccttaatatttgcatgataagctagttttattggtttagtattc

SEQ ID NO: 408208 - DNA, 120 bp, Artificial Sequence
  ENSG00000147862_25 (sequence is synthesized)
ttgttgtttacgcatggaatcactattcctggttatctcaccaacgaaggctaggaggcggcgtcagaggtgctgggtgacagagccatgagccagccattttataagcactctgatttc

SEQ ID NO: 408209 - DNA, 120 bp, Artificial Sequence
  ENSG00000147862_26 (sequence is synthesized)
taaaagttaaaaaaaatatatgaaatctctgtagcctttagttatcagtacagatttattaaatttcggcccttaacccagccttttccagtgtgtaacccagtttgaaatcttaaaaaa

SEQ ID NO: 408210 - DNA, 120 bp, Artificial Sequence
  ENSG00000147862_27 (sequence is synthesized)
agagaagagaaatgaactgtggcatcgctcctgccttctgaacagctctactccgattaaaaaaaaaaaatctcactgtgttctttgtaaaatggtactgcatagtgatgaatttcaccc

SEQ ID NO: 408211 - DNA, 120 bp, Artificial Sequence
  ENSG00000147862_28 (sequence is synthesized)
aattccagattgaacttgaacttcagggacttaggttgggggaacaatggaccataggaatcaataatgtccattttccacatgattatgtttggagctttaagttaacctttatgggag

SEQ ID NO: 408212 - DNA, 120 bp, Artificial Sequence
  ENSG00000147862_29 (sequence is synthesized)
aagcagcaggatctgcagtgtgaccaaaatgagatgatcctgagacaagatgttagaggaaagaaaacaacttttttccgtgatattttctgagcaggactgcagattccagcaggatta

SEQ ID NO: 408213 - DNA, 120 bp, Artificial Sequence
  ENSG00000147862_30 (sequence is synthesized)
cctcatctgaagtggaactcaacaaacaaattattgacatacagccacatctgcacatatgtaagacaaaagcaaatactgcattcagctgaaaagcaactggaattggaggaataaagc

SEQ ID NO: 408214 - DNA, 120 bp, Artificial Sequence
  ENSG00000147862_31 (sequence is synthesized)
acagttatttgtgctgaattttgggctcaagaattatacttccacaggaatttcattgtgatatgaacctcaattcacaaagtctcttgcataattcagtgataatataacttctagtcc

SEQ ID NO: 408215 - DNA, 120 bp, Artificial Sequence
  ENSG00000147862_32 (sequence is synthesized)
aaaagcgggaactgtgtggcattacactgagcatctatatgctttgtgtttctgtgccacagagaagagaaatgaactgtggcatcgctcctgccttctgaacagctctactccgattaa

SEQ ID NO: 408216 - DNA, 120 bp, Artificial Sequence
  ENSG00000147862_33 (sequence is synthesized)
tattgggcagtacaggtctagatgatcaaatgcctacactgaatgacttcatagaatatcactgttgagctgacaccgatctaaaagattcacatgtcggagcaagactgttagtggagt

SEQ ID NO: 408217 - DNA, 120 bp, Artificial Sequence
  ENSG00000147862_34 (sequence is synthesized)
aaactcctcgagtgtacaggacccctttgttcttgttctattttgtttttaacagcttgctctgctccataaagatccatcagtcaccctcaaactcttcggaccttctgcctgttcatt

SEQ ID NO: 408218 - DNA, 120 bp, Artificial Sequence
  ENSG00000147862_35 (sequence is synthesized)
cctatgaagctgcgtttgctaaggtactcggtgacctggagcaaacattctaaaacagcgcaaatggcagaagcagagcctacaggcttcttgtcgggaatccgttcggagtatggaaag

SEQ ID NO: 408219 - DNA, 120 bp, Artificial Sequence
  ENSG00000147862_36 (sequence is synthesized)
aatcccagtgtctgtggacttctgggttgtctgctgtgcagttctgaaatgtaaccctgggattcctaaaagaatgtcaactctgtgctttggattttctgatgaatttcacccattcat

SEQ ID NO: 408220 - DNA, 120 bp, Artificial Sequence
  ENSG00000147862_37 (sequence is synthesized)
aaataaatgcatcaagatatagatgtccttgcattaccaacaatccatagtaaaacaatcattttacaaagccgcataccaaaagtagactgaagtttgagctgtcacagatggtaggtc

SEQ ID NO: 408221 - DNA, 120 bp, Artificial Sequence
  ENSG00000147862_38 (sequence is synthesized)
atttccaaacttggcctggtgggaggaaaaatggcctgcagatagccaggtgacagactgttacctgaggtttgttatataaatgtgggacttaataaactgctatgagctttattattc

SEQ ID NO: 408222 - DNA, 120 bp, Artificial Sequence
  ENSG00000147862_39 (sequence is synthesized)
atgcctctatgtaggtgaagtgttctctctgcatgcaacagtaaaaattaatataatattttccccacaaaagaaacacttaacagaggcaagtgcaatttataaatttatatctaaagg

SEQ ID NO: 408223 - DNA, 120 bp, Artificial Sequence
  ENSG00000147862_40 (sequence is synthesized)
ggaatcatgattataagtccttcagcccttggactctaaattgaggggattaaaaagaatttaaaataattttgaacgaatttattttcccctcagtttttgagggcattaaaaaggcat

SEQ ID NO: 408224 - DNA, 120 bp, Artificial Sequence
  ENSG00000147862_41 (sequence is synthesized)
taaatcaagacaaatcatgtgcttgagaaaaataaaattaatgaaaacacagcacttatgttggtttagctgcagcctccttggaggtagaatttatttatttaaaattactggttgcat

SEQ ID NO: 408225 - DNA, 120 bp, Artificial Sequence
  ENSG00000147862_42 (sequence is synthesized)
caagaacccatagggtgtacaaaaggttctataaaatctgcattatagagacaaagaggcaggcaaatccatgtcacaagggtaaagcttacagtttacaaactgggaacgccagggtgt

SEQ ID NO: 408226 - DNA, 120 bp, Artificial Sequence
  ENSG00000147862_43 (sequence is synthesized)
aggatataaaaacgcactcttgagaaaacaaatgtaatcagggtgctgaaaacttgcatggtgctttcagacattagccttgttcaacaaatttcttgtattgacagatccatagtgtgc

SEQ ID NO: 408227 - DNA, 120 bp, Artificial Sequence
  ENSG00000147862_44 (sequence is synthesized)
atgggcagacacattttgcctctatgtctcttaaaattttaattaaaaatactctttccagtaatcctaatttgcacgaagatataatgtccacattacgtgccttgccttgaaatctaa

SEQ ID NO: 408228 - DNA, 120 bp, Artificial Sequence
  ENSG00000147862_45 (sequence is synthesized)
aaaaaaaaacaaaaaaatacaacaaagtgacatcactacacttgttttgctgcatttattatcattttaaatctttaccatttttatgacaaaatattttgtactccagacgaagaaaaa

SEQ ID NO: 408229 - DNA, 120 bp, Artificial Sequence
  ENSG00000147862_46 (sequence is synthesized)
tccagacgaagaaaaatgtgtgacatcatggattttttagacagttatacctttatctcacatttataaagcatatcatggctgtgtatagttgccgcttaaaaattgtaatcgaccagc

SEQ ID NO: 408230 - DNA, 120 bp, Artificial Sequence
  ENSG00000147862_47 (sequence is synthesized)
aatattttcagtattttggtgtttttttctattaacctttcatgtttttcatcttccaattaatatttgggggggaggggtttcaaatttatacgaattatgcaataccaagttttgcct

SEQ ID NO: 408231 - DNA, 120 bp, Artificial Sequence
  ENSG00000147862_48 (sequence is synthesized)
atgtaggtagtgcttttagctgtattggttattataggtaagtacacagatttaaaaaaaaaataatgtatgcttttttgtttgtttgtttgttttaattgaccaaagtgggtactgcta

SEQ ID NO: 408232 - DNA, 120 bp, Artificial Sequence
  ENSG00000147862_49 (sequence is synthesized)
tttttgcagtgtgatgaggtccttttgtgtactgagagatggacaggggattttttttaatatacatatatatatattctggggtgggtgggaggatttttaacactttgcagtgtagct

SEQ ID NO: 408233 - DNA, 120 bp, Artificial Sequence
  ENSG00000147862_50 (sequence is synthesized)
gtgaagcagtgcaccctgagatgggcctgggctgcaaagcgactgttctgcctactgtgacaaacttcaacttacacaggttcccctctctaacttcccacctgggttgcaagctgaact

SEQ ID NO: 408234 - DNA, 120 bp, Artificial Sequence
  ENSG00000147862_51 (sequence is synthesized)
cattactggttttcataacaacacaatagtaagaacaagcaaacacaacaaattctcctggaggcagacttggcttaaaaaggcagacttggcttggtgatagtttttcttgaaagttcc

SEQ ID NO: 408235 - DNA, 120 bp, Artificial Sequence
  ENSG00000147862_52 (sequence is synthesized)
aaaaatatttgttgaaatgtccacataggggatgttggatgtttaacacttttgagagtttaacacatgaatattctttctcctagaaaacacattagacctgttggagggagtctcccg

SEQ ID NO: 408236 - DNA, 120 bp, Artificial Sequence
  ENSG00000147862_53 (sequence is synthesized)
tattccttttctgccacttttcgtccccatttcatttcattaatgataggatatgatttacctgtgacttactacttcaaatggatggcagtgcacttggatttttttttaatatccaga

SEQ ID NO: 408237 - DNA, 120 bp, Artificial Sequence
  ENSG00000147862_54 (sequence is synthesized)
agattgaacagagggttgctattgttgaatgtatttggactgatagattaaaatcaaagttcaatttttaaggaacaaaaaagtaaatcctgttttcattttatctccccttttaaaact

SEQ ID NO: 408238 - DNA, 120 bp, Artificial Sequence
  ENSG00000147862_55 (sequence is synthesized)
gagaaccagagcagaagggaaatatagaattttaagcaattaatcttcctgtggatgaattaaacccattagatgctgatgggatttttttaaggaatggtaccttaactatatatttga

SEQ ID NO: 408239 - DNA, 120 bp, Artificial Sequence
  ENSG00000147862_56 (sequence is synthesized)
tttcgtttcccctgagggctagaggctgaatggaggctggttttattttgcctttccctcaccgcccagtcccattgagtgtattcattactagaaggaaaatctttcagaattggtgac

SEQ ID NO: 408240 - DNA, 120 bp, Artificial Sequence
  ENSG00000147862_57 (sequence is synthesized)
acatggtaggctgtcttaaggagtcccctggcccccttcccctaggccatggcctaataaaataaactgtcaattgttctcacagcatatcatttaataatgaatactttagaacaatgc

SEQ ID NO: 408241 - DNA, 120 bp, Artificial Sequence
  ENSG00000147862_58 (sequence is synthesized)
ttatgggctggagaattgtatttgattagcccattcagtttgatagcccaaatgctgaacagcacagcgggatcctagcagtgcaagttcaaaagtaagtccaatcatttctgtgatact

SEQ ID NO: 408242 - DNA, 120 bp, Artificial Sequence
  ENSG00000147862_59 (sequence is synthesized)
cgccctggtagcaaacagatcatctcagccaagctcttcatgtatctttgacctattaggtgaacaaatgaacctcacaggacacacagtattttttaaaggcagactcgctctcttttt

SEQ ID NO: 408243 - DNA, 120 bp, Artificial Sequence
  ENSG00000147862_60 (sequence is synthesized)
tgccagtgagcagttctagctaaccaagttacacactgtgggtattcctgcctgcctcttgaatacaaaggcctagttcaagtgttgctttttttatttcaaatcaattttttcttcttt

SEQ ID NO: 408244 - DNA, 120 bp, Artificial Sequence
  ENSG00000147862_61 (sequence is synthesized)
cctttttgagataaaactattaaaagtactactatatatataaaatctcaaatcaacttttcggcctcctcctcgtgtaccaggaagtatattctgacgaagggccccacttttgcaggt

SEQ ID NO: 408245 - DNA, 120 bp, Artificial Sequence
  ENSG00000147862_62 (sequence is synthesized)
cttgcacgcccctcccttacccagaactgcagagcttcaggatggcgaaggtcacccaagggcatgagtagggagtggtgtctccaaccatcagttccgtggcactgttcagcctttgtg

SEQ ID NO: 408246 - DNA, 120 bp, Artificial Sequence
  ENSG00000147862_63 (sequence is synthesized)
tgctgccctgccacccaccactcacagtgcctctgaagcgtgttacccctggagtgacgtgagcatttgaggcttgtctaaggaaaaaaataaaaggcagtgaaggagactgtacataaa

SEQ ID NO: 408247 - DNA, 120 bp, Artificial Sequence
  ENSG00000147862_64 (sequence is synthesized)
gacatggcaaaaatcttaattatagcaatatagttatcgggtaatgttcgggtgggcagctccattaaaaaatatgtgaatgaatctgtgaagctgcaagtagcgagaagagcgaaaggt

SEQ ID NO: 408248 - DNA, 120 bp, Artificial Sequence
  ENSG00000147862_65 (sequence is synthesized)
cttcttaatgaaccgcctaccttgtagacagtaatttgtacactgtatagttttgttaagaattttttttaaattaaaattcccatgtttgtaaagctaactttttaacaattataatgg

SEQ ID NO: 408249 - DNA, 120 bp, Artificial Sequence
  ENSG00000147862_66 (sequence is synthesized)
aactatatgttgtttccatttttaaagtaaacaagaatattccttgtttagagactggacttgagttaaaactctccagtctcttaagttatgtattaaaaagaaaatctgtccatgtta

SEQ ID NO: 408250 - DNA, 120 bp, Artificial Sequence
  ENSG00000147862_67 (sequence is synthesized)
ggagttatttcacagattcctgtgcttgaaaagcataggatactaatcctttaaaaaagtgtaaatggagaaaagttatattttatgaaggttattttgttgtatttagtattggaaaag

SEQ ID NO: 408251 - DNA, 120 bp, Artificial Sequence
  ENSG00000147862_68 (sequence is synthesized)
ttggtttccagagcatttcagaatgtcgaagcaccactgtctttttattagtatatacggcctttagcaaaagtttttgtgattgttacgtgatggtatttaaggttaagtttcacagag

SEQ ID NO: 408252 - DNA, 120 bp, Artificial Sequence
  ENSG00000147862_69 (sequence is synthesized)
cattcaggataggcagaaaactaaaacagtgctatgtctcacataacgtgtcctcagggagcagaatcttggatttgtgacttgtagcttcataaggactcaacgaaagagattgcacag

SEQ ID NO: 408253 - DNA, 120 bp, Artificial Sequence
  ENSG00000147862_70 (sequence is synthesized)
ggacatcttcagcggtgtgacagcaggacatgttctttacctagattcaaattctatgtactgtgtgaaatgatgaaggctgcagaaagttatcccatattcagtgtacagtattcattt

SEQ ID NO: 408254 - DNA, 120 bp, Artificial Sequence
  ENSG00000147862_71 (sequence is synthesized)
ttaatgaaacaactctacaatattgctggcagataggccccaagcatgacattcaatatagtttacatgttcctgtcaaggtcttttgttaacattaaccagctgcatgctttctggact

SEQ ID NO: 408255 - DNA, 120 bp, Artificial Sequence
  ENSG00000147862_72 (sequence is synthesized)
ttaagaaattgggtttctatagaaaactttttttttttttttttttttaatgtgcaggctattcaagttcaatagtaaaagctcaaaaatgaatgttctactccatgctgaaggagctga

SEQ ID NO: 408256 - DNA, 120 bp, Artificial Sequence
  ENSG00000147862_73 (sequence is synthesized)
aagctgccttcttcatattttgcactttctggtagttcccctgttttttctaattccctaaaattgtgtgggtggagtggagccctgcagttggggggtaacatggaccactgattttgc

SEQ ID NO: 408257 - DNA, 120 bp, Artificial Sequence
  ENSG00000147862_74 (sequence is synthesized)
cctttgaccctgcacaatgacctttgcatcagccaaactcattgccatgacaactctttgtactgtgtccgtgccacagatctgttggtcacattgttaatagtaaaggggacaagttgg

SEQ ID NO: 408258 - DNA, 120 bp, Artificial Sequence
  ENSG00000147862_75 (sequence is synthesized)
agacggtcaatttttacattttttgttgcaattttttcttcaatggttgtaagtagtttttttttttttttaataataaaagggttcactagttaatactctagaaatatctgtgtgttg

SEQ ID NO: 408259 - DNA, 120 bp, Artificial Sequence
  ENSG00000147862_76 (sequence is synthesized)
caattcaaatgtatgttgagattgtgaaaagcgcttcagtgccactagcttaccggtacactagactaagcccttgatgacttattgcatgatacagtaccaggaacaacaggtggccta

SEQ ID NO: 408260 - DNA, 120 bp, Artificial Sequence
  ENSG00000147862_77 (sequence is synthesized)
aatacatgaaaagcagtgtaagctagtgacactaaagccagtcttgtattactgtatttttgacagaatggttttgaaaactgtgctacagggactgatgtggcaaatatatctctttat

SEQ ID NO: 408261 - DNA, 120 bp, Artificial Sequence
  ENSG00000147862_78 (sequence is synthesized)
gcagaaggaagtctttttttttcttttttttttttttaagaagtatggctttttatgcatccttcatcgagggcattgaagttgcatggactgataaaagttgatgcaaaacaagaaaga

SEQ ID NO: 408262 - DNA, 120 bp, Artificial Sequence
  ENSG00000147862_79 (sequence is synthesized)
aacaaacaaaaaaaaaaaaccagcaaaatgtttaccaaaaaactcaaacaaatgagcagtgcctgttcaatttcacagtctctgttgagttcagttgtaaatatgtttcaaatgacattt

SEQ ID NO: 408263 - DNA, 120 bp, Artificial Sequence
  ENSG00000147862_80 (sequence is synthesized)
tcttgggaaaaaaaatctctacaacattgtagaatgtgaggggtaactacatcccaggcataggtttctcaaagctgcagtagattatgtcttcatcaagctgttaatttgtgcttatat

SEQ ID NO: 408264 - DNA, 120 bp, Artificial Sequence
  ENSG00000147862_81 (sequence is synthesized)
catatagaacttttagcatcctgggaagagctgcccccacctcaatgatatttctctgagaacaacttttgtaggactgtgtgtttctttagatacatttagtacaactgtaggtgacga

SEQ ID NO: 408265 - DNA, 120 bp, Artificial Sequence
  ENSG00000147862_82 (sequence is synthesized)
gtagtcagttattgcttgctagctacacaccagggttgatccattttaaaacttttggcattttgtcctcatgggccataaatacagaaccttgtattttaattaaatttttttacaaaa

SEQ ID NO: 408266 - DNA, 120 bp, Artificial Sequence
  ENSG00000147862_83 (sequence is synthesized)
ggaggcacatgcacaatctccatgtaacaaacctttagcagtaggatgtattatacgacagttacttaatttctagagttcaggcctctgggatcaaccccagactgggccagaatgtta

SEQ ID NO: 408267 - DNA, 120 bp, Artificial Sequence
  ENSG00000147862_84 (sequence is synthesized)
gtgaaggttttattgtgcccggttggaggataacgttctttgggtactttttgtgggttgcaaatgaactcaattgccacaagttttaaactggtgtaaatcaagcttgacttaatgtga

SEQ ID NO: 408268 - DNA, 120 bp, Artificial Sequence
  ENSG00000147862_85 (sequence is synthesized)
ttgttactgttatatccagcctatactgctagcagctgctcatactgcagtcaattactggaagcggatatatttcctatgcaaaaactgtttaaacaataaaatgagctatgctacaga

SEQ ID NO: 408269 - DNA, 120 bp, Artificial Sequence
  ENSG00000147862_86 (sequence is synthesized)
cgacaccaaaacaacccctgagaaaatccacaaatctgtacctgagacacgtcaagtcagcggcccagggttctgttacagactcaagatctcttttatttaatgcaatacagtgcgatg

SEQ ID NO: 408270 - DNA, 120 bp, Artificial Sequence
  ENSG00000147862_87 (sequence is synthesized)
acatacatgcacacacgcacacgcgggcgcacacacacacaccatcctggacggcgttcaagtcaagcacgagaaacagccttctgcaagggagaggaaagaaagctggaaatccagaca

SEQ ID NO: 408271 - DNA, 120 bp, Artificial Sequence
  ENSG00000147862_88 (sequence is synthesized)
gactgaagggctgcctgcttttagacttgactttgaccgccttttcttctcgggccaagaactgtggcagtgcagaaattacaattaaaaaatacataagactactcccggattgctttt

SEQ ID NO: 408272 - DNA, 120 bp, Artificial Sequence
  ENSG00000147862_89 (sequence is synthesized)
atgaacagcacactgaggaggacacaaaagaagtagacagaatctctgcctctgcttaggagtatgcaatttagttggggcgacaaaacttaaatgctagaaccaataaaagaagattac

SEQ ID NO: 408273 - DNA, 120 bp, Artificial Sequence
  ENSG00000147862_90 (sequence is synthesized)
gcagcctcaacgacctgggcccaagcaatcctcccacctcagccttcccaagtagcggggactgcaggtgcacagaaccatgcctggctaattttcagatttgtcatagagatgtgtctt

SEQ ID NO: 408274 - DNA, 120 bp, Artificial Sequence
  ENSG00000147862_91 (sequence is synthesized)
tctatgttgcccaggctgggctcgaattcctggccttacgagatcctccctgcctcggcctcctgaagtgtgggattatagatatgagccacgggacctggcctcaccaaaagttcttaa

SEQ ID NO: 408275 - DNA, 120 bp, Artificial Sequence
  ENSG00000147862_92 (sequence is synthesized)
accaagaaaacacagggcagtaacaggtattcttccttttcttgaagaattatcctgccaaaacagtttccccacagtttgtggtgaaagctagaggcatcctgaggcatcccaaggcag

SEQ ID NO: 408276 - DNA, 120 bp, Artificial Sequence
  ENSG00000147862_93 (sequence is synthesized)
ccttggaagactgcgatctatgttcctttggggatacttgagtttctgtggatggaaatgctctggagaagctctatttgttgacagtggcagacacccagttcttgatgttcataaaac

SEQ ID NO: 408277 - DNA, 120 bp, Artificial Sequence
  ENSG00000147862_94 (sequence is synthesized)
tatggcaggcagagttgggaaagatatattaggtcataaatctagatttgggtccaaggcagaatggttcaccattgtagtcattccaagtcattgtccaggcagctttgaaatatcttg

SEQ ID NO: 408278 - DNA, 120 bp, Artificial Sequence
  ENSG00000147862_95 (sequence is synthesized)
cagaactacttaattatctccattcacctaaatttctatagtggtttccttatgaagaaaacaattaatgtagagaggccctagtacctctggcataaagttgtcatcaaagaacaaatc

SEQ ID NO: 408279 - DNA, 120 bp, Artificial Sequence
  ENSG00000147862_96 (sequence is synthesized)
aatgattttctttggttccttgtatttcaccttttgtgttgagttttgtttcagctttaaggaaaaagcaaacttgctgggcttctcattagccagcattatcaagaatgagtaagattt

SEQ ID NO: 408280 - DNA, 120 bp, Artificial Sequence
  ENSG00000147862_97 (sequence is synthesized)
aaaagctcctttttgttaatggaaaggaattagcttccttgcctttcctataaacatttacattgagtctgtttactcctgtcattggtaaacctcatttgttcccaagttttattttag

SEQ ID NO: 408281 - DNA, 120 bp, Artificial Sequence
  ENSG00000147862_98 (sequence is synthesized)
gctattacagggctaagaaaaaaatgggaaatcctaaaactaagctttcattttttcatgttttcttttaacttcatattgaatgatcctaatcttccaaaagattttagtggctactgt

SEQ ID NO: 408282 - DNA, 120 bp, Artificial Sequence
  ENSG00000147862_99 (sequence is synthesized)
tgtgtagcaaagagggagactgttctagactacaaagagagtagacttgaattaatacaattgcttgactaatgtatgctatatgtcattagtgaaatcatttatgtgccttgcatgcat

SEQ ID NO: 408283 - DNA, 120 bp, Artificial Sequence
  ENSG00000147862_100 (sequence is synthesized)
gcatgtgtgtgcatgtatgtgatgtgatgtggtttgcttgcttgttcatgaaaatattcagaacaattctctttttgatcagtaatgctactagcaaatacagaagtgctgaagaataat

SEQ ID NO: 408284 - DNA, 120 bp, Artificial Sequence
  ENSG00000147862_101 (sequence is synthesized)
atgatatttgaatatttgcatttgaaagcctattatcattttaaaccaagacaagtgggtgttagtttactgatgccagtgacatcagcattagtaatgggctcttttagcaaaaagcaa

SEQ ID NO: 408285 - DNA, 120 bp, Artificial Sequence
  ENSG00000147869_0 (sequence is synthesized)
agagaatgagcctctcctttgggcctcatcatttacaaaagaagcttgggcccctgacagcatgcatctcctcttatttcagctgctggtactcctgcctctaggaaagaccacacggca

SEQ ID NO: 408286 - DNA, 120 bp, Artificial Sequence
  ENSG00000147869_1 (sequence is synthesized)
ccaggatggccgccagaatcagagttctctttcccccgtactcctgccaaggaatcaaagagagcttcccacaggcaaccatgaggaagctgaggagaagccagatctgtttgtcgcagt

SEQ ID NO: 408287 - DNA, 120 bp, Artificial Sequence
  ENSG00000147869_2 (sequence is synthesized)
gccacaccttgtagccaccagccctgcaggggaaggccagaggcagagagagaagatgctgtccagatttggcaggttctggaagaagcctgagagagaaatgcatccatccagggactc

SEQ ID NO: 408288 - DNA, 120 bp, Artificial Sequence
  ENSG00000147869_3 (sequence is synthesized)
agatagtgagcccttcccacctgggacccagtccctcatccagccgatagatggaatgaaaatggagaaatctcctcttcgggaagaagccaagaaattctggcaccacttcatgttcag

SEQ ID NO: 408289 - DNA, 120 bp, Artificial Sequence
  ENSG00000147869_4 (sequence is synthesized)
aaaaactccggcttctcagggggtcatcttgcccatcaaaagccatgaagtacattgggagacctgcaggacagtgcccttcagccagactataacccacgaaggctgtgaaaaagtagt

SEQ ID NO: 408290 - DNA, 120 bp, Artificial Sequence
  ENSG00000147869_5 (sequence is synthesized)
gggtctgttcattttcctggagccgcgcagcactcccatacctcctgctctcactgtttgcctgccaagttcaccacgatgcacttgccactgaactgcactgaactttcctccgtgatc

SEQ ID NO: 408291 - DNA, 120 bp, Artificial Sequence
  ENSG00000147869_6 (sequence is synthesized)
aaggtggtgatgctggtggaggagtgccagtgcaaggtgaagacggagcatgaagatggacacatcctacatgctggctcccaggattcctttatcccaggagtttcagcttgaagagct

SEQ ID NO: 408292 - DNA, 120 bp, Artificial Sequence
  ENSG00000147869_7 (sequence is synthesized)
atcccactattacctttgaaaagcaaaaccacaacagcaaagatgctgattattcagtctgaaaatgttaagtgggtacataacattttcagggaaaggtgacttgaaacgtagttttaa

SEQ ID NO: 408293 - DNA, 120 bp, Artificial Sequence
  ENSG00000147869_8 (sequence is synthesized)
attagaacgatagaggaaatgatattagtctagttattggtacacgtttgagaccttgtctcagctctgccactaactagccgtagaatgttaagttgtaaaacctttctccatctaaag

SEQ ID NO: 408294 - DNA, 120 bp, Artificial Sequence
  ENSG00000147869_9 (sequence is synthesized)
attttcatctataaatgacggacccgacctagatgattgctaaaatcctttccactactaatattccgtgatgcattttctccaagtttgggtaaaagccctccatctaaagaaggaaaa

SEQ ID NO: 408295 - DNA, 120 bp, Artificial Sequence
  ENSG00000147872_0 (sequence is synthesized)
gctttgaccgggtcgtggcagccggagtcgtcttcgggacgcgcctgctcttcgcctttcgctgcagtccgtcgatttctttctccaggaagaaaaatggcatccgttgcagttgatcca

SEQ ID NO: 408296 - DNA, 120 bp, Artificial Sequence
  ENSG00000147872_1 (sequence is synthesized)
caaccgagtgtggtgactcgggtggtcaacctgcccttggtgagctccacgtatgacctcatgtcctcagcctatctcagtacaaaggaccagtatccctacctgaagtctgtgtgtgag

SEQ ID NO: 408297 - DNA, 120 bp, Artificial Sequence
  ENSG00000147872_2 (sequence is synthesized)
atggcagagaacggtgtgaagaccatcacctccgtggccatgaccagtgctctgcccatcatccagaagctagagccgcaaattgcagttgccaatacctatgcctgtaaggggctagac

SEQ ID NO: 408298 - DNA, 120 bp, Artificial Sequence
  ENSG00000147872_3 (sequence is synthesized)
aggattgaggagagactgcctattctgaatcagccatcaactcagattgttgccaatgccaaaggcgctgtgactggggcaaaagatgctgtgacgactactgtgactggggccaaggat

SEQ ID NO: 408299 - DNA, 120 bp, Artificial Sequence
  ENSG00000147872_4 (sequence is synthesized)
tctgtggccagcacgatcacaggggtgatggacaagaccaaaggggcagtgactggcagtgtggagaagaccaagtctgtggtcagtggcagcattaacacagtcttggggagtcggatg

SEQ ID NO: 408300 - DNA, 120 bp, Artificial Sequence
  ENSG00000147872_5 (sequence is synthesized)
atgcagctcgtgagcagtggcgtagaaaatgcactcaccaaatcagagctgttggtagaacagtacctccctctcactgaggaagaactagaaaaagaagcaaaaaaagttgaaggattt

SEQ ID NO: 408301 - DNA, 120 bp, Artificial Sequence
  ENSG00000147872_6 (sequence is synthesized)
gatctggttcagaagccaagttattatgttagactgggatccctgtctaccaagcttcactcccgtgcctaccagcaggctctcagcagggttaaagaagctaagcaaaaaagccaacag

SEQ ID NO: 408302 - DNA, 120 bp, Artificial Sequence
  ENSG00000147872_7 (sequence is synthesized)
tctacctctcatgggtagagtggaaaaggagcattggatatgatgatactgatgagtcccactgtgctgagcacattgagtcacgtactcttgcaattgcccgcaacctgactcagcagc

SEQ ID NO: 408303 - DNA, 120 bp, Artificial Sequence
  ENSG00000147872_8 (sequence is synthesized)
tccagaccacgtgccacaccctcctgtccaacatccaaggtgtaccacagaacatccaagatcaagccaagcacatgggggtgatggcaggcgacatctactcagtgttccgcaatgctg

SEQ ID NO: 408304 - DNA, 120 bp, Artificial Sequence
  ENSG00000147872_9 (sequence is synthesized)
cctcctttaaagaagtgtctgacagcctcctcacttctagcaaggggcagctgcagaaaatgaaggaatctttagatgacgtgatggattatcttgttaacaacacgcccctcaactggc

SEQ ID NO: 408305 - DNA, 120 bp, Artificial Sequence
  ENSG00000147872_10 (sequence is synthesized)
tggtaggtcccttttatcctcagctgactgagtctcagaatgctcaggaccaaggtgcagagatggacaagagcagccaggagacccagcgatctgagcataaaactcattaaacctgcc

SEQ ID NO: 408306 - DNA, 120 bp, Artificial Sequence
  ENSG00000147872_11 (sequence is synthesized)
cctatcactagtgcatgctgtggccagacagatgacaccttttgttatgttgaaattaacttgctaggcaaccctaaattgggaagcaagtagctagtataaaggccctcaattgtagtt

SEQ ID NO: 408307 - DNA, 120 bp, Artificial Sequence
  ENSG00000147872_12 (sequence is synthesized)
gtttccagctgaattaagagctttaaagtttctggcattagcagatgatttctgttcacctggtaagaaaagaatgataggcttgtcagagcctatagccagaactcagaaaaaattcaa

SEQ ID NO: 408308 - DNA, 120 bp, Artificial Sequence
  ENSG00000147872_13 (sequence is synthesized)
atgcacttatgttctcattctatggccattgtgttgcctctgttactgtttgtattgaataaaaacatcttcatgtgggctggggtagaaactggtgtctgctctggtgtgatctgaaaa

SEQ ID NO: 408309 - DNA, 120 bp, Artificial Sequence
  ENSG00000147872_14 (sequence is synthesized)
ggcgtcttcactgctttatctcatgatgcttgcttgtaaaacttgattttagtttttcatttctcaaataggaatactacctttgaattcaataaaattcactgcaggatagaccagtta

SEQ ID NO: 408310 - DNA, 120 bp, Artificial Sequence
  ENSG00000147872_15 (sequence is synthesized)
gcagccggagtcgtcttcgggacgcgcctgctcttcgcctttcgctgcagtccgtcgatttctttctccaggaagaaaaatggcatccgttgcagttgatccacaaccggtatgaatttt

SEQ ID NO: 408311 - DNA, 120 bp, Artificial Sequence
  ENSG00000147872_16 (sequence is synthesized)
tctgcccatcatccagaagctagagccgcaaagtgagttctgatttttcaagatgcaagtcaagggactggtcagtggcgagcccctgagctcacagcagtaacatctggaactcctcag

SEQ ID NO: 408312 - DNA, 69 bp, Artificial Sequence
  ENSG00000147872_17 (sequence is synthesized)
cccttcctggggcatacactgcctttacctagaaactttcaggtgaccctcattaccgtaagaggactg

SEQ ID NO: 408313 - DNA, 63 bp, Artificial Sequence
  ENSG00000147872_18 (sequence is synthesized)
acagaaggcctgtttcatagctttggcagatgtttatgatcctttaattaaaaatcccccaga

SEQ ID NO: 408314 - DNA, 120 bp, Artificial Sequence
  ENSG00000147872_19 (sequence is synthesized)
tggcagatgtttatgatcctttaattaaaaatcccccagaggatgggcacggtggcctgcacctgtaatcctagcactttgggaggtctagatgggaggatcgcttgaggcctggaattt

SEQ ID NO: 408315 - DNA, 120 bp, Artificial Sequence
  ENSG00000147872_20 (sequence is synthesized)
caaaagtgctgagacttgacacttcacatgttttcatcttctatctgttaaaacaagctgtacatatcacaaacaggcaaatacttgttttcccaacctggatctggatgtatgtttgaa

SEQ ID NO: 408316 - DNA, 120 bp, Artificial Sequence
  ENSG00000147872_21 (sequence is synthesized)
aaataatggccacttccttacttcctgaactgttgtcaagttgtatctacgaagcagagaagaactagcctcctttggattagaaaacttttagtgtgttgtctatcagtttgtgtcttt

SEQ ID NO: 408317 - DNA, 120 bp, Artificial Sequence
  ENSG00000147872_22 (sequence is synthesized)
cagaacgttttgtcagaacaattatggctttcttcctgaagtgtgcttggccggaaaagaaagcaggagacctcaagggctaataatctagcagtggctgacactgaaatgatgcatgga

SEQ ID NO: 408318 - DNA, 120 bp, Artificial Sequence
  ENSG00000147872_23 (sequence is synthesized)
agaaaggctaccaagcaagggaggtggagagcagtttgaagcaactggggtaaagtccggagaagaagctggtgagaaagagacaggagccagatgctgaatgacgatttctttctccag

SEQ ID NO: 408319 - DNA, 120 bp, Artificial Sequence
  ENSG00000147872_24 (sequence is synthesized)
ccaccatagacttgacatctgagactgatgaaattccagatattatagctttggaagaggagaacggatcaaataattcacatgctaatggccctgtcctctcagggcaagatgttgaat

SEQ ID NO: 408320 - DNA, 120 bp, Artificial Sequence
  ENSG00000147872_25 (sequence is synthesized)
aactaacaacaataaaataccccttttggttgaatacgcaatttgtattacattaaacttcctgtttttattcctgtgactttgaagagtgttaatctattttttggctacattggtctt

SEQ ID NO: 408321 - DNA, 120 bp, Artificial Sequence
  ENSG00000147872_26 (sequence is synthesized)
aattgcaatgacactctgatctaaacttttgtaagagatcctagttctgtgtcatataatcatttaatataattaaagtttaattgctgaaatacttataatgaaaattgggctgtataa

SEQ ID NO: 408322 - DNA, 120 bp, Artificial Sequence
  ENSG00000147872_27 (sequence is synthesized)
aaatcgaatcctggagggaaccaaacaaaaccctgaaaacctccaggaatctcaggttggccaaatccttggtaatgtcctgccactccccaggactgccacactgtacacaccctatct

SEQ ID NO: 408323 - DNA, 120 bp, Artificial Sequence
  ENSG00000147872_28 (sequence is synthesized)
aatggcaacctactgcaggggccaaggaaaaacgtctcctttgtcctctggaggttcactgaaaaatcaactggcggaaagcaaattaacaggtcaaaagatatacatgtattattataa

SEQ ID NO: 408324 - DNA, 120 bp, Artificial Sequence
  ENSG00000147872_29 (sequence is synthesized)
aaagacgtaaatgtattattgggcatgtgggggaaccacagagtaattactccacctctcagtgggctcagaagcttatatacccctcctgaggttacagaaagtttgggggctcagaga

SEQ ID NO: 408325 - DNA, 120 bp, Artificial Sequence
  ENSG00000147872_30 (sequence is synthesized)
atggtggtaaatcaggatttagtggcaagacagaaatggaaacttggctagcaaaagtcatttcattatgtagattggggtccccaaactttgggccatttacactgtggccatttacat

SEQ ID NO: 408326 - DNA, 120 bp, Artificial Sequence
  ENSG00000147872_31 (sequence is synthesized)
tcctgttaggaatagggccgcacagcaagaggtgagtggcgggtgagtgagcaataccgcctgagctctgcctcttgtcaggtcagcagctggtattaggttctcttaggagcaagaacg

SEQ ID NO: 408327 - DNA, 120 bp, Artificial Sequence
  ENSG00000147872_32 (sequence is synthesized)
ggctccttatgagaatctaatgccgatgatttaaggtggaacagtttcatcctgaaaaccatccccctgccctggtccatggaaaaattgtcttccatgaaacctatccctggtgccaaa

SEQ ID NO: 408328 - DNA, 120 bp, Artificial Sequence
  ENSG00000147872_33 (sequence is synthesized)
aaggttggggaccgctcatgtagatgaaacctcacaggtagtagccattggaaagaatagatggttgatgtttctttcagacctttaaaggtgtcagactgtccattaacctttcctata

SEQ ID NO: 408329 - DNA, 120 bp, Artificial Sequence
  ENSG00000147872_34 (sequence is synthesized)
gactgtccattaacctttcctatatctggacgagggaaaacctcagagagcacctggctgcatcaatgcagattttctctgtatattgcaagcctctctcacacacacacacacacacac

SEQ ID NO: 408330 - DNA, 120 bp, Artificial Sequence
  ENSG00000147872_35 (sequence is synthesized)
acacaccaaacagcttcgtaggactacttccgcctgcaggtcctctgaacagccatatctcaaaatatgtgaaagaagtatattttggggtaaaattttttggtttccttcactacacat

SEQ ID NO: 408331 - DNA, 120 bp, Artificial Sequence
  ENSG00000147872_36 (sequence is synthesized)
ctcaccttgggtgttattcttgccactggtttcatgttctcagactcacgaagctgaaaaacagttggggatgcagaatttgatgtgcttcatcctttgtgggcttgaagagtctcttgt

SEQ ID NO: 408332 - DNA, 120 bp, Artificial Sequence
  ENSG00000147872_37 (sequence is synthesized)
tcccaaaattattccctggggccctctgcttcacaggcaaataaaagcaaaaagaagcttgctcagccttaagtgaggaaatgactcacaggtttaaaacaaaaaaggaaaagatggagg

SEQ ID NO: 408333 - DNA, 120 bp, Artificial Sequence
  ENSG00000147872_38 (sequence is synthesized)
cattttgtaggtgaaagggcgagagtcttctgatgcaaagtaagaggtcattagagcagggatggattatcaataagcagagcaaacatttgcttagggaacaaacagcgccggaacacg

SEQ ID NO: 408334 - DNA, 120 bp, Artificial Sequence
  ENSG00000147873_0 (sequence is synthesized)
cccaaggttcagggtcactcaatctcaacagcccagaagcatctgcaacctccccaatggccttgccctttgttttactgatggccctggtggtgctcaactgcaagtcaatctgttctc

SEQ ID NO: 408335 - DNA, 120 bp, Artificial Sequence
  ENSG00000147873_1 (sequence is synthesized)
tgggctgtgatctgcctcagacccacagcctgagtaacaggaggactttgatgataatggcacaaatgggaagaatctctcctttctcctgcctgaaggacagacatgactttggatttc

SEQ ID NO: 408336 - DNA, 120 bp, Artificial Sequence
  ENSG00000147873_2 (sequence is synthesized)
ctcaggaggagtttgatggcaaccagttccagaaggctcaagccatctctgtcctccatgagatgatccagcagaccttcaatctcttcagcacaaaggactcatctgctacttgggatg

SEQ ID NO: 408337 - DNA, 120 bp, Artificial Sequence
  ENSG00000147873_3 (sequence is synthesized)
agacacttctagacaaattctacactgaactttaccagcagctgaatgacctggaagcctgtatgatgcaggaggttggagtggaagacactcctctgatgaatgtggactctatcctga

SEQ ID NO: 408338 - DNA, 89 bp, Artificial Sequence
  ENSG00000147873_4 (sequence is synthesized)
ttctctttatcagcaaacttgcaagaaagattaaggaggaaggaatgaaaactggttcaacatcgaaatgattctcattgactagtaca

SEQ ID NO: 408339 - DNA, 120 bp, Artificial Sequence
  ENSG00000147873_5 (sequence is synthesized)
aactggttcaacatcgaaatgattctcattgactagtacaccatttcacacttcttgagttctgccgtttcaaatattaatttctgctatatccatgacttgagttgaatcaaaattttc

SEQ ID NO: 408340 - DNA, 120 bp, Artificial Sequence
  ENSG00000147873_6 (sequence is synthesized)
aaacgtttcacacgtgttaagcaacacttctttagctccacagggacaaaatctttacagatgatcatgccaatctatctattctatctatttatctatctgtctgtcttctatctaatc

SEQ ID NO: 408341 - DNA, 120 bp, Artificial Sequence
  ENSG00000147874_0 (sequence is synthesized)
cttaagggcgggagtctcggtttgtggtggcttcgctgaggcagtggtggccgcactataccgttagaaactcaatttcccggaggttgtgaggccctttgaggcgaaatcgctctgggc

SEQ ID NO: 408342 - DNA, 120 bp, Artificial Sequence
  ENSG00000147874_1 (sequence is synthesized)
gtgaaaggagcaggcgttggcaatggaaggaccaccgcgacctcaggctgaccgtagggagggatcttgagggccctccgagtcccctgggcttgcgctttctttctttgcagccaccgt

SEQ ID NO: 408343 - DNA, 120 bp, Artificial Sequence
  ENSG00000147874_2 (sequence is synthesized)
gcctaccgcgaggatgagctcggcctcggtcaccgctttcgagaaggagcatctctggatgtatctgcaggcgctcggcttcgagccaggcccggcaaccattgcctgcggaaagatcgt

SEQ ID NO: 408344 - DNA, 120 bp, Artificial Sequence
  ENSG00000147874_3 (sequence is synthesized)
gtcgcacacgcacctcggagtgaacatgtttgacaagctgaaccgtgatgcctttcatataatttcttattttttgtttcaagttctggaccagtctctcaccaaagaagttttcaaatt

SEQ ID NO: 408345 - DNA, 120 bp, Artificial Sequence
  ENSG00000147874_4 (sequence is synthesized)
ttgttggcccccatttgaccaaaaaagtgacactgaattccgaaaacattgctgtgaatggataaaaaggatttctggtgaatgtggaagtagctttcctcaagttgttggttcactatt

SEQ ID NO: 408346 - DNA, 120 bp, Artificial Sequence
  ENSG00000147874_5 (sequence is synthesized)
tctttctcctggtggtcctaagtttattcatctgatgtatcattttgcaagatttgttgcaatgaaatatattaaatccaattctaaaaattcttctcatcattttgtagagacatttaa

SEQ ID NO: 408347 - DNA, 120 bp, Artificial Sequence
  ENSG00000147874_6 (sequence is synthesized)
cataaaaccacaggacttgcacaaatgcattgccagatgccatttcgcacgtagcagatttttacaaattttgcaaagacaagattgtgttacccaaaaatatcaggaaaatgcacaatt

SEQ ID NO: 408348 - DNA, 120 bp, Artificial Sequence
  ENSG00000147874_7 (sequence is synthesized)
atcagttaagcaggtacgaaacttgagatctgaatgtataggattggaaaaccaaataaagaaaatggaaccctatgatgaccacagtaatatggaagaaaaaattcaaaaggttcggtc

SEQ ID NO: 408349 - DNA, 120 bp, Artificial Sequence
  ENSG00000147874_8 (sequence is synthesized)
tttgtgggcttcagtgaatgaaacgctcatgtttttggaaaaagagagagaagttgttagttcggtccttagtcttgttaaccaatatgctttagatggaactaatgttgctattaatat

SEQ ID NO: 408350 - DNA, 120 bp, Artificial Sequence
  ENSG00000147874_9 (sequence is synthesized)
tccaaggctcttacttgacaaaattgagaaacaaatgtttcagttgcacataggaaatgtttatgaggctggaaaactgaacctcttaacagttattcagttattaaatgaagtcttgaa

SEQ ID NO: 408351 - DNA, 120 bp, Artificial Sequence
  ENSG00000147874_10 (sequence is synthesized)
ggtgatgaaatatgaacgttgtcaggctgatcaagcaagattgacggtagaccttcactaccttgaaaaagagaccaaatttcagaaggaaagattatcagatctgaaacatatgaggta

SEQ ID NO: 408352 - DNA, 120 bp, Artificial Sequence
  ENSG00000147874_11 (sequence is synthesized)
tagaataaaagatgatctcacaactataagacattctgttgttgaaaagcaaggagaatggcataaaaagtggaaagaatttcttggtttgtctcctttcagtctaattaaaggttggac

SEQ ID NO: 408353 - DNA, 120 bp, Artificial Sequence
  ENSG00000147874_12 (sequence is synthesized)
tccatctgtagatcttttaccaccaatgtctcccctttcgtttgatcctgcctcagaagaagtgtatgcaaagagtattctttgtcagtatcctgcttcacttccagatgcacataagca

SEQ ID NO: 408354 - DNA, 120 bp, Artificial Sequence
  ENSG00000147874_13 (sequence is synthesized)
acataaccaagaaaatggttgcagaggagacagtgataccttgggagcgctacatgatctagccaacagccctgcctctttcttgtcgcagtcagtttcatcatcagatagaaacagtgt

SEQ ID NO: 408355 - DNA, 120 bp, Artificial Sequence
  ENSG00000147874_14 (sequence is synthesized)
tacagtacttgaaaaggacacaaagatgggaactcccaaagaaaaaaatgaagcaatttctaagaaaataccagaatttgaagtggaaaattctccattatcagatgttgcaaagaatac

SEQ ID NO: 408356 - DNA, 120 bp, Artificial Sequence
  ENSG00000147874_15 (sequence is synthesized)
agagagtagtgcatttggagggtctttgccagctaaaaaaagtgatccatttcaaaaagagcaagatcatctggtagaagaggttgccagagcagttttatctgattcaccacagctctc

SEQ ID NO: 408357 - DNA, 120 bp, Artificial Sequence
  ENSG00000147874_16 (sequence is synthesized)
tgaaggaaaagaaataaaattagaggaactaattgactctctgggttctaaccccttcttaacaaggaatcagattccccgtactccagaaaacttgataactgaaattaggagctcatg

SEQ ID NO: 408358 - DNA, 120 bp, Artificial Sequence
  ENSG00000147874_17 (sequence is synthesized)
gagaaaagctattgaaatggaagaaaacagaactaaagaaccaattcaaatggatgctgaacatagagaagtattgccagaatcattacctgtgttgcacaatcaaagagaatttagcat

SEQ ID NO: 408359 - DNA, 120 bp, Artificial Sequence
  ENSG00000147874_18 (sequence is synthesized)
ggctgattttctcttagaaaccactgtatcagattttggccagtctcatttgactgaagagaaagttatttcagattgcgagtgtgtgcctcagaaacatgtgctgaccagtcacataga

SEQ ID NO: 408360 - DNA, 120 bp, Artificial Sequence
  ENSG00000147874_19 (sequence is synthesized)
tgaaccaccaacacaaaatcagtcagatttgttaaataagaaagtaatttgcaagcaagatttggaatgtttagccttcaccaagctttcagaaactagccgaatggagacattctcccc

SEQ ID NO: 408361 - DNA, 120 bp, Artificial Sequence
  ENSG00000147874_20 (sequence is synthesized)
tgctgtcggcaataggatagatgtgatgggtggcagtgaagaggagtttatgaaaatattggaccacttagaagtttcttgtaacaaaccttccacaaataaaactatgttgtggaattc

SEQ ID NO: 408362 - DNA, 120 bp, Artificial Sequence
  ENSG00000147874_21 (sequence is synthesized)
ttttcagatatcaagtggaattagttctaagagttttaaagataatgattttggcatattacacgaaactctcccggaagaagttggtcatctaagttttaatagttccagtagttcaga

SEQ ID NO: 408363 - DNA, 120 bp, Artificial Sequence
  ENSG00000147874_22 (sequence is synthesized)
ggccaattttaaactggagccaaatagtcctatgcatggtggcactcttctagaagatgttgtgggagggagacagactactccagaatcagactttaatttacaggctcttcgcagtag

SEQ ID NO: 408364 - DNA, 120 bp, Artificial Sequence
  ENSG00000147874_23 (sequence is synthesized)
atacgaggctctgaagaaatctctttccaagaaaagggaagaatcttacctctcgaattcccaaacacccgaaagacacaaaccagaattgagccctactccccaaaatgtacaaacaga

SEQ ID NO: 408365 - DNA, 120 bp, Artificial Sequence
  ENSG00000147874_24 (sequence is synthesized)
tgatacgcttaactttttggacacctgtgatttgcatactgagcatataaagccatctttacgcacgtccatcggtgaaagaaaacggtctctttcaccactaattaagttttctccagt

SEQ ID NO: 408366 - DNA, 120 bp, Artificial Sequence
  ENSG00000147874_25 (sequence is synthesized)
ggaacaaagattgagaaccacaatagcatgtagtcttggagaactacctaatttaaaggaagaagacattttgaataagagccttgatgcaaaagaaccaccgtctgacttgacaagatg

SEQ ID NO: 408367 - DNA, 120 bp, Artificial Sequence
  ENSG00000147874_26 (sequence is synthesized)
atgttggaagtgtaacactgtttttcaaggtttaaaaaaattcctaatgccttttagccttctttaatatttttaggtaaggaaagtatgtttggattttttcctctttgtaggtatatg

SEQ ID NO: 408368 - DNA, 120 bp, Artificial Sequence
  ENSG00000147874_27 (sequence is synthesized)
agattgaaatgtgaagtatttggacaacaaacgtcaagcaatgggaagccattttgatttcttgagtaatcttgtaagcattaagtgaatgacaaagtagtagtgtaacttatttcttat

SEQ ID NO: 408369 - DNA, 120 bp, Artificial Sequence
  ENSG00000147874_28 (sequence is synthesized)
gttataacttcagtcaattaatataaggatagtttttgttgtatgttcactaaatggttaatataatagccattgaatatactaatctttcatcttagagaactatacaacttttattgt

SEQ ID NO: 408370 - DNA, 120 bp, Artificial Sequence
  ENSG00000147874_29 (sequence is synthesized)
ttcttaatggaacattctggctaaccagaaaaagtgagaaaagtagtaccttgggatgtgtagtcaagatgacaaattttaagactggaaaagctctaaacaggcttaatgattcttcag

SEQ ID NO: 408371 - DNA, 120 bp, Artificial Sequence
  ENSG00000147874_30 (sequence is synthesized)
gtagaatgatcctgagaagtgatgtttgatggaataaagtgcatgtgatgattaagtgaagactggggcagaatgatttaaaaaaaggaaaaagatggaagatgagtagacacttgcaag

SEQ ID NO: 408372 - DNA, 120 bp, Artificial Sequence
  ENSG00000147874_31 (sequence is synthesized)
cttgcaaggaacactgtcaaactataaatccattcagtgggttgtataacatttatatttagtctaatttagactttgataatttaatgctacttttatattttaacaaaaatataaatt

SEQ ID NO: 408373 - DNA, 120 bp, Artificial Sequence
  ENSG00000147874_32 (sequence is synthesized)
cattagtctgttttgttgttgggtttttttgtgaggtactccctgttgggggaaaggaacaaggaacaaccatcagaatcccccagtccctacagaatagcctcacagtaacttgagaaa

SEQ ID NO: 408374 - DNA, 120 bp, Artificial Sequence
  ENSG00000147874_33 (sequence is synthesized)
actgaacttggggttaaataacttgtcacacttgcagtctcctgcctcactccttcaggtgccctgcctagaaaaagacttgtgtctagcatccaagtgaacacatactattgccctctg

SEQ ID NO: 408375 - DNA, 120 bp, Artificial Sequence
  ENSG00000147874_34 (sequence is synthesized)
tgaaccaggaggaatggaacaggcaatggaagggtgatagtacctacaataccctttgtagaccccatctcactaccatcaaaatcttgtccactagcccccaaaaaactggcaaggaaa

SEQ ID NO: 408376 - DNA, 120 bp, Artificial Sequence
  ENSG00000147874_35 (sequence is synthesized)
gaaggtggaggggaaatttatggaagtagatggcttaatagttatttcttttatcttgggctgcctttctctaagttggttgtcctgtcccagtgtgaagacccatctttttgtgagaaa

SEQ ID NO: 408377 - DNA, 120 bp, Artificial Sequence
  ENSG00000147874_36 (sequence is synthesized)
agacaaaagaaagcacatgtaactaccttctttgcaatggaaaaggagaaagaaaaaatcttctcctaagttgctgttttcttttattagttaataaaacaaatcagggactatgcaggt

SEQ ID NO: 408378 - DNA, 120 bp, Artificial Sequence
  ENSG00000147874_37 (sequence is synthesized)
ctatggggaaacctttagtctgctttaagaaaactcagtatctgaaaatcttaacttagcatgtgatactgtcttatcagcatctgcagaagtgccaaagccactgctagacacttaatg

SEQ ID NO: 408379 - DNA, 120 bp, Artificial Sequence
  ENSG00000147874_38 (sequence is synthesized)
tgtattatttcatttaattatattttaaatgtgcttccttggtaattcttaagctcgagaaagagtttgagaactgctgctaggaaatagagattcacatttaaccctgtggtactttta

SEQ ID NO: 408380 - DNA, 120 bp, Artificial Sequence
  ENSG00000147874_39 (sequence is synthesized)
agaagcaggtacgttgttgcatatatacttgggtagagattggtaactatctgatagggaagctcaagttggccacccaagtctgagaaacccttaattactgagaatcaaaagagcaga

SEQ ID NO: 408381 - DNA, 120 bp, Artificial Sequence
  ENSG00000147874_40 (sequence is synthesized)
atgtctgtagacattttggatttgtaaaaatcacattgttgagttatacctgtgatgggctgaaagtttttggcattctttcctgttcttcatatgccagtaccataaacaaaaagtatc

SEQ ID NO: 408382 - DNA, 120 bp, Artificial Sequence
  ENSG00000147874_41 (sequence is synthesized)
tcagatctgtcactttcttctcctaaaccaatgtgatggcagctttttgccttcagccttttccctatccagtatctcctacatagttaccttttgatcttaaggaactgttttgattgg

SEQ ID NO: 408383 - DNA, 120 bp, Artificial Sequence
  ENSG00000147874_42 (sequence is synthesized)
gtcacttccttgcctaaaattccattgattgttcattgttaattctaaaatagagttcaaatttaaaggcatgtaagttcccctgtaacggatttcctctactcccccttccgctgtaat

SEQ ID NO: 408384 - DNA, 120 bp, Artificial Sequence
  ENSG00000147874_43 (sequence is synthesized)
ctcccatttttttactgaaatgcttcagtgagcatgggtctttagaggtcttgatatacaattttcctgaagcaggaataccttgctttcctctactagtttaccacaattacagctctc

SEQ ID NO: 408385 - DNA, 120 bp, Artificial Sequence
  ENSG00000147874_44 (sequence is synthesized)
ttttaagcctcagaaaaaaatctcacttccgtcttgaagtcttaatccacgctttttatatccatgtgcctactccttctctgaaatctcctatggtttatctttttattcatttaatat

SEQ ID NO: 408386 - DNA, 120 bp, Artificial Sequence
  ENSG00000147874_45 (sequence is synthesized)
cccacgaattgattttattatatattttttatggttgcatgtggtctttctagttatagcaatatacacatacatgcataaatacatatacacctatgtaaatgtgtgttgggagtatgt

SEQ ID NO: 408387 - DNA, 120 bp, Artificial Sequence
  ENSG00000147874_46 (sequence is synthesized)
attcacacacatacatataccccaaggccatgtgtcatctttatcaatatttaagttttggaattgttttgtttgcctcctatatcatggaataaatggtaaagagggctaatttattac

SEQ ID NO: 408388 - DNA, 120 bp, Artificial Sequence
  ENSG00000147874_47 (sequence is synthesized)
tctaagtggatttcttattacattaatatcagacatatagaatgtactttgttttactatttgtaagatacaaaggtatataaactgacatacatcagcttgaaacctgagataatgcta

SEQ ID NO: 408389 - DNA, 120 bp, Artificial Sequence
  ENSG00000147874_48 (sequence is synthesized)
aaatgttctaattattttaaatgtttaaagaggacaaccatgtaatgttgctaaacatgaaaaatgtcatcaagtggaataaagaatagctgaagttaacatttgggggaaattgagctg

SEQ ID NO: 408390 - DNA, 120 bp, Artificial Sequence
  ENSG00000147874_49 (sequence is synthesized)
aaaacaaaaatatgagtattttgataccttttctttaccatgagactcttgactatgaagtcaaatttatctaaaggaaaaacaggaattctggagacctgtgtaaaagcagactattat

SEQ ID NO: 408391 - DNA, 120 bp, Artificial Sequence
  ENSG00000147874_50 (sequence is synthesized)
cttcctactgtgagagtactaaaattaaaatacgtttaatgacgttttcctcaatgtaaaagcattgaagtaaatgtttcttttatgttgcagatacatagttgctctagagatcacctt

SEQ ID NO: 408392 - DNA, 120 bp, Artificial Sequence
  ENSG00000147874_51 (sequence is synthesized)
tttctttatgcattgtgaatagcagtctgcatcctaagtttaaaatatttgagaatcctctatgggactctctgtaaatgttttaaatactgttgttttcaataaatattttatactatc

SEQ ID NO: 408393 - DNA, 120 bp, Artificial Sequence
  ENSG00000147874_52 (sequence is synthesized)
atattcacctgttgaagttttctctcaacttttgataaaaccagtacacaaagaatgctgcatgacctttattgttaatgtgctcccccttccttcatttaggatgaggggaatgatccc

SEQ ID NO: 408394 - DNA, 120 bp, Artificial Sequence
  ENSG00000147874_53 (sequence is synthesized)
tcactggacaggtcctttcagaatctctgtttatgtatatatagttacaattgatttgagacaggggtgggaaaaaaaagcccccccaatctgaagcttacaggttttataatacaaatg

SEQ ID NO: 408395 - DNA, 120 bp, Artificial Sequence
  ENSG00000147874_54 (sequence is synthesized)
actgaaaagtaaatgtcatcaaaatcttgcccagtggaaggtggtttttaaacacttgagaaacccaattttaaatatcatcactataatggtgtaatatctgggggtggggtgtagaaa

SEQ ID NO: 408396 - DNA, 120 bp, Artificial Sequence
  ENSG00000147874_55 (sequence is synthesized)
taaaagaagccaggtcagtgtattagtttcctagggctgccataacaaagcaccatcaagtgggtggcttagaacagcagaaatttattgtctctggagacagtaagttctagaggctag

SEQ ID NO: 408397 - DNA, 120 bp, Artificial Sequence
  ENSG00000147874_56 (sequence is synthesized)
atgtccaaaatcaaggtgttgacagggccatgttccctctgaagccactagaagaggatccttctttgcctcttctagcctctggtagcaccaggcattccttggcttgtggcagtgtaa

SEQ ID NO: 408398 - DNA, 120 bp, Artificial Sequence
  ENSG00000147874_57 (sequence is synthesized)
ttctaatctttgcctccattgtcacatggtattcttcccttgtgtgtgtattgtcttataaggacacagtcatattagctaattaatgggtcaccctactccagtatgacctcatcttac

SEQ ID NO: 408399 - DNA, 120 bp, Artificial Sequence
  ENSG00000147874_58 (sequence is synthesized)
ttagctaattatatctgtaatgaccacatttccaaataaggtcacattctgaggtactggggttagaacttcaacatatgtttttgggggtattcagttcataacagttagtattaataa

SEQ ID NO: 408400 - DNA, 120 bp, Artificial Sequence
  ENSG00000147874_59 (sequence is synthesized)
ttattgaagctaggtgatggatatattgagttaatcacagttctcttcacttttgtatgtttgaatgttttcctcataaaaggttaaaaaaattgctcttgtagctcattaagagagata

SEQ ID NO: 408401 - DNA, 120 bp, Artificial Sequence
  ENSG00000147874_60 (sequence is synthesized)
ctcattaagagagataaggatctggtgatacagattcattacatactctgatttgcccataatagttatacactgccatattgaaaagtatttggctgggcacagtggctcacacctgca

SEQ ID NO: 408402 - DNA, 120 bp, Artificial Sequence
  ENSG00000147874_61 (sequence is synthesized)
agtccgagatgggaggatcacttgaacccaggagttcgagactagcctcagcaacacagggagactatgtctctacaaaaaattaaacaattagctgggcacgttggcgcatgcctgtga

SEQ ID NO: 408403 - DNA, 86 bp, Artificial Sequence
  ENSG00000147874_62 (sequence is synthesized)
aattaaacaattagctgggcacgttggcgcatgcctgtgatcccaggtacaggagtttgaggctgaagtgagctgcgatcgtgcca

SEQ ID NO: 408404 - DNA, 120 bp, Artificial Sequence
  ENSG00000147883_0 (sequence is synthesized)
actctgccagagcgaggcggggcagtgaggactccgcgacgcgtccgcaccctgcggccagagcggctttgagctcggctgcgtccgcgctaggcgctttttcccagaagcaatccaggc

SEQ ID NO: 408405 - DNA, 120 bp, Artificial Sequence
  ENSG00000147883_1 (sequence is synthesized)
gcgcccgctggttcttgagcgccaggaaaagcccggagctaacgaccggccgctcggccactgcacggggccccaagccgcagaaggacgacgggagggtaatgaagctgagcccaggtc

SEQ ID NO: 408406 - DNA, 120 bp, Artificial Sequence
  ENSG00000147883_2 (sequence is synthesized)
tcctaggaaggagagagtgcgccggagcagcgtgggaaagaagggaagagtgtcgttaagtttacggccaacggtggattatccgggccgctgcgcgtctgggggctgcggaatgcgcga

SEQ ID NO: 408407 - DNA, 120 bp, Artificial Sequence
  ENSG00000147883_3 (sequence is synthesized)
ggagaacaagggcatgcccagtgggggcggcagcgatgagggtctggccagcgccgcggcgcggggactagtggagaaggtgcgacagctcctggaagccggcgcggatcccaacggagt

SEQ ID NO: 408408 - DNA, 120 bp, Artificial Sequence
  ENSG00000147883_4 (sequence is synthesized)
caaccgtttcgggaggcgcgcgatccaggtcatgatgatgggcagcgcccgcgtggcggagctgctgctgctccacggcgcggagcccaactgcgcagaccctgccactctcacccgacc

SEQ ID NO: 408409 - DNA, 120 bp, Artificial Sequence
  ENSG00000147883_5 (sequence is synthesized)
ggtgcatgatgctgcccgggagggcttcctggacacgctggtggtgctgcaccgggccggggcgcggctggacgtgcgcgatgcctggggtcgtctgcccgtggacttggccgaggagcg

SEQ ID NO: 408410 - DNA, 120 bp, Artificial Sequence
  ENSG00000147883_6 (sequence is synthesized)
gggccaccgcgacgttgcagggtacctgcgcacagccacgggggactgacgccaggttccccagccgcccacaacgactttattttcttacccaatttcccacccccacccacctaattc

SEQ ID NO: 408411 - DNA, 120 bp, Artificial Sequence
  ENSG00000147883_7 (sequence is synthesized)
gatgaaggctgccaacggggagcggcggaaagcctgtaagcctgcaagcctgtctgagactcacaggaaggaggagccgaccgggaataaccttccatacatttttttctttgtcttatc

SEQ ID NO: 408412 - DNA, 120 bp, Artificial Sequence
  ENSG00000147883_8 (sequence is synthesized)
tggccctcgacactcaccatgaagcgaaacacagagaagcggatttccagggatatttaggagtgtgtgacattccaggggtcgtttgcttttcagggttttctgagggaaagtgcatat

SEQ ID NO: 408413 - DNA, 120 bp, Artificial Sequence
  ENSG00000147883_9 (sequence is synthesized)
gaaatccttgactggacctggtggctacgaatcttccgatggatgaatctcccactccagcgctgagtgggagaaggcagtgattagcacttgggtgacggcagtcgatgcgttcactcc

SEQ ID NO: 408414 - DNA, 120 bp, Artificial Sequence
  ENSG00000147883_10 (sequence is synthesized)
aatgtctgctgaggagttatggtgaacccacaacttaggccctagcggcagaaaggaaaacctgaagactgaggacaaagtggaggagggccgaggtgggcttcagtaagtccccggcgg

SEQ ID NO: 408415 - DNA, 120 bp, Artificial Sequence
  ENSG00000147883_11 (sequence is synthesized)
cgctttagtttgagcgcatggcaagtcacatgcgtaaacgacactctctggaagccctggagaccctcgcccaactccaccagatagcagaggggtaagagaggatgtgcaagcgacgac

SEQ ID NO: 408416 - DNA, 120 bp, Artificial Sequence
  ENSG00000147883_12 (sequence is synthesized)
agatgctaaaatccctggatcacgacgctgcagagcacctttgcacaggatgctggcctttgctcttactacactgaggagagattcccgcgggttccgcaggcagactacacaggatga

SEQ ID NO: 408417 - DNA, 88 bp, Artificial Sequence
  ENSG00000147883_13 (sequence is synthesized)
gagattcccgcgggttccgcaggcagactacacaggatgaggtggtggagtggagtgagagcaattgtaacggttaactgtaacgttt

SEQ ID NO: 408418 - DNA, 120 bp, Artificial Sequence
  ENSG00000147883_14 (sequence is synthesized)
tttgattttgtgatattttgtactttttagttgttcagcaactgtcttatttaatggggagattttaagtaacataactagtggctctcagttaaaatgtgaggaagaactacagctctt

SEQ ID NO: 408419 - DNA, 120 bp, Artificial Sequence
  ENSG00000147883_15 (sequence is synthesized)
aaatgtagcaatggcactgttgcaaactcagtgcaaacgcctagattgctttcttcttaacctatttatttctttgttaaatttttctgattgtttcctttatagagtgtctcagggtgc

SEQ ID NO: 408420 - DNA, 120 bp, Artificial Sequence
  ENSG00000147883_16 (sequence is synthesized)
agaaatattccaaatgtcttttagaagatagatgcacttatgcagtaaattatcttgggatagttcccaaaagattgctgaaaaagtagattgagtataaaaacttgaaaatatatgatg

SEQ ID NO: 408421 - DNA, 120 bp, Artificial Sequence
  ENSG00000147883_17 (sequence is synthesized)
gctcgtgggatgtcctactatcactgaacaaactaaaggtgcactgctttgggatttaatttccagggttgcttgatcattatatcattggaacaactgatacttcactactttaataaa

SEQ ID NO: 408422 - DNA, 120 bp, Artificial Sequence
  ENSG00000147883_18 (sequence is synthesized)
gaattaacagagattgaactccaagaggtgggtaatttggtttaaaaatacatgttcatgggtttaccactaactcctgagaaatgttaaaggttcacaggggttcccttctctcaatgt

SEQ ID NO: 408423 - DNA, 120 bp, Artificial Sequence
  ENSG00000147883_19 (sequence is synthesized)
ttgtaataattgctcataagcaataccagcaattcataaaaactgcttacttatgccatagaaaattaaacacaaagtgtatacatgtattatgcttctaaatgctcattctaccagata

SEQ ID NO: 408424 - DNA, 120 bp, Artificial Sequence
  ENSG00000147883_20 (sequence is synthesized)
cacatttaaaagagaaaaaaggaacagaaacaagtcatttgagagtggagacttataagaaggagtacatttgagttgaatacacaaatctttacttctctaccaattcctattcccaaa

SEQ ID NO: 408425 - DNA, 120 bp, Artificial Sequence
  ENSG00000147883_21 (sequence is synthesized)
atgaacatattactggggaaagttagttgagaatcagagcatatgttattggggaaaggatatgtttattgacacataatctgtaccaggtatgcattaaaatatatttgttaatttaat

SEQ ID NO: 408426 - DNA, 120 bp, Artificial Sequence
  ENSG00000147883_22 (sequence is synthesized)
atttaaacctgagagataggtattgtttcccagatgaggacaatgaggcaaagaaatatcaagtaacttgccaaaggttacaagatattcattccatggatgcacaaagaagtgcatcta

SEQ ID NO: 408427 - DNA, 120 bp, Artificial Sequence
  ENSG00000147883_23 (sequence is synthesized)
gttccacagctgattatggttgtcttgcttttcttcccattgcaccagcttgtcctccaaaatcatgaatgatacacatgaagataactttttttaaaaaaaagcagaaatacacaatga

SEQ ID NO: 408428 - DNA, 120 bp, Artificial Sequence
  ENSG00000147883_24 (sequence is synthesized)
tctcccttgtaagctcctaaggtggcttttctttctctaacttctagtaaatataaacggtttgtttgaaaactattttaaaatgtcaacaatatggagaataaccccccccaacacacc

SEQ ID NO: 408429 - DNA, 120 bp, Artificial Sequence
  ENSG00000147883_25 (sequence is synthesized)
tataaaaacccaaatttttggaacaaagataatggaacctccattttcaaactgaagcacagggacagaaaatatatttctagttatcacttaagcactcaatcattagaggctacaaga

SEQ ID NO: 408430 - DNA, 120 bp, Artificial Sequence
  ENSG00000147883_26 (sequence is synthesized)
aagaataatatttttaaagttacagtattttacaattattagaaaacattctatataaaagaagtcagttgatactttaaaatctcccatttggtttataaaatcccttaatttgacctc

SEQ ID NO: 408431 - DNA, 120 bp, Artificial Sequence
  ENSG00000147883_27 (sequence is synthesized)
tcttaaattccaagatgtttaaatttgctagttgcattatactgggtcatgaaaaattatcccttgaaatagatatgaaacatgttacttcatttctggtttaaataacttgtggaatct

SEQ ID NO: 408432 - DNA, 120 bp, Artificial Sequence
  ENSG00000147883_28 (sequence is synthesized)
ataacttgtggaatctttcctaatgacaacctgatattaagggaaactaaagaaaatgttattgtggatcccacagtactatattacactgttttttttgtttgttttgttagttttttt

SEQ ID NO: 408433 - DNA, 120 bp, Artificial Sequence
  ENSG00000147883_29 (sequence is synthesized)
caaacattattgggtatcaattaccacctggttgtattgaaatagtaacttatcaatgccatgtaaaaattaattccattttcgaagccacctggcagacaggtttagctgtttcatcag

SEQ ID NO: 408434 - DNA, 120 bp, Artificial Sequence
  ENSG00000147883_30 (sequence is synthesized)
cagcctaatatatactgttaaatttgttaaggatttcactttgaaggatacatgcaaaacatatagttactattttcatgagtcctgcttctagctccattgtggaatacagaaaattaa

SEQ ID NO: 408435 - DNA, 120 bp, Artificial Sequence
  ENSG00000147883_31 (sequence is synthesized)
atatacctgttaagttcgtatctaaacctaagacattaccaaggtttgtacaaattctactacctgacatttattccaagaagatctggaaagttaaataaatttataaatttaataaca

SEQ ID NO: 408436 - DNA, 120 bp, Artificial Sequence
  ENSG00000147883_32 (sequence is synthesized)
tggggccccagggcctcgccggcagggggcgcgcgaacgcggggcgcggcctcggcggatcggggctggaacctagatcgccgatgtagatttgtacaggagtctccgttggccggaggt

SEQ ID NO: 408437 - DNA, 120 bp, Artificial Sequence
  ENSG00000147885_0 (sequence is synthesized)
atcccaatggccctgtccttttctttactgatggccgtgctggtgctcagctacaaatccatctgttctctgggctgtgatctgcctcagactcacagcctgggtaataggagggccttg

SEQ ID NO: 408438 - DNA, 120 bp, Artificial Sequence
  ENSG00000147885_1 (sequence is synthesized)
atactcctggcacaaatgggaagaatctctcatttctcctgcctgaaggacagatatgatttcggattcccccaggaggtgtttgatggcaaccagttccagaaggctcaagccatctct

SEQ ID NO: 408439 - DNA, 120 bp, Artificial Sequence
  ENSG00000147885_2 (sequence is synthesized)
gccttccatgagatgatccagcagaccttcaatctcttcagcacaaaggattcatctgctgcttgggatgagaccctcctagacaaattctacattgaacttttccagcaactgaatgac

SEQ ID NO: 408440 - DNA, 120 bp, Artificial Sequence
  ENSG00000147885_3 (sequence is synthesized)
aggttgtcagagcagaaatcatgagatccttctctttttcaacaaacttgcaaaaaggattaagaaggaaggattgaaaactcattcaacatggaaatgatcctcattgattaatacatc

SEQ ID NO: 408441 - DNA, 120 bp, Artificial Sequence
  ENSG00000147885_4 (sequence is synthesized)
ctcattcaacatggaaatgatcctcattgattaatacatcatctcacactttcatgagttcttccatttcaaagactcacttctataaccaccacaagttgaatcaaaattttcaaatgt

SEQ ID NO: 408442 - DNA, 120 bp, Artificial Sequence
  ENSG00000147885_5 (sequence is synthesized)
tttcaggagtgtaaagaagcatcgtgtttacctgtgcaggcactagtcctttacagatgaccatgctgatgtctctattcatctatttatttaaatatttatttatttaactatttttaa

SEQ ID NO: 408443 - DNA, 120 bp, Artificial Sequence
  ENSG00000147889_0 (sequence is synthesized)
cccaacctggggcgacttcaggggtgccacattcgctaagtgctcggagttaatagcacctcctccgagcactcgctcacggcgtccccttgcctggaaagataccgcggtccctccaga

SEQ ID NO: 408444 - DNA, 120 bp, Artificial Sequence
  ENSG00000147889_1 (sequence is synthesized)
ggatttgagggacagggtcggagggggctcttccgccagcaccggaggaagaaagaggaggggctggctggtcaccagagggtggggcggaccgcgtgcgctcggcggctgcggagaggg

SEQ ID NO: 408445 - DNA, 120 bp, Artificial Sequence
  ENSG00000147889_2 (sequence is synthesized)
ggagagcaggcagcgggcggcggggagcagcatggagccggcggcggggagcagcatggagccttcggctgactggctggccacggccgcggcccggggtcgggtagaggaggtgcgggc

SEQ ID NO: 408446 - DNA, 120 bp, Artificial Sequence
  ENSG00000147889_3 (sequence is synthesized)
gctgctggaggcgggggcgctgcccaacgcaccgaatagttacggtcggaggccgatccaggtcatgatgatgggcagcgcccgagtggcggagctgctgctgctccacggcgcggagcc

SEQ ID NO: 408447 - DNA, 120 bp, Artificial Sequence
  ENSG00000147889_4 (sequence is synthesized)
caactgcgccgaccccgccactctcacccgacccgtgcacgacgctgcccgggagggcttcctggacacgctggtggtgctgcaccgggccggggcgcggctggacgtgcgcgatgcctg

SEQ ID NO: 408448 - DNA, 120 bp, Artificial Sequence
  ENSG00000147889_5 (sequence is synthesized)
cctggctgaggagctgggccatcgcgatgtcgcacggtacctgcgcgcggctgcggggggcaccagaggcagtaaccatgcccgcatagatgccgcggaaggtccctcagacatccccga

SEQ ID NO: 408449 - DNA, 120 bp, Artificial Sequence
  ENSG00000147889_6 (sequence is synthesized)
ttgaaagaaccagagaggctctgagaaacctcgggaaacttagatcatcagtcaccgaaggtcctacagggccacaactgcccccgccacaacccaccccgctttcgtagttttcattta

SEQ ID NO: 408450 - DNA, 120 bp, Artificial Sequence
  ENSG00000147889_7 (sequence is synthesized)
gaaaatagagcttttaaaaatgtcctgccttttaacgtagatatatgccttcccccactaccgtaaatgtccatttatatcattttttatatattcttataaaaatgtaaaaaagaaaaa

SEQ ID NO: 408451 - DNA, 120 bp, Artificial Sequence
  ENSG00000147889_8 (sequence is synthesized)
caccgcttctgccttttcactgtgttggagttttctggagtgagcactcacgccctaagcgcacattcatgtgggcatttcttgcgagcctcgcagcctccggaagctgtcgacttcatg

SEQ ID NO: 408452 - DNA, 120 bp, Artificial Sequence
  ENSG00000147889_9 (sequence is synthesized)
acaagcattttgtgaactagggaagctcaggggggttactggcttctcttgagtcacactgctagcaaatggcagaaccaaagctcaaataaaaataaaataattttcattcattcactc

SEQ ID NO: 408453 - DNA, 120 bp, Artificial Sequence
  ENSG00000147889_10 (sequence is synthesized)
tttgtagaagcaggcatgcgtagggaagctacgggattccgccgaggagcgccagagcctgaggcgccctttggttatcgcaagctggctggctcactccgcaccaggtgcaaaagatgc

SEQ ID NO: 408454 - DNA, 120 bp, Artificial Sequence
  ENSG00000147889_11 (sequence is synthesized)
ggcaggagtggcgctgctcacctctggtgccaaagggcggcgcagcggctgccgagctcggccctggaggcggcgagaacatggtgcgcaggttcttggtgaccctccggattcggcgcg

SEQ ID NO: 408455 - DNA, 120 bp, Artificial Sequence
  ENSG00000147889_12 (sequence is synthesized)
cgtgcggcccgccgcgagtgagggttttcgtggttcacatcccgcggctcacgggggagtgggcagcgccaggggcgcccgccgctgtggccctcgtgctgatgctactgaggagccagc

SEQ ID NO: 408456 - DNA, 120 bp, Artificial Sequence
  ENSG00000147889_13 (sequence is synthesized)
cgcgcgcgcctccctacgggcgcctccggcagcccttcccgcgtgcgcagggctcagagccgttccgagatcttggaggtccgggtgggagtgggggtggggtgggggtgggggtgaagg

SEQ ID NO: 408457 - DNA, 120 bp, Artificial Sequence
  ENSG00000147889_14 (sequence is synthesized)
ttccagggctgagcaaaaagcctgaggagccaagtgggagagggagtaaaactactgaattgggccacaagcaaatgaataaactgaacgactcttaaccaaacctaatatatttaatcc

SEQ ID NO: 408458 - DNA, 120 bp, Artificial Sequence
  ENSG00000147889_15 (sequence is synthesized)
gtgcgtggcatcatctggagatctctcgatctcggctcttctgcacaactcaactaatctgaccctcctcagctaatctgaccctccgctttatgcggtagagttttccagagctgcccc

SEQ ID NO: 408459 - DNA, 120 bp, Artificial Sequence
  ENSG00000147889_16 (sequence is synthesized)
cttgtgcaagagatcgctgagcgatgaagttacagctagcatccaggtcccgggaggtgaagaaggagacttcggctccagttacagctagcatccgggtcccgatttagaaggagctgc

SEQ ID NO: 408460 - DNA, 120 bp, Artificial Sequence
  ENSG00000147889_17 (sequence is synthesized)
aggggtaattagacacctggggcttgtgtgggggtctgcttggcggtgagggggctctacacaagcttcctttccgtcatgccggcccccaccctggctctgaccattctgttctctctg

SEQ ID NO: 408461 - DNA, 120 bp, Artificial Sequence
  ENSG00000147889_18 (sequence is synthesized)
ccgaatagttacggtcggaggccgatccaggtgggtagagggtctgcagcgggagcaggggatggcgggcgactctggaggacgaagtttgcaggggaattggaatcaggtagcgcttcg

SEQ ID NO: 408462 - DNA, 120 bp, Artificial Sequence
  ENSG00000147889_19 (sequence is synthesized)
attctccggaaaaaggggaggcttcctggggagttttcagaaggggtttgtaatcacagacctcctcctggcgacgccctgggggcttgggaagccaaggaagaggaatgaggagccacg

SEQ ID NO: 408463 - DNA, 120 bp, Artificial Sequence
  ENSG00000147889_20 (sequence is synthesized)
ggttaaaaccgaaaataaaaatgggctagacacaaaggactcggtgcttgtcccagccaggcgccctcggcgacgcgggcagctgggaggggaatgggcgcccggacccagctgggaccc

SEQ ID NO: 408464 - DNA, 120 bp, Artificial Sequence
  ENSG00000147889_21 (sequence is synthesized)
ccgggtgcgactccacctacctagtccggcgccaggccgggtcgacagctccggcagcgccagcgccgcgccgtgtccagatgtcgcgtcagaggcgtgcagcggtttagtttaatttcg

SEQ ID NO: 408465 - DNA, 120 bp, Artificial Sequence
  ENSG00000147889_22 (sequence is synthesized)
cttgttttccaaatctagaagaggagcggagcggcttttagttcaaaactgacattcagcctcctgattggcggatagagcaatgagatgacctcgctttcctttcttcctttttcattt

SEQ ID NO: 408466 - DNA, 120 bp, Artificial Sequence
  ENSG00000147889_23 (sequence is synthesized)
ggaattcattgtgtactgaagaatggatagagaactcaagaaggaaattggaaactggaagcaaatgtaggggtcatgatgatgggcagcgcccgagtggcggagctgctgctgctccac

SEQ ID NO: 408467 - DNA, 120 bp, Artificial Sequence
  ENSG00000147889_24 (sequence is synthesized)
gcacagaaagttcagcccgggagaccagtctccggtcttgcctcagctcacgcgccaatcggtgggacggcctgagtctccctatcgccctgccccgccagggcggcaaatgggaaataa

SEQ ID NO: 408468 - DNA, 120 bp, Artificial Sequence
  ENSG00000147889_25 (sequence is synthesized)
tcgacgaggggagccaggaataaaataaggggaataggggagcggggacgcgagcagcaccagaatccgcgggagcgcggctgttcctgcccaggctaggaggaggaggagataaccgcc

SEQ ID NO: 408469 - DNA, 120 bp, Artificial Sequence
  ENSG00000147889_26 (sequence is synthesized)
gacttagacatgtggttctcgcagtaccattgaacctggacctcccttcacacagcccctcaatcgtgggaaactgaggcgaacagagcttctaaacccacctcagaagtcagtcatgat

SEQ ID NO: 408470 - DNA, 120 bp, Artificial Sequence
  ENSG00000147889_27 (sequence is synthesized)
ggggagcggggacgcgagcagcaccagaatccgcgggagcgcggctgttcctgataattcgtctctagcccaggctaggaggaggaggagataaccgccggtggaggcttccccattcgg

SEQ ID NO: 408471 - DNA, 120 bp, Artificial Sequence
  ENSG00000147889_28 (sequence is synthesized)
agacgctgcggatcccagaggcttaactggcagctggaacgaggtcctccaacaagaatttagacgctaggtccaattatcactccaccgcgcgcactttccgcaggagcgatgtgatcc

SEQ ID NO: 408472 - DNA, 120 bp, Artificial Sequence
  ENSG00000147889_29 (sequence is synthesized)
acctggggttccacgtggaagacgattgggatttcactggccgcggtgggggtgggagcagacagagtctgagtggggttagtggactcgagacgaaaggcaggacatgacagaaggcaa

SEQ ID NO: 408473 - DNA, 120 bp, Artificial Sequence
  ENSG00000147889_30 (sequence is synthesized)
ctctgggtcacctctccagcttggaactggctaggccttgttttggaggggatgggtagatgaaaagtgagtcagggttacccggaggaaccacggggaaagtgcgcttctgagactctt

SEQ ID NO: 408474 - DNA, 120 bp, Artificial Sequence
  ENSG00000147889_31 (sequence is synthesized)
gacagccatttcgttcccttccaagccagatggagacccaagagtgttgaaaggccacgacttccctcagtttctccatctgggggtgcaggatggtatagagagtggcccgtagtattt

SEQ ID NO: 408475 - DNA, 120 bp, Artificial Sequence
  ENSG00000147889_32 (sequence is synthesized)
ttccagtgacgatgtctctccattgttttcttcttatattgcagctttccccatgtttgaaaattttcttttcaaatgaaatcattgattagaataaaaaaaagtaagtagctattaaaa

SEQ ID NO: 408476 - DNA, 120 bp, Artificial Sequence
  ENSG00000147894_0 (sequence is synthesized)
gcgcaggcggtggcgagtggatatctccggagcatttggataatgtgacagttggaatgcagtgatgtcgactctttgcccaccgccatctccagctgttgccaagacagagattgcttt

SEQ ID NO: 408477 - DNA, 120 bp, Artificial Sequence
  ENSG00000147894_1 (sequence is synthesized)
aagtggcaaatcacctttattagcagctacttttgcttactgggacaatattcttggtcctagagtaaggcacatttgggctccaaagacagaacaggtacttctcagtgatggagaaat

SEQ ID NO: 408478 - DNA, 120 bp, Artificial Sequence
  ENSG00000147894_2 (sequence is synthesized)
aacttttcttgccaaccacactctaaatggagaaatccttcgaaatgcagagagtggtgctatagatgtaaagttttttgtcttgtctgaaaagggagtgattattgtttcattaatctt

SEQ ID NO: 408479 - DNA, 120 bp, Artificial Sequence
  ENSG00000147894_3 (sequence is synthesized)
tgatggaaactggaatggggatcgcagcacatatggactatcaattatacttccacagacagaacttagtttctacctcccacttcatagagtgtgtgttgatagattaacacatataat

SEQ ID NO: 408480 - DNA, 120 bp, Artificial Sequence
  ENSG00000147894_4 (sequence is synthesized)
ccggaaaggaagaatatggatgcataaggaaagacaagaaaatgtccagaagattatcttagaaggcacagagagaatggaagatcagggtcagagtattattccaatgcttactggaga

SEQ ID NO: 408481 - DNA, 120 bp, Artificial Sequence
  ENSG00000147894_5 (sequence is synthesized)
agtgattcctgtaatggaactgctttcatctatgaaatcacacagtgttcctgaagaaatagatatagctgatacagtactcaatgatgatgatattggtgacagctgtcatgaaggctt

SEQ ID NO: 408482 - DNA, 120 bp, Artificial Sequence
  ENSG00000147894_6 (sequence is synthesized)
tcttctcaatgccatcagctcacacttgcaaacctgtggctgttccgttgtagtaggtagcagtgcagagaaagtaaataagatagtcagaacattatgcctttttctgactccagcaga

SEQ ID NO: 408483 - DNA, 120 bp, Artificial Sequence
  ENSG00000147894_7 (sequence is synthesized)
gagaaaatgctccaggttatgtgaagcagaatcatcatttaaatatgagtcagggctctttgtacaaggcctgctaaaggattcaactggaagctttgtgctgcctttccggcaagtcat

SEQ ID NO: 408484 - DNA, 120 bp, Artificial Sequence
  ENSG00000147894_8 (sequence is synthesized)
gtatgctccatatcccaccacacacatagatgtggatgtcaatactgtgaagcagatgccaccctgtcatgaacatatttataatcagcgtagatacatgagatccgagctgacagcctt

SEQ ID NO: 408485 - DNA, 120 bp, Artificial Sequence
  ENSG00000147894_9 (sequence is synthesized)
ctggagagccacttcagaagaagacatggctcaggatacgatcatctacactgacgaaagctttactcctgatttgaatatttttcaagatgtcttacacagagacactctagtgaaagc

SEQ ID NO: 408486 - DNA, 120 bp, Artificial Sequence
  ENSG00000147894_10 (sequence is synthesized)
cttcctggatcaggtctttcagctgaaacctggcttatctctcagaagtactttccttgcacagtttctacttgtccttcacagaaaagccttgacactaataaaatatatagaagacga

SEQ ID NO: 408487 - DNA, 120 bp, Artificial Sequence
  ENSG00000147894_11 (sequence is synthesized)
tacgcagaagggaaaaaagccctttaaatctcttcggaacctgaagatagaccttgatttaacagcagagggcgatcttaacataataatggctctggctgagaaaattaaaccaggcct

SEQ ID NO: 408488 - DNA, 120 bp, Artificial Sequence
  ENSG00000147894_12 (sequence is synthesized)
acactcttttatctttggaagacctttctacactagtgtgcaagaacgagatgttctaatgactttttaaatgtgtaacttaataagcctattccatcacaatcatgatcgctggtaaag

SEQ ID NO: 408489 - DNA, 120 bp, Artificial Sequence
  ENSG00000147894_13 (sequence is synthesized)
actacagttctcacaagagcctgtgaggggatgtcaggtgcatcattacattgggtgtctcttttcctagatttatgcttttgggatacagacctatgtttacaatataataaatattat

SEQ ID NO: 408490 - DNA, 120 bp, Artificial Sequence
  ENSG00000147894_14 (sequence is synthesized)
tgctatcttttaaagatataataataggatgtaaacttgaccacaactactgtttttttgaaatacatgattcatggtttacatgtgtcaaggtgaaatctgagttggcttttacagata

SEQ ID NO: 408491 - DNA, 120 bp, Artificial Sequence
  ENSG00000147894_15 (sequence is synthesized)
gttgactttctatcttttggcattctttggtgtgtagaattactgtaatacttctgcaatcaactgaaaactagagcctttaaatgatttcaattccacagaaagaaagtgagcttgaac

SEQ ID NO: 408492 - DNA, 120 bp, Artificial Sequence
  ENSG00000147894_16 (sequence is synthesized)
ataggatgagctttagaaagaaaattgatcaagcagatgtttaattggaattgattattagatcctactttgtggatttagtccctgggattcagtctgtagaaatgtctaatagttctc

SEQ ID NO: 408493 - DNA, 120 bp, Artificial Sequence
  ENSG00000147894_17 (sequence is synthesized)
tatagtccttgttcctggtgaaccacagttagggtgttttgtttattttattgttcttgctattgttgatattctatgtagttgagctctgtaaaaggaaattgtattttatgttttagt

SEQ ID NO: 408494 - DNA, 120 bp, Artificial Sequence
  ENSG00000147894_18 (sequence is synthesized)
aattgttgccaactttttaaattaattttcattatttttgagccaaattgaaatgtgcacctcctgtgccttttttctccttagaaaatctaattacttggaacaagttcagatttcact

SEQ ID NO: 408495 - DNA, 120 bp, Artificial Sequence
  ENSG00000147894_19 (sequence is synthesized)
ggtcagtcattttcatcttgttttcttcttgctaagtcttaccatgtacctgctttggcaatcattgcaactctgagattataaaatgccttagagaatatactaactaataagatcttt

SEQ ID NO: 408496 - DNA, 120 bp, Artificial Sequence
  ENSG00000147894_20 (sequence is synthesized)
ttttcagaaacagaaaatagttccttgagtacttccttcttgcatttctgcctatgtttttgaagttgttgctgtttgcctgcaataggctataaggaatagcaggagaaattttactga

SEQ ID NO: 408497 - DNA, 120 bp, Artificial Sequence
  ENSG00000147894_21 (sequence is synthesized)
agtgctgttttcctaggtgctactttggcagagctaagttatcttttgttttcttaatgcgtttggaccattttgctggctataaaataactgattaatataattctaacacaatgttga

SEQ ID NO: 408498 - DNA, 120 bp, Artificial Sequence
  ENSG00000147894_22 (sequence is synthesized)
cattgtagttacacaaacacaaataaatattttatttaaaattctggaagtaatataaaagggaaaatatatttataagaaagggataaaggtaatagagcccttctgccccccacccac

SEQ ID NO: 408499 - DNA, 120 bp, Artificial Sequence
  ENSG00000147894_23 (sequence is synthesized)
caaatttacacaacaaaatgacatgttcgaatgtgaaaggtcataatagctttcccatcatgaatcagaaagatgtggacagcttgatgttttagacaaccactgaactagatgactgtt

SEQ ID NO: 408500 - DNA, 120 bp, Artificial Sequence
  ENSG00000147894_24 (sequence is synthesized)
gtactgtagctcagtcatttaaaaaatatataaatactaccttgtagtgtcccatactgtgttttttacatggtagattcttatttaagtgctaactggttattttctttggctggttta

SEQ ID NO: 408501 - DNA, 120 bp, Artificial Sequence
  ENSG00000147894_25 (sequence is synthesized)
ttgtactgttatacagaatgtaagttgtacagtgaaataagttattaaagcatgtgtaaacattgttatatatcttttctcctaaatggagaattttgaataaaatatatttgaaatttt

SEQ ID NO: 408502 - DNA, 120 bp, Artificial Sequence
  ENSG00000147894_26 (sequence is synthesized)
acgtaacctacggtgtcccgctaggaaagagaggtgcgtcaaacagcgacaagttccgcccacgtaaaagatgacgcttggtgtgtcagccgtccctgctgcccggttgcttctcttttg

SEQ ID NO: 408503 - DNA, 120 bp, Artificial Sequence
  ENSG00000147894_27 (sequence is synthesized)
tttgaactgttgcttaaatttgtgttatttttcactcattatatttctatatatatttggtgttattccatttgctatttaaagaaaccgagtttccatcccagacaagaaatcatggcc

SEQ ID NO: 408504 - DNA, 120 bp, Artificial Sequence
  ENSG00000147894_28 (sequence is synthesized)
ccttgcttgattctggtttcttgttttacttctcattaaagctaacagaatcctttcatattaagttgtactgtagatgaacttaagttatttaggcgtagaacaaaattattcatattt

SEQ ID NO: 408505 - DNA, 120 bp, Artificial Sequence
  ENSG00000147894_29 (sequence is synthesized)
atactgatctttttccatccagcagtggagtttagtacttaagagtttgtgcccttaaaccagactccctggattaatgctgtgtacccgtgggcaaggtgcctgaattctctatacacc

SEQ ID NO: 408506 - DNA, 120 bp, Artificial Sequence
  ENSG00000147894_30 (sequence is synthesized)
tatttcctcatctgtaaaatggcaataatagtaatagtacctaatgtgtagggttgttataagcattgagtaagataaataatataaagcacttagaacagtgcctggaacataaaaaca

SEQ ID NO: 408507 - DNA, 120 bp, Artificial Sequence
  ENSG00000147894_31 (sequence is synthesized)
cttaataatagctcatagctaacatttcctatttacatttcttctagaaatagccagtatttgttgagtgcctacatgttagttcctttactagttgctttacatgtattatcttatatt

SEQ ID NO: 408508 - DNA, 120 bp, Artificial Sequence
  ENSG00000147894_32 (sequence is synthesized)
ctgttttaaagtttcttcacagttacagattttcatgaaattttacttttaataaaagagaagtaaaagtataaagtattcacttttatgttcacagtcttttcctttaggctcatgatg

SEQ ID NO: 408509 - DNA, 120 bp, Artificial Sequence
  ENSG00000147894_33 (sequence is synthesized)
gagtatcagaggcatgagtgtgtttaacctaagagccttaatggcttgaatcagaagcactttagtcctgtatctgttcagtgtcagcctttcatacatcattttaaatcccatttgact

SEQ ID NO: 408510 - DNA, 120 bp, Artificial Sequence
  ENSG00000147894_34 (sequence is synthesized)
ttaagtaagtcacttaatctctctacatgtcaatttcttcagctataaaatgatggtatttcaataaataaatacattaattaaatgatattatactgactaattgggctgttttaaggc

SEQ ID NO: 408511 - DNA, 120 bp, Artificial Sequence
  ENSG00000147894_35 (sequence is synthesized)
gaactctggcttatatcatccttgcttgctgacctcaaggtccatgtataaattctcagagaagaagccctctggttggtgatgcttggaacatgccctggagggtgggccccttgaagt

SEQ ID NO: 408512 - DNA, 120 bp, Artificial Sequence
  ENSG00000147894_36 (sequence is synthesized)
ggagcttgctggaaccacatgggctggagcaaggcgctagggccagaagagagaggtaggcagggctgctggccaggcactcttcaccaagacaaggcaagaggaggggcatgattgagg

SEQ ID NO: 408513 - DNA, 120 bp, Artificial Sequence
  ENSG00000147894_37 (sequence is synthesized)
cagtgatacagaaagcagacagtagaggtcgtggcaagtgtgccgttacttgctacctgtggttgatgggagagtcacaccacatttaggaggagagaatccatttgccacttctgacaa

SEQ ID NO: 408514 - DNA, 120 bp, Artificial Sequence
  ENSG00000147894_38 (sequence is synthesized)
tgccacaagaatcacatatttcatccagaggttgaatttggcccatgctgagctttaaaatacagagctgtcttggaacaatggctcagtacattcatttggtgtccaacaaagcctgcc

SEQ ID NO: 408515 - DNA, 120 bp, Artificial Sequence
  ENSG00000147894_39 (sequence is synthesized)
tctgttgccttccctctctctgtgtgcccttcaagatcttcattgtgctttggggagagaaagagaaaatgtcatatcagggtagctcaccccatgtgtcctggactcaggaaaagagta

SEQ ID NO: 408516 - DNA, 120 bp, Artificial Sequence
  ENSG00000147894_40 (sequence is synthesized)
agactgatgatatatcatggattgtcatttaaatggtaggttgcaattaaaatgatctagtagtataaggaggcaatgtaatctcatcaaattgctaagacaccttgtggcaacagtgag

SEQ ID NO: 408517 - DNA, 120 bp, Artificial Sequence
  ENSG00000147894_41 (sequence is synthesized)
tttgaaataaactgagtaagaatcatttatcagtttattttgatagctcggaaataccagtgtcagtagtgtataaatggttttgagaatatattaaaatcagatatataaaaaaaatta

SEQ ID NO: 408518 - DNA, 120 bp, Artificial Sequence
  ENSG00000147894_42 (sequence is synthesized)
ctcttctatttcccaatgttatctttaacaaatctgaagatagtcatgtacttttggtagtagttccaaagaaatgttatttgtttattcatcttgatttcattgtcttcgctttccttc

SEQ ID NO: 408519 - DNA, 120 bp, Artificial Sequence
  ENSG00000147894_43 (sequence is synthesized)
taaatctgtcccttctagggagctattgggattaagtggtcattgattattatactttattcagtaatgtttctgaccctttccttcagtgctacttgagttaattaaggattaatgaac

SEQ ID NO: 408520 - DNA, 120 bp, Artificial Sequence
  ENSG00000147894_44 (sequence is synthesized)
agttacatttccaagcattagctaataaactaaaggattttgcacttttcttcactgaccattagttagaaagagttcagagataagtatgtgtatctttcaatttcagcaaacctaatt

SEQ ID NO: 408521 - DNA, 120 bp, Artificial Sequence
  ENSG00000147894_45 (sequence is synthesized)
ttttaaaaaaagttttacataggaaatatgttggaaatgatactttacaaagatattcataatttttttttgtaatcagctactttgtatatttacatgagccttaatttatatttctca

SEQ ID NO: 408522 - DNA, 120 bp, Artificial Sequence
  ENSG00000147894_46 (sequence is synthesized)
tataaccatttatgagagcttagtatacctgtgtcattatattgcatctacgaactagtgaccttattccttctgttacctcaaacaggtggctttccatctgtgatctccaaagcctta

SEQ ID NO: 408523 - DNA, 120 bp, Artificial Sequence
  ENSG00000147894_47 (sequence is synthesized)
ggttgcacagagtgactgccgagctgctttatgaagggagaaaggctccatagttggagtgtttttttttttttttttaaacatttttcccatcctccatcctcttgagggagaatagct

SEQ ID NO: 408524 - DNA, 120 bp, Artificial Sequence
  ENSG00000147894_48 (sequence is synthesized)
taccttttatcttgttttaatttgagaaagaagttgccaccactctaggttgaaaaccactcctttaacataataactgtggatatggtttgaatttcaagatagttacatgccttttta

SEQ ID NO: 408525 - DNA, 120 bp, Artificial Sequence
  ENSG00000147894_49 (sequence is synthesized)
tttttcctaatagagctgtaggtcaaatattattagaatcagatttctaaatcccacccaatgacctgcttattttaaatcaaattcaataattaattctcttctttttggaggatctgg

SEQ ID NO: 408526 - DNA, 120 bp, Artificial Sequence
  ENSG00000147894_50 (sequence is synthesized)
acattctttgatatttcttacaacgaatttcatgtgtagacccactaaacagaagctataaaagttgcatggtcaaataagtctgagaaagtctgcagatgatataattcacctgaagag

SEQ ID NO: 408527 - DNA, 120 bp, Artificial Sequence
  ENSG00000147894_51 (sequence is synthesized)
tcacagtatgtagccaaatgttaaaggttttgagatgccatacagtaaatttaccaagcattttctaaatttatttgaccacagaatccctattttaagcaacaactgttacatcccatg

SEQ ID NO: 408528 - DNA, 120 bp, Artificial Sequence
  ENSG00000147894_52 (sequence is synthesized)
gattccaggtgactaaagaatacttatttcttaggatatgttttattgataataacaattaaaatttcagatatctttcataagcaaatcagtggtctttttacttcatgttttaatgct

SEQ ID NO: 408529 - DNA, 120 bp, Artificial Sequence
  ENSG00000147894_53 (sequence is synthesized)
gacaagttccgcccacgtaaaagatgacgcttgaaagtgtattgggaaacctctcatgaaccctgtgagcaagccaccgtctcactcaatttgaatcttggcttccctcaaaagactggc

SEQ ID NO: 408530 - DNA, 120 bp, Artificial Sequence
  ENSG00000147894_54 (sequence is synthesized)
ctttactcctgatttgtacgtaatgctctgcctgctggtactgtagtcaagcaatatgaaattgtgtcttttacgaataaaaacaaaacagaagttgcatttaaaaagaaagaaatatta

SEQ ID NO: 408531 - DNA, 120 bp, Artificial Sequence
  ENSG00000147896_0 (sequence is synthesized)
ggattttttagcttgcaaaaaaaatgagcaccaaacctgatatgattcaaaagtgtttgtggcttgagatccttatgggtatattcattgctggcaccctatccctggactgtaacttac

SEQ ID NO: 408532 - DNA, 120 bp, Artificial Sequence
  ENSG00000147896_1 (sequence is synthesized)
tgaacgttcacctgagaagagtcacctggcaaaatctgagacatctgagtagtatgagcaattcatttcctgtagaatgtctacgagaaaacatagcttttgagttgccccaagagtttc

SEQ ID NO: 408533 - DNA, 120 bp, Artificial Sequence
  ENSG00000147896_2 (sequence is synthesized)
tgcaatacacccaacctatgaagagggacatcaagaaggccttctatgaaatgtccctacaggccttcaacatcttcagccaacacaccttcaaatattggaaagagagacacctcaaac

SEQ ID NO: 408534 - DNA, 120 bp, Artificial Sequence
  ENSG00000147896_3 (sequence is synthesized)
aaatccaaataggacttgatcagcaagcagagtacctgaaccaatgcttggaggaagacaagaatgaaaatgaagacatgaaagaaatgaaagagaatgagatgaaaccctcagaagcca

SEQ ID NO: 408535 - DNA, 120 bp, Artificial Sequence
  ENSG00000147896_4 (sequence is synthesized)
tgaaagaaaagaaatacagtgactgtgcctgggagattgtccgagtggaaatcagaagatgtttgtattacttttacaaatttacagctctattcaggaggaaataagaatcatctacct

SEQ ID NO: 408536 - DNA, 120 bp, Artificial Sequence
  ENSG00000147896_5 (sequence is synthesized)
tcaagcaagaattaacagagattgtggctacgcaaatgcaccaaaaaagggtgaaatatatctgaaatgtacctggttctgcccttggaagccatttcctgctcatgccactaacagcat

SEQ ID NO: 408537 - DNA, 120 bp, Artificial Sequence
  ENSG00000147896_6 (sequence is synthesized)
gctgccaaactgttcagattcaagattattccaagcgcagggcccaaatgttatagccaaagaaagtcttatgataaaagtgaggcaaatttcagccaagaagttagaagagatgtttaa

SEQ ID NO: 408538 - DNA, 120 bp, Artificial Sequence
  ENSG00000147896_7 (sequence is synthesized)
aagaacaagaacaaattgtggatcatggtatatgcaggctatcagcagaaggatcagacaataaaatgagttagtgcaaaccatttagtaaaaataactatcagcagagttgttccagat

SEQ ID NO: 408539 - DNA, 120 bp, Artificial Sequence
  ENSG00000147896_8 (sequence is synthesized)
taaaaatagtactacaagcttgtaaaggagttaggacatgcaagctactgagcataaaatatatacttgctatttttcatgactttctctaataaagtctttgcctgttctctctaataa

SEQ ID NO: 408540 - DNA, 120 bp, Artificial Sequence
  ENSG00000147905_0 (sequence is synthesized)
ctccttacctcatttgtcctcgcccctccccgtccctctacgcgttttggttcccggttggtgcttcctgttcgcagctgcggcacttcaaggttactgactttttatgatgtttggtgg

SEQ ID NO: 408541 - DNA, 120 bp, Artificial Sequence
  ENSG00000147905_1 (sequence is synthesized)
ctatgagactatagaagcatacgaagatgatctttatcgagatgagtcatctagtgaactgagtgttgatagtgaggtggaatttcaactctatagccaaattcattatgcccaagatct

SEQ ID NO: 408542 - DNA, 120 bp, Artificial Sequence
  ENSG00000147905_2 (sequence is synthesized)
tgatgatgtcatcagggaggaagagcatgaagaaaagaactctgggaattcggaatcttcgagtagtaaaccaaatcagaagaagctaatcgtcctttcagatagtgaggtcatccagct

SEQ ID NO: 408543 - DNA, 120 bp, Artificial Sequence
  ENSG00000147905_3 (sequence is synthesized)
gtcagatgggtcagaggtcatcactttgtctgatgaagacagtatttatagatgtaaaggaaagaatgttagagttcaagcacaagaaaatgcccatggtctttcttcttctcttcaatc

SEQ ID NO: 408544 - DNA, 120 bp, Artificial Sequence
  ENSG00000147905_4 (sequence is synthesized)
taatgagctggttgataagaaatgcaagagtgatattgagaagcctaaatctgaagagagatcaggtgtaatccgagaggtcatgattatagaggtcagttcaagtgaagaggaagagag

SEQ ID NO: 408545 - DNA, 120 bp, Artificial Sequence
  ENSG00000147905_5 (sequence is synthesized)
caccatttcagaaggtgataatgtggaaagctggatgctactgggatgtgaagtagatgataaagatgatgatatccttctcaaccttgtgggatgtgaaaactctgttactgaaggaga

SEQ ID NO: 408546 - DNA, 120 bp, Artificial Sequence
  ENSG00000147905_6 (sequence is synthesized)
agatggtataaactggtccatcagtgacaaagacattgaggcccagatagctaataaccgaacacctggaagatggacccagcggtactattcagccaacaaaaacattatctgtagaaa

SEQ ID NO: 408547 - DNA, 120 bp, Artificial Sequence
  ENSG00000147905_7 (sequence is synthesized)
ttgtgacaaacgtggtcatttatcaaaaaactgccccttaccacgaaaagttcgtcgctgcttcctgtgctccaggagaggacatctcctgtattcctgtccagcccccctttgcgaata

SEQ ID NO: 408548 - DNA, 120 bp, Artificial Sequence
  ENSG00000147905_8 (sequence is synthesized)
ctgtcctgtgcctaagatgttggaccactcatgtcttttcagacattcctgggataaacagtgtgaccgatgtcatatgctaggccactatacagatgcttgcacagaaatctggaggca

SEQ ID NO: 408549 - DNA, 120 bp, Artificial Sequence
  ENSG00000147905_9 (sequence is synthesized)
gtatcacctaacgaccaaacctggaccacccaaaaagccgaagaccccttcaagaccatcagccttagcatattgctatcactgcgcgcaaaaaggccattatggacacgaatgtccaga

SEQ ID NO: 408550 - DNA, 120 bp, Artificial Sequence
  ENSG00000147905_10 (sequence is synthesized)
aaaagtactcaagaaaaatggggttatcccagagccatccaagctaccttatataaaagcagcaaatgagaacccccaccatgatataaggaagggccgtgcctcatggaaaagcaacag

SEQ ID NO: 408551 - DNA, 120 bp, Artificial Sequence
  ENSG00000147905_11 (sequence is synthesized)
gtggcctcaagaaaataaagaaacacaaaaagaaatgaagaacaagaatagaaactgggagaagcacaggaaggctgacagacatcgtgaagtggatgaggattttcccaggggccccaa

SEQ ID NO: 408552 - DNA, 120 bp, Artificial Sequence
  ENSG00000147905_12 (sequence is synthesized)
aacctactcttctcctggcagttttaaaacccagaagccttctaagccctttcaccgttcatcacattaccacacgtcaagagaagacaagtctcccaaggaaggcaagaggggcaagca

SEQ ID NO: 408553 - DNA, 120 bp, Artificial Sequence
  ENSG00000147905_13 (sequence is synthesized)
gaagaaaaaggagaggtgctgggaagatgatgacaatgataacttatttcttattaagcagagaaaaaaaaagtcttaagccgtcaggcagcctctgatgtggcttttcattgttcattt

SEQ ID NO: 408554 - DNA, 120 bp, Artificial Sequence
  ENSG00000147905_14 (sequence is synthesized)
ggcctttgtgtctataaccttctggcactgtgtttattatctatgattaaataaagtgagtttttggttttgtttttttaatttcagccattcctagagttactgaatatccatggagat

SEQ ID NO: 408555 - DNA, 120 bp, Artificial Sequence
  ENSG00000147905_15 (sequence is synthesized)
ctcaattctctgtgtccaacaggatattaggtaagaaagtacaaagataaacctggacttctcctattccaatatgtcatctttactcagaatcctagggataggtagaagaattcatct

SEQ ID NO: 408556 - DNA, 120 bp, Artificial Sequence
  ENSG00000147905_16 (sequence is synthesized)
tttcaagaaagtgttttaaaaatactttgggaaaaaaactgcatcaaaggtaatttatcctcaaattaaatccttgcaggaagagaaattaacactaagaaaaagtcatcaatatttttc

SEQ ID NO: 408557 - DNA, 120 bp, Artificial Sequence
  ENSG00000147905_17 (sequence is synthesized)
aactttttttttttttttttttactttggaaaggacaataactataaacctatatccagattttctttctgctgaagctgttgtcagaatcttcctttggacaaaacatcactagctgac

SEQ ID NO: 408558 - DNA, 120 bp, Artificial Sequence
  ENSG00000147905_18 (sequence is synthesized)
tataaaaacaaaagtgtcatcattgaagccctgaagaggcagggaattgagcttcagcaaaatacaggaaaagaactatccagtataaatgtcagaagacagatttcctaaacaagtaaa

SEQ ID NO: 408559 - DNA, 120 bp, Artificial Sequence
  ENSG00000147905_19 (sequence is synthesized)
agagacatcaaaaattttaacataatcacaatgaaatcattttttaccacttttacagcggtgtttcaagcggactgtcactcagatctgcagagatgaatattactcaaaaaatttttt

SEQ ID NO: 408560 - DNA, 120 bp, Artificial Sequence
  ENSG00000147905_20 (sequence is synthesized)
tgttctcttgcatttttttcaactaccgcaaagctatacagatttttttgtacttgtggatcttttgtacttctcataacctaatgtcagactaagaaaaataaaatatctgagagtaaa

SEQ ID NO: 408561 - DNA, 120 bp, Artificial Sequence
  ENSG00000147905_21 (sequence is synthesized)
ggtgcttcctgttcgcagctgcggcagtgagtatgtgtgtgacggacccccgccgcccgcggctcgggacccctgcctaccctccttcttgcccgccgggctgtggaactagcgcgtgcc

SEQ ID NO: 408562 - DNA, 120 bp, Artificial Sequence
  ENSG00000147905_22 (sequence is synthesized)
ccctcgccggcctcgacgtctcccgtccgcccctcactcgtggcagggcgcagctcctggtccgtcacctgcgcgccgccccacgcggccgggctgcgggtctagggggtccgcgtctcc

SEQ ID NO: 408563 - DNA, 120 bp, Artificial Sequence
  ENSG00000147905_23 (sequence is synthesized)
cggcctcgacgtctcccgtccgcccctcactcgtggcagggcgcagctcctggagaatctgagcatggggaataaagtcaggaaggatcgcaagtgaggattatattaatatgataatta

SEQ ID NO: 408564 - DNA, 120 bp, Artificial Sequence
  ENSG00000147905_24 (sequence is synthesized)
ttttcaaagaatttgtttctgtgtatctgaatttgcacctactctgtaacctaactgcgatttataaaatgaaacaatctcttctaatttggcacttgataggtgctttgactttaaaag

SEQ ID NO: 408565 - DNA, 120 bp, Artificial Sequence
  ENSG00000147905_25 (sequence is synthesized)
gcaagtgtatttttctgtcacgaatatcttgtcattctaaaataagtaaaaacaatggattgatgaaacttcttcactgcttttttctttgtgtataacaaatacattgatattttactg

SEQ ID NO: 408566 - DNA, 120 bp, Artificial Sequence
  ENSG00000147905_26 (sequence is synthesized)
cgtattattctgaggacactgtggtaatcaagaactatccataactaatgtataaataactgcttgcttatttctacaataatccaactcaaattatatatacacagcaaaaagcttatg

SEQ ID NO: 408567 - DNA, 120 bp, Artificial Sequence
  ENSG00000147905_27 (sequence is synthesized)
atttatatagttacaaacaacacactttttgctcctgagaagatggtaaactgatcaactatacataagcagcttggttagaaaaagtgtccttaacaaggcttgcacagaaatctggag

SEQ ID NO: 408568 - DNA, 120 bp, Artificial Sequence
  ENSG00000147905_28 (sequence is synthesized)
acccaccaaaaaaaaagagagagagagagaaagcgactttgttctgcaaacgttggcctaagctttgaaaaccatgagccattgagttttgtgaattcaagttagacagtaacagaggcc

SEQ ID NO: 408569 - DNA, 120 bp, Artificial Sequence
  ENSG00000147905_29 (sequence is synthesized)
gttagcaccaagtgattccgtaaaagatgccaacagctatcacaaatatgtaataacagtgaagtcttcttaaagcagttactattaaattgttttccatcttactaccaaagttcaaaa

SEQ ID NO: 408570 - DNA, 120 bp, Artificial Sequence
  ENSG00000147905_30 (sequence is synthesized)
cggggtcaatgtcagatttagtcatgctgttattttagcccagtggtccagagagatgactgaaaagtaatacctagcaaatacagaaagagagataaagcaagcaagctgttttgaaag

SEQ ID NO: 408571 - DNA, 80 bp, Artificial Sequence
  ENSG00000147912_0 (sequence is synthesized)
acatgacggcggcggctccgcacgatccccaggcagctgtccgcccccgggcggggctggccgcacgccgcaatcctacc

SEQ ID NO: 408572 - DNA, 120 bp, Artificial Sequence
  ENSG00000147912_1 (sequence is synthesized)
ggcaccggcggccgcggcccggactccgcggtgggcgagcgccctgtgaggtgaccatggaggctggtggcctccccttggagctgtggcgcatgatcttagcctacttgcaccttcccg

SEQ ID NO: 408573 - DNA, 120 bp, Artificial Sequence
  ENSG00000147912_2 (sequence is synthesized)
acctgggccgctgcagcctggtatgcagggcctggtatgaactgatcctcagtctcgacagcacccgctggcggcagctgtgtctgggttgcaccgagtgccgccatcccaattggccca

SEQ ID NO: 408574 - DNA, 120 bp, Artificial Sequence
  ENSG00000147912_3 (sequence is synthesized)
accagccagatgtggagcctgagtcttggagagaagccttcaagcagcattaccttgcatccaagacatggaccaagaatgccttggacttggagtcttccatctgcttttctctattcc

SEQ ID NO: 408575 - DNA, 120 bp, Artificial Sequence
  ENSG00000147912_4 (sequence is synthesized)
gccggaggagggaacgacgtaccctgagtgttgggccaggccgtgagtttgacagcctgggcagtgccttggccatggccagcctgtatgaccgaattgtgctcttcccaggtgtgtacg

SEQ ID NO: 408576 - DNA, 120 bp, Artificial Sequence
  ENSG00000147912_5 (sequence is synthesized)
aagagcaaggtgaaatcatcttgaaggtgcctgtggagattgtagggcaggggaagttgggtgaagtggccctgctggccagcattgatcagcactgctcaaccacacgcctgtgcaacc

SEQ ID NO: 408577 - DNA, 120 bp, Artificial Sequence
  ENSG00000147912_6 (sequence is synthesized)
tcgtcttcacgccagcctggttctcacccatcatgtataagacaacatcaggtcacgtccagtttgacaactgcaactttgagaacgggcacatccaggtccatggcccgggtacttgcc

SEQ ID NO: 408578 - DNA, 120 bp, Artificial Sequence
  ENSG00000147912_7 (sequence is synthesized)
aagtgaagttctgtaccttcaaaaacacccatatcttcctgcacaacgtgcccctgtgtgtcctggaaaactgtgaatttgtgggcagtgaaaacaactctgtgactgttgagggtcacc

SEQ ID NO: 408579 - DNA, 120 bp, Artificial Sequence
  ENSG00000147912_8 (sequence is synthesized)
catctgcagataagaactgggcctacaagtatctactagggcttatcaagtcctcacccacttttctccccacagaggactctgactttttaatgtccctggacctagagagccgggacc

SEQ ID NO: 408580 - DNA, 120 bp, Artificial Sequence
  ENSG00000147912_9 (sequence is synthesized)
aggcctggagcccaaagacctgtgacattgttatcgagggcagccagagccctaccagcccagcctctagctccccaaagccaggctccaaggctggctcacaggaggcagaggtgggta

SEQ ID NO: 408581 - DNA, 120 bp, Artificial Sequence
  ENSG00000147912_10 (sequence is synthesized)
gtgatggtgaaagggtggcccagaccccggacagcagcgatggaggcctgagtcccagcggtgaggatgaagatgaggaccagctgatgtacagactatcctaccaagtgcagggcccac

SEQ ID NO: 408582 - DNA, 120 bp, Artificial Sequence
  ENSG00000147912_11 (sequence is synthesized)
gccctgtattggggggctcatttctgggcccacctctaccaggagcatccattcagctgcccagctgcctagtgctgaactcactgcagcaggagctgcagaaggataaggaggccatgg

SEQ ID NO: 408583 - DNA, 120 bp, Artificial Sequence
  ENSG00000147912_12 (sequence is synthesized)
cactggccaactccgtgcagggctgcctcatccgcaagtgcctcttccgggacgggaagggaggcgtcttcgtctgctcccacggcagagccaagatggaaggaaacatcttccggaacc

SEQ ID NO: 408584 - DNA, 120 bp, Artificial Sequence
  ENSG00000147912_13 (sequence is synthesized)
tgacttacgcagtgcggtgtatacataatagcaagatcatcatgctcaggaacgacatttaccgctgccgagcgtcaggcatctttcttcgcttggagggcggtggcttgattgccggca

SEQ ID NO: 408585 - DNA, 120 bp, Artificial Sequence
  ENSG00000147912_14 (sequence is synthesized)
acaacatttaccacaatgcagaggctggtgtagacatccggaaaaagtccaacccactcatactgtgtaaccagatccaccatggccttcgctctggcattgtcgtccttggcaatggga

SEQ ID NO: 408586 - DNA, 120 bp, Artificial Sequence
  ENSG00000147912_15 (sequence is synthesized)
aaggcatcatccggaacaatcaaatcttttccaataaggaggctggcatttacatcctgtaccacggaaaccccgttgtgagcgggaaccacatcttcaagggccgtgctgccggcatag

SEQ ID NO: 408587 - DNA, 120 bp, Artificial Sequence
  ENSG00000147912_16 (sequence is synthesized)
cagtgaatgagaacggcaaaggcctcatcacagaaaatgtcatccgtgagaatcagtggggaggtgtggacatccgccgtggagggatccccgttctcaggagtaacctcatctgctttg

SEQ ID NO: 408588 - DNA, 120 bp, Artificial Sequence
  ENSG00000147912_17 (sequence is synthesized)
gctattcagatggtgtggttgtgggagacgaaggcaaaggcctcatagaaggaaataccatctacgctaacaagggctgtggtgtgtggatgatgtcgtccagcctcccccatgtcacca

SEQ ID NO: 408589 - DNA, 120 bp, Artificial Sequence
  ENSG00000147912_18 (sequence is synthesized)
gcaaccacgtcagctacaatggcctgtatggagtggcagtatttagccagaaggatggctccagcgagttacctcgaggccacagggctcaagagaacttcagcgaggatggggacgcca

SEQ ID NO: 408590 - DNA, 120 bp, Artificial Sequence
  ENSG00000147912_19 (sequence is synthesized)
gaaggaggacgacccactgcgccggcccatcaccatagctcttgttgagtctaacagtattaatcacaatggagcctcaggactctatgtccagagcagcgaggcactgcatgtcatcac

SEQ ID NO: 408591 - DNA, 120 bp, Artificial Sequence
  ENSG00000147912_20 (sequence is synthesized)
caatgtgatccacgcgaatggggacagaggcattactgtggcccagagcagccaacccacccgagtggccaacaacagcatctcctgcaaccggcaaagtggggtcaaggttgaggccca

SEQ ID NO: 408592 - DNA, 120 bp, Artificial Sequence
  ENSG00000147912_21 (sequence is synthesized)
gtgcaaagtggagctccggggcaatggtatctatgacaacagaggccacggcattatcaccaagggcgacagcaccatcgtcattgaaaacgatatcattggcaaccggggcagcgggct

SEQ ID NO: 408593 - DNA, 120 bp, Artificial Sequence
  ENSG00000147912_22 (sequence is synthesized)
gcagctgctgcccaggtccgacactaaagtaataaagaaccggatccactcgttccgggcctacggcatcgccgtgcggggccgtgccaaggccctggtgcaggaaaacatcatcttcca

SEQ ID NO: 408594 - DNA, 120 bp, Artificial Sequence
  ENSG00000147912_23 (sequence is synthesized)
gggcaaaaccagtaagaccatctttcagcagatctcaaacaaccgagaatgcatcatgcaaaacaacaagttcctggtcttcaagaaaaagtctgatacgtggcgcctggtgaacccacc

SEQ ID NO: 408595 - DNA, 120 bp, Artificial Sequence
  ENSG00000147912_24 (sequence is synthesized)
agcacggccccaccttgaaaattctctcagacgtccctcggcagcccacaatgggcagaaggtgacagccatggcaacgaggatcacagcccgggtggaaggtggttaccacagcaaccg

SEQ ID NO: 408596 - DNA, 120 bp, Artificial Sequence
  ENSG00000147912_25 (sequence is synthesized)
cagtgtcttctgcaccatcctgtgaggacacagacctgcttcagggccaagcctggatgggtgctcagaggagctaaggtggaaatactgcctgaaaagactccgcccctccccctcccc

SEQ ID NO: 408597 - DNA, 120 bp, Artificial Sequence
  ENSG00000147912_26 (sequence is synthesized)
ctcgaacaaatgggtcccgggcctccaaaacacggtacctccagaacacttcagctccacagcccatagcaagaagaaagtgggcaatgtttttcagggagaagggatagaagctggtgg

SEQ ID NO: 408598 - DNA, 120 bp, Artificial Sequence
  ENSG00000147912_27 (sequence is synthesized)
gtttccagtcactcgaagtctataaagattgtgaagagcgggggaagctcaaatgctgaagcttttggtcaggattttctctgagttctaaggaactgtgttttacacacaccaaaccca

SEQ ID NO: 408599 - DNA, 120 bp, Artificial Sequence
  ENSG00000147912_28 (sequence is synthesized)
gactcttctcaggaaagagcagatttacttctgatggcgggaagtgattctagtgaggtggagagagacaactgctccagaattttcccctttgctagagctgtctccctctcaatccct

SEQ ID NO: 408600 - DNA, 120 bp, Artificial Sequence
  ENSG00000147912_29 (sequence is synthesized)
ccagggaccccaccacaccctcccagctgtctctggaggctggaggagttgagtttggttgacttgaggacttggacatggacctgggaggaaggaaggacctgggagcaacaggagacc

SEQ ID NO: 408601 - DNA, 120 bp, Artificial Sequence
  ENSG00000147912_30 (sequence is synthesized)
ccatggaaaggctgccccagggatgacaagagggacatgctgaaacaggtggggctgcagcgtgcaggcagatgctaggctgggtgggcagggatgcacaaggctctactccatccccag

SEQ ID NO: 408602 - DNA, 120 bp, Artificial Sequence
  ENSG00000147912_31 (sequence is synthesized)
agagctcccaaatgcagaaggattcaaaccccatgtgagcgtgcccacaccagccgcccctcctgagcatcagcctgttcagatgagggtacctgggcctctcgttcgcatctgtgttct

SEQ ID NO: 408603 - DNA, 120 bp, Artificial Sequence
  ENSG00000147912_32 (sequence is synthesized)
catggatgagcgctggtctttactgaccctcccaagcctccccactctgtgccttggctcatgctctttcctcctcccggcatgcccttctcccccatctccgtgtcctcgttcctcaag

SEQ ID NO: 408604 - DNA, 120 bp, Artificial Sequence
  ENSG00000147912_33 (sequence is synthesized)
gtttagccgagacactgccacctccacatagctctccctgccctctttccccctctgggcctcagtggcctttctctgctccctctcagggtactgagcactttctgccttgtcctggag

SEQ ID NO: 408605 - DNA, 120 bp, Artificial Sequence
  ENSG00000147912_34 (sequence is synthesized)
ctatctgggtccattgcctgaccccccactcacctgtgtgctccccgtaggtagggccacttctgactgtgtgtccccagatccagcctggggttggggtaggattagtggcctgagtga

SEQ ID NO: 408606 - DNA, 120 bp, Artificial Sequence
  ENSG00000147912_35 (sequence is synthesized)
ggagaggaaggccagctcccagaggactttactgaaccgtactgtgaatatgtccaagtcccaaagccaggtgaggtcagaccccactgcctgaggaagagggctggatgcagggccagc

SEQ ID NO: 408607 - DNA, 120 bp, Artificial Sequence
  ENSG00000147912_36 (sequence is synthesized)
tcaacctgaacaatcccctcccactcggcctttcctgtggggccttcaccagcctgctggggtcactgtcgtgcacttggctgcgtggctggttctattggccctaggtgctgctctgtt

SEQ ID NO: 408608 - DNA, 120 bp, Artificial Sequence
  ENSG00000147912_37 (sequence is synthesized)
gggtgggatgggagggggtagagggagccaggagcactgggttctccctgagaacactgggcacaagagtactggcctcttctatccctggcactgtcctttgcacttgtttggtggccc

SEQ ID NO: 408609 - DNA, 120 bp, Artificial Sequence
  ENSG00000147912_38 (sequence is synthesized)
caatgtgagtcgctgtaaaaaatgctgccgttactattttctaagaaatgacttttctgtgaaccaacagtaacaaaaacctcagtaaccaaaataaagttctatattttaaaaaaggca

SEQ ID NO: 408610 - DNA, 120 bp, Artificial Sequence
  ENSG00000147912_39 (sequence is synthesized)
tgggcgagcgccctgtgaggactacagtgaagaacagaggggaaagtcatttgaggagccagaactctggagtcagttagctctggttcagatcacagttctgccacttactggctttgt

SEQ ID NO: 408611 - DNA, 120 bp, Artificial Sequence
  ENSG00000147912_40 (sequence is synthesized)
aacaagataatcacaggaagaaaactcttctcactcacgcagtgactttgggcagagccttcatctgtctggactctatctctaataatacagtgataataataaagatgactcaggccc

SEQ ID NO: 408612 - DNA, 120 bp, Artificial Sequence
  ENSG00000147912_41 (sequence is synthesized)
acccagggattgtggctgcccgggctccctgcaaccctgccagctgtcgactccagtcagaaaaaggcctgtgcctggctctatgtcaggcccgggctgaggactccccaggagggaaca

SEQ ID NO: 408613 - DNA, 120 bp, Artificial Sequence
  ENSG00000147912_42 (sequence is synthesized)
agctttttaagagtcaggggtatgtggtttcagatctcagctctgcaggttactggctgtgtgaccttgggcaacttacttcacatcttcgagccttagtaaaatccatttaataagatc

SEQ ID NO: 408614 - DNA, 120 bp, Artificial Sequence
  ENSG00000147912_43 (sequence is synthesized)
acactatctggctgaatctctgaggggctgtaaaaatgttagttgatgctgctgctgtcctttagtcactctgcctcaatgtatcacaattgccgccacccatcttcctcaaacctgtct

SEQ ID NO: 408615 - DNA, 120 bp, Artificial Sequence
  ENSG00000147912_44 (sequence is synthesized)
gtcctttcacgttctccatttcagcgacatcaccatccactcagtgttctgacaacaaaacttctgctgcctttttctccctaatccgaagatgtccagtcagtcagtcaccaggtcttg

SEQ ID NO: 408616 - DNA, 120 bp, Artificial Sequence
  ENSG00000147912_45 (sequence is synthesized)
ttgattctgcttctaaaatgttcctttttccagcacctcctcttccccaactgcccccatcctaattcaggtctcagcaccgctcaccctaacctgtaccgcctgtgttactgcaatgca

SEQ ID NO: 408617 - DNA, 120 bp, Artificial Sequence
  ENSG00000147912_46 (sequence is synthesized)
cagctgttccagttgcttctgcttgggctgtgttctgattggtccgtgctttcgctttcacattctggttgtaaaatcatactgatatttgctgtagttggtatcactcctgcaccgcca

SEQ ID NO: 408618 - DNA, 120 bp, Artificial Sequence
  ENSG00000147912_47 (sequence is synthesized)
atgtcacctgtccccctgcagcagcctcctgccagtctccctgcccgtggccaccccctgctccactctggaggttgtcccatgcatcctgccaggttaatctttctaagtgagagctct

SEQ ID NO: 408619 - DNA, 80 bp, Artificial Sequence
  ENSG00000147955_0 (sequence is synthesized)
gtgggcagccggcgggctccgaggccgtgagcgcaaagcctcaggccccggctccctcctgagctgcgccgtgccaggcc

SEQ ID NO: 408620 - DNA, 120 bp, Artificial Sequence
  ENSG00000147955_1 (sequence is synthesized)
tgggccgcgctgctcctggctgtcgcagcggtgctgacccaggtcgtctggctctggctgggtacgcagagcttcgtcttccagcgcgaagagatagcgcagttggcgcggcagtacgct

SEQ ID NO: 408621 - DNA, 120 bp, Artificial Sequence
  ENSG00000147955_2 (sequence is synthesized)
gggctggaccacgagctggccttctctcgtctgatcgtggagctgcggcggctgcacccaggccacgtgctgcccgacgaggagctgcagtgggtgttcgtgaatgcgggtggctggatg

SEQ ID NO: 408622 - DNA, 120 bp, Artificial Sequence
  ENSG00000147955_3 (sequence is synthesized)
ggcgccatgtgccttctgcacgcctcgctgtccgagtatgtgctgctcttcggcaccgccttgggctcccgcggccactcggggcgctactgggctgagatctcggataccatcatctct

SEQ ID NO: 408623 - DNA, 120 bp, Artificial Sequence
  ENSG00000147955_4 (sequence is synthesized)
ggcaccttccaccagtggagagagggcaccaccaaaagtgaggtcttctacccaggggagacggtagtacacgggcctggtgaggcaacagctgtggagtgggggccaaacacatggatg

SEQ ID NO: 408624 - DNA, 120 bp, Artificial Sequence
  ENSG00000147955_5 (sequence is synthesized)
gtggagtacggccggggcgtcatcccatccaccctggccttcgcgctggccgacactgtcttcagcacccaggacttcctcaccctcttctatactcttcgctcctatgctcggggcctc

SEQ ID NO: 408625 - DNA, 120 bp, Artificial Sequence
  ENSG00000147955_6 (sequence is synthesized)
gcccatgtttacagacagggacatacaccatgcagatcctgagttcctgctgtatgagcagggatatccatgcttatgtatccaaacacagagacccatgggaacaaatgagacacatat

SEQ ID NO: 408626 - DNA, 120 bp, Artificial Sequence
  ENSG00000147955_7 (sequence is synthesized)
agatactgagacctgtgtgtacagtaggaccatgcactcacacccatctggagagggagcccccggtataccaagggagccagttgtgttcagacacacacatcacagcttgactcacta

SEQ ID NO: 408627 - DNA, 120 bp, Artificial Sequence
  ENSG00000147955_8 (sequence is synthesized)
actgaggcctttccatagctccacagcttcccacctcctccccaccaaaccggggttctagagttaaggatgggggagggtattatactgcctcagtctgactcctcaacccagcagcaa

SEQ ID NO: 408628 - DNA, 120 bp, Artificial Sequence
  ENSG00000147955_9 (sequence is synthesized)
tttgaggggatgagggggaagaggagctgccttttggaggcccccttcacctgcagctatgatgcccttccccttctcccctgtcctcaccatatgccttatccccattctactcccctg

SEQ ID NO: 408629 - DNA, 120 bp, Artificial Sequence
  ENSG00000147955_10 (sequence is synthesized)
ctatgcaagtgcccctgtggcttgtccccaaccccctcagcaacaaagctcagctggggaacgagagtaatttgaagaatgcttgaagtcagcgtcttccattccagaaagacccccatt

SEQ ID NO: 408630 - DNA, 120 bp, Artificial Sequence
  ENSG00000147955_11 (sequence is synthesized)
cttcctttgggggtatgatgtggaagctggtttcagcccaggacccaccactgaggagaggatctagacaggtgggcctaattccaaggggcccttcctggcctggagaaggccttttac

SEQ ID NO: 408631 - DNA, 90 bp, Artificial Sequence
  ENSG00000147955_12 (sequence is synthesized)
acacacactatcacagttttcacacagcccctgctgcattctctgtccatctgtctgtttctattaataaagatttgttgatctgttcca

SEQ ID NO: 408632 - DNA, 120 bp, Artificial Sequence
  ENSG00000147955_13 (sequence is synthesized)
aagaaggctctgtcagagaagtgggtcccttcacgcggggggtgcccacaattgcggggagcatggcatggaaaaggagtgtgttgggggggccctcctcatggttcccttcctccaccc

SEQ ID NO: 408633 - DNA, 120 bp, Artificial Sequence
  ENSG00000147955_14 (sequence is synthesized)
tcccataagccacaggtgattggttggggcagagctgagggactcttgctttcctctgtcaaggggaaacaaaacataacaacttcctattaaacatgtctgatttttatctgcccaggc

SEQ ID NO: 408634 - DNA, 120 bp, Artificial Sequence
  ENSG00000147955_15 (sequence is synthesized)
tggggttgtaaaggggcccatgccctcctttctgatgtttggctgggccatgcaatggcgcgaataccctgatagtgtcatgtgcgattgtcactcagggcgctactgggctgagatctc

SEQ ID NO: 408635 - DNA, 120 bp, Artificial Sequence
  ENSG00000147996_0 (sequence is synthesized)
aagggacgaggcagttctcgtccagagcccaggtaatccgggcgggatcagctagcgtcgcgatgtgatgacgtcaggccccggccaggccgggagtggcgtgctgggcgtgcgcggctg

SEQ ID NO: 408636 - DNA, 120 bp, Artificial Sequence
  ENSG00000147996_1 (sequence is synthesized)
cggtacggcgtgttggtcccagcggttcagctgaggtagggacgtgccgtaggccggaatgttaccggctgttggatctgtggatgaggaagaggatcctgcggaggaggattgtcctga

SEQ ID NO: 408637 - DNA, 120 bp, Artificial Sequence
  ENSG00000147996_2 (sequence is synthesized)
ctgaattggttcccattgagacgacgcaaagcgaggaggaggaaaagtctggcctcggcgccaagatcccagtcacaattatcaccgggtatttaggtgctgggaagacaacacttctga

SEQ ID NO: 408638 - DNA, 120 bp, Artificial Sequence
  ENSG00000147996_3 (sequence is synthesized)
tattttgacagagcaacatagtaaaagagtagcggtcattttaaatgaatctggggaaggaagtgcgctggagaaatccttagctgtcagccaaggtggagagctctatgaagagtggct

SEQ ID NO: 408639 - DNA, 120 bp, Artificial Sequence
  ENSG00000147996_4 (sequence is synthesized)
ggaacttagaaacggttgcctctgctgttcagtgaaggacaatggccttagagctattgagaatttgatgcaaaagaaggggaaatttgatgacatactgttagagaccactggattagc

SEQ ID NO: 408640 - DNA, 120 bp, Artificial Sequence
  ENSG00000147996_5 (sequence is synthesized)
agaccctggtgcagtgacttctatgttttgggttgatgctgaattagggagtgatatttaccttgatggtatcataactattgtggattcaaaatatggattaaaacatttaacagaaga

SEQ ID NO: 408641 - DNA, 120 bp, Artificial Sequence
  ENSG00000147996_6 (sequence is synthesized)
gaaacctgatggccttatcaatgaagctactaggcaagttgctttggcagatatcattctcattaataaaacagacttggttccagaagaagatgtaaagaaattaagaacgacaattag

SEQ ID NO: 408642 - DNA, 120 bp, Artificial Sequence
  ENSG00000147996_7 (sequence is synthesized)
aaaacttcagcatgtgccaggaacacaacctcaccttgatcagagtattgttacaatcacatttgaagtaccaggaaatgcaaaggaagaacatcttaatatgtttattcagaatctcct

SEQ ID NO: 408643 - DNA, 120 bp, Artificial Sequence
  ENSG00000147996_8 (sequence is synthesized)
ggaagaacatcttaatatgtttattcagaatctcctgtgggaaaagaatgtgagaaacaaggacaatcactgcatggaggtcataaggctgaagggattggtgtcaatcaaagacaaatc

SEQ ID NO: 408644 - DNA, 120 bp, Artificial Sequence
  ENSG00000147996_9 (sequence is synthesized)
tgatctggaggagactccagtgagctggaaggatgacactgagagaacaaatcgattggtcctcattggcagaaatttagataaggatatccttaaacagctgtttatagctactgtgac

SEQ ID NO: 408645 - DNA, 120 bp, Artificial Sequence
  ENSG00000147996_10 (sequence is synthesized)
agaaacagaaaagcagtggacaacacatttcaaagaagatcaagtttgtacataacactagtggcatttcttatcaaaaggattggataataaaaataagtttctactgggtatatttca

SEQ ID NO: 408646 - DNA, 120 bp, Artificial Sequence
  ENSG00000147996_11 (sequence is synthesized)
agcatttatttattactttagttacgaattccaatatactttaaaatggtatttgttttacagcatacataaaatgtagcaaatcagtactgtaaaacatttaacattcatacaattata

SEQ ID NO: 408647 - DNA, 120 bp, Artificial Sequence
  ENSG00000147996_12 (sequence is synthesized)
tataatatccttttttttaaagaatggtatttcacaaaaatatcttttgaaattggctttggagtttacatatactgaacatgaaagtttataataatgatgatacaactttcaacatcg

SEQ ID NO: 408648 - DNA, 120 bp, Artificial Sequence
  ENSG00000147996_13 (sequence is synthesized)
tcattttttcttagaacttcagctgattgcagagatataatgattacattgttattaaatttttttaacacaagtaagtgtcaccattttatgacatgaaataaaaggttatgactgtta

SEQ ID NO: 408649 - DNA, 120 bp, Artificial Sequence
  ENSG00000147996_14 (sequence is synthesized)
acaaatcttagaaacacaaagatcaaggtactttaaaaaagctattcctattaataacaaatcattttagttattaataataaacattaagtaattgacaaatatgcttgattctgatat

SEQ ID NO: 408650 - DNA, 120 bp, Artificial Sequence
  ENSG00000147996_15 (sequence is synthesized)
aagatctaagttcatttaaaaagaattggatccaaaatgttgtttggaatgctcttaataagttagtttggcatatttggctagtacatttgcctgtcttcaaaactaagattacaaagc

SEQ ID NO: 408651 - DNA, 120 bp, Artificial Sequence
  ENSG00000147996_16 (sequence is synthesized)
catggtaacactgtgtaagtgtttgcttaatgaggaagaaaagacttccaaacactcgagagggtaactcagtacagaaatctgaagtatattgaggaatcttaatttgaagtgtttaaa

SEQ ID NO: 408652 - DNA, 120 bp, Artificial Sequence
  ENSG00000147996_17 (sequence is synthesized)
tggcattttaatatttaaaaagccttcttagtgttttatagttgccaaaaaatacatggagtctttaccttgaagttcctgacaaattcttttattaaattttgactttcattttctcta

SEQ ID NO: 408653 - DNA, 120 bp, Artificial Sequence
  ENSG00000147996_18 (sequence is synthesized)
gttaagtgcctacagatccatattgtatacacagaatattttttactctgattgttgccctgtagaaacttaaggtataaggttgacctgcttcaagaacgttagggaatcacatatatt

SEQ ID NO: 408654 - DNA, 120 bp, Artificial Sequence
  ENSG00000147996_19 (sequence is synthesized)
gttgatggctaattgttatataaatggtaatacataaaattagtcctcagtgcttgcagaatatagttcacagttaatagactgatattcagggtcttcgcactccatctttcttttcct

SEQ ID NO: 408655 - DNA, 120 bp, Artificial Sequence
  ENSG00000147996_20 (sequence is synthesized)
tccctaactttacccaggatggttaattcactttcccatggatgcatcctctcagttcctgtctttactcataatgtattctcactctgccaatccctgagttctttcttgttctgtttt

SEQ ID NO: 408656 - DNA, 120 bp, Artificial Sequence
  ENSG00000147996_21 (sequence is synthesized)
tttttttttaaatttattctatagagcctattctgtctctccccgcttcctatgtgaagtcttccctgactcaagtggtctcagttttccctgaactcttgttgacttcatcttccttaa

SEQ ID NO: 408657 - DNA, 120 bp, Artificial Sequence
  ENSG00000147996_22 (sequence is synthesized)
ctgtcaaccatgccttgtcttccagcttgcttgtatatcttctttgtccatagccaaggctgatcagcataggacaatcaggacaatatgaatgatgctcaaatatgtgctaacagtcat

SEQ ID NO: 408658 - DNA, 120 bp, Artificial Sequence
  ENSG00000147996_23 (sequence is synthesized)
tttgctgactgttctggagactcccattccttttgaaaacaaagatggacttttcaaatgaagttatagttcagggactttgttttgaattattttgtaagacctgaactaataaaagcc

SEQ ID NO: 408659 - DNA, 120 bp, Artificial Sequence
  ENSG00000147996_24 (sequence is synthesized)
gatggtggctcaaaattactattcttagtatttataagttctactgacattagattttgaatctgtcatctcagttcatatagtatatattataaattgaatcaataaaggtaaggctca

SEQ ID NO: 408660 - DNA, 120 bp, Artificial Sequence
  ENSG00000147996_25 (sequence is synthesized)
ttaggagattatttgccatgattaatgattgtggaagaaagaaattcacattttttccacatatttcatcttattttaatagtaatgtccttaaactttactataaaaaaatataatgtc

SEQ ID NO: 408661 - DNA, 120 bp, Artificial Sequence
  ENSG00000147996_26 (sequence is synthesized)
atgacagctctctattctgaggacttgacacccgggctactgacattgttcttttcagttctacaaatgtgacagcatttaatgcaatagaagcaatgaatgaagttacccagagaaggt

SEQ ID NO: 408662 - DNA, 83 bp, Artificial Sequence
  ENSG00000147996_27 (sequence is synthesized)
catgcagtgattgatttttcttacttcaagtggatgagtgagcaagtgactaaaatcttctgtgaattcttcagtgatagtct

SEQ ID NO: 408663 - DNA, 120 bp, Artificial Sequence
  ENSG00000147996_28 (sequence is synthesized)
tcaggttttggttgtgataaaaaacactgaaaaaccatcctaatatatgtattaactttatcattagaaaaggggattgttcaaaaaaaaaacaatacacagaaaccttttttgaaaatt

SEQ ID NO: 408664 - DNA, 120 bp, Artificial Sequence
  ENSG00000147996_29 (sequence is synthesized)
aaaaacattaagaaacttcttgtaattcacaaataattgaaattaaataattttctcagcttaagagtttgtattttttaagtgaatatcagtaattaatccattaacattgatgctcta

SEQ ID NO: 408665 - DNA, 120 bp, Artificial Sequence
  ENSG00000147996_30 (sequence is synthesized)
agaatgaattaaataatgaggaccctttcatcagggtttttgagtgagttttttaaaatacaaggtagtagtttgtgtaaatactaaatccattggtacctgtgcagaatgtaggaaatg

SEQ ID NO: 408666 - DNA, 120 bp, Artificial Sequence
  ENSG00000147996_31 (sequence is synthesized)
gagttgctaattccaaaaaaaacagcacatatgctgaggaaagtataatacctaatatatatggtttaagcaatgtaaaattccatgaatatgttccttttcatcttaaaatttgtgatt

SEQ ID NO: 408667 - DNA, 120 bp, Artificial Sequence
  ENSG00000147996_32 (sequence is synthesized)
acaggcatgagccactgtgcacagcctacttatattatttaaaaaacaattaatcaaataagttggttaggattagtttcagtggcataaacagaaacttaaacaatgtgaaagcttatt

SEQ ID NO: 408668 - DNA, 120 bp, Artificial Sequence
  ENSG00000147996_33 (sequence is synthesized)
tctgtctccttctgccaggtgaacacacagtgttcatcccctcaggaggacacagcttttgaggtaccatcttggaagcagagaccagccctcactagacacaaacttcctggcacgttg

SEQ ID NO: 408669 - DNA, 120 bp, Artificial Sequence
  ENSG00000147996_34 (sequence is synthesized)
gctatgaggactgaagttggattagaatccgtttcaatgaagatcagatgtcctgagtagaattcttactattgggtcctgaatcttacattaaatattctctcaaattccttgaggcat

SEQ ID NO: 408670 - DNA, 120 bp, Artificial Sequence
  ENSG00000147996_35 (sequence is synthesized)
gagccaccgtgcccggcctgtcctctgtggttttctgggcttatgttaaaattataactcaatcaccagtctttataaatttgcttttttatatttaaaccaaacctaatgctaattgtg

SEQ ID NO: 408671 - DNA, 120 bp, Artificial Sequence
  ENSG00000147996_36 (sequence is synthesized)
gaattttctttctacatgcagccccattctgaatgaatgaaatcaaatcatgtgaagatcagggtcctagagtaacctaatattttgtacattggttatttgactcctcatttttatatt

SEQ ID NO: 408672 - DNA, 120 bp, Artificial Sequence
  ENSG00000147996_37 (sequence is synthesized)
aaatgttatatcaagggagggggtataaaagaaatacaaaaattgcagaggtatctggaatgtacctatttgttaattctatttgtcatttcttttgtttcatcttttgagtaataagct

SEQ ID NO: 408673 - DNA, 120 bp, Artificial Sequence
  ENSG00000147996_38 (sequence is synthesized)
gcttggaaaagtttctgttctttagctgattttttagctataaaaatgtatttgaaaagctcataaatttcaggattgaaaagataattggaagtttaaaaaaaacctaattcattgaag

SEQ ID NO: 408674 - DNA, 120 bp, Artificial Sequence
  ENSG00000147996_39 (sequence is synthesized)
taataaccaaataattttcaatcttgattcaactgtgattcaaatcttacaccatttgcccacttctatgaattttatgtataaaattttttaagagtcagagtttttttttcttgatta

SEQ ID NO: 408675 - DNA, 90 bp, Artificial Sequence
  ENSG00000147996_40 (sequence is synthesized)
ataaaattttttaagagtcagagtttttttttcttgattaattggatgtatttcacagaatttccaactgctcacgttagttttcttcct

SEQ ID NO: 408676 - DNA, 120 bp, Artificial Sequence
  ENSG00000147996_41 (sequence is synthesized)
tgcagacttttggacaaagtccttttcttggctgttataaaaactatatttggttttaaacagaaacactggttttagtacaaatcatctttgtctactttcatttttctttattatttt

SEQ ID NO: 408677 - DNA, 120 bp, Artificial Sequence
  ENSG00000147996_42 (sequence is synthesized)
catgactgaaaaggagctttggaaatcactgcataaggcttgatttatttgcacaactttctttagggttgcagctagaacaaacctgtgcgctttgaaatgttaccttctgctctctgt

SEQ ID NO: 408678 - DNA, 120 bp, Artificial Sequence
  ENSG00000147996_43 (sequence is synthesized)
tcccaagtacagagaaataatgttgcaaatctcacttctgctgaacattatgcttcctgatgcatttagcagacactaaacatttgtcatactctaaacaaagttacaaaggactagaag

SEQ ID NO: 408679 - DNA, 120 bp, Artificial Sequence
  ENSG00000147996_44 (sequence is synthesized)
aaacacaaagatcaagaatctcactctggtttgagacagaatctcactgtgtcccccaagttggagtgcggtggtgcgatctcggctcactgaaaccactgcctcctgggttcaagcgat

SEQ ID NO: 408680 - DNA, 120 bp, Artificial Sequence; identical to SEQ ID NO: 330306
  ENSG00000147996_45 (sequence is synthesized)

SEQ ID NO: 408681 - DNA, 120 bp, Artificial Sequence; identical to SEQ ID NO: 330307
  ENSG00000147996_46 (sequence is synthesized)

SEQ ID NO: 408682 - DNA, 120 bp, Artificial Sequence
  ENSG00000147996_47 (sequence is synthesized)
aactttctttaggtgccagcattattttcatattaggaagcaggagaaagttaaggaactctaagcaatactagaatggttatatatatatttaagtttgtattaaacctgttggaatgg

SEQ ID NO: 408683 - DNA, 120 bp, Artificial Sequence
  ENSG00000147996_48 (sequence is synthesized)
taaagaaatttactgacatatttaaccatacaaaatagtgttgctaaaagactagtttttctctttattctgtgcatatgtatatatatgaatgtgtgttttttttaagaaattttaaaa

SEQ ID NO: 408684 - DNA, 120 bp, Artificial Sequence
  ENSG00000147996_49 (sequence is synthesized)
aaacttaatctgccagcttttctctattggaatttgcaaacaacttgtaaaattggaattacagaatattagaatagtcagttatggaaagtcacttcattatccttgtgtcactaaacg

SEQ ID NO: 408685 - DNA, 120 bp, Artificial Sequence
  ENSG00000147996_50 (sequence is synthesized)
cttaaccagtcagttgagtgtctactcttgtgtgttcacaagtgtacacaaagtttttggtaaattaagaatattatttcaaataaattaatttcatccccataggagccagtttatcag

SEQ ID NO: 408686 - DNA, 120 bp, Artificial Sequence
  ENSG00000147996_51 (sequence is synthesized)
tgattgcaacccatttctaaaacaaattatttaatataaccaaactcctttaacttctcaacttttcccactaaaactgtgaaacattatataaaatctttaatcaataggatatgatac

SEQ ID NO: 408687 - DNA, 120 bp, Artificial Sequence
  ENSG00000147996_52 (sequence is synthesized)
aagtgaaaaatatatttgaaagggatatcatgtgccacttaaacagattaaccattcaggtcctcttttaaaactaaataagcttgtggtcaatgtttcatctttatcatgttacaacgt

SEQ ID NO: 408688 - DNA, 120 bp, Artificial Sequence; identical to SEQ ID NO: 330320
  ENSG00000147996_53 (sequence is synthesized)

SEQ ID NO: 408689 - DNA, 120 bp, Artificial Sequence; identical to SEQ ID NO: 330321
  ENSG00000147996_54 (sequence is synthesized)

SEQ ID NO: 408690 - DNA, 120 bp, Artificial Sequence
  ENSG00000147996_55 (sequence is synthesized)
ttttttttttttttttttttttgtggtgagaaaggctcagcagctgatagactcagcaacaggcagccaggagctctgaggctcacagctggcagtctagttctactcagtctctacttg

SEQ ID NO: 408691 - DNA, 120 bp, Artificial Sequence
  ENSG00000147996_56 (sequence is synthesized)
actcagtctctacttgagaaattctttctttggaagtacagcagaggccttagatgagtggcttgtctgctatggcagagattagaggtgctgccagactgccattaagtgttaggcagt

SEQ ID NO: 408692 - DNA, 120 bp, Artificial Sequence
  ENSG00000147996_57 (sequence is synthesized)
gaacagctggggaattaatttggtatgcattctcaggagccgctcatctgctggcagaggtagccgaagaatgccctttagtgtaagtcctctacaaccatacaccaaatgtgctccctg

SEQ ID NO: 408693 - DNA, 120 bp, Artificial Sequence
  ENSG00000147996_58 (sequence is synthesized)
catttcaaattccattgtagaaagtctctgataatctcacttataccatgagccattcctcagtatctgtcctcttcctgttagtgttctacaattcctttctccttaatttttctccgc

SEQ ID NO: 408694 - DNA, 120 bp, Artificial Sequence
  ENSG00000147996_59 (sequence is synthesized)
tttacaaaatgtcacacagacaagtgcataatacttaaacaagcttttaaaaataatgctcataaatagctttggttctgtcataatattcgtatttataaacattttaagtcaattctc

SEQ ID NO: 408695 - DNA, 120 bp, Artificial Sequence
  ENSG00000147996_60 (sequence is synthesized)
ttcttttgttttcatttcagaaatatccatgtcctgaataaaagttgtgtcttgattagtttattatgtaacaatttagtgtgtttgacatttctaacttttatttctaacatttgcttt

SEQ ID NO: 408696 - DNA, 120 bp, Artificial Sequence
  ENSG00000147996_61 (sequence is synthesized)
caaaggctgctctactgagaagatgaacaaatttcttgtccaaaacaatgtatttcaaacgtgcccctcgggcctttcccgtgttgctcactggtaggtgctgggaagacaacacttctg

SEQ ID NO: 408697 - DNA, 120 bp, Artificial Sequence
  ENSG00000147996_62 (sequence is synthesized)
tttaaaagaggaaaagtacttggttgtcattttctttggcagttgaatgaatgatcagagtatttcttggtgcttttaagctgttaatagaatttgaagttttattgattgacttaggat

SEQ ID NO: 408698 - DNA, 120 bp, Artificial Sequence
  ENSG00000147996_63 (sequence is synthesized)
tatttgtaagaacagaagttgttaaaaataaggacatgtaggaagagcagagacgttctacctctaagtacagttgtcccttggcatccatggcgtattagttccagaacctctgaggat

SEQ ID NO: 408699 - DNA, 120 bp, Artificial Sequence
  ENSG00000147996_64 (sequence is synthesized)
ttggcatccatggcgtattagttccagaacctctgaggataccaaaatctattaatgttcaagtcccttacataaaatggtgtagtatttgcctataacctatgcacatcctcccatata

SEQ ID NO: 408700 - DNA, 120 bp, Artificial Sequence
  ENSG00000147996_65 (sequence is synthesized)
gttgagaattttctttagtttttattgggttatgtatccttccagaatgggttggttctttgccatttgtatgccctattcatttcttcattttgtgttctttcttgctttttattccct

SEQ ID NO: 408701 - DNA, 120 bp, Artificial Sequence
  ENSG00000147996_66 (sequence is synthesized)
gtatgtgtgtgtttctttttgtcaggctgtaatacatatgcatacatgtttcttcttgatatgggagaacttctatgtggtgctgatgggaaatatttttaatactccactctccttacc

SEQ ID NO: 408702 - DNA, 120 bp, Artificial Sequence
  ENSG00000147996_67 (sequence is synthesized)
caagtttgtttttctcctgagccctagtttgaaagctgtatattgttggagtggagggaaagagaagggaaaagtggtgattcagagagccaaatggggcaatgtggcttttaggctctg

SEQ ID NO: 408703 - DNA, 120 bp, Artificial Sequence
  ENSG00000147996_68 (sequence is synthesized)
ctctcttgaagtaccaagtatttcactcttgggtctgcccaagtgcttatgaataaaattcctttgccttgtatggggacatcattcgacctcagacctctcatttctctttgttctgag

SEQ ID NO: 408704 - DNA, 120 bp, Artificial Sequence
  ENSG00000147996_69 (sequence is synthesized)
ccctagaatgtgacctgaccttctccttcccaaagcatggagatggttaaaactcactcttgaaatttttttgttgacttttccctgtgttgcttattcattcctcggctctactttttg

SEQ ID NO: 408705 - DNA, 120 bp, Artificial Sequence
  ENSG00000147996_70 (sequence is synthesized)
tcctctggtgaattgatattccatatttaaaaatgaaaatgcaaggtattgtattgatgtggatagctttagaaaaattagattaatttctgttaagatttatatgggttgagatactga

SEQ ID NO: 408706 - DNA, 120 bp, Artificial Sequence
  ENSG00000147996_71 (sequence is synthesized)
ttgagatactgaaattagttttaataaaattttattttgtataactttggaattcttattaacagaattaaactacatttttacatgaaataaatgactccagaagtaaaaatctggaca

SEQ ID NO: 408707 - DNA, 120 bp, Artificial Sequence
  ENSG00000147996_72 (sequence is synthesized)
ttttttcttttttttttttttcttggcgattttaatgctttggaaaagatctcatgcttttatctccaaaggaggaaattaatttgatgccatggaaattagttttctagtcgtatgcct

SEQ ID NO: 408708 - DNA, 120 bp, Artificial Sequence
  ENSG00000147996_73 (sequence is synthesized)
aattagttttctagtcgtatgccttgaatgagtgaagaatttctttttcatggtggtactaaatttggggaaagctatagaaactttcatctggaagcttacacttttcctcttttttga

SEQ ID NO: 408709 - DNA, 120 bp, Artificial Sequence
  ENSG00000147996_74 (sequence is synthesized)
aaatttggtgagagacttggatattttattattttctgtaaaagagtgtaatttgttgtacaggtctaatattgatccttttttggaagtatggaaagaatctgagtataaagcagaatt

SEQ ID NO: 408710 - DNA, 120 bp, Artificial Sequence
  ENSG00000147996_75 (sequence is synthesized)
acctctggatggcatgtattctcaaggacactgtcatagtgaaacagtttatttagaagcttgtgtttccaaactgttgaatttgatattcacaaaattggcatgtgtaaactttattaa

SEQ ID NO: 408711 - DNA, 120 bp, Artificial Sequence
  ENSG00000147996_76 (sequence is synthesized)
actttaagctatttcctaagatgaagatgacaaacttggagggaaacttcattcatttggtttatttttatttttatttttatttatctttttgagacagaatctcactctggtttgaga

SEQ ID NO: 408712 - DNA, 87 bp, Artificial Sequence
  ENSG00000147996_77 (sequence is synthesized)
tgtatttttagtagagacggtttcgccacattggctaggttggtgtcaaactcctggcctcaagcccccgtgccccttgtttgtgac

SEQ ID NO: 408713 - DNA, 120 bp, Artificial Sequence
  ENSG00000147996_78 (sequence is synthesized)
tggagcccccgtgccccttgtttgtgacctgtcaatataaatatgctcagtagcggggggaggggtggggggtgaaaaaggaaatatgtttaatattaagactttggccttttagtgtaa

SEQ ID NO: 408714 - DNA, 120 bp, Artificial Sequence
  ENSG00000147996_79 (sequence is synthesized)
actgatattcaaaaatttcttcatagaacatttgcttctttgcttgatcatttttctaattctgtacatctaaaatgcccagaatttgagttgctgttatagtctactaacatagaactt

SEQ ID NO: 408715 - DNA, 120 bp, Artificial Sequence
  ENSG00000147996_80 (sequence is synthesized)
tggagtaataagatgggaatttgtctctcttttgccaagacaagtattcgtaatctaacacagtattgttgccacgagtacgagtatgtgatagactgttgagaataaagaaagcaggca

SEQ ID NO: 408716 - DNA, 120 bp, Artificial Sequence
  ENSG00000147996_81 (sequence is synthesized)
cagttggtcagtcctaagataaaggagatgttttttcttatatgtttgtgcattaaagaaaaaaaaatcttgaatctgaccaatgatgttttttttccttgtaagaaaatttaacaaatg

SEQ ID NO: 408717 - DNA, 120 bp, Artificial Sequence
  ENSG00000147996_82 (sequence is synthesized)
tttggcaagcttctggaatctaaatttgaaattatacatttgtcattttctttaaatatttcttcaccttagctttgattatgagaaatcactgtcctctgctgttcttttttttttttt

SEQ ID NO: 408718 - DNA, 65 bp, Artificial Sequence
  ENSG00000147996_83 (sequence is synthesized)
atgagaaatcactgtcctctgctgttctttttttttttttttcttttgaggcggagtctcactct

SEQ ID NO: 408719 - DNA, 120 bp, Artificial Sequence
  ENSG00000147996_84 (sequence is synthesized)
gtttattgattatatttccagctttaattttcttgagtaatttaactgaatttacacagtttgcttcattgtattttcaaacaaatagaaaataaacttattaggaagcattttcttaaa

SEQ ID NO: 408720 - DNA, 120 bp, Artificial Sequence
  ENSG00000147996_85 (sequence is synthesized)
ctaatgttttggtccttttattgagtttttattgcttttgatgtcagggcttatttaatctctagtgcatgaaagtctcatatgtaaaaaatgattattctgaatttaatctgtcattgg

SEQ ID NO: 408721 - DNA, 120 bp, Artificial Sequence
  ENSG00000147996_86 (sequence is synthesized)
tcatacttctaagtgttcaaccttataaaaaataaatgactatcaaaaaagaaaaaccttacattatgttctagtagttaagtttccaaggacagtgttcactagtctaccatagaccct

SEQ ID NO: 408722 - DNA, 120 bp, Artificial Sequence
  ENSG00000147996_87 (sequence is synthesized)
agaagagttacccaacacatagtagcactcaaatatttgttgaatgaattataaaaatgactacttgtattgttaattttgtgtattctagtgaattaaatctcttcggcatcatttact

SEQ ID NO: 408723 - DNA, 120 bp, Artificial Sequence
  ENSG00000147996_88 (sequence is synthesized)
cccttaggtatttgactttgtgtcaaatgttttggcaaggataaaattataacagactttcttgaacaaccaaaatgtaatctattaaggattttccttcacttttgataaaataagaaa

SEQ ID NO: 408724 - DNA, 120 bp, Artificial Sequence
  ENSG00000147996_89 (sequence is synthesized)
ttaaaaccttgcatcctaatgtaaaatagaattatatggtgtttaatatcagtgtccctttagctattatattaaactactatagttaataaattttatcattattttgtatgttggttt

SEQ ID NO: 408725 - DNA, 120 bp, Artificial Sequence
  ENSG00000147996_90 (sequence is synthesized)
ttttgtatgttggtttttaacaatttcataaagctataaaaagatacttggtcagataaagtttcctctgcttttaattttaataaagtattattatgtatatgatttctttttacctat

SEQ ID NO: 408726 - DNA, 120 bp, Artificial Sequence
  ENSG00000148019_0 (sequence is synthesized)
cgaatcaccgctcctgagcccggtgcggggctgccgctatcgcctggccgtgggtgccggagcggccgggttgcgactcagcgttcttgggtgggcgcgggcggcgtctccgcggcgggc

SEQ ID NO: 408727 - DNA, 120 bp, Artificial Sequence
  ENSG00000148019_1 (sequence is synthesized)
atcccccgaggccgccctcgggccatgatcgactccgtgaagctgcgccgcgacagcgcggcggacttcttctcccactacgagtacctgtgcgcgctgcagaactcggtgccgctgccc

SEQ ID NO: 408728 - DNA, 120 bp, Artificial Sequence
  ENSG00000148019_2 (sequence is synthesized)
gccgtgcgcgcctgtctccgggagggcgtgctggatttcaacgccgaccgcctccgcggggtggactgggcgcctctgctgagcaccctcaagatcaataaagacctgcccttggtctcc

SEQ ID NO: 408729 - DNA, 120 bp, Artificial Sequence
  ENSG00000148019_3 (sequence is synthesized)
atcaagagcttcttccagccctggctgggggacacaggttctgacatgaataaattttgcagaagtcgtgttcctgcgataagatacaaagatgtgaccttccagttgtgtaaagctctt

SEQ ID NO: 408730 - DNA, 120 bp, Artificial Sequence
  ENSG00000148019_4 (sequence is synthesized)
aaaggctgtttaagtatatcaagtgtgctaaagaacctggagctaaatggactaattctgagagagagggatttaactattctagcaaagggattgaataaatcggcttctttggtgcac

SEQ ID NO: 408731 - DNA, 120 bp, Artificial Sequence
  ENSG00000148019_5 (sequence is synthesized)
ctgtctcttgcaaattgtccaattggagatggaggtttagaaattatttgtcaaggtataaagagctctatcactcttaagacagtcaacttcacaggatgtaatctgacatggcaggga

SEQ ID NO: 408732 - DNA, 120 bp, Artificial Sequence
  ENSG00000148019_6 (sequence is synthesized)
gcagatcacatggccaagatcttaaagtatcagaccatgagaaggcatgaagaaacctgggctgagagtcttcgctataggagacctgatcttgactgtatggctggcttaagacgtatc

SEQ ID NO: 408733 - DNA, 120 bp, Artificial Sequence
  ENSG00000148019_7 (sequence is synthesized)
acactgaattgcaacacacttattggtgacctaggtgcatgtgcttttgcagactctctcagtgaggatttatggctgagagctcttgacctgcaacagtgcggcctcaccaatgaagga

SEQ ID NO: 408734 - DNA, 120 bp, Artificial Sequence
  ENSG00000148019_8 (sequence is synthesized)
gcaaaggctttgctagaggcccttgaaaccaatacaactctggtcgttctggatataagaaaaaatccactcattgatcattctatgatgaaagcagttatcaaaaaagtcctccagaat

SEQ ID NO: 408735 - DNA, 120 bp, Artificial Sequence
  ENSG00000148019_9 (sequence is synthesized)
ggaaggagtgccaaatcagagtaccagtggataacttctccatcagtgaaggaaccatccaaaactgctaaacagaaaaggagaactataattctaggaagtggtcacaaaggaaaagct

SEQ ID NO: 408736 - DNA, 120 bp, Artificial Sequence
  ENSG00000148019_10 (sequence is synthesized)
ctggtttcttgccgtggcgtactgcagaacgtgcaaaaagacacaggggtttcccattaatcaaaacacgtgatatatgtaatcagttgcagcaaccaggttttcctgtgactgtgacag

SEQ ID NO: 408737 - DNA, 120 bp, Artificial Sequence
  ENSG00000148019_11 (sequence is synthesized)
tagagagtccttcatcctctgaagttgaagaggttgatgattcttcagagagtgttcatgaagtgcctgagaaaactagtatagaacaagaagcattacaggaaaaactggaggagtgcc

SEQ ID NO: 408738 - DNA, 120 bp, Artificial Sequence
  ENSG00000148019_12 (sequence is synthesized)
taaagcagttaaaggaagaaagagtgataaggcttaaggttgataaacgagtcagtgagctggaacatgaaaatgcccagttaagaaatataaatttctctttgtctgaagcccttcatg

SEQ ID NO: 408739 - DNA, 120 bp, Artificial Sequence
  ENSG00000148019_13 (sequence is synthesized)
cacagtcattgacaaatatgatcctggatgatgaaggtgttttgggcagcattgagaattcttttcagaagtttcatgctttcttggatctccttaaagatgctgggcttgggcagcttg

SEQ ID NO: 408740 - DNA, 120 bp, Artificial Sequence
  ENSG00000148019_14 (sequence is synthesized)
ccacaatggctgggatagatcagtcagattttcaattactaggtcatccccagatgacttctactgttagtaatccacctaaagaagaaaagaaggcgcttgaagatgaaaaaccagaac

SEQ ID NO: 408741 - DNA, 120 bp, Artificial Sequence
  ENSG00000148019_15 (sequence is synthesized)
cgaagcagaatgccctagggcaaatgcaaaatatccaggtttctatttgtatgcagtcagcttacaatgaaggaacactaatgaagtttcagaaaattacaggtgatgctagaattcctt

SEQ ID NO: 408742 - DNA, 120 bp, Artificial Sequence
  ENSG00000148019_16 (sequence is synthesized)
tgcctctcgactcctttcctgtcccagtttctactccagagggcttaggaacttccagcaacaacctaggagtcccagctactgagcagcggcaggagtcttttgaaggattcattgcta

SEQ ID NO: 408743 - DNA, 120 bp, Artificial Sequence
  ENSG00000148019_17 (sequence is synthesized)
gaatgtgttctccttcaccagatgcgacttctggaactggaagtcaaagaaaagaagaggagttgtccagaaatagcagatcttcttcagagaaaaagaccaaaacaggtgaatatacca

SEQ ID NO: 408744 - DNA, 120 bp, Artificial Sequence
  ENSG00000148019_18 (sequence is synthesized)
aaaaacactctgataagcaacaccctggaaaggacctgcattcctgatctgactgtcctgaaaaccagaaaagcaaagaaactagggaaactagttctttggttaatgaaccaattaaaa

SEQ ID NO: 408745 - DNA, 120 bp, Artificial Sequence
  ENSG00000148019_19 (sequence is synthesized)
gtaggtctttgaaaaaatacgtttctgtcaagaaagaaaatagaatagtgactgtttcatccaagacaaataaaagtaaatccagtccactagaacattctgaaagtgatactcttggat

SEQ ID NO: 408746 - DNA, 120 bp, Artificial Sequence
  ENSG00000148019_20 (sequence is synthesized)
gtgattttgaatttcaagaaagcatccattctctatcacacctttcatatgactaaatcttttgaaactatgtttttacctttaaattttaataaattttcttatgtttttattatggca

SEQ ID NO: 408747 - DNA, 120 bp, Artificial Sequence
  ENSG00000148019_21 (sequence is synthesized)
cagatgatttaagtaccagttaattaaaggatggaacagctaagccattccactcatctttggagcatctgattctggagtttgccaccaggctaagaaagcagctatctgaagtgggag

SEQ ID NO: 408748 - DNA, 120 bp, Artificial Sequence
  ENSG00000148019_22 (sequence is synthesized)
ctctgacccaagaaatgctgggatcggagaataagggaattatccaaaatggctccgaagaggaactgaagttaagctgcccacatgatctctctaactatgatgacctgccacttccgt

SEQ ID NO: 408749 - DNA, 120 bp, Artificial Sequence
  ENSG00000148019_23 (sequence is synthesized)
ggcaccgcccaccggcttgaatcccggcgcctcagaggactatgaggcgggcgccaactgcttgggccgcagggcgggaggcagcgcgggagtggggcgttgaggggccggcctagcttg

SEQ ID NO: 408750 - DNA, 120 bp, Artificial Sequence
  ENSG00000148019_24 (sequence is synthesized)
aataacacttccaactttaatcttaggccctcatttataaatatggacaaccaagaatcatcaaatttgaagaaaaccagtaacataaaaggaggcatgaaattaaaattaacctgttca

SEQ ID NO: 408751 - DNA, 120 bp, Artificial Sequence
  ENSG00000148019_25 (sequence is synthesized)
agaagatagttactaggagaaacatgaaatttttaaattaatgaatcaaaatcttcagcaattcataaagatactgtgttcataaagaataggatgccatgaaaaaaatatttagagttt

SEQ ID NO: 408752 - DNA, 120 bp, Artificial Sequence
  ENSG00000148019_26 (sequence is synthesized)
ctggaaattaaaaatttgattatgaaactgaaacactcagaagatggactacacagcagaatggattcatttgaagcttaaattcatgaaatggaaggtattaattggtcttagacgttt

SEQ ID NO: 408753 - DNA, 120 bp, Artificial Sequence
  ENSG00000148019_27 (sequence is synthesized)
catcagcaacttaattacttagaaaaaatctttctcagagtaactaagcaaaatgaacaatgaacccattaacgtgtggttttgttttttgggttttttttttttgagtcaaggtctcac

SEQ ID NO: 408754 - DNA, 120 bp, Artificial Sequence
  ENSG00000148019_28 (sequence is synthesized)
tttttgagtcaaggtctcactcatgtcacccaggctggggtgtagtgatgggatcacagcttattgtaaccatgaaccattgggcttaaattatcttcccacctcagcctcccaagtagc

SEQ ID NO: 408755 - DNA, 76 bp, Artificial Sequence
  ENSG00000148019_29 (sequence is synthesized)
acctcagcctcccaagtagctgcaatgtaccaccatgccgaagttttaaaaaattattgtagagttggggacggag

SEQ ID NO: 408756 - DNA, 85 bp, Artificial Sequence
  ENSG00000148019_30 (sequence is synthesized)
tcgatctcagctcactgcaaccgtgaagtgatcttcctgcctcagcccccctagtaactgggattacaggcacacaccaccatgc

SEQ ID NO: 408757 - DNA, 75 bp, Artificial Sequence
  ENSG00000148019_31 (sequence is synthesized)
ctacagacctgagccactgtgcccagccccatgaaagatgtttagatcaaataaactgataaagatattgataaa

SEQ ID NO: 408758 - DNA, 120 bp, Artificial Sequence
  ENSG00000148019_32 (sequence is synthesized)
agatgtttagatcaaataaactgataaagatattgataaagatatgagacaaactacttcagctttgtgacctgcaaatccccttttataatcaccagaggtgcctgtagtcagaaaaag

SEQ ID NO: 408759 - DNA, 120 bp, Artificial Sequence
  ENSG00000148019_33 (sequence is synthesized)
tctaaataaatactaatgacatatgaaaacaaagtccaaccaaagttctaggtttgaacatgaatggaggcatggcaggacacagaaagtgaaagcttgtcctagatattgtcttattca

SEQ ID NO: 408760 - DNA, 120 bp, Artificial Sequence
  ENSG00000148019_34 (sequence is synthesized)
tgggaaggatacaggtagtgtttgattctaggtattgattgaaaaaatatattaaaatatatataaagttaagggtatgttagtaaggataggttaggtgatgttgcattaacagctccc

SEQ ID NO: 408761 - DNA, 120 bp, Artificial Sequence
  ENSG00000148019_35 (sequence is synthesized)
aaattttaattactttcaacaacataggtttatttgtgcccatgcagtttgcctttggcagattggctagaggcccctattcaacatcaacctcaatctggaagcgaggctggtggaacg

SEQ ID NO: 408762 - DNA, 120 bp, Artificial Sequence
  ENSG00000148019_36 (sequence is synthesized)
tcactatttggaacattgctggttgcagtgtccaaggaaagacagtatgatgcagcatatattgtgacttaaagcttctgtctagatgtgacatatgtcacttctgttcacatttctttg

SEQ ID NO: 408763 - DNA, 120 bp, Artificial Sequence
  ENSG00000148019_37 (sequence is synthesized)
gccaaagaaagtcacatggttatgcctgagttcagcagaccagggaagtgcagaattgccatttgccatgagaagagagggaagcaaatgtatgtcaacaactttaatagctacaaaact

SEQ ID NO: 408764 - DNA, 120 bp, Artificial Sequence
  ENSG00000148019_38 (sequence is synthesized)
acctggaaagagggaatggaatttttaggtccaacaagacgggaaagaaaaagaaacaagctacatagaaataaaaaatccacaatatagcaagatcaagttttttactcataataaaca

SEQ ID NO: 408765 - DNA, 120 bp, Artificial Sequence
  ENSG00000148019_39 (sequence is synthesized)
tgaacaggttaaattctggaatccttaggcttgagtaaaaacatgaaatcccactgtgtgctatttgcaaaatctaaaacgctgtcatagattataaagagatgaacaaaaatataccag

SEQ ID NO: 408766 - DNA, 120 bp, Artificial Sequence
  ENSG00000148019_40 (sequence is synthesized)
gcagatgctaaagagtaaatgtggctgtgttagctgcagactaaatagaacccaaggtgaaaattggtaaaggggacaaaagcttcttttggctgataagtacagtgttgcagaagattt

SEQ ID NO: 408767 - DNA, 79 bp, Artificial Sequence
  ENSG00000148019_41 (sequence is synthesized)
agcttcttttggctgataagtacagtgttgcagaagattttttaaaaaaatatatctgcaatttaaaaacttgatgtta

SEQ ID NO: 408768 - DNA, 120 bp, Artificial Sequence
  ENSG00000148019_42 (sequence is synthesized)
ggaggcggagtttgcagtgagctgagatggcaccgctgcactccagcctgggccatagaggagactccgtctcaaacaaacaaaaaccttcatcttaaaattatagggtaagaatttaga

SEQ ID NO: 408769 - DNA, 120 bp, Artificial Sequence
  ENSG00000148019_43 (sequence is synthesized)
ttatagggtaagaatttagaaatacaaggaaaaatggccagccagttataacaagaagctttaagacatctcttttcagaatcagtggatcgactgctgcacacacactagaatggctaa

SEQ ID NO: 408770 - DNA, 120 bp, Artificial Sequence
  ENSG00000148019_44 (sequence is synthesized)
cattttgaaatgctgataaatatgcagagcaactggagttcctcacagctggtaggaatgcaaaatgactcagtcactcaaaacagtttggcagattctttaaatgctaacatacacata

SEQ ID NO: 408771 - DNA, 120 bp, Artificial Sequence
  ENSG00000148019_45 (sequence is synthesized)
agatgaaaacttagttcacacaaaacctgtgcgtggatatttatagcagctccattcatagtgaccaagatgtcttccaacaggtgaatggatagcgatgtatccatatggtggcaaaca

SEQ ID NO: 408772 - DNA, 120 bp, Artificial Sequence
  ENSG00000148019_46 (sequence is synthesized)
tgccacaattcggatgaatctcaacatcatatgctgagtgaaaaagccagtctcggaaggctacattctgtatgattccatttatatggcattcttgaaaagacaaaactatagtgacag

SEQ ID NO: 408773 - DNA, 120 bp, Artificial Sequence
  ENSG00000148019_47 (sequence is synthesized)
aacagattggagattgccaggtgttggggttgggaggagttgattacaaagaggctgtacaagggagtttgtttgtttgtttgttttggtgatgaacagttctgtatcctgattgcggtg

SEQ ID NO: 408774 - DNA, 120 bp, Artificial Sequence
  ENSG00000148019_48 (sequence is synthesized)
gtggtaacgtgagtctatacatatgttaaaatttatagaactgcatactctcaaaaaaattagttttactctataataatattagagcttaaaaaattcatccctcttgcccatcagtag

SEQ ID NO: 408775 - DNA, 120 bp, Artificial Sequence
  ENSG00000148019_49 (sequence is synthesized)
atcaggatatgaaggataccattgaacataaatattttgtatccatgatgaatacaaagtatattctcctggaaaaccaatagaacattcatataaatgattcctatgaaggtaaaaaac

SEQ ID NO: 408776 - DNA, 120 bp, Artificial Sequence
  ENSG00000148019_50 (sequence is synthesized)
ttacaaaattcaaagatcatacagatcatgtgctctgtataatgtaataatagtaacaaaaggcctgtccacttggaaatttttaaatgatcttctaaataactcatttaaaggagaaat

SEQ ID NO: 408777 - DNA, 120 bp, Artificial Sequence
  ENSG00000148019_51 (sequence is synthesized)
caaaataaattgcaaattatttagaattaataaaaacttctctaaagctgaggaattctaccaaagaggtgttagaggaaattgtatagattttgatttactttccaggaagaaagaaga

SEQ ID NO: 408778 - DNA, 120 bp, Artificial Sequence
  ENSG00000148019_52 (sequence is synthesized)
caaaagagatgaattaaacatttaaagctaagaaagagataaaccaaaagaaaggtgaggaattggtaaaagcagaaatgaataaaatagcaaattttgatcagtgaaacacaggttttt

SEQ ID NO: 408779 - DNA, 120 bp, Artificial Sequence
  ENSG00000148019_53 (sequence is synthesized)
aaaaatgaaagataaacctttgtaaaatatgataaagaaaaaaaagcaagaagtaattaacaaaaattgccagcattaggaataattttagaaggatacctacaactagaagagatattt

SEQ ID NO: 408780 - DNA, 120 bp, Artificial Sequence
  ENSG00000148019_54 (sequence is synthesized)
actagaagagatatttttaattatgagcacttttataatttactataaataattgtgtagtgttaaaccaataaatttgaaagactagatgaaatgtgactgtttaaaaatatggattgt

SEQ ID NO: 408781 - DNA, 120 bp, Artificial Sequence
  ENSG00000148019_55 (sequence is synthesized)
tagaaaatgtaaataaacgaaacatcttaggagaaattgaaaaaataggacaagaacttatttttaaaaagaggccaggtgcggtggcccatgcctgtaataccagtactttgggaggcc

SEQ ID NO: 408782 - DNA, 75 bp, Artificial Sequence
  ENSG00000148019_56 (sequence is synthesized)
aaaaattagccgggcttggtggcgggcacttgtaatcccaactactcaggagtctgaggcatgagtgccgttgca

SEQ ID NO: 408783 - DNA, 78 bp, Artificial Sequence
  ENSG00000148019_57 (sequence is synthesized)
caccaaagtgggaacattgctgagaccagcagtttgagaccagcctgggcaagacctcatctctacaaaaattaaaaa

SEQ ID NO: 408784 - DNA, 89 bp, Artificial Sequence
  ENSG00000148019_58 (sequence is synthesized)
aagacctcatctctaccccaaaacttagccaggcatggtggtgcgtgcatgtagtcccagccactcaggaggctgaagtgggaggatcg

SEQ ID NO: 408785 - DNA, 120 bp, Artificial Sequence
  ENSG00000148019_59 (sequence is synthesized)
gaggctgcagtgagctgtgatcatgccaccactgctctctagcctgggcaagagtgagactccgactcaagaagagaaaaagaaaaaccttccaggggcacatttatttgtaaaccattc

SEQ ID NO: 408786 - DNA, 120 bp, Artificial Sequence
  ENSG00000148019_60 (sequence is synthesized)
caggggcacatttatttgtaaaccattccagaggatagaaaagagatgtaaggctccctaattcattccatacggttagcgtaatccttatagcaaactgcacaaataaaacacaaggaa

SEQ ID NO: 408787 - DNA, 120 bp, Artificial Sequence
  ENSG00000148019_61 (sequence is synthesized)
aactaaaccaaattcaattaatgtaggtgcaaaaaatccaaaataaaactagcagtttgaattcagcattgtagcaaaagatatatcattttcaaggaagatttgtaccaaaacatgcaa

SEQ ID NO: 408788 - DNA, 120 bp, Artificial Sequence
  ENSG00000148019_62 (sequence is synthesized)
gattgagtgaagagtaactcactgtagctcactaaattaacagattaaagaagtatagtcatcttcacaagctgaaagagtatgtgataaattcaacatcctctggtattcttaacaatc

SEQ ID NO: 408789 - DNA, 120 bp, Artificial Sequence
  ENSG00000148019_63 (sequence is synthesized)
tcgaaatagaaggaaacttccttagcttagcttcttggcttcattaaatatacctaacagaaatccacaggaaacaaacttggtgaaaagtttttgctaagataaaaacggtactaaaaa

SEQ ID NO: 408790 - DNA, 120 bp, Artificial Sequence
  ENSG00000148019_64 (sequence is synthesized)
gtacacattttgggaaatgagacaaggctctcgttatttgtaaatatggggtctttttttttttggacaaaaaaccccctgtgatgatctactggcatgctattacagctaataaagctg

SEQ ID NO: 408791 - DNA, 120 bp, Artificial Sequence
  ENSG00000148019_65 (sequence is synthesized)
aataaggaggctgtgcacaacaccaacacaccggtatgaaaagtgtgtacaccagcaataaccaattagaaaatgtatgaggaaatagactctcatccacaatagctgcgagaagtaaat

SEQ ID NO: 408792 - DNA, 120 bp, Artificial Sequence
  ENSG00000148019_66 (sequence is synthesized)
attatctagaaataagattaacaagagaaatgtaaggcctatataaataaaaggataaatctatgctagagggtataaaagaaacacaaaaatagaggtatgccatgtataagacccaac

SEQ ID NO: 408793 - DNA, 120 bp, Artificial Sequence
  ENSG00000148019_67 (sequence is synthesized)
ataataaatagttctaccaaattaatttataaattcaaagcaatttcatataaccacagtaaagctttttaaatggatgtaataacctgattataacattaatctgaaagtcatcaggca

SEQ ID NO: 408794 - DNA, 120 bp, Artificial Sequence
  ENSG00000148019_68 (sequence is synthesized)
taaagcaattttgattacatctcaaaacaatccatggagttagggtaaatgtgctgttcacacaggaataatcacaggtatagaaccgagaacctaggaacagagcaatgtatatatata

SEQ ID NO: 408795 - DNA, 120 bp, Artificial Sequence
  ENSG00000148019_69 (sequence is synthesized)
tgtatttaaaaaatggcatcacaagtcagtagagaagggtttgaactattcagtaaatgatgttgaggttatttactactttttcttatttcatatcatggatgaaaaaaatcaagatga

SEQ ID NO: 408796 - DNA, 120 bp, Artificial Sequence
  ENSG00000148019_70 (sequence is synthesized)
attaaacatggaaattaaaaataactagaagaaaatactggaaaaaaattgtaataaatgtgtaagaaaggcattcccaaccaagacacaaaacccagtagccatgaaaaaaaagataga

SEQ ID NO: 408797 - DNA, 120 bp, Artificial Sequence
  ENSG00000148019_71 (sequence is synthesized)
tttgactacatttttaaaaagtaaaacctttcactttttacaaaactttgataaaattagatttcataaataaaggagtgggaaaatacatgtaatagaacagaagatttaagataatat

SEQ ID NO: 408798 - DNA, 120 bp, Artificial Sequence
  ENSG00000148019_72 (sequence is synthesized)
aaagagcacctacaaacaacaaaaattggacaaaggctataaaaatattttataaataagaaatacagactataaacataaactttcaacctcgtaagcaatcaggaaaattaaagttaa

SEQ ID NO: 408799 - DNA, 120 bp, Artificial Sequence
  ENSG00000148019_73 (sequence is synthesized)
aatgagatactatttttcaatacattgaaatggcagattattaaagattggtgatagtgctggagataatgtgaggaaaggagtattctcagtcattgtagaaattgatacagcttttgg

SEQ ID NO: 408800 - DNA, 120 bp, Artificial Sequence
  ENSG00000148019_74 (sequence is synthesized)
atggacagtttgacagtgtgtatcaacatgtgaaatgtctccagcctttgatctaatgactaattttaggcatccagcctgaagaaatattcacacaagtgcccaaagagtcagatacaa

SEQ ID NO: 408801 - DNA, 120 bp, Artificial Sequence
  ENSG00000148019_75 (sequence is synthesized)
gactgtgtgaagtgttttttgagataataaaaaactagaaacagcataaatgtacagaaatgcagaaattgttgaattagtacataccaatttctgacatataacactctgcagcagata

SEQ ID NO: 408802 - DNA, 120 bp, Artificial Sequence
  ENSG00000148019_76 (sequence is synthesized)
aagacaatagctctctagtgtggacatgaaaatatttctaagacattgacaggacgaagaagttgcacagtaaccacgcactcctgtttacatttgtatagttaaaacttgtttacctat

SEQ ID NO: 408803 - DNA, 120 bp, Artificial Sequence
  ENSG00000148019_77 (sequence is synthesized)
acgtagcatatatgcgtgtgtgcaccctagaaaagagtctgtgataacacatatcaagctattgacagcggttttgtctgctgaaggaggaaaaaaggggggcttctcacattttactcc

SEQ ID NO: 408804 - DNA, 120 bp, Artificial Sequence
  ENSG00000148019_78 (sequence is synthesized)
atttaattctaggttgtttggtttaaaaaaaaagtttttatgtacaacagacaatttttaaaattccttttcatcatagaaaatgaaaatgtgtactctgttatcctttacgctctgtcc

SEQ ID NO: 408805 - DNA, 120 bp, Artificial Sequence
  ENSG00000148019_79 (sequence is synthesized)
atttttttcttcaaaaatgtgtctgacctattatcaatgtgaatgaaaatgagctttgctacataacctcttttcagagctttgtattcctgaagtgttggagtcgcctacatggcatag

SEQ ID NO: 408806 - DNA, 120 bp, Artificial Sequence
  ENSG00000148019_80 (sequence is synthesized)
tcaaatgtttttaacttaaccacaacccacagtaaaaatgaagctttctgcaaagttaaaagtagtagtcctggccccaccttccttgtgtgcacgtataattaatggaaaattgcatca

SEQ ID NO: 408807 - DNA, 120 bp, Artificial Sequence
  ENSG00000148019_81 (sequence is synthesized)
aacaactctgattgtacttctagtgactaattcatgttctgttctattccttgcctttaaagaaaattatgttggcaactcacgaagtatgtttcacaatccactaatgggtaatgtcct

SEQ ID NO: 408808 - DNA, 120 bp, Artificial Sequence
  ENSG00000148019_82 (sequence is synthesized)
actgtttggaaacactggctagagtgtttcaaacatctgctctgtttacccctgacaaaactgctactcgtggggcaatgcaagtctttcccacatttgttttattttatggctaaaagt

SEQ ID NO: 408809 - DNA, 120 bp, Artificial Sequence
  ENSG00000148019_83 (sequence is synthesized)
catttctgcatttgcaaattacttccaaagcctaccttccttgagctctttaactctctatagtcttctggtaattttctttagatttcccttttcagaacccttttgtgacactgaaaa

SEQ ID NO: 408810 - DNA, 120 bp, Artificial Sequence
  ENSG00000148019_84 (sequence is synthesized)
cctgagttttcaaactgatacatctacctgagaattttcacatataatttggtcaaaaagttaaaaaataagaagactttgccctgtgactgaggtgctcagaaggtatggctggctgct

SEQ ID NO: 408811 - DNA, 120 bp, Artificial Sequence
  ENSG00000148019_85 (sequence is synthesized)
cacaaaggcacatagtgagtgataggggctgaaagggctcagagaatgcccgagttctcttagtacagtttgtacattttaaaccactgtgaactgaaaaaaaaaaaaaaggcaaccttg

SEQ ID NO: 408812 - DNA, 120 bp, Artificial Sequence
  ENSG00000148019_86 (sequence is synthesized)
gtagtttagaaatagataaggacccacttatagattaaataataattagcttgttccagagagaccagtgaagattagttggtttatttaatgtgttagaaagatggtcctcaaagtcct

SEQ ID NO: 408813 - DNA, 120 bp, Artificial Sequence
  ENSG00000148019_87 (sequence is synthesized)
tgaaatgtgaaggcggcttttatctccttaagaaaacaagaaaactccacaaaatcttgaaagctagataatcctagcttaaatgataaaatttgagtagagtttgaaaacactaaaatc

SEQ ID NO: 408814 - DNA, 120 bp, Artificial Sequence
  ENSG00000148019_88 (sequence is synthesized)
agtttgccaaataaccagctctaatttctttataccaaagccaaacttcacctaaatcttacctaagaattgagttccttattgtaaccagataggagacacttttgtatattattccaa

SEQ ID NO: 408815 - DNA, 120 bp, Artificial Sequence
  ENSG00000148019_89 (sequence is synthesized)
atattgcaaacctacaaggagtaaaaggtgttattattttaaagaagaaggaatgaggcctgagaggtattgattcacttggttgagggcttcaagtagcacaaggcaaaagcaggattt

SEQ ID NO: 408816 - DNA, 120 bp, Artificial Sequence
  ENSG00000148019_90 (sequence is synthesized)
gttgacttccaaacctgttttcttccttcaccatgtggcctttgcatctttcccacacaaatattattccacaaatatttattgtcaccaactataataaaagaacagaactatgtatca

SEQ ID NO: 408817 - DNA, 120 bp, Artificial Sequence
  ENSG00000148019_91 (sequence is synthesized)
agattatgagaatttatggaatgtagaaatagtaaatgaatcattaggaaagggatgctagtgcttccatttaaaaaattacccttatttgtttttcatacaatattcatcattttggat

SEQ ID NO: 408818 - DNA, 120 bp, Artificial Sequence
  ENSG00000148019_92 (sequence is synthesized)
atgttttctgattcatgattacttttgatactttgcaattgaaatttgggatgcactttgatgacagttttagcagtgcttttgtatgattttgttgttaatgaagaattatcctttcat

SEQ ID NO: 408819 - DNA, 120 bp, Artificial Sequence
  ENSG00000148019_93 (sequence is synthesized)
acgatagaaaacaaaatttcttcccagttccattttttttcccttgtttcctcctccttccttgcaaattcttacccaaagttgttgaattaggtagcaccttgcttctttcaatgatga

SEQ ID NO: 408820 - DNA, 120 bp, Artificial Sequence
  ENSG00000148019_94 (sequence is synthesized)
aataaccttaaaatatatgtaatccttataaaacaatactgcaggtaagtttattacccagagatggaacattttagacaaacattccctaaatgtttgctatttatggtttatttaatc

SEQ ID NO: 408821 - DNA, 120 bp, Artificial Sequence
  ENSG00000148019_95 (sequence is synthesized)
tgccaaataatagtctagaattttgaaattgtctataattttgtgaccaagaataatgaaaaaagactttataaactgtttatcagctaatggcataaattttacattctcctgaataca

SEQ ID NO: 408822 - DNA, 120 bp, Artificial Sequence
  ENSG00000148019_96 (sequence is synthesized)
taaatttggtataatctagttctactgatattttctttttttttttaaagagtctttaacttttgtagaacacattatctttagtcataagtagcctttttttactgataagaatgagtg

SEQ ID NO: 408823 - DNA, 120 bp, Artificial Sequence
  ENSG00000148019_97 (sequence is synthesized)
acagtggaataagttaagccaaatctaatgtgaaagtgaccttttcttgtaagtaactttgaattttgaaacagtaaaaccatgaagactactacagagaaaaaaattaatgtttttatg

SEQ ID NO: 408824 - DNA, 120 bp, Artificial Sequence
  ENSG00000148019_98 (sequence is synthesized)
tttataatctgccagtttcccagaaaaaggtttgtggtgactttagttcataccctgtacattaagatcaccaaacaattaacaccagataatcttttatttggatgctactttaaattt

SEQ ID NO: 408825 - DNA, 120 bp, Artificial Sequence
  ENSG00000148019_99 (sequence is synthesized)
ttgaaggatatcacttgacttaatatcactgaactgtacacttaaaaatggctaagatataaaacaatttaacataaaatataaaacattagaaattctataattttagtagctagtggt

SEQ ID NO: 408826 - DNA, 120 bp, Artificial Sequence
  ENSG00000148019_100 (sequence is synthesized)
atataattggacatcattgaatgagaataaaaaacaaaaatcttttttcttagcatgattaaagaaattggaaatgtgactgaagtttacaagctcactgagctattttaagagtaactt

SEQ ID NO: 408827 - DNA, 120 bp, Artificial Sequence
  ENSG00000148019_101 (sequence is synthesized)
tatttcttgggctttttttgtatttgcctcagtaatttggagacacagaggtaagccaaatcagtgtctggctttatatttaatagttaggtgtcagtgagtataggggttatataattt

SEQ ID NO: 408828 - DNA, 120 bp, Artificial Sequence
  ENSG00000148019_102 (sequence is synthesized)
atgtaaattatgtcacattcatattgcaattacgtgtgcagacagaagataggaaactttataatttttttcatctaacaagataagtaaattagtttggttttaattaaaatttatatt

SEQ ID NO: 408829 - DNA, 120 bp, Artificial Sequence
  ENSG00000148019_103 (sequence is synthesized)
atttctcatctgcagttgatctgagaaaaaatgtttatcctgcctccttgcttggtttatgtgaaaaaagtgtaataaaataatatgggttattttcggaaagattttatgtaaaaaaga

SEQ ID NO: 408830 - DNA, 120 bp, Artificial Sequence
  ENSG00000148019_104 (sequence is synthesized)
aaaaaaaaatatgggcgattccagtattaattataaaccttatatgagagaattatttcagtgacatagcaagaataagttagtgtctttttactttgttattgattgtgttagactaag

SEQ ID NO: 408831 - DNA, 120 bp, Artificial Sequence
  ENSG00000148019_105 (sequence is synthesized)
ggggattggaatgggaagggtggaagatcattctctgtgctctttaaattgaatagagtcgtaagaaacatttccctccctgaagtaaattctttaaaaattttctgggttctcccggtg

SEQ ID NO: 408832 - DNA, 120 bp, Artificial Sequence
  ENSG00000148019_106 (sequence is synthesized)
ccacagtataggcgtgtggatatgtcacacaatggaggccttgtggtttcatctgtgtagacaggaagtcatttctctgggtccacaaatcagctgttgcctccagcaaaacaaatttga

SEQ ID NO: 408833 - DNA, 120 bp, Artificial Sequence
  ENSG00000148019_107 (sequence is synthesized)
ccaccatttctcacccgacacatggagctatcatagtcaagaatgtccttaagtttaaaagaaatgttcttgggggatacatattttatatgtatatatatatttccagattctaaagct

SEQ ID NO: 408834 - DNA, 120 bp, Artificial Sequence
  ENSG00000148019_108 (sequence is synthesized)
ccctgtcattctgcatcatggtattagagcaagtgaattctgtcagagtatcagattttccttttcagttgtttttagagaccgtaatttctctgtaaaagatagcactactgagatgaa

SEQ ID NO: 408835 - DNA, 120 bp, Artificial Sequence
  ENSG00000148019_109 (sequence is synthesized)
attaattacatttttaaaatgttttattttagtttcataaaaactattttggtgataatgagagaaaatcatgtcacacattttcaatcttcttttatagctggaacatgaaaatgccca

SEQ ID NO: 408836 - DNA, 120 bp, Artificial Sequence
  ENSG00000148053_0 (sequence is synthesized)
ggagcaggagcctcgctggctgcttcgctcgcgctctacgcgctcagtccccggcggtagcaggagcctggacccaggcgccgccggcgggcgtgaggcgccggagcccggcctcgaggt

SEQ ID NO: 408837 - DNA, 120 bp, Artificial Sequence
  ENSG00000148053_1 (sequence is synthesized)
gcataccggacccccattcgcatctaacaaggaatctgcgccccagagagtcccgggagcgccgccggtcggtgcccggcgcgccgggccatgcagcgacggccgccgcggagctccgag

SEQ ID NO: 408838 - DNA, 120 bp, Artificial Sequence
  ENSG00000148053_2 (sequence is synthesized)
cagcggtagcgcccccctgtaaagcggttcgctatgccggggccactgtgaaccctgccgcctgccggaacactcttcgctccggaccagctcagcctctgataagctggactcggcacg

SEQ ID NO: 408839 - DNA, 120 bp, Artificial Sequence
  ENSG00000148053_3 (sequence is synthesized)
cccgcaacaagcaccgaggagttaagagagccgcaagcgcagggaaggcctccccgcacgggtgggggaaagcggccggtgcagcgcggggacaggcactcgggctggcactggctgcta

SEQ ID NO: 408840 - DNA, 120 bp, Artificial Sequence
  ENSG00000148053_4 (sequence is synthesized)
gggatgtcgtcctggataaggtggcatggacccgccatggcgcggctctggggcttctgctggctggttgtgggcttctggagggccgctttcgcctgtcccacgtcctgcaaatgcagt

SEQ ID NO: 408841 - DNA, 120 bp, Artificial Sequence
  ENSG00000148053_5 (sequence is synthesized)
gcctctcggatctggtgcagcgacccttctcctggcatcgtggcatttccgagattggagcctaacagtgtagatcctgagaacatcaccgaaattttcatcgcaaaccagaaaaggtta

SEQ ID NO: 408842 - DNA, 120 bp, Artificial Sequence
  ENSG00000148053_6 (sequence is synthesized)
gaaatcatcaacgaagatgatgttgaagcttatgtgggactgagaaatctgacaattgtggattctggattaaaatttgtggctcataaagcatttctgaaaaacagcaacctgcagcac

SEQ ID NO: 408843 - DNA, 120 bp, Artificial Sequence
  ENSG00000148053_7 (sequence is synthesized)
atcaattttacccgaaacaaactgacgagtttgtctaggaaacatttccgtcaccttgacttgtctgaactgatcctggtgggcaatccatttacatgctcctgtgacattatgtggatc

SEQ ID NO: 408844 - DNA, 120 bp, Artificial Sequence
  ENSG00000148053_8 (sequence is synthesized)
aagactctccaagaggctaaatccagtccagacactcaggatttgtactgcctgaatgaaagcagcaagaatattcccctggcaaacctgcagatacccaattgtggtttgccatctgca

SEQ ID NO: 408845 - DNA, 120 bp, Artificial Sequence
  ENSG00000148053_9 (sequence is synthesized)
aatctggccgcacctaacctcactgtggaggaaggaaagtctatcacattatcctgtagtgtggcaggtgatccggttcctaatatgtattgggatgttggtaacctggtttccaaacat

SEQ ID NO: 408846 - DNA, 120 bp, Artificial Sequence
  ENSG00000148053_10 (sequence is synthesized)
atgaatgaaacaagccacacacagggctccttaaggataactaacatttcatccgatgacagtgggaagcagatctcttgtgtggcggaaaatcttgtaggagaagatcaagattctgtc

SEQ ID NO: 408847 - DNA, 120 bp, Artificial Sequence
  ENSG00000148053_11 (sequence is synthesized)
aacctcactgtgcattttgcaccaactatcacatttctcgaatctccaacctcagaccaccactggtgcattccattcactgtgaaaggcaaccccaaaccagcgcttcagtggttctat

SEQ ID NO: 408848 - DNA, 120 bp, Artificial Sequence
  ENSG00000148053_12 (sequence is synthesized)
aacggggcaatattgaatgagtccaaatacatctgtactaaaatacatgttaccaatcacacggagtaccacggctgcctccagctggataatcccactcacatgaacaatggggactac

SEQ ID NO: 408849 - DNA, 120 bp, Artificial Sequence
  ENSG00000148053_13 (sequence is synthesized)
actctaatagccaagaatgagtatgggaaggatgagaaacagatttctgctcacttcatgggctggcctggaattgacgatggtgcaaacccaaattatcctgatgtaatttatgaagat

SEQ ID NO: 408850 - DNA, 120 bp, Artificial Sequence
  ENSG00000148053_14 (sequence is synthesized)
tatggaactgcagcgaatgacatcggggacaccacgaacagaagtaatgaaatcccttccacagacgtcactgataaaaccggtcgggaacatctctcggtctatgctgtggtggtgatt

SEQ ID NO: 408851 - DNA, 120 bp, Artificial Sequence
  ENSG00000148053_15 (sequence is synthesized)
gcgtctgtggtgggattttgccttttggtaatgctgtttctgcttaagttggcaagacactccaagtttggcatgaaagatttctcatggtttggatttgggaaagtaaaatcaagacaa

SEQ ID NO: 408852 - DNA, 120 bp, Artificial Sequence
  ENSG00000148053_16 (sequence is synthesized)
ggtgttggcccagcctccgttatcagcaatgatgatgactctgccagcccactccatcacatctccaatgggagtaacactccatcttcttcggaaggtggcccagatgctgtcattatt

SEQ ID NO: 408853 - DNA, 120 bp, Artificial Sequence
  ENSG00000148053_17 (sequence is synthesized)
ggaatgaccaagatccctgtcattgaaaatccccagtactttggcatcaccaacagtcagctcaagccagacacatttgttcagcacatcaagcgacataacattgttctgaaaagggag

SEQ ID NO: 408854 - DNA, 120 bp, Artificial Sequence
  ENSG00000148053_18 (sequence is synthesized)
ctaggcgaaggagcctttggaaaagtgttcctagctgaatgctataacctctgtcctgagcaggacaagatcttggtggcagtgaagaccctgaaggatgccagtgacaatgcacgcaag

SEQ ID NO: 408855 - DNA, 120 bp, Artificial Sequence
  ENSG00000148053_19 (sequence is synthesized)
gacttccaccgtgaggccgagctcctgaccaacctccagcatgagcacatcgtcaagttctatggcgtctgcgtggagggcgaccccctcatcatggtctttgagtacatgaagcatggg

SEQ ID NO: 408856 - DNA, 120 bp, Artificial Sequence
  ENSG00000148053_20 (sequence is synthesized)
gacctcaacaagttcctcagggcacacggccctgatgccgtgctgatggctgagggcaacccgcccacggaactgacgcagtcgcagatgctgcatatagcccagcagatcgccgcgggc

SEQ ID NO: 408857 - DNA, 120 bp, Artificial Sequence
  ENSG00000148053_21 (sequence is synthesized)
atggtctacctggcgtcccagcacttcgtgcaccgcgatttggccaccaggaactgcctggtcggggagaacttgctggtgaaaatcggggactttgggatgtcccgggacgtgtacagc

SEQ ID NO: 408858 - DNA, 120 bp, Artificial Sequence
  ENSG00000148053_22 (sequence is synthesized)
actgactactacagggtcggtggccacacaatgctgcccattcgctggatgcctccagagagcatcatgtacaggaaattcacgacggaaagcgacgtctggagcctgggggtcgtgttg

SEQ ID NO: 408859 - DNA, 120 bp, Artificial Sequence
  ENSG00000148053_23 (sequence is synthesized)
tgggagattttcacctatggcaaacagccctggtaccagctgtcaaacaatgaggtgatagagtgtatcactcagggccgagtcctgcagcgaccccgcacgtgcccccaggaggtgtat

SEQ ID NO: 408860 - DNA, 120 bp, Artificial Sequence
  ENSG00000148053_24 (sequence is synthesized)
gagctgatgctggggtgctggcagcgagagccccacatgaggaagaacatcaagggcatccataccctccttcagaacttggccaaggcatctccggtctacctggacattctaggctag

SEQ ID NO: 408861 - DNA, 120 bp, Artificial Sequence
  ENSG00000148053_25 (sequence is synthesized)
ggcccttttccccagaccgatccttcccaacgtactcctcagacgggctgagaggatgaacatcttttaactgccgctggaggccaccaagctgctctccttcactctgacagtattaac

SEQ ID NO: 408862 - DNA, 120 bp, Artificial Sequence
  ENSG00000148053_26 (sequence is synthesized)
atcaaagactccgagaagctctcgagggaagcagtgtgtacttcttcatccatagacacagtattgacttctttttggcattatctctttctctctttccatctcccttggttgttcctt

SEQ ID NO: 408863 - DNA, 120 bp, Artificial Sequence
  ENSG00000148053_27 (sequence is synthesized)
tttaaattttctttttcttttttttttcgtcttccctgcttcacgattcttaccctttcttttgaatcaatctggcttctgcattactattaactctgcatagacaaaggccttaacaaa

SEQ ID NO: 408864 - DNA, 120 bp, Artificial Sequence
  ENSG00000148053_28 (sequence is synthesized)
ttaacaaacgtaatttgttatatcagcagacactccagtttgcccaccacaactaacaatgccttgttgtattcctgcctttgatgtggatgaaaaaaagggaaaacaaatatttcactt

SEQ ID NO: 408865 - DNA, 120 bp, Artificial Sequence
  ENSG00000148053_29 (sequence is synthesized)
aaactttgtcacttctgctgtacagatatcgagagtttctatggattcacttctatttatttattattattactgttcttattgtttttggatggcttaagcctgtgtataaaaaagaaa

SEQ ID NO: 408866 - DNA, 120 bp, Artificial Sequence
  ENSG00000148053_30 (sequence is synthesized)
acttgtgttcaatctgtgaagcctttatctatgggagattaaaaccagagagaaagaagatttattatgaaccgcaatatgggaggaacaaagacaaccactgggatcagctggtgtcag

SEQ ID NO: 408867 - DNA, 120 bp, Artificial Sequence
  ENSG00000148053_31 (sequence is synthesized)
tccctacttaggaaatactcagcaactgttagctgggaagaatgtattcggcaccttcccctgaggacctttctgaggagtaaaaagactactggcctctgtgccatggatgattctttt

SEQ ID NO: 408868 - DNA, 120 bp, Artificial Sequence
  ENSG00000148053_32 (sequence is synthesized)
cccatcaccagaaatgatagcgtgcagtagagagcaaagatggcttccgtgagacacaagatggcgcatagtgtgctcggacacagttttgtcttcgtaggttgtgatgatagcactggt

SEQ ID NO: 408869 - DNA, 120 bp, Artificial Sequence
  ENSG00000148053_33 (sequence is synthesized)
ttgtttctcaagcgctatccacagaacctttgtcaacttcagttgaaaagaggtggattcatgtccagagctcatttcggggtcaggtgggaaagccaagaacttggaaaagataagaca

SEQ ID NO: 408870 - DNA, 120 bp, Artificial Sequence
  ENSG00000148053_34 (sequence is synthesized)
agctataaattcggaggcaagtttcttttacaatgaacttttcagatctcacttccctccgacccctaacttccatgcccacccgtccttttaactgtgcaagcaaaattgtgcatggtc

SEQ ID NO: 408871 - DNA, 120 bp, Artificial Sequence
  ENSG00000148053_35 (sequence is synthesized)
gtttattagctgagtatcaatgtctctgcgttgtacggtggtgatgggttttaatgaatatggaccctgaagcctggaaatcctcatccacgtcgaacccacaggactgtgggaagggca

SEQ ID NO: 408872 - DNA, 120 bp, Artificial Sequence
  ENSG00000148053_36 (sequence is synthesized)
gaatcaatccctaagggaaaggaaacctcaccctgagggcatcacatgcactcatgttcagtgtacacaggtcaagtcccttgctctgggctctagttgggagagtggtttcattccaag

SEQ ID NO: 408873 - DNA, 120 bp, Artificial Sequence
  ENSG00000148053_37 (sequence is synthesized)
tgtactccattgtcagtatgctgtttttgtttccttcactccattcaaaaagtcaaaatacaaaatttggcacagcatgccaacgggaggctgtgcccagaccaagcactggaagtgtgc

SEQ ID NO: 408874 - DNA, 120 bp, Artificial Sequence
  ENSG00000148053_38 (sequence is synthesized)
ttctaggcatagtcattggttttgcaaaaagagggctcaaatttaaatagaaatttacagctatttgaatggtcagatataccaagaaagaaaaatatttctgttcctcaagaaaacttg

SEQ ID NO: 408875 - DNA, 120 bp, Artificial Sequence
  ENSG00000148053_39 (sequence is synthesized)
ctaccctctgtgaggggaattttgctaaacttgacatctttataacatgagccagattgaaagggagtgattttcattcatcttaggtcatgttatttcatatttgtttctgaaggtgcg

SEQ ID NO: 408876 - DNA, 120 bp, Artificial Sequence
  ENSG00000148053_40 (sequence is synthesized)
atagctctgttttaggttttgcttgcgcctgttaattactggaacaccttatttttcattaaaggctttgaaagccaattctcaaaaattcaaaagtgcaaattaacagaacaaaaggaa

SEQ ID NO: 408877 - DNA, 120 bp, Artificial Sequence
  ENSG00000148053_41 (sequence is synthesized)
atccagtagcaactgcagtcaagcgagggagttgacaagataaaccttacgtccattcaagttatatgctggcctatgagagatgagagttgggtcgtttgttctctttgttgatgattt

SEQ ID NO: 408878 - DNA, 120 bp, Artificial Sequence
  ENSG00000148053_42 (sequence is synthesized)
taaaaaaaccctctagaatacacataataacataatgaaagccatatctccatgatatatatgtgcacatatatatacatacatgtgcatgtatgtatcatattaaggacccatggtact

SEQ ID NO: 408879 - DNA, 120 bp, Artificial Sequence
  ENSG00000148053_43 (sequence is synthesized)
cttaaaacactgtagaactctgtgacgcagtaaggaaggggcagatttgtacaaaaacttttctagattccatcagcaaaaaccaacacaggtttgtcacgctgcatgtctggccagcta

SEQ ID NO: 408880 - DNA, 120 bp, Artificial Sequence
  ENSG00000148053_44 (sequence is synthesized)
atctcgggggaaaagctacaagttatttattttattttaagagaataaagtaggtaataatttaagggatcaaattcaaggaggaatgtgcaattttagagcaaagatttgtttaaggca

SEQ ID NO: 408881 - DNA, 120 bp, Artificial Sequence
  ENSG00000148053_45 (sequence is synthesized)
aatgagactttgggagcatcccattccagttttgtcttttttttctctgaaagaaaaaagcaaaaaataaaataaaattccacttataccttctgacaagtccctaaaggtcttgaaata

SEQ ID NO: 408882 - DNA, 120 bp, Artificial Sequence
  ENSG00000148053_46 (sequence is synthesized)
aaaggttctatgcaagtgcaaagttttatagttatttttattgctgattattactattactatctctgttgtcttaagagtatgtgctgatttcagagacatctcaaattgaaagaatat

SEQ ID NO: 408883 - DNA, 120 bp, Artificial Sequence
  ENSG00000148053_47 (sequence is synthesized)
cagattgcttttaaagtagctgaacgagccacagaatatctgaaattattcattgttgttcctccaccaccccctttctcatggtctgatttttagaagagtggcatcctcgttctaaaa

SEQ ID NO: 408884 - DNA, 120 bp, Artificial Sequence
  ENSG00000148053_48 (sequence is synthesized)
tgtaatgatcaccaaatacggccttccatcaaatttgtgaaaactacaacagtataacagtgacaaacctaattctctagcccaaacctggtctgacaatcatttccatttagaagtcat

SEQ ID NO: 408885 - DNA, 120 bp, Artificial Sequence
  ENSG00000148053_49 (sequence is synthesized)
tgaatagttttccaaacactttccatgtgtgttagcaaattattcctattttgtgtagatgaggacgttgagactcagagacattcagaggcacgctagaggtctccagcctagcttcca

SEQ ID NO: 408886 - DNA, 120 bp, Artificial Sequence
  ENSG00000148053_50 (sequence is synthesized)
gcaccattgggactgaatccaagtactctcactctgaacttcgtggttctgtccactagagactctaatatgcaaacaagcagttcaggaaagaaagcatgctaacacattcatgaagca

SEQ ID NO: 408887 - DNA, 120 bp, Artificial Sequence
  ENSG00000148053_51 (sequence is synthesized)
gtatatgaagttagaagaacaaaaggaaatacaggagatgacaagcaactgagatattgtgatatataatcatgctcttagcttcagctaaattcagctaaattcttgtacactgaacca

SEQ ID NO: 408888 - DNA, 120 bp, Artificial Sequence
  ENSG00000148053_52 (sequence is synthesized)
atgtcataatcaggcttatttagaaaacactttgaactatgctataaaagattatatcagaattcatattatacatgtgttcacatcagcgctacctgtgatgttttcatgtatttatgt

SEQ ID NO: 408889 - DNA, 120 bp, Artificial Sequence
  ENSG00000148053_53 (sequence is synthesized)
atgtgttataaatacttgatttatacatatacaaatgcacatacgtagtgtgtttgtgtgtttatgtataaatttataggcacacaataatagaggtaattataagtaggatgcggtatg

SEQ ID NO: 408890 - DNA, 120 bp, Artificial Sequence
  ENSG00000148053_54 (sequence is synthesized)
aataatttgcttaaaatatgctaaataaccaaaactgtttaacgtcatgttgctgttagtgcttccatactccacgtgggtaggactacatcacacttttcaactctgtgcagtactgca

SEQ ID NO: 408891 - DNA, 120 bp, Artificial Sequence
  ENSG00000148053_55 (sequence is synthesized)
tgggtggaagacatatttaagataatgtgcttcccaaaacaactgaataaaagccatcccactacattgagtgctttctctggctccttgcaaagaaagatactttttgtaatggtccag

SEQ ID NO: 408892 - DNA, 120 bp, Artificial Sequence
  ENSG00000148053_56 (sequence is synthesized)
gaaaggaacattgctttctttttgtctttcagcacatttgtattatgctcaccttgtctctgtctcactgtgacccctttacacttgagttcagagttcaagcattccaaatataaattg

SEQ ID NO: 408893 - DNA, 120 bp, Artificial Sequence
  ENSG00000148053_57 (sequence is synthesized)
gaatgttggcagcccagtggcttgaaggccaatgatgagcagtccaagaccccacagcgagatgagcaactcttaggaattcccacatcctagagtgaatgcaccaactaacagtataga

SEQ ID NO: 408894 - DNA, 120 bp, Artificial Sequence
  ENSG00000148053_58 (sequence is synthesized)
atgctgtccttttcaaagcgtcctaacagcaggattacctggtcaagtatggactttctttgaatctttcttttcacaaattggactgcctgtaataccaataacattgttgtatctaac

SEQ ID NO: 408895 - DNA, 120 bp, Artificial Sequence
  ENSG00000148053_59 (sequence is synthesized)
taaataaatgactgcatatacacacataccctcaattctcttgcttccccattttctttttcatcccctgtctcaggacttttattttcaatgttgacctttggtttggccatatatcac

SEQ ID NO: 408896 - DNA, 120 bp, Artificial Sequence
  ENSG00000148053_60 (sequence is synthesized)
tgttataggaaatctcatgagaggaatggctagtgacccaactctccaaatgtctaagttagtagttacagctgattttttatgatgcataattggaatgtggagcctctgaggttgtga

SEQ ID NO: 408897 - DNA, 120 bp, Artificial Sequence
  ENSG00000148053_61 (sequence is synthesized)
tagcttgtacatgaatttcaaatgtcattctaaagaatgaggggtgggagggatttatagttagaaacgacagtgcaggaaggggtattttcttgttgtcagggctggaatgaatcactg

SEQ ID NO: 408898 - DNA, 120 bp, Artificial Sequence
  ENSG00000148053_62 (sequence is synthesized)
ctgctcaagtcaaaggttcttgaatatccttagtttttgcatttcccctccttttcctttgacctttatttatttaattatgtatttatttatttatttatatacttttgctccattcag

SEQ ID NO: 408899 - DNA, 120 bp, Artificial Sequence
  ENSG00000148053_63 (sequence is synthesized)
cacaaacacaaagcaaagcaaaaaaaaaaatatatatatatatatctgtatatgtgttgtaggcaaaacactgtgaatttcacaacaaccaccaccaagcaactattttgccatcttaac

SEQ ID NO: 408900 - DNA, 120 bp, Artificial Sequence
  ENSG00000148053_64 (sequence is synthesized)
atacatctcaggagacgaaatgagaaaagatggggatgtcattttttagtctatgcgtttgaggccaggtccatgtttatttatttctttagtctatgcattaatgaaaatgatcctgag

SEQ ID NO: 408901 - DNA, 120 bp, Artificial Sequence
  ENSG00000148053_65 (sequence is synthesized)
tggaggttagctgaacgttcaatgtactggagcaagcatcataaaagctgctagtagccatgtgtttgaacaggaaaaatattacagaaaatgaaatgtaaaggcctatatcttgcagct

SEQ ID NO: 408902 - DNA, 120 bp, Artificial Sequence
  ENSG00000148053_66 (sequence is synthesized)
tgtatatcttactattgcttaaaaaatgtataaagcagctggaaatgttttaaatacaaggtctttgaattaaatgtggattttaaatatgtaatcccttgacaaatgaccaaattatgg

SEQ ID NO: 408903 - DNA, 120 bp, Artificial Sequence
  ENSG00000148053_67 (sequence is synthesized)
tgaactattgctccctgcgttctttgatcattacctatgacttacaaatctgcctggagatgtggacattctgcatttgcttctgtatctggagagatgtttgtatatatccaggccgta

SEQ ID NO: 408904 - DNA, 120 bp, Artificial Sequence
  ENSG00000148053_68 (sequence is synthesized)
tacacacacatttccatatctctctacagatatatttccccttcaatcgtgacctggtatttggaactctccttttcatttggcttatcttccttttaatgtgatgtctctgtgctaata

SEQ ID NO: 408905 - DNA, 120 bp, Artificial Sequence
  ENSG00000148053_69 (sequence is synthesized)
cttaccagttcttgttttgcaatctgttttgaggtccattgctttactaagacccactgcatcttggctgatttcaaagtgacacctgaatacagtgtttaaaaaaaaaaaagttttgtt

SEQ ID NO: 408906 - DNA, 120 bp, Artificial Sequence
  ENSG00000148053_70 (sequence is synthesized)
tgtaaatcatgtgaccagcttctctcaacctgacatggaaagtctcttgtactacagtgtatttaataaaaatgatgtcttacaataaataacatactccaaaagagagactaaaaatga

SEQ ID NO: 408907 - DNA, 120 bp, Artificial Sequence
  ENSG00000148053_71 (sequence is synthesized)
aagacggattctcagacaaggcttgcaaatgccccgcagccatcatttaactgcacccgcagaatagttacggtttgtcacccgaccctcccggatcgcctaatttgtccctagtgagac

SEQ ID NO: 408908 - DNA, 120 bp, Artificial Sequence
  ENSG00000148053_72 (sequence is synthesized)
cccgaggctctgcccgcgcctggcttcttcgtagctggatgcatatcgtgctccgggcagcgcgggcgcagggcacgcgttcgcgcacaccctagcacacatgaacacgcgcaagagctg

SEQ ID NO: 408909 - DNA, 120 bp, Artificial Sequence
  ENSG00000148053_73 (sequence is synthesized)
aaccaagcacggtttccatttcaaaaagggagacagcctctaccgcgattgtagaagagactgtggtgtgaattagggaccgggaggcgtcgaacggaggaacggttcatcttagagact

SEQ ID NO: 408910 - DNA, 120 bp, Artificial Sequence
  ENSG00000148053_74 (sequence is synthesized)
accaacagtcagctcaagccagacacatggcccagaggttcccccaagaccgcctgataataatttggtatttggaggctcctgtgtcactgcaggaactaaaggaggctaaatccatgc

SEQ ID NO: 408911 - DNA, 120 bp, Artificial Sequence
  ENSG00000148053_75 (sequence is synthesized)
ctgatggaggagaagagttctatggttatctgcaaattctggccagacaacatcttgacgtcactccttagcttccataacctagccaagcaagaagttgcctttccaagacaaagcagt

SEQ ID NO: 408912 - DNA, 120 bp, Artificial Sequence
  ENSG00000148053_76 (sequence is synthesized)
gtgctctaatgactaacccctcaaagtactatgccactttaactatagacccatctcctcgatcaatcaggatggcaagatggagctgaggagctcagcaacatcaagtctggagttggt

SEQ ID NO: 408913 - DNA, 120 bp, Artificial Sequence
  ENSG00000148053_77 (sequence is synthesized)
ctttaactcaactagctcgtttagacgtgtctgaacaccacatcacctgacagcacggggtggtttcccagtaaaatttacaaactcagctcaagggcagctgtgttgctttcctttcct

SEQ ID NO: 408914 - DNA, 120 bp, Artificial Sequence
  ENSG00000148053_78 (sequence is synthesized)
tgactgctgagaaactttttgacagggaacaatggaaacacaccttctgagctgaaacaaacaaacagaaacaaaacatactaaccagcaaaatccccaaatcatcaatcttgggttctc

SEQ ID NO: 408915 - DNA, 120 bp, Artificial Sequence
  ENSG00000148053_79 (sequence is synthesized)
ttgaagggcaggagtgtgttttatcttctcccgtcggagcaaacactatagatgtcctccctaaaattctgtcttccctagagcagccttgtaaattagctagggtcctagggttgaggc

SEQ ID NO: 408916 - DNA, 120 bp, Artificial Sequence
  ENSG00000148053_80 (sequence is synthesized)
ctaaatcaacttaaaattgtctctaaatatgtacctggatgtgtttgtacttgcagagcatgccctcttcatgtgcctagggctagtaactccctgtggcagaggcatgtaaagtattct

SEQ ID NO: 408917 - DNA, 120 bp, Artificial Sequence
  ENSG00000148053_81 (sequence is synthesized)
gactttttttttttcaacttaattccatttccaatgaaatggatttttaaaaattttctccagagtgtgccatacttctccagctattatagttaatgtgtgtgtatccttgtgtatatg

SEQ ID NO: 408918 - DNA, 120 bp, Artificial Sequence
  ENSG00000148053_82 (sequence is synthesized)
tgtgtttgtgtgtgcatatgtgttttcctagtggttacatgcttactaggcaattatgtaaataagcacagattcataggccagctaggcctgaggaaagaagacattataaagggaggg

SEQ ID NO: 408919 - DNA, 120 bp, Artificial Sequence
  ENSG00000148053_83 (sequence is synthesized)
agtattttaacattagctaaagctatcacacaaggcacccattctgctcccctcaacagccacagcccacttcgtccttgtcttaccaataaggggaaaggctggaggtgatatttttca

SEQ ID NO: 408920 - DNA, 120 bp, Artificial Sequence
  ENSG00000148053_84 (sequence is synthesized)
cagaaccgcagaggttttgaacatatttgcaacattactttgagtacacatgagcaaaaattctgaattacatccaggaccccagaagctcattagatcaaagagtgcggggcccctcag

SEQ ID NO: 408921 - DNA, 120 bp, Artificial Sequence
  ENSG00000148053_85 (sequence is synthesized)
agttaccagagattatctgcagacttcagtgcaatcgaatgaccatggtccattttgatggtcagaggtaggactgaaaaacgggtagaaacaattgctttagcgcttccttctgtactt

SEQ ID NO: 408922 - DNA, 120 bp, Artificial Sequence
  ENSG00000148053_86 (sequence is synthesized)
tgcctattaatgttttgtctttcaaaaatatattttctcctaattgtttaattggccaaataatggctgctttgggagttgtttgtatgccttggaaggccatggcctgcactttaaaaa

SEQ ID NO: 408923 - DNA, 120 bp, Artificial Sequence
  ENSG00000148053_87 (sequence is synthesized)
taagctaagtccattctgcccagcacgagcattaggacagagaatgcacttattttaggatccttaaaaattgcttcttttatggcacactgggttgacgactcatctcgtgggagcctt

SEQ ID NO: 408924 - DNA, 120 bp, Artificial Sequence
  ENSG00000148053_88 (sequence is synthesized)
catggcacattgctgctgttctgcaggtcccaatacaattccttccccctctcagtgccacggcccccccattgctagctacaacaatttgatatcatattcccttttcaactccaaagg

SEQ ID NO: 408925 - DNA, 120 bp, Artificial Sequence
  ENSG00000148053_89 (sequence is synthesized)
agatgataagaagctatcaaataatgctttaaaaaagcaacttgagtttcttaaaagaaaggaaatgaatacatgctgcataattacatttaaaatgtaagccatgttattataagccgc

SEQ ID NO: 408926 - DNA, 120 bp, Artificial Sequence
  ENSG00000148053_90 (sequence is synthesized)
actgagatgaagatttgttagcaaaccagtttcaagcacactcacagtgaagtaaaatcatgtttttagcatctgaccattgggtaatattattctttgttatcaaaagagaaatatcac

SEQ ID NO: 408927 - DNA, 120 bp, Artificial Sequence
  ENSG00000148053_91 (sequence is synthesized)
gacctcctagaggaaacactccagtcctaagcttggtgtctgaaaagaaaaacaaaaataaagattatggatttaggtcagggagacagagtgatattctgaagactgtgtttactccct

SEQ ID NO: 408928 - DNA, 120 bp, Artificial Sequence
  ENSG00000148053_92 (sequence is synthesized)
catcatcggccaaccaagatggagttctgcatcctgcacatatcagacatttcagtccaatttcaccaaagcatcagtgatgttctagaagcatcccagcagatggaggatcctaatgta

SEQ ID NO: 408929 - DNA, 120 bp, Artificial Sequence
  ENSG00000148053_93 (sequence is synthesized)
tttgttctgggtatttcccaaggcccagcctgactggagtgtgtgtaccaacaggatgaatccaatcaagctacgcccccattttggtttcggattggccactcttgcatgtgctagtag

SEQ ID NO: 408930 - DNA, 120 bp, Artificial Sequence
  ENSG00000148053_94 (sequence is synthesized)
attgtggaccaggaccagctgagcaaacacagttgcagagtagcctcctatgttgctaagaagctcctgctacccaggtgctttgaacaattgagtgctccctctggttaagtagagatg

SEQ ID NO: 408931 - DNA, 120 bp, Artificial Sequence
  ENSG00000148053_95 (sequence is synthesized)
gcaccaccggagtttttcttggatgtgaggctcaatcctttacggcagctattataacaaagtgaaggttttctccctgggaaatgcagcttttctctgtctttactaattctgccagcc

SEQ ID NO: 408932 - DNA, 120 bp, Artificial Sequence
  ENSG00000148053_96 (sequence is synthesized)
tgtgagagtaaccaccgtagctgggcttcttctcagattaattgtcatgccaggtctccttcctggggagctgtgatgctgctctgaggttgattgctgaggttgtagtgggtttttgtt

SEQ ID NO: 408933 - DNA, 120 bp, Artificial Sequence
  ENSG00000148053_97 (sequence is synthesized)
tgtttttgtttagtttttcttgattgttcttctttctcttgaatggcaagagaagaaacactttctctaacccacggccaggaaggaaatggggagagagctacttcttagttcaacctg

SEQ ID NO: 408934 - DNA, 120 bp, Artificial Sequence
  ENSG00000148053_98 (sequence is synthesized)
gttgccacataaaggaatctctctccttggactcagcccctaactggaagcaagagccactgccctctgagactgagagagcagcccgaggaggagatgaatccattctgccctttgttt

SEQ ID NO: 408935 - DNA, 120 bp, Artificial Sequence
  ENSG00000148053_99 (sequence is synthesized)
gggtttgcttcctgtcagtgagagaatgctgaggcagttcctgttatgtgaaactttcatttttaaaaccaggacagtcctaaacagactggaatgagttggtcaatcccagttggtata

SEQ ID NO: 408936 - DNA, 120 bp, Artificial Sequence
  ENSG00000148053_100 (sequence is synthesized)
ggcccaatgatttttgctagtaagataggattgtcttcctcacccaaaatgccttcaagtgccctaaaatgggtattttaaaataagaataaataatgtagatttagtagaaaacctgga

SEQ ID NO: 408937 - DNA, 120 bp, Artificial Sequence
  ENSG00000148053_101 (sequence is synthesized)
aaacataagaaacaaagatgaaacgaaaagtcccatgtaattccaccagttagagttaaccactgatatcgtttggatatatggctttctagtcttgtggatatccttttaatctcttgt

SEQ ID NO: 408938 - DNA, 120 bp, Artificial Sequence
  ENSG00000148053_102 (sequence is synthesized)
aatataaagtctgaccatatgtgtccttgcatttgtttgtactggactctgttaatatttctatagtaatggctcactttggggagattgtgctgcacagtgtgtaggaagcacattggg

SEQ ID NO: 408939 - DNA, 120 bp, Artificial Sequence
  ENSG00000148053_103 (sequence is synthesized)
tgtattattcccagttttgtattttgtatttccttggagatgtgcaggggttaagagcgggggtctggccatagctggccacgtcagactctcatatggtaagtatcacagagcacatga

SEQ ID NO: 408940 - DNA, 120 bp, Artificial Sequence
  ENSG00000148053_104 (sequence is synthesized)
ggcctgtgttatgcgctggaaagactcaggaaatgagaggctctcttgttctgacaaggcaggctgagagctctcatttagggtcatcactccagataactccaaatgcagtttattgct

SEQ ID NO: 408941 - DNA, 120 bp, Artificial Sequence
  ENSG00000148053_105 (sequence is synthesized)
caactgaagcagatgatcactttttgcctccaagttcttcaccctagctagctcctttcaaagagccgagtatgctggatcttaaagggccaaactagttacatctcatacatttcctga

SEQ ID NO: 408942 - DNA, 120 bp, Artificial Sequence
  ENSG00000148053_106 (sequence is synthesized)
tgtttagggatgccttcacttccatcaaggataccttggctgtgcaaggacctctgatagctggagtctccttttggtcactcccagctttgcttaaacttgatggagtttgctgtccag

SEQ ID NO: 408943 - DNA, 120 bp, Artificial Sequence
  ENSG00000148053_107 (sequence is synthesized)
tgatccccggatctttcatcatgaaagccttccttcctctcctgatgtctcaggcctctagacctagactggggttctggcaaggaggcctctatcaatagtatgacatccaataatatg

SEQ ID NO: 408944 - DNA, 120 bp, Artificial Sequence
  ENSG00000148053_108 (sequence is synthesized)
ttagtgttgatattttgcacagtaatattaagtttaagagattataaaaatgagttcaaatgaataagttcctgtgatgtaagagattagatatgtgtgatttcagaaccaaaggcaggg

SEQ ID NO: 408945 - DNA, 120 bp, Artificial Sequence
  ENSG00000148053_109 (sequence is synthesized)
gggaatcccagaaagaaaacaataatataatcctagtttctatatattatttttattcattactgtatatgggtagagatcaatattctttcttatgctgttactattaattaacacatt

SEQ ID NO: 408946 - DNA, 120 bp, Artificial Sequence
  ENSG00000148053_110 (sequence is synthesized)
ttttaaccatgccattgaacttttgggtgcattaaagtggaacccaagctcctcattagataataatggcatttggactgagtgccatattcctaaatttccaataaagtggttgatata

SEQ ID NO: 408947 - DNA, 120 bp, Artificial Sequence
  ENSG00000148053_111 (sequence is synthesized)
gagaggacaggataaagccctatagtgtgcagttatatcaaaacagctagtctccactttagggaatgcctttactagagattacatgaaatgtctgcttataaaataagcagagatggc

SEQ ID NO: 408948 - DNA, 120 bp, Artificial Sequence
  ENSG00000148053_112 (sequence is synthesized)
accactaagcagccacctgaattgttttcctacaggaatgattacttttcagatccatttatgttttcatgctcaatacttactccccttccctgcaacacccaaagagtttacttttgc

SEQ ID NO: 408949 - DNA, 120 bp, Artificial Sequence
  ENSG00000148053_113 (sequence is synthesized)
aagtcatttggtcttcagtctactactgaggaatagagaggcactaactgctttacccaggatcagaactcatgttcttaccttctattaatagagtacttgagccagatggactaactg

SEQ ID NO: 408950 - DNA, 120 bp, Artificial Sequence
  ENSG00000148053_114 (sequence is synthesized)
gtctcacattttctctatcttggttttacttccataaacatcaatatctttacccacatgatttttccatcctcccatttttttccatatgtattagggttcaggaactatgatgctaat

SEQ ID NO: 408951 - DNA, 120 bp, Artificial Sequence
  ENSG00000148053_115 (sequence is synthesized)
gatcacatttcttcctagttcctaatttcattagtgccatttcctgatatctacagaaacaattatcaatacatgtagctgcttgagccttatttagaaggctagcctttcttttccaag

SEQ ID NO: 408952 - DNA, 120 bp, Artificial Sequence
  ENSG00000148053_116 (sequence is synthesized)
tgctgtcagaatgtatacatttagtctgtctttttcccttttaggagtctttgttctgggttgatggcaaaattcctctttttacatgtgagatttttgatttcactgaattctacctag

SEQ ID NO: 408953 - DNA, 120 bp, Artificial Sequence
  ENSG00000148053_117 (sequence is synthesized)
atttttatggacattggattttaaagaggaaaacactcattttcttagtaagatattggtgatacatagctatgccattgatttccatactcctgagctttggggagggagacagtggcc

SEQ ID NO: 408954 - DNA, 120 bp, Artificial Sequence
  ENSG00000148053_118 (sequence is synthesized)
aagtagcaggcagaataagatcatcactcatgtcctgaatcaatcacactttccttctcggattgtgtatatgctctgccacttcctacatattacatcctgagtttttaagtaaagtgg

SEQ ID NO: 408955 - DNA, 120 bp, Artificial Sequence
  ENSG00000148053_119 (sequence is synthesized)
atcttagccagatttgagtctaatggctgattcatcggcatagttcttggcgttaacatctcagtgtcctctttagttctctttgaggattcatgtcattgagggcctttgtgcctccac

SEQ ID NO: 408956 - DNA, 120 bp, Artificial Sequence
  ENSG00000148053_120 (sequence is synthesized)
ttgtctcagtatgaggaagaactttggtgtgagggcggagctatgtgaagggttgctgggttgggggattagttcatatggtccccatgccatctatttacttttggagagaggggactt

SEQ ID NO: 408957 - DNA, 120 bp, Artificial Sequence
  ENSG00000148053_121 (sequence is synthesized)
tgagtgggtgggtatggatagatgttcctcaaggaaaccctgctggctaatgggcactacatctgtgtattactgtgattctctctgtaagctccccatgtggccaaggacccccctcct

SEQ ID NO: 408958 - DNA, 120 bp, Artificial Sequence
  ENSG00000148053_122 (sequence is synthesized)
accagggcacttcctgccacctcattgcactggtctcaaccattcagcctgctgctgctgcaccatgttgggctgcggtaggatagggaaggggttctgttgattgctaaatgttgccta

SEQ ID NO: 408959 - DNA, 120 bp, Artificial Sequence
  ENSG00000148053_123 (sequence is synthesized)
actttatttccctctcccacatttcatgcaagggagcggacctaacacatgacttgcattctcttcctatgttcagaaactccagggcttgcccacgtgtatgtatgagtgaccaatgga

SEQ ID NO: 408960 - DNA, 120 bp, Artificial Sequence
  ENSG00000148053_124 (sequence is synthesized)
gcttggaattctttatctatatgatctgtccgaaaatgagatcttttgtactggaatttgtgatgtagttgatcattcagagccaaacgcatataccaataaagacaagactgtcatata

SEQ ID NO: 408961 - DNA, 120 bp, Artificial Sequence
  ENSG00000148053_125 (sequence is synthesized)
aagacactccaagtttggcatgaaaggttttgttttgtttcataagatcccactggatgggtagctgaaataaaggaaaagacagagaaaggggctgtggtgcttgttggttgatgctgc

SEQ ID NO: 408962 - DNA, 120 bp, Artificial Sequence
  ENSG00000148053_126 (sequence is synthesized)
catgtaagctggactcctgggactgctgttggcttatcccgggaagtgctgcttatctggggttttctggtagatgtgggcggtgtttggaggctgtactatatgaagcctgcatatact

SEQ ID NO: 408963 - DNA, 120 bp, Artificial Sequence
  ENSG00000148053_127 (sequence is synthesized)
gtgagctgtgattggggaacaccaatgcagaggtaactctcaggcagctaagcagcacctcaagaaaacatgttaaattaatgcttctcttcttacagtagttcaaatacaaaactgaaa

SEQ ID NO: 408964 - DNA, 120 bp, Artificial Sequence
  ENSG00000148053_128 (sequence is synthesized)
tgaaatcccattggattgtacttctcttctgaaaagtgtgctttttgaccctactggacatttattgacttaattgcttctgtttattaaaattgacctgcaaagttaaaaaaaaattaa

SEQ ID NO: 408965 - DNA, 120 bp, Artificial Sequence
  ENSG00000148053_129 (sequence is synthesized)
agttgagaacaggtataagtgcacactgaatagtctaatctacatgtaacacatattttagtgtgattttctatactctaatcagcactgaattcagagggtttgactttttcatctata

SEQ ID NO: 408966 - DNA, 120 bp, Artificial Sequence
  ENSG00000148053_130 (sequence is synthesized)
acacagtgactaaaagagttaagggtatatataccatcactttgggacttggtagtattattaaaaggttatttccttcactgtcaataaaagtccaaatgtttagcttaggtctgagag

SEQ ID NO: 408967 - DNA, 120 bp, Artificial Sequence
  ENSG00000148053_131 (sequence is synthesized)
tcaaacaatgttaaggattgtcttaaagttccttagccagcaaaacaaaacaaaacaaaacaaacaaatgaaaaacgtttaaaaagaagaagaagaaaaaaaacaagaacaagcagcaac

SEQ ID NO: 408968 - DNA, 120 bp, Artificial Sequence
  ENSG00000148053_132 (sequence is synthesized)
agctgttttgttggggctatagatttaagttaggcatagtcaatttcagaataactaagagtggaatatatgcatatggtgaaattataaccttgcccttttttatttgccctctgcgat

SEQ ID NO: 408969 - DNA, 120 bp, Artificial Sequence
  ENSG00000148053_133 (sequence is synthesized)
ccacctgctttttagaagtctgccgagtgagaaggccacagtatctcatgctgtttgcattacagaactgcagcttttctactctgaaaaggcctgggagcagaatggctggcctgctgt

SEQ ID NO: 408970 - DNA, 120 bp, Artificial Sequence
  ENSG00000148053_134 (sequence is synthesized)
gagcaggagaggagattctaagaaggatagtcccccctacaacatactgtcatactgctgggttttcatgggtaggaaagcttgtcctgaccccagcagcaaagaggtggcaggtcgcta

SEQ ID NO: 408971 - DNA, 120 bp, Artificial Sequence
  ENSG00000148053_135 (sequence is synthesized)
atgaatatatgctttataatgtccttcttcattgctgagagggcagccttagagctgtggatttctgcatcccccctgagtctgacccatggacacctgtttcattcactttagcatcac

SEQ ID NO: 408972 - DNA, 120 bp, Artificial Sequence
  ENSG00000148053_136 (sequence is synthesized)
agtgacctttgtatgctctgttcagtctgtgtcaggcagtatgcttgtcctgaagagaggtttggctatccccaccccaccccaccccaccctgttccttttttatcaggaggacttcag

SEQ ID NO: 408973 - DNA, 120 bp, Artificial Sequence
  ENSG00000148053_137 (sequence is synthesized)
agccaggcctgcagcattttgtttgaaaacacaatcagctctgacagttagacatgcacacagacgccatagctggattggaaacattgatgttttaaaaatttattttttttggaaata

SEQ ID NO: 408974 - DNA, 120 bp, Artificial Sequence
  ENSG00000148053_138 (sequence is synthesized)
ttctatagatttttaactagtccaacacagtcagaaacattgttttgaatcctctgtaaaccaaggcattaatcttaataaaccaggatccatttaggtaccacttgatataaaaaggat

SEQ ID NO: 408975 - DNA, 120 bp, Artificial Sequence
  ENSG00000148053_139 (sequence is synthesized)
atccataatgaatattttatactgcatcctttacattagccactaaatacgttattgcttgatgaagacctttcacagaatcctatggattgcagcatttcacttggctacttcataccc

SEQ ID NO: 408976 - DNA, 120 bp, Artificial Sequence
  ENSG00000148053_140 (sequence is synthesized)
atgccttaaagaggggcagtttctcaaaagcagaaacatgccgccagttctcaagttttcctcctaactccatttgaatgtaagggcagctggcccccaatgtggggaggtccgaacatt

SEQ ID NO: 408977 - DNA, 120 bp, Artificial Sequence
  ENSG00000148053_141 (sequence is synthesized)
ttctgaattcccattttcttgttcgcggctaaatgacagtttctgtcattacttagattccgatctttcccaaaggtgttgatttacaaagaggccagctaatagcagaaatcatgaccc

SEQ ID NO: 408978 - DNA, 120 bp, Artificial Sequence
  ENSG00000148053_142 (sequence is synthesized)
tgaaagagagatgaaattcaagctgtgagccaggcaggagctcagtatggcaaaggttcttgagaatcagccatttggtacaaaaaagatttttaaagcttttatgttataccatggagc

SEQ ID NO: 408979 - DNA, 120 bp, Artificial Sequence
  ENSG00000148053_143 (sequence is synthesized)
catagaaaggctatggattgtttaagaactattttaaagtgttccagacccaaaaaggaaaaataaaaaaaaaggaatatttgtacccaacagctagaaggattgcaaggtagatttttg

SEQ ID NO: 408980 - DNA, 120 bp, Artificial Sequence
  ENSG00000148053_144 (sequence is synthesized)
ttttaaaatggagagaagtggacagataaggccatttaatatatcaaagatcagttgacatctcctagggaatgatgaaaacagcaggctattagaaaattatttcatatagttctcgtg

SEQ ID NO: 408981 - DNA, 120 bp, Artificial Sequence
  ENSG00000148053_145 (sequence is synthesized)
ttcttttcttttttttaatccctgaagggatgatcagtaacatagcttctcttttctgtactctagaccaccccttttcatcattttgctttttatgtctcccataagaaatgtgctttt

SEQ ID NO: 408982 - DNA, 120 bp, Artificial Sequence
  ENSG00000148053_146 (sequence is synthesized)
tagagcttcctaatgcatgtgttgcattattgcagcattagaaaaggagaggtagcatttttgctgaaatcgggcctgtcactctccaataaaggttctggcacttcaatgccaggcagg

SEQ ID NO: 408983 - DNA, 120 bp, Artificial Sequence
  ENSG00000148053_147 (sequence is synthesized)
tctcctaaatgaacagaatgatctgtgtgagccgatgcctgcccttccagaggggccactgtccccagccgcagccaactgtgtcccacaggaatgggagcctaggtttccaaatcttgt

SEQ ID NO: 408984 - DNA, 120 bp, Artificial Sequence
  ENSG00000148053_148 (sequence is synthesized)
gattctttaggagaaacatgaaacctggatttcgtgtgaaatgtcccgattgttaaaaagttggctcaattatttttaaaacattttgtaagccaacaaaagtctgtgggctgccagttt

SEQ ID NO: 408985 - DNA, 120 bp, Artificial Sequence
  ENSG00000148053_149 (sequence is synthesized)
attacttttgtcttaaaacatgatcattgttctctcacggtatccttctgtcttcccgttgcaaattcacttttctttcttcctgacattgccattgagggctttgttaccacaagctaa

SEQ ID NO: 408986 - DNA, 120 bp, Artificial Sequence
  ENSG00000148053_150 (sequence is synthesized)
gaaactgagtttaacagcccagttatctgcaacatgtcaattacctttgctcctctcctgtgattcccaccatgctgtgaccctcagctgtctccctttgctgggaattctgcaccaatg

SEQ ID NO: 408987 - DNA, 120 bp, Artificial Sequence
  ENSG00000148053_151 (sequence is synthesized)
tctcccctcaacccattccctggttggtcctactcccgtgtggccagagacatcctagcaaatccttcctcctattatatctgacactaatttcttttcaacagcgctcatgtctcttgg

SEQ ID NO: 408988 - DNA, 120 bp, Artificial Sequence
  ENSG00000148053_152 (sequence is synthesized)
cccagtcaggtgctgccaggtttagataggaaagtacatgtcccattttcatgggtgcccttaatgtggtccacgtcctatatcttattatatttactcatggctcaatgggggcctcca

SEQ ID NO: 408989 - DNA, 120 bp, Artificial Sequence
  ENSG00000148053_153 (sequence is synthesized)
gagaccctctcaggctgctgagctagactaaggaatgcatccaccgtcatcacatgagacactgactctgtgacgacaaaagtacaaacagtctgaggctaagaaaggttcatctcacaa

SEQ ID NO: 408990 - DNA, 120 bp, Artificial Sequence
  ENSG00000148053_154 (sequence is synthesized)
caggaaaaacaaatctcaacacacattagagataattgattcaggggttttctctcccagtctcccagcagggactgatttcatttctgacccactaggttttctttccagaaataggta

SEQ ID NO: 408991 - DNA, 120 bp, Artificial Sequence
  ENSG00000148053_155 (sequence is synthesized)
gcaaggacaagaactaaacaatcccagccccacccagcaacacagaacacaggagtttgcttttggcttctcactctccaagtaaccctgaattaggcccagaatggctgaggcttggag

SEQ ID NO: 408992 - DNA, 120 bp, Artificial Sequence
  ENSG00000148053_156 (sequence is synthesized)
catctcctcagacagagcagaggcgacacctcttcaggggtgtgtggagtaaatagctcgaagagctgaagacagaaaaccagtttcacgccaggtgcgagagagagcataatggaggga

SEQ ID NO: 408993 - DNA, 120 bp, Artificial Sequence
  ENSG00000148053_157 (sequence is synthesized)
agcccgctttctctctcctcttcttttctctttatttctttagagcacttgacttttttttctctctctctctagtattctaaactgaccccatgaccaactgagaatttatttttgttt

SEQ ID NO: 408994 - DNA, 120 bp, Artificial Sequence
  ENSG00000148053_158 (sequence is synthesized)
cattggttgtttcacagaattagaacacacacgactttttattcctccattgcaaaatggaatcaagatactacacaagacctgtgctttcttcctttgcatgatttacacctccgcctg

SEQ ID NO: 408995 - DNA, 120 bp, Artificial Sequence
  ENSG00000148053_159 (sequence is synthesized)
ttttggtgctagctgtctagaacttctctcttggtttgaatctgattccttcacactacactagaagtttatttcatcttgttttgtctagactccagatacagagggacagctggactg

SEQ ID NO: 408996 - DNA, 120 bp, Artificial Sequence
  ENSG00000148053_160 (sequence is synthesized)
aggacaagcaattccatctagcatagggtctctcagggttggtgcatccagccacatgggcagggccagtcacatctagtctatgtccccagagcccttggagttgcgcagcttagctga

SEQ ID NO: 408997 - DNA, 120 bp, Artificial Sequence
  ENSG00000148053_161 (sequence is synthesized)
cttgactccaaggaaattagtacagaagtaaccactctattaagtgtgttctgctatgttcacatgcctgtagtacctgcaaaccatgccaggttcatctaaagacataggggaagatta

SEQ ID NO: 408998 - DNA, 120 bp, Artificial Sequence
  ENSG00000148053_162 (sequence is synthesized)
aggactcttttggacagaccatgaattgaatttgctgccaggtgctgccagactgaatttggctgacagaactcccagcccaggaaagttccatgacaatgactgtcgcagaaggaaatt

SEQ ID NO: 408999 - DNA, 120 bp, Artificial Sequence
  ENSG00000148053_163 (sequence is synthesized)
tcccactaaagtcagtccattttcaagttttggtcttcagagacaaaagaacgtcccagccacctgattttgatggtgaggtaactctaagttgaattcaggctagtgttgcagtatagc

SEQ ID NO: 409000 - DNA, 120 bp, Artificial Sequence
  ENSG00000148053_164 (sequence is synthesized)
tttggcatgttcatgagtgagcacccagaatgtgttgaaccaacccccacccctaactactgactatgactgcagtgggtttttatggggaaaaaaagtgtgaaaagcaaaaagaaagga

SEQ ID NO: 409001 - DNA, 120 bp, Artificial Sequence
  ENSG00000148053_165 (sequence is synthesized)
acagagattttttatcacctttattgtaagacagtccatttatgaattgagtataaacacatacaaagtaacaagagattcctaagaaacgcaaatccttgagtttcacgcacttcatgt

SEQ ID NO: 409002 - DNA, 120 bp, Artificial Sequence
  ENSG00000148053_166 (sequence is synthesized)
tcaaccatttgctgtaatccagaggcagcctgtgaatcattctcatgccctgttttttttttttttttcctataatgttctgggtttaaaagccatcttttccacattttctgtaaataa

SEQ ID NO: 409003 - DNA, 120 bp, Artificial Sequence
  ENSG00000148053_167 (sequence is synthesized)
tggataatcattttaaaaatttttatttttagtgctgttttaacaatgtagatagatcataaatgtacttgctgaattcaatcatttttaacaagccaataaagtttgataattcatctc

SEQ ID NO: 409004 - DNA, 120 bp, Artificial Sequence
  ENSG00000148057_0 (sequence is synthesized)
aggcgacgggaaggagccgagcttgggttatggcggcgccgggcgcgctgctggtgatgggcgtgagcggctcggggaaatccaccgtgggcgccctgctggcatctgagctgggatgga

SEQ ID NO: 409005 - DNA, 120 bp, Artificial Sequence
  ENSG00000148057_1 (sequence is synthesized)
aattctatgatgctgatgattatcacccggaggaaaatcgaaggaagatgggaaaaggcataccgctcaatgaccaggaccggattccatggctctgtaacttgcatgacattttactaa

SEQ ID NO: 409006 - DNA, 120 bp, Artificial Sequence
  ENSG00000148057_2 (sequence is synthesized)
gagatgtagcctcgggacagcgtgtggttctagcctgttcagccctgaagaaaacgtacagagacatattaacacaaggaaaagatggtgtagctctgaagtgtgaggagtcgggaaagg

SEQ ID NO: 409007 - DNA, 120 bp, Artificial Sequence
  ENSG00000148057_3 (sequence is synthesized)
tgccccctgaattattgcagtcccagtttgagactctggagcccccagcagctccagaaaactttatccaaataagtgtggacaaaaatgtttcagagataattgctacaattatggaaa

SEQ ID NO: 409008 - DNA, 120 bp, Artificial Sequence
  ENSG00000148057_4 (sequence is synthesized)
ccctaaaaatgaaatgacaatgattttgtatcagtggtccaaacagaactaagcataaatcattgtgccatcccaaacctcgttccagccgccttgcccatactagattctaaatgtttc

SEQ ID NO: 409009 - DNA, 120 bp, Artificial Sequence
  ENSG00000148057_5 (sequence is synthesized)
taaaggcaaaccccaatgtgtcaagacagacttgtttaggtgtaattttaggaattatgctggttcatcaggaagcagagggggagttttaaaagtcaagcttaaattgaagtttaaatt

SEQ ID NO: 409010 - DNA, 120 bp, Artificial Sequence
  ENSG00000148057_6 (sequence is synthesized)
catctataaccaaatcaaatgatcagaggaaattctgtaatcaatgctggaaatcgttacattgtttagaacattcttgctcatgcctgtatttgcacaaataaatgaaacttcgctgtc

SEQ ID NO: 409011 - DNA, 120 bp, Artificial Sequence
  ENSG00000148057_7 (sequence is synthesized)
gacgggaaggagccgagcttgggttatggcggcgccgggcgcgctgctggtgatgggcgtgagcggctcggggaactaaggccagtctccagactccacggtcacgggcatcactgcttt

SEQ ID NO: 409012 - DNA, 120 bp, Artificial Sequence
  ENSG00000148057_8 (sequence is synthesized)
aggattacacagtgattggtgtttaaattcctgctaaggcagccatccctttcccagacatccttgcacagaaggaagctccacacattgggcagggcagtaacgggaacatctgtgtcc

SEQ ID NO: 409013 - DNA, 77 bp, Artificial Sequence
  ENSG00000148057_9 (sequence is synthesized)
cggcggggcccggaaggcgacgggaaggagccgagcttgggttatggcggcgccgggcgcgctgctggtgatgggca

SEQ ID NO: 409014 - DNA, 74 bp, Artificial Sequence
  ENSG00000148057_10 (sequence is synthesized)
gagtaactggggtgagacggggttttgccatgttggccgagctagtcccgaactcctggcctcaagtgatccgc

SEQ ID NO: 409015 - DNA, 120 bp, Artificial Sequence
  ENSG00000148057_11 (sequence is synthesized)
aagtgctgggattataggcgtgagccaagggctcaacctaacttggtcttaagtgtgatttctgctatgcacacttctggcttcaccagccatggagtttggccgggatggtctactcat

SEQ ID NO: 409016 - DNA, 120 bp, Artificial Sequence
  ENSG00000148057_12 (sequence is synthesized)
gccatggagtttggccgggatggtctactcatccgtaggctgcatgtctccctgcgcagccttcaatagaatgaactaatgggaaaggtttcactgctctcgcaacctttggttacatcc

SEQ ID NO: 409017 - DNA, 120 bp, Artificial Sequence
  ENSG00000148057_13 (sequence is synthesized)
aggagcagatctcagtttggtacaactgtgtctaacacctctctgatagctttttagtgaaagaaagaggacctttgttaggcaacagtatccagctagaatttaatcacattgttctgt

SEQ ID NO: 409018 - DNA, 120 bp, Artificial Sequence
  ENSG00000148082_0 (sequence is synthesized)
gcagtgctcaccgagcctttgttgagaagggtctcctctcagagtgagtcatgcttttgctgtgagcagccccaagcagctgggcgctccatcagaggcaactatgacttttgcaaagca

SEQ ID NO: 409019 - DNA, 120 bp, Artificial Sequence
  ENSG00000148082_1 (sequence is synthesized)
aacgtgcaaccccaagcagcggtctcccgggccggggctgcgcggccgccgctgtgctggcttttaacggtgggagggcaccatcctcttgctctgctctcgttctccagaaggctgtcc

SEQ ID NO: 409020 - DNA, 120 bp, Artificial Sequence
  ENSG00000148082_2 (sequence is synthesized)
ccactctccgtcccgctccggggacagtggctcgcctgctatgcgcggcagcccgcgccggggccggcaccagcagcgcccgggcggatgcagcgagcccacggaggggcatgcttccac

SEQ ID NO: 409021 - DNA, 120 bp, Artificial Sequence
  ENSG00000148082_3 (sequence is synthesized)
gcttccacgcaccaagtataaccgcttcaggaatgactcggtgacatcggtcgatgaccttctccacagcctgtcggtgagcggcggcggaggcaaggtttcggcggcgcgcgcgacccc

SEQ ID NO: 409022 - DNA, 120 bp, Artificial Sequence
  ENSG00000148082_4 (sequence is synthesized)
ggcggcggctccctacttggtgtccggcgaggcgctgcgcaaggcgcccgacgatgggcccggcagcctgggccacctgctccacaaggtgtcccacctgaaactctccagctcgggcct

SEQ ID NO: 409023 - DNA, 80 bp, Artificial Sequence
  ENSG00000148082_5 (sequence is synthesized)
aaactctccagctcgggcctccgcggcctgtcgtcggccgcccgggagcgggcgggcgcgcggctctcgggcagctgcag

SEQ ID NO: 409024 - DNA, 120 bp, Artificial Sequence
  ENSG00000148082_6 (sequence is synthesized)
gagcgccgccaggaagggccggcccggcgacgagccgctgcccaggccccctcggggggcgccgcacgccagcgaccaggtgctggggcccggagtcacctacgtggtcaagtacttggg

SEQ ID NO: 409025 - DNA, 120 bp, Artificial Sequence
  ENSG00000148082_7 (sequence is synthesized)
gtgcattgaagttctgcgctcaatgaggtctcttgacttcagtacaagaacacaaattaccagggaagccatcagccgcgtctgtgaagctgtgcctggtgcgaagggagccttcaagaa

SEQ ID NO: 409026 - DNA, 120 bp, Artificial Sequence
  ENSG00000148082_8 (sequence is synthesized)
gagaaagcctccaagcaaaatgctgtccagcatcttgggaaagagcaacctccagtttgcgggaatgagcatctctctgaccatctccacggccagtctgaacctgcgaactccggactc

SEQ ID NO: 409027 - DNA, 120 bp, Artificial Sequence
  ENSG00000148082_9 (sequence is synthesized)
caaacagatcatagcgaatcaccacatgcggtccatctccttcgcctctgggggagacccggacacaactgactatgttgcatatgtggctaaggaccctgttaatcgcagagcttgtca

SEQ ID NO: 409028 - DNA, 120 bp, Artificial Sequence
  ENSG00000148082_10 (sequence is synthesized)
cattttggaatgctgtgatgggctggcccaggatgtcatcggctccatcggacaagcctttgagctccggtttaagcaatatttacagtgtcctaccaagattcccgctctccatgatcg

SEQ ID NO: 409029 - DNA, 120 bp, Artificial Sequence
  ENSG00000148082_11 (sequence is synthesized)
aatgcagagtctggatgagccatggacggaagaggagggagatggctcagaccacccatactacaacagcatcccaagcaagatgcctcctccagggggctttcttgatactagactgaa

SEQ ID NO: 409030 - DNA, 120 bp, Artificial Sequence
  ENSG00000148082_12 (sequence is synthesized)
acccagaccccatgctcctgacacagcccagtttgcaggaaaagagcagacttattaccagggaagacacttaggagacacttttggcgaagactggcagcaaacacctttaaggcaagg

SEQ ID NO: 409031 - DNA, 120 bp, Artificial Sequence
  ENSG00000148082_13 (sequence is synthesized)
gtcctcggacatctacagcacgccagaagggaaactgcacgtggcccccacgggagaagcacccacctacgtcaacactcagcagatcccaccacaggcctggccggctgcggtcagcag

SEQ ID NO: 409032 - DNA, 120 bp, Artificial Sequence
  ENSG00000148082_14 (sequence is synthesized)
tgctgagagcagcccaaggaaagacctctttgacatgaaaccttttgaagatgctctcaagaaccagcccttggggcccgtgttaagcaaggcagcctccgtggagtgcatcagccctgt

SEQ ID NO: 409033 - DNA, 120 bp, Artificial Sequence
  ENSG00000148082_15 (sequence is synthesized)
gtcacctagagccccagatgccaagatgctggaggaactgcaagccgagacttggtaccaaggagagatgagcaggaaggaggcagaggggctgctggagaaagacggagacttcctggt

SEQ ID NO: 409034 - DNA, 120 bp, Artificial Sequence
  ENSG00000148082_16 (sequence is synthesized)
caggaagagcaccaccaacccgggctcctttgtcctcacgggcatgcacaatggccaggccaagcacctgctgctcgtggacccagaaggcacgatccggacaaaggacagagtctttga

SEQ ID NO: 409035 - DNA, 120 bp, Artificial Sequence
  ENSG00000148082_17 (sequence is synthesized)
cagtatcagccacctcatcaaccaccacctagaaagcagcctgcccattgtctctgcagggagtgagctgtgtctccagcagccagtggagaggaagcagtgacctggccagcactgctc

SEQ ID NO: 409036 - DNA, 120 bp, Artificial Sequence
  ENSG00000148082_18 (sequence is synthesized)
ccagcactgcgcaccaggtcaggaggacctggagtggactagaatcggggctgctggaactgggacagctgcctgtggctcagagccttcttcaaaagcttcaaaaggaaggcttccttt

SEQ ID NO: 409037 - DNA, 120 bp, Artificial Sequence
  ENSG00000148082_19 (sequence is synthesized)
aaggtcaagtttcataaacttggttctgaatttctcatatgcatattaaaggtgtacatacctatacatcctgtacaaattatccctctatatttatattttttaagactaagaaagatg

SEQ ID NO: 409038 - DNA, 120 bp, Artificial Sequence
  ENSG00000148082_20 (sequence is synthesized)
taagactaatgttctgtgctgtatgtttttaatgaaaaaaaaaaataagtttaactgtagttgtccaggcaaaaatttaattcaactgacccatcccaccgggaaatgccactaggaagg

SEQ ID NO: 409039 - DNA, 120 bp, Artificial Sequence
  ENSG00000148082_21 (sequence is synthesized)
tgtagcctgcagttttacctaataagcacaactggaggggaatagaaacacagaattgtgagggaatcgcaaggcatgctgctcagagcatgcctagccctgcactgaaagctatgagat

SEQ ID NO: 409040 - DNA, 120 bp, Artificial Sequence
  ENSG00000148082_22 (sequence is synthesized)
actggttctgaggcatggctgtgcttgctggtgggagcgggcatcctcccttggcctccctgggacacctcctgtgctccctgcactgcactccacgtgcctggggtgtctacacaactc

SEQ ID NO: 409041 - DNA, 120 bp, Artificial Sequence
  ENSG00000148082_23 (sequence is synthesized)
gctgcagcttcactaaagaacaggtggcactccagcttctccgggtcctgctgagcacagggccccgccacccttgaccccagttgtgcgaggagtacttgggaattcatttcatgccaa

SEQ ID NO: 409042 - DNA, 120 bp, Artificial Sequence
  ENSG00000148082_24 (sequence is synthesized)
aatggcacaaaataagcttcaccaaccaagattttgattgacaagtgcttccctgttctcatgtatctaatgctaaaatgggtatttgtagaagggtggtcggggcaaattcctggtttg

SEQ ID NO: 409043 - DNA, 120 bp, Artificial Sequence
  ENSG00000148082_25 (sequence is synthesized)
tgtctccctctagtcagcggttgactacaggctgcttatggtaattgctagtaaagtcccccgcccgccttatacaataggggagaagcctgtgtgacagcaagagcaggcacccatccc

SEQ ID NO: 409044 - DNA, 120 bp, Artificial Sequence
  ENSG00000148082_26 (sequence is synthesized)
agagctcagtcccgaagactcaggtattgaggcttctggggctgcatgtgccagaaacccaggagtcactggaatccatttgaggtactgcctctggcatgagggatgggggaaaggcct

SEQ ID NO: 409045 - DNA, 120 bp, Artificial Sequence
  ENSG00000148082_27 (sequence is synthesized)
gctgtcccaacaacaaggtttctccgttgctgcagggaagagcatgtgcctgcccccactctttgtcttgactccctttcttccaggtaaaatactgtcatttcctgaggagtcatttgg

SEQ ID NO: 409046 - DNA, 120 bp, Artificial Sequence
  ENSG00000148082_28 (sequence is synthesized)
tgttagaaagctggcaatgtttatacctttcaaatactatctgggctgagattgccctgtgattttcacagatgccctttaaagaatagatggatccatttgcttgctggcagcgtggct

SEQ ID NO: 409047 - DNA, 120 bp, Artificial Sequence
  ENSG00000148082_29 (sequence is synthesized)
cttgttctggtgagaccccacagggtacagcaccctgtagggtatgggtcagcagaacagaaagacacactaaacacgcttagagttggatagtgataaatctgatcctgtaaggagagt

SEQ ID NO: 409048 - DNA, 120 bp, Artificial Sequence
  ENSG00000148082_30 (sequence is synthesized)
tatgaggagactgaaaaatctggcagataataatactgctaagttctaatgccaatggtatgagccccatttctgccttggggtgtgcgtgtggccagatggaaggacaggttagagcta

SEQ ID NO: 409049 - DNA, 120 bp, Artificial Sequence
  ENSG00000148082_31 (sequence is synthesized)
accagtgaggatgagtcagggcaggccccagccttcatacatggccttctagggagtctttgcctttgagggtccagtgaatttgagatgacagtgaagtcagtgttctagaatgttctg

SEQ ID NO: 409050 - DNA, 120 bp, Artificial Sequence
  ENSG00000148082_32 (sequence is synthesized)
cagtggattgaaactctggagagtctgacactactgtagactgcactgctgttttctgaaatggttttggcttcaggcatcatgtggatactctgcttagtgatccagaagcagacggct

SEQ ID NO: 409051 - DNA, 120 bp, Artificial Sequence
  ENSG00000148082_33 (sequence is synthesized)
ccacggggttgctggcagcagctgcatcaggctcctgccccaagacagcatagacttgggtgctctgagagctgccctgcacatctgtcctctgggaggctgggagccctggagagacac

SEQ ID NO: 409052 - DNA, 120 bp, Artificial Sequence
  ENSG00000148082_34 (sequence is synthesized)
acacagctctgacccacctgtgcatgaatgtgcaccacatagaaaaatgtgcgaaatgaccttctttctacattcatgcattccccacttgtgaaaggtcaaaatgctattataacattc

SEQ ID NO: 409053 - DNA, 120 bp, Artificial Sequence
  ENSG00000148082_35 (sequence is synthesized)
agggacaatagcaaagtaggaaatgcaagttaggagctgtgaatgctgtaacatttgatttactttatttttctcttggggggacttgaatggtaacctgcagctttagtagctcttgct

SEQ ID NO: 409054 - DNA, 120 bp, Artificial Sequence
  ENSG00000148082_36 (sequence is synthesized)
gtgaagtcagtgtctagttcgatggtgatagaaaatatatatattttttgcatgagaatcaatttagaaaatttaaagtattggagtcgaattttttctttttaatattaattcaaaata

SEQ ID NO: 409055 - DNA, 120 bp, Artificial Sequence
  ENSG00000148082_37 (sequence is synthesized)
tacatttttaagctcagattatatattggttacactagaatagtgccagtgaagtgagcaggcttcagacatagcagatggcagcgattttctaatctttgttccctcccatttgtaaag

SEQ ID NO: 409056 - DNA, 120 bp, Artificial Sequence
  ENSG00000148082_38 (sequence is synthesized)
tgggttagagcacacattagttatcccaactcttccctccagcactgtgtggtgggccattcctgtgagcctcacagacacatggggaaagtgaggctggggctggtgccacaccttcct

SEQ ID NO: 409057 - DNA, 120 bp, Artificial Sequence
  ENSG00000148082_39 (sequence is synthesized)
ggaggccatgttgtcatctggctgcagagctcttctgctcactcagcatttcgtgagccctgctgtgtgccagcctgtgctttgagctcaggattccaaggcaaaagcaatggaggctcc

SEQ ID NO: 409058 - DNA, 120 bp, Artificial Sequence
  ENSG00000148082_40 (sequence is synthesized)
attaggccttgcgttccagggcctcaggcttccagggcacagtcgctgctgctgtgctgggccaccctggtcctgcagagtgcacctgggccctgctgtccctccaatgggcacccccaa

SEQ ID NO: 409059 - DNA, 120 bp, Artificial Sequence
  ENSG00000148082_41 (sequence is synthesized)
cacttaaccccaaactctatgtcttctgggagtacaaggtgggggccagcagtcctaaaacggcccctctgcccttaccgagtggccctagagacccccacccacctcccctaaccccac

SEQ ID NO: 409060 - DNA, 120 bp, Artificial Sequence
  ENSG00000148082_42 (sequence is synthesized)
gaatgaatcagctgtgcttcaaatgacatctctgtcccacggaggccggctgggcctctcatgggggtgctcattgtggtttaagtcagctttgattcttgacctccaaggctgcctctg

SEQ ID NO: 409061 - DNA, 120 bp, Artificial Sequence
  ENSG00000148082_43 (sequence is synthesized)
agtagctaaccggagaatcgggtggggaggtgaaaaacaccgcagtcaaatgactcaatctttaatcctgtgcttaagacaccactgttgctgttttttatatttgaagcacccaaagac

SEQ ID NO: 409062 - DNA, 120 bp, Artificial Sequence
  ENSG00000148082_44 (sequence is synthesized)
tgggcgtccgctcagccttgatgagcgagcagctattttgtcaggccatctatgatgttgggataatggacaaaggcctgattgggccatatatggccttctttagggcctcctggaggt

SEQ ID NO: 409063 - DNA, 120 bp, Artificial Sequence
  ENSG00000148082_45 (sequence is synthesized)
ggaggaagttgtgggtaatttctaataaagacgggaaatgacaagccgtgtgtgtaggtaaagtcctaacttaaaaggaaggacaggcctagggaagggtggaccctaaagggcccatgt

SEQ ID NO: 409064 - DNA, 120 bp, Artificial Sequence
  ENSG00000148082_46 (sequence is synthesized)
gccaggggaacagtggacatgtgtgtccagcccaacctccatgtctggtgctgggattctgaaggtggcccccagctcccaaaataaagctttccttttcagtagcgtccgacacttggg

SEQ ID NO: 409065 - DNA, 120 bp, Artificial Sequence
  ENSG00000148082_47 (sequence is synthesized)
tagcttctttctataagcaatgcttgaagatggacgtctgggtcctcatttcctccaaactggctgctacctgaaggcagtcacacatttcttttctgttgggctgagctgggcagaagc

SEQ ID NO: 409066 - DNA, 120 bp, Artificial Sequence
  ENSG00000148082_48 (sequence is synthesized)
ctcggactataggcctttccagggcagaggcaatgcgggccacgagtagatacctccatccagcctccaccctggcacacccagaacggcgtggactcaggcgggttgctggatttctct

SEQ ID NO: 409067 - DNA, 120 bp, Artificial Sequence
  ENSG00000148082_49 (sequence is synthesized)
gagccttggcgtgctctacactgcagggctatacatgttcccagcttgagggcgtgctggggattgacaaatatatgaaacatataagcgcaatgattttctaaaattgtgcattcccag

SEQ ID NO: 409068 - DNA, 120 bp, Artificial Sequence
  ENSG00000148082_50 (sequence is synthesized)
cgtgcccattggttctctctcgctggcccaactttgtgtgctgtccataaatccctttctgtggacggtgacagtaggattgggagtgagtgggaagattgtggaaagattgcaaagagg

SEQ ID NO: 409069 - DNA, 120 bp, Artificial Sequence
  ENSG00000148082_51 (sequence is synthesized)
tcattgcaggactcagacagaccttgcagtgggtttcagagtaatactcaggttctcccatggaactttcaaagctggctctaagaaagatgaagaggacaaacccactcctggacatag

SEQ ID NO: 409070 - DNA, 120 bp, Artificial Sequence
  ENSG00000148082_52 (sequence is synthesized)
tgccaacctagaactgtcagctccacacaggatcacagggaagggagcttggtaagacagcccagtagggggccctgcttttcagaagaggaaactggagccatgcaagggcctggggat

SEQ ID NO: 409071 - DNA, 120 bp, Artificial Sequence
  ENSG00000148082_53 (sequence is synthesized)
caacttagaaaagagcacaggactcacagtcctgggcctgcacgtaaagctagccccctgccccacggaaatggcaagcagtgcttccctccaggggttctacatctgtgctccatctca

SEQ ID NO: 409072 - DNA, 120 bp, Artificial Sequence
  ENSG00000148082_54 (sequence is synthesized)
aaatgcataaaagcctgagtcattcagatgggagagacagtgtttctacttcctcttagttggggttcctccagaaggagaccctgagagaggacttgaggttatgtagtttatttgagt

SEQ ID NO: 409073 - DNA, 120 bp, Artificial Sequence
  ENSG00000148082_55 (sequence is synthesized)
gaagatcccggaagtagggagagaaggaagctgacggggaaggcgtgcattatcaagtaagttaccgtcatgtgcacaactggagctgaatcccaccggggaaccccgagagacagagct

SEQ ID NO: 409074 - DNA, 120 bp, Artificial Sequence
  ENSG00000148082_56 (sequence is synthesized)
gacaccccagagttcacccagcaaggcggggagacagctggggtatttattcaccaagtctatcacttatgaaaggctgtttctggaaacaatttctgactggccctgcacacacctgag

SEQ ID NO: 409075 - DNA, 120 bp, Artificial Sequence
  ENSG00000148082_57 (sequence is synthesized)
catacttcctaagccggggatgtccctgagctgagacaggcgttcgtgacaagcagacttcgagtggaaggcaggcatcagaaccaccctgtgagctggttcagacaaagattgcaggcc

SEQ ID NO: 409076 - DNA, 120 bp, Artificial Sequence
  ENSG00000148082_58 (sequence is synthesized)
cttccacccccctggccccgccaagttcctgactccctaggtctggagtggggcccgggaatttgcatttcaaaaaatctcgaggtgatgctggtgcagctgctctgaagtcttgacttt

SEQ ID NO: 409077 - DNA, 120 bp, Artificial Sequence
  ENSG00000148082_59 (sequence is synthesized)
gagaaccactcactagtgagagtttccagcccttacctgtctcttattgatggctttcccccctctaatttataattatgctttcacaccacttcatgtcacagatcccagggtccgtgc

SEQ ID NO: 409078 - DNA, 120 bp, Artificial Sequence
  ENSG00000148082_60 (sequence is synthesized)
tgtgaatttaaaagtggagaattaataagcatttataactccatgcaaccattgctggcagcttaaatgccatctgccagccataatttatttataatggggtttatacatatttataag

SEQ ID NO: 409079 - DNA, 120 bp, Artificial Sequence
  ENSG00000148082_61 (sequence is synthesized)
tttgcaagcaacaaatgcacagttttaaaactggcacattttatagcagccagaaaaattgcaactttataccaggacttgtgaatgtgaattgcatatgtatatacatatacgcatata

SEQ ID NO: 409080 - DNA, 120 bp, Artificial Sequence
  ENSG00000148082_62 (sequence is synthesized)
cttacattgattaaaaacggatctgcatctctgtacacacgcagattggctctgtgttgtgcaccttgggactcctccctgggctttggttttacagctaagtaggaagtcaaacaaacg

SEQ ID NO: 409081 - DNA, 120 bp, Artificial Sequence
  ENSG00000148082_63 (sequence is synthesized)
tgaagaatttgggaattggcaggctgtggcatcagccatggaggatggtcctggatgctgtaggatgtgagatccagcacaaagagaacaagaacaggacatgaggaccacagggattgg

SEQ ID NO: 409082 - DNA, 120 bp, Artificial Sequence
  ENSG00000148082_64 (sequence is synthesized)
gggaacccactgtgggaaatgacagagaagccagtgggggaagacaaagaaagaagaaggtggaggcagaataaaggtgagaagaagggaaggggaggataaaacaagtccagatttaga

SEQ ID NO: 409083 - DNA, 120 bp, Artificial Sequence
  ENSG00000148082_65 (sequence is synthesized)
tcttccttcatgcagccatgcatagctgtctgaggccagcagggaaggaggagaaagggaaggtgtggtggaggaggctgtgctcgtgatgtcatgctttcgtgtattcccaggtgcagc

SEQ ID NO: 409084 - DNA, 120 bp, Artificial Sequence
  ENSG00000148082_66 (sequence is synthesized)
tgcatatacttggcacagtttcttgggatttctagccagtttcttggcctcatttgtgcattagttaatatgtggctggccctgtactgggatggtgggatagagaagtgaatgtatgag

SEQ ID NO: 409085 - DNA, 120 bp, Artificial Sequence
  ENSG00000148082_67 (sequence is synthesized)
gcctctgcctgagtttataacctagaaagaaataaagacacacacacacaaaggtgttggagtgtgacaagccttaaggtacccgtgtgtccaagtaaagtagaaccagcaagggtggag

SEQ ID NO: 409086 - DNA, 120 bp, Artificial Sequence
  ENSG00000148082_68 (sequence is synthesized)
tgcccaggtcagtctggggactctggaggcttcgcactgcaggcgtcagatactgagtgttagtggcacggagaagagtgtggaaggctcaggatgggggtggacagcctggagttgtca

SEQ ID NO: 409087 - DNA, 120 bp, Artificial Sequence
  ENSG00000148082_69 (sequence is synthesized)
ctctcagtagagatgctagaaggggcgggaggtgatcccagcctcccttctttcctcctcctggctgtcacagatgctctgaattgatgaatccttcaggccaaaaacacacaggctcct

SEQ ID NO: 409088 - DNA, 120 bp, Artificial Sequence
  ENSG00000148082_70 (sequence is synthesized)
tccctaggtctggaaaaatggttctcgctgaaaaagcaccaggaataaaatctcatacaattttaggtgtctattttgttgtctcaccttgaaatactgcagacagaaaaacatgcacat

SEQ ID NO: 409089 - DNA, 120 bp, Artificial Sequence
  ENSG00000148082_71 (sequence is synthesized)
ggggagctgtggtcctgagctttgaggtaatgaattcccactcatgtgatcatttttaccataaccaaagtttctaaccatcaaaatcaagtgacaattaaaacaggcattaatggataa

SEQ ID NO: 409090 - DNA, 120 bp, Artificial Sequence
  ENSG00000148082_72 (sequence is synthesized)
atccgtctttaaatattaatggggttaattttgttaacagctatgtgttggttgcaagtggaatgttctctgttcatttgacttttgaatataacttgttccagaatattgtaaaattaa

SEQ ID NO: 409091 - DNA, 120 bp, Artificial Sequence
  ENSG00000148082_73 (sequence is synthesized)
gtatgtgaatgtttctttgtattcagaattaaacatttggtgttaaaatcccaggattaggagacaactccatgtaaatttaatgtgtaataataagataataactttttaaaaagcatt

SEQ ID NO: 409092 - DNA, 120 bp, Artificial Sequence
  ENSG00000148082_74 (sequence is synthesized)
tggatggcaaattatacatactgacaaatgaatattatctgaaagttgttttgtttccattaacttttgtgaaacaaaaagaattactgtaacagtctatgtcttggcgtattgccaatt

SEQ ID NO: 409093 - DNA, 120 bp, Artificial Sequence
  ENSG00000148082_75 (sequence is synthesized)
caccactttctactttgtgctggaacagaactggcttttttgacatccctgaggagtggaaatgcaaaacgaatttcaagttctctaatctttgttctatgacaaatgaaaaaacctaag

SEQ ID NO: 409094 - DNA, 120 bp, Artificial Sequence
  ENSG00000148082_76 (sequence is synthesized)
ttatctggtgttttggagatttgagaatacagcaggtgaagagaattagcttaaattccctcctcccttttgataaatccacagggattccttcactctgtcaggaaatggtgtggtttc

SEQ ID NO: 409095 - DNA, 120 bp, Artificial Sequence
  ENSG00000148082_77 (sequence is synthesized)
caagcattagcccttcatgatctgtctggtgcatttctgtgctcctgggatcgccaagtgcaggcacggcatcgcatccccaggtgtcatcctgtgacccaggaggggaagatgacacac

SEQ ID NO: 409096 - DNA, 120 bp, Artificial Sequence
  ENSG00000148082_78 (sequence is synthesized)
ccaatttaggtaatgctgcacttcttgttataattggttattggaaaatgtgcctttattatcagaacagtggtgtgcgcatttctgattatggagctaacttttggatatctgacttag

SEQ ID NO: 409097 - DNA, 120 bp, Artificial Sequence
  ENSG00000148082_79 (sequence is synthesized)
atactaaaaacatttgggtgttgcagttttgcacttgtagatacaacttaaaagcatgaaactggtgatttaattagatgttttctataaaatgcaccttgttacatttctgtgaaaggg

SEQ ID NO: 409098 - DNA, 120 bp, Artificial Sequence
  ENSG00000148082_80 (sequence is synthesized)
tcttaccagcgtggaataactggctcaagggttgagagaaacaaccattttctaaacagttaattgtttaaaggactatacatgtaagtctgcaggcaataaaggctgttgtgaaaagta

SEQ ID NO: 409099 - DNA, 120 bp, Artificial Sequence
  ENSG00000148082_81 (sequence is synthesized)
gctgtatctgaataatcccgtaggtttggctgaatttttcatcttcccgtcaagaaagacattcatctttacctggggcatagtccaagaattgctaagtttaataaatgcagttaaatc

SEQ ID NO: 409100 - DNA, 120 bp, Artificial Sequence
  ENSG00000148090_0 (sequence is synthesized)
aggtccacgccgtaaacagacaacatggcggccgcggtggcggcggcacctggggccttgggatccctgcatgctggcggcgcccgcctggtggccgcttgcagtgcgtggctctgcccg

SEQ ID NO: 409101 - DNA, 120 bp, Artificial Sequence
  ENSG00000148090_1 (sequence is synthesized)
gggttgaggctgcccggctcgttggcaggccggcgagcgggcccggcgatctgggcccagggctgggtacctgcggccgggggtcccgccccgaaaaggggctacagctctgagatgaag

SEQ ID NO: 409102 - DNA, 120 bp, Artificial Sequence
  ENSG00000148090_2 (sequence is synthesized)
acggaggacgagctgcgggtgcggcacctggaggaggagaaccgaggaattgtggtgcttggaataaacagagcttatggcaaaaattcactcagtaaaaatcttataaaaatgctatca

SEQ ID NO: 409103 - DNA, 120 bp, Artificial Sequence
  ENSG00000148090_3 (sequence is synthesized)
aaagctgtggatgctttgaaatctgataagaaagtacggaccataataatcaggagtgaagtcccagggatattctgtgctggtgctgaccttaaggaaagagccaaaatgagttccagt

SEQ ID NO: 409104 - DNA, 120 bp, Artificial Sequence
  ENSG00000148090_4 (sequence is synthesized)
gaagttggtccttttgtctccaaaataagagcagtgattaacgatattgctaatcttccagtaccaacaattgcagcaatagatggactcgctttaggtggtggtcttgaactggcttta

SEQ ID NO: 409105 - DNA, 120 bp, Artificial Sequence
  ENSG00000148090_5 (sequence is synthesized)
gcctgtgatatacgagtagcagcttcctctgcaaaaatgggcctggttgaaacaaaattggcgattattcctggtggaggggggacacagcgattgccacgcgccattggaatgtccctg

SEQ ID NO: 409106 - DNA, 120 bp, Artificial Sequence
  ENSG00000148090_6 (sequence is synthesized)
ctctgcgcgagtcctcgatggcaaagaagccaaagcagtgggcttaatcagccacgttctggaacagaaccaggagggagacgcggcctacaggaaggccttggacctggcgagagagtt

SEQ ID NO: 409107 - DNA, 120 bp, Artificial Sequence
  ENSG00000148090_7 (sequence is synthesized)
tttacctcagggacctgttgcaatgagagtggcaaaattagcaattaatcaagggatggaggtcgatttagtaacagggttagccatagaagaagcttgttatgctcagaccattccaac

SEQ ID NO: 409108 - DNA, 120 bp, Artificial Sequence
  ENSG00000148090_8 (sequence is synthesized)
aaaagacagacttgaaggtcttcttgcttttaaagagaaaaggccccctcgctataaaggagaataaaaggaacagaaattcttaagatgccaatgtaataaatgtacttcctggaagtg

SEQ ID NO: 409109 - DNA, 120 bp, Artificial Sequence
  ENSG00000148090_9 (sequence is synthesized)
tctttcggatccactatatgcctcagcacatggaaccttaatgaccaaagtgaagagcagattattcatacggtgtaataagcatctggaatggacccatccgtgtacttcattcaaatg

SEQ ID NO: 409110 - DNA, 120 bp, Artificial Sequence
  ENSG00000148090_10 (sequence is synthesized)
tgtaaatgtcatattcattcagatttataaagctagtagtgtatagtcagaaacagaatcaaagttagatatacatttttaaatatttactgcatatgaggctttctgttaattttttaa

SEQ ID NO: 409111 - DNA, 120 bp, Artificial Sequence
  ENSG00000148090_11 (sequence is synthesized)
tgtgaataatttatatattgcacattctagggaataatattgattgtatgtctactgtgctgcattaagaaaataaaatttctatataccaaaaatgtgaagttataccaaataaagttt

SEQ ID NO: 409112 - DNA, 120 bp, Artificial Sequence
  ENSG00000148090_12 (sequence is synthesized)
ctaagtgattaatgcatacgaacagctacatatacatatatctaaacctgaaaaatgaattgatattctgagtgaaaactacctaatataaataaaattagtgaaaagaaaacatgggaa

SEQ ID NO: 409113 - DNA, 120 bp, Artificial Sequence
  ENSG00000148090_13 (sequence is synthesized)
tgttgacccttgagcaacatgagaggttaggagagatgacacctccacctgcacccctgcccccacccctcacagttgaaaatcctcctataacttgacttctcaaaaactgaactacta

SEQ ID NO: 409114 - DNA, 120 bp, Artificial Sequence
  ENSG00000148090_14 (sequence is synthesized)
ggttgagtaacaaacattttgtatgttatatgtattatatgctttattcttacagtaaagtaagctaaagaaaagaaaatgttactaagaaaaccataaggaagagaaaatacatttact

SEQ ID NO: 409115 - DNA, 120 bp, Artificial Sequence
  ENSG00000148090_15 (sequence is synthesized)
atcaagtggaagtgggtcatcacacaggttatccttgtcatcttcatgttgagtaggttaaggagaaagaggaggggttgtcttgctgtctcaaaggggtggcagaggtggaagaaaatc

SEQ ID NO: 409116 - DNA, 120 bp, Artificial Sequence
  ENSG00000148090_16 (sequence is synthesized)
tgtgtacaaatagacctgatgttgttcaaaggtcagctgcacttaaattttaatgttttcatttgagcacgtcagagatgccgttaaaaatgactcagagtactcgtgccctttctgtgt

SEQ ID NO: 409117 - DNA, 120 bp, Artificial Sequence
  ENSG00000148090_17 (sequence is synthesized)
cctggaggaggagaaccgagacagagacaagaacatggtcaaaggcatggagatgtgaacatgtgtggtgtatttgggacgtaacataaggcaagtgtggcataagcagaatagtaagaa

SEQ ID NO: 409118 - DNA, 120 bp, Artificial Sequence
  ENSG00000148110_0 (sequence is synthesized)
ggtaactgcgagagtcggggtcggtgcggtttgataagtggtcggttcctggagctgcggtcttctgctagcctgatccgcagcttcagcctccgccgcctcctcagccctcggcgccgc

SEQ ID NO: 409119 - DNA, 120 bp, Artificial Sequence
  ENSG00000148110_1 (sequence is synthesized)
ccgcggcatgagcgtggagccgccgccggagctggaggagaaggcggcgtcggagcccgaggcgggagccatgccggagaagcgcgcgggcgcgcaggccgcggggagcacctggctaca

SEQ ID NO: 409120 - DNA, 120 bp, Artificial Sequence
  ENSG00000148110_2 (sequence is synthesized)
tacaaggctttggccgaccaagtgtgtaccatgctgctattgtcatcttccttgaattctttgcgtggggcctgttgacaactccaatgttgactgttctacatgaaacattttctcaac

SEQ ID NO: 409121 - DNA, 120 bp, Artificial Sequence
  ENSG00000148110_3 (sequence is synthesized)
acacattcctcatgaatggtctcattcaaggtgtaaagggcctgctctcttttttgagtgccccactcattggtgccctgtctgatgtgtgggggaggaagccctttctcctcggcactg

SEQ ID NO: 409122 - DNA, 120 bp, Artificial Sequence
  ENSG00000148110_4 (sequence is synthesized)
tattctttacctgcttcccaatcccactgatgaggatcagcccatggtggtattttgcgatgatttctgtgtctggagtcttctcggtcacgttttctgttatatttgcctatgtagctg

SEQ ID NO: 409123 - DNA, 120 bp, Artificial Sequence
  ENSG00000148110_5 (sequence is synthesized)
atgtcactcaggagcacgagcgaagtacagcttatggatgggtctcagccacctttgcggctagtcttgtcagcagcccggccattggagcatatctttctgccagttacggagacagcc

SEQ ID NO: 409124 - DNA, 120 bp, Artificial Sequence
  ENSG00000148110_6 (sequence is synthesized)
tcgttgtgctggtggccacagtggtggctcttctggacatctgcttcatcttagtggctgttccagaatctctgcctgagaaaatgagaccggtttcctggggagctcagatttcttgga

SEQ ID NO: 409125 - DNA, 120 bp, Artificial Sequence
  ENSG00000148110_7 (sequence is synthesized)
aacaagcagacccttttgcgtcgttgaagaaagttggaaaagattctactgtcttactaatctgcatcaccgtgtttctttcataccttcctgaagctggacagtattcaagtttttttc

SEQ ID NO: 409126 - DNA, 120 bp, Artificial Sequence
  ENSG00000148110_8 (sequence is synthesized)
tctatctcaggcaggtcataggttttggatctgttaaaattgcagcattcatagctatggtaggaattctgtctattgtggctcagacggcctttcttagcatcttgatgagatcattag

SEQ ID NO: 409127 - DNA, 120 bp, Artificial Sequence
  ENSG00000148110_9 (sequence is synthesized)
gaaataagaatactgtcctccttggcttgggcttccagatgctccagttagcctggtacggttttggatcacaggcctggatgatgtgggcagcagggaccgtggctgccatgtccagca

SEQ ID NO: 409128 - DNA, 120 bp, Artificial Sequence
  ENSG00000148110_10 (sequence is synthesized)
tcacgtttccggcaatcagtgccctcgtctctcggaatgcagagtcagatcagcaaggagttgcccaggggatcataactggaataagaggactatgcaatggcctggggccagcactgt

SEQ ID NO: 409129 - DNA, 120 bp, Artificial Sequence
  ENSG00000148110_11 (sequence is synthesized)
atggcttcatattctacatgttccatgtggaactgactgagttgggcccgaaattgaattctaacaacgttcccctgcagggagctgtcatcccaggcccgccgtttttatttggggcat

SEQ ID NO: 409130 - DNA, 120 bp, Artificial Sequence
  ENSG00000148110_12 (sequence is synthesized)
gtatagtccttatgtcttttctggttgccttattcattcctgaatacagtaaagccagtggagttcaaaaacacagtaacagcagcagcggcagcctgaccaacaccccagaacggggca

SEQ ID NO: 409131 - DNA, 120 bp, Artificial Sequence
  ENSG00000148110_13 (sequence is synthesized)
gggagctctcttcatttgaggagcctgggaatcagtgcactgagctgtaaactcggcagaaagtgggattctgcatacgccatctctgagagccatggagggagccacacccctggtgac

SEQ ID NO: 409132 - DNA, 120 bp, Artificial Sequence
  ENSG00000148110_14 (sequence is synthesized)
ttcatggtgctggatgggagacgctagcggcatccttcagggccaagtttgataaataccaccgccatcattctgctcatcctcctcctgttttttttttttctcttacattcttttttt

SEQ ID NO: 409133 - DNA, 120 bp, Artificial Sequence
  ENSG00000148110_15 (sequence is synthesized)
ttttcctgtttatacattagaacaagataagatttgaaatacttccttgcaaataatgtgcaactcccaaggtgaaactcaaatagaaaaagtcatctctctggtagaaaggatggcttt

SEQ ID NO: 409134 - DNA, 120 bp, Artificial Sequence
  ENSG00000148110_16 (sequence is synthesized)
cctgtaatgactatagagtaagagtggcagcaatctttccatgcccttttcagcagaaggcacagaacagtagcgggactgccatctctggcaagatttcaggtaaagaatctcttctta

SEQ ID NO: 409135 - DNA, 120 bp, Artificial Sequence
  ENSG00000148110_17 (sequence is synthesized)
atttctaccttcctgtttctctgaatcagcccataggtgttgatgagtggccactcttaaagagtcactcagtatcagggatctactgtctttgttcaaaggtcaaataaaaacctagtc

SEQ ID NO: 409136 - DNA, 120 bp, Artificial Sequence
  ENSG00000148110_18 (sequence is synthesized)
tccttttattctactttctattcttagctagaatgaaactcagcatatatacacttctggacataataatattgaatagtaattacctttactagatgaaagaaattttcattacaaact

SEQ ID NO: 409137 - DNA, 120 bp, Artificial Sequence
  ENSG00000148110_19 (sequence is synthesized)
taaatcatgtaaaactcaacaactcagattcctggacctggtgtcctggttgggtccaaggtgattttacagaagaaaaaaacaactcaagcattctggtggcaacatagagattgtagg

SEQ ID NO: 409138 - DNA, 120 bp, Artificial Sequence
  ENSG00000148110_20 (sequence is synthesized)
ctgcttctaagaaagttattaacaatttggaaattcctaagtaggatgagagttagtaactggatacgagtgaagtttatatccaagttcagactcaaaggcattattatgatttgcttc

SEQ ID NO: 409139 - DNA, 120 bp, Artificial Sequence
  ENSG00000148110_21 (sequence is synthesized)
ttcccatgtcttccatgtcctgcttctcaaagtttttctcatccatcacactcctgccttaactgctctgagtatgcatttgttttcaattcatctttatttcaatctgtttaacttttg

SEQ ID NO: 409140 - DNA, 120 bp, Artificial Sequence
  ENSG00000148110_22 (sequence is synthesized)
aatcgcatgggaatacgcacattaagttcctttctaaaataaggttttatgaagctgagtttcacgataagtgtcttgctattttttgagatgttttatggacaaagaaaactttacaga

SEQ ID NO: 409141 - DNA, 120 bp, Artificial Sequence
  ENSG00000148110_23 (sequence is synthesized)
tttatatgtattttgctgcaccagtaaatggaccattaactagggcccacctttaacagagcacccctttgaaagttttataggtatgaaatatatgtagatatttgtaaagggttttaa

SEQ ID NO: 409142 - DNA, 120 bp, Artificial Sequence
  ENSG00000148110_24 (sequence is synthesized)
ttttttttttttgatggggtgctgtgtaaatcttgtatttataaatgtaatgaaggtattgacagaaaaaaatatatacaacttttataaaggattgtgtactgactgaatacatttaaa

SEQ ID NO: 409143 - DNA, 120 bp, Artificial Sequence
  ENSG00000148110_25 (sequence is synthesized)
agaaaatatattttgaaacctgttctgctatgaacagagataacatatctttttactatgctattggtttttaggttaagcttcctaatgcataataaatttacagtggttacttttatg

SEQ ID NO: 409144 - DNA, 120 bp, Artificial Sequence
  ENSG00000148110_26 (sequence is synthesized)
tcttgtgtcttttttttaaagcaaatagtattgctcttttgggttctctgttgggtggctttcaattaaactgagttgtaatctttcagctgatgcaaaaggtatgtattttcaaaaaaa

SEQ ID NO: 409145 - DNA, 120 bp, Artificial Sequence
  ENSG00000148110_27 (sequence is synthesized)
agcaaggatttaggagttgcccaggggatcataactggaataagaggactatgcaatggcctgggccagcactgtatggcttcatattctacatgttccatgtggaactgactgagttgg

SEQ ID NO: 409146 - DNA, 120 bp, Artificial Sequence
  ENSG00000148110_28 (sequence is synthesized)
attctacatgttccatgtggaactgactgagttgggcccgaaattgaattctaacaacgttcccctgcaggtaatttggtcataagtctagttttgtaacaacaattatgtatgattata

SEQ ID NO: 409147 - DNA, 120 bp, Artificial Sequence
  ENSG00000148110_29 (sequence is synthesized)
gcaaaatcttgtgaccttaaatttggagagcattctttcttgtatgttactatattttatttggcagcaataagtattgtgttcattgcttctcgggatcagggaggggtcattttagtg

SEQ ID NO: 409148 - DNA, 120 bp, Artificial Sequence
  ENSG00000148110_30 (sequence is synthesized)
atttaatatcttatgtaaaagatatgtcttaactttgttcagattctgttttcacctacacaatcactacactattctctggataagcccaggctagttaaaatttgaaatgacctaaaa

SEQ ID NO: 409149 - DNA, 120 bp, Artificial Sequence
  ENSG00000148110_31 (sequence is synthesized)
atccagctaaaaattgaggtagggtactttttgtactatttatttgaaatttcttcccttgttccctctaagccatatctatacaaagctggaattaatgttcatgtacaaaggtgcatg

SEQ ID NO: 409150 - DNA, 120 bp, Artificial Sequence
  ENSG00000148110_32 (sequence is synthesized)
atctgaagtcataggatgggattataggtaaacagctgttgcttacaagcttacagttttgcttaagctatttggaagtggtacaaaaagcagttaattagttgccctttgtcatattcc

SEQ ID NO: 409151 - DNA, 120 bp, Artificial Sequence
  ENSG00000148110_33 (sequence is synthesized)
aaacaccaagctctagtggagtttgccttgacatttaatgaaacatttgcttatgagaatatgattcactttttggtggtgtgttttttttgggtaatctaggaataattttgagttaaa

SEQ ID NO: 409152 - DNA, 120 bp, Artificial Sequence
  ENSG00000148120_0 (sequence is synthesized)
gagactgaaaggaaccataatttgtgacatcagttgttttctttgataagcagctatttatgattctggaagattaaggcagataggaaaccccatctgagattttaataaatccctcaa

SEQ ID NO: 409153 - DNA, 120 bp, Artificial Sequence
  ENSG00000148120_1 (sequence is synthesized)
acaataaaccacatcatggacatacagctggaccctgccagagatgacctgcctctcatggccaacaccagccacatacttgtgaagcactatgtactggatttggatgtggattttgaa

SEQ ID NO: 409154 - DNA, 120 bp, Artificial Sequence
  ENSG00000148120_2 (sequence is synthesized)
agtcaagtcattgaggggaccatagtgcttttcctcgaggatggaaacagattcaagaaacagaatagctctattgaggaagcctgccaatcagaatcaaacaaagcctgcaaatttggg

SEQ ID NO: 409155 - DNA, 120 bp, Artificial Sequence
  ENSG00000148120_3 (sequence is synthesized)
atgcctgaaccctgccatattcccgtgacaaatgcaaggaccttctcatctgaaatggaatataatgattttgcaatctgtagtaaaggtgaaaaagatacttctgataaagatggtaac

SEQ ID NO: 409156 - DNA, 120 bp, Artificial Sequence
  ENSG00000148120_4 (sequence is synthesized)
catgacaaccaggaacatgcttctgggatttctagctcaaagtactgctgtgacacagggaatcatgggagtgaggattttttgctagtgttggactgctgtgatttatctgtgttaaaa

SEQ ID NO: 409157 - DNA, 120 bp, Artificial Sequence
  ENSG00000148120_5 (sequence is synthesized)
gtcgaggaggtggatgttgctgctgtgccaggtctggaaaaatttacaaggtctcctgagctcacggttgtttctgaggagttcaggaatcagattgtacgtgaacttgtgactttgcct

SEQ ID NO: 409158 - DNA, 120 bp, Artificial Sequence
  ENSG00000148120_6 (sequence is synthesized)
gcaaatcgttggagggagcagttagactattacgctcgctgcagccaggctcctggctgtggggaactcctctttgacactgacacttggagcttgcagataaggaagacaggggctcag

SEQ ID NO: 409159 - DNA, 120 bp, Artificial Sequence
  ENSG00000148120_7 (sequence is synthesized)
acagctactgactttcctcatgctatcaggatatggtacaaaactaaacctgaagggcgatcggttacatggacctcagaccagagtggcaggccatgtgtttatactgtgggatctccc

SEQ ID NO: 409160 - DNA, 120 bp, Artificial Sequence
  ENSG00000148120_8 (sequence is synthesized)
ataaacaacagggccctttttccatgccaggagccacccgttgccatgtcaacatggcaggctacagttcgagcagctgcatcttttgttgttttaatgagtggggaaaattctgccaaa

SEQ ID NO: 409161 - DNA, 120 bp, Artificial Sequence
  ENSG00000148120_9 (sequence is synthesized)
ccaacgcagctttgggaagagtgctcaagctggtattactatgtaactatgccaatgccagcctccaccttcacaattgcagtgggatgctggacagaaatgaagatggagacatggtca

SEQ ID NO: 409162 - DNA, 120 bp, Artificial Sequence
  ENSG00000148120_10 (sequence is synthesized)
tcaaatgatttggcaacagagagacccttctcaccttctgaggccaacttcaggcatgttggtgtttgcagtcacatggaatacccctgccgcttccagaatgcttctgccaccacccag

SEQ ID NO: 409163 - DNA, 120 bp, Artificial Sequence
  ENSG00000148120_11 (sequence is synthesized)
gagatcattcctcatcgggtctttgcccctgtgtgcctcacgggtgcctgccaagagacccttctgcggctgatccctccttgcctctcagcagcacattctgttctgggagcacacccg

SEQ ID NO: 409164 - DNA, 120 bp, Artificial Sequence
  ENSG00000148120_12 (sequence is synthesized)
ttctctcggctggatgttctcatcgtccctgccaactttccaagtctggggatggccagcccacacatcatgttcctctctcagagcatcttgacaggagggaaccatctctgtgggacc

SEQ ID NO: 409165 - DNA, 120 bp, Artificial Sequence
  ENSG00000148120_13 (sequence is synthesized)
ttgcccatgcctggtttggcctagccatcggggcccgagactggacggaggagtggctgagtgaaggcttcgccactcacttggaggatgtgttttgggccacagcacagcagctggccc

SEQ ID NO: 409166 - DNA, 120 bp, Artificial Sequence
  ENSG00000148120_14 (sequence is synthesized)
cctatgaggcccgggagcagcaggagctgagggcttgtctgcgctggcgtcgcctccaggacgagatgcaatgctcccccgaggagatgcaggtgttaagacccagtaaagacaaaactg

SEQ ID NO: 409167 - DNA, 120 bp, Artificial Sequence
  ENSG00000148120_15 (sequence is synthesized)
gccacacaagtgactcgggagcatctgttatcaagcatggacttaatccggagaagatcttcatgcaggtgcattatttaaagggctacttccttcttcggtttcttgccaaaagacttg

SEQ ID NO: 409168 - DNA, 120 bp, Artificial Sequence
  ENSG00000148120_16 (sequence is synthesized)
gagatgaaacctatttttcatttttaagaaaatttgtgcacacatttcatggacagctgattctttcccaggatttccttcaaatgctactggagaacattccagaagaaaaaaggcttg

SEQ ID NO: 409169 - DNA, 120 bp, Artificial Sequence
  ENSG00000148120_17 (sequence is synthesized)
agctgtctgttgaaaacatctaccaagactggcttgagagttccggaataccaaagccgctgcagagggagcgtcgcgccggggcggagtgcgggcttgcgcggcaagtgcgcgccgagg

SEQ ID NO: 409170 - DNA, 120 bp, Artificial Sequence
  ENSG00000148120_18 (sequence is synthesized)
tcacgaaatggattggagtgaaccggagaccccgaaaacggaagcgcagggagaaggaagaggtgtttgaaaagcttcttccagaccagctggtcttgcttctggagcatctcttggagc

SEQ ID NO: 409171 - DNA, 120 bp, Artificial Sequence
  ENSG00000148120_19 (sequence is synthesized)
agaagactctgagcccccgaactctgcaaagcctccagaggacataccacctccaggatcaggatgcagaggttcgccatcggtggtgtgaactcattgttaagcacaagttcacgaaag

SEQ ID NO: 409172 - DNA, 120 bp, Artificial Sequence
  ENSG00000148120_20 (sequence is synthesized)
cctacaaaagtgtggagaggttccttcaggaggatcaggccatgggtgtgtacctctacggggagctgatggtgagtgaggacgccagacagcagcagctcgcccgtaggtgcttcgagc

SEQ ID NO: 409173 - DNA, 120 bp, Artificial Sequence
  ENSG00000148120_21 (sequence is synthesized)
ggaccaaggagcagatggataggtcctcagcccaggtggtggccgaaatgttattttaacgaggaaagaccacagcaagattctttcattcgtctcctcctagcctgggggaccaggctc

SEQ ID NO: 409174 - DNA, 120 bp, Artificial Sequence
  ENSG00000148120_22 (sequence is synthesized)
gaactgaccctggacatcaaaggagggattatgtggctgctaaagccatcggcccacagccctgttcacatcttggtgcttctctttcccagaggctggtcccagccaggcacacacaaa

SEQ ID NO: 409175 - DNA, 120 bp, Artificial Sequence
  ENSG00000148120_23 (sequence is synthesized)
aggcagattctcgtaaacgcagcctccctccctggaggctgcctcctgccctggatctggagtggagctgctctgagattttgagttcttctgcagagatgattaaatatatccaagaga

SEQ ID NO: 409176 - DNA, 120 bp, Artificial Sequence
  ENSG00000148120_24 (sequence is synthesized)
cattggaaaacctgctgaacattttacattggtctgctcagcacatggctggatgcggatatttctataattccagaaagtcacacagctcctctgtatgagaccagtgggcgccattta

SEQ ID NO: 409177 - DNA, 120 bp, Artificial Sequence
  ENSG00000148120_25 (sequence is synthesized)
aaagaacaggatgagaatctaagatatattattaataaatgtaatggattttttttttgtatacgtgtttgcttctaaatttcatactgtttaaaaataataaaggccaggtgcggtggc

SEQ ID NO: 409178 - DNA, 120 bp, Artificial Sequence
  ENSG00000148120_26 (sequence is synthesized)
ggtttccacatgttggcggatgcagtggaagcttctcttgagatctttgccacactgttcaacatgtttgaccactctgtcctaaaaacgctttcttcttaaagcactttctcctcctgg

SEQ ID NO: 409179 - DNA, 120 bp, Artificial Sequence
  ENSG00000148120_27 (sequence is synthesized)
tttaagtagtccagttatgaatatggaatgaagggataaattcctgatgtctccattaagctcctctgtgtaaaatactccatggcaaagttgctgctatttaaagtagtgagtttgatc

SEQ ID NO: 409180 - DNA, 120 bp, Artificial Sequence
  ENSG00000148120_28 (sequence is synthesized)
ttggctttgatctaaaccttttgatcttgaaagaaggatggagtagcaataaagagagggcaagacagattttctttaaagaaatgtgataaagttaaagggatggtcaagacccagcaa

SEQ ID NO: 409181 - DNA, 120 bp, Artificial Sequence
  ENSG00000148120_29 (sequence is synthesized)
gcaacaggacaacccgactctccgccccggcccgccctcaccggcaggcgggttccagcaactgctgatgcggatgagaaggcctttggcgggtggaggaaaatcttggggtatcgcaca

SEQ ID NO: 409182 - DNA, 120 bp, Artificial Sequence
  ENSG00000148120_30 (sequence is synthesized)
gtgatcccattgcagtcccaaactattgaaaccaccatttctattagcaaaatctcatgtgtttgctgtatgagtgaagaactaagtgctttaatctgattatgcttatgcttctaatca

SEQ ID NO: 409183 - DNA, 120 bp, Artificial Sequence
  ENSG00000148120_31 (sequence is synthesized)
agctaatgaaaggcacttaagattgggcccatgtgcatcatcacattgaagttttctgtctaaaggaaggttccagctacctgttacccttttgctaaacacagttgcagtgttgcagtg

SEQ ID NO: 409184 - DNA, 120 bp, Artificial Sequence
  ENSG00000148120_32 (sequence is synthesized)
tatttcatgacaaaagtgtactctagttttctgtgaaatgattattttctctgaaatgattcttggtcatgttgagcttctaaatgttaaagagaacatagtgcttttgacctgtggaaa

SEQ ID NO: 409185 - DNA, 120 bp, Artificial Sequence
  ENSG00000148120_33 (sequence is synthesized)
tctcatcttggtaccatggtgctgcacagaccatcaggaagaactgaaaagttcaggcaacttgagaaaataaagtcaccaccagcaagaagctgtctaaaataaccggaagattataac

SEQ ID NO: 409186 - DNA, 120 bp, Artificial Sequence
  ENSG00000148120_34 (sequence is synthesized)
ccaagcacgtggaggagtgtgctagtgagtagaatgttatgaaagctactagaggtcctccatagatgcatgtgctagtcctaaggagaaggaagaggagaaggattgccacggaggaac

SEQ ID NO: 409187 - DNA, 120 bp, Artificial Sequence
  ENSG00000148120_35 (sequence is synthesized)
tgagcactttgtttggaaagttgtccaaggctggagttgtgagagctgggaaagacctcacaagcttctctaattcaagtccttgtttcacatatgagaatgcagaggccctgagaagtt

SEQ ID NO: 409188 - DNA, 120 bp, Artificial Sequence
  ENSG00000148120_36 (sequence is synthesized)
gattcccaggcctgcatgctggcctggaactagagcctgggtctcctcttgctttttccagctgtctgcccaggtagctccccaaggcaggcatggaggcagagctgctttgggttccag

SEQ ID NO: 409189 - DNA, 120 bp, Artificial Sequence
  ENSG00000148120_37 (sequence is synthesized)
ggggcaggtttgggctggggcctgctgtgtgaccacagtctcccatcttagattgaagctacatcgctgtgtgcatctaactcttgattcacggtctgaccgacgccttggtttctggag

SEQ ID NO: 409190 - DNA, 120 bp, Artificial Sequence
  ENSG00000148120_38 (sequence is synthesized)
aactgccctcgtttatggaagagtcactgtcatcaggagccatcccagggagaggctcagtgggaagtgtaaaggtggagcaagtaaaccggctccagaagagaaggcgaagaaggacta

SEQ ID NO: 409191 - DNA, 120 bp, Artificial Sequence
  ENSG00000148120_39 (sequence is synthesized)
tttctgtttagatttgcttaaccgcattttcactttcttgggaacccctgatggagttcaaggtcatagaagagaagaaatcagacactgctacaggactcttgctcttggttcagatta

SEQ ID NO: 409192 - DNA, 120 bp, Artificial Sequence
  ENSG00000148120_40 (sequence is synthesized)
ttcaatgggaggggagaagagagtagtcgcaagtgattgttgtagattttgtctcagctttttgtttttctttgtatcaaacctgttttgagatcatacactgttacagagaaagagagg

SEQ ID NO: 409193 - DNA, 120 bp, Artificial Sequence
  ENSG00000148120_41 (sequence is synthesized)
aggcatattataaacgtgtggacttcagtgttattccttctcttcaaaatgatgttccaggtgtctagagggtgaggtatgtcatttacatgaaggttaagaataaaacagaaagtgcct

SEQ ID NO: 409194 - DNA, 120 bp, Artificial Sequence
  ENSG00000148120_42 (sequence is synthesized)
aaggggaaaaaaagaaacagttttccagtgaggcttgtcagggggaagactgatcgccggcaggccggctcggaccatgagcacagttccaagaatgcagggatgaggaggagccgggct

SEQ ID NO: 409195 - DNA, 120 bp, Artificial Sequence
  ENSG00000148120_43 (sequence is synthesized)
ggccagtccttcctcacctctcttgctggcaggttaacagtctccacttcaatagcccaaggctcagaaagactgagtaatgcgtctaacctcctctagctgataaagaaccaaggctca

SEQ ID NO: 409196 - DNA, 120 bp, Artificial Sequence
  ENSG00000148120_44 (sequence is synthesized)
gaaagactgaataacgtgtctaacctcctctagctgataaagaagagaacagggatttaaacccagggacggaaactcttctcggttccctataccatattcctgtcttcagggaactga

SEQ ID NO: 409197 - DNA, 120 bp, Artificial Sequence
  ENSG00000148120_45 (sequence is synthesized)
acaaataaaaaaacaaacaaacaaaaaacctgcaggtatcttgggctctggaaggacatacaggtcagggtgaaaagtatgcttggtccaagcatcttttttcttttaacacatgaagta

SEQ ID NO: 409198 - DNA, 120 bp, Artificial Sequence
  ENSG00000148120_46 (sequence is synthesized)
ttcttttaacacatgaagtatgtgtcttattattttaaaagacattgagaaaaaggaacattcaacattctcttggttatagatactggagtattaacaaagtgaaaagagaaaaactaa

SEQ ID NO: 409199 - DNA, 120 bp, Artificial Sequence
  ENSG00000148120_47 (sequence is synthesized)
gggattataggcgtgaaccactgcgcccagcccagatgtttcttagattgactttgctgtgtttcctttgtatccgatgtgtctgagattgacttccttgtaagtcattcgttaacaggt

SEQ ID NO: 409200 - DNA, 120 bp, Artificial Sequence
  ENSG00000148120_48 (sequence is synthesized)
gtctgagattgacttccttgtaagtcattcgttaacaggtttcttgtattttcctagccttctcagccttcattggctggagagcctgtaatgtggctacaggcttctgaggcaagacga

SEQ ID NO: 409201 - DNA, 120 bp, Artificial Sequence
  ENSG00000148120_49 (sequence is synthesized)
tttgctcagtttcaaaatgttaggggtcacatgccatttttcatttgttaattattgaagatgtctttcccacagataagaccccaaggactctcccagactcttcatctcctctctggc

SEQ ID NO: 409202 - DNA, 120 bp, Artificial Sequence
  ENSG00000148120_50 (sequence is synthesized)
cctgggcagaactcttccccaggcaaagtctgatttcagtgttcctttctgtcctgccactgttcagctctctcctgtcatctatcccctgcctacaaggtcccctcctgactcgtgcag

SEQ ID NO: 409203 - DNA, 120 bp, Artificial Sequence
  ENSG00000148120_51 (sequence is synthesized)
cagtggtggctcttgcctgagatgcatggcagcttccgaaaggctcgccatgcctcctgtctccagggtgcagctggattccggcagcttctgcctaagtgctttcagttagcacactct

SEQ ID NO: 409204 - DNA, 120 bp, Artificial Sequence
  ENSG00000148120_52 (sequence is synthesized)
gacaggccccagggatggaagagctaaggtggcagggtcagaagaaatctgttgtttttttattgtttgtgatttattatgacttctctttttttctggattcattgttaaattcaagct

SEQ ID NO: 409205 - DNA, 120 bp, Artificial Sequence
  ENSG00000148120_53 (sequence is synthesized)
cctgctgaggaaaacgttaaaatgtatcgctttaaggaggtgcaacaggcaggagtctatggaactcttaatcttagctgctgcctccactttgatacaatgctagataaatgcgagcat

SEQ ID NO: 409206 - DNA, 120 bp, Artificial Sequence
  ENSG00000148120_54 (sequence is synthesized)
ctttccctaaccttcctcctgaatgcctcatcccttgatcacaaaaacatcccttaataatagggggaaaaccccaagtatgtaaccctatccatagccaaaataaagtctgcatgccac

SEQ ID NO: 409207 - DNA, 120 bp, Artificial Sequence
  ENSG00000148120_55 (sequence is synthesized)
gattcaagggcataggcgtcggaattgtgatttcgtgcgtgttttatttaccaggccttcaaatcaaaaaggccaggcaaacacacgttctggggctatcaagaaagttcacacgaagga

SEQ ID NO: 409208 - DNA, 120 bp, Artificial Sequence
  ENSG00000148120_56 (sequence is synthesized)
caaatccagcagggagaaagtgacataccttgcgggctcaggcttgggatttctgcagccacgcgcgcgttcacccgacgggacctcgcctgcactgccgccgggagaagcctgctctag

SEQ ID NO: 409209 - DNA, 120 bp, Artificial Sequence
  ENSG00000148120_57 (sequence is synthesized)
cttaatgcatcttaaggcacctcttcacagaaggcggtggaaggctgcttacgtgatggcatgtggatagcgatgccatccgtttgtttttttctcctccatgacagagaagcaggaaaa

SEQ ID NO: 409210 - DNA, 120 bp, Artificial Sequence
  ENSG00000148120_58 (sequence is synthesized)
cattcctaaatttatttatagacgttaaaaaaaaatcaggcttggttttttcctgtaactgttcttcagccggcagcaagtatagcagcaagtatacagcagcaagtatacagcagcaag

SEQ ID NO: 409211 - DNA, 120 bp, Artificial Sequence
  ENSG00000148120_59 (sequence is synthesized)
tatacagcagcaagtacagcagcagcaagtacagcagcagtactttatgagttgttgtgtttattccctgccttttggctttactcaagaaaaccagttgtgtttctcagagcaactgta

SEQ ID NO: 409212 - DNA, 120 bp, Artificial Sequence
  ENSG00000148120_60 (sequence is synthesized)
ttgttttatttgccactctcttcactttgtccattatagtacaatagattgtccttgtcccgtctccaaattggaagctccctaggtggtggtcaggctgttgatgagatttgtattcta

SEQ ID NO: 409213 - DNA, 120 bp, Artificial Sequence
  ENSG00000148120_61 (sequence is synthesized)
tcaaagctccattttagataatctatcatcattttttatacgcagtaagtcgctgattttgtttctttttttcaaacagttttgatttgaagttcctttaaaggctgttggagcttttgc

SEQ ID NO: 409214 - DNA, 80 bp, Artificial Sequence
  ENSG00000148120_62 (sequence is synthesized)
ctgcgtcctccccggccgcgggcgagccgctgcagagggagcgtcgcgccggggcggagtgcgggcttgcgcggcaagtg

SEQ ID NO: 409215 - DNA, 120 bp, Artificial Sequence
  ENSG00000148120_63 (sequence is synthesized)
gctgcggggatgctttcaaacatgagaccggctctgcagagatgctcctgtgtcttctgtgacattacccaagtagcctcaaatccttagacctacagtgaagcaggccatgtgtttata

SEQ ID NO: 409216 - DNA, 120 bp, Artificial Sequence
  ENSG00000148120_64 (sequence is synthesized)
ttttaacgagtccaggccttcgcgtctcctgcgccagcagacggtgcccacggagctcccagctgaggcgctgcttctccgggctgtcgattggacccgccctccggtgcctactgagct

SEQ ID NO: 409217 - DNA, 120 bp, Artificial Sequence
  ENSG00000148120_65 (sequence is synthesized)
gatatcagttctcattttacacactggctcagttcagcaggaacaggagtcgagcccttgagcaaaaagccttcgtgtctgaaagaccacagcaagattctttcattcgtctcctcctag

SEQ ID NO: 409218 - DNA, 120 bp, Artificial Sequence
  ENSG00000148120_66 (sequence is synthesized)
gatcaggtaggtgtcatctttcagcagatggggattctgtaaaggctgtccctgcacttcacacaggaatccacgttctcagtatctctttcataacaaataattaaatctgttacagag

SEQ ID NO: 409219 - DNA, 120 bp, Artificial Sequence
  ENSG00000148120_67 (sequence is synthesized)
tttttccttggctcattgtgccctgacagtcaccagattatggaagcaaattttatttttaatcttttgagactcttctgctttgtttggtactgttgacagctcttctggaagtttttg

SEQ ID NO: 409220 - DNA, 120 bp, Artificial Sequence
  ENSG00000148120_68 (sequence is synthesized)
tgtggcagtccctcacctgattcttcttgccctctgtcattcctcctccatctccttcgaggtctgccctttgcctgcctgtgtcttcagagctgatcttcctcggggcctccacactcg

SEQ ID NO: 409221 - DNA, 120 bp, Artificial Sequence
  ENSG00000148120_69 (sequence is synthesized)
gctgcgtgtcctcccagagtggtctcatctaaacccccatcttaggtgggagtctccaggtgcagaccctgatgcaaggggtatgggaaagagatttattaggaattgttctgatacggg

SEQ ID NO: 409222 - DNA, 120 bp, Artificial Sequence
  ENSG00000148120_70 (sequence is synthesized)
atccccagtgttggaggtggggcctggcgggaggtgactggatcacagaggtggtttgtcatggtttaacaccatccccccttggtgctgtggtcacaatagtgagtgagttctcatgag

SEQ ID NO: 409223 - DNA, 120 bp, Artificial Sequence
  ENSG00000148120_71 (sequence is synthesized)
cttggtgctgtggtcacaatagtgagtgagttctcatgagctctggttatttaaaagtgtgtggcaccttcctccaccaactgtctccctcccgccccagccatgtaagatgtcctgctt

SEQ ID NO: 409224 - DNA, 74 bp, Artificial Sequence
  ENSG00000148120_72 (sequence is synthesized)
gtaagatgtcctggagcaggtgacagcatcatgcttcctgtacaacctgcagaaccgtgagccaattaaacctc

SEQ ID NO: 409225 - DNA, 120 bp, Artificial Sequence
  ENSG00000148120_73 (sequence is synthesized)
aaacggaagcgcagggagaaggaagaggtgtttgaaaagactttaaattggagtcatctaagaaatagagagagaagaagaaagaagtggattacttttaaaacactaggaggaatttta

SEQ ID NO: 409226 - DNA, 120 bp, Artificial Sequence
  ENSG00000148120_74 (sequence is synthesized)
tttactgtaaagcagatgagaaatttgtttgcccaagtttagaatttcagtatgttactttgcagaagtttggactgcctgtcttttgattttgtattaaaacttgatttgtcattgtaa

SEQ ID NO: 409227 - DNA, 120 bp, Artificial Sequence
  ENSG00000148120_75 (sequence is synthesized)
gaggtgtttgaaaaggttcgccatcggtggtgtgaactcattgttaagcacaagttcacgaaagcctacaaaagtgtggagaggttccttcaggaggatcaggccatgggtgtgtacctc

SEQ ID NO: 409228 - DNA, 120 bp, Artificial Sequence
  ENSG00000148120_76 (sequence is synthesized)
taggtcctcagcccaggtggtggccgaaatgttattttaacgaggtgattctctccctttcctttctgtcatttagttctaaccagatactccttttaggagccaactaaatcagtaagc

SEQ ID NO: 409229 - DNA, 120 bp, Artificial Sequence
  ENSG00000148120_77 (sequence is synthesized)
cgaatagttagccaagactacccgcagcatcaatagtcggctccctggcccagggcctggagagtaactggccaagtgggtgctgggctggtatgggagccccgggtccctggagcacct

SEQ ID NO: 409230 - DNA, 120 bp, Artificial Sequence
  ENSG00000148120_78 (sequence is synthesized)
tgcctggctgtggcagtcaccgggaagcagaggctgtccacctggaggcacagcggcactccttggcactattttggccacttcaggttttataatctgttgaaacaaaaattgtggggg

SEQ ID NO: 409231 - DNA, 120 bp, Artificial Sequence
  ENSG00000148120_79 (sequence is synthesized)
caagtgagaaagagaatgactttttttgaatttgatcttcacgtcacttactgtatgcaaagctttcaagtatatttaaaacataaatttattatgttagctttcaataaatttcttttt

SEQ ID NO: 409232 - DNA, 120 bp, Artificial Sequence
  ENSG00000148120_80 (sequence is synthesized)
ttaaattagacaaatataagaaaatctgtaaattggtaccttttcttttaagttccattagtggcttccccatttcccacctgtactgtatcccagctgagaataaaacttgtatcaaaa

SEQ ID NO: 409233 - DNA, 120 bp, Artificial Sequence
  ENSG00000148120_81 (sequence is synthesized)
ctttcttcgtgtgaggctgcagcgcaccagctgggccacgccgggaggtgccctcctttgctttcggaggggtgcaggcaatggggcttggatgttgccatttgctggtctcttgtcaca

SEQ ID NO: 409234 - DNA, 120 bp, Artificial Sequence
  ENSG00000148120_82 (sequence is synthesized)
ggccctgcctctgcaaggtcagtcatgggacatgtccgtggcattttctgatgtaggaggtgagctggcctgttctgcatcatgctaatggaagaaatggtggcggaacctcagttgcgt

SEQ ID NO: 409235 - DNA, 120 bp, Artificial Sequence
  ENSG00000148123_0 (sequence is synthesized)
agccttttgctctttcctttcattaaacaaacaggagatcctgaaacctggaccctgtgcaagctgcagcgccaggaggaggcagcggaggaagcagagcgcgggatgggcgcccagcgg

SEQ ID NO: 409236 - DNA, 120 bp, Artificial Sequence
  ENSG00000148123_1 (sequence is synthesized)
catctgtgatcccgcgcacctccgccccacgggcgcgcgcacaaacacggacacacacatacacacactcgcgcacacactcgcacaaacacacactcgtacacgcccgcgccgctcgct

SEQ ID NO: 409237 - DNA, 120 bp, Artificial Sequence
  ENSG00000148123_2 (sequence is synthesized)
cgccggcttgctctcccacgcaagcggaatgcagcagcgcctggagagcgtgtctcggaccgccgcctgaatgtacctcgctcccgggagccggacggcccagtagggcgcactggagga

SEQ ID NO: 409238 - DNA, 120 bp, Artificial Sequence
  ENSG00000148123_3 (sequence is synthesized)
cgctccgctgcgggagcctggacagtttttgacggtgcagtcttgctatatggtgtgagaaatggctgtaggaaacaacactcaacgaagttattccatcatcccgtgttttatatttgt

SEQ ID NO: 409239 - DNA, 120 bp, Artificial Sequence
  ENSG00000148123_4 (sequence is synthesized)
tgagcttgtcatcatggctgggacagtgctgcttgcctactacttcgaatgcactgacacttttcaggtgcatatccaaggattcttctgtcaggacggagacttaatgaagccttaccc

SEQ ID NO: 409240 - DNA, 120 bp, Artificial Sequence
  ENSG00000148123_5 (sequence is synthesized)
agggacagaggaagaaagcttcatcacccctctggtgctctattgtgtgctggctgccaccccaactgctattatttttattggtgagatatccatgtatttcataaaatcaacaagaga

SEQ ID NO: 409241 - DNA, 120 bp, Artificial Sequence
  ENSG00000148123_6 (sequence is synthesized)
atccctgattgctcaggagaaaacaattctgaccggagaatgctgttacctgaaccccttacttcgaaggatcataagattcacaggggtgtttgcatttggactttttgctactgacat

SEQ ID NO: 409242 - DNA, 120 bp, Artificial Sequence
  ENSG00000148123_7 (sequence is synthesized)
ttttgtaaacgccggacaagtggtcactgggcacttaacgccatacttcctgactgtgtgcaagccaaactacaccagtgcagactgccaagcgcaccaccagtttataaacaatgggaa

SEQ ID NO: 409243 - DNA, 120 bp, Artificial Sequence
  ENSG00000148123_8 (sequence is synthesized)
catttgtactggggacctggaagtgatagaaaaggctcggagatcctttccctccaaacacgctgctctgagcatttactccgccttatatgccacgatgtatattacaagcacaatcaa

SEQ ID NO: 409244 - DNA, 120 bp, Artificial Sequence
  ENSG00000148123_9 (sequence is synthesized)
gacgaagagcagtcgactggccaagccggtgctgtgcctcggaactctctgcacagccttcctgacaggcctcaaccgggtctctgagtatcggaaccactgctcggacgtgattgctgg

SEQ ID NO: 409245 - DNA, 120 bp, Artificial Sequence
  ENSG00000148123_10 (sequence is synthesized)
cttccaaacccaagcctgaggatccccgtggagtacccctaatggctttcccaaggatagaaagccctctggaaaccttaagtgcacagaatcactctgcgtccatgaccgaagttacct

SEQ ID NO: 409246 - DNA, 120 bp, Artificial Sequence
  ENSG00000148123_11 (sequence is synthesized)
gagacgactgatgtgtcacaagctgttttttaaaatcatcttccaattctatacttcaaaacacacagttgctcaatgtcaaactgtgatgacaaatattacgtttatctagttagaagc

SEQ ID NO: 409247 - DNA, 120 bp, Artificial Sequence
  ENSG00000148123_12 (sequence is synthesized)
taatgttttgtacattttttgtatgaggaagtgatgtagcttgccctgattttttttttttttttttggtcagctttaatatatttatgccagaattttaaaaccaacaaaattttcttg

SEQ ID NO: 409248 - DNA, 120 bp, Artificial Sequence
  ENSG00000148123_13 (sequence is synthesized)
ttcaagcgtgcattgaagaaccacatttattcaatggttgacgttgttttgtgatatttgtacacaaattttcttttctcagttttataaacacagaatataacaattcactttaaactt

SEQ ID NO: 409249 - DNA, 120 bp, Artificial Sequence
  ENSG00000148123_14 (sequence is synthesized)
ttattaccacagttgctgcctcctccagaatttttgaattttaataaaaggcaaacttttgagctgcaggaaggacaatgttggttaataataaatctcaaagtcaattgtagaaaaaaa

SEQ ID NO: 409250 - DNA, 120 bp, Artificial Sequence
  ENSG00000148123_15 (sequence is synthesized)
attgtcttcaaaaagaatgttgcactctgatctcttaacaaattgttacgttcaaagtttaaagtgatatattaacaaagtcacctagttatacaaacaattgtcagagaattctggatt

SEQ ID NO: 409251 - DNA, 120 bp, Artificial Sequence
  ENSG00000148123_16 (sequence is synthesized)
tggagggtattggggttatatgattctttcttagataatggcctctactaaataactcaagatctttctggaatgtcttctggcaggcaggtgccactgtcagcttttctccaaaaagca

SEQ ID NO: 409252 - DNA, 120 bp, Artificial Sequence
  ENSG00000148123_17 (sequence is synthesized)
gccaacatcagcctcccctgtcaactcaacagttttgtatctcatattatatggactttatatgaaaatgaatattttacagtttgcacagtattattttacagaaaaggaatcagagaa

SEQ ID NO: 409253 - DNA, 120 bp, Artificial Sequence
  ENSG00000148123_18 (sequence is synthesized)
tctacaacatagggccccagaacaacagtttcactttgtggcttttaattattctagaattttaactgcatctcatttttctagcatggtgagaactaatatgtaactcctttgattgaa

SEQ ID NO: 409254 - DNA, 120 bp, Artificial Sequence
  ENSG00000148123_19 (sequence is synthesized)
ggagctcttttgtccgtacctatcagaatgttttcttgacacttccatgttggctcttctcagctttttttgtacatattttttttttctaaagagaagaaaaagttatcacaaaatgta

SEQ ID NO: 409255 - DNA, 120 bp, Artificial Sequence
  ENSG00000148123_20 (sequence is synthesized)
aattctctaggttgcaaattgggaggattaggaacaagtaagagagatccatgcaggatggacaagaaaaaaaagttttataccaaaaattgtatttcatggcattagggcagtctactg

SEQ ID NO: 409256 - DNA, 120 bp, Artificial Sequence
  ENSG00000148123_21 (sequence is synthesized)
cagaaagtgagccagatggagctggaatgtagaggactcgtcgtgagcggggagcccacttggtcagctcagtgaaggctctccctcagacgccaacatctacatgcggatatggaagcc

SEQ ID NO: 409257 - DNA, 120 bp, Artificial Sequence
  ENSG00000148123_22 (sequence is synthesized)
tttattgctggaagctgtagtctccgaagattttcagctctctaatgtgtgaatgaagagcttggccggtggagcagcaacaaaggagataaattagttcttctgtagcttaccctgaca

SEQ ID NO: 409258 - DNA, 120 bp, Artificial Sequence
  ENSG00000148123_23 (sequence is synthesized)
taaatagaagtctaaaaatctgggagaggaaagatggtttattctttttcttgttgtattgttgttcttattttgcatggaaattctcttagaactgtcttagaaataggcaggcaaaag

SEQ ID NO: 409259 - DNA, 120 bp, Artificial Sequence
  ENSG00000148123_24 (sequence is synthesized)
ggaagggaagtaggacacagaagacattgagtgggaaggaggtgaatctcaaagtggctctcatgattctcatgtatttcattcaccaaacacttattgtttacctatattattccaggt

SEQ ID NO: 409260 - DNA, 120 bp, Artificial Sequence
  ENSG00000148123_25 (sequence is synthesized)
actataacaaggatatcacaaaacttggtaaaaaatgtcaacttgaccaatgaatatcttttcactgtttttttaattatgaaagaatttaatcacagaaaataactgacatccctgcac

SEQ ID NO: 409261 - DNA, 120 bp, Artificial Sequence
  ENSG00000148123_26 (sequence is synthesized)
ctaccatcaagacaaaatcttaaagttttgtcatatttgcttcaaatatttttgtcaaggaaaataaaatgttacagatatggccaaaatcctattgtcctgaagccagaagtcattata

SEQ ID NO: 409262 - DNA, 120 bp, Artificial Sequence
  ENSG00000148123_27 (sequence is synthesized)
tgtatgaagtttggggcttcttttccctacatgtttcccatgcatggtttatattttcctacatatgtatatattcataaatattttaggaaaattttacataaatgacactatgctgaa

SEQ ID NO: 409263 - DNA, 120 bp, Artificial Sequence
  ENSG00000148136_0 (sequence is synthesized)
atggacaagataaaccagacatttgtgagagaattcattcttctgggactctctggttaccccaaacttgagatcattttctttgctctgattctagttatgtacgtagtgattctaatt

SEQ ID NO: 409264 - DNA, 120 bp, Artificial Sequence
  ENSG00000148136_1 (sequence is synthesized)
ggcaatggtgttctgatcatagcaagcatcttggattctcgtcttcacatgcccatgtacttcttcctgggcaacctctctttcctggatatctgctatacaacctcctccattccctca

SEQ ID NO: 409265 - DNA, 120 bp, Artificial Sequence
  ENSG00000148136_2 (sequence is synthesized)
acactggtgagcttaatctcaaagaaaagaaacatttccttctctggatgtgcagtgcagatgttctttgggtttgcaatggggtcaacagaatgtttcctccttggcatgatggcattt

SEQ ID NO: 409266 - DNA, 120 bp, Artificial Sequence
  ENSG00000148136_3 (sequence is synthesized)
acatcacttgccatgcgatggcctttctgtgggaacaatattattaatcatttcttatgcgagatcttagctgtcctaaaattagcttgttctgatatatctgtcaatattgttacccta

SEQ ID NO: 409267 - DNA, 120 bp, Artificial Sequence
  ENSG00000148136_4 (sequence is synthesized)
gcagtgtcaaatattgctttcctagttcttcctctgctcgtgatttttttctcctatatgttcatcctctacaccatcttgcgaacgaactcggccacaggaagacacaaggcattttct

SEQ ID NO: 409268 - DNA, 120 bp, Artificial Sequence
  ENSG00000148136_5 (sequence is synthesized)
acatgctcagctcacctgactgtggtgatcatattttatggtaccatcttctttatgtatgcaaaacctaagtcccaggacctccttgggaaagacaacttgcaagctacagaggggctt

SEQ ID NO: 409269 - DNA, 120 bp, Artificial Sequence
  ENSG00000148136_6 (sequence is synthesized)
gtttccatgttttatggggttgtgacccccatgttaaaccccataatctatagcttgagaaataaagatgtaaaagctgctataaaatatttgctgagcaggaaagctattaaccagtaa

SEQ ID NO: 409270 - DNA, 120 bp, Artificial Sequence
  ENSG00000148143_0 (sequence is synthesized)
gagtctgaggagccgaggaaggcagggaagatggcgatcctccattgctgagacccggcagaagcacatgagactcccaaacaacttccacaacaataacccgagcaggaagaggagaaa

SEQ ID NO: 409271 - DNA, 120 bp, Artificial Sequence
  ENSG00000148143_1 (sequence is synthesized)
gagaaagaggataaggaggcggtggggctggagaacccgaagcacctcccggcgccgggacgcttcttctgttcctaatgtgagaggctagacccagatcatggaggtgcttcagtgtga

SEQ ID NO: 409272 - DNA, 120 bp, Artificial Sequence
  ENSG00000148143_2 (sequence is synthesized)
tggctgtgatttccgagccccgtcttatgaagatctcaaggcacacattcaggatgtccacacggcatttctgcagccaactgatgttgctgaggacaatgtgaatgagctacgatgtgg

SEQ ID NO: 409273 - DNA, 120 bp, Artificial Sequence
  ENSG00000148143_3 (sequence is synthesized)
gtccgtgaatgccagtaatcagacagaggtggagttttcttctataaaggatgaatttgccattgcagaagatttatcaggtcaaaatgcaacttcattggggaccggaggttactatgg

SEQ ID NO: 409274 - DNA, 120 bp, Artificial Sequence
  ENSG00000148143_4 (sequence is synthesized)
ccacagtccaggatattatggtcagcatattgccgctaatcccaaaccaacaaacaagttttttcaatgcaagttctgtgtacgctacttcaggtcaaaaaacctcctcatagaacacac

SEQ ID NO: 409275 - DNA, 120 bp, Artificial Sequence
  ENSG00000148143_5 (sequence is synthesized)
tagaaaggtccatggagctcaagctgaagggagttcatcaggaccccctgtcccgggatccttaaattataatatcatgatgcacgagggatttggaaaggtcttctcttgccagttttg

SEQ ID NO: 409276 - DNA, 120 bp, Artificial Sequence
  ENSG00000148143_6 (sequence is synthesized)
cacatacaagtcaccaagaagggcaagaataattaagcatcagaagatgtatcacaaaaacaatttgaaggagaccactgctcccccacctgctcctgctccaatgccagaccctgtggt

SEQ ID NO: 409277 - DNA, 120 bp, Artificial Sequence
  ENSG00000148143_7 (sequence is synthesized)
tccgcccgtatcactgcaggacccctgcaaggaactgccagcagaggttgtggagcgcagcatcttagagtctatggtcaagcctttgaccaaatctcgaggcaacttttgttgtgagtg

SEQ ID NO: 409278 - DNA, 120 bp, Artificial Sequence
  ENSG00000148143_8 (sequence is synthesized)
gtgcagctaccagaccccccgccgagaacgctggtgtgaccacatgatgaagaaacaccgcagtatggtcaagatcctttccagtctcagacagcaacaagaaggaactaatctacctga

SEQ ID NO: 409279 - DNA, 120 bp, Artificial Sequence
  ENSG00000148143_9 (sequence is synthesized)
tgtgccgaacaagagtgcccccagccccacttccaactccacctatctgaccatgaatgctgcaagccgggagatacccaatactaccgtctccaacttcaggggctccatgggcaactc

SEQ ID NO: 409280 - DNA, 120 bp, Artificial Sequence
  ENSG00000148143_10 (sequence is synthesized)
catcatgagacccaattcttcagcttccaagttttcgcccatgtcttaccctcagatgaagccgaagtcacctcacaattctggtctagttaacttgacagagagatcccgttatggaat

SEQ ID NO: 409281 - DNA, 120 bp, Artificial Sequence
  ENSG00000148143_11 (sequence is synthesized)
gactgacatgaccaattcttctgctgacctggaaactaacagcatgctaaatgactctagttctgatgaagagttaaatgaaatagacagtgagaatggtttaagtgctatggatcacca

SEQ ID NO: 409282 - DNA, 120 bp, Artificial Sequence
  ENSG00000148143_12 (sequence is synthesized)
gacatcaggcctgtctgcagagcagctgatgggctcagatggcaacaaattattggagaccaaggggattccatttagaagattcatgaataggttccagtgccccttttgtcctttcct

SEQ ID NO: 409283 - DNA, 120 bp, Artificial Sequence
  ENSG00000148143_13 (sequence is synthesized)
caccatgcatcgacgtagcatctctcgtcacatagaaaacatccacttatctggaaagacagctgtctacaaatgtgacgaatgtccgtttacttgcaagagctcgttgaaacttggggc

SEQ ID NO: 409284 - DNA, 120 bp, Artificial Sequence
  ENSG00000148143_14 (sequence is synthesized)
tcacaaacagtgtcacacgggtacaacgtcagattgggatgctgtgaattcccagagtgaaagcatttcttcctcactgaatgaaggtgtggtgtcttatgagagctcaagcatcaatgg

SEQ ID NO: 409285 - DNA, 120 bp, Artificial Sequence
  ENSG00000148143_15 (sequence is synthesized)
tagaaagtcaggagtcatgttggatcccttgcagcagcaacagccaccgcagccaccaccaccgccgccgccaccaccaccatcacagccacagccactgcagcagccacagccaccaca

SEQ ID NO: 409286 - DNA, 120 bp, Artificial Sequence
  ENSG00000148143_16 (sequence is synthesized)
gctgcagccaccacatcaggtgccaccccagccacaaacacagccaccaccaacgcagcagccacagccacccacacaagccgcacctctgcacccatacaaatgcaccatgtgtaatta

SEQ ID NO: 409287 - DNA, 120 bp, Artificial Sequence
  ENSG00000148143_17 (sequence is synthesized)
ctccaccacaactctgaaagggctaagagtccatcagcagcataaacattcattctgtgacaacttgccaaaattcgaggggcagccctcaagcctaccattggaaaatgagacagacag

SEQ ID NO: 409288 - DNA, 120 bp, Artificial Sequence
  ENSG00000148143_18 (sequence is synthesized)
ccacccctcttccagcaacactgtgaagaaaagtcagacctcaattcttgggttgtcctccaagaacaattttgtagctaaagcctctaggaagctcgccaatgactttcctctagattt

SEQ ID NO: 409289 - DNA, 120 bp, Artificial Sequence
  ENSG00000148143_19 (sequence is synthesized)
gtcacccgtgaagaagagaaccaggattgacgagatagcaagcaaccttcagagcaaaattaaccaaaccaaacagcaggaagatgcagtgatcaatgttgaggatgatgaagaggaaga

SEQ ID NO: 409290 - DNA, 120 bp, Artificial Sequence
  ENSG00000148143_20 (sequence is synthesized)
ggaagacaacgaagtcgagatagaggttgagttggacagggaggaagaaccgacagaacccatcatagaggttcccacttccttttctgcccaacagatatgggtaagagataccagtga

SEQ ID NO: 409291 - DNA, 120 bp, Artificial Sequence
  ENSG00000148143_21 (sequence is synthesized)
gccccagaaagagcccaacttcagaaacatcacccacgattacaatgccaccaatggggctgagattgagctcaccctttctgaagatgaagaggattattatggctcctcaacaaactt

SEQ ID NO: 409292 - DNA, 120 bp, Artificial Sequence
  ENSG00000148143_22 (sequence is synthesized)
gaaagatcaccaagtttccaatactgctctgctgaatacccaaactcccatctatgggactgagcacaatagtgaaaacacagactttggtgactctggaaggctttactattgtaaaca

SEQ ID NO: 409293 - DNA, 120 bp, Artificial Sequence
  ENSG00000148143_23 (sequence is synthesized)
ctgtgactttaacaacaaatctgcccggagtgttagcacccactaccaacgaatgcacccatacattaaattcagctttaggtacatcttggaccccaatgatcacagtgcagtgtacag

SEQ ID NO: 409294 - DNA, 120 bp, Artificial Sequence
  ENSG00000148143_24 (sequence is synthesized)
gtgcctggaatgctacatcgattacaccaacttcgaagatctccagcagcattatggcgagcaccacccagaagccatgaatgtactcaactttgatcactcggacctgatctaccggtg

SEQ ID NO: 409295 - DNA, 120 bp, Artificial Sequence
  ENSG00000148143_25 (sequence is synthesized)
tcggttttgttcatacacgagcccgaatgttagaagcctgatgccacattaccaaagaatgcatcccacggtgaagatcaacaacgcgatgatattttcaagctatgtcgtggagcagca

SEQ ID NO: 409296 - DNA, 120 bp, Artificial Sequence
  ENSG00000148143_26 (sequence is synthesized)
ggaagggctgaatacagaatcccagaccctgagggagattctgaattcggctcccaagaacatggcgacttccacacctgtggctcgtggtggtggtttgccagctacgttcaacaaaaa

SEQ ID NO: 409297 - DNA, 120 bp, Artificial Sequence
  ENSG00000148143_27 (sequence is synthesized)
cactcctaagacctttactcctgaatgtgaaaatcagaaggaccctttggtcaacactgttgttgtttatgattgtgatgtttgttcgtttgcaagccccaacatgcattctgtcttggt

SEQ ID NO: 409298 - DNA, 120 bp, Artificial Sequence
  ENSG00000148143_28 (sequence is synthesized)
tcattatcagaagaaacaccccgaagaaaaggcttcctactttaggatccagaaaactatgcgaatggtgtctgtggacaggggctctgccctttctcaattatcatttgaggtgggtgc

SEQ ID NO: 409299 - DNA, 120 bp, Artificial Sequence
  ENSG00000148143_29 (sequence is synthesized)
tccaatgtctcccaaaatgtccaacatgggttccccaccccccccacaacccccgccaccagacctcagtactgagctttactactgcaaacactgttcctacagcaatcggtcagttgt

SEQ ID NO: 409300 - DNA, 120 bp, Artificial Sequence
  ENSG00000148143_30 (sequence is synthesized)
gggagtgcttgtccactaccagaaaagacacccagaaataaaggttactgccaaatatatcagacaggctcctcccacagctgcaatgatgagaggggtcgaagggccccaaggctcccc

SEQ ID NO: 409301 - DNA, 120 bp, Artificial Sequence
  ENSG00000148143_31 (sequence is synthesized)
ccggccacccgcccccatacaacagctgaaccgaagcagctctgagagagatggccctcctgtggagaatgagatgttcttttgccagcactgtgattatgggaaccggacggtcaaagg

SEQ ID NO: 409302 - DNA, 120 bp, Artificial Sequence
  ENSG00000148143_32 (sequence is synthesized)
ggtactcattcattatcagaagaagcaccgagacttcaaggccaatgcagatgtgatccggcagcatacggccaccattcgaagcctctgcgaccgaaatcagaagaagcctgccagctg

SEQ ID NO: 409303 - DNA, 120 bp, Artificial Sequence
  ENSG00000148143_33 (sequence is synthesized)
cgtgcttgtctccccctctaatctggagcgggacaaaacgaaactccgagcactcaaatgtaggcagtgctcatatacctccccctacttctatgcactgaggaagcatatcaagaaaga

SEQ ID NO: 409304 - DNA, 120 bp, Artificial Sequence
  ENSG00000148143_34 (sequence is synthesized)
ccaccccgccctgaaagccacagtcacgtccatcatgcgatgggcatttctagatggcttgatagaagctggctaccactgcgagtggtgcatctactcccatacggagcccaacggttt

SEQ ID NO: 409305 - DNA, 120 bp, Artificial Sequence
  ENSG00000148143_35 (sequence is synthesized)
gctcctgcattaccaacggaggcatccagaacactatgttgattacacctacatggctactaaactgtgggctgggccagacccatcccctccctctctcacaatgccagccgaagccaa

SEQ ID NO: 409306 - DNA, 120 bp, Artificial Sequence
  ENSG00000148143_36 (sequence is synthesized)
aacctacagatgcagggactgtgttttcgaagctgtttccatctgggacatcactaatcactaccaagcattccacccctgggccatgaatggtgatgagtcagtgctactggacatcat

SEQ ID NO: 409307 - DNA, 120 bp, Artificial Sequence
  ENSG00000148143_37 (sequence is synthesized)
caaggagaaagatgctgtggagaagcccattctttcatccgaagagttggcaggccctgtgaattgtgaaaacagtatacccacccctttcccggagcaggaagctgaatgtccagagga

SEQ ID NO: 409308 - DNA, 120 bp, Artificial Sequence
  ENSG00000148143_38 (sequence is synthesized)
tgcaagactgtcccctgagaaaagcctgcagctagcttcagccaaccccgccatatcctccaccccataccagtgcacggtatgccaatctgagtataacaacttgcacggccttctcac

SEQ ID NO: 409309 - DNA, 120 bp, Artificial Sequence
  ENSG00000148143_39 (sequence is synthesized)
tcattatgggaagaagcaccctggcatgaaagtgaaggctgctgactttgcccaggacattgacatcaacccaggtgccgtctacaaatgcaggcattgcccatacatcaacacccgcat

SEQ ID NO: 409310 - DNA, 120 bp, Artificial Sequence
  ENSG00000148143_40 (sequence is synthesized)
ccacggcgtactgacccactaccagaagcgacacccgtccatcaaggtgaccgctgaggactttgtgcacgacgtagagcagtctgctgacatatcccagaatgacgtggaggagacgag

SEQ ID NO: 409311 - DNA, 120 bp, Artificial Sequence
  ENSG00000148143_41 (sequence is synthesized)
caggatcttcaagcaagggtatggcgcctaccggtgcaaactgtgtccgtacacacacggcactttggagaaactaaaaatccactacgagaagtatcacaatcagcctgaatttgatgt

SEQ ID NO: 409312 - DNA, 120 bp, Artificial Sequence
  ENSG00000148143_42 (sequence is synthesized)
cttttcccagtcgcccccgaagctgccagtccccctcgagcccgagatgaccactgaagtgagcccttcccaagtctccatcactgaggaggaggtgggagaggagcccgtgtccacttc

SEQ ID NO: 409313 - DNA, 120 bp, Artificial Sequence
  ENSG00000148143_43 (sequence is synthesized)
tcccacactgtgttccggtgccagctctgcaagtacttctgctccacgaggaaggggatcgccaggcactaccgcatcaagcacaataatgtccgagcccagccagaaggcaagaacaac

SEQ ID NO: 409314 - DNA, 120 bp, Artificial Sequence
  ENSG00000148143_44 (sequence is synthesized)
ctcttcaagtgtgccctgtgtgcctacaccaaccccatccgcaaaggtctggcagcccactaccagaagcgccacgacattgatgcgtattacactcactgcttggcagcctccaggacc

SEQ ID NO: 409315 - DNA, 120 bp, Artificial Sequence
  ENSG00000148143_45 (sequence is synthesized)
atcagcgacaagcccaacaaagtgatcatcccatccccgcccaaggacgactcccctcagctgagcgaggaactccggcgggcagtggagaagaaaaagtgctccttgtgctctttccag

SEQ ID NO: 409316 - DNA, 120 bp, Artificial Sequence
  ENSG00000148143_46 (sequence is synthesized)
tcgttcagcaagaagggcatcgtgtcccattacatgaaacgccacccaggggtgttcccaaagaagcagcacgccagcaagttggggggctacttcacggccgtctatgcagatgagcat

SEQ ID NO: 409317 - DNA, 120 bp, Artificial Sequence
  ENSG00000148143_47 (sequence is synthesized)
gagaagcccacactgatggaagaagaggagagaggcaactttgagaaagccgaggtggagggtgaagctcaggaaatcgagtggctcccattccgctgcatcaaatgcttcaagctgtcc

SEQ ID NO: 409318 - DNA, 120 bp, Artificial Sequence
  ENSG00000148143_48 (sequence is synthesized)
tttagcactgcagagctgctgtgcatgcattacactgaccaccacagtcgggacctaaagagggacttcatcattctgggcaacggcccccgcttgcagaactccacctaccagtgtaag

SEQ ID NO: 409319 - DNA, 120 bp, Artificial Sequence
  ENSG00000148143_49 (sequence is synthesized)
cactgtgatagcaaactgcaaagcacagccgagctgacctcacacttgaacattcacaatgaggaattccagaagcgtgccaaacgtcaggagaggaggaaacagcttttgagcaagcag

SEQ ID NO: 409320 - DNA, 120 bp, Artificial Sequence
  ENSG00000148143_50 (sequence is synthesized)
aaatatgcagatggtgcttttgcagatttcaaacaagagaggccttttggtcacttagaagaggtgccaaagatcaaggagaggaaagtggtgggctacaaatgtaaattctgtgtggaa

SEQ ID NO: 409321 - DNA, 120 bp, Artificial Sequence
  ENSG00000148143_51 (sequence is synthesized)
gtgcacccaacgctccgagccatctgcaatcacctccgaaagcacgtccagtatggcaatgtcccagctgtgtcagctgctgtgaaggggctgcgttctcatgagaggagccacctggcc

SEQ ID NO: 409322 - DNA, 120 bp, Artificial Sequence
  ENSG00000148143_52 (sequence is synthesized)
ctggccatgtttacccgcgaggacaagtacagctgccagtattgctcgtttgtttctgctttcaggcacaatttggatcgccatatgcaaacccaccacggacaccataaaccattccga

SEQ ID NO: 409323 - DNA, 120 bp, Artificial Sequence
  ENSG00000148143_53 (sequence is synthesized)
tgcaaactctgctccttcaagtcctcctataacagccggctgaaaacacatatactcaaagctcatgctggtgagcatgcctacaagtgttcttggtgctcattctccaccatgacaatc

SEQ ID NO: 409324 - DNA, 120 bp, Artificial Sequence
  ENSG00000148143_54 (sequence is synthesized)
agccagctgaaggaacactccctcaaggtccacggaaaagccctgaccctccccaggccacggatcgtcagtctcctctcctcacactcccaccactcctcccaaaaagctaccccggct

SEQ ID NO: 409325 - DNA, 120 bp, Artificial Sequence
  ENSG00000148143_55 (sequence is synthesized)
gaagaagtggaagactccaatgactcatcatattcagagcccccagatgttcagcagcagttgaaccactatcagtcagctgccctggcaaggaacaacagccgtgttagccctgtgcct

SEQ ID NO: 409326 - DNA, 120 bp, Artificial Sequence
  ENSG00000148143_56 (sequence is synthesized)
ctttctggggctgctgctggcactgagcagaaaactgaagccgtgcttcactgcgaattctgtgaattctcctccggctacatccagagcatcaggcgtcattaccgggacaagcatggt

SEQ ID NO: 409327 - DNA, 120 bp, Artificial Sequence
  ENSG00000148143_57 (sequence is synthesized)
gggaagaagcttttcaagtgcaaagactgctccttttacacaggctttaaatctgcttttactatgcacgtggaagctgggcactcagcagttcccgaggagggccccaaagatcttcgc

SEQ ID NO: 409328 - DNA, 120 bp, Artificial Sequence
  ENSG00000148143_58 (sequence is synthesized)
tgtcctctctgcctctatcacaccaaatacaagcgcaacatgattgaccacatcgtgctgcaccgagaagagcgtgttgtccccattgaagtttgccggtccaaactgtccaaatacttg

SEQ ID NO: 409329 - DNA, 120 bp, Artificial Sequence
  ENSG00000148143_59 (sequence is synthesized)
cagggagtagttttccgctgtgataagtgtaccttcacctgctccagtgatgagagcctccagcaacatatagaaaagcacaatgaactgaaaccttacaaatgccagctctgctactat

SEQ ID NO: 409330 - DNA, 120 bp, Artificial Sequence
  ENSG00000148143_60 (sequence is synthesized)
gagaccaagcacacggaggaactggacagccaccttcgggatgagcataaggtaagccgtaactttgagctggttggacgggttaacttggatcagctggaacagatgaaggagaaaatg

SEQ ID NO: 409331 - DNA, 120 bp, Artificial Sequence
  ENSG00000148143_61 (sequence is synthesized)
gagagctccagcagcgatgatgaggacaaggaagaagaaatgaacagcaaggctgaagacagagagctgatgagattttctgaccacggggctgctcttaacactgagaagcgttttcca

SEQ ID NO: 409332 - DNA, 120 bp, Artificial Sequence
  ENSG00000148143_62 (sequence is synthesized)
tgtgaattttgtggacgggcgttttcacagggctctgagtgggaaagacatgtgctgagacacggcatggcattgaatgacaccaagcaggtgagcagagaagaaatccacccaaaagag

SEQ ID NO: 409333 - DNA, 120 bp, Artificial Sequence
  ENSG00000148143_63 (sequence is synthesized)
atcatggagaacagtgttaaaatgccctccatagaggaaaaggaagatgacgaggccattgggatagacttttccctaaagaatgaaacagtagccatctgtgtagtaactgccgacaaa

SEQ ID NO: 409334 - DNA, 120 bp, Artificial Sequence
  ENSG00000148143_64 (sequence is synthesized)
tctctcctggagaatgcagaggccaaaaaagaatgagcgtttggtgaaattcttaatcaaaccttacttgaacagtgatgaaaaagtgggagggctggcttgggctgagaagggagggac

SEQ ID NO: 409335 - DNA, 120 bp, Artificial Sequence
  ENSG00000148143_65 (sequence is synthesized)
agaaaagagaagacagaacaaagctgctttttaggactgaacaatctattttcaaagcactggtacctgtgtgagtgagtatgtaaattaaagttatttaaatggttggaatatgtggct

SEQ ID NO: 409336 - DNA, 120 bp, Artificial Sequence
  ENSG00000148143_66 (sequence is synthesized)
ccttttccatcactacatcttttcttccggatcttcatcatggaagtttcatttgttgcggaatatggaagcacctcccaatggtacggtgcaccctgtggtggtcttggacagtatgtg

SEQ ID NO: 409337 - DNA, 120 bp, Artificial Sequence
  ENSG00000148143_67 (sequence is synthesized)
gaaacagaagctccatgacggtagaagacttctcattggggagcaactttttgacgcacaacttttggtgcgtttttctagttttaataccttaagctttttcaagacctaactgcagcc

SEQ ID NO: 409338 - DNA, 120 bp, Artificial Sequence
  ENSG00000148143_68 (sequence is synthesized)
caaaaaacagaaaacaaaaaaaaaaaaactgctttgcataaaacagtcacctgtttcctagtacctcaaacttaaccaagggaactctctgcatttgtcagtactacctgtcgtcgttgt

SEQ ID NO: 409339 - DNA, 120 bp, Artificial Sequence
  ENSG00000148143_69 (sequence is synthesized)
gtcagtactacctgtcgtcgttgtggttaaatgtagagagaactgctgggcaagatggtgaatggagaaaaaaaaagagttttaaagaaaggaacacaaattgtgcttaaaatccccatg

SEQ ID NO: 409340 - DNA, 120 bp, Artificial Sequence
  ENSG00000148143_70 (sequence is synthesized)
tgggttttatttcttaaaatactgtgatttttttaattattttagtaaaaaacaaaacaaaaaaaagaaacagactttaattattagataactgtttgtgaattgtcatcctttattcca

SEQ ID NO: 409341 - DNA, 120 bp, Artificial Sequence
  ENSG00000148143_71 (sequence is synthesized)
ggtaagctgtttattagtgttcaactataatttagaatttggtagattcatgtgagctaattttaaggtgattgtggagttttgtttgccacatgtttattttctatcaatttgagtgtt

SEQ ID NO: 409342 - DNA, 120 bp, Artificial Sequence
  ENSG00000148143_72 (sequence is synthesized)
acaaacacagcacaattcagtttttcatatgaattgtttttcgtgtgtgtgttgttattgttgttttaatttcggggcaagggagatttagttttttgtgaataggaatgtttttatttt

SEQ ID NO: 409343 - DNA, 120 bp, Artificial Sequence
  ENSG00000148143_73 (sequence is synthesized)
tttttttttttttttttttaatttaactaaagaaccaaactttcggcacagctatgcagcttgtgggccagacgaggaggtcctcctcacccttttgttgcctgtcaaattcacgcatta

SEQ ID NO: 409344 - DNA, 120 bp, Artificial Sequence
  ENSG00000148143_74 (sequence is synthesized)
cctcacccttttgttgcctgtcaaattcacgcattatccgtctcataaataatttctgttaggattggctggcttttgtgtgtgattttaaaatctgtgttttgtttctgctggcattgt

SEQ ID NO: 409345 - DNA, 120 bp, Artificial Sequence
  ENSG00000148143_75 (sequence is synthesized)
gttttgttgggggttttcatttatttaggggacgaggggatgtactagaatcccatccctttcgtgagagtggacaagaaataacatatcctacaaggagcctggagaactactttcttt

SEQ ID NO: 409346 - DNA, 120 bp, Artificial Sequence
  ENSG00000148143_76 (sequence is synthesized)
ttttttttttttttttttttttaaatctagctgccagctgctctgtcccccatatcagctttttcaggagggagcagcttagactaaatctaagcctacatttataatatgttctgattg

SEQ ID NO: 409347 - DNA, 120 bp, Artificial Sequence
  ENSG00000148143_77 (sequence is synthesized)
tctgattgtgaacaaagggtttcgttccaaaaaatagaaaagaacttttcttgaagcctaggttttagaagcccgtgtgtgtgtgtgcttggatgtgtgtgtgcgtgtatgagtgtgtgt

SEQ ID NO: 409348 - DNA, 120 bp, Artificial Sequence
  ENSG00000148143_78 (sequence is synthesized)
tcatgtttttttttttttttttttacttggaagggttgtgggagggtgggagggaagaaagggaaggggaattgctgagatgacagtgtcccacacagcttcaaataaaatccatggaaa

SEQ ID NO: 409349 - DNA, 120 bp, Artificial Sequence
  ENSG00000148143_79 (sequence is synthesized)
tcccacacagcttcaaataaaatccatggaaagatgttgcatttgtggaataagtgcttacttgaaaagcatgttcttcttttattttcttactgttaagaatttttatttgtaggatgt

SEQ ID NO: 409350 - DNA, 120 bp, Artificial Sequence
  ENSG00000148143_80 (sequence is synthesized)
ttgttttaatttaatttttttaagggatgggggccatcatgtggaaaccagaaaatggggaaagtgtgaactatccagacaaagattcattttgtgtctatatttgtttttaattggcct

SEQ ID NO: 409351 - DNA, 120 bp, Artificial Sequence
  ENSG00000148143_81 (sequence is synthesized)
tgtgtctatatttgtttttaattggcctcatttcaaatgtattaaacagttccatacctggattgggtgtttgtaatggttaccaaaaaacaaacaaaaaaagaaagaaaaaggaaaaaa

SEQ ID NO: 409352 - DNA, 120 bp, Artificial Sequence
  ENSG00000148143_82 (sequence is synthesized)
atcactactttatttttcaaataacatgtaaatattgtaatccattggattttgttttgctaacctgttaataaaaatatgggaccattatccttttaacaaggctagaatgtcattttt

SEQ ID NO: 409353 - DNA, 120 bp, Artificial Sequence
  ENSG00000148143_83 (sequence is synthesized)
ttctttttcaaacatatacctgatattttgtggccgcacattttggatgcattattataattctgttgactgtaatgacatagaatttacaacattttttgttgttgtttaatttataca

SEQ ID NO: 409354 - DNA, 120 bp, Artificial Sequence
  ENSG00000148143_84 (sequence is synthesized)
gaggacatttttttcagagcttgagagaagaaaataaatagcaaaatgataacctattgactccagtaatcagtgtttcccaatacttcataagagatagggagaccctgagtccttgaa

SEQ ID NO: 409355 - DNA, 120 bp, Artificial Sequence
  ENSG00000148143_85 (sequence is synthesized)
gccaagggtttaaaaacaaaacaaaaacaaaaaaaaccacaagtaggttattcaagttgtttgcaacatacattttgtaatgaaatgtgagaaattaataaagaatttttttcacatgtg

SEQ ID NO: 409356 - DNA, 120 bp, Artificial Sequence
  ENSG00000148143_86 (sequence is synthesized)
actaagctaaagcagaagcttggatgagtaagaaggccccactcatggttcacacctgctgctatgttacctggagcctcagtcaccttttctgtaaaatggggctgagaacaggagatt

SEQ ID NO: 409357 - DNA, 120 bp, Artificial Sequence
  ENSG00000148143_87 (sequence is synthesized)
gatcggatggcgttagatttggcaaatgcaggcattttaaaaatgagaattggaggaattgctatgatttacccaaagtttggatcgccatatgcaaacccaccacggacaccataaacc

SEQ ID NO: 409358 - DNA, 120 bp, Artificial Sequence
  ENSG00000148143_88 (sequence is synthesized)
ctgatataaatcatcacacaagggagagaataaatcggaaaaaataatgctcagattcctttggaatctcgggcaagcggctcttcagtcaagaaagacccagattttgtgatagaagca

SEQ ID NO: 409359 - DNA, 120 bp, Artificial Sequence
  ENSG00000148143_89 (sequence is synthesized)
ttggggaggtgaggcgaaatgaggtcttggggcccaagaaccagaaacagttctcgaatgctattcaaggaatgccctaagggggaaacctaagaaaaagtgaggaatctggaaattgct

SEQ ID NO: 409360 - DNA, 120 bp, Artificial Sequence
  ENSG00000148143_90 (sequence is synthesized)
gagatctgagtcctaactaatcctggcttcatcacctacctgttttgtgatcttcatctacaaatatagaaggcaacacatttactgcacaatggtcgtaagggataagtgatacatgta

SEQ ID NO: 409361 - DNA, 120 bp, Artificial Sequence
  ENSG00000148143_91 (sequence is synthesized)
atgaccctgcccacttgttcctggatggattggaagcagccaaagacgccagtggcgccctggtgggccgggtggatggtgaacactgcttgcttgatggaatgttggaggatgaaaccc

SEQ ID NO: 409362 - DNA, 120 bp, Artificial Sequence
  ENSG00000148143_92 (sequence is synthesized)
ccttgttcctcaccttatcttcaggcaagaaaccacagtgataaccacagtgacagccaaaagggcaaaaacaccttcctgctgggagtatttcctccacctggagggaggcaaaggtga

SEQ ID NO: 409363 - DNA, 120 bp, Artificial Sequence
  ENSG00000148143_93 (sequence is synthesized)
tggattctgcagtgaacatttccgtagggcttcccagcatgggggatttgtacattctgacaattctgccacccacagccttgcgtagactgcatagaaggaatgaacaagaaacaaaat

SEQ ID NO: 409364 - DNA, 120 bp, Artificial Sequence
  ENSG00000148143_94 (sequence is synthesized)
gggtgggtgaaagcaaatgtgaaatgtggagagctctatggctgtgagagattctttcaagaagaccaaaatgatttccaaagcagaacatggaacttcccttgaaatggttgaagggag

SEQ ID NO: 409365 - DNA, 120 bp, Artificial Sequence
  ENSG00000148143_95 (sequence is synthesized)
agagaattctttaaaataatgtatattatacattctaataatagtctctattatatattctaataataattagaaaatccatgggctttggatttaaattctggttttagagcccactgt

SEQ ID NO: 409366 - DNA, 120 bp, Artificial Sequence
  ENSG00000148143_96 (sequence is synthesized)
gtttaacctctccatccattaaaagagatgattgtacctatgagataatgggtaaagtgtccagtggtttttcataatggatgcataatgactgctcaataaatgttggttcctgctgat

SEQ ID NO: 409367 - DNA, 120 bp, Artificial Sequence
  ENSG00000148143_97 (sequence is synthesized)
tgaaggttggaccttcctcatctttctgttcagggaaaggtcgagtttcgatctggtttccttccacgcggatagtttggtggcagcagaaggtccaggattctcggtctaggaggcttc

SEQ ID NO: 409368 - DNA, 120 bp, Artificial Sequence
  ENSG00000148153_0 (sequence is synthesized)
aggaggcggaagcgcagcgggggcgggaaggttgtagtgccgcgagttgagctcctcttgcctaagtggtcgcgccccctttaagagcagcgattgtaaggagaggcggtcccggtgtcc

SEQ ID NO: 409369 - DNA, 120 bp, Artificial Sequence
  ENSG00000148153_1 (sequence is synthesized)
tcgggtcccaggtgattgtgaagtgctgaccaattgccactggacatacttgaaacaaaataggaaaatggcagcaaactcttcaggacaaggttttcaaaacaaaaatagagttgcaat

SEQ ID NO: 409370 - DNA, 120 bp, Artificial Sequence
  ENSG00000148153_2 (sequence is synthesized)
cttggcagaactggacaaagagaaaagaaaactacttatgcagaaccagtcttcaacaaatcatcctggagctagcattgcactctcgagaccctctcttaataaggacttccgggatca

SEQ ID NO: 409371 - DNA, 120 bp, Artificial Sequence
  ENSG00000148153_3 (sequence is synthesized)
cgctgagcagcagcatattgcagcccaacagaaggcagctttgcagcatgctcatgcacattcatctggatacttcatcactcaagactctgcatttgggaaccttattcttcctgtttt

SEQ ID NO: 409372 - DNA, 120 bp, Artificial Sequence
  ENSG00000148153_4 (sequence is synthesized)
acctcgccttgacccagaatgaagaaaacatttgcgatggaaaagtgactttgtaatatcaaatgccaaagctactatcattcagtgctacatgaactgtgactttaagaattttggtga

SEQ ID NO: 409373 - DNA, 120 bp, Artificial Sequence
  ENSG00000148153_5 (sequence is synthesized)
actttgatattttttgtttgtctgaaagaaaggaatgtgtaagtgaaagctgaaagaagaataaccaggatgatgagagctgtggaagctgtatcgtccaaggaattgattatgtaccgt

SEQ ID NO: 409374 - DNA, 120 bp, Artificial Sequence
  ENSG00000148153_6 (sequence is synthesized)
gactgtaacttttttgtaatgctgtttaactctcaatcagactgtgaactggatggtcacgaagtcattccccaactcctagcaagtttgactgaatatatcatgtccacagtagatttt

SEQ ID NO: 409375 - DNA, 120 bp, Artificial Sequence
  ENSG00000148153_7 (sequence is synthesized)
caagaatcatttatagtacttaactttaaagaaacaaggctgcttttaaaaaatgaactaataggcttaaatcaattgcatccatatttgctgtttataggattgctatcagtatacctt

SEQ ID NO: 409376 - DNA, 120 bp, Artificial Sequence
  ENSG00000148153_8 (sequence is synthesized)
ttgcgtttatagtcaacatgtatcatcctgaaatattctttctggacttataactacttccccctttttcactttaaaacaaacctcaagaataaattactaaccagtcttaaccatctt

SEQ ID NO: 409377 - DNA, 120 bp, Artificial Sequence
  ENSG00000148153_9 (sequence is synthesized)
ttataaacatatgctcttataaatgttgtgactagatgcaattaaaaataatagggaatgtggtaggtttttaatttgtacatcctcttatttagtgttaccacataaatgatgagtttg

SEQ ID NO: 409378 - DNA, 85 bp, Artificial Sequence
  ENSG00000148153_10 (sequence is synthesized)
catcctcttatttagtgttaccacataaatgatgagtttgtgtggttctgttttccatttttgttctaactgaaaactttttggc

SEQ ID NO: 409379 - DNA, 120 bp, Artificial Sequence
  ENSG00000148153_11 (sequence is synthesized)
gtgtcactgcactccagcctgggtgacagtgagtctttgtctcaaagaaaaaaagaaaaagaaaacttatgcaagtcgagctcctttttaattaagtaggaagggattaggttaagaaag

SEQ ID NO: 409380 - DNA, 120 bp, Artificial Sequence
  ENSG00000148153_12 (sequence is synthesized)
ctcctttttaattaagtaggaagggattaggttaagaaagtctctcaacatgacccatctttagcagtatctggggtgcttatttaagtatgcagtcccactaccctaccctagtcctac

SEQ ID NO: 409381 - DNA, 120 bp, Artificial Sequence
  ENSG00000148153_13 (sequence is synthesized)
agaattagaatctgattcaaaataaagtctgaaaaccatgagatagagaattctatgaaatatcttgtacagattttcgtgatatatttatacacgcatgggtttgtagatccctgaaac

SEQ ID NO: 409382 - DNA, 120 bp, Artificial Sequence
  ENSG00000148153_14 (sequence is synthesized)
ttagaggtcatttagctaaaatctacattttttttaacttttaataggattgaaatgatattttacactgtatcacagatacagtattttatataactttttgtaactgaccttatcttg

SEQ ID NO: 409383 - DNA, 120 bp, Artificial Sequence
  ENSG00000148153_15 (sequence is synthesized)
gccttgagtcccatcctctctggtggtagcgtaaaactgaaaattccagtttgggtcaatatttagtgaaagttctactttcttttcagagagtttgttcccccctttcttccttagatg

SEQ ID NO: 409384 - DNA, 120 bp, Artificial Sequence
  ENSG00000148153_16 (sequence is synthesized)
agtgaagcaagagtggacaattctagaattggctgtgccatgtaggttttttttagaatttgaactgatttccttcattttgatgaggtggcaactgtccccattgtaatggtcaccatt

SEQ ID NO: 409385 - DNA, 120 bp, Artificial Sequence
  ENSG00000148153_17 (sequence is synthesized)
gcagcgaggatagccttacttctgcggcgcagagctcctcagggggcctctggctcctgtccttcctcaggtccatccaactactccttgggcctccttatggtagccctcattgtcttg

SEQ ID NO: 409386 - DNA, 120 bp, Artificial Sequence
  ENSG00000148153_18 (sequence is synthesized)
agttgatttcactaggtttctgttctctgtcatctgcaacataactgacatggttctaaatctgtctctaaggagataacacattagtatattttctacactattgaagcctctacctaa

SEQ ID NO: 409387 - DNA, 120 bp, Artificial Sequence
  ENSG00000148153_19 (sequence is synthesized)
tgtatgacttttgtagctcaggtaaagagatctttttaccagtgttatcgtttctagtctgtttgttagtcttcttttaaatagatatggcctaaatcctgtattcctggctaggaagca

SEQ ID NO: 409388 - DNA, 120 bp, Artificial Sequence
  ENSG00000148153_20 (sequence is synthesized)
cttctctccacccctctgctttgagttacaaattcaattcaatttcctatgtatttattaatacctacagataaagtactgtgctttgggggacacaaaggtgactggtacctgctcttt

SEQ ID NO: 409389 - DNA, 120 bp, Artificial Sequence
  ENSG00000148153_21 (sequence is synthesized)
taggaggtcaccgtgcagaggatcctattctggtacaccaatagttataaagcaagccacagcctaggcaacatagtgagacccctgtctctactaaaaaattaaaaaaaaaaaaaaaag

SEQ ID NO: 409390 - DNA, 78 bp, Artificial Sequence
  ENSG00000148153_22 (sequence is synthesized)
acccctgtctctactaaaaaattaaaaaaaaaaaaaaaagattggctaggtgtgctggtgcatgcatagagtcccagc

SEQ ID NO: 409391 - DNA, 120 bp, Artificial Sequence
  ENSG00000148153_23 (sequence is synthesized)
agagtgagaccctgtctctaaatcaatcaatcaagcgagccagaatgcagtagtggcctgagagaggcatcctggaacgcagtgcggtctggctaggcttagaagtattcatgtgatttt

SEQ ID NO: 409392 - DNA, 120 bp, Artificial Sequence
  ENSG00000148153_24 (sequence is synthesized)
tacctgacaagggaaggaagagctgctccacgtgcagagcaaggtttcagaatgagaggagaagagcaggcactgcagagggtgagggaaagggcagcagtggactgggaagccctcagg

SEQ ID NO: 409393 - DNA, 120 bp, Artificial Sequence
  ENSG00000148153_25 (sequence is synthesized)
tggaggtcagcattgcttccctcagatcatgggtgaatttgaggaactcagttaatatctttgtatgttcctccctccataaggtgagaacaagcacatgctctgcccatgtcagaaatt

SEQ ID NO: 409394 - DNA, 120 bp, Artificial Sequence
  ENSG00000148153_26 (sequence is synthesized)
gtctagactagtgtttttcaaagtgcaaaagcctcaacccattactgagttgagaagccaacttaatggtttaacaggattgaccagcattttttccgaaaaaatcaaaaacatctgagt

SEQ ID NO: 409395 - DNA, 120 bp, Artificial Sequence
  ENSG00000148153_27 (sequence is synthesized)
gtactgcatatagaaataggtggttttgcctcatgaatattctgtttctgtgtgttcctatattttactttgtattgtgttggttttttaagagacagtcctgctctgtcatccaggctg

SEQ ID NO: 409396 - DNA, 89 bp, Artificial Sequence
  ENSG00000148153_28 (sequence is synthesized)
cataatcatagctcactgcaagactccttgaatccctgggctcaagcaatcctcaacccttagcctcccaagtagctgagactacaggc

SEQ ID NO: 409397 - DNA, 73 bp, Artificial Sequence
  ENSG00000148153_29 (sequence is synthesized)
ccatgcccagctaatttttttttttttttaatttttgtagagacagcgtcctctcgatcctcccaccttggcc

SEQ ID NO: 409398 - DNA, 120 bp, Artificial Sequence
  ENSG00000148153_30 (sequence is synthesized)
gagattacaggtgtgagccactgcatctggcttacttattttgtctattgtctgttccactagtatgtaaagtcttagagagcaagaatttttgtttatttctttctcttcctcctttcc

SEQ ID NO: 409399 - DNA, 120 bp, Artificial Sequence
  ENSG00000148153_31 (sequence is synthesized)
tttcttcctcttttacttcgttcactactgtattccacataaaatatatttggcatatagtaggtgttcaatatgttgaaggaatgaaagaatttatagacttgagttgcaatataaaat

SEQ ID NO: 409400 - DNA, 120 bp, Artificial Sequence
  ENSG00000148153_32 (sequence is synthesized)
gtatttttttttactgtgagttatggcaaaaaaagttttgaaagccgcttctaaataatgcagatgtcagtgctttgaccctggaataaaaactgaaatgacttagtgatttcaaaggca

SEQ ID NO: 409401 - DNA, 84 bp, Artificial Sequence
  ENSG00000148153_33 (sequence is synthesized)
ggacaaagagaaaagaaaactacttatgcagaaccagtcttcaacaaatcatcctggagctaggtattgacactataatgtggg

SEQ ID NO: 409402 - DNA, 80 bp, Artificial Sequence
  ENSG00000148154_0 (sequence is synthesized)
agtgcgcggagctgcggcggtggagctgctcggccgggagcccggcggcgagacggagaggcggcggaggtgcccgcgcg

SEQ ID NO: 409403 - DNA, 120 bp, Artificial Sequence
  ENSG00000148154_1 (sequence is synthesized)
cgaggctcgggagaggcgaaccggagcgcgggaccgcggtcgccccgaccagagccgggagaccgcagcacccgcagccgcccgcgagcgcgccgaagacagcgcgcaggcgagagcgcg

SEQ ID NO: 409404 - DNA, 120 bp, Artificial Sequence
  ENSG00000148154_2 (sequence is synthesized)
ctgcccgccccttccgtccccacccccctccgccctttcctctccccaccttcctctcgcctcccgcgcccccgcaccgggcgcccaccctgtcctcctcctgcgggagcgttgtccgtg

SEQ ID NO: 409405 - DNA, 120 bp, Artificial Sequence
  ENSG00000148154_3 (sequence is synthesized)
ttggcggccgcagcgggccgggccggtccggcgggccgggggatggcgctgctggacctggccttggagggaatggccgtcttcgggttcgtcctcttcttggtgctgtggctgatgcat

SEQ ID NO: 409406 - DNA, 120 bp, Artificial Sequence
  ENSG00000148154_4 (sequence is synthesized)
ttcatggctatcatctacacccgattacacctcaacaagaaggcaactgacaaacagccttatagcaagctcccaggtgtctctcttctgaaaccactgaaaggggtagatcctaactta

SEQ ID NO: 409407 - DNA, 120 bp, Artificial Sequence
  ENSG00000148154_5 (sequence is synthesized)
atcaacaacctggaaacattctttgaattggattatcccaaatatgaagtgctcctttgtgtacaagatcatgatgatccagccattgatgtatgtaagaagcttcttggaaaatatcca

SEQ ID NO: 409408 - DNA, 120 bp, Artificial Sequence
  ENSG00000148154_6 (sequence is synthesized)
aatgttgatgctagattgtttataggtggcaaaaaagttggcattaatcctaaaattaataatttaatgccaggatatgaagttgcaaagtatgatcttatatggatttgtgatagtgga

SEQ ID NO: 409409 - DNA, 120 bp, Artificial Sequence
  ENSG00000148154_7 (sequence is synthesized)
ataagagtaattccagatacgcttactgacatggtgaatcaaatgacagaaaaagtaggcttggttcacgggctgccttacgtagcagacagacagggctttgctgccaccttagagcag

SEQ ID NO: 409410 - DNA, 120 bp, Artificial Sequence
  ENSG00000148154_8 (sequence is synthesized)
gtatattttggaacttcacatccaagatactatatctctgccaatgtaactggtttcaaatgtgtgacaggaatgtcttgtttaatgagaaaagatgtgttggatcaagcaggaggactt

SEQ ID NO: 409411 - DNA, 120 bp, Artificial Sequence
  ENSG00000148154_9 (sequence is synthesized)
atagcttttgctcagtacattgccgaagattactttatggccaaagcgatagctgaccgaggttggaggtttgcaatgtccactcaagttgcaatgcaaaactctggctcatattcaatt

SEQ ID NO: 409412 - DNA, 120 bp, Artificial Sequence
  ENSG00000148154_10 (sequence is synthesized)
tctcagtttcaatccagaatgatcaggtggaccaaactacgaattaacatgcttcctgctacaataatttgtgagccaatttcagaatgctttgttgccagtttaattattggatgggca

SEQ ID NO: 409413 - DNA, 120 bp, Artificial Sequence
  ENSG00000148154_11 (sequence is synthesized)
gcccaccatgtgttcagatgggatattatggtatttttcatgtgtcattgcctggcatggtttatatttgactacattcaactcaggggtgtccagggtggcacactgtgtttttcaaaa

SEQ ID NO: 409414 - DNA, 120 bp, Artificial Sequence
  ENSG00000148154_12 (sequence is synthesized)
cttgattatgcagtcgcctggttcatccgcgaatccatgacaatatacatttttttgtctgcattatgggacccaactataagctggagaactggtcgctacagattacgctgtgggggt

SEQ ID NO: 409415 - DNA, 120 bp, Artificial Sequence
  ENSG00000148154_13 (sequence is synthesized)
acagcagaggaaatcctagatgtataactacagctttgtgactgtatataaaggaaaaaagagaagtattataaattatgtttatataaatgcttttaaaaatctaccttctgtagtttt

SEQ ID NO: 409416 - DNA, 120 bp, Artificial Sequence
  ENSG00000148154_14 (sequence is synthesized)
atcacatgtatgttttggtatctgttctttaatttatttttgcatggcacttgcatctgtgaaaaaaaaaaaaaacacatctgtagtcttggccaaatgatacactttattttgtggaag

SEQ ID NO: 409417 - DNA, 120 bp, Artificial Sequence
  ENSG00000148154_15 (sequence is synthesized)
tagagaatcaagagaattggttctaggaacctgggttcgttcatcattgttgtttatttttttaaaataaataaataaatatatatatagatgctctgcaacaaactctgtgacagtatc

SEQ ID NO: 409418 - DNA, 120 bp, Artificial Sequence
  ENSG00000148154_16 (sequence is synthesized)
aatggttttgtgcagtgaacaacacatggcgaggtactaactgagaaactttttcatgctttatgcctacctcttgtagttgttgcagagcaaatataaattgtaataagatagctaggc

SEQ ID NO: 409419 - DNA, 120 bp, Artificial Sequence
  ENSG00000148154_17 (sequence is synthesized)
cttgcagaaacaaacagaaaaacttaaaaaaaaatgatataagagctggagtctagtatttatatgaatctgtgagagataatttttttggtctcactgcaatgaaccaaaagcggctga

SEQ ID NO: 409420 - DNA, 120 bp, Artificial Sequence
  ENSG00000148154_18 (sequence is synthesized)
gtttggtttttaattgtagccatgtattgaaggcatctttttgaccaactcttgttggttctgtcttgaaccattgttaatcactgtgctgtaattagtatagctaaatcttttccttcc

SEQ ID NO: 409421 - DNA, 120 bp, Artificial Sequence
  ENSG00000148154_19 (sequence is synthesized)
ttgctcctcccccagcccaccccgtcttcccttaacattttttcagggggggttgggagtggtttcattttagtgtgagtggatgttttgatagttgtaaggaaaaaatgcatttcagac

SEQ ID NO: 409422 - DNA, 120 bp, Artificial Sequence
  ENSG00000148154_20 (sequence is synthesized)
acatttcacacatgagctattttcttacacagtatgtcttattgttaataagaatgtaatttcatgatacaagtatttaataccttttttaagtcagtaaatattctagccatcaataaa

SEQ ID NO: 409423 - DNA, 120 bp, Artificial Sequence
  ENSG00000148154_21 (sequence is synthesized)
atattctagccatcaataaattgcagtagagtattaagaggggacaggatgagtttactcttaaaattaatcagtatcaaactaagtctactgtgtgtgttttttttttttgttttttgt

SEQ ID NO: 409424 - DNA, 120 bp, Artificial Sequence
  ENSG00000148154_22 (sequence is synthesized)
agtaagtctagtcttatttaaattggatttttgtattcaagtttatatgacaaaatagactagatcagcgctggttgtaaatgcatgctgtacctcactgttttctccccatcatgccgc

SEQ ID NO: 409425 - DNA, 120 bp, Artificial Sequence
  ENSG00000148154_23 (sequence is synthesized)
taaacttgctcgccaggttgtgcttaacttgtggtgaactggacttgattctgttttgttttgtttttttaaaaaaaaaaaacaaaaatgtaagggacagtgcataagccttttctttgt

SEQ ID NO: 409426 - DNA, 120 bp, Artificial Sequence
  ENSG00000148154_24 (sequence is synthesized)
taagtagtggtgttttgctttttcttcaggattggatggcatgttgtccacaggaatgcctactgcagggctaacactggcaatatggcagctttaaattctgagttactacagtctcca

SEQ ID NO: 409427 - DNA, 120 bp, Artificial Sequence
  ENSG00000148154_25 (sequence is synthesized)
tgtcaaagcataatgtgtagcatatcagcaataactacatatttatagaaaacactttttcactttactgagccaattcatttaattgtcaaatgtctatatccatggtttaaatggcaa

SEQ ID NO: 409428 - DNA, 120 bp, Artificial Sequence
  ENSG00000148154_26 (sequence is synthesized)
tcaaatgtctatatccatggtttaaatggcaacatatctataagtatgtatacacattatatttaagcttttctctgggccaaactgcttcatccttttttctttctttttttttttttt

SEQ ID NO: 409429 - DNA, 120 bp, Artificial Sequence
  ENSG00000148154_27 (sequence is synthesized)
ttctttatgaacaaaggcttggatgcatattcctttctttctgtgaatgggtattattccctgaggaaagttgcacagtgaaaaccagtctggttgtgacccactacatgttttgttttt

SEQ ID NO: 409430 - DNA, 120 bp, Artificial Sequence
  ENSG00000148154_28 (sequence is synthesized)
aatcactattacctgagttgaactttgctcaccatgtttgtacttgttggtctgtttaatgaagtttggttgatgccatcctttgcactgccgaagcgtaatcttgtgtattacttagct

SEQ ID NO: 409431 - DNA, 120 bp, Artificial Sequence
  ENSG00000148154_29 (sequence is synthesized)
ctctgctgatctcagtatggacagtgtaacaacaaaaccaaaatggctggacagacttcttgtgttttgtaaatataaactaggacagttctgtaggtttgttcagtgtgctagtggagt

SEQ ID NO: 409432 - DNA, 120 bp, Artificial Sequence
  ENSG00000148154_30 (sequence is synthesized)
atttccttaatgtaaaacttcacttaacagagagattctttgtttagcaagcttggagtgatgataaaatggtaagaaataatataaatgttgaagaaagcatcacaacagaactatagg

SEQ ID NO: 409433 - DNA, 120 bp, Artificial Sequence
  ENSG00000148154_31 (sequence is synthesized)
aaagcatcacaacagaactataggagtctaaatttaataaatctttaaaaaaaaccagtgtctagaatatataccatgttttattatttaaaatcattgtcttaaatttttgttcaaaaa

SEQ ID NO: 409434 - DNA, 120 bp, Artificial Sequence
  ENSG00000148154_32 (sequence is synthesized)
atcaatgagtgatatttttaccttattttgtatctaaattaagttttatttggatgcatttttagcttactaactgtgcttgctctatgaaagcaatattgtctaccactttttattcag

SEQ ID NO: 409435 - DNA, 120 bp, Artificial Sequence
  ENSG00000148154_33 (sequence is synthesized)
tttttgttttgttttgttttgttttgttcccctcatgataaacatttagggattttaacactgtataaggtgaaggtattaaaaattcatgatgatattggcctcataaaatataacctt

SEQ ID NO: 409436 - DNA, 120 bp, Artificial Sequence
  ENSG00000148154_34 (sequence is synthesized)
aaatataacctttagtagtagtcatcacagaacagaaataggttgaggaaggggtgtaaattccctttctaaccacctatatgtccgtgtgaagtagagatccctgagtaaaccttctga

SEQ ID NO: 409437 - DNA, 120 bp, Artificial Sequence
  ENSG00000148156_0 (sequence is synthesized)
atttctccccagggggctctaggctgtggatgtgagaaggggagcaagggaggcagatggcgacaaggaacagccccatgcccctgggcacggctcagggtgaccctggagaggcaggaa

SEQ ID NO: 409438 - DNA, 120 bp, Artificial Sequence
  ENSG00000148156_1 (sequence is synthesized)
cacggcccggccctgacgccagcctccgggacacaggtgcggccactcagctcaagatgaagcccaggaaggtgcacaagatcaaggcggtcatcatcgacctgggctcccagtactgca

SEQ ID NO: 409439 - DNA, 120 bp, Artificial Sequence
  ENSG00000148156_2 (sequence is synthesized)
agtgcggctacgcgggagagccgaggcccacctacttcatctcctccaccgtgggcaaacgctgccccgaggcggccgacgctggcgacacccgcaagtggactttagtgggccatgagc

SEQ ID NO: 409440 - DNA, 120 bp, Artificial Sequence
  ENSG00000148156_3 (sequence is synthesized)
tgctcaacacggaggcgcctctcaagctggtgaacccgctgaagcacggcatcgtggtggactgggactgcgtgcaggacatctgggagtacatcttccgcaccgccatgaagatcctcc

SEQ ID NO: 409441 - DNA, 120 bp, Artificial Sequence
  ENSG00000148156_4 (sequence is synthesized)
ccgaggagcacgctgtgctggtctccgaccctccgctcagccccagcagcaaccgggagaagtacgcggagctcatgtttgagaccttcggcatcccagccatgcacgtgacgtcccagt

SEQ ID NO: 409442 - DNA, 120 bp, Artificial Sequence
  ENSG00000148156_5 (sequence is synthesized)
catatccgagggcgacgtgctgccgggcctgaccagccgcgccgactacgctgggggtgacctcaccaactacctgatgcagctgctcaatgaggcgggccacgcattcacggacgacca

SEQ ID NO: 409443 - DNA, 120 bp, Artificial Sequence
  ENSG00000148156_6 (sequence is synthesized)
cctgcacatcatagagcacatcaagaagaagtgctgctatgcggccttcctgcccgaggaggagctgggcctggtcccggaggagctgcgcgtggactacgagctcccggacggcaaact

SEQ ID NO: 409444 - DNA, 120 bp, Artificial Sequence
  ENSG00000148156_7 (sequence is synthesized)
catcactattggccaggagcgcttccgttgctctgagatgctcttccagccctccctggcaggcagcacccagccgggcctcccggagctcacagctgcctgcctgggccgctgccagga

SEQ ID NO: 409445 - DNA, 120 bp, Artificial Sequence
  ENSG00000148156_8 (sequence is synthesized)
cacgggcttcaaggaggagatggccgccaacgtgctactgtgtggcggctgcactatgctggatggcttccccgagcgcttccagagggagctgagcctcctctgccccggggacagccc

SEQ ID NO: 409446 - DNA, 120 bp, Artificial Sequence
  ENSG00000148156_9 (sequence is synthesized)
tgcagtggctgccgctcctgagaggaagacctccgtgtggaccggcggttccatcctggcctccctgcaggccttccaacagctctgggtcagcaaggaagagtttgaggagcggggcag

SEQ ID NO: 409447 - DNA, 120 bp, Artificial Sequence
  ENSG00000148156_10 (sequence is synthesized)
cgtggccatctacagcaagtgctgagcctcggcatttccacagacaaggcctccagcacagatggccacaggcctctctatacacatttacagaatttcacataaaggtttactctgaaa

SEQ ID NO: 409448 - DNA, 80 bp, Artificial Sequence
  ENSG00000148158_0 (sequence is synthesized)
cgcggcgcggagcggagcgtctgagcgccggcagagaccagccggcgggtggcggcggcccccagcacggccggtgcaag

SEQ ID NO: 409449 - DNA, 80 bp, Artificial Sequence
  ENSG00000148158_1 (sequence is synthesized)
gcacggccggtgcaaggcctcgggttaagcggcggccgagcggggctcggcccggggtgctcggggagctcgccgcggcg

SEQ ID NO: 409450 - DNA, 120 bp, Artificial Sequence
  ENSG00000148158_2 (sequence is synthesized)
ccccaaggccctgccgtccacggggccccactccctgcgcgacatgccgcacccgctggccggctccagcagcgaggaggccgtgggtggtgacagcacgcccagcccggacctgctgat

SEQ ID NO: 409451 - DNA, 120 bp, Artificial Sequence
  ENSG00000148158_3 (sequence is synthesized)
gcccggacctgctgatggcccgcagcttcggtgacaaggatctcattttgcccaacggtggtactccagcaggtacttcaagtccagcttcttcatcttcccttctcaacagacttcagc

SEQ ID NO: 409452 - DNA, 120 bp, Artificial Sequence
  ENSG00000148158_4 (sequence is synthesized)
ttgatgatgatattgatggtgagactagagatctcttcgttatagttgatgatcccaagaagcatgtgtgtacaatggagacttacatcacctataggatcaccaccaaaagtactcggg

SEQ ID NO: 409453 - DNA, 120 bp, Artificial Sequence
  ENSG00000148158_5 (sequence is synthesized)
tggagtttgacctgccagaatattctgttcgtcgaagataccaggattttgactggttgaggagcaaactggaagaatcccagcccactcatctcattccccctcttcccgagaagtttg

SEQ ID NO: 409454 - DNA, 120 bp, Artificial Sequence
  ENSG00000148158_6 (sequence is synthesized)
tggtaaaaggtgttgtggatcgtttttcagaagagtttgtggagaccagaagaaaagctttggataaatttctaaaaagaattacggaccatcctgtgctgtctttcaatgaacacttta

SEQ ID NO: 409455 - DNA, 120 bp, Artificial Sequence
  ENSG00000148158_7 (sequence is synthesized)
atattttccttactgctaaggacctgaacgcctacaagaagcaagggatagcattgctgaccagaatgggcgagtcagtcaagcacgtcactggcggctacaagctgaggactcggccgc

SEQ ID NO: 409456 - DNA, 120 bp, Artificial Sequence
  ENSG00000148158_8 (sequence is synthesized)
ttgagtttgctgccataggtgactacttagatacatttgcactcaaactgggaaccattgatcgaatagcccagcggatcatcaaagaagaaatagagtaccttgtggagctgagagaat

SEQ ID NO: 409457 - DNA, 120 bp, Artificial Sequence
  ENSG00000148158_9 (sequence is synthesized)
acgggcctgtgtactccacatggagcgccttggagggtgagctggctgaacccctggagggtgtgtcagcttgcattgggaactgctctacagccttagaagagctgacagatgacatga

SEQ ID NO: 409458 - DNA, 120 bp, Artificial Sequence
  ENSG00000148158_10 (sequence is synthesized)
cagaagacttcctacctgtgctcagggaatatattttatactctgactccatgaagagtgtattgaagaagagggaccaagttcaagcagagtatgaagccaaactggaagctgtggctc

SEQ ID NO: 409459 - DNA, 120 bp, Artificial Sequence
  ENSG00000148158_11 (sequence is synthesized)
tgcggaaggaagaccgccccaaggtaccggcggacgtcgagaaatgtcaggatcggatggagtgtttcaatgctgacctgaaagctgacatggagaggtggcagaacaacaagaggcagg

SEQ ID NO: 409460 - DNA, 120 bp, Artificial Sequence
  ENSG00000148158_12 (sequence is synthesized)
acttccggcagctactcatggggatggctgacaagaacatccagtattatgagaagtgcctcatggcgtgggagtcgattattccactactgcaggagaaacaagaggccaagtaaagtt

SEQ ID NO: 409461 - DNA, 120 bp, Artificial Sequence
  ENSG00000148158_13 (sequence is synthesized)
ctttcttgggacggagactcttctacctacacagggcctggcaccctataccggaatgtccctgcagtgccagagacgcagtgctgggaaaacaaccacagaaacatctctcctttgtgt

SEQ ID NO: 409462 - DNA, 120 bp, Artificial Sequence
  ENSG00000148158_14 (sequence is synthesized)
atttttccctcccccacctttcaccccacagtggttttcaattagtatttattccatggtggagtctgtgaggctagaatatctctcagcaagagcagcatacctccatgttgtgaaggc

SEQ ID NO: 409463 - DNA, 120 bp, Artificial Sequence
  ENSG00000148158_15 (sequence is synthesized)
atctgttcagtgaagcactacgaaaatttgaaaccaagggacaagacaacctgcagctgacgctctgacatttcatgacagtttcctctttagggacagctgagttgccagttgtgggag

SEQ ID NO: 409464 - DNA, 120 bp, Artificial Sequence
  ENSG00000148158_16 (sequence is synthesized)
agaacccggggcctgcttttcaaggatgaggaggaggcaggaacagaaggcagctgctgctttctgtggaaacctggcccctctggaattggcctctgtgggcattgactcgtcttggcc

SEQ ID NO: 409465 - DNA, 120 bp, Artificial Sequence
  ENSG00000148158_17 (sequence is synthesized)
taggaggcattggtgcctccctggcaagtccttaacgtacagtacctgtagctgtgagtgtggcctgctgcctgcttgtgatgagtgataccgtcttactgtttctgtttcacataggga

SEQ ID NO: 409466 - DNA, 120 bp, Artificial Sequence
  ENSG00000148158_18 (sequence is synthesized)
catttaaatcaatgtcaatgtgcgtccatgcttgagtgagcaagccagcgtccttgtcctcctgcaatgcctttgggaagctcaggggaatgctccccaagcttgtttctgacactagaa

SEQ ID NO: 409467 - DNA, 120 bp, Artificial Sequence
  ENSG00000148158_19 (sequence is synthesized)
tgcaacagattggaaactttttgtgtaaaatgaaaaaaacaaagtgctggttttttttttttttctgtgaaggtcttcagtgttttgcttgttcactgtcatcagagcagggattagacc

SEQ ID NO: 409468 - DNA, 120 bp, Artificial Sequence
  ENSG00000148158_20 (sequence is synthesized)
tgttagggaatatctattgtcttgaagtcagagtagctccccattgttgagatcagtgggcatataccaagctccacccccagtgtcagctttgtgcaatttgcctttacctcaccaaaa

SEQ ID NO: 409469 - DNA, 120 bp, Artificial Sequence
  ENSG00000148158_21 (sequence is synthesized)
atacctactttaatatttcctcctgtgtcctctgaatgtctgggcgagcttttggtgagagggctggtatgtcatgttgttatgatacagtcgaaatttgtcaatgcagtgtgaatgttc

SEQ ID NO: 409470 - DNA, 120 bp, Artificial Sequence
  ENSG00000148158_22 (sequence is synthesized)
tacataaagtgctttaacccttaacatttcctggtcaggaaggaaaatcagtacctggacgggcctcgaaaatgacaaatgcaacagcgagccctttgtgtccagctaagctaaagtctc

SEQ ID NO: 409471 - DNA, 120 bp, Artificial Sequence
  ENSG00000148158_23 (sequence is synthesized)
ctcagtgtgcagccagattcctggggactgctgagtgtggttacaggctgcatttcagacaatgaccaggtttacttttcagatcacaaagcaaacagtcaccaaggatctgtcttccaa

SEQ ID NO: 409472 - DNA, 120 bp, Artificial Sequence
  ENSG00000148158_24 (sequence is synthesized)
ctcttttttttttctgctgaaatgaagctacatgtcatgtttgtgttctttcatctgtggctcatccctgtaaaactacgaatctgagcctcaaataagcagtagtttttttgttgttta

SEQ ID NO: 409473 - DNA, 120 bp, Artificial Sequence
  ENSG00000148158_25 (sequence is synthesized)
tttttaatgaaacagctgtgttaaggcgctgcttcagatgcaagttcacctggaaatactggtcagcgggcagcacgtcaaggtcacttaagcccacttttaactgcaggtcatcctcgc

SEQ ID NO: 409474 - DNA, 120 bp, Artificial Sequence
  ENSG00000148158_26 (sequence is synthesized)
atcagccaaggctgtggtgctgttgatgccgcagttggacagcataggacggcttggttctgtttcattgtgtttgacaatgttgcagtttaaatgataatgtttaaatcaattggtact

SEQ ID NO: 409475 - DNA, 120 bp, Artificial Sequence
  ENSG00000148158_27 (sequence is synthesized)
tgcctgtagtgttaaaccctatttgtgccattctcaagtcctttgatgtgaattttcagtttggtacagttagaaatgactcattgatgcggacaggtaagaacaacccatgtacccccg

SEQ ID NO: 409476 - DNA, 120 bp, Artificial Sequence
  ENSG00000148158_28 (sequence is synthesized)
agtgattgcatgctttattctacctctaagccatcgtgttgacgtgggtatggacgcctgggtctgacctgacactgtgctgggagaatcaggatgtgtgtctaatggcgagctgacagc

SEQ ID NO: 409477 - DNA, 120 bp, Artificial Sequence
  ENSG00000148158_29 (sequence is synthesized)
cctctgctgatatttggcagaaggcaccagaccagcccagcagcaaatgctcatctttgggaacataggaagctttaccttggggaaggtatgctttacaaatgtccagtgtaatgaatg

SEQ ID NO: 409478 - DNA, 120 bp, Artificial Sequence
  ENSG00000148158_30 (sequence is synthesized)
tttggaaaaaactggagttacaggaaaatgaaatctgactatctgctagttgccaaaacccagaaacattcctgtgtaatggttagttgggaaagaaggcagcacttgaaaaaatttacc

SEQ ID NO: 409479 - DNA, 120 bp, Artificial Sequence
  ENSG00000148158_31 (sequence is synthesized)
aggttcctcactgggagatgtgggaaggggcgtgggacgcacgcggtcactccctctcctagtgagaggcagatggctggctctgaagggaggcaggcaccgtgggatttgggcttgctc

SEQ ID NO: 409480 - DNA, 120 bp, Artificial Sequence
  ENSG00000148158_32 (sequence is synthesized)
ccctgtgctgtaagatatcagaaagacctggaacaaggcaaactttatgtcctcctggcatgttattgataacagagccaggaagtccagtgtacattacagattttctgggagaaatag

SEQ ID NO: 409481 - DNA, 120 bp, Artificial Sequence
  ENSG00000148158_33 (sequence is synthesized)
tccttccagagaaaggattccttcccagcctccaggctggtgtctcatgaggtgaggaggctggcccagaaggaaggggacgttaggtggtgaagcaggctcccctgggcctctgagggc

SEQ ID NO: 409482 - DNA, 120 bp, Artificial Sequence
  ENSG00000148158_34 (sequence is synthesized)
cagcagtcccaaccatttgcctcttcgttttgaccaagcacaaaagagatattccctagaagtgtcacacggaggcttctgtgccaaagactgccttgtagaggtctcatcacctcacac

SEQ ID NO: 409483 - DNA, 120 bp, Artificial Sequence
  ENSG00000148158_35 (sequence is synthesized)
ttcttgacttcacaaaattgtggccctgagatcagtactcctctcttaagtatttattattattattatttactttacctcaagcagacagacataggttttgaggcttgaatacatggc

SEQ ID NO: 409484 - DNA, 120 bp, Artificial Sequence
  ENSG00000148158_36 (sequence is synthesized)
agtggaatacaaggccctccctagcagccgccccaggcctggaaagtgggagatttcattcgcccgggttaaaaatccagaggaagacagaagagaggagtcctaggaactgagcagatt

SEQ ID NO: 409485 - DNA, 120 bp, Artificial Sequence
  ENSG00000148158_37 (sequence is synthesized)
ttagagacgcaaatgatgtttaagagagccttgtgatttgtagcaagcatgggcactgctttttcttactaatgtggtagatctacacgaacattctaggctgttctgctcagagcgagg

SEQ ID NO: 409486 - DNA, 120 bp, Artificial Sequence
  ENSG00000148158_38 (sequence is synthesized)
aaccactgctcctcaatggggagggaacataccacccagccaggcttagcattgggttttatcctttaataaaagttttataatgaatcctgttcaccttaaagtgtgattatggagatg

SEQ ID NO: 409487 - DNA, 120 bp, Artificial Sequence
  ENSG00000148158_39 (sequence is synthesized)
attggctccatattccaccacgtcattccttcaactcaccagacacctttctttagttgaaataaaccagcatgacctggagatcatggtgactgtaagctaagtctgttttcatgccag

SEQ ID NO: 409488 - DNA, 120 bp, Artificial Sequence
  ENSG00000148158_40 (sequence is synthesized)
atttcagccccacccagagtgtgctctagatgttgttgatttgaatggttttcccagttcccactccacatggggaagttgaatgaatgcacacctgctgctcacttcttgtgaggctgc

SEQ ID NO: 409489 - DNA, 120 bp, Artificial Sequence
  ENSG00000148158_41 (sequence is synthesized)
cttttgtgatcaaataacaggaagttctgctttagaggagggcacgatgaccatgtggcagtctgcaagtggaattttgggatggcagcccgaggaacatccagagttactgtgtgactt

SEQ ID NO: 409490 - DNA, 120 bp, Artificial Sequence
  ENSG00000148158_42 (sequence is synthesized)
ggtcctgccatcgttagctttgaaatcacaggcattgggctctgttttgacaccattcattggactgcgggacagtcattctttacgttctctcttgagctggtgagagaggaggaagag

SEQ ID NO: 409491 - DNA, 120 bp, Artificial Sequence
  ENSG00000148158_43 (sequence is synthesized)
ggaagtcaagagcaacctccaaggcctatgtcagcctcttctccttgggtcttggggtgggttagaactgggttccagtctggccagatgggttgctggctgcactgagggtgattcttc

SEQ ID NO: 409492 - DNA, 120 bp, Artificial Sequence
  ENSG00000148158_44 (sequence is synthesized)
tcagaagatgggctgcctgtggtcaggacagggcataccagtctggactccaccttcccagacacctactttaaggacctgtggaaactgggtgatccaattatagggctggggcaaccc

SEQ ID NO: 409493 - DNA, 120 bp, Artificial Sequence
  ENSG00000148158_45 (sequence is synthesized)
tgctttggccaccctcatttacaaacttaggttgggagcttgggtttcctgtctcacttccaaaagccttcaagatggcagcagatggacacaccctctcatttcttgtgtcttgtctgt

SEQ ID NO: 409494 - DNA, 120 bp, Artificial Sequence
  ENSG00000148158_46 (sequence is synthesized)
cagatggcaggaggcctgtatcagtaaatttgaggaaaatgttctctcctgggccagcctcacagcttgcgttgggtgtgttggaattgttctcttcggccttgttctgccttgtgatct

SEQ ID NO: 409495 - DNA, 120 bp, Artificial Sequence
  ENSG00000148158_47 (sequence is synthesized)
tttcaattcagtgaataaaccaggaatccattttttcaccaacccaccctgtagattgtcagctttttgtttgagagatgcctggtctcacagttacatgtatcagagtgtgtgtaagtt

SEQ ID NO: 409496 - DNA, 120 bp, Artificial Sequence
  ENSG00000148158_48 (sequence is synthesized)
gtctgtgttagaaaggttggggtgggggctttgttgcaggggattagactgttctttcttcatcataatttgagatacatcctgagtatgactgtctaaccctttctgtgtggcagaaaa

SEQ ID NO: 409497 - DNA, 120 bp, Artificial Sequence
  ENSG00000148158_49 (sequence is synthesized)
atatgttttccaggtagtttttactactacagagagtctgtaaataagtgctttaaaaaaataacaaaccaataagatatttgtctcctatataaacattctgtgtatttagcacttgaa

SEQ ID NO: 409498 - DNA, 120 bp, Artificial Sequence
  ENSG00000148158_50 (sequence is synthesized)
aatcaacaaatccagaatttaaaaaaatgccacagacttttcaaagcccaactctacttttttgagaatttgtccgtacctactaatatgccttattcttcttcacctagtgttttaaaa

SEQ ID NO: 409499 - DNA, 120 bp, Artificial Sequence
  ENSG00000148158_51 (sequence is synthesized)
gtcctgggtagaaagagttttagaaatgtaatcagttgttcagcttcaataatatagagatctaacatagtcagtcctcaggccccctaaagaaacaagcaagaaagtgagggccatcac

SEQ ID NO: 409500 - DNA, 120 bp, Artificial Sequence
  ENSG00000148158_52 (sequence is synthesized)
tagggttggctttggggaggggaaaactaaggactgcttttgccaaatgatatttttgataatgtaaggaaacacagggaccacaaaaccttttttttttttttaagtgtgaaagattag

SEQ ID NO: 409501 - DNA, 120 bp, Artificial Sequence
  ENSG00000148158_53 (sequence is synthesized)
tgccttttggcatacttttgattttagaggatatagtatcggcattgacaaatcacgtagaaacaaagaatgctatagatgacaacagtattaaatgttactcctgattctgcagaacag

SEQ ID NO: 409502 - DNA, 120 bp, Artificial Sequence
  ENSG00000148158_54 (sequence is synthesized)
cttttgaagatactggggggtatcttcaagcctcagagcagcttgtttcagatagaaattctctatgggttgaaatgccaaaaacagaaaacatgatgttgactcatgtaatttagtcca

SEQ ID NO: 409503 - DNA, 120 bp, Artificial Sequence
  ENSG00000148158_55 (sequence is synthesized)
ttttagcagagcctttagtgttaacaccagtggcgaggagcattgcatattctctgtcagcagcagcactcccacaccaggtggttctgggctctctgtaggctggtcctagtaggtgac

SEQ ID NO: 409504 - DNA, 120 bp, Artificial Sequence
  ENSG00000148158_56 (sequence is synthesized)
acccagcaacacccctgttggacaggattgattgttcgcagtcttagaccaacacttcagtcagaaatgttactgggaggaggaaaggaaaatcactttttttcctccatgtggaaatga

SEQ ID NO: 409505 - DNA, 120 bp, Artificial Sequence
  ENSG00000148158_57 (sequence is synthesized)
ggagagaggaaagtggattgcaaaccaaaatgtgagtcagtgtgatgaagcagtggctctgtcatctcggcctttatccaataacaaaccagcatctcttaaaggcgcttttggcctaga

SEQ ID NO: 409506 - DNA, 120 bp, Artificial Sequence
  ENSG00000148158_58 (sequence is synthesized)
cacccctgaagtttggatgaagtctggtggattccctgtctgttgtatttctgtgtgcctgttcccttcattgctgtgagttgggagtgcattgagagatgatgtccatctgatatattc

SEQ ID NO: 409507 - DNA, 120 bp, Artificial Sequence
  ENSG00000148158_59 (sequence is synthesized)
ctgtgaaataaactgccagcaaactttctaacttgtattttaactgttaaagaagagattaaaaacttcggctttggacatgtccacattatggactgtcatcttatttttaaaagtcat

SEQ ID NO: 409508 - DNA, 120 bp, Artificial Sequence
  ENSG00000148158_60 (sequence is synthesized)
tctttacgtttaaaattttaaaataaaaaccttctgaggtattgatgtagtccaccgtgtaaatgttaccttctctccatgctgccattatgccaaaacaaaagctgtgataaaaaaagt

SEQ ID NO: 409509 - DNA, 120 bp, Artificial Sequence
  ENSG00000148158_61 (sequence is synthesized)
gcttgagagagtgtgttgataagaaagtgatttatttacagatggaagtctttgtttcatgaagctaccaaactttaaaaagaatgtcacccttttttttgtttgttatggaaaccagag

SEQ ID NO: 409510 - DNA, 120 bp, Artificial Sequence
  ENSG00000148158_62 (sequence is synthesized)
attgtaaaatggaaaaagaatcgtttttttgttgactttttgatgctggcacgaggtttttgtccacttttttcatatatctgtgtataaaaaaattgttgtttactatggaattagtat

SEQ ID NO: 409511 - DNA, 120 bp, Artificial Sequence
  ENSG00000148158_63 (sequence is synthesized)
tacattttgaggtaaacaaaagaatttgtattgcttgataaatattagcttgtaaatttaaagtttctttacttcaattaacttaaaggaccaataaacccataaaagatgctttcttta

SEQ ID NO: 409512 - DNA, 120 bp, Artificial Sequence
  ENSG00000148158_64 (sequence is synthesized)
tatgagaaggcccagtttaccctcaatttaccctcttctacatcttccacatctgcaccaatctggggagatgaagaaacttcctagtgtagtagccatcatgactggcaggcaggccga

SEQ ID NO: 409513 - DNA, 120 bp, Artificial Sequence
  ENSG00000148158_65 (sequence is synthesized)
agctcactgcaacctctgccttccaggcccaagcagtccccccgcctcagtctcccgagtagctggtgctacaggtgatgctgctgctgctggcccaagaacccctgggttagaacatct

SEQ ID NO: 409514 - DNA, 120 bp, Artificial Sequence
  ENSG00000148158_66 (sequence is synthesized)
tgctgctggcccaagaacccctgggttagaacatctgttagaagaaatggtgaccctggaaaagctgacaaggtttgaaactcctaccctggtgacagctggagttgaaaaggagccaat

SEQ ID NO: 409515 - DNA, 120 bp, Artificial Sequence
  ENSG00000148158_67 (sequence is synthesized)
acttgggctttgagagctcagctcaggttaaaaaacacaagtttatatagcacggtcaatgtggacaaggaatgacatttctctaaacagtaagaggcttttcaggagtaggaacgatta

SEQ ID NO: 409516 - DNA, 120 bp, Artificial Sequence
  ENSG00000148158_68 (sequence is synthesized)
gattcattcaggctgaggagctggtcaagaggctggaccagaaggtaaggagttggggaatgagcatattgatgagtaagggtggagaggttgaacatggtcttgacctcatctttccca

SEQ ID NO: 409517 - DNA, 120 bp, Artificial Sequence
  ENSG00000148158_69 (sequence is synthesized)
tcctatctgctctgctcatgctgccagactcttggggttggaggggggcgctacctttttcccagtggcctgagccccaaatctgagtcattctggcctccatctacctcaccctctacc

SEQ ID NO: 409518 - DNA, 120 bp, Artificial Sequence
  ENSG00000148158_70 (sequence is synthesized)
atccatccattaaccaactcctgtagcctctaactcccaaatatttttccatatccatctacttttctccatgcttgtagcttcctaccctacgtctgctattatttttttactttaatt

SEQ ID NO: 409519 - DNA, 120 bp, Artificial Sequence
  ENSG00000148158_71 (sequence is synthesized)
tttttttttaagaggcaatcttgctctctcacccaggcaggggtatagtggcccagtcatagctcactgcagccttgaactcgggctcaagcgatcctgtcgttttagcctcctgagtag

SEQ ID NO: 409520 - DNA, 120 bp, Artificial Sequence
  ENSG00000148158_72 (sequence is synthesized)
ctgggattataggtgcacaccaccatacccaggtaattttaattttttttgtagagatagtggtctcgctatttgctcaggctagtgctggattcctggcctcaagtgatcttcctagct

SEQ ID NO: 409521 - DNA, 120 bp, Artificial Sequence
  ENSG00000148158_73 (sequence is synthesized)
tggcctcccagagtgctgggattataggcctgagccaccaaggctggccagtcagtctgccattatccttcacctggtttactgcaagggcttcacagctcatctcctttcttcaagctt

SEQ ID NO: 409522 - DNA, 120 bp, Artificial Sequence
  ENSG00000148158_74 (sequence is synthesized)
gctcactccttccaccaattcattgtcctcagtgttgccagggagctgtttctaagatgcaaatttaagcactctgtgttcctgcttaacaccttccaacagctatccccatttactctg

SEQ ID NO: 409523 - DNA, 120 bp, Artificial Sequence
  ENSG00000148158_75 (sequence is synthesized)
aagagaaacatctttttcttttgaaaggatattttatgttattcctccttaccaccccagtctcatcttactgtcctccgtaatacttgtccttccgtctgctgccttcacactgaattc

SEQ ID NO: 409524 - DNA, 120 bp, Artificial Sequence
  ENSG00000148158_76 (sequence is synthesized)
ctaaacctttgatatattttcaccttcaggccttccagcaagttgttccttctgcctggaatgtcccccaacatctggccttagtaactgctacttacccttccagccttgtcatagaag

SEQ ID NO: 409525 - DNA, 120 bp, Artificial Sequence
  ENSG00000148158_77 (sequence is synthesized)
tcatttctgggatgcccttcctgctctcccaaatctggattccgtgctcccttatattagtgaggttggagaggttgaacgtgatcttgaacttcttgaactcatctttcccatcccatc

SEQ ID NO: 409526 - DNA, 120 bp, Artificial Sequence
  ENSG00000148158_78 (sequence is synthesized)
gtgctagggcagacacagtcacgtgctattctttctgtatctcagcacctagcatggggcctggaccttattagatgtgtcatagagttttgttcattccctgcaagaggattagagata

SEQ ID NO: 409527 - DNA, 120 bp, Artificial Sequence
  ENSG00000148158_79 (sequence is synthesized)
caaactctcagagcccaaataccttgaatgtattctgcagccgtgtattttatcctgtataagaacatcaagtctgtagtcacagacagaatctgacctgggaaggaacgattcacacac

SEQ ID NO: 409528 - DNA, 120 bp, Artificial Sequence
  ENSG00000148158_80 (sequence is synthesized)
tcatacaatgaatgttgattttattaggtgagtctgcttttataaatccaagtaaacaaggttataaaaatgactacctcaaataaaatagctcttaatgtacctcctcttccttcacac

SEQ ID NO: 409529 - DNA, 120 bp, Artificial Sequence
  ENSG00000148158_81 (sequence is synthesized)
cacccactttgggaagcactgttgactggaagtactcaattgaacatcccattgaagaaagccttgtgacatttgcttcttaaaagcaacagtagtaacaaaactacccagaagacaagg

SEQ ID NO: 409530 - DNA, 120 bp, Artificial Sequence
  ENSG00000148158_82 (sequence is synthesized)
gcctgagctccatccccctcctgagtgtttgtaggtaaggaagactcaggaaagaaagctgacttttttcaaggttttattttaatttaaaagacattgttcgtgcaaaactgttggtag

SEQ ID NO: 409531 - DNA, 120 bp, Artificial Sequence
  ENSG00000148158_83 (sequence is synthesized)
ttcttacaaaacatcccttccacattcccctcaggctgtgataatgcacgctttgagttctcccatgggactttcagcacagcacccaggtgactagttagctatactttggagccctca

SEQ ID NO: 409532 - DNA, 120 bp, Artificial Sequence
  ENSG00000148158_84 (sequence is synthesized)
agacagtcccttgaagaaaaggggcaggctcgctgtagctggagtctgaagcccctcacagggcctgggactgctgtgtgcagcctgcctgtaacccttaaggtcatgctctgctgtcac

SEQ ID NO: 409533 - DNA, 120 bp, Artificial Sequence
  ENSG00000148158_85 (sequence is synthesized)
agaacccagtgtctgcctaatgggggtgtcttaaagctgagaacgtttttccatcaccaggaaagtgcttttccccatccaccagggatccctgagccagagcaggtcattctgaggcca

SEQ ID NO: 409534 - DNA, 120 bp, Artificial Sequence
  ENSG00000148158_86 (sequence is synthesized)
actctggctggaacgcaggtttcttaagcagtgggttgcttaggtcaccagttccctggtcccttcttttgtcttctgggggcctggccatggctgatgttttcagttcctgcaggtaag

SEQ ID NO: 409535 - DNA, 120 bp, Artificial Sequence
  ENSG00000148158_87 (sequence is synthesized)
catcttcatttctctatgatgtctccatatggtgacaatgggacttgtttataggccacgatgctgtaagaattgaccatagagagttacaagagaacagctggaatggggtaaaggtga

SEQ ID NO: 409536 - DNA, 120 bp, Artificial Sequence
  ENSG00000148158_88 (sequence is synthesized)
aactgccctcacagggttaatgataattacaagccaggctttaggcaaaatcataggtaggcattgaccaaggtgtgctggtgcactgtgacccatctccctgcagctgctagctaaaag

SEQ ID NO: 409537 - DNA, 120 bp, Artificial Sequence
  ENSG00000148158_89 (sequence is synthesized)
gtgcactgtgacccatctccctgcagctgctagctaaaaggagcatgttgaccatttgcttccccattgttcctttagatagaatctctgggggccaggcatggtggcttatgcctgtaa

SEQ ID NO: 409538 - DNA, 120 bp, Artificial Sequence
  ENSG00000148158_90 (sequence is synthesized)
atactggacctttttacttaagaattgcttaaggtgtttttcagatcctgaattccagcagaatggctagtgccaaccagcctgaagaccctcaccaaggaaccaactcagcacagggct

SEQ ID NO: 409539 - DNA, 120 bp, Artificial Sequence
  ENSG00000148158_91 (sequence is synthesized)
ggcaagtggagagtgaagacttggaagcagccagcacagggccacatgatccttgacccctgctgtggaccactacagcacaggcacaaggcgatggccagcatctgacttcatgggcag

SEQ ID NO: 409540 - DNA, 120 bp, Artificial Sequence
  ENSG00000148158_92 (sequence is synthesized)
ccccaggcagctctggggtgtgggcggtcagcagtgctgacttattagtcagcgtaagtcagcgctgagagatgctacaccctctgacagggcatgcattcattaaacgaattctttttg

SEQ ID NO: 409541 - DNA, 120 bp, Artificial Sequence
  ENSG00000148175_0 (sequence is synthesized)
gcattcccggcggctccgggtttggcaacgaggacgggggagtgcgactgcgtctcgggcagcatggccgagaagcggcacacacgggactccgaagcccagcggctccccgactccttc

SEQ ID NO: 409542 - DNA, 120 bp, Artificial Sequence
  ENSG00000148175_1 (sequence is synthesized)
aaggacagccccagtaagggccttggaccttgcggatggattttggtggcgttctcattcttattcaccgttataactttcccaatctcaatatggatgtgcataaagattataaaagag

SEQ ID NO: 409543 - DNA, 120 bp, Artificial Sequence
  ENSG00000148175_2 (sequence is synthesized)
tatgaaagagccatcatctttagattgggtcgcattttacaaggaggagccaaaggacctggtttgttttttattctgccatgcactgacagcttcatcaaagtggacatgagaactatt

SEQ ID NO: 409544 - DNA, 120 bp, Artificial Sequence
  ENSG00000148175_3 (sequence is synthesized)
tcatttgatattcctcctcaggagatcctcacaaaggattcagtgacaattagcgtggatggtgtggtctattaccgcgttcagaatgcaaccctggctgtggcaaatatcaccaacgct

SEQ ID NO: 409545 - DNA, 120 bp, Artificial Sequence
  ENSG00000148175_4 (sequence is synthesized)
gactcagcaacccgtcttttggcacaaactactctgaggaatgttctgggcaccaagaatctttctcagatcctctctgacagagaagaaattgcacacaacatgcagtctactctggat

SEQ ID NO: 409546 - DNA, 120 bp, Artificial Sequence
  ENSG00000148175_5 (sequence is synthesized)
gatgccactgatgcctggggaataaaggtggagcgtgtggaaattaaggatgtgaaactacctgtgcagctccagagagctatggctgcagaagcagaagcgtcccgcgaggcccgcgcc

SEQ ID NO: 409547 - DNA, 120 bp, Artificial Sequence
  ENSG00000148175_6 (sequence is synthesized)
aaggttattgcagccgaaggagaaatgaatgcatccagggctctgaaagaagcctccatggtcatcactgaatctcctgcagcccttcagctccgatacctgcagacactgaccaccatt

SEQ ID NO: 409548 - DNA, 120 bp, Artificial Sequence
  ENSG00000148175_7 (sequence is synthesized)
gctgctgagaaaaactcaacaattgtcttccctctgcccatagatatgctgcaaggaatcataggggcaaaacacagccatctaggctagtgtagagatgagcgctagccttccaagcat

SEQ ID NO: 409549 - DNA, 120 bp, Artificial Sequence
  ENSG00000148175_8 (sequence is synthesized)
gaagtcggggaccaaattagcctttaactcataaagagagggtagggcttttctttttccatatgtcaattgtggtgttcccagaatgtatagcagttataaaaataggtgaaagaattg

SEQ ID NO: 409550 - DNA, 120 bp, Artificial Sequence
  ENSG00000148175_9 (sequence is synthesized)
ttagcttgtaaatactgagagattggtgatttatataaggtaatctgttagtcttaaaatagttaaaagtttgtatttttagattattatgtagtaggttagatccctcttgttttgact

SEQ ID NO: 409551 - DNA, 120 bp, Artificial Sequence
  ENSG00000148175_10 (sequence is synthesized)
tccactgactcattctgaaccccctaagcacccaggccagaggcaagaacctgggctgtaactgccacctgacaccgctgactggctaaatgctttgcagaaagtgatgaccttacacca

SEQ ID NO: 409552 - DNA, 83 bp, Artificial Sequence
  ENSG00000148175_11 (sequence is synthesized)
actggctaaatgctttgcagaaagtgatgaccttacaccacaaccagcttctccaggtcatatgtgccttacctccagagagt

SEQ ID NO: 409553 - DNA, 70 bp, Artificial Sequence
  ENSG00000148175_12 (sequence is synthesized)
tttggagagtcttaattaaggaaatttccctaatgttcatttattttctaaatccagaccgtgtttcaga

SEQ ID NO: 409554 - DNA, 120 bp, Artificial Sequence
  ENSG00000148175_13 (sequence is synthesized)
taatgttcatttattttctaaatccagaccgtgtttcagaataatccttacttgagagtagccattttcttgcctgtacttgtcagaactagaggaaatagccaagactaatgaaaaaga

SEQ ID NO: 409555 - DNA, 120 bp, Artificial Sequence
  ENSG00000148175_14 (sequence is synthesized)
ttactctaacccttaaaagacttttaaattcactactagagtggtcattttaaaaatacatccatgttttaacttatttgagccttctttatgagtaaatgattcctccttgttctgtct

SEQ ID NO: 409556 - DNA, 120 bp, Artificial Sequence
  ENSG00000148175_15 (sequence is synthesized)
ttcaaaccagctaaatatttgtcacaaaagtgcttttttctcactgttgcctattttcatatatcaggttttaaatagttttaattttttaataaaattttctctacgttctatatgcaa

SEQ ID NO: 409557 - DNA, 120 bp, Artificial Sequence
  ENSG00000148175_16 (sequence is synthesized)
ttgttatatatctatttgaatagctgaaggactaaaatacttttttaagagataacttcaggaaaccattatattttactatctgcatgctgttaactgtggtacactgtgaaatatgtt

SEQ ID NO: 409558 - DNA, 120 bp, Artificial Sequence
  ENSG00000148175_17 (sequence is synthesized)
gattacaaacccattcattacatagtataaggaattcacagtatattgactatatagtgtctaatgatcttgggcagatactgtcaaacttacaatatctatatagatgtaggtcttttt

SEQ ID NO: 409559 - DNA, 120 bp, Artificial Sequence
  ENSG00000148175_18 (sequence is synthesized)
aaatttacctagtcattcttctatcatgtatattgatgctgaaagaggaactggtcagctcctctggacaacaaattcttagtctataatattaggagacatcttctgttttgcaaatgt

SEQ ID NO: 409560 - DNA, 120 bp, Artificial Sequence
  ENSG00000148175_19 (sequence is synthesized)
ctgtgaatctgagcaacctggcattctgcttactggccagaaagctggcgggtgacatttgtaacatttcctctttgagactctgagttcacctagagaagtctaagcataacagctttc

SEQ ID NO: 409561 - DNA, 120 bp, Artificial Sequence
  ENSG00000148175_20 (sequence is synthesized)
tttcccagcacgagcctttatagctctctttagctcaaccactctgtccatccagccaatggatgtcccttcccctgtaccccaatttcaagcttattttaggaagccttgaactaccat

SEQ ID NO: 409562 - DNA, 120 bp, Artificial Sequence
  ENSG00000148175_21 (sequence is synthesized)
gtatcctggctcctagctgagtttattagaggtatggagcagtgcaacttaaactcaagttgcacttacattttgaattttaaaatgatggttttatctgttgtgtgaagtggttcaccc

SEQ ID NO: 409563 - DNA, 120 bp, Artificial Sequence
  ENSG00000148175_22 (sequence is synthesized)
ttgaggaccaggagcctccatatcctgactgaaaaccttttctgagacttagagtaacagtgcttttggttccttgagttctcctgtctccagataccaaatgaccttgacttttctgcc

SEQ ID NO: 409564 - DNA, 120 bp, Artificial Sequence
  ENSG00000148175_23 (sequence is synthesized)
ttgtgaattcgtagtccaatcagctgaaattaaatcacttgggagggacgcatagaaggagctctaggaacacagtgccagtgcagaagtttctccaggtggcctccctttccaacaatg

SEQ ID NO: 409565 - DNA, 120 bp, Artificial Sequence
  ENSG00000148175_24 (sequence is synthesized)
tacataataaagtgtatgcactttcactaatatttttggggtgagagtctgtttcggcctgtattgaatgtctgtggatttccgttttcagaagtagtacattagatcctccggttctga

SEQ ID NO: 409566 - DNA, 120 bp, Artificial Sequence
  ENSG00000148180_0 (sequence is synthesized)
gggcggctacttaaggtcggcgacccgaggccgcggctgccgactgggtcccctgccgctgtcgccaccatggctccgcaccgccccgcgcccgcgctgctttgcgcgctgtccctggcg

SEQ ID NO: 409567 - DNA, 120 bp, Artificial Sequence
  ENSG00000148180_1 (sequence is synthesized)
cgcgcggccactgcgtcgcggggggcgtcccaggcgggggcgccccaggggcgggtgcccgaggcgcggcccaacagcatggtggtggaacaccccgagttcctcaaggcagggaaggag

SEQ ID NO: 409568 - DNA, 120 bp, Artificial Sequence
  ENSG00000148180_2 (sequence is synthesized)
gagttcctcaaggcagggaaggagcctggcctgcagatctggcgtgtggagaagttcgatctggtgcccgtgcccaccaacctttatggagacttcttcacgggcgacgcctacgtcatc

SEQ ID NO: 409569 - DNA, 120 bp, Artificial Sequence
  ENSG00000148180_3 (sequence is synthesized)
ctgaagacagtgcagctgaggaacggaaatctgcagtatgacctccactactggctgggcaatgagtgcagccaggatgagagcggggcggccgccatctttaccgtgcagctggatgac

SEQ ID NO: 409570 - DNA, 120 bp, Artificial Sequence
  ENSG00000148180_4 (sequence is synthesized)
tacctgaacggccgggccgtgcagcaccgtgaggtccagggcttcgagtcggccaccttcctaggctacttcaagtctggcctgaagtacaagaaaggaggtgtggcatcaggattcaag

SEQ ID NO: 409571 - DNA, 120 bp, Artificial Sequence
  ENSG00000148180_5 (sequence is synthesized)
cacgtggtacccaacgaggtggtggtgcagagactcttccaggtcaaagggcggcgtgtggtccgtgccaccgaggtacctgtgtcctgggagagcttcaacaatggcgactgcttcatc

SEQ ID NO: 409572 - DNA, 120 bp, Artificial Sequence
  ENSG00000148180_6 (sequence is synthesized)
ctggacctgggcaacaacatccaccagtggtgtggttccaacagcaatcggtatgaaagactgaaggccacacaggtgtccaagggcatccgggacaacgagcggagtggccgggcccga

SEQ ID NO: 409573 - DNA, 120 bp, Artificial Sequence
  ENSG00000148180_7 (sequence is synthesized)
gtgcacgtgtctgaggagggcactgagcccgaggcgatgctccaggtgctgggccccaagccggctctgcctgcaggtaccgaggacaccgccaaggaggatgcggccaaccgcaagctg

SEQ ID NO: 409574 - DNA, 120 bp, Artificial Sequence
  ENSG00000148180_8 (sequence is synthesized)
gccaagctctacaaggtctccaatggtgcagggaccatgtccgtctccctcgtggctgatgagaaccccttcgcccagggggccctgaagtcagaggactgcttcatcctggaccacggc

SEQ ID NO: 409575 - DNA, 120 bp, Artificial Sequence
  ENSG00000148180_9 (sequence is synthesized)
aaagatgggaaaatctttgtctggaaaggcaagcaggcaaacacggaggagaggaaggctgccctcaaaacagcctctgacttcatcaccaagatggactaccccaagcagactcaggtc

SEQ ID NO: 409576 - DNA, 120 bp, Artificial Sequence
  ENSG00000148180_10 (sequence is synthesized)
tcggtccttcctgagggcggtgagaccccactgttcaagcagttcttcaagaactggcgggacccagaccagacagatggcctgggcttgtcctacctttccagccatatcgccaacgtg

SEQ ID NO: 409577 - DNA, 120 bp, Artificial Sequence
  ENSG00000148180_11 (sequence is synthesized)
cgccgccaccctgcacacctccactgccatggccgcccagcacggcatggatgacgatggcacaggccagaaacagatctggagaatcgaaggttccaacaaggtgcccgtggaccctgc

SEQ ID NO: 409578 - DNA, 120 bp, Artificial Sequence
  ENSG00000148180_12 (sequence is synthesized)
cacatatggacagttctatggaggcgacagctacatcattctgtacaactaccgccatggtggccgccaggggcagataatctataactggcagggtgcccagtctacccaggatgaggt

SEQ ID NO: 409579 - DNA, 120 bp, Artificial Sequence
  ENSG00000148180_13 (sequence is synthesized)
cgctgcatctgccatcctgactgctcagctggatgaggagctgggaggtacccctgtccagagccgtgtggtccaaggcaaggagcccgcccacctcatgagcctgtttggtgggaagcc

SEQ ID NO: 409580 - DNA, 120 bp, Artificial Sequence
  ENSG00000148180_14 (sequence is synthesized)
catgatcatctacaagggcggcacctcccgcgagggcgggcagacagcccctgccagcacccgcctcttccaggtccgcgccaacagcgctggagccacccgggctgttgaggtattgcc

SEQ ID NO: 409581 - DNA, 120 bp, Artificial Sequence
  ENSG00000148180_15 (sequence is synthesized)
taaggctggtgcactgaactccaacgatgcctttgttctgaaaaccccctcagccgcctacctgtgggtgggtacaggagccagcgaggcagagaagacgggggcccaggagctgctcag

SEQ ID NO: 409582 - DNA, 120 bp, Artificial Sequence
  ENSG00000148180_16 (sequence is synthesized)
ggtgctgcgggcccaacctgtgcaggtggcagaaggcagcgagccagatggcttctgggaggccctgggcgggaaggctgcctaccgcacatccccacggctgaaggacaagaagatgga

SEQ ID NO: 409583 - DNA, 120 bp, Artificial Sequence
  ENSG00000148180_17 (sequence is synthesized)
tgcccatcctcctcgcctctttgcctgctccaacaagattggacgttttgtgatcgaagaggttcctggtgagctcatgcaggaagacctggcaacggatgacgtcatgcttctggacac

SEQ ID NO: 409584 - DNA, 120 bp, Artificial Sequence
  ENSG00000148180_18 (sequence is synthesized)
ctgggaccaggtctttgtctgggttggaaaggattctcaagaagaagaaaagacagaagccttgacttctgctaagcggtacatcgagacggacccagccaatcgggatcggcggacgcc

SEQ ID NO: 409585 - DNA, 120 bp, Artificial Sequence
  ENSG00000148180_19 (sequence is synthesized)
catcaccgtggtgaagcaaggctttgagcctccctcctttgtgggctggttccttggctgggatgatgattactggtctgtggaccccttggacagggccatggctgagctggctgcctg

SEQ ID NO: 409586 - DNA, 120 bp, Artificial Sequence
  ENSG00000148180_20 (sequence is synthesized)
aggaggggcagggcccacccatgtcaccggtcagtgccttttggaactgtccttccctcaaagaggccttagagcgagcagagcagctctgctatgagtgtgtgtgtgtgtgtgtgttgt

SEQ ID NO: 409587 - DNA, 120 bp, Artificial Sequence
  ENSG00000148180_21 (sequence is synthesized)
ttcttttttttttttttacagtatccaaaaatagccctgcaaaaattcagagtccttgcaaaattgtctaaaatgtcagtgtttgggaaattaaatccaataaaaacattttgaagtgtg

SEQ ID NO: 409588 - DNA, 80 bp, Artificial Sequence
  ENSG00000148180_22 (sequence is synthesized)
caccccggccgcgcgcaccacaacgcccccgccccgccgcccggaaccagctgagcgcagctggacccagcagccgctgt

SEQ ID NO: 409589 - DNA, 120 bp, Artificial Sequence
  ENSG00000148180_23 (sequence is synthesized)
ctggacccagcagccgctgtctccagtgccgcagcagcaggtagtgctcatagctctctttgtccagtgcttcggccttggtcccagcgccttcccacggagcagcactcttcaccctgc

SEQ ID NO: 409590 - DNA, 120 bp, Artificial Sequence
  ENSG00000148180_24 (sequence is synthesized)
gctggagtgcaatggcacgatatcagctcactgaagcctccacctcctgggctcaagcactcctcccacctcagccccccaggtagctgagactacaggaatggataaagcacggagagg

SEQ ID NO: 409591 - DNA, 120 bp, Artificial Sequence
  ENSG00000148180_25 (sequence is synthesized)
aaccaagaatgtgctcagaaaaaaatccttcctcactgaaaccaggactaaggaaaggagattcccttctaccatccatggactcaggctgacggagcacgctgcctgtctgtgtctctc

SEQ ID NO: 409592 - DNA, 120 bp, Artificial Sequence
  ENSG00000148180_26 (sequence is synthesized)
cgtttctctctctggaacgttgtcagatgtcacggcggagggaaaagagacctggaatgacttgccgaatttttagcccataaccaggcactgtgtaaaccgctttacctcattcagtct

SEQ ID NO: 409593 - DNA, 120 bp, Artificial Sequence
  ENSG00000148180_27 (sequence is synthesized)
ttgcaattataccacaaggtcacactgtttagaaggagaaagaagagctcgctgtgaaaaacgctccacaatgctgcagagccttgtgaaggtggaagagtactctcatcagcaaacggc

SEQ ID NO: 409594 - DNA, 73 bp, Artificial Sequence
  ENSG00000148180_28 (sequence is synthesized)
gccttgtgaaggtggaagagtactctcatcagcaaacggcattccttccatggaaaatgtcattgggaggaaa

SEQ ID NO: 409595 - DNA, 120 bp, Artificial Sequence
  ENSG00000148180_29 (sequence is synthesized)
cttgtgctgataacttctctttctgaagccagctccaggagaggtctgtaatcagaagagcccctgaaccctgaagcctcctgggctgcccagcccaggcatctcctctcctcactctgg

SEQ ID NO: 409596 - DNA, 120 bp, Artificial Sequence
  ENSG00000148180_30 (sequence is synthesized)
gtgctcccagggcccacaactgcttgaatgactattggtgttcctgtttgtgtgccctctgggccgggaagtcagagaaagaaaggagacaatttgtgattgaacagccactgtggccat

SEQ ID NO: 409597 - DNA, 120 bp, Artificial Sequence
  ENSG00000148180_31 (sequence is synthesized)
tcctcgcctctttgcctgctccaacaagattggacgttttgtggtgagcccctgcggaggtcacacctctgctttcccctcgggaggcgagttccacaggactggccggcagcaggggca

SEQ ID NO: 409598 - DNA, 120 bp, Artificial Sequence
  ENSG00000148180_32 (sequence is synthesized)
atagctccccccagcctcgcgatggccgaggaagaagccctcaggggcaattctgacccatggttcttgcagatacagcgctaggaaaaggggagtaattcaggtctagaatggaaaaac

SEQ ID NO: 409599 - DNA, 120 bp, Artificial Sequence
  ENSG00000148180_33 (sequence is synthesized)
cgcgtctgctgtggcccagctggcttccagatggtgacatgagccacccacagccggagctgttcctctttcccaaagctcagacggagtcttgctgtggtgcccaggctggagtgcagt

SEQ ID NO: 409600 - DNA, 120 bp, Artificial Sequence
  ENSG00000148180_34 (sequence is synthesized)
gctcactgcaacctcctcctcccaggacttttgggtcctttccagttttcttcaaacaatgcttcagtgaacatccttgcacatatatttttgtgtttgttgttcttgcagatacagcgc

SEQ ID NO: 409601 - DNA, 120 bp, Artificial Sequence
  ENSG00000148180_35 (sequence is synthesized)
acaagggcggcacctcccgcgagggcgggcagacagcccctgccagcacccgcctcttccaggtccgcgccaacagcgctggagccacccgggctgttgaggtaatttccaggtcctgga

SEQ ID NO: 409602 - DNA, 120 bp, Artificial Sequence
  ENSG00000148180_36 (sequence is synthesized)
attaaagcgtcatgggcacacagaggagtgtgtgaatcctgagtgtacagcttgatggattacacagagcgaacacactcacgtaacactggatcatgaagcagaacctcaccagcccct

SEQ ID NO: 409603 - DNA, 120 bp, Artificial Sequence
  ENSG00000148180_37 (sequence is synthesized)
agaaggccccttttgcccctttcggtgccctcaccccaagggcaaccatcatcctgaactttctcaacagcatagatgagttttgcctgtttctgaactttatagacacggaaccttgtt

SEQ ID NO: 409604 - DNA, 120 bp, Artificial Sequence
  ENSG00000148180_38 (sequence is synthesized)
cttttatctctgaccttttgctcaacattacatttctgagatgcatccgtattgttgcatttagttgtaggttgttcattttccttgctgtggaagattcagttgtgtgggtgtaccatg

SEQ ID NO: 409605 - DNA, 120 bp, Artificial Sequence
  ENSG00000148180_39 (sequence is synthesized)
atttatgtatcctttatgttgttgatgggcacttgaggtggcttctggtttggggctattacagacagtgctactctgaacattcttgcacaagtcttttggtggacatacgaacgtact

SEQ ID NO: 409606 - DNA, 120 bp, Artificial Sequence
  ENSG00000148180_40 (sequence is synthesized)
tctgtcaggtattttcctagaaggaggattgctgggtcataaggaaataggtatattcggctttagtggctatggccaaatggttttccaaaatggttgtgccaatttatattcccttca

SEQ ID NO: 409607 - DNA, 120 bp, Artificial Sequence
  ENSG00000148180_41 (sequence is synthesized)
gcaggcaaacatttttgcacacattctagatgtagttgtacctgtgaaaaaattcctgtcctcagacatgcgctcccatctcctggtgtgtgcagatcacacttaattgtacgtaaataa

SEQ ID NO: 409608 - DNA, 120 bp, Artificial Sequence
  ENSG00000148180_42 (sequence is synthesized)
tgcacgtgtgcagactgtgccagccttcacctgggcaagtgcagaacagggtgagcctgcacaccacacgccacactccccaagccctgtcgctgggcggggcttataggaaggcggggc

SEQ ID NO: 409609 - DNA, 120 bp, Artificial Sequence
  ENSG00000148180_43 (sequence is synthesized)
ttctcaagaagaagaaaagacagaagccttgacttctggtgaggacccgagtgcctgggggcggggggaggggtccgttgcttgtggggtgctgggagtggctcctgtacaggtctggga

SEQ ID NO: 409610 - DNA, 120 bp, Artificial Sequence
  ENSG00000148180_44 (sequence is synthesized)
atgagcatctttccaggggactgatggacaagatagggtggggacttcctcctctgtgggccagcccctcataaatcctgcctgggatagtgaagaacacatcagttccttcagaaaccc

SEQ ID NO: 409611 - DNA, 120 bp, Artificial Sequence
  ENSG00000148180_45 (sequence is synthesized)
tgaggcttctcaaagaaggctctcctctgttccaggagaaggaagggacagatgagaagtcacttcaagttcccagaatactcagaagctgaacttgtcaaggtttagatgtggcaaagc

SEQ ID NO: 409612 - DNA, 63 bp, Artificial Sequence
  ENSG00000148180_46 (sequence is synthesized)
ctcagaagctgaacttgtcaaggtttagatgtggcaaagcaggccaggcatggtgactcatgc

SEQ ID NO: 409613 - DNA, 63 bp, Artificial Sequence
  ENSG00000148180_47 (sequence is synthesized)
aacacagctacttgggaggctaaagcacaagaatcgctggaacccaggaggtggaggctgcag

SEQ ID NO: 409614 - DNA, 120 bp, Artificial Sequence
  ENSG00000148180_48 (sequence is synthesized)
gcactccagcctgggcaacagagcgagaaaacctgatattgagagaagaatgtggatcttacagattcagacatgcctgggtttgaattctagctccaccaccttgggcaagtcccgtca

SEQ ID NO: 409615 - DNA, 120 bp, Artificial Sequence
  ENSG00000148180_49 (sequence is synthesized)
tctagctccaccaccttgggcaagtcccgtcacctgtgggccccattttgcacatcagtgcgatgcagcaatgacacctcccttgcaggcgatgcgtgaagaatgcccggcacagtgggc

SEQ ID NO: 409616 - DNA, 120 bp, Artificial Sequence
  ENSG00000148180_50 (sequence is synthesized)
atcatcatttcacaaacacgtatactgctgacacaggaagacagagcaggagcccaatatacacggactccgtttgtcccttgccctcctcgagtctgtgcggctagaattagacttagc

SEQ ID NO: 409617 - DNA, 120 bp, Artificial Sequence
  ENSG00000148180_51 (sequence is synthesized)
acagtgggctgaggggccctggatggggtggctgcattgctggcctgagtggaagccctctgcttccacccccatgtgtctccggagcagggagacgagcacccgattgggaggaggaaa

SEQ ID NO: 409618 - DNA, 120 bp, Artificial Sequence
  ENSG00000148180_52 (sequence is synthesized)
caaggtttccagccttggcttggccacgcacttgctgagtgcccttgagtaagtcacttcacttctctgggcttcagtttaccgtgggtaaagtggggtgaagtagaaggacctttccaa

SEQ ID NO: 409619 - DNA, 120 bp, Artificial Sequence
  ENSG00000148180_53 (sequence is synthesized)
ctctgatttgacaactctggggcatggagctggggactgctcacaggaaagcccagctgactttccttggcttgcttctgagtgagggcagttgtgactgcagcagggaagctctcctga

SEQ ID NO: 409620 - DNA, 120 bp, Artificial Sequence
  ENSG00000148180_54 (sequence is synthesized)
acgccttgctctgggatgcagtaatgattacagagggctggggagcaggagcttgtgtctccacttcagaaaggagaggcctgaggctcggaaagggcaagtgacttacccaaagccatc

SEQ ID NO: 409621 - DNA, 120 bp, Artificial Sequence
  ENSG00000148180_55 (sequence is synthesized)
cagcattgttgtggcggggcacctgtcccttacccatagctgctctgaagggactgctgggtgggagttgctgcggtaccgtaggggaaagcagaagggtggcatgggctggaacaatcc

SEQ ID NO: 409622 - DNA, 120 bp, Artificial Sequence
  ENSG00000148180_56 (sequence is synthesized)
agaaagacttcccagagagccttgaaggatgagaaagatttggattagtacctctcaaagtggcttttgcaaaatactcaagctggaggcaggatatggtgaagaaaagtggttcttggg

SEQ ID NO: 409623 - DNA, 120 bp, Artificial Sequence
  ENSG00000148180_57 (sequence is synthesized)
ctgggttcagtgactcactcctgtaatcccagcacccaaggatctcttgaggccaggagttcaagaccagcttaaacagcatagtgagaccccatgtctacaataaaataaaataaaata

SEQ ID NO: 409624 - DNA, 120 bp, Artificial Sequence
  ENSG00000148180_58 (sequence is synthesized)
agtaagctgggcactgtggctcataactgtagtcttagccactcgagaggctgagatgggaggatcattcaagtccaggagtttgaggttacagtgagctgtgattgtaccaatgcactg

SEQ ID NO: 409625 - DNA, 120 bp, Artificial Sequence
  ENSG00000148180_59 (sequence is synthesized)
cagcctgggacagagtgaaaccctgttgaaaggaaggaagagagagagagagcggaaggaaggagagagagagagaaagagagaaaggaaggaaggaaaggaaagagagagggaaagaga

SEQ ID NO: 409626 - DNA, 120 bp, Artificial Sequence
  ENSG00000148180_60 (sequence is synthesized)
atgaaagaaagaaaaaaagaaaggaaagaaaaaagaaagagggaaagaaagaaaagcagttcttggttcaataagatagggaaatactgtataaaacaaaaggcaagcaggtgtattcac

SEQ ID NO: 409627 - DNA, 120 bp, Artificial Sequence
  ENSG00000148180_61 (sequence is synthesized)
cataggatttgacagagcctttattatgcacatgcgcgttgtataacagtcagggagggtgagtgagaagcattccctatgcttatttgaccgtggaactctttccttgcagaatgtctt

SEQ ID NO: 409628 - DNA, 120 bp, Artificial Sequence
  ENSG00000148180_62 (sequence is synthesized)
aggggactagtgtgcctttgggaaacgccggttttgaggaaggaattgttgcagtttttttgatttagaaagtggctacaggggtccttgttagtggagtatgggattcaaaggggtggc

SEQ ID NO: 409629 - DNA, 120 bp, Artificial Sequence
  ENSG00000148180_63 (sequence is synthesized)
agaaagatgcagtgggcagggaatctctcacttcttagctgtgtggccttgggcaaattttattcctttcctaaacctcagtttcctactctgaaacagtctcaaacaagataatgggta

SEQ ID NO: 409630 - DNA, 120 bp, Artificial Sequence
  ENSG00000148180_64 (sequence is synthesized)
tgaaagtcctgagttaactgagaatcactgtgttgctggaaagcccctggtccacaagccagaatttcctttacctcaattctgtccccttcttccatatctgcttccctgggccttctc

SEQ ID NO: 409631 - DNA, 120 bp, Artificial Sequence
  ENSG00000148180_65 (sequence is synthesized)
ggtctgatcagggacttgggtacatccacgtgaacaaatgcatagatgcaggtgggcaaaccacagggaccagcattgttcacgtacagatatgtctgtatgcaaagactcccacaaatg

SEQ ID NO: 409632 - DNA, 120 bp, Artificial Sequence
  ENSG00000148180_66 (sequence is synthesized)
tagactcacaccacgggtatagtgcgtacttggactttgattgacatatagacttcctggcaccttctgttcatatgtacgtcttgtgtcctttttcacatgcttataaatatataacag

SEQ ID NO: 409633 - DNA, 120 bp, Artificial Sequence
  ENSG00000148180_67 (sequence is synthesized)
tcatgggcaaacactctgggcttttgcccaccaggtgtgcacatgtgcaccatcatgaatgcccacacatgtatactcgggtatgttgtttaaggtcccacatgtgtatgtcatacatgt

SEQ ID NO: 409634 - DNA, 120 bp, Artificial Sequence
  ENSG00000148180_68 (sequence is synthesized)
agttgcacatgcccatgatctatggcaatgtgtgtgggatgcccttacccaggcccaccttatagatgtgtgacgctttgtacacacttgtctcacaaatccctggagcgcagacctgca

SEQ ID NO: 409635 - DNA, 120 bp, Artificial Sequence
  ENSG00000148180_69 (sequence is synthesized)
tctgttcagtaggcaatttgaggtgaatttgaggaaaaaaaaaaacttccgctctaccccacctttttatttttaaaatacttttttattttaatttttgagacaggatcttattcattg

SEQ ID NO: 409636 - DNA, 63 bp, Artificial Sequence
  ENSG00000148180_70 (sequence is synthesized)
cttttttattttaatttttgagacaggatcttattcattgttgcctgagctggagtgcagggg

SEQ ID NO: 409637 - DNA, 120 bp, Artificial Sequence
  ENSG00000148180_71 (sequence is synthesized)
gccaggctaacttttgaattttttgtaggaatgaggtcttgccatgtcgctcaggctggtctccaacttctggggtcaaaccatcacctgcctcaacctcccaaaatgctgggattacaa

SEQ ID NO: 409638 - DNA, 120 bp, Artificial Sequence
  ENSG00000148180_72 (sequence is synthesized)
gcatgagtcaccatgctggccctgcctcacttttgaggctgtttttccatcaaacctgatcactttagggagcaagggagatcagtttcttgcacaactccccgactaccctgagaggtg

SEQ ID NO: 409639 - DNA, 120 bp, Artificial Sequence
  ENSG00000148180_73 (sequence is synthesized)
ggactggaacccaaggctgtgctgtgagtgtgagccgcattctccagtggggagggccaggtcctctgcagagctaaggagggcagtctcttagcatccccagagggccagctttgtgct

SEQ ID NO: 409640 - DNA, 120 bp, Artificial Sequence
  ENSG00000148180_74 (sequence is synthesized)
agaataaggtcagaaagagaccactgagccccaatcccctcttttctcttctgactatttctggtagtttttggcccatttagtcacatggtgggattgccagccattgtgcgttgagga

SEQ ID NO: 409641 - DNA, 120 bp, Artificial Sequence
  ENSG00000148180_75 (sequence is synthesized)
cgtatcaatagaggcaagattcactaggaaaaggagaagaccatgagctctgctccatgtcacttggttcctgcttctctgggggcatccaattccagcttttggagagagcagaatggt

SEQ ID NO: 409642 - DNA, 120 bp, Artificial Sequence
  ENSG00000148180_76 (sequence is synthesized)
gattattattatgggaagggacctggacaccaaccatggcttgggagggacagtgggagtgaaaataggctctgaagccacagggatggaggttcagattctggcttagccacctaatag

SEQ ID NO: 409643 - DNA, 120 bp, Artificial Sequence
  ENSG00000148180_77 (sequence is synthesized)
ctgtgtgagtaggtgacttcatctttctggacctcagattcctcttctgtaaaatgagagtgataatctgtgcctcctggcctggctgcgaggatgcagtgacatcttttaaaggtaggc

SEQ ID NO: 409644 - DNA, 120 bp, Artificial Sequence
  ENSG00000148180_78 (sequence is synthesized)
ggtagaaggtgttcagtagctatagttatcacaattagccggtaggcgaaatatctgaagcgctgtctggaggcagaggagcaggagtgttctcctggagtttctgagtcagggagacaa

SEQ ID NO: 409645 - DNA, 120 bp, Artificial Sequence
  ENSG00000148180_79 (sequence is synthesized)
ggtggaagggacctctgatggacagatctggacatgtgagcagatgcaggatgtgtctggaggaggtcagactccatggggagggtcacagtggatgtccttgtgatccttgcctgcctg

SEQ ID NO: 409646 - DNA, 120 bp, Artificial Sequence
  ENSG00000148180_80 (sequence is synthesized)
ggaactcagctcccggggagtgtggagtgtgcctggtgcaatggaaatcagaagtcttgggctgaggccttggttttgcatttgacatactgtgtgatcttgggcactttacttaccctt

SEQ ID NO: 409647 - DNA, 120 bp, Artificial Sequence
  ENSG00000148180_81 (sequence is synthesized)
tctgggcctcagattcctgatctgggctaaaatgggtgtttcccaagtgcattataacgtcagttctctgagaggctaattggcatcctgtagaaattatgtagaaaacatctaactgta

SEQ ID NO: 409648 - DNA, 120 bp, Artificial Sequence
  ENSG00000148180_82 (sequence is synthesized)
tggtcagataaattcatgggcaacagtggattttaaaatgttcgagtttgtttactgtaggacttttaacttgttcatttacaggggggcttttcatgaagatgatctggtttgggaaat

SEQ ID NO: 409649 - DNA, 120 bp, Artificial Sequence
  ENSG00000148180_83 (sequence is synthesized)
gctaagctagaagttcataaactctttcggtactatcttgtgggaattctcttggaaaccattggcccagatgtttcccagaggccctgagatgttctgagaggacccatcaatatcctc

SEQ ID NO: 409650 - DNA, 120 bp, Artificial Sequence
  ENSG00000148180_84 (sequence is synthesized)
ccctgattctctaaggctcatcttggggaagaggacagaggagagggaggcagtaggaggacagagagaaagggagacggtggggagaaagagagagagagagacactattatgattatt

SEQ ID NO: 409651 - DNA, 120 bp, Artificial Sequence
  ENSG00000148187_0 (sequence is synthesized)
gcagctgcggtcgccgccgtcgcacgagtctttccttagtaacctgggcgatagctgtggatgtttccaaggattgtcttcagtcatggccttgggattaaagtgcttccgcatggtcca

SEQ ID NO: 409652 - DNA, 120 bp, Artificial Sequence
  ENSG00000148187_1 (sequence is synthesized)
ccctacctttcgcaattatcttgcagcctctatcagacccgtttcagaagttacactgaagacagtgcatgaaagacaacatggccataggcaatacatggcctattcagctgtaccagt

SEQ ID NO: 409653 - DNA, 120 bp, Artificial Sequence
  ENSG00000148187_2 (sequence is synthesized)
ccgccattttgctaccaagaaagccaaagccaaagggaaaggacagtcccaaaccagagtgaatattaatgctgccttggttgaggatataatcaacttggaagaggtgaatgaagaaat

SEQ ID NO: 409654 - DNA, 120 bp, Artificial Sequence
  ENSG00000148187_3 (sequence is synthesized)
gaagtctgtgatagaagctctcaaggataatttcaataagactctcaatataaggacctcaccaggatcccttgacaagattgctgtggtaactgctgacgggaagcttgctttaaacca

SEQ ID NO: 409655 - DNA, 120 bp, Artificial Sequence
  ENSG00000148187_4 (sequence is synthesized)
gattagccagatctccatgaagtcgccacagctgattttggtgaatatggccagcttcccagagtgtacagctgcagctatcaaggctataagagaaagtggaatgaatctgaacccaga

SEQ ID NO: 409656 - DNA, 120 bp, Artificial Sequence
  ENSG00000148187_5 (sequence is synthesized)
agtggaagggacgctaattcgggtacccattccccaagtaaccagagagcacagagaaatgctggtgaaactggccaaacagaacaccaacaaggccaaagactctttacggaaggttcg

SEQ ID NO: 409657 - DNA, 120 bp, Artificial Sequence
  ENSG00000148187_6 (sequence is synthesized)
caccaactcaatgaacaagctgaagaaatccaaggatacagtctcagaggacaccattaggctaatagagaaacagatcagccaaatggccgatgacacagtggcagaactggacaggca

SEQ ID NO: 409658 - DNA, 120 bp, Artificial Sequence
  ENSG00000148187_7 (sequence is synthesized)
tctggcagtgaagaccaaagaactccttggatgaaagtccactggggccagcaatactccagagcccagtttctgctggatcccatgggtggcacattgggacttctctccctcccccat

SEQ ID NO: 409659 - DNA, 120 bp, Artificial Sequence
  ENSG00000148187_8 (sequence is synthesized)
ctacacagaagactgtcaccatgctgacagaagcctgtccttgtaaggcccagccttccaggggaacactcagacatgttcattctcttcctgcttctgctctgggccggtgggtggctc

SEQ ID NO: 409660 - DNA, 120 bp, Artificial Sequence
  ENSG00000148187_9 (sequence is synthesized)
tcagaaaatacttgctgctggcaaaaggcctgtactcaggcatttgctttgacttgatgttgccaagggactgaggccattggcaggcttagtaccacctgctcctcatcttaggagtct

SEQ ID NO: 409661 - DNA, 120 bp, Artificial Sequence
  ENSG00000148187_10 (sequence is synthesized)
ccttttcaaataattaggctctgttcccattttaaaactctgatattggccttcacctgtgactggacactttactagaggcccattttcactaaacaataaaatctaaataaattggaa

SEQ ID NO: 409662 - DNA, 120 bp, Artificial Sequence
  ENSG00000148187_11 (sequence is synthesized)
ggaataacaaccacaaaggaaagaatagagttggtctggattgatgatcactgaggatctgtatgtgaggcacccataacagtagttttgcctgtgagtcgtcttcacacatgctgtttt

SEQ ID NO: 409663 - DNA, 120 bp, Artificial Sequence
  ENSG00000148187_12 (sequence is synthesized)
ctctgcctggctctctcttcccctccttacctggccagtcctgtttatcatcaggccttgtcttggatatcacgtcctctgggaagtcttcttttcccctctaacctaggaccctcatta

SEQ ID NO: 409664 - DNA, 120 bp, Artificial Sequence
  ENSG00000148187_13 (sequence is synthesized)
ccggctctcatagcacagtctactgctttgtacgaattctaagtattcttgttgcacttaattagcctgtatatcctcagaactttgtgtaatgcctggagcatagtaggcagtcatatg

SEQ ID NO: 409665 - DNA, 120 bp, Artificial Sequence
  ENSG00000148187_14 (sequence is synthesized)
ttgtatcgtgaataaattgcacatagtagctacccagcaaatgctgacttcttttctttctagtcttaacactccctttctatcattttccactcttgtacttgttctcaacatttactt

SEQ ID NO: 409666 - DNA, 120 bp, Artificial Sequence
  ENSG00000148187_15 (sequence is synthesized)
ggtagtgacatacctttcctgcagggcctgcccattgttgacagacaagtagtttattgtggcttatcttcggatactgggttattaggtttttttccctccaattattttttattcatt

SEQ ID NO: 409667 - DNA, 120 bp, Artificial Sequence
  ENSG00000148187_16 (sequence is synthesized)
cattcattcctaatatagccattatgagttaggtatagttctaggcattatttataatcttgacagtaaacttaagagatgtgtattatcttcatttacaaataggaaaactaagtcttg

SEQ ID NO: 409668 - DNA, 120 bp, Artificial Sequence
  ENSG00000148187_17 (sequence is synthesized)
acagtattaggtaatttgcccaaagtaacaaagcaaagctgatcagtggtagaaggttttcatgattcattgtcagcgtcatttacatagaggtgaagtttcttgtgcagggttacacac

SEQ ID NO: 409669 - DNA, 120 bp, Artificial Sequence
  ENSG00000148187_18 (sequence is synthesized)
ctagcaagtagcagagctggcattcaaattgaggcctgatgtgctaatgtaaaaggaaaaaaacaaactttttttccttttgtactttcacactcaacatggaacacttctgtgacaagg

SEQ ID NO: 409670 - DNA, 120 bp, Artificial Sequence
  ENSG00000148187_19 (sequence is synthesized)
tgtgtgagtttgtttcccccacacaccaagcaattctccagcagacaccaactgggtatcctataattcaattcatttctgacattacctggaaatagtgtcagatcccacaggttgagg

SEQ ID NO: 409671 - DNA, 120 bp, Artificial Sequence
  ENSG00000148187_20 (sequence is synthesized)
gctccatctcccaagactgccaacacttttgatgccagtcatgagtctgggccacccatactcctgactgaccaactacaaactagagtccttgatttcctttggttcagttaatttcct

SEQ ID NO: 409672 - DNA, 120 bp, Artificial Sequence
  ENSG00000148187_21 (sequence is synthesized)
aggacagctcacacaactcagggaaacacgttcactggtttattataaaagatacagctgaacagcccaatgaaggaggtacacagggcaaggttgagggagagggagagggtgtggagc

SEQ ID NO: 409673 - DNA, 120 bp, Artificial Sequence
  ENSG00000148187_22 (sequence is synthesized)
ttccatgccttctctgggctcacactctctcagcacctcaccaatctggaaggaaccactgtgtcctgctgccttcattagcatttagtgagcaccaattgtttgtcaggtgctgaacta

SEQ ID NO: 409674 - DNA, 120 bp, Artificial Sequence
  ENSG00000148187_23 (sequence is synthesized)
tgtactggcaatacaaaaatgggaaagatatgacccctgttttgggggggtacatagtgcactgaactaaattgctgtctataataatctattgggtggaaaagtaggaagttcattcca

SEQ ID NO: 409675 - DNA, 120 bp, Artificial Sequence
  ENSG00000148187_24 (sequence is synthesized)
gttctgcaaggtgtctgctttcagaatggagcccactttggtggtggcaaggcctggctgagttctttcaaagcaacatccaacttctctttgctctttgacttcctccagattctctcc

SEQ ID NO: 409676 - DNA, 120 bp, Artificial Sequence
  ENSG00000148187_25 (sequence is synthesized)
tgtgctggaggtaataagggttgcacttccctctttacttacactggtgaaacatgcagtgaggattcaaggtcaaaattgggtcaaagttaaactaacacagtctcctgccccacttac

SEQ ID NO: 409677 - DNA, 120 bp, Artificial Sequence
  ENSG00000148187_26 (sequence is synthesized)
ctgtcctctaaccccatccaccagccctaagtggtcatcacatgatcagaagtcagctgggggaagagcagggatagatagagcaattaaggagcctcttttggggtaagccacatgaca

SEQ ID NO: 409678 - DNA, 120 bp, Artificial Sequence
  ENSG00000148187_27 (sequence is synthesized)
ggggctttgcaacagtctttcatgagtggccgaaatcccccactcactgcaaatgtgcttctcaaagatgcaggattttttaataaacagaggaaatgataaattatgttgtaattccac

SEQ ID NO: 409679 - DNA, 120 bp, Artificial Sequence
  ENSG00000148187_28 (sequence is synthesized)
tccaaaggcatttggttcttaacagccaaatcctctgtagtctttaaataaacaaaaacttatttggtgaacagacagggaggaaaatgaaagattttctgtacttgggttccacatgtc

SEQ ID NO: 409680 - DNA, 120 bp, Artificial Sequence
  ENSG00000148187_29 (sequence is synthesized)
aacaatttctctcctgtgtgtatgttggccaaagctgtatcatgataaatgaataaaggaaaacctcgagcccagggcagtcagacagctcagcaaatggctttcagatgattactcaat

SEQ ID NO: 409681 - DNA, 120 bp, Artificial Sequence
  ENSG00000148187_30 (sequence is synthesized)
ttcagttgacatttatcaaagagtttctctgtgactctgtgtcagggctgtagtggtgacagggacaagaatgagactacctgtttggatgtgctgagaatgagtaatgctggagcaatt

SEQ ID NO: 409682 - DNA, 120 bp, Artificial Sequence
  ENSG00000148187_31 (sequence is synthesized)
cattctccatctcttctctcctacagcctctctcaaaaagaaacactgggtatggaaattctcacacttgccagaagaattaaccacctcttctattcagtttaatgactttcaaagtcc

SEQ ID NO: 409683 - DNA, 82 bp, Artificial Sequence
  ENSG00000148187_32 (sequence is synthesized)
taaccacctcttctattcagtttaatgactttcaaagtcctatgaaatattcaggccagagagaatttgagaatttttttcc

SEQ ID NO: 409684 - DNA, 120 bp, Artificial Sequence
  ENSG00000148187_33 (sequence is synthesized)
ttggaatgcagaaagttaaaaaaaaaatctcaccaggccctactcctttaaaattaggtatatatctttccagacctcctttctctgtgcatatatgtgtgtgtgtgtgtgtgtgttcgt

SEQ ID NO: 409685 - DNA, 87 bp, Artificial Sequence
  ENSG00000148187_34 (sequence is synthesized)
ttctctgtgcatatatgtgtgtgtgtgtgtgtgtgttcgtttcattttgttttgcctttgagacagtgtctcactctgtcgcccatc

SEQ ID NO: 409686 - DNA, 120 bp, Artificial Sequence
  ENSG00000148187_35 (sequence is synthesized)
tgagtagctgggactgcagctatgcaccaccacacctggcttttttttttttgctttgtttcctaggctggtctcaaacacctggcctcaagcggtccttctgcctcagcctcccaaagc

SEQ ID NO: 409687 - DNA, 120 bp, Artificial Sequence
  ENSG00000148187_36 (sequence is synthesized)
aagcgctgggattacaagtgtgagccactctgcctggccatatataatttttttttttttttttttgcaatggagtcttgctctgtcgcccacgctggagtgcattggcgcaatctcggc

SEQ ID NO: 409688 - DNA, 120 bp, Artificial Sequence
  ENSG00000148187_37 (sequence is synthesized)
gtgatacagtattccataatatgggtctaccataacttaattcactattagcccatgacactatttaaaaattatttcacatgcattggagaatgtttaaagatgatttttttttttaag

SEQ ID NO: 409689 - DNA, 120 bp, Artificial Sequence
  ENSG00000148187_38 (sequence is synthesized)
aaaaaagaaaggcccctattctaagattatctgataaggtctgctctttctccttcaacctcaggctaacatttattgaatgcctacagtcggccaggttccatgctagaccctttacac

SEQ ID NO: 409690 - DNA, 120 bp, Artificial Sequence
  ENSG00000148187_39 (sequence is synthesized)
gtgttcccacattgaaacttctgatgaatccttgttaatgtaggtgttatgattatctgtgtttttctgtgaaaaaaacaggttcagaaaggatatttaacttgcccaaggtcacacagg

SEQ ID NO: 409691 - DNA, 120 bp, Artificial Sequence
  ENSG00000148187_40 (sequence is synthesized)
tagtaagtgctagaatgaaatttcaaacccacatctgaccttgaagtaggtccttaatcagtgtgctttggttcccaagtcttcgctgaacacttactcaaaagggacctcgcgctgttc

SEQ ID NO: 409692 - DNA, 120 bp, Artificial Sequence
  ENSG00000148187_41 (sequence is synthesized)
tggacctggacggtgatgtgagagaagcagaagtcttgctttcataaaacacatagcaagctgttcctaattaatgactgcaagtaaaatagcatagtacctggcacattgtaaacacca

SEQ ID NO: 409693 - DNA, 120 bp, Artificial Sequence
  ENSG00000148187_42 (sequence is synthesized)
aagaaatggtagctcttatggagacagtaaagattacatattaatcccccacctgtttggccaacttctctagaatatgtcagagagcaagcaaaatgttcaccaagcagtgaataatga

SEQ ID NO: 409694 - DNA, 120 bp, Artificial Sequence
  ENSG00000148187_43 (sequence is synthesized)
taataataacaacaataacagtattgacagatcagtaactaatatttgcttggtgctttttagttttcaaactgcttctacattctttgttgcattgaaaccactcagtgaaactttgcg

SEQ ID NO: 409695 - DNA, 120 bp, Artificial Sequence
  ENSG00000148187_44 (sequence is synthesized)
gttagacaaagagtgatcataaaagcttgtatcctcaaaagccactttgaggctttcttttgccctaatagacggtcatttttcatgatgtgcatttgaaatgatatgttccctattttg

SEQ ID NO: 409696 - DNA, 120 bp, Artificial Sequence
  ENSG00000148187_45 (sequence is synthesized)
ggggtacaaattttgatatgtatgcaggaaatgtagcttatagagtatgttgtttaggttttccattattttttgaccctttgatgagtcttggactgaaagtggtgtgtttcagacccc

SEQ ID NO: 409697 - DNA, 120 bp, Artificial Sequence
  ENSG00000148187_46 (sequence is synthesized)
tgctattaacatttctgttccttcttgcattttctgctttatgaaaatggattctgctttgtgaaagtactgctgtgttgttttatacatagcgctccagacgcttacatcttctttatt

SEQ ID NO: 409698 - DNA, 120 bp, Artificial Sequence
  ENSG00000148187_47 (sequence is synthesized)
tcattcagtgctcttagtctgaattttatcttgttgtatatcaggattacagctcttgcttgctttttgtttacatttgctttccccatttcttgatttttaagctttcagaatcactat

SEQ ID NO: 409699 - DNA, 120 bp, Artificial Sequence
  ENSG00000148187_48 (sequence is synthesized)
tttaggtgtttctttttttttttggaattgggttttgttcgatgaaccattctgaaactccttttttcttatttttatttttaattgtaaaatatacataaaatttactctcttaaccat

SEQ ID NO: 409700 - DNA, 82 bp, Artificial Sequence
  ENSG00000148187_49 (sequence is synthesized)
ctcctgagtagctgggattacagccacgtgcaccgccacacctggctaacttttaaaattatttgtagagacaaggtcttgg

SEQ ID NO: 409701 - DNA, 120 bp, Artificial Sequence
  ENSG00000148187_50 (sequence is synthesized)
aaagtgctgggattacaggcttgagcttctgtgcccagccttaaccattttaagtgtacagttcagtagcatttagtacatttacattgttgtacaaccatcctccagaactctttacca

SEQ ID NO: 409702 - DNA, 120 bp, Artificial Sequence
  ENSG00000148187_51 (sequence is synthesized)
ccagaactctttaccatgcagaactgacgctctatacccattacacaaccccagttcccccttctcagcccccagcaaccaccatttatgaatttataaatttgattaggaacatcatgt

SEQ ID NO: 409703 - DNA, 120 bp, Artificial Sequence
  ENSG00000148187_52 (sequence is synthesized)
taagtggaatcatacaggatttgtctttttgtgactagtttatttcactgaagcatgatgtccttaaagtatatccatattgtagcatgtatcagaatttcctttctaaggctgagtaat

SEQ ID NO: 409704 - DNA, 120 bp, Artificial Sequence
  ENSG00000148187_53 (sequence is synthesized)
aggctgagtaatctgttgtatatatgaataagtatatataaagctccttttaacagacacttaaattcatttacatttatttataatagtgatatgtttagtagaacccatttacttttt

SEQ ID NO: 409705 - DNA, 120 bp, Artificial Sequence
  ENSG00000148187_54 (sequence is synthesized)
tattaacataagtgatttggtgttttagccctaagcagataaaggattagagattagaatgaggaagagggttgcttcacatagacgaagttcagtttttgtggaataaacaaataagtg

SEQ ID NO: 409706 - DNA, 120 bp, Artificial Sequence
  ENSG00000148187_55 (sequence is synthesized)
gtggaataaacaaataagtgattatctctgtctgcctctttgtctctctctctctctcttttttttttaataagagatgaggggtctccctatgttgcccaggctggacttgaactcctg

SEQ ID NO: 409707 - DNA, 120 bp, Artificial Sequence
  ENSG00000148187_56 (sequence is synthesized)
tgcagatatgcacagctgtgcccgaagatccctttctcttacattcctttcttctggtctgtgtttcagtccatcctacgctgttaagttagaacaacctgaaacagcttttatcatgtc

SEQ ID NO: 409708 - DNA, 120 bp, Artificial Sequence
  ENSG00000148187_57 (sequence is synthesized)
actcttctctcagaaaccttcattggttccctgttgcctgctgaattatgtaaactcttcaccctggcattcagtaacttctgcaatctgggcctgatgtattcctttaattgtgatgca

SEQ ID NO: 409709 - DNA, 120 bp, Artificial Sequence
  ENSG00000148187_58 (sequence is synthesized)
tctcttacaactaccctgataccaccagtgcttaagcgaaacggaattattagcttttctgaaagctaataattttgtgctgctttctctcaccttcaagccttttcttaggctattttc

SEQ ID NO: 409710 - DNA, 120 bp, Artificial Sequence
  ENSG00000148187_59 (sequence is synthesized)
tttgcctagtgtatgctcccttaaaccacttccccaccagcaggcaaaacttacctagtcttataagcccttcttggtcccatgttcttccttacactaactcattcattcattatccat

SEQ ID NO: 409711 - DNA, 120 bp, Artificial Sequence
  ENSG00000148187_60 (sequence is synthesized)
cccgatgcttctcctgattcattcattcattatccataccgatgcctctcctgatccctaaacctgcctatgcctattaagcgcttggatttgcctcaagcatctgacgttcagctaccc

SEQ ID NO: 409712 - DNA, 120 bp, Artificial Sequence
  ENSG00000148187_61 (sequence is synthesized)
acctgcgtttcctctctcaggaaaagcctcaccatccacccaggtgccaagccaggacactgggagccacttttgcctccctgtccctctcccctcatccaataagtcaccaagtcctgt

SEQ ID NO: 409713 - DNA, 120 bp, Artificial Sequence
  ENSG00000148187_62 (sequence is synthesized)
caattctcccttcaacagacctttcctttccttcctgggcacacccttgagtggtgctcaccagggaacagatgtggcaaatgttccaggctggcctcacccgggtctctagacacttgg

SEQ ID NO: 409714 - DNA, 120 bp, Artificial Sequence
  ENSG00000148187_63 (sequence is synthesized)
ctcagaggcagaacatggctaaccctagataagccttgtgtgaattcctggcaagaaagtcccctgctgtcttagtctgtgcattctctgactagcacagtatgtggcgagagcaggtgt

SEQ ID NO: 409715 - DNA, 120 bp, Artificial Sequence
  ENSG00000148187_64 (sequence is synthesized)
tgaggaaatgtttgtctaattctaaggggcctgccaggccttgatacaaatggcgtcacatttacatgaataacccagagtttctctaattatcctcacctgcctgcccaggaccttcaa

SEQ ID NO: 409716 - DNA, 120 bp, Artificial Sequence
  ENSG00000148187_65 (sequence is synthesized)
cctcatctgctaagtcggcctcaggcgtttctagacatcttaagggaccgcatggcatccaaggccactggcatctactgtactcccctcccaccggcgcttccctttgctagcatctgc

SEQ ID NO: 409717 - DNA, 120 bp, Artificial Sequence
  ENSG00000148187_66 (sequence is synthesized)
agccacaagtgacacttaagggagatttacctccactactgggagtgttagtgtctgtgacaaaagtgctggttgctgggctgagggggtctgagcatgctgggtggaagccctgaagag

SEQ ID NO: 409718 - DNA, 120 bp, Artificial Sequence
  ENSG00000148187_67 (sequence is synthesized)
gaagggagaaggtctctgcccacatcccacatttgccgtgcatccctgagttccaaagcagcctcgctaggctctagagcccctaaatctccaaagacagcagctcctccgcgagctagc

SEQ ID NO: 409719 - DNA, 120 bp, Artificial Sequence
  ENSG00000148187_68 (sequence is synthesized)
tgcccctgaccgaggctcacagcttgcctaggggagggcagggcaaaagtccctgctattctcttcctttcctggctcaggccttgatccaaatagctcccttcttccaagacactactc

SEQ ID NO: 409720 - DNA, 120 bp, Artificial Sequence
  ENSG00000148187_69 (sequence is synthesized)
cccaggcctcctcttcctgataataatagtggctaacaagttttactagattttaggcaactcaaggagctagctgttattttgttcattctacaagtgaggaaggaagcacagacagtg

SEQ ID NO: 409721 - DNA, 120 bp, Artificial Sequence
  ENSG00000148187_70 (sequence is synthesized)
agtggttaagttacatgtccagagacacacagagggcctagtgcagtagctcatgcctggaatctcagcactttgggtggctgaggtgggcgagtcacttgaggtcaggagttcgggacc

SEQ ID NO: 409722 - DNA, 120 bp, Artificial Sequence
  ENSG00000148187_71 (sequence is synthesized)
gagccaagattgcaccactgcactgcagcatgggcaacagagcgagactctgtctccacacagaggaacacttggcatcagggagtctgttgtctgacccgcaactaggcagcctcatac

SEQ ID NO: 409723 - DNA, 120 bp, Artificial Sequence
  ENSG00000148187_72 (sequence is synthesized)
ctaggcagcctcatacattattttcactaagagaccagtggggctggaaagggacttgtgaggtgctaagtagccagtgagagcttctgggtcctgtcgcagttttgccctttcttccct

SEQ ID NO: 409724 - DNA, 120 bp, Artificial Sequence
  ENSG00000148187_73 (sequence is synthesized)
caaaaaaaggtctctccacttctctgtgggaaaggcttgggcaagttctctggtttccaatgaggccagagaacctgtgctgatccctaacatcttcacccatcgggggcaaaataagta

SEQ ID NO: 409725 - DNA, 120 bp, Artificial Sequence
  ENSG00000148187_74 (sequence is synthesized)
aaataaaagtaatgtagcaaatgtttttataaaagtgttaatttaaattaacggactattacctattcttagagctttctcttttgtttttggcattaaaatatcctttctattataaaa

SEQ ID NO: 409726 - DNA, 120 bp, Artificial Sequence
  ENSG00000148187_75 (sequence is synthesized)
atgagacggaagtcctgagagtttgaccgatttaaggtcacgtgcctaggaagtgctggaaccaagactcggagttttctctaagtttagtgcctttattttgttttaaaccacactgtt

SEQ ID NO: 409727 - DNA, 120 bp, Artificial Sequence
  ENSG00000148187_76 (sequence is synthesized)
gcatttccccccattttggaaagctttatagttggaaagaatgaaaacctgatctgaccccttcattttatggttgaaacaaaatctacgtaggagaaatcacttggtacaagtcacaag

SEQ ID NO: 409728 - DNA, 120 bp, Artificial Sequence
  ENSG00000148187_77 (sequence is synthesized)
agggccaccaatttgtgacctctgcattagtatttggagcagaccctccaggaagtccttttatactagactgaccattgcagaatattgcatggagcacagtgcttccaaaactggaag

SEQ ID NO: 409729 - DNA, 120 bp, Artificial Sequence
  ENSG00000148187_78 (sequence is synthesized)
tccttagtaacctgggcgatagctgatgagacggaagtcctgagagtttgaccgatttaaggtcacgtgcctaggaagtgctggaaccaagactcggagttttctctaatggatgtttcc

SEQ ID NO: 409730 - DNA, 120 bp, Artificial Sequence
  ENSG00000148187_79 (sequence is synthesized)
cagcttcccagaggtaagatggccttgctaaaatctctctccgtggtctcttttggaatggaggagactgggtcatatcaggaggaagtgttccttcagcttaggatgaaacaagagaga

SEQ ID NO: 409731 - DNA, 120 bp, Artificial Sequence
  ENSG00000148187_80 (sequence is synthesized)
aagagaacttaaggataaggcaaagctcttttcctgttgccagattccttttctgttaaactcagatgctacagaggctaggtaagttgtttgaatacccaaacgggtcccatctaagaa

SEQ ID NO: 409732 - DNA, 120 bp, Artificial Sequence
  ENSG00000148187_81 (sequence is synthesized)
aaacaatactggagatgcagtgattggtgcttggccagcgtgaaaaggctctggtgagctggagagcctgtaccttgtgtgagtggaatgcctctgcccagctcctgctgatcattgcca

SEQ ID NO: 409733 - DNA, 120 bp, Artificial Sequence
  ENSG00000148187_82 (sequence is synthesized)
ggcacaatgtaggcctggtaatcagtgttacctgatactacgatttttatttccagaagaagctagtaacacaaatttttatgtgacatctttattctgtaaatgttgatgactaattga

SEQ ID NO: 409734 - DNA, 120 bp, Artificial Sequence
  ENSG00000148187_83 (sequence is synthesized)
aactggctgtttgaccttgggcaagttgcttcactctctgggcctccatttcctcatctgctaatataagtgtacagctgcagctatcaaggctataagagaaagtggaatgaatctgaa

SEQ ID NO: 409735 - DNA, 120 bp, Artificial Sequence
  ENSG00000148187_84 (sequence is synthesized)
acaggacaatccggggcggggcctgagatgcagtcctgcgagggcggcctcctgtaagacctcttagcgggcccatcgctgaggtgcagggacatgtcgcggccgaactcacctcgtggc

SEQ ID NO: 409736 - DNA, 120 bp, Artificial Sequence
  ENSG00000148187_85 (sequence is synthesized)
ctcggcgtggtgctctcagctcatgcccggaaaccaggtcccgacgccgcggtcagacggacctctagacgcgtccgcctcaatgccgccagctgccaggccgcccgtgacgcgttaagc

SEQ ID NO: 409737 - DNA, 120 bp, Artificial Sequence
  ENSG00000148200_0 (sequence is synthesized)
cggaggggcgcggagcggcgcggagccgggcggctcggggcccagagagagccgcggccgggagctcgcgggctcctgacaacctcctcccctcggcggacgacgaccacggcgactagg

SEQ ID NO: 409738 - DNA, 120 bp, Artificial Sequence
  ENSG00000148200_1 (sequence is synthesized)
cgacgaccacggcgactagggcgccggtcatggcggagcaacaaacccggcgcggaccctaggcaccaccgcatggagcgggacgaaccgccgcctagcggagggggaggcggcgggggc

SEQ ID NO: 409739 - DNA, 120 bp, Artificial Sequence
  ENSG00000148200_2 (sequence is synthesized)
tcggcggggttcctggagcctcccgccgcgctccctccgccgccgcgcaacggtttctgtcaggatgaattggcagagcttgacccaggcactatttctgtttcagatgatcgggctgaa

SEQ ID NO: 409740 - DNA, 120 bp, Artificial Sequence
  ENSG00000148200_3 (sequence is synthesized)
caacgaacctgtctcatttgtggggaccgcgctacaggcttgcactatgggatcatctcctgtgagggctgcaaagggtttttcaagcggagcatttgcaacaaacgggtatatcgatgc

SEQ ID NO: 409741 - DNA, 120 bp, Artificial Sequence
  ENSG00000148200_4 (sequence is synthesized)
agtcgtgacaagaactgtgtcatgtctcggaagcagaggaacaggtgccagtactgccgcctgctcaaatgcctccagatggggatgaaccggaaggctatcagagaagatggcatgcct

SEQ ID NO: 409742 - DNA, 120 bp, Artificial Sequence
  ENSG00000148200_5 (sequence is synthesized)
ggaggccggaataagagcattgggccagtccagatatcggaagaagaaatcgaaaggatcatgtctgggcaggagtttgaggaagaggccaatcactggagcaaccatggtgatagtgac

SEQ ID NO: 409743 - DNA, 120 bp, Artificial Sequence
  ENSG00000148200_6 (sequence is synthesized)
cacagttcccctgggaacagggcttcggagagcaaccagccctcaccaggctccacactgtcttccagtaggtctgtggaactgaatggattcatggccttcagggaacagtacatggga

SEQ ID NO: 409744 - DNA, 120 bp, Artificial Sequence
  ENSG00000148200_7 (sequence is synthesized)
atgtctgtgcctccacattaccaatatataccgcacctttttagctattctggccactcaccacttctgccccaacaagctcgcagcctggatccccagtcatacagtctgattcaccag

SEQ ID NO: 409745 - DNA, 120 bp, Artificial Sequence
  ENSG00000148200_8 (sequence is synthesized)
ctgttatcagccgaggacctggaaccattgggcacgcccatgttgattgaagatggatacgctgtgacacaggcagaactatttgccctgctttgccgcctggccgacgagctgctcttt

SEQ ID NO: 409746 - DNA, 120 bp, Artificial Sequence
  ENSG00000148200_9 (sequence is synthesized)
aggcagattgcctggatcaagaaactgcctttcttctgcgagctctcaatcaaggattacacgtgcctcttgagctctacgtggcaggagctaatcctgctgtcttccctcaccgtttac

SEQ ID NO: 409747 - DNA, 120 bp, Artificial Sequence
  ENSG00000148200_10 (sequence is synthesized)
agcaagcagatctttggggaactggctgatgtcactgccaagtactcgccctccgatgaagaactacacagatttagtgatgaagggatggaggtgatcgagcggctcatctacctctat

SEQ ID NO: 409748 - DNA, 120 bp, Artificial Sequence
  ENSG00000148200_11 (sequence is synthesized)
cacaagttccatcagctaaaggtcagcaacgaggagtatgcttgcatgaaagcaattaacttcctaaatcaagatatcaggggtctgaccagtgcctcacagctggaacaattgaataaa

SEQ ID NO: 409749 - DNA, 120 bp, Artificial Sequence
  ENSG00000148200_12 (sequence is synthesized)
cgatactggtacatttgccaggattttactgaatataaatacacacatcagccgaaccgctttcctgatctcatgatgtgcttacctgagattcgatatattgcaggaaagatggtgaat

SEQ ID NO: 409750 - DNA, 120 bp, Artificial Sequence
  ENSG00000148200_13 (sequence is synthesized)
gtgcccctggagcagctgcccctcctctttaaggtggtgctgcattcctgcaagaccagtgtgggcaaggaatgacctgttccaggcgccctcctcaggccaaccacagcgtcttgggtg

SEQ ID NO: 409751 - DNA, 120 bp, Artificial Sequence
  ENSG00000148200_14 (sequence is synthesized)
ggcaggacaggctctggagggaaaagccagagagaccaagatggaggctgtggagcagcatttcccgttgcctccatagcaagaagagtttttgtttgtttgtctgtttttttaacctca

SEQ ID NO: 409752 - DNA, 120 bp, Artificial Sequence
  ENSG00000148200_15 (sequence is synthesized)
tttttctatatatttatttcacgacagagttgaatgtatggccttcaacatgatgcacatgcttttgtgtgaatgcagccaatgcattttcttacagtttacagaatgtgaagatgttta

SEQ ID NO: 409753 - DNA, 120 bp, Artificial Sequence
  ENSG00000148200_16 (sequence is synthesized)
atgttacagtgttgtcattgtttagaaatagttcttttgtattttgagggagagggtgggatggggctaagatgactatttccataatgttgacaaagatgactacctcaatggaaatgg

SEQ ID NO: 409754 - DNA, 120 bp, Artificial Sequence
  ENSG00000148200_17 (sequence is synthesized)
ggggtgtggccatccctactttttccacattttctcagcagactcatacatttgtctgtcagagagcaaattgccttttttagccacagaattgccagataaaacggcacactgtaaggg

SEQ ID NO: 409755 - DNA, 120 bp, Artificial Sequence
  ENSG00000148200_18 (sequence is synthesized)
ggcaaagtgttgttaggagattcactaagcaaggttggtgagacggcaacagggtaggaggtgaggattgagccacgtcctttccttggaaagcgtgaaaattaagagagtagggcacag

SEQ ID NO: 409756 - DNA, 120 bp, Artificial Sequence
  ENSG00000148200_19 (sequence is synthesized)
tgaccatatttaaggcaggtgtccttccacccaacaagtcctaagggcagaagaatttctgttctcacaccttgctgccccccttacccctgcaccaccatcattgtctaccactgcgaa

SEQ ID NO: 409757 - DNA, 120 bp, Artificial Sequence
  ENSG00000148200_20 (sequence is synthesized)
ctttccatctaggcaaagtcctggcaatcacttgatccacaggactcgcctcccagctccctcggggcccccagctacctagtttccttacctggatctcctgaggcccaccttcctcct

SEQ ID NO: 409758 - DNA, 120 bp, Artificial Sequence
  ENSG00000148200_21 (sequence is synthesized)
tcccactcccttacacatttgacttcctattggccctttgaaaaaccagctgagcagaatgccatgttctgaagcctggtgcccactactgatttattctcctttcaccttgttttcttc

SEQ ID NO: 409759 - DNA, 120 bp, Artificial Sequence
  ENSG00000148200_22 (sequence is synthesized)
aaagggtagtagggcaaggccagactgcaaaaagaatagacactccccttttgaaatctgttcctctcccctccccttcctaccgcaccctcaggtctaaatccgaaaacttcaggcttt

SEQ ID NO: 409760 - DNA, 120 bp, Artificial Sequence
  ENSG00000148200_23 (sequence is synthesized)
tttaaacaatgagaaggaccattcacctgtctgctgaccagaaatgttgcccctaagttcttctccaagttctccttttctctccagagtgagaccagttttcctcagggacccaggaca

SEQ ID NO: 409761 - DNA, 120 bp, Artificial Sequence
  ENSG00000148200_24 (sequence is synthesized)
caaagcccaaggcccagagtggctcagctgccccttacttcagcagtggactggccagccaaggcctggagggctggagccagaagcacctggaagggaaggggggctttaaactacctc

SEQ ID NO: 409762 - DNA, 120 bp, Artificial Sequence
  ENSG00000148200_25 (sequence is synthesized)
aggttcctaatggcccggctgctacctctgcagacatggcctggactccttgacctctcactacctgccccaccttatcccaggacgtgttccttaccctcttgactttggccagcgcta

SEQ ID NO: 409763 - DNA, 120 bp, Artificial Sequence
  ENSG00000148200_26 (sequence is synthesized)
caccaggtctgtctttgaactctttcaggtgcttgtcctgcctacacccaggtatctttcacagccagtgtggcaagcagaccacttagttggctgcatgcctgggtaggttggaagggc

SEQ ID NO: 409764 - DNA, 120 bp, Artificial Sequence
  ENSG00000148200_27 (sequence is synthesized)
ccacggcaccttcttctgcctatttagtcaaaggctgtttgctgtctcctcaactcaacctagtaaagctacccaggagggcaccacgtcgtgtgcatactgggtagtccatgtctgatt

SEQ ID NO: 409765 - DNA, 120 bp, Artificial Sequence
  ENSG00000148200_28 (sequence is synthesized)
gtaattgtttctttctggtgaaatgttacgggtaccagcagagtgatgattttggcccttgatggatctaaaactcggaacattactcctcaatgccgtttccccagttgctctgagaag

SEQ ID NO: 409766 - DNA, 120 bp, Artificial Sequence
  ENSG00000148200_29 (sequence is synthesized)
cttgttcccctgaattttatttaaccaactagatcacattctttggccacaggtcagactctgagctgctttcctccagatcgggaaggagacacatatcacagatgccttctctaagac

SEQ ID NO: 409767 - DNA, 120 bp, Artificial Sequence
  ENSG00000148200_30 (sequence is synthesized)
agctcctgtgtacagcatcgttctttgctgaggcctctatctgtccaattattatttttgaaattgcttttcaaattaaacattttacccgttgtgttgggtgtcaaaagaaattgctct

SEQ ID NO: 409768 - DNA, 120 bp, Artificial Sequence
  ENSG00000148200_31 (sequence is synthesized)
ctgatgaggcaagaacatgtctctccaacaacgtagtattgaacagagcaagttgttaatttgtggagtaggggaaaggttctgcaagttgccattgtacaaatccagttttacaaatgt

SEQ ID NO: 409769 - DNA, 120 bp, Artificial Sequence
  ENSG00000148200_32 (sequence is synthesized)
ttgcagcagattccacagaacaaagagcccattcattgccgagagccctgcagaatctcagagcaaagtggctgtgtgttccgagccggagcctgacctgtggaccgtctttaatgtctt

SEQ ID NO: 409770 - DNA, 120 bp, Artificial Sequence
  ENSG00000148200_33 (sequence is synthesized)
ctgcaccagtccttttatgacgtgggctttttttaaacagggtaaagtgaatgtgttgcattgcaaactcaggtattatgaggagaaggtaggagtgtagctagcagcgtggagacatta

SEQ ID NO: 409771 - DNA, 120 bp, Artificial Sequence
  ENSG00000148200_34 (sequence is synthesized)
ggtcagccactagatgtatttgtgaatttggtttgaaggacacggagaaaggttggaggggaggtttggtgtgtttgttttttgctttcttccccataatgtttggttaacaggtagcct

SEQ ID NO: 409772 - DNA, 120 bp, Artificial Sequence
  ENSG00000148200_35 (sequence is synthesized)
ttttgcgagtggaaggagagaaaagttgtgcatgttttctctaatttctctttctgccctctctctgatccccaaccaccaaaagcactcactttgagtgaggatttttttttttttttt

SEQ ID NO: 409773 - DNA, 120 bp, Artificial Sequence
  ENSG00000148200_36 (sequence is synthesized)
aggcgtgagccactgcacccagccgagtgagaatttttatgccataaaaatacgactctgaaagctacatggaaaaggagaatcccacctccttgcactacattgaaacatgcaagcctt

SEQ ID NO: 409774 - DNA, 120 bp, Artificial Sequence
  ENSG00000148200_37 (sequence is synthesized)
ctccttgcactacattgaaacatgcaagcctttccctccctctcctttttgatgttttcttgtcccaagacaaaagtttggcatcttggaacttattcatgctctctggctgcctttgta

SEQ ID NO: 409775 - DNA, 120 bp, Artificial Sequence
  ENSG00000148200_38 (sequence is synthesized)
gacttttggagtcctttgcaaggtttggtggtctcgtcgttaatctggagaaattccccagaatctgtctcaaagcgctcaacctggctcagaggacacccagcccctatgccccactca

SEQ ID NO: 409776 - DNA, 120 bp, Artificial Sequence
  ENSG00000148200_39 (sequence is synthesized)
caagagaggtgggcaagcccccagggataggaggaagtaagcaggatcctccctgtcctgtttcccagaaccagagcaaggaatggggaatcctaagggtttctgtggcatcactgaatg

SEQ ID NO: 409777 - DNA, 120 bp, Artificial Sequence
  ENSG00000148200_40 (sequence is synthesized)
tcacccactccacatcaacctgcctctcacctgccaccctttttcagggaggtgagtacctgccatggtcactgttaccagatccttaaaatcctgggctctgagctaggtgcattgctc

SEQ ID NO: 409778 - DNA, 120 bp, Artificial Sequence
  ENSG00000148200_41 (sequence is synthesized)
tgttacccatttcctacatttgtttgtttgttcttgatttcctgggggaatgggactgatggagacagacaaacccactgtgggcagcatctaagccatgtccaaggttggtcgaattaa

SEQ ID NO: 409779 - DNA, 120 bp, Artificial Sequence
  ENSG00000148200_42 (sequence is synthesized)
gggaaccctggcctctcagcaggacagaaagctgagctgtggttccaggccctcctctctgggcccctggtgtgtatcttttttccttgttgcttttgaaatttttgcaattattttaag

SEQ ID NO: 409780 - DNA, 120 bp, Artificial Sequence
  ENSG00000148200_43 (sequence is synthesized)
cttttgaaatttttgcaattattttaagaatccagtctttcagaccagcccttttattaagctttgaatttttaattgatttttttaaagtaaaaaaaaaaaaaacccaaaaaacaaaca

SEQ ID NO: 409781 - DNA, 120 bp, Artificial Sequence
  ENSG00000148200_44 (sequence is synthesized)
actcccctgcctccccctaccccagcccatgagagttcccttgcactcccctctgcctttgcaactgatcatcctccctttctccttggcttgaagcatctatgtccagtatctgtgaaa

SEQ ID NO: 409782 - DNA, 120 bp, Artificial Sequence
  ENSG00000148200_45 (sequence is synthesized)
tgatgttttatctgtgtgtcaggatgagaaacggcagtcattccaccaagtgttggaaactggttagcctggagacaagggtttctggggccacagctcagggatgtgtatttaattaca

SEQ ID NO: 409783 - DNA, 120 bp, Artificial Sequence
  ENSG00000148200_46 (sequence is synthesized)
ggatccccagaaactcctctctaggctgccacagcaacattttttctgggcttgggagccatacctgaactgtttcctccaaggcgggaactccagagagcctgccaagtctggagcaag

SEQ ID NO: 409784 - DNA, 120 bp, Artificial Sequence
  ENSG00000148200_47 (sequence is synthesized)
ctggggcttctgctttggccagacctgggccaccatgagacttgaaggcttctagctgtcctacgacacgagccacggtggccctgcctctccccgctcatagaagcctggtccctctgt

SEQ ID NO: 409785 - DNA, 120 bp, Artificial Sequence
  ENSG00000148200_48 (sequence is synthesized)
ctagcccagttcccatctagcatccgtcttctgggcctgaagccctaaatggaccacagcctgcacaggaatcaactgtaggctcaaagggaggcggtgagtaaggtcagagcctgctcc

SEQ ID NO: 409786 - DNA, 120 bp, Artificial Sequence
  ENSG00000148200_49 (sequence is synthesized)
aagcccaagaacaaaagttgtgttatgggtggaggctagtcccccagatctagccctgccgtctttgccctttaatgaccattgttttctttctctaaaatgtcttgtaataggtgataa

SEQ ID NO: 409787 - DNA, 120 bp, Artificial Sequence
  ENSG00000148200_50 (sequence is synthesized)
tgttgttgattcaaatttccatgaaaaagaaaaaaaaaactacctcttaagcgacatcctggtcgattcctctctgaggaatcctgtgggaaaagaatactgtagctcctgctctgttta

SEQ ID NO: 409788 - DNA, 120 bp, Artificial Sequence
  ENSG00000148200_51 (sequence is synthesized)
catgtttctgtcgggaaagaagccccgcctgccctggggtgttggtgtttttgtctgtgttgccatcccaggtctgccataggggctggtggctgcattgtgatgtctgggctgtgtctg

SEQ ID NO: 409789 - DNA, 120 bp, Artificial Sequence
  ENSG00000148200_52 (sequence is synthesized)
gggattccttcccacctacccagccagggactagtcacccccctgaagaggcctccatttccttcctgtgctccagggcatagggagcaccactcccacagacaccacctttaagggctc

SEQ ID NO: 409790 - DNA, 120 bp, Artificial Sequence
  ENSG00000148200_53 (sequence is synthesized)
tagtggcacacacatccacgagcctacccccaggttacctgccctaggtccacctccacccacagtcctgtgtgtaggaatcgaggaaacgggatgtccctgagcccttgtctccaaagg

SEQ ID NO: 409791 - DNA, 120 bp, Artificial Sequence
  ENSG00000148200_54 (sequence is synthesized)
gccggccaagggctgcccgccagcctgactccatcaaccctccatgaccaaatgatagctggcgggctctgcaggctacccaggccctctgctacctcccaccctgccagctggcaaggg

SEQ ID NO: 409792 - DNA, 120 bp, Artificial Sequence
  ENSG00000148200_55 (sequence is synthesized)
atgggccctgttctgtgaattgactacctgtggaaatgtgaccaattagtgtgaaatgcatgtttagcaagtgttaggtactgtatttgaaccaataaatgtgaatccttctgcacatgg

SEQ ID NO: 409793 - DNA, 120 bp, Artificial Sequence
  ENSG00000148204_0 (sequence is synthesized)
gcggagccagccaggccgccctcccgttctcacagcagccgagcagagcgcagagcgggctgccatggcgctggccaggcctgggaccccggacccccaggccctggcctctgtcctgct

SEQ ID NO: 409794 - DNA, 120 bp, Artificial Sequence
  ENSG00000148204_1 (sequence is synthesized)
actgctgctctgggcccctgccctttccctcctggctgggacggtgccttcagagccccccagtgcctgtgcctcagacccgtgcgctccagggaccgagtgccaggctaccgagagtgg

SEQ ID NO: 409795 - DNA, 120 bp, Artificial Sequence
  ENSG00000148204_2 (sequence is synthesized)
tggctatacctgtgggcccatggagccccggggctgtgccacccagccatgccaccacggcgctctgtgtgtgccccagggtccagatcccaccggcttccgctgctactgcgtgccggg

SEQ ID NO: 409796 - DNA, 120 bp, Artificial Sequence
  ENSG00000148204_3 (sequence is synthesized)
tttccagggcccacgctgcgagctggacatcgatgagtgtgcatcccggccgtgccaccatggggccacctgccgcaacctggccgatcgctacgagtgccattgcccccttggctatgc

SEQ ID NO: 409797 - DNA, 120 bp, Artificial Sequence
  ENSG00000148204_4 (sequence is synthesized)
aggcgtgacctgcgagatggaggtggacgagtgcgcctcagcgccctgcctgcacgggggctcgtgcctggacggcgtgggctccttccgctgtgtgtgcgcgccaggctacgggggcac

SEQ ID NO: 409798 - DNA, 120 bp, Artificial Sequence
  ENSG00000148204_5 (sequence is synthesized)
ccgttgccagctggacctcgacgagtgccagagccagccgtgcgcacatgggggcacgtgccacgacctggtcaacgggttccggtgcgactgcgcgggcaccggctacgagggcacgca

SEQ ID NO: 409799 - DNA, 120 bp, Artificial Sequence
  ENSG00000148204_6 (sequence is synthesized)
ctgcgagcgggaggtgctggagtgcgcatcggcgccctgcgagcacaacgcgtcctgcctcgagggcctcgggagcttccgctgcctctgttggccaggctacagcggcgagctgtgcga

SEQ ID NO: 409800 - DNA, 120 bp, Artificial Sequence
  ENSG00000148204_7 (sequence is synthesized)
ggtggacgaggacgagtgtgcatcgagcccctgccagcatgggggccgatgcctgcagcgctctgacccggccctctacgggggtgtccaggccgccttccctggcgccttcagcttccg

SEQ ID NO: 409801 - DNA, 120 bp, Artificial Sequence
  ENSG00000148204_8 (sequence is synthesized)
ccatgctgcgggtttcctgtgccactgccctcctggctttgagggagccgactgcggtgtggaggtggacgagtgtgcctcacggccatgcctcaacggaggccactgccaggacctgcc

SEQ ID NO: 409802 - DNA, 120 bp, Artificial Sequence
  ENSG00000148204_9 (sequence is synthesized)
caatggcttccagtgtcactgcccagatggctacgcagggccgacatgtgaggaagatgtggatgaatgcctgtcggatccctgcctgcacggcggaacctgcagtgacactgtggcagg

SEQ ID NO: 409803 - DNA, 120 bp, Artificial Sequence
  ENSG00000148204_10 (sequence is synthesized)
ctatatctgcaggtgcccagagacctggggtgggcgcgactgttctgtgcagctcactggctgccagggccacacctgcccgctggctgccacctgcatccctatcttcgagtctggggt

SEQ ID NO: 409804 - DNA, 120 bp, Artificial Sequence
  ENSG00000148204_11 (sequence is synthesized)
ccacagttacgtctgccactgcccacctggtacccatggaccgttctgtggccagaataccaccttctctgtgatggctgggagccccattcaggcatcagtgccagctggtggccccct

SEQ ID NO: 409805 - DNA, 120 bp, Artificial Sequence
  ENSG00000148204_12 (sequence is synthesized)
gggtctggcactgaggtttcgcaccacactgcccgctgggaccttggccactcgcaatgacaccaaggaaagcttggagctggcattggtggcagccacacttcaggccacactctggag

SEQ ID NO: 409806 - DNA, 120 bp, Artificial Sequence
  ENSG00000148204_13 (sequence is synthesized)
ctacagcaccactgtgcttgtcctgagactgccggacctggccctaaacgatggccattggcaccaggtggaggttgtgctccatctagcgaccctggagctacggctctggcatgaggg

SEQ ID NO: 409807 - DNA, 120 bp, Artificial Sequence
  ENSG00000148204_14 (sequence is synthesized)
ctgccctgcccggctctgtgtggcctctggtcctgtggccctggcttccacggcttcggcaactccgctgcctgccgggatctcctctgcccagctgggggacgcgacctttgcaggctg

SEQ ID NO: 409808 - DNA, 120 bp, Artificial Sequence
  ENSG00000148204_15 (sequence is synthesized)
cctccaggacgtgcgtgtggatggccacctcctgctgcctgaggatctcggtgagaacgtcctcctgggctgtgagcgccgagagcagtgccggcctctgccttgtgtccacggagggtc

SEQ ID NO: 409809 - DNA, 120 bp, Artificial Sequence
  ENSG00000148204_16 (sequence is synthesized)
ctgtgtggatctgtggactcatttccgttgcgactgtgcccggccccatagaggtcccacgtgcgctgatgagattcctgctgccacctttggcttgggaggcgccccaagctctgcctc

SEQ ID NO: 409810 - DNA, 120 bp, Artificial Sequence
  ENSG00000148204_17 (sequence is synthesized)
ctttctgctccaagagctgccaggtcccaacctcacagtgtctttccttctccgcactcgggagtccgctggcctgttgctccagtttgccaatgactccgcagctggcctaacagtatt

SEQ ID NO: 409811 - DNA, 120 bp, Artificial Sequence
  ENSG00000148204_18 (sequence is synthesized)
cctgagtgagggtcggatccgggctgaggtgccgggcagtcctgctgtagtgctccctgggcgctgggatgatgggctccgtcacctggtgatgctcagcttcgggcctgaccagctgca

SEQ ID NO: 409812 - DNA, 120 bp, Artificial Sequence
  ENSG00000148204_19 (sequence is synthesized)
ggacctggggcagcacgtgcacgtgggtgggaggctccttgctgccgacagccagccctggggtgggcccttccgaggctgcctccaggacctgcgactcgatggctgccacctcccctt

SEQ ID NO: 409813 - DNA, 120 bp, Artificial Sequence
  ENSG00000148204_20 (sequence is synthesized)
ctttcctctgccactggataactcaagccagcccagcgagctcggcggcaggcagtcctggaacctcactgcgggctgcgtctccgaggacatgtgcagtcctgacccctgtttcaatgg

SEQ ID NO: 409814 - DNA, 120 bp, Artificial Sequence
  ENSG00000148204_21 (sequence is synthesized)
tgggacttgcctcgtcacctggaatgacttccactgtacctgccctgccaatttcacggggcctacgtgtgcccagcagctgtggtgtcccggccagccctgtctcccacctgccacgtg

SEQ ID NO: 409815 - DNA, 120 bp, Artificial Sequence
  ENSG00000148204_22 (sequence is synthesized)
tgaggaggtccctgatggctttgtgtgtgtggcggaggccacgttccgcgagggtccccccgccgcgttcagcgggcacaacgcgtcgtcagggcgcttgctcggcggcctgtcgctggc

SEQ ID NO: 409816 - DNA, 120 bp, Artificial Sequence
  ENSG00000148204_23 (sequence is synthesized)
gcaatggctcgctggcggggggcgtgcgcggaggccatggcctgcccggcgctgtgctgcccataccggggccgcgcgtggccgatggtgcctggcaccgcgtgcgtctggccatggagc

SEQ ID NO: 409817 - DNA, 120 bp, Artificial Sequence
  ENSG00000148204_24 (sequence is synthesized)
ctcgcgctggctgctgtggctggatggtgccgccaccccggtggcgctgcgcggcctggccagtgacctgggcttcctgcagggcccgggtgctgtgcgcatcctgctggctgagaactt

SEQ ID NO: 409818 - DNA, 80 bp, Artificial Sequence
  ENSG00000148204_25 (sequence is synthesized)
ccttggcgcggccccggcccggcgcggcccctggcgcccgagagcacttcgcgtcttggcctgggacgccggccccgatc

SEQ ID NO: 409819 - DNA, 120 bp, Artificial Sequence
  ENSG00000148204_26 (sequence is synthesized)
gatcctcggctgccgcggcgcgcccgtgtgtgcgccctcgccctgtctgcacgacggtgcctgccgtgacctcttcgacgcctttgcctgcgcctgcggcccggggtgggaaggcccgcg

SEQ ID NO: 409820 - DNA, 120 bp, Artificial Sequence
  ENSG00000148204_27 (sequence is synthesized)
ctgcgaagcccacgtcgacccctgtcactccgccccctgcgcccgtggccgctgtcacacgcaccccgacggccgcttcgagtgccgctgcccgcctggcttcgggggcccgcgctgcag

SEQ ID NO: 409821 - DNA, 120 bp, Artificial Sequence
  ENSG00000148204_28 (sequence is synthesized)
gttgcctgtcccatccaaggagtgcagcctgaatgtcacctgcctcgatggcagcccatgtgagggtggctctcccgctgccaactgcagctgcctggagggtcttgctggccagaggtg

SEQ ID NO: 409822 - DNA, 120 bp, Artificial Sequence
  ENSG00000148204_29 (sequence is synthesized)
tcaggtccccactctcccctgtgaagccaacccctgcttgaatgggggcacctgccgggcagctggaggggtgtctgaatgtatctgcaatgccagattctccggccagttctgtgaagt

SEQ ID NO: 409823 - DNA, 120 bp, Artificial Sequence
  ENSG00000148204_30 (sequence is synthesized)
ggcgaagggcctgcccctgccgctgccattcccactgctggaggtggccgtacctgcagcctgtgcctgcctcctcctcctcctcctgggcctcctttcagggatcctggcagcccgaaa

SEQ ID NO: 409824 - DNA, 120 bp, Artificial Sequence
  ENSG00000148204_31 (sequence is synthesized)
gcgccgccagtctgagggcacctacagcccaagccagcaggaggtggctggggcccggctggagatggacagtgtcctcaaggtgccaccggaggagagactcatctaggccagcctggc

SEQ ID NO: 409825 - DNA, 120 bp, Artificial Sequence
  ENSG00000148204_32 (sequence is synthesized)
tgctggcaccagcacctggaggtcctgaatggtttctacctggagacccaaggaagctgcttccagggctcgggacattgctacggaagtgtccccttggctggcagcctctgcctctgc

SEQ ID NO: 409826 - DNA, 120 bp, Artificial Sequence
  ENSG00000148204_33 (sequence is synthesized)
ctctgccccatcctggatggaggacgaggggagcaactcagggaaacagaggcctagagaggctgcggacttctccatcccaccctcggggttccgccttggcaggtgtacggctgtgcg

SEQ ID NO: 409827 - DNA, 120 bp, Artificial Sequence
  ENSG00000148204_34 (sequence is synthesized)
tgggagggcacacgtgggttcacagtgtgttcaggagtgtgtgtatctggaggagtgtgtgtgtgagtgtgtacctgggcctgtgttagtctgcagatgctagtgtgagtgtgtcctgac

SEQ ID NO: 409828 - DNA, 120 bp, Artificial Sequence
  ENSG00000148204_35 (sequence is synthesized)
atggctccagggcgtgtctgccgtgtttactgtgtgtctatgactgtgatgggtgtagctgatcccaggaggtggcggctgcgccatggggtcaaccattacagtcctagggcaggggcg

SEQ ID NO: 409829 - DNA, 120 bp, Artificial Sequence
  ENSG00000148204_36 (sequence is synthesized)
gcccaaggctgcatgttctccaggaggccaggccggggttgcccaggcacctccttccccgcctctgggggctgctcctgctgtggaggcagctgggaagtcagggaaggccactagcag

SEQ ID NO: 409830 - DNA, 120 bp, Artificial Sequence
  ENSG00000148204_37 (sequence is synthesized)
aggctgagtgggcttctggctcctagaacaaatgtcccttcaggcaggtctgtctgccagaagccagagccagtcatgcgagggaaccacagacccacccgccccctcagccggagcagc

SEQ ID NO: 409831 - DNA, 120 bp, Artificial Sequence
  ENSG00000148204_38 (sequence is synthesized)
ccgagggagcagaggaggggctgcctggagcttcccaccctgctgtggtcatttgtcaaagggggaaggcacccactgcctacctcacagggctgttgtgaggatcagagaggacgacag

SEQ ID NO: 409832 - DNA, 120 bp, Artificial Sequence
  ENSG00000148204_39 (sequence is synthesized)
tggggaaagaatctggaagtcttcaactgccgtctgatgggaaggaccgtctgggtgtccttctgggatgaggatgacagagcaacccttctcctgccctgaacccccccagctcacctg

SEQ ID NO: 409833 - DNA, 120 bp, Artificial Sequence
  ENSG00000148204_40 (sequence is synthesized)
accacctctggttctccagctccggtccttcctagcagcctggtgagctcactccttcccctgatgactggctgcctctacacagactcggcgagaggacttgaaggaagccctctgggt

SEQ ID NO: 409834 - DNA, 120 bp, Artificial Sequence
  ENSG00000148204_41 (sequence is synthesized)
tgtctgctgagtacaggggctcagtgaacactggcgctgcctctgagtcggggctgggcctgcagaggccgactcagaggagactctgctgcttgctcccagccccttccccggcgatgc

SEQ ID NO: 409835 - DNA, 120 bp, Artificial Sequence
  ENSG00000148204_42 (sequence is synthesized)
ccatcacactgtgacctcccatccctgaagggcacctgcctgagggcctggcctccttccagcttcatggacctggagatgtgccctttcatccttcctgcttcccaggccagtagatcc

SEQ ID NO: 409836 - DNA, 120 bp, Artificial Sequence
  ENSG00000148204_43 (sequence is synthesized)
gtttacacttttgggtcgacagtcagcttttccttttggttttggcgggtcccagaggcatgggtgtccagtccaatgtggggagccacgtgacaacgtgggggactgggacatgggact

SEQ ID NO: 409837 - DNA, 120 bp, Artificial Sequence
  ENSG00000148204_44 (sequence is synthesized)
gggaagtcagcagacgctgggatagagagggccctgaacaccaggctcaggggcttgcttggtccttatcctgtaggaggtgggaccacctttccctgaactttctctacaacccttggg

SEQ ID NO: 409838 - DNA, 120 bp, Artificial Sequence
  ENSG00000148204_45 (sequence is synthesized)
agcgtggggaggaggcggctggttccagggtcagtttactaagttagagatttggaaaacctgtgtcagctgtaactcctaggatattttatgtggaacctaacatgcagatgaaagctg

SEQ ID NO: 409839 - DNA, 120 bp, Artificial Sequence
  ENSG00000148204_46 (sequence is synthesized)
agaagtctgccaggtctgtggatgagtcgcttcccttccctggtcctcatgtccttatctgtgacatgaggaggacagtttaatttgataaatttcctgataaaatacagatcaaaacac

SEQ ID NO: 409840 - DNA, 120 bp, Artificial Sequence
  ENSG00000148204_47 (sequence is synthesized)
attcctgagcaggctccgaaggaggcagctgggccaggcagggagctctgcctcctccccacttccccagcctcagtgcccgcccaccactctcaacctgtctggagggcatggcaatgg

SEQ ID NO: 409841 - DNA, 120 bp, Artificial Sequence
  ENSG00000148204_48 (sequence is synthesized)
cattcctgagccagacaggtcacggttgacccaggaagagccatgtgccaggatggccgccaagcctcactgagcatgtgcagcagtggcagcctctcagacatagagggggctccctgg

SEQ ID NO: 409842 - DNA, 120 bp, Artificial Sequence
  ENSG00000148204_49 (sequence is synthesized)
gtgacatctccagagacccccttgtcccccagacacccctgggtagactgtgtctgacccttcacaaataggaaatgagagctcgggtcgaaatgctcacaatttcctgcgtgtctcaga

SEQ ID NO: 409843 - DNA, 120 bp, Artificial Sequence
  ENSG00000148204_50 (sequence is synthesized)
tggttgttttcttaaatggtcgggccatactttaacttggtttatggaaatgaatccatttcaagattcatcaaatcaataaggtaaaaaggaaaaagaaagataataaacattcaatct

SEQ ID NO: 409844 - DNA, 120 bp, Artificial Sequence
  ENSG00000148215_0 (sequence is synthesized)
atgaactcagagaacctcacccgggccgcggttgcccctgctgaattcgtcctcctgggcatcacaaatcgctgggacctgcgtgtggccctcttcctgacctgcctgcctgtctacctg

SEQ ID NO: 409845 - DNA, 120 bp, Artificial Sequence
  ENSG00000148215_1 (sequence is synthesized)
gtgagcctgctgggaaacatgggcatggcgctgctgatccgcatggatgcccggctccacacacctatgtacttcttcctggccaacctctccctgctggatgcctgctattcctccgcc

SEQ ID NO: 409846 - DNA, 120 bp, Artificial Sequence
  ENSG00000148215_2 (sequence is synthesized)
atcggccccaagatgctagtggacctgctgctgccccgagccaccatcccttacacagcctgtgccctccagatgtttgtctttgcaggtctggctgatactgagtgttgcttgctggca

SEQ ID NO: 409847 - DNA, 120 bp, Artificial Sequence
  ENSG00000148215_3 (sequence is synthesized)
gccatggcctatgaccgctacgtggccatcagaaacccacttctctatacaacagctatgtcgcagcgtctatgcctggccttgctgggagcatcaggcctgggtggggcagtgagtgcc

SEQ ID NO: 409848 - DNA, 120 bp, Artificial Sequence
  ENSG00000148215_4 (sequence is synthesized)
gttcacacaaccctcaccttccgcctgagcttctgccgctcccggaagatcaatagcttcttctgcgatatccctccactgctggccatctcgtgcagtgacaccagtctcaatgaactc

SEQ ID NO: 409849 - DNA, 120 bp, Artificial Sequence
  ENSG00000148215_5 (sequence is synthesized)
cttctcttcgccatctgtggcttcatccagacagccacggtgttagctatcacggtgtcttatggcttcatcgctggggctgtgatccacatgcgctcggtcgagggcagtcggcgagca

SEQ ID NO: 409850 - DNA, 120 bp, Artificial Sequence
  ENSG00000148215_6 (sequence is synthesized)
gcctccaccggtggttcccacctcacagccgtggccatgatgtacgggacactcattttcatgtacctgcgccccagctccagctatgccctggacactgacaagatggcctctgtgttc

SEQ ID NO: 409851 - DNA, 120 bp, Artificial Sequence
  ENSG00000148215_7 (sequence is synthesized)
tataccctggtcatcccgtctctcaacccactcatctacagcctccgcaataaggaggtcaaggaggccctcaggcagacctggagccgattccactgtccagggcaggggtcccagtga

SEQ ID NO: 409852 - DNA, 120 bp, Artificial Sequence
  ENSG00000148218_0 (sequence is synthesized)
acgcggtctgtgggagaccggagcgggagacagcggtgacaggagcagcggccgggagcccttagggaggcagacagagcctgcagccaatgccccaggagccctcggttccaaccaact

SEQ ID NO: 409853 - DNA, 120 bp, Artificial Sequence
  ENSG00000148218_1 (sequence is synthesized)
gatgcccctgtgcccactggcccacgccatgcagccccagtccgttctgcacagcggctacttccacccactacttcgggcctggcagacagccaccaccaccctcaatgcctccaacct

SEQ ID NO: 409854 - DNA, 120 bp, Artificial Sequence
  ENSG00000148218_2 (sequence is synthesized)
catctaccccatctttgtcacggatgttcctgatgacatacagcctatcaccagcctcccaggagtggccaggtatggtgtgaagcggctggaagagatgctgaggcccttggtggaaga

SEQ ID NO: 409855 - DNA, 120 bp, Artificial Sequence
  ENSG00000148218_3 (sequence is synthesized)
gggcctacgctgtgtcttgatctttggcgtccccagcagagttcccaaggacgagcggggttccgcagctgactccgaggagtccccagctattgaggcaatccatctgttgaggaagac

SEQ ID NO: 409856 - DNA, 120 bp, Artificial Sequence
  ENSG00000148218_4 (sequence is synthesized)
cttccccaacctcctggtggcctgtgatgtctgcctgtgtccctacacctcccatggtcactgcgggctcctgagtgaaaacggagcattccgggctgaggagagccgccagcggctggc

SEQ ID NO: 409857 - DNA, 120 bp, Artificial Sequence
  ENSG00000148218_5 (sequence is synthesized)
tgaggtggcattggcgtatgccaaggcaggatgtcaggtggtagccccgtcggacatgatggatggacgcgtggaagccatcaaagaggccctgatggcacatggacttggcaacagggt

SEQ ID NO: 409858 - DNA, 120 bp, Artificial Sequence
  ENSG00000148218_6 (sequence is synthesized)
atcggtgatgagctacagtgccaaatttgcttcctgtttctatggccctttccgggatgcagctaagtcaagcccagcttttggggaccgccgctgctaccagctgccccctggagcacg

SEQ ID NO: 409859 - DNA, 120 bp, Artificial Sequence
  ENSG00000148218_7 (sequence is synthesized)
aggcctggctctccgagctgtggaccgggatgtacgggaaggagctgacatgctcatggtgaagccgggaatgccctacctggacatcgtgcgggaggtaaaggacaagcaccctgacct

SEQ ID NO: 409860 - DNA, 120 bp, Artificial Sequence
  ENSG00000148218_8 (sequence is synthesized)
ccctctcgccgtgtaccacgtctctggagagtttgccatgctgtggcatggagcccaggccggggcatttgatctcaaggctgccgtactggaggccatgactgccttccgcagagcagg

SEQ ID NO: 409861 - DNA, 120 bp, Artificial Sequence
  ENSG00000148218_9 (sequence is synthesized)
tgctgacatcatcatcacctactacacaccgcagctgctgcagtggctgaaggaggaatgatggagacagtgccaggcccaagaactagaactttaaaacgttcccggggcctcagacaa

SEQ ID NO: 409862 - DNA, 120 bp, Artificial Sequence
  ENSG00000148218_10 (sequence is synthesized)
gtgaaaaccaaagtaaatgctgcttttagaactgtgccctcatgccctcttcctgctcacatgctagcggggcccagcagccctgggtggttttgccagcatgctaactcttgtaactcg

SEQ ID NO: 409863 - DNA, 120 bp, Artificial Sequence
  ENSG00000148218_11 (sequence is synthesized)
cagctgcatcctatgagctctcccaagcttccccgcccctcccctgggtcagccgtgaggcccacctttgccaccctcagctctttcctctggtgtggcttcagcttgaaagcaacctgg

SEQ ID NO: 409864 - DNA, 120 bp, Artificial Sequence
  ENSG00000148218_12 (sequence is synthesized)
agtcgggggcacagcctttggggcctggctgggagagggtcttggagcattaggggaagaagagagcagtgggatcttggggcctgagaagccttggaacgcttctggcagcagagctgg

SEQ ID NO: 409865 - DNA, 120 bp, Artificial Sequence
  ENSG00000148218_13 (sequence is synthesized)
tgaggcctagatcgatatccctgggttagagttgaaatttgccgcaattccactggaaggcatttcccacgaggccagaggttgccaggctgcctgaggtctcctattctactctgaacc

SEQ ID NO: 409866 - DNA, 120 bp, Artificial Sequence
  ENSG00000148218_14 (sequence is synthesized)
ataaacccagagaagaattactcattaaccagcataaatactgcctgaggatcaaaactcagaggcaaagagggagttcctgactgctagaggtgccaccaccacaaacactttttattc

SEQ ID NO: 409867 - DNA, 120 bp, Artificial Sequence
  ENSG00000148218_15 (sequence is synthesized)
aggagatactttttgagaatctctgctctgttcctaggttcagtgctgggtcctgggaatacagcaggacagacctcagcttatctcttcatagaaattatacaaagagaattggggaga

SEQ ID NO: 409868 - DNA, 120 bp, Artificial Sequence
  ENSG00000148218_16 (sequence is synthesized)
cagctaagaagaaaacaaagaaataaagcagttacaaattgtgataagtgctttgaaggaaagaaggggtctgagacaacaacagggaaggggcctctcttgaaacagtagttgggaagg

SEQ ID NO: 409869 - DNA, 120 bp, Artificial Sequence
  ENSG00000148218_17 (sequence is synthesized)
aggcagacatgcaccagtgatgtggtgacaggtgctctgaaggaggtcaccaggacctgacctctttgaaggatcagaaaatacttccctgaaggactgacatttgagcctagacctgaa

SEQ ID NO: 409870 - DNA, 120 bp, Artificial Sequence
  ENSG00000148218_18 (sequence is synthesized)
gggtgagccatcaagctaagacaattggggaagagcattccagggagagggaggagttgtgcaaaggccctggggctccttctagctggaggaatgcaaggctagcttgtctggagcact

SEQ ID NO: 409871 - DNA, 120 bp, Artificial Sequence
  ENSG00000148218_19 (sequence is synthesized)
gagaggatggcctgaactgagtggagagagacagaccaggaccaaaccatgcagaggtcaagggccacattcaccttttcagagtgactcaatcaaatttgtagtttgtaaaagtatttt

SEQ ID NO: 409872 - DNA, 120 bp, Artificial Sequence
  ENSG00000148218_20 (sequence is synthesized)
aacagctctgcggcaaagtgcaaatgaaaagtcttgatggcatggactggagcggggacagtggggatggagaaaggggaatggattgtggatgtgtttagaaggtagattcgatgtgaa

SEQ ID NO: 409873 - DNA, 120 bp, Artificial Sequence
  ENSG00000148218_21 (sequence is synthesized)
ggatgaatctggcttgaccttctgggtggctgatgggccatttactgagatggggcagcctggaagaggaacagaagcagggtcggggtggagggagaatactaaacttagcttgagaca

SEQ ID NO: 409874 - DNA, 120 bp, Artificial Sequence
  ENSG00000148218_22 (sequence is synthesized)
ttttgcaataaggaagctatatctagagtgcttatgtgactcacctaaggccactcaacaagtttgtggcagaactggattagaactgcacagaaaacagccaagctgggatttgaaccc

SEQ ID NO: 409875 - DNA, 120 bp, Artificial Sequence
  ENSG00000148218_23 (sequence is synthesized)
atgtagtccaactccaaggcctctgcccctaaccactgtgccataccacctcccaataatcaacagcaaaattataggtctaacaatgttttatagacacccctccatttatgtgatggg

SEQ ID NO: 409876 - DNA, 120 bp, Artificial Sequence
  ENSG00000148218_24 (sequence is synthesized)
tttgcatcctgataaacccatcataagttgaaaatatgatcataagttgaaaatatgatcataagtcaaaaatgtatttaatatacctaacctaccaaacatcatagcttagcctagcct

SEQ ID NO: 409877 - DNA, 120 bp, Artificial Sequence
  ENSG00000148218_25 (sequence is synthesized)
gccttaaacatgctcagaacacttacattagcctacagtgggcaaaactatccaacacaaaatctatattgtaataaagttgtaaagaattttgaataaaaattcaatatttgaagtaca

SEQ ID NO: 409878 - DNA, 120 bp, Artificial Sequence
  ENSG00000148218_26 (sequence is synthesized)
aattaaccacgcatgatatagatgaaggcctaaggctcaaagagatgatagaacttggccacggtcacccaggcagtaagtggctgggatagaaagcaaggacctgccaaattcagagtc

SEQ ID NO: 409879 - DNA, 120 bp, Artificial Sequence
  ENSG00000148218_27 (sequence is synthesized)
caagttcttaaccacttaattccttcctgtaattaccgttcttttagtacagttgctagtgttgtcactgttattcttgttgttcctattattatttcaggccctgggcttggccaggca

SEQ ID NO: 409880 - DNA, 120 bp, Artificial Sequence
  ENSG00000148218_28 (sequence is synthesized)
tggggttggggagggagtgttgactggagcgggcatcagtatggctgggggtggcaaagtgagctgtcagcttgaaattcaaggcactggaagcaggctacttggattaaggacaggaat

SEQ ID NO: 409881 - DNA, 120 bp, Artificial Sequence
  ENSG00000148218_29 (sequence is synthesized)
cttaggaacaaaacaaactttgaaagaactcattcatcccatttggaaaattagaagaataacccttgcctgccatcctgagctcttgcagtaagacagaagctgagaaggtgctctgta

SEQ ID NO: 409882 - DNA, 120 bp, Artificial Sequence
  ENSG00000148218_30 (sequence is synthesized)
acctcctctccaagcccagctccccactgccctcttcctgccctgtccctgtctccgctgccctttagatcaggcaggcaggcaggcctagagcatccgccctgagacactgcctgttgg

SEQ ID NO: 409883 - DNA, 120 bp, Artificial Sequence
  ENSG00000148218_31 (sequence is synthesized)
ctgccttaagacgccccttccttctctgcccgcagcctccccagcctctgcattcctctgcttcctgtctgctctgctcagcctgcaggattgatcttcccaaagccaggtgtcaaccag

SEQ ID NO: 409884 - DNA, 120 bp, Artificial Sequence
  ENSG00000148218_32 (sequence is synthesized)
ccacagccatcctccttccccacctttgcccctttcttcccttcctaaggaaatattggcccccttctctccaccaggctgaacccactcatcctgcaaaaccaagttcaacgccctgtc

SEQ ID NO: 409885 - DNA, 84 bp, Artificial Sequence
  ENSG00000148218_33 (sequence is synthesized)
ctgtcgcccaggctagagtgcaatgggtgcactcgattcttctgcctcagcctccagaggaactctgactacagacagagcctg

SEQ ID NO: 409886 - DNA, 120 bp, Artificial Sequence
  ENSG00000148218_34 (sequence is synthesized)
cctcagcctccagaggaactctgactacagacagagcctgcagccaatgccccaggagccctcggttccaaccaactgatgcccctgtgcccactggcccacgccatgcagccccagtcc

SEQ ID NO: 409887 - DNA, 120 bp, Artificial Sequence
  ENSG00000148218_35 (sequence is synthesized)
gctcttacgcggtctgtgggagaccggagcgggagacagcggtgacaggagcagcggccgggagcccttagggaggcagcacccaaagcagaaacagtatgggcagagagacgcctactg

SEQ ID NO: 409888 - DNA, 120 bp, Artificial Sequence
  ENSG00000148218_36 (sequence is synthesized)
ccacttctcaacagggtggggacaggccagggcccaaggtgctccccaaaacccagtcatctgtcctgaagggctcctgagtgaaaacggagcattccgggctgaggagagccgccagcg

SEQ ID NO: 409889 - DNA, 120 bp, Artificial Sequence
  ENSG00000148218_37 (sequence is synthesized)
gggaagccagacactggatcccatcctcctcccaccatctccacttccatatttctttcctgcttcccaaccatccctctcagtcgcccccgcaccactggcccttcccacagctaccaa

SEQ ID NO: 409890 - DNA, 120 bp, Artificial Sequence
  ENSG00000148218_38 (sequence is synthesized)
aggaagactggataaaatgggcccctgagatggctgaaggcagctaaaggggcctaagagactatggggagaagggcagccagttcctaggcagccctgccccactgtttctgataagca

SEQ ID NO: 409891 - DNA, 120 bp, Artificial Sequence
  ENSG00000148218_39 (sequence is synthesized)
ggaggcagttgttccctcagcctcctgaaagcaatgaggagttgaggccacgggaatgcagctttggattccagaagccaaggacctgttacaaaggtggttttctgggaagcaaattag

SEQ ID NO: 409892 - DNA, 120 bp, Artificial Sequence
  ENSG00000148219_0 (sequence is synthesized)
ggctctctccgctccttagctcgggcgtcctggttcgcttcggcgtccgccgtctccgcagctgcctcctcttcctccttcgccaccgccgccaccgccgccgccgcccgcagcaccgca

SEQ ID NO: 409893 - DNA, 80 bp, Artificial Sequence
  ENSG00000148219_1 (sequence is synthesized)
ccccggctcggggctccgggggcggccgaggctctgcttccacccggggccgccgccactgctgccgctgctgctgctgt

SEQ ID NO: 409894 - DNA, 120 bp, Artificial Sequence
  ENSG00000148219_2 (sequence is synthesized)
ctgttcctgctcctgctgccgccgccgccgctgctggccggcgccaccgccgctgcctcgcgggagcccgacagcccgtgccggctgaagaccgtcacggtgtccacactgcccgccctg

SEQ ID NO: 409895 - DNA, 80 bp, Artificial Sequence
  ENSG00000148219_3 (sequence is synthesized)
ggagccgccgccgccgccgcgtccccgggctctcctggctctgccggcaccgccgccgagtcgcgcctcctgctctttgt

SEQ ID NO: 409896 - DNA, 120 bp, Artificial Sequence
  ENSG00000148219_4 (sequence is synthesized)
tcgcgcctcctgctctttgtgcgtaacgagctgccggggcgcatcgcggtgcaggacgacctggacaacaccgagctgcccttcttcaccctggagatgtctggcacagcagcggacatc

SEQ ID NO: 409897 - DNA, 120 bp, Artificial Sequence
  ENSG00000148219_5 (sequence is synthesized)
tcgctggtgcactggagacagcagtggctggagaatggcaccttgtacttccacgtctccatgagcagctccgggcagctggcccaagccaccgcccccactctccaggagccctcggag

SEQ ID NO: 409898 - DNA, 120 bp, Artificial Sequence
  ENSG00000148219_6 (sequence is synthesized)
attgttgaggagcagatgcacatcctccacatttctgtgatgggtggcctcatcgcgctgctgctgctgctgctggtgttcaccgtggcgctgtacgcccagcgacgttggcagaagcgt

SEQ ID NO: 409899 - DNA, 120 bp, Artificial Sequence
  ENSG00000148219_7 (sequence is synthesized)
cgccgcatcccccagaagagcgcaagcacagaagccactcatgagatccactacatcccatctgtgctgctgggtccccaggcgcgggagagcttccgttcatcccggctgcaaacccac

SEQ ID NO: 409900 - DNA, 120 bp, Artificial Sequence
  ENSG00000148219_8 (sequence is synthesized)
aattccgtcattggcgtgcccatccgggagactcccatcctggatgactatgactgtgaggaggatgaggagccacctaggcgggccaaccatgtctcccgcgaggacgagtttggcagc

SEQ ID NO: 409901 - DNA, 120 bp, Artificial Sequence
  ENSG00000148219_9 (sequence is synthesized)
caggtgacccacactctggacagtctgggacatccaggggaagagaaggtggactttgagaagaaaggaggaatcagctttgggagagccaaggggacgtcgggctcagaggcagacgat

SEQ ID NO: 409902 - DNA, 120 bp, Artificial Sequence
  ENSG00000148219_10 (sequence is synthesized)
gaaactcagctgacattctacacggagcagtaccgcagtcgccgccgcagcaaaggtttgctgaaaagcccagtgaacaagacagccctgacactgattgctgtgagttcctgcatcctg

SEQ ID NO: 409903 - DNA, 120 bp, Artificial Sequence
  ENSG00000148219_11 (sequence is synthesized)
gccatggtgtgtggcagccagatgtcttgtccactcactgtgaaggtgactctgcatgtgcccgagcacttcatagcagatggaagcagcttcgtggtgagtgaagggagctacctggac

SEQ ID NO: 409904 - DNA, 120 bp, Artificial Sequence
  ENSG00000148219_12 (sequence is synthesized)
atctccgactggttaaacccggccaagctttccctgtattaccagatcaatgccacctccccatgggtgagggacctctgtggacaaaggacgacagatgcctgtgagcagctctgcgac

SEQ ID NO: 409905 - DNA, 120 bp, Artificial Sequence
  ENSG00000148219_13 (sequence is synthesized)
ccagaaaccggagagtgcagctgtcatgaaggctatgcccctgaccctgttcacagacacctgtgtgtgcgcagtgactggggacagagtgaaggaccttggccctacacgacacttgag

SEQ ID NO: 409906 - DNA, 120 bp, Artificial Sequence
  ENSG00000148219_14 (sequence is synthesized)
aggggctatgatctggtgacaggggagcaagcccctgaaaagattctcaggtctactttcagcttgggccaaggcctctggcttcctgtcagcaaaagctttgtggttccgcctgtggag

SEQ ID NO: 409907 - DNA, 120 bp, Artificial Sequence
  ENSG00000148219_15 (sequence is synthesized)
ctgtccatcaaccccctggccagctgcaagaccgatgtgctcgtcacggaagaccctgcagatgtcagggaagaagcgatgctgtccacatactttgaaaccatcaatgacctgctgtct

SEQ ID NO: 409908 - DNA, 120 bp, Artificial Sequence
  ENSG00000148219_16 (sequence is synthesized)
tccttcgggccagttcgtgactgctctcggaacaatgggggctgcactcgcaacttcaagtgtgtgtctgaccggcaggtggattcctcgggatgtgtgtgccctgaggagctgaaaccc

SEQ ID NO: 409909 - DNA, 120 bp, Artificial Sequence
  ENSG00000148219_17 (sequence is synthesized)
atgaaggatggctctggctgctacgaccactccaaaggcattgactgctctgatggctttaatggcggctgtgagcagctgtgcctgcagcagacgctgcccctgccctacgatgccact

SEQ ID NO: 409910 - DNA, 120 bp, Artificial Sequence
  ENSG00000148219_18 (sequence is synthesized)
tcgagcaccatcttcatgttctgcggttgcgtggaggagtacaaactggctcctgatggaaaatcctgcttaatgctctcagatgtctgcgagggccccaagtgcctcaaacctgactcc

SEQ ID NO: 409911 - DNA, 120 bp, Artificial Sequence
  ENSG00000148219_19 (sequence is synthesized)
gaaccaaggccaagtcttccagatgacctttagggagaacaacttcatcaaggactttccccagctggccgatgggctgttggtgatcccgctgccggtggaggagcagtgccggggggt

SEQ ID NO: 409912 - DNA, 120 bp, Artificial Sequence
  ENSG00000148219_20 (sequence is synthesized)
cctctccgagccccttccagacctccaactgctcactggagatatcaggtatgatgaggccatgggttaccccatggtgcagcagtggcgggtccggagcaacctctaccgtgtgaagct

SEQ ID NO: 409913 - DNA, 120 bp, Artificial Sequence
  ENSG00000148219_21 (sequence is synthesized)
cagcaccatcaccctcgcagcaggcttcactaatgttctcaagatcctgaccaaggagagcagtcgggaggagctgctgtccttcatccagcactatggctcccactacatcgcagaggc

SEQ ID NO: 409914 - DNA, 120 bp, Artificial Sequence
  ENSG00000148219_22 (sequence is synthesized)
cctctatggctcagagctcacctgcatcatccactttcccagcaagaaggtccagcagcagctgtggctccagtatcagaaagagaccacagagctgggcagcaagaaggagctcaagtc

SEQ ID NO: 409915 - DNA, 120 bp, Artificial Sequence
  ENSG00000148219_23 (sequence is synthesized)
catgcccttcatcacctacctctcaggtttgctgacagcccagatgctgtcagatgaccagctcatttcaggtgtggagattcgctgtgaggagaaggggcgctgtccatctacctgtca

SEQ ID NO: 409916 - DNA, 120 bp, Artificial Sequence
  ENSG00000148219_24 (sequence is synthesized)
cctttgccgccggccaggcaaggagcagctgagccccacaccagtgctgctggaaatcaaccgtgtggtgccactttataccctcatccaagacaatggcacaaaggaggccttcaagag

SEQ ID NO: 409917 - DNA, 120 bp, Artificial Sequence
  ENSG00000148219_25 (sequence is synthesized)
tgcactgatgagttcctactggtgctcagggaaaggggatgtgatcgatgactggtgcaggtgtgacctcagcgcctttgatgccaatgggctccccaactgcagcccccttctgcagcc

SEQ ID NO: 409918 - DNA, 120 bp, Artificial Sequence
  ENSG00000148219_26 (sequence is synthesized)
ggtgctgcggctgtccccaacagtggagccctccagtactgtggtctccttggagtgggtggatgttcagccagctattgggaccaaggtctccgactatattctgcagcataagaaagt

SEQ ID NO: 409919 - DNA, 120 bp, Artificial Sequence
  ENSG00000148219_27 (sequence is synthesized)
ggatgaatacacagacactgacctgtacacaggagaattcctgagttttgctgatgacttactctctggcctgggcacatcttgtgtagcagctggtcgaagccatggagaggtccctga

SEQ ID NO: 409920 - DNA, 120 bp, Artificial Sequence
  ENSG00000148219_28 (sequence is synthesized)
agtcagtatctactcagtcatcttcaagtgtctggagcccgacggtctctacaagttcactctgtatgctgtggatacacgagggaggcactcagagctaagcacggtgaccctgaggac

SEQ ID NO: 409921 - DNA, 120 bp, Artificial Sequence
  ENSG00000148219_29 (sequence is synthesized)
ggcctgtccactggtagatgacaacaaggcagaagaaatagctgacaagatctacaatctgtacaatgggtacacaagtggaaaggagcagcagatggcctacaacacactgatggaggt

SEQ ID NO: 409922 - DNA, 120 bp, Artificial Sequence
  ENSG00000148219_30 (sequence is synthesized)
ctcagcctcgatgctgttccgagtccagcaccactacaactctcactatgaaaagtttggcgacttcgtctggagaagtgaggatgagctggggcccaggaaggcccacctgattctacg

SEQ ID NO: 409923 - DNA, 120 bp, Artificial Sequence
  ENSG00000148219_31 (sequence is synthesized)
gcgactggagagggtgagtagccactgctccagcctcctgcggagtgcctacatccagagccgcgtggaaacagtgccctatcttttctgccgcagcgaggaggtccggcctgcaggcat

SEQ ID NO: 409924 - DNA, 120 bp, Artificial Sequence
  ENSG00000148219_32 (sequence is synthesized)
ggtgtggtatagcatcctcaaggacaccaaaatcacgtgtgaggagaagatggtgtcaatggcccgaaacacgtacggggagtccaagggccggtgagggagggtattgccctccgtgag

SEQ ID NO: 409925 - DNA, 120 bp, Artificial Sequence
  ENSG00000148219_33 (sequence is synthesized)
cacagagactctccatgggagggggagcagtattctcctggatcctggggcctgggtgggctgggggacagctgaggatgggcctagcagatgaagcttgccagcaaggccaaagcaaac

SEQ ID NO: 409926 - DNA, 120 bp, Artificial Sequence
  ENSG00000148219_34 (sequence is synthesized)
ggtttctcctgtggatagtggacagagacctttgtaaccaatggaattattcatttttctctatcttttattttttcaaagatattatttgactctatcaaaagtctctcctttttaaac

SEQ ID NO: 409927 - DNA, 120 bp, Artificial Sequence
  ENSG00000148219_35 (sequence is synthesized)
cttttcttatggatggctgtcaatcccgaggcagaagttttcaggtggagaccaagcggcctttgctcttcttccttcttcctgccacactctgctttcttcctgccatggacccctgga

SEQ ID NO: 409928 - DNA, 120 bp, Artificial Sequence
  ENSG00000148219_36 (sequence is synthesized)
ggagacctatggagggacagttttgacctgacccctagaggagacagttttgacctcttcagcaccaggaaggaagctctgaggatggttgcagtgaggaagcatgggtctttaaggact

SEQ ID NO: 409929 - DNA, 120 bp, Artificial Sequence
  ENSG00000148219_37 (sequence is synthesized)
tctctctcttttttgctggacattattgagtttgtgggaccctgcctcttcctgctacctgtgggtctgcccagagtccctgcaggcctgtccatgcattaaaaattcctattgtctctc

SEQ ID NO: 409930 - DNA, 120 bp, Artificial Sequence
  ENSG00000148219_38 (sequence is synthesized)
atccaggggaagagaaggtggactttgagaagaaagcagcagctgaggcgactcaggagacagtggagtccctgatgcagaagttcaaggagagtttccgcgctaacacgcccatcgaga

SEQ ID NO: 409931 - DNA, 120 bp, Artificial Sequence
  ENSG00000148219_39 (sequence is synthesized)
tcggtcagctgcaaccacccctgcgcagcacatcggcagggaagaggaagcggaggagcaagtctcgaggaggaatcagctttgggagagccaaggggacgtcgggctcagaggcagacg

SEQ ID NO: 409932 - DNA, 120 bp, Artificial Sequence
  ENSG00000148219_40 (sequence is synthesized)
ctggccccaagcgcgcggggcaaggcggccctgcaggggtgagctttcctctgagaacccggggccttagcgacacgtaatccagttttccgtctccttggtgcagatgaagaaaccgac

SEQ ID NO: 409933 - DNA, 68 bp, Artificial Sequence
  ENSG00000148219_41 (sequence is synthesized)
aatggtaccagctcattttggttagtaggctattaattatggcctcaatttcagaacctgttattggt

SEQ ID NO: 409934 - DNA, 81 bp, Artificial Sequence
  ENSG00000148219_42 (sequence is synthesized)
ttacatttgctgaggagtgctttacttcccactgtgtgatcaattttggaataacggggtggatagttctgtagatgtcta

SEQ ID NO: 409935 - DNA, 120 bp, Artificial Sequence
  ENSG00000148219_43 (sequence is synthesized)
tgcatatatatttaggatagttagctcgaagaaggtatcttctatttctagtctgctgcaaaggctctgttttgtttccattggaaacagatgttgaattttctgtgtctattaaaatga

SEQ ID NO: 409936 - DNA, 120 bp, Artificial Sequence
  ENSG00000148219_44 (sequence is synthesized)
gttgaattttctgtgtctattaaaatgattgtatagtttatctctctaaatttgttaatatgataagtcacattgatagattttcatattataaaacaacctactatgtgagatttatcc

SEQ ID NO: 409937 - DNA, 120 bp, Artificial Sequence
  ENSG00000148219_45 (sequence is synthesized)
caggaatgtgtaggttgttttatctgtttgttttaattaggatcattctggtctcacaaaatgaattataaaatattttctccttttcagttttctgaagtgtatctgtcttctcagaga

SEQ ID NO: 409938 - DNA, 120 bp, Artificial Sequence
  ENSG00000148219_46 (sequence is synthesized)
atcactgtggttaaaattgatagtatttttttcttaatcattttttagaattcaccagtgaaggcatctgggcttagaccttttcttgcaagaaggtttttaactactaatttagttatt

SEQ ID NO: 409939 - DNA, 120 bp, Artificial Sequence
  ENSG00000148219_47 (sequence is synthesized)
taatagatatagatttacttagattatctgtttcttcttgagtgatctttggcagcttgtgtgttttaaggaacttgttcattccatgtaaattatcaaatttattggaaaaagttgttt

SEQ ID NO: 409940 - DNA, 120 bp, Artificial Sequence
  ENSG00000148219_48 (sequence is synthesized)
atgacattccgttactattcttttgaaatctgttgagattatagtgatattagtctcatcttgatattggtaatgtgtgtctcctctgttttttttctagatcagtttggctagatagct

SEQ ID NO: 409941 - DNA, 120 bp, Artificial Sequence
  ENSG00000148219_49 (sequence is synthesized)
atgacatttatttgtattttcaaagaatcaactttcggttttatctgtttttgcttattgtttcctatttcattgatttatcctctaatttttattataattttctttgtttggcttact

SEQ ID NO: 409942 - DNA, 120 bp, Artificial Sequence
  ENSG00000148219_50 (sequence is synthesized)
ttgagtttggttttctccgcattttaatttttgaaatggtagctgaggctattgatttgagacctttcttgtaatgtagtcattccctcttaactactgctttagtagtatctcaaagat

SEQ ID NO: 409943 - DNA, 120 bp, Artificial Sequence
  ENSG00000148219_51 (sequence is synthesized)
tgtgttatgttgcgttttcattttcattcagttcaaagtatttccaatttcacttttgttttcttctttgacttatgagttatttagaggcatgccacttcgttttcaaatatttgggag

SEQ ID NO: 409944 - DNA, 120 bp, Artificial Sequence
  ENSG00000148219_52 (sequence is synthesized)
ttttttcagaaatttttgttgttgatttttgattccgctatagtcagaaaatatgtttttatgactttaaacattttaaatttattgagactagtttttggtctagatggtctattgctg

SEQ ID NO: 409945 - DNA, 120 bp, Artificial Sequence
  ENSG00000148219_53 (sequence is synthesized)
tattcagtgttcactttaaaataatgtgtatccacttatttatgggtattttataaatgcctgttagataaaatcggttaattatgttattcaagtcttctggagcctttctgattttct

SEQ ID NO: 409946 - DNA, 120 bp, Artificial Sequence
  ENSG00000148219_54 (sequence is synthesized)
gggcgaaagggacctgctcaagttcactcagtaagtcaggagataagccagaatgcgtatctgactccagtctcaatgtctaccccttcacaaaacggtagcctccagggtagtcctcag

SEQ ID NO: 409947 - DNA, 120 bp, Artificial Sequence
  ENSG00000148219_55 (sequence is synthesized)
caaagcgttggcaccttactgaatctgtttttccatctgagaaatgggccaacggaaaaatcaaacttccattctggggaagtcgagaaccgggactccctaggaagggcagtgctttgg

SEQ ID NO: 409948 - DNA, 120 bp, Artificial Sequence
  ENSG00000148219_56 (sequence is synthesized)
cctcatgttctgtgctctgacagagagctgcactagagacaagtttatccatgaacacattgctctgtaaaggaatgttttgcctactcagctgggaggccgacagcagaggcagacttg

SEQ ID NO: 409949 - DNA, 120 bp, Artificial Sequence
  ENSG00000148219_57 (sequence is synthesized)
gacataaatcttctggaaaggcggccgggccgcccacagaggccaggcaatccactcagtaatgtctcctggaggatatctgagattgctccaacatcccacactgatatgtcagcagga

SEQ ID NO: 409950 - DNA, 120 bp, Artificial Sequence
  ENSG00000148219_58 (sequence is synthesized)
atcaaggaaactgcctcctaatctatcctggtgctgctaataagctcactgtgcaaccctgggctctgccgctttctggccctcagtctcctcacctataacatgataaggacgaactag

SEQ ID NO: 409951 - DNA, 120 bp, Artificial Sequence
  ENSG00000148225_0 (sequence is synthesized)
acccccaggctccgcgttcccgccggccccagctccagccccgcagcccaccgtgcaaacatgcttagacagagaagagattaacttcagtggcttcccactaattacagagattaagaa

SEQ ID NO: 409952 - DNA, 120 bp, Artificial Sequence
  ENSG00000148225_1 (sequence is synthesized)
gtggctgcctgaactattttccaaaggatacacattacaaattattgaatagggcagctaaccaagaagatcctattggtttggggggaacacaacttccagcagccacaagggatgctg

SEQ ID NO: 409953 - DNA, 120 bp, Artificial Sequence
  ENSG00000148225_2 (sequence is synthesized)
ctactcaggtgccaactgaaacaagctcctccacagaaggtttcgtttaggttttgtgtcgtgatggggaaacagcaaagcaaactcaaacacagcacttataaatacgggcctgatgaa

SEQ ID NO: 409954 - DNA, 120 bp, Artificial Sequence
  ENSG00000148225_3 (sequence is synthesized)
attatagaagagagaattcaaactaaagcttttcaagagtatagcccagctcacatggataccgtctctgtcgtggctgctttgaactcagacctttgtgtctctggagggaaagataag

SEQ ID NO: 409955 - DNA, 120 bp, Artificial Sequence
  ENSG00000148225_4 (sequence is synthesized)
acagttgtggcctataattggaaaactggaaatgtggtgaaaaggttcaaaggacatgaacatgagatcaccaaggtagcctgtattcccaaatccagccagttcttcagtgcctctcgt

SEQ ID NO: 409956 - DNA, 120 bp, Artificial Sequence
  ENSG00000148225_5 (sequence is synthesized)
gacaggatggtcatgatgtgggacttgcacggttcctcacaaccaaggcagcaattgtgtggccatgccatggtggtcaccggattggctgtgagtccagactcatcacagctgtgcact

SEQ ID NO: 409957 - DNA, 120 bp, Artificial Sequence
  ENSG00000148225_6 (sequence is synthesized)
ggctctcgggacaacaccctgcttctgtgggatgtggtgacaggacagagtgtggaaagagcatctgtctccaggaacgtggtcactcacctgtgctgggtccccagagaaccatacata

SEQ ID NO: 409958 - DNA, 120 bp, Artificial Sequence
  ENSG00000148225_7 (sequence is synthesized)
ctacagacctctgaagataaaaccctcagattatgggacagtcgggggctgcaggtagctcatatgtttcctgcaaagcagcacattcagacctactgtgaagtcagtgtggatggacac

SEQ ID NO: 409959 - DNA, 120 bp, Artificial Sequence
  ENSG00000148225_8 (sequence is synthesized)
aagtgtatctcctgcagcaatggctttggaggagaaggctgtgaagccacgttgtgggacctaagacagactcgaaacagaatatgtgagtataaggggcatttccagactgtcgcatcc

SEQ ID NO: 409960 - DNA, 120 bp, Artificial Sequence
  ENSG00000148225_9 (sequence is synthesized)
tgcgtctttctaccaagagcattggccttgatgcctttaattgctacctcatcacatgattgcaaggtgaagatttggaaccaagatactggagcctgccttttcaccttgtctctggat

SEQ ID NO: 409961 - DNA, 120 bp, Artificial Sequence
  ENSG00000148225_10 (sequence is synthesized)
ggatcaggacccttgacttctctggctgttggtgacgccatctccttattgtgtgcaagttttaacagaggaattcacttactcagaatggaccacagccaagggctggaactgcaggaa

SEQ ID NO: 409962 - DNA, 120 bp, Artificial Sequence
  ENSG00000148225_11 (sequence is synthesized)
gtggcagcattctgaggccaagagacactcactggacaatatcaaaccatggctcctcctcagcatggctttgtgtctttcccagttatcttgaggggagtgggatgtagggctggtatt

SEQ ID NO: 409963 - DNA, 120 bp, Artificial Sequence
  ENSG00000148225_12 (sequence is synthesized)
ctttgcttaggttcatttacaagatgtatcagtgttgtaagtccaataatttaagtccagtgattcaaaatcaggtatagagtccagaaacatggactacacataaggttctctatttaa

SEQ ID NO: 409964 - DNA, 120 bp, Artificial Sequence
  ENSG00000148225_13 (sequence is synthesized)
gttaaatacaaatgcaactttttagtgagcttttaggactactcttcaaaaaaagtgtattgctcagaatgatgacctgtaaatgtaagagtggcaggcctctgtctgtgaaagtcagaa

SEQ ID NO: 409965 - DNA, 120 bp, Artificial Sequence
  ENSG00000148225_14 (sequence is synthesized)
cacagggctcgagcctctggaactgaccctttgcaagtctttacaaaagaaaaaaggcagtggggagagagagtgttttggttacatcagaaataattgagatgggaaagaatagtgcag

SEQ ID NO: 409966 - DNA, 120 bp, Artificial Sequence
  ENSG00000148225_15 (sequence is synthesized)
ctccatagaggagacggactgtagacaatgagattaagcttcaatcactgctcctcagcaatgtgaagaatcaaagtcagggcaagaaagcgaaagcttggacttctattcaaagtggca

SEQ ID NO: 409967 - DNA, 120 bp, Artificial Sequence
  ENSG00000148225_16 (sequence is synthesized)
gcagagtgggagggcggtacccttctagcccagtgctgctgagcttgtgtgaaaatcagacctgagatggcttgaagcagccaagaaccacatgggcattgcccagaattacaggagtta

SEQ ID NO: 409968 - DNA, 120 bp, Artificial Sequence
  ENSG00000148225_17 (sequence is synthesized)
gcacaccagctctacagataagaaaacattgaaattcaaagattaaggccaaaaatatctcacttgcaattttaatattttcatttggatttatataaatgaaacatatatatgttttgg

SEQ ID NO: 409969 - DNA, 120 bp, Artificial Sequence
  ENSG00000148225_18 (sequence is synthesized)
atttatataaatgaaacatatatatgttttggaatggccagagtgaggcaaaggggatccctgaaataacattagaacatacaggaaaaacgaggcaggcagatcactttaggtcaggag

SEQ ID NO: 409970 - DNA, 65 bp, Artificial Sequence
  ENSG00000148225_19 (sequence is synthesized)
tgtgacagaatgagaccttgtcttgaaaaaaaaaaaaacaaaaaaccacatacaggaaaaaagag

SEQ ID NO: 409971 - DNA, 120 bp, Artificial Sequence
  ENSG00000148225_20 (sequence is synthesized)
cagacattaagcccccttcagtgaggaggggcaaggtgctcaggcctgcctgtgtggcccccaggagtcagacctcagcctcatgctcactggtccattttcctccagggaaaatggagt

SEQ ID NO: 409972 - DNA, 120 bp, Artificial Sequence
  ENSG00000148225_21 (sequence is synthesized)
tctttctgccttcagagatgcccacacataaggcacatgaggctgttggtgacaccatcaccaacactggagattccctttctgacaagtcccagccaaagaaagattttgcatttgtct

SEQ ID NO: 409973 - DNA, 120 bp, Artificial Sequence
  ENSG00000148225_22 (sequence is synthesized)
tctctgtcctctgcttgtctctgataccagtgactgacagccaccttccttcttccctctcttggtgtgatcatggctaactgcagcctcaatcaccagggctcaatcaatcctccctcc

SEQ ID NO: 409974 - DNA, 120 bp, Artificial Sequence
  ENSG00000148225_23 (sequence is synthesized)
caccacacctggctaattttttgtgtgtttgtgtggtctaaaactcctgggctcaagtgatccatctgcctcggcctccttaagtgttgagattacaggtatgagccaccacatccagct

SEQ ID NO: 409975 - DNA, 120 bp, Artificial Sequence
  ENSG00000148225_24 (sequence is synthesized)
tgttgagattacaggtatgagccaccacatccagctgagagtctgttcttaagctagtacaaagagtcagacccgactttgaatctccacttctccatttagctggatgatcttgggcaa

SEQ ID NO: 409976 - DNA, 120 bp, Artificial Sequence
  ENSG00000148225_25 (sequence is synthesized)
gttataaaatctgtttcctcttcactttataacgtgggtttcatgatcatacctcgccacagggctgttctgaagactggacatagctattttaaatgccaggaaaggccaggcgcagtg

SEQ ID NO: 409977 - DNA, 120 bp, Artificial Sequence
  ENSG00000148225_26 (sequence is synthesized)
aacaagagcgaaactccatctcaataaataaataaataagtaaatgccaggaaaggtggtgacaaatggtagccataattatttattgtcctctctgtccagactaaatgttcccttttc

SEQ ID NO: 409978 - DNA, 78 bp, Artificial Sequence
  ENSG00000148225_27 (sequence is synthesized)
ccataattatttattgtcctctctgtccagactaaatgttcccttttccatattaaacatttaccattctgccggtag

SEQ ID NO: 409979 - DNA, 83 bp, Artificial Sequence
  ENSG00000148225_28 (sequence is synthesized)
cattgcactccagcctaggcaacagagagagactctacgtttaccattccttgatccttttttttttttttttttttgagatg

SEQ ID NO: 409980 - DNA, 120 bp, Artificial Sequence
  ENSG00000148225_29 (sequence is synthesized)
gcgtgagccactgcgcccggcctccttcatccattcttagatcttatcctctaaacctttagtcatcgtttcactctcctttgattccttgttatgggtctttcaactctggaaagacaa

SEQ ID NO: 409981 - DNA, 120 bp, Artificial Sequence
  ENSG00000148225_30 (sequence is synthesized)
ttgttatgggtctttcaactctggaaagacaaagagatagtgggagaggaagcccggtcactgagcatctacagagggctaaatatatttattctcatttgttattcccaatattctctg

SEQ ID NO: 409982 - DNA, 120 bp, Artificial Sequence
  ENSG00000148225_31 (sequence is synthesized)
tattgtgatttccatttcacagatgaggaagctgagggctagaaacatgcagtactttgcccaaagtcacacacatattaagaagagctgaggtatgaatctgggtctgcctgactcaaa

SEQ ID NO: 409983 - DNA, 120 bp, Artificial Sequence
  ENSG00000148225_32 (sequence is synthesized)
gcccaaacgctttcctttgcatcgtgtcacaaagtcatagaccatgacattgtttgtatcttcaagaccagttattaactttctggctccaaggagatcccctgcccaagtgcctagggg

SEQ ID NO: 409984 - DNA, 120 bp, Artificial Sequence
  ENSG00000148225_33 (sequence is synthesized)
cagtagacagctgtctcagggacagtcgtagcatgtgctggattattagtgcagcagctgacactttttcccagaagggagagaggcagcaagtcagaaagttcacgggaatgagttggg

SEQ ID NO: 409985 - DNA, 120 bp, Artificial Sequence
  ENSG00000148225_34 (sequence is synthesized)
agggggtcccagggaagggggacaggctgccaggagaaggaaagtacacgggagaaaatagtggggctctgatgagttagtagggttctgttaccaataaaattgtttccataaactgta

SEQ ID NO: 409986 - DNA, 120 bp, Artificial Sequence
  ENSG00000148225_35 (sequence is synthesized)
aggcgcgggagggctcggaggctgttcccacccccaggctccgcgttcccgccggccccagctccagccccgcagcccaccgggaacacaacttccagcagccacaagggatgctgctac

SEQ ID NO: 409987 - DNA, 120 bp, Artificial Sequence
  ENSG00000148229_0 (sequence is synthesized)
gcagggtcagaccgtagcgacgcgggaagtccggacgcagtagctccctgaagcggaggcgaaggggagtttaagccccagcggcggcaatggcggagaggcccgaggacctaaacctgc

SEQ ID NO: 409988 - DNA, 120 bp, Artificial Sequence
  ENSG00000148229_1 (sequence is synthesized)
ccaatgccgtgatcaccaggatcatcaaggaggcgctcccggacggtgtcaacatctccaaggaggcccggagcgccatctcccgcgccgccagcgtcttcgtgctgtacgccacatcct

SEQ ID NO: 409989 - DNA, 120 bp, Artificial Sequence
  ENSG00000148229_2 (sequence is synthesized)
gtgctaacaactttgcaatgaaaggaaagcggaagacgctgaatgccagtgatgtgctctcagccatggaagagatggagttccagcggttcgttaccccattgaaagaagctctggaag

SEQ ID NO: 409990 - DNA, 120 bp, Artificial Sequence
  ENSG00000148229_3 (sequence is synthesized)
catataggcgggagcagaaaggcaagaaggaggcctcagagcaaaagaagaaggacaaagacaaaaaaacagactcggaagagcaagacaagagcagggatgaggacaatgatgaagacg

SEQ ID NO: 409991 - DNA, 120 bp, Artificial Sequence
  ENSG00000148229_4 (sequence is synthesized)
aagaaaggctggaagaagaagaacagaatgaagaggaagaagtagacaactgaaaagggcgggagactgtggcaccttggaaggtaccacttgaaatgagacgtgctacgtgtttctgtg

SEQ ID NO: 409992 - DNA, 120 bp, Artificial Sequence
  ENSG00000148229_5 (sequence is synthesized)
aagcttttccatgctgggcagagtagtctcaggcaaaagtgcctgaaaagatcagaataaaaactgactagaaataccgtcaaaaccagcacttaccaaactcagagcatctgagtagca

SEQ ID NO: 409993 - DNA, 120 bp, Artificial Sequence
  ENSG00000148229_6 (sequence is synthesized)
gaatcctgttttgcttcatcaatctgaaggttatggccttttgacaagagggattctgaacgactaaattagtcagtttgctcgcttttgtttacttaaatgtatggttagatggttttt

SEQ ID NO: 409994 - DNA, 120 bp, Artificial Sequence
  ENSG00000148229_7 (sequence is synthesized)
gatctgcagtcttccctagtcccccaaataagtaataataacttccatgctgcctgctgtgttccagatcacagaggcagccaaggctcaggaaaaactggggctttgcttatggtcagc

SEQ ID NO: 409995 - DNA, 120 bp, Artificial Sequence
  ENSG00000148229_8 (sequence is synthesized)
aaactactaaaatgctgtgggagaataacaaaatccgttctctctcttcacttgacagaagcattaactgaattttgtttttcatagacccacttggcccaaaacctttctatattgcct

SEQ ID NO: 409996 - DNA, 120 bp, Artificial Sequence
  ENSG00000148229_9 (sequence is synthesized)
gtagatgatcggcctgctggtgtggtagtaatctgatcacagatattcttaaatcagcagtgtggaatggtattagtcaaacatggtgccagtgtcttttacaaaaacagatggcatagt

SEQ ID NO: 409997 - DNA, 120 bp, Artificial Sequence
  ENSG00000148229_10 (sequence is synthesized)
gtcagatgtaccttactctctgctactgtacagctttaggatttgtcatcacctcccggaaggtgtaaaaccccaggcttcctcttcttgtagtccatctcccagacttgtgactatggc

SEQ ID NO: 409998 - DNA, 120 bp, Artificial Sequence
  ENSG00000148229_11 (sequence is synthesized)
ttttcattcttcaattcatgacgagtgccaaacttgattttctctaggcacagctttctccctctgtgcctcctgcttcctttctctctcctgcctctcctctgctccccatcccacttt

SEQ ID NO: 409999 - DNA, 120 bp, Artificial Sequence
  ENSG00000148229_12 (sequence is synthesized)
ctcatctgcctccttttctcacttctgtcagtctgtaagctttgataacctgcttaatactccaaagtgtgagttcctctgatctcttgattccttagttctaatctcacgttttgtttt

SEQ ID NO: 410000 - DNA, 120 bp, Artificial Sequence
  ENSG00000148229_13 (sequence is synthesized)
gcagtggcatgatcatagctcattgcatccttgaaatcctgggctcaggtgatcctcccgcctgagcctcctgagtatctgggactacagatgcgtgccaccaagcctggctaattttgt

SEQ ID NO: 410001 - DNA, 120 bp, Artificial Sequence
  ENSG00000148229_14 (sequence is synthesized)
gggactacagatgcgtgccaccaagcctggctaattttgtctcatgtcttctaaaaattattttgtgaagccccttcacaaaaaaccttaagggaaatctgatggtgctcaggaatctaa

SEQ ID NO: 410002 - DNA, 120 bp, Artificial Sequence
  ENSG00000148229_15 (sequence is synthesized)
ctctccctaaaccatcctctttaactgcttctaaaatatctctgttggcctttcttagcctttttctgtttccattcagtgctccaagcgctttttgtttctaagttgagtgcttggggt

SEQ ID NO: 410003 - DNA, 120 bp, Artificial Sequence
  ENSG00000148229_16 (sequence is synthesized)
ttgacaggtagtgacgtgtagtttgacactgttaacttgttaaatacagtgaaaagtttgtgagtgaagaatgctgagaagattgtaatgctttgtacaaataaaagtcttgttaaaaaa

SEQ ID NO: 410004 - DNA, 120 bp, Artificial Sequence
  ENSG00000148229_17 (sequence is synthesized)
ctggctgggagttgctggctgggagcctacaaaccccaacgattgtgttctccctcggtggggacatgttcacagtcctctgccagtttttacaagttctgaagcaaaataacacaacaa

SEQ ID NO: 410005 - DNA, 120 bp, Artificial Sequence
  ENSG00000148229_18 (sequence is synthesized)
aatcactttgctttagcttttttgtgcagagaagggaaggacttatccctgtcacaccaaaatccatacatgtaagaggcaggctttcccgttccacctctgggtgctccttttcccact

SEQ ID NO: 410006 - DNA, 120 bp, Artificial Sequence
  ENSG00000148248_0 (sequence is synthesized)
acttcctgtggaggccgcagcgggtgcgggcgccgacgggcgagagccagcgagcgagcgagcgagccgagccgagcctcccgccgtcgccatgggccagaacgacctgatgggcacggc

SEQ ID NO: 410007 - DNA, 120 bp, Artificial Sequence
  ENSG00000148248_1 (sequence is synthesized)
cgaggacttcgccgaccagttcctccgtgtcacaaagcagtacctgccccacgtggcgcgcctctgtctgatcagcaccttcctggaggacggcatccgtatgtggttccagtggagcga

SEQ ID NO: 410008 - DNA, 120 bp, Artificial Sequence
  ENSG00000148248_2 (sequence is synthesized)
gcagcgcgactacatcgacaccacctggaactgcggctacctgctggcctcgtccttcgtcttcctcaacttgctgggacagctgactggctgcgtcctggtgttgagcaggaacttcgt

SEQ ID NO: 410009 - DNA, 120 bp, Artificial Sequence
  ENSG00000148248_3 (sequence is synthesized)
gcagtacgcctgcttcgggctctttggaatcatagctctgcagacgattgcctacagcattttatgggacttgaagtttttgatgaggaacctggccctgggaggaggcctgttgctgct

SEQ ID NO: 410010 - DNA, 120 bp, Artificial Sequence
  ENSG00000148248_4 (sequence is synthesized)
cctagcagaatcccgttctgaagggaagagcatgtttgcgggcgtccccaccatgcgtgagagctcccccaaacagtacatgcagctcggaggcagggtcttgctggttctgatgttcat

SEQ ID NO: 410011 - DNA, 120 bp, Artificial Sequence
  ENSG00000148248_5 (sequence is synthesized)
gaccctccttcactttgacgccagcttcttttctattgtccagaacatcgtgggcacagctctgatgattttagtggccattggttttaaaaccaagctggctgctttgactcttgttgt

SEQ ID NO: 410012 - DNA, 120 bp, Artificial Sequence
  ENSG00000148248_6 (sequence is synthesized)
gtggctctttgccatcaacgtatatttcaacgccttctggaccattccagtctacaagcccatgcatgacttcctgaaatacgacttcttccagaccatgtcggtgattgggggcttgct

SEQ ID NO: 410013 - DNA, 120 bp, Artificial Sequence
  ENSG00000148248_7 (sequence is synthesized)
cctggtggtggccctgggccctgggggtgtctccatggatgagaagaagaaggagtggtaacagtcacagatccctacctgcctggctaagacccgtggccgtcaaggactggttcgggg

SEQ ID NO: 410014 - DNA, 120 bp, Artificial Sequence
  ENSG00000148248_8 (sequence is synthesized)
tggattcaacaaaactgccagcttttatgtatcctcttcccttcccctcccttggtaaaggcacagatgttttgagaactttatttgcagagacacctgagaatcgatggctcagtctgc

SEQ ID NO: 410015 - DNA, 120 bp, Artificial Sequence
  ENSG00000148248_9 (sequence is synthesized)
tctggagccacagtctggcgtctgacccttcagtgcaggccagcctggcagctggaagcctcccccacgccgaggctttggagtgaacagcccgcttggctgtggcatctcagtcctatt

SEQ ID NO: 410016 - DNA, 120 bp, Artificial Sequence
  ENSG00000148248_10 (sequence is synthesized)
tttgagtttttttgtgggggtacaggagggggccttcaagctgtactgtgagcagacgcattggtattatcattcaaagcagtctccctcttatttgtaagtttacatttttagcggaaa

SEQ ID NO: 410017 - DNA, 120 bp, Artificial Sequence
  ENSG00000148248_11 (sequence is synthesized)
ctactaaattattttgggtggttcagccaaacctcaaaacagttaatctccctggtttaaaatcacaccagtggctttgatgttgtttctgccccgcattgtattttataggaatagtga

SEQ ID NO: 410018 - DNA, 120 bp, Artificial Sequence
  ENSG00000148248_12 (sequence is synthesized)
agctgctgtttatgataaaagtcatcggtcagaaaatcagcttggattggtgccaagtgttttattgggtaacaccctgggagttttagtagcttgaggcaaggtggaggggcaagaagt

SEQ ID NO: 410019 - DNA, 120 bp, Artificial Sequence
  ENSG00000148248_13 (sequence is synthesized)
ccttggggaagctgctggtctgggtgctgctggcctccaagctggcagtgggaagggctagtgagaccacacaggggtagccccagcagcagcaccctgcaagccagcctggccagctgc

SEQ ID NO: 410020 - DNA, 120 bp, Artificial Sequence
  ENSG00000148248_14 (sequence is synthesized)
tcagaccagcttgcagagccgcagccgctgtgggcagggggtgtggcaggagctcccagcactggagacccacggactcaacccagttacctcacatggggccttttctgagcaaggtct

SEQ ID NO: 410021 - DNA, 120 bp, Artificial Sequence
  ENSG00000148248_15 (sequence is synthesized)
cgaaagcgcaggccgccctggctgagcagcaccgccctttcccagctgcactcgccctgtggacagccccgacacaccactttcctgaggctgtcgctcactcagattgtccgtttgcta

SEQ ID NO: 410022 - DNA, 120 bp, Artificial Sequence
  ENSG00000148248_16 (sequence is synthesized)
tgccgaatgcagccaaaattcctttttacaatttgtgatgccttaccgatttgatcttaatcctgtatttaaagttttctaacactgccttatactgtgtttctctttttgggggagctt

SEQ ID NO: 410023 - DNA, 120 bp, Artificial Sequence
  ENSG00000148248_17 (sequence is synthesized)
aactgcttgttgctccctgtcgtctgcaccatagtaaatgccacaagggtagtcgaacacctctctggcccctagacctatctggggacaggctggctcagcctgtctccagggctgctg

SEQ ID NO: 410024 - DNA, 120 bp, Artificial Sequence
  ENSG00000148248_18 (sequence is synthesized)
cggcccagccccgagcctgcctccctcttggcctctcatccattggctctgcagggcaggggtgaggcaggtttctgctcataagtgcttttggaagtcacctacctttttaacacagcc

SEQ ID NO: 410025 - DNA, 120 bp, Artificial Sequence
  ENSG00000148248_19 (sequence is synthesized)
gaactagtcccaacgcgtttgcaaatattcccctggtagcctacttccttacccccgaatattggtaagatcgagcaatggcttcaggacatgggttctcttctcctgtgatcattcaag

SEQ ID NO: 410026 - DNA, 120 bp, Artificial Sequence
  ENSG00000148248_20 (sequence is synthesized)
tgctcactgcatgaagactggcttgtctcagtgtttcaacctcaccagggctgtctcttggtccacacctcgctccctgttagtgccgtatgacagcccccatcaaatgaccttggccaa

SEQ ID NO: 410027 - DNA, 120 bp, Artificial Sequence
  ENSG00000148248_21 (sequence is synthesized)
gtcacggtttctctgtggtcaaggttggttggctgattggtggaaagtagggtggaccaaaggaggccacgtgagcagtcagcaccagttctgcaccagcagcgcctccgtcctagtggg

SEQ ID NO: 410028 - DNA, 120 bp, Artificial Sequence
  ENSG00000148248_22 (sequence is synthesized)
tgttcctgtttctcctggccctgggtgggctagggcctgattcgggaagatgcctttgcagggaggggaggataagtgggatctaccaattgattctggcaaaacaatttctaagatttt

SEQ ID NO: 410029 - DNA, 120 bp, Artificial Sequence
  ENSG00000148248_23 (sequence is synthesized)
tttgctttatgtgggaaacagatctaaatctcattttatgctgtattttatatcttagttgtgtttgaaaacgttttgatttttggaaacacatcaaaataaataatggcgtttgttgta

SEQ ID NO: 410030 - DNA, 120 bp, Artificial Sequence
  ENSG00000148248_24 (sequence is synthesized)
accagatgtgctggactcttggggtccctttgaccctgtctgcgtctccctccccgtttggactctgccctgggctggattgagtggggacctgtacacagcctgggaggaggggaagcc

SEQ ID NO: 410031 - DNA, 120 bp, Artificial Sequence
  ENSG00000148248_25 (sequence is synthesized)
gcctttggaaaggctgagactcaagtatctctctcttctttcccctcagacgattgcctacagcattttatgggacttgaagtttttgatgagattgtccagaacatcgtgggcacagct

SEQ ID NO: 410032 - DNA, 120 bp, Artificial Sequence
  ENSG00000148248_26 (sequence is synthesized)
ctttgacgccagcttcttttctcagccgtctcagcagtagctacatcagcctgatggatagagacttcatgacgtgcagcagctggaacttttgtttataaagcatctcttttcctcaca

SEQ ID NO: 410033 - DNA, 120 bp, Artificial Sequence
  ENSG00000148288_0 (sequence is synthesized)
ctcttttctgtctggcccgcggccccgctgcctgccctgctccaggctccacctgcgccgccgatcgcccgggtatcgcgggggcccaggccagctgagtccgttttccgcgccggggtg

SEQ ID NO: 410034 - DNA, 120 bp, Artificial Sequence
  ENSG00000148288_1 (sequence is synthesized)
gcgcccctccaaccgtcctaacgccgggccggcagcaaggagtgttcctgggacctcagagaccaggctcagagcctgacatccctgcgaggggacagcctcatccgcccaggccagtgg

SEQ ID NO: 410035 - DNA, 120 bp, Artificial Sequence
  ENSG00000148288_2 (sequence is synthesized)
gggtctctacaagtgcccaggctcaggtgcagcccccagcaatgcatcgccggagactggccctgggtctggggttctgcctgttggcgggcacaagcctcagtgtcctgtgggtgtatc

SEQ ID NO: 410036 - DNA, 120 bp, Artificial Sequence
  ENSG00000148288_3 (sequence is synthesized)
ttgagaactggctgccagtctcctatgtcccctattatctcccctgcccagagatcttcaacatgaagctgcactacaagagggagaagccactccagcccgtggtatggtcacagtacc

SEQ ID NO: 410037 - DNA, 120 bp, Artificial Sequence
  ENSG00000148288_4 (sequence is synthesized)
ctcagcccaagctgctggagcacaggcccacacagctgctgacactcacaccctggttggcgcccatcgtctccgagggaaccttcaacccagagcttctgcagcacatctaccagccac

SEQ ID NO: 410038 - DNA, 120 bp, Artificial Sequence
  ENSG00000148288_5 (sequence is synthesized)
tgaacctgaccattggggtcacggtgtttgccgtggggaagtacactcatttcatccagtccttcctggagtcagccgaggagttcttcatgcgtgggtaccgggtgcactactacatct

SEQ ID NO: 410039 - DNA, 120 bp, Artificial Sequence
  ENSG00000148288_6 (sequence is synthesized)
tcactgacaaccctgcagccgttcccggggtcccgctgggtccccaccggcttctcagctccatccccatccagggtcactcccactgggaggagacatccatgcgccggatggagacca

SEQ ID NO: 410040 - DNA, 120 bp, Artificial Sequence
  ENSG00000148288_7 (sequence is synthesized)
tcagccagcacattgctaagagggctcaccgggaggtggactacctcttctgccttgatgtggacatggtgtttcggaacccgtggggccctgagaccttgggagacctggtggctgcca

SEQ ID NO: 410041 - DNA, 120 bp, Artificial Sequence
  ENSG00000148288_8 (sequence is synthesized)
gttcccctatgagcgcaggcgtgtttccactgcctttgtggcagacagcgaaggggacttctattatggtggggcagtcttcggggggcaggtggccagggtatatgagtttactagggg

SEQ ID NO: 410042 - DNA, 120 bp, Artificial Sequence
  ENSG00000148288_9 (sequence is synthesized)
ctgccacatggccatcctggcggacaaggccaatggcatcatggctgcctggcgggaggaaagccacctgaaccgtcacttcatctcaaacaagccgtccaaggtgctgtcccccgagta

SEQ ID NO: 410043 - DNA, 120 bp, Artificial Sequence
  ENSG00000148288_10 (sequence is synthesized)
cctctgggacgacaggaagccccagccacccagcctgaagctgatccgcttttctacactggacaaggatatcagctgcctgaggagctgaccacggagctgggggttgccatggatggg

SEQ ID NO: 410044 - DNA, 120 bp, Artificial Sequence
  ENSG00000148288_11 (sequence is synthesized)
gacccaaagacctgcagccaccagtgcttcactagcgtgcagaccagccctgtcccgcctccctgtcagtcaggcgaattcaaccggaaaagggacgtggaaaggccactgtgaactgca

SEQ ID NO: 410045 - DNA, 120 bp, Artificial Sequence
  ENSG00000148288_12 (sequence is synthesized)
gagggctgtgcacacagtagcacacaggatctcacagtaacgcggcatgggaacagtgagacagggggaggggaggcgcagttacaaaggcagggcccggcaggcttgccacgttctgca

SEQ ID NO: 410046 - DNA, 120 bp, Artificial Sequence
  ENSG00000148288_13 (sequence is synthesized)
gccgtgcctttgcggggcaggctctgaagcctcagcccgactcagagtgcctgaaccctgccgcgccagtcccccgtttattgcatattgcccttaacgtagcatttctaataccctggt

SEQ ID NO: 410047 - DNA, 120 bp, Artificial Sequence
  ENSG00000148288_14 (sequence is synthesized)
gtgaaggcgccctagaccccttttctctggtcacaggggtcctgggtcctttgatgtctcccaaccacatgtagccaattcctcactcaggcccccagagtgagcctttgaaatggaaca

SEQ ID NO: 410048 - DNA, 120 bp, Artificial Sequence
  ENSG00000148288_15 (sequence is synthesized)
ggtctaggctccctcggtttcctgcaccccaaagtgagccgcactctcaggggactagccacctccttcttaagagggtttggggcagtttataataaagggggcgtgtgctcaacccta

SEQ ID NO: 410049 - DNA, 120 bp, Artificial Sequence
  ENSG00000148288_16 (sequence is synthesized)
agacgtgcacacaggaccctgctgggcacccgggaggctcggaaccaggtgccaagcagatagaaagtacagtgtagggtgtgatagtgggatgggagcttcctggagtaggggatctgg

SEQ ID NO: 410050 - DNA, 120 bp, Artificial Sequence
  ENSG00000148288_17 (sequence is synthesized)
ctctagcatagacaggatgcagagtccaggtgaggggacagcaggagcctttgtcaggaggcccccttgcccctccctgtttcatctagacccctcctctgcccttgtctctcccatgac

SEQ ID NO: 410051 - DNA, 120 bp, Artificial Sequence
  ENSG00000148288_18 (sequence is synthesized)
cccacctggccttcctttaggagctgccgcttggcagccttcctctgggcctctgggactccttcctggaacttcctggggccctaaagcatgaccagatgatgaatggtccacctaggg

SEQ ID NO: 410052 - DNA, 120 bp, Artificial Sequence
  ENSG00000148288_19 (sequence is synthesized)
tcaggtgacccccttgtccaatgagttttggcctgggggcagggctgtgtcaaccacacccccctccatgcccccagcatctagctcaacttgccttcccttgattcgtccacttacctg

SEQ ID NO: 410053 - DNA, 120 bp, Artificial Sequence
  ENSG00000148288_20 (sequence is synthesized)
cttcttcactactttcttctctgtgatcctcaatgttcctgcctgtaaaatgggcatgcttatgcagatcaaagatcataagaattcttagaacgtcgctgggcacttagaaattgctca

SEQ ID NO: 410054 - DNA, 120 bp, Artificial Sequence
  ENSG00000148288_21 (sequence is synthesized)
agggccagagcagagtgacatcttgagatggggagctggtaagtggaccccagcctggctgaccccagcacacagtggggaccctggcaggctgctggtgtagcagtgggtgaccgggtg

SEQ ID NO: 410055 - DNA, 120 bp, Artificial Sequence
  ENSG00000148288_22 (sequence is synthesized)
gagatcttgtaagtatgggtgtggctaggagaactgggggccctgagggctgctcacagttggggagacaggagagtatttaagttcacttcatctgccggttcctgattcctaagttca

SEQ ID NO: 410056 - DNA, 120 bp, Artificial Sequence
  ENSG00000148288_23 (sequence is synthesized)
caacctccacctcccgggttcaagcaattgtcatgcctcagccacctgaatagctgggattacaggcacacacgctaatttttgtatttttagtagaaacagcatttcatcatgttggcc

SEQ ID NO: 410057 - DNA, 120 bp, Artificial Sequence
  ENSG00000148288_24 (sequence is synthesized)
cacacgctaatttttgtatttttagtagaaacagcatttcatcatgttggccaggttggtctttgcccccttcggccaggcttcgccccctcatcggcctcccaaagtgctgggattaaa

SEQ ID NO: 410058 - DNA, 120 bp, Artificial Sequence
  ENSG00000148288_25 (sequence is synthesized)
ctgcccagagatcttcatccttgcagccccctgcatggtctgaccgtccacatgttgcacagctgtgagccttgcttgctgtgtctggccactgagaacacagagtgcaaagatgcccat

SEQ ID NO: 410059 - DNA, 120 bp, Artificial Sequence
  ENSG00000148288_26 (sequence is synthesized)
aaacagcctgctgttgctcccggtgaccagcaggggttgtgttcagtgcttttaggacttgaccttgttgctcaattttgtgttccatggattcaaggaacaaatgaacatgtgaccaaa

SEQ ID NO: 410060 - DNA, 120 bp, Artificial Sequence
  ENSG00000148288_27 (sequence is synthesized)
atgtcccctattatctcccctgcccagagatcttacccatgatgatggctctttcttgcctctgccaccagcaacatgaagctgcactacaagagggagaagccactccagcccgtggta

SEQ ID NO: 410061 - DNA, 120 bp, Artificial Sequence
  ENSG00000148288_28 (sequence is synthesized)
gcgcccctccaaccgtcctaacgccgggccggcagcaaggagaccccggctctccgctcactgtggcccgggctgcgcccagcgttttacagccgttcccgcgtgtcctccccccgggcg

SEQ ID NO: 410062 - DNA, 120 bp, Artificial Sequence
  ENSG00000148288_29 (sequence is synthesized)
ggatgactggcccaaggtcaacgagccagcgagttgaggcgcgttcccatcgttccgtggagaacccgggccctgcctcccggagaggtggacagcggccacctcgctcccctcggggaa

SEQ ID NO: 410063 - DNA, 120 bp, Artificial Sequence
  ENSG00000148288_30 (sequence is synthesized)
tcctgggcgccccttcccgcgcatcctgcgctgggactgcatgtgtcctcgctgtgcctcggtgcttgatttccagcggacggtggactggcccatgcacccctcccggcggcctcggct

SEQ ID NO: 410064 - DNA, 80 bp, Artificial Sequence
  ENSG00000148290_0 (sequence is synthesized)
tggctgcgttgcagctggggctgcgggcggcggggctgggacgggccccggccagcgccgcctggaggagcgtcctcagg

SEQ ID NO: 410065 - DNA, 120 bp, Artificial Sequence
  ENSG00000148290_1 (sequence is synthesized)
cagggtctccccgcgcccaggggtggcctggaggccaagcagatgtggcagttctgcagcagaagcatctgccacaaaagcggaagatgactcctttcttcagtgggtcctgctcctcat

SEQ ID NO: 410066 - DNA, 120 bp, Artificial Sequence
  ENSG00000148290_2 (sequence is synthesized)
ccctgtgactgcctttggcttggggacatggcaggtccagcgtcggaagtggaagctgaacctgattgcagagttggagtccagagttctggctgagcctgtccctctgccagccgaccc

SEQ ID NO: 410067 - DNA, 120 bp, Artificial Sequence
  ENSG00000148290_3 (sequence is synthesized)
aatggaactgaaaaatctggagtataggccagtgaaggtcagggggtgctttgaccattccaaggagctgtatatgatgccccggaccatggtggaccctgtccgggaggcccgggaggg

SEQ ID NO: 410068 - DNA, 120 bp, Artificial Sequence
  ENSG00000148290_4 (sequence is synthesized)
ctcctcaactcagagtggggcctatgtggtcactcccttccactgcaccgacctgggagtcaccatcctggtaaatagagggttcgttcccaggaagaaagtgaatcctgaaacccggca

SEQ ID NO: 410069 - DNA, 120 bp, Artificial Sequence
  ENSG00000148290_5 (sequence is synthesized)
gaaaggccagattgagggagaagtggacctcattgggatggtgaggctgacagaaaccaggcagccttttgtccctgagaacaatccagaaaggaaccactggcattatcgagacctgga

SEQ ID NO: 410070 - DNA, 120 bp, Artificial Sequence
  ENSG00000148290_6 (sequence is synthesized)
agctatggccagaatcacaggcgcagagcccatcttcattgatgccaacttccagagcacagtccctggaggacccattggagggcaaaccagagttactctgaggaacgagcatctgca

SEQ ID NO: 410071 - DNA, 120 bp, Artificial Sequence
  ENSG00000148290_7 (sequence is synthesized)
gtacatcgtgacctggtatggactctctgcagctacatcctacctgtggtttaagaaattcctacgtgggacacctggtgtgtgacagatcagctgctgaagccctgtccctggataatg

SEQ ID NO: 410072 - DNA, 120 bp, Artificial Sequence
  ENSG00000148290_8 (sequence is synthesized)
cagtatttcaagactgcctttatgctggatcatgtgctactggtataaagttctggccttctaccttaaatgagctcatgactggttcatcataaaatcctggcttggtttcagtccaaa

SEQ ID NO: 410073 - DNA, 120 bp, Artificial Sequence
  ENSG00000148290_9 (sequence is synthesized)
gccacattttccattcagggtagcaaacagtatgccagatttggcttgcagatggggttttggcccacatattttttaaaatttcacataaaatattcattgaggagtccagatttttag

SEQ ID NO: 410074 - DNA, 120 bp, Artificial Sequence
  ENSG00000148290_10 (sequence is synthesized)
cctctcttgtaaagttggactctggcagtgcagatccacattcccacatggcatcaaagttcccctttgaagagcacgccctttgcctttctccttcacttgtctggccctggtgggctg

SEQ ID NO: 410075 - DNA, 120 bp, Artificial Sequence
  ENSG00000148290_11 (sequence is synthesized)
gcgaaccttgcgggcgtccgtctggagccgcaggctcgggtgctcccgcagaaacgcccgcacgtcgcccggcaactcgctcatggccgacgcgcccgcggagcagcccggcggaagccg

SEQ ID NO: 410076 - DNA, 120 bp, Artificial Sequence
  ENSG00000148290_12 (sequence is synthesized)
ccacctgctgtctgccctgcactttgaagggttgtcgtggggattgaaatgaaccaactgccggctgagcggaggctccctgggagtgacaagttccgtattaaaatgctttcagtggaa

SEQ ID NO: 410077 - DNA, 120 bp, Artificial Sequence
  ENSG00000148291_0 (sequence is synthesized)
ctgcgagcggcttccgccgggctgctccgcgggcgcgtcggccatgagcgagttgccgggcgacgtgcgggcgtttctgcgggagcacccgagcctgcggctccagacggacgcccgcaa

SEQ ID NO: 410078 - DNA, 120 bp, Artificial Sequence
  ENSG00000148291_1 (sequence is synthesized)
ggtgaggtgcatcctgacaggtcacgagctgccctgccgcctgccggagctccaggtctacacccgcggcaaaaagtaccagcggctggtccgcgcctccccggccttcgactatgcaga

SEQ ID NO: 410079 - DNA, 120 bp, Artificial Sequence
  ENSG00000148291_2 (sequence is synthesized)
gttcgagccgcacatcgtgcccagcaccaagaacccgcaccagttgttctgcaaactcaccctgcggcacatcaacaagtgcccagaacacgtgctgaggcacacccagggccggcggta

SEQ ID NO: 410080 - DNA, 120 bp, Artificial Sequence
  ENSG00000148291_3 (sequence is synthesized)
ctcgcccgcgggaagccttctgggagcccacatccagtgatgaggggggagctgcaagtgatgacagcatgacagacctgtacccacctgagctattcaccagaaaggaccttggaagca

SEQ ID NO: 410081 - DNA, 120 bp, Artificial Sequence
  ENSG00000148291_4 (sequence is synthesized)
cggaggatggggatggcactgatgactttttgacagacaaagaggatgagaaggcaaagcccccaagagagaaggccactgatgagggcaggagagagacgaccgtgtaccgagggctgg

SEQ ID NO: 410082 - DNA, 120 bp, Artificial Sequence
  ENSG00000148291_5 (sequence is synthesized)
tccagaagcgcgggaagaagcagttgggctcgttgaaaaagaagttcaagagtcatcaccgcaaacccaagagcttcagctcctgtaaacagccaggttaataaaagcacatgccgtgaa

SEQ ID NO: 410083 - DNA, 120 bp, Artificial Sequence
  ENSG00000148291_6 (sequence is synthesized)
cgtgcccagcaccaagaacccgtaggtggtccgcggcggcgcggggaggcccagggcaattaggacagcccctccgctggactccgccagtgctgcagcccctactctttcagagttggg

SEQ ID NO: 410084 - DNA, 120 bp, Artificial Sequence
  ENSG00000148296_0 (sequence is synthesized)
gagagtcgcacgcgcagcggggaaggtgtgagtcgtgaacggcccgggtctccgccatggcctctctactcgccaaggacgcctacctgcagagcctggccaagaagatctgctcccatt

SEQ ID NO: 410085 - DNA, 120 bp, Artificial Sequence
  ENSG00000148296_1 (sequence is synthesized)
cggccccggaacagcaggcgcgcacgcgggctggcaaaactcaaggctcagaaactgcagggcccccaaaaaagaaaaggaagaaaacacaaaagaaattccggaagcgagaagagaagg

SEQ ID NO: 410086 - DNA, 120 bp, Artificial Sequence
  ENSG00000148296_2 (sequence is synthesized)
ctgctgagcacaaggccaagtccttgggggagaaatctccagcagcctctggggccaggaggcctgaggcagccaaagaggaagcagcttgggcttccagctcagcagggaaccctgcag

SEQ ID NO: 410087 - DNA, 120 bp, Artificial Sequence
  ENSG00000148296_3 (sequence is synthesized)
atggcctggccactgagcctgagtctgtctttgctctggatgttctgcgacagcgactgcatgagaagatccaggaggcccggggccagggcagtgccaaggagctgtcccctgccgcct

SEQ ID NO: 410088 - DNA, 120 bp, Artificial Sequence
  ENSG00000148296_4 (sequence is synthesized)
tggagaaaaggcggcggagaaagcaggaacgggaccggaagaagaggaagcgaaaggagctgcgggcgaaagagaaggccaggaaggctgaggaggccacggaggcccaggaggtggtgg

SEQ ID NO: 410089 - DNA, 120 bp, Artificial Sequence
  ENSG00000148296_5 (sequence is synthesized)
aggcaaccccagagggggcctgcacggagccgcgggagccgcccgggctgatcttcaataaggtggaggtgagcgaagacgagccggccagcaaggcgcagcgcagaaaagagaagaggc

SEQ ID NO: 410090 - DNA, 120 bp, Artificial Sequence
  ENSG00000148296_6 (sequence is synthesized)
agagggtgaaggggaacctcacgccgctgaccgggaggaactaccggcagctgctggagcgcctgcaggcacggcagagccggctggacgagctgcgcggccaggatgaggggaaggcgc

SEQ ID NO: 410091 - DNA, 120 bp, Artificial Sequence
  ENSG00000148296_7 (sequence is synthesized)
aggagctggaggcgaagatgaagtggaccaacctcctctacaaggcggagggcgtgaagatccgtgacgacgaacgcctgctgcaggaggccctgaagcgcaaggagaagcgcagggcgc

SEQ ID NO: 410092 - DNA, 120 bp, Artificial Sequence
  ENSG00000148296_8 (sequence is synthesized)
agcggcagcgccggtgggagaagcgcacggccggcgtggtggagaagatgcagcagcgccaggaccggcggcggcagaacctgcgcaggaagaaggcggcccgcgccgagcgccgcctgc

SEQ ID NO: 410093 - DNA, 120 bp, Artificial Sequence
  ENSG00000148296_9 (sequence is synthesized)
tcagagcccgcaagaagggccgcatcctgccgcaggacctggagcgcgcaggcctggtctgagtctttcccacctggggccgccgtcttccgtcctaggagactccaggacaccctctga

SEQ ID NO: 410094 - DNA, 120 bp, Artificial Sequence
  ENSG00000148296_10 (sequence is synthesized)
gtccttgacgctggctctgtcccaggatctccacagacctcggcctctccatgtgagggggacacagtggtgctctgctgagttgtgagggcccagatcacagatcccatgtgagaaaga

SEQ ID NO: 410095 - DNA, 120 bp, Artificial Sequence
  ENSG00000148296_11 (sequence is synthesized)
gagagtttcagcgtcatccttgaacgcaggatccgggaccttcagacccagggaaagggtgagggagactggggcctggtctgctttcccgggcctgaaagcttccccgaggtttgcagg

SEQ ID NO: 410096 - DNA, 120 bp, Artificial Sequence
  ENSG00000148296_12 (sequence is synthesized)
gtcagggaggaggaacggtgggggtgggcagtcactgcctgttccccactgcctgtgttcgcaggagccacgggacagaagacggtggcctctgctgccgggccacgttagtccgcagct

SEQ ID NO: 410097 - DNA, 120 bp, Artificial Sequence
  ENSG00000148296_13 (sequence is synthesized)
cacccgaacagaggacaaccctgaggtgtggcatatgggcacctggcactgggagtcgggggagcacgtccaggcgtggtgcatcctggggcagaacgccatggctcctccccgctctct

SEQ ID NO: 410098 - DNA, 120 bp, Artificial Sequence
  ENSG00000148296_14 (sequence is synthesized)
tggcttctgcctgttggggtctcattcctttctgttccccagtgccccggggcggcattttactgctcagaatttggagggagggagcagtaccttcccggagtccacgcatgtgagttg

SEQ ID NO: 410099 - DNA, 120 bp, Artificial Sequence
  ENSG00000148296_15 (sequence is synthesized)
ggtcaagtgcattggacctagggaaagagaaagaaagaataaaagctggagagagagtgaagtgaatgcaagatacaaagtgggatggaagaattaaatccagagttccaggcaatcaaa

SEQ ID NO: 410100 - DNA, 120 bp, Artificial Sequence
  ENSG00000148296_16 (sequence is synthesized)
atgagtgcaggttgaaagaaaacaggtgaattttagtggcatatggatgataaagctgtaaataaaattcttttgatgaaactctccggttatgagacaaagactgtaactgaacaggag

SEQ ID NO: 410101 - DNA, 120 bp, Artificial Sequence
  ENSG00000148296_17 (sequence is synthesized)
aaaaagccctgtgaaagataggatgtgaggtgagcatgagcttgagctgagagacagacacaacagtatctgaaaagaatacatactctttccatgcatatatggaacatggatggaaac

SEQ ID NO: 410102 - DNA, 120 bp, Artificial Sequence
  ENSG00000148296_18 (sequence is synthesized)
tgaccacctactttgtccagaaaagaagtcttaagatatttcaaggaatcagtgtcgttatctgaccgtatcccaatgtcattaaaaaaaatttgagctatttttttttgttttttagat

SEQ ID NO: 410103 - DNA, 120 bp, Artificial Sequence
  ENSG00000148296_19 (sequence is synthesized)
tgtcactcaggctggagtgcagtggcatttcatatttggaatttttaaaacacacttataaattacctatgagttaaagaattccgaatggctattagaaatatttgggactaaaggata

SEQ ID NO: 410104 - DNA, 120 bp, Artificial Sequence
  ENSG00000148296_20 (sequence is synthesized)
ttgggactaaaggataatgaaaatgctacgtattaaaatttgtggaacagggcctggcatggtggctcatgctgtcaatcccagctctttgggaggcgggtggatcacttgagatcagga

SEQ ID NO: 410105 - DNA, 90 bp, Artificial Sequence
  ENSG00000148296_21 (sequence is synthesized)
tggatcacttgagatcaggagttcaaggctagcctggacaacatgataaaaccccatctctattgcaaacctgtagtcccagctgcttgg

SEQ ID NO: 410106 - DNA, 73 bp, Artificial Sequence
  ENSG00000148296_22 (sequence is synthesized)
aaaatttaagatttgtggaacagagctaaagcagcacaaaaaaacatagcccctaaatgtatgtgcatctaca

SEQ ID NO: 410107 - DNA, 120 bp, Artificial Sequence
  ENSG00000148296_23 (sequence is synthesized)
gcacaaaaaaacatagcccctaaatgtatgtgcatctacagataaatagtgccatttatacacacatacgctgtatgtctgtatttttaaagctaaagaaaaataagcatgcagcttaag

SEQ ID NO: 410108 - DNA, 120 bp, Artificial Sequence
  ENSG00000148296_24 (sequence is synthesized)
ttggaacaactcaaagtaaatggaagaaaaatctccaaaactgactaaaagtaatagaaagcctgagttgtaatcactgatgaaattgagtcagtagttaagaatgttcccctagacggt

SEQ ID NO: 410109 - DNA, 120 bp, Artificial Sequence
  ENSG00000148296_25 (sequence is synthesized)
tttacagggaagttccacgatatagagaacaggtaattccagacgtagacaaattctaacagaatcaattgagagaacacttcattcgtgaacttagctttgataccaaaactaggtaag

SEQ ID NO: 410110 - DNA, 86 bp, Artificial Sequence
  ENSG00000148296_26 (sequence is synthesized)
ttcattcgtgaacttagctttgataccaaaactaggtaagagaaagggaagttaccaaatacctgtgggcggcaagccacccaggc

SEQ ID NO: 410111 - DNA, 76 bp, Artificial Sequence
  ENSG00000148296_27 (sequence is synthesized)
aaaaagtgtccctttccctggaggagtttagagaagactctgctcttccacctcttgtggagggcctgacatccgg

SEQ ID NO: 410112 - DNA, 90 bp, Artificial Sequence
  ENSG00000148296_28 (sequence is synthesized)
ggaaagggagtgtccctttccctggaggagtttagagaagactctgctcttccacctcttgtggagggcctgacatccggcaggcctgcc

SEQ ID NO: 410113 - DNA, 76 bp, Artificial Sequence
  ENSG00000148296_29 (sequence is synthesized)
cagacattcggggccactaccggtctccgagcattggtagtagtggtctgtatttctacactctctcattgctgca

SEQ ID NO: 410114 - DNA, 120 bp, Artificial Sequence
  ENSG00000148296_30 (sequence is synthesized)
tttctacactctctcattgctgcacacagggagggagagacccacggaccctgtggggctggtccctacaaataccaatgtcaagattttagacaataataaaccaagtttagcaaagtg

SEQ ID NO: 410115 - DNA, 120 bp, Artificial Sequence
  ENSG00000148296_31 (sequence is synthesized)
cttttggggtcatttgctttttggggaacatcatggtggaacattgaactccgcgggccccttgtttgcgtgaggattttctcacctgccttccagccctgattcttctcgactatgggc

SEQ ID NO: 410116 - DNA, 120 bp, Artificial Sequence
  ENSG00000148297_0 (sequence is synthesized)
attcctataaagctaaaaatcgaggcggggccgagaggctgcggcggctgactaggttttcggaccgcggcgcggcggggaagagagactgcggcgggagggccaggccgtgggagagac

SEQ ID NO: 410117 - DNA, 120 bp, Artificial Sequence
  ENSG00000148297_1 (sequence is synthesized)
gcgggaaagtgcgggtcgcagaggcacttgaccaccccgccctaggccgacccggcggacgcggcgtctggtgtgcgggcgctggggcgggtcccaggtctccccgctgcgctgcttgag

SEQ ID NO: 410118 - DNA, 120 bp, Artificial Sequence
  ENSG00000148297_2 (sequence is synthesized)
gctcggccatggcccagcagagagccctgccccagagcaaggagacgctgctgcagtcctacaacaagcggctgaaggacgacattaagtccatcatggacaacttcaccgagatcatca

SEQ ID NO: 410119 - DNA, 120 bp, Artificial Sequence
  ENSG00000148297_3 (sequence is synthesized)
agaccgccaagattgaggacgagacgcaggtgtcacgggccactcagggtgaacaggacaattacgagatgcatgtgcgagccgccaacatcgtccgagccggcgagtccctgatgaagc

SEQ ID NO: 410120 - DNA, 120 bp, Artificial Sequence
  ENSG00000148297_4 (sequence is synthesized)
tggtgtccgacctcaagcagttcctgatcctcaatgacttcccctccgtgaacgaggccattgaccagcgcaaccagcagctgcgcacactgcaggaggagtgcgaccggaagctcatca

SEQ ID NO: 410121 - DNA, 120 bp, Artificial Sequence
  ENSG00000148297_5 (sequence is synthesized)
cgctgcgagacgagatctccattgacctctacgagctggaggaggagtattactcgtccagctcaagcctttgcgaagctaatgacctgcctctgtgcgaagcttacgggaggctggacc

SEQ ID NO: 410122 - DNA, 120 bp, Artificial Sequence
  ENSG00000148297_6 (sequence is synthesized)
tcgacacagactctgctgatggcctctcggcccctctgctggcgtccccggagcccagtgctggccccctacaggtggcagcccctgcccactcccatgctggtggccctggccccactg

SEQ ID NO: 410123 - DNA, 120 bp, Artificial Sequence
  ENSG00000148297_7 (sequence is synthesized)
agcacgcctgagcctccggggccacgcttcgttctcaggaacaaaacctgaggcagccctttggatgccctcacagccttgcttctctcagcctaggttcccatttggggacttcaggac

SEQ ID NO: 410124 - DNA, 120 bp, Artificial Sequence
  ENSG00000148297_8 (sequence is synthesized)
cccagagccactaggacttccttgggaagcccgttagcccagggtgggtcccgccaggacagtagggaaacagttgtttccctagccatttccgaatagcccatcattccgagtcatcat

SEQ ID NO: 410125 - DNA, 120 bp, Artificial Sequence
  ENSG00000148297_9 (sequence is synthesized)
ctctgtttgctgccttcctggccagccaggtggaagaaagtttccaagctaggtctggcccgttggggatctcagcagtggggcaggagggtgcctgatttcggggagtcctgacccgag

SEQ ID NO: 410126 - DNA, 120 bp, Artificial Sequence
  ENSG00000148297_10 (sequence is synthesized)
cctgttgtcagagttgggaggggctctgagcagtgttgggcaggccgggtctcccatcccgaggccagcgttcctgtgcagagccccatccactggttcttgccctgagccacatatgtc

SEQ ID NO: 410127 - DNA, 120 bp, Artificial Sequence
  ENSG00000148297_11 (sequence is synthesized)
tgtgccatgggctgagtgccacgacaggcccgtgtgacagctgctgcccacgcatgtggaagctaggtgggactcattcctaattctgccgttgtaatgagacttgattaaaacaccgcc

SEQ ID NO: 410128 - DNA, 120 bp, Artificial Sequence
  ENSG00000148297_12 (sequence is synthesized)
acttttttgcattgctgctctttcttcctcattccttgtcagtccaggaccatccttggtctcccagcagttgtccgagcagcagctcctcagctctgcctggacagcctggcccaaggt

SEQ ID NO: 410129 - DNA, 120 bp, Artificial Sequence
  ENSG00000148297_13 (sequence is synthesized)
cactctctcctcattggcacctggtaggtccccagtattcagtgaatggacctgctgccatcattgcacatccaggcacctgtgcctctgctggcatctcatcctcactgctaccagagc

SEQ ID NO: 410130 - DNA, 120 bp, Artificial Sequence
  ENSG00000148297_14 (sequence is synthesized)
cggtgctcctagtgccggtattttagagaggagaggatgtggacttagaaggggtgaggtgtaccacggccacagagctaggaagtgaagtggcaggaatcagaacttgaacctgatgga

SEQ ID NO: 410131 - DNA, 120 bp, Artificial Sequence
  ENSG00000148297_15 (sequence is synthesized)
agtctagacccagtgtcttttggtgccaggctcaccttagaaatgcagaagtcacaacactgggcaggaagtgtggggggagcacagttcgtccacaggaagtgtgggggagcaccccac

SEQ ID NO: 410132 - DNA, 120 bp, Artificial Sequence
  ENSG00000148297_16 (sequence is synthesized)
cccaggatccagccttggggacaggtaagaacacagctgacccatcaccacctgaaccagagaaccccacagccaagcagaaggcaccagacagacaggagcttgaggcccagtcctggc

SEQ ID NO: 410133 - DNA, 120 bp, Artificial Sequence
  ENSG00000148297_17 (sequence is synthesized)
tctggacctggcttctggggtggcctagggaagttgcttcccctctgagggagaatttccccattgatacgtgtggtgatctgttcccgcactattttagctgtggaaatgccttgtact

SEQ ID NO: 410134 - DNA, 120 bp, Artificial Sequence
  ENSG00000148297_18 (sequence is synthesized)
taaccactgaggaagaaaaagattacaaccagatggaagcatatatgaagcgagagcccggaaggaactggccagactttgtggtgggatcccacttaccctgttcctaaaatcctgagc

SEQ ID NO: 410135 - DNA, 120 bp, Artificial Sequence
  ENSG00000148297_19 (sequence is synthesized)
gataagacctgccatcagcttcattttctgcttggccaggaccatcattcccatgtgaaaatcaagttatttctccttcttaaagccaagccgctctgctgaccttttttcctctccagc

SEQ ID NO: 410136 - DNA, 120 bp, Artificial Sequence
  ENSG00000148297_20 (sequence is synthesized)
tcatggccttggcagcagagctccacggggaagcagctgataaccatttgcagttctctcttgggcctacgtcagacaggttttgtctccatgactctagcaaaactacacctattaagg

SEQ ID NO: 410137 - DNA, 120 bp, Artificial Sequence
  ENSG00000148297_21 (sequence is synthesized)
tcaccagtggcctccacattgctaagccccggcccattctcagtccatgtaactcttttatcccaagctttttattttgagggcagtggaactcatggaagtacttgtcagtttgcctct

SEQ ID NO: 410138 - DNA, 120 bp, Artificial Sequence
  ENSG00000148297_22 (sequence is synthesized)
ctgagcacattctccttcgtccatcaccacaaccagaatggatgatgattgcatatcctctggtatctagctgtattcagatttcttcagttgttccccaaatagtttttttaatgccta

SEQ ID NO: 410139 - DNA, 120 bp, Artificial Sequence
  ENSG00000148297_23 (sequence is synthesized)
cccaaatagtttttttaatgcctattttttttctttctagtccagaggtcttttatttttttaacacccacgatgccatgaattcatagggaagaggttccagcagctcaggctccttcc

SEQ ID NO: 410140 - DNA, 120 bp, Artificial Sequence
  ENSG00000148297_24 (sequence is synthesized)
ctgggtggagcaggctggcgcttcagttgaatccaggtacctttctctttggcttccctctttttctgatcattttccttcacgcgtttcaggaagctctctcggctcttagagtgctta

SEQ ID NO: 410141 - DNA, 120 bp, Artificial Sequence
  ENSG00000148297_25 (sequence is synthesized)
gtgtgctgaatatgcacattcattctcttggcaagaatcttgcccttacttgtttacaacagtgccaacagcatgctggggaacactgtagactctcccagtctagccatggtgacattt

SEQ ID NO: 410142 - DNA, 120 bp, Artificial Sequence
  ENSG00000148297_26 (sequence is synthesized)
tttttgaacagtacccattcccttgatatctacaatatcacctttctcatcaatttgcatatacttggccaaaggaacaactgcatgttttctgaaaggcctagagaacatatattgggt

SEQ ID NO: 410143 - DNA, 120 bp, Artificial Sequence
  ENSG00000148297_27 (sequence is synthesized)
cgtcattttggcgaattactggaaggtggcggttccagctgaaaggcttttatgcctgtttttattgtgtgttgcatttggttgttattttggagtcttaaaatctaaaacaggaccagg

SEQ ID NO: 410144 - DNA, 120 bp, Artificial Sequence
  ENSG00000148297_28 (sequence is synthesized)
ttattttggagtcttaaaatctaaaacaggaccaggtcaggcccagtggctcctgctgtaatcccagcactttgagaagccaaagcgggtggatcacttgtggtcagaagttttgagacc

SEQ ID NO: 410145 - DNA, 74 bp, Artificial Sequence
  ENSG00000148297_29 (sequence is synthesized)
cagaagtttttatagaaatcggccgggcgcggtggcttacgcctgcaaccccagcactttgggaggccaaggcg

SEQ ID NO: 410146 - DNA, 120 bp, Artificial Sequence
  ENSG00000148297_30 (sequence is synthesized)
ctgagcaccgcgcgcaaaggcccggccccagggccaggcaactccagcgccgaggccgtccagtgcggctggagggcagaggccgagaggcgcggcgcggaacttgagccccttgtcccg

SEQ ID NO: 410147 - DNA, 120 bp, Artificial Sequence
  ENSG00000148297_31 (sequence is synthesized)
ccccttgtcccggcgcaccggggaaccatgagggatgttaagcgagggagtggaattaccccccttttttttttcttttggagacgtagtctccccctgtcgcccaggctggagtgcagt

SEQ ID NO: 410148 - DNA, 62 bp, Artificial Sequence
  ENSG00000148297_32 (sequence is synthesized)
cctcaggtgaggaatgaccactttttaggacctcttccctgccgcgcagagactggagggag

SEQ ID NO: 410149 - DNA, 120 bp, Artificial Sequence
  ENSG00000148297_33 (sequence is synthesized)
ctccattgacctctacgagctggaggaggagtattactcgtccaggtataaatagcgctggactccccatgcagagcgggagcctgcctacctgggcctggccagcaggcagggctgcct

SEQ ID NO: 410150 - DNA, 120 bp, Artificial Sequence
  ENSG00000148297_34 (sequence is synthesized)
tctgctttttcaaattcttgctggtcttagcagtggagccatgcctgggtttcagagcagagctcctggccagagcgtttgaccgacagacaattcacatccatatgccagggccctggg

SEQ ID NO: 410151 - DNA, 120 bp, Artificial Sequence
  ENSG00000148297_35 (sequence is synthesized)
cctttcccacagtgcaatgtgatgaaaaccacaggactcacgccagtcggataggccgagtctggagaagggaggcgcctggctgtatcccccgcaggccctcttccgagagccttcctc

SEQ ID NO: 410152 - DNA, 120 bp, Artificial Sequence
  ENSG00000148297_36 (sequence is synthesized)
ctcgggcagtgcgttctggggctgtgctgctcctgttaccttctgaatccatatgtagagatttcagccaaggctgggccagccttttttgggcagtcaggtccacacctatgtccaggg

SEQ ID NO: 410153 - DNA, 120 bp, Artificial Sequence
  ENSG00000148297_37 (sequence is synthesized)
caattcgtgacccactcagccttatccacggagctggagccaacctacgtgccaggccccgtgctgggtcccagggatgcagaagggtcaaaacccatcatcctgacccttgtggggctc

SEQ ID NO: 410154 - DNA, 120 bp, Artificial Sequence
  ENSG00000148297_38 (sequence is synthesized)
cgtaagaagctgaaaccttcgaccgtttgagctggaggggccctgagaaatcagagtctacgtatcatttacttagggggaaacttaggctggagacagggaggccttccactctgcccc

SEQ ID NO: 410155 - DNA, 120 bp, Artificial Sequence
  ENSG00000148297_39 (sequence is synthesized)
attagcttagaaaatcaagattcagtccagcagatgcagagtccatgtccatcttgtgccttctcctggacaaacctttccttcctggtggtggatttaaaatactcctttctgcccatt

SEQ ID NO: 410156 - DNA, 120 bp, Artificial Sequence
  ENSG00000148297_40 (sequence is synthesized)
ggccatgctgggagccacagatatccagagccagcatgacctggggcttggtttccctgccctgggctcagtggcactgctgagctgcagcagtcctagagttttccagggggttctgag

SEQ ID NO: 410157 - DNA, 120 bp, Artificial Sequence
  ENSG00000148297_41 (sequence is synthesized)
ggaatctttggtccccagtactcattaactcagcagacatgaggcagcatttcctccacactagggtggctgagaggggtcctggggtgtttcagacccttctgggcatctccttccaca

SEQ ID NO: 410158 - DNA, 120 bp, Artificial Sequence
  ENSG00000148297_42 (sequence is synthesized)
gctgttcagtttgtcggtctctttgaggcagccaccgtccctgagggcccctgcacagagcagctgtgggcctgtaattcagcctgcctgccttgccttggggcagggagagagggaacc

SEQ ID NO: 410159 - DNA, 120 bp, Artificial Sequence
  ENSG00000148297_43 (sequence is synthesized)
cgcaaacccaggacatctgtgccaggcttcccatgccctcccccaacagtccctcagcttcacccagcggggcttccaggccagcctgtgtcccctcccgcaggcctcctgtccacacca

SEQ ID NO: 410160 - DNA, 120 bp, Artificial Sequence
  ENSG00000148297_44 (sequence is synthesized)
gcgccccctggggggcctcacacagcccctgtggcagaagcagttgccctcctctgtacattgcctttaagcgaccaggtcctggccgagtttcctctgccccttcttgctggtccccca

SEQ ID NO: 410161 - DNA, 120 bp, Artificial Sequence
  ENSG00000148297_45 (sequence is synthesized)
aagggcgctccgctccctgccctgccctgccctgttccgcatgagctgcgcctctgtgctcgcctgccccctctctgcttgttagttgctctttctggctctgcctctcctttgcgttcc

SEQ ID NO: 410162 - DNA, 120 bp, Artificial Sequence
  ENSG00000148297_46 (sequence is synthesized)
tcgggatgccactctgtgcccaggacggttctgagactgaacactgagggcaggagcaagggaggaagccaggggcgaggcaggccgcgggaaagccagggcccctgcctgcaggttaga

SEQ ID NO: 410163 - DNA, 120 bp, Artificial Sequence
  ENSG00000148297_47 (sequence is synthesized)
aagaggcgagcgtggattgtcacagctgcgggcatgggaagggctagctgagctcttcacctgcatcctggctgccgtgaggattccccgtgttagaggtggggacgcctgctggaggcc

SEQ ID NO: 410164 - DNA, 120 bp, Artificial Sequence
  ENSG00000148297_48 (sequence is synthesized)
gcctggctgatgtagggctatcgggaagtgccagggcctgtgttcccaactgtcgcccccttcaggctaagtctcaggcagggacagacccagaaagaacacagtctgccctcagagagc

SEQ ID NO: 410165 - DNA, 120 bp, Artificial Sequence
  ENSG00000148297_49 (sequence is synthesized)
tctttgcagtgtagtgacactggggtttctgcagtcagggaggagggagggtggccaggctgacagctttttgcaagaggagggggaccagcaccagctgggaggcataggctaggacag

SEQ ID NO: 410166 - DNA, 120 bp, Artificial Sequence
  ENSG00000148297_50 (sequence is synthesized)
gcccacgtggaggctgggcaggaagggcctgctgaggtcacacagctgttggtggttgggccagggcggcttcctcctttcagaatgctagggtggctctcaccactggccgcctctcct

SEQ ID NO: 410167 - DNA, 120 bp, Artificial Sequence
  ENSG00000148297_51 (sequence is synthesized)
tgccaggcctgccaactcaggggacagatggagcaggagtggagaaagggaaaggcaggtctggggtgtggtcgtgttttcttaactctgcttctgtcttgctctcccctcccctggctt

SEQ ID NO: 410168 - DNA, 120 bp, Artificial Sequence
  ENSG00000148297_52 (sequence is synthesized)
gtgggagagacgcgggaaagtgcgggtcgcagaggcacttgaccaccccgccctaggccgacccggcggacgcggcgtctggtgtgcgggcgctggggcgggtatgagggtcccaggtct

SEQ ID NO: 410169 - DNA, 120 bp, Artificial Sequence
  ENSG00000148297_53 (sequence is synthesized)
ggcccaccaaggggagcagagtctgagaaggggtggagacaggagaggccaggggctgagcagcgcgagtgaatagtgttctaggcaggaagcacccagtgcacagggagctggtcagta

SEQ ID NO: 410170 - DNA, 120 bp, Artificial Sequence
  ENSG00000148300_0 (sequence is synthesized)
atgcgcaacgcgtgcggggtctcttccggagtcttttcctggacggggtccctgcggtgggtgtgtttcggcctggcctgggcaggcgcttgtgctgccagggcgccgggcccggggagg

SEQ ID NO: 410171 - DNA, 120 bp, Artificial Sequence
  ENSG00000148300_1 (sequence is synthesized)
ccggggtctcgggtggccgccggcccaggcgctggacggcagcaggatggggaaggcgaaggtccccgcctccaagcgcgccccgagcagccccgtggctaagccgggtcctgtcaagac

SEQ ID NO: 410172 - DNA, 120 bp, Artificial Sequence
  ENSG00000148300_2 (sequence is synthesized)
gctcactcggaagaaaaacaagaagaaaaaaaggttttggaaaagcaaggcgcgggaagtaagcaagaagccagcaagcggccccggtgctgtggtgcgacctccaaaggcaccagaaga

SEQ ID NO: 410173 - DNA, 120 bp, Artificial Sequence
  ENSG00000148300_3 (sequence is synthesized)
cttttctcaaaactggaaggcgctgcaagagtggctgctgaaacaaaaatctcaggccccagaaaagcctcttgtcatctctcagatgggttccaaaaagaagcccaaaattatccagca

SEQ ID NO: 410174 - DNA, 120 bp, Artificial Sequence
  ENSG00000148300_4 (sequence is synthesized)
aaacaaaaaagagacctcgcctcaagtgaagggagaggagatgccggcaggaaaagaccaggaggccagcaggggctctgttccttcaggttccaagatggacaggagggcgccagtacc

SEQ ID NO: 410175 - DNA, 120 bp, Artificial Sequence
  ENSG00000148300_5 (sequence is synthesized)
tcgcaccaaggccagtggaacagagcacaataagaaaggaaccaaggaaaggacaaatggtgatattgttccagaacgaggggacatcgagcataagaagcggaaagctaaggaggcagc

SEQ ID NO: 410176 - DNA, 120 bp, Artificial Sequence
  ENSG00000148300_6 (sequence is synthesized)
cccagccccacccaccgaggaagacatctggtttgacgacgtggacccagcggatatcgaagctgccataggtccagaggcggccaagatagcgaggaaacagttgggtcagagcgaggg

SEQ ID NO: 410177 - DNA, 120 bp, Artificial Sequence
  ENSG00000148300_7 (sequence is synthesized)
cagcgtcagcctcagcctcgtgaaagagcaggccttcggcggcctgacaagagccttagccttggactgtgagatggtgggcgtgggccctaagggggaggagagcatggccgcccgtgt

SEQ ID NO: 410178 - DNA, 120 bp, Artificial Sequence
  ENSG00000148300_8 (sequence is synthesized)
gtccatcgtgaaccagtatgggaagtgcgtttatgacaagtacgtcaaaccaaccgagcccgtgacggactataggacagcggtcagtgggattcggcctgagaacctcaagcagggaga

SEQ ID NO: 410179 - DNA, 120 bp, Artificial Sequence
  ENSG00000148300_9 (sequence is synthesized)
agaattctagtggggcacgctctgcataatgacctaaaggtactatttcttgatcatccaaaaaagaagattcgggacacacagaaatataaacctttcaagagtcaagtaaagagtgga

SEQ ID NO: 410180 - DNA, 120 bp, Artificial Sequence
  ENSG00000148300_10 (sequence is synthesized)
aggccgtctctgagactactttcagagaagatccttgggctccaggtccagcaggcggagcactgttcaattcaggatgcccaggcagcaatgaggctgtacgtcatggtgaagaaggag

SEQ ID NO: 410181 - DNA, 120 bp, Artificial Sequence
  ENSG00000148300_11 (sequence is synthesized)
tgggagagcatggcccgagacaggcgccccctgctgactgctccagaccactgcagtgacgacgcctagcagtcctgccctgctgctgctgccgccccgctacagaggcaatgtgaccag

SEQ ID NO: 410182 - DNA, 120 bp, Artificial Sequence
  ENSG00000148300_12 (sequence is synthesized)
tcacagggacagatcacatctccccagagtggcaactctggtgaaaccttttcagaatcatggcagaggggcgtggcgtggtgctactgagaaggtcctccttcctcttgactttgtggt

SEQ ID NO: 410183 - DNA, 120 bp, Artificial Sequence
  ENSG00000148300_13 (sequence is synthesized)
ctgaaacctggtcttactgtccatgtgtgtttgggcccggatggtcagggtggggagcagggacggccatgggcacgcctggccacgctttaccgactgctgaccccctgggccaggtga

SEQ ID NO: 410184 - DNA, 120 bp, Artificial Sequence
  ENSG00000148300_14 (sequence is synthesized)
ggttggggcctgtgggccgccagtccatacggtgctgtcactgcccatcttcggtgacaccctggggtgaggtgctcagcaccttcctctcgaggagccacattttcctcctttgtgtta

SEQ ID NO: 410185 - DNA, 120 bp, Artificial Sequence
  ENSG00000148300_15 (sequence is synthesized)
ggggacataacaagctctgctgggcttgagggacccagaccaggtgtctgcagtcagctcctgagacacagctggccggcacaacaggtgttacatcaggggtttcctgtggccgtttga

SEQ ID NO: 410186 - DNA, 120 bp, Artificial Sequence
  ENSG00000148300_16 (sequence is synthesized)
actttgagcatttatctaaattaaattggcccagggttggctggtgggtcacccagcagaggcttctccccatagcacgaggatgtgttgcctgggcacggtgactgcggttattcctgg

SEQ ID NO: 410187 - DNA, 120 bp, Artificial Sequence
  ENSG00000148300_17 (sequence is synthesized)
aggtcggcagacatgccaaccttgggctatttgagctggagaagctatgtgatgctagccggtggctttctgggctaggccccagtttgaggctcccctgggaactagagccaggaacag

SEQ ID NO: 410188 - DNA, 120 bp, Artificial Sequence
  ENSG00000148300_18 (sequence is synthesized)
ccagtggcactgacaaggggacggagtccaaggcgttattgggccacctgacagctggacagaaaaggggcagacacaccgaggatgcgatttaaaataaatgcagatgtttacttggaa

SEQ ID NO: 410189 - DNA, 120 bp, Artificial Sequence
  ENSG00000148300_19 (sequence is synthesized)
atactctgcacagtatctcagtgcagacattcctgtcttaacacacaggaccagtcaaattcccgtgggcagccccagggttctgtgggatttcttgaacaccaactcttcttccttctc

SEQ ID NO: 410190 - DNA, 120 bp, Artificial Sequence
  ENSG00000148300_20 (sequence is synthesized)
ccaagaaagaaaagcaaaataagtgaatggaagggatgtgtgctatagggaaactttggagtgttttctaattcatccaagaaagtcagcccttcagttctttacctatcacagaacagt

SEQ ID NO: 410191 - DNA, 120 bp, Artificial Sequence
  ENSG00000148303_0 (sequence is synthesized)
ctttctctctcctcccgccgcccaagatgccgaaaggaaagaaggccaagggaaagaaggtggctccggccccagctgtcgtgaagaagcaggaggctaagaaagtggtgaatcccctgt

SEQ ID NO: 410192 - DNA, 120 bp, Artificial Sequence
  ENSG00000148303_1 (sequence is synthesized)
caggacatccagcccaaaagagacctcacccgctttgtgaaatggccccgctatatcaggttgcagcggcagagagccatcctctataagcggctgaaagtgcctcctgcgattaaccag

SEQ ID NO: 410193 - DNA, 73 bp, Artificial Sequence
  ENSG00000148303_2 (sequence is synthesized)
cgctatatcaggttgcagcggcagagagccatcctctataagccgccaaacagctactcagctgcttaagctg

SEQ ID NO: 410194 - DNA, 120 bp, Artificial Sequence
  ENSG00000148303_3 (sequence is synthesized)
gtcccaacgaagagaccacctgtccttcgagcaggagttaacaccgtcaccaccttggtggagaacaagaaagctcagctggtggtgattgcacacgacgtggatcccatcgagctggtt

SEQ ID NO: 410195 - DNA, 120 bp, Artificial Sequence
  ENSG00000148303_4 (sequence is synthesized)
gtgattgcacacgacgtggatcccatcgagctggttgtcttcttgcctgccctgtgtcgtaaaatgggggtcccttactgcattatcaagggaaaggcaagactgggacgtctagtccac

SEQ ID NO: 410196 - DNA, 120 bp, Artificial Sequence
  ENSG00000148303_5 (sequence is synthesized)
ggtggaagctatcaggaccaattacaatgacagatacgatgagatccgccgtcactggggtggcaatgtcctgggtcctaagtctgtggctcgtatcgccaagctcgaaaaggcaaaggc

SEQ ID NO: 410197 - DNA, 120 bp, Artificial Sequence
  ENSG00000148303_6 (sequence is synthesized)
ctttctctctcctcccgccgcccaagatggtgagtgagctgtagttccgtggcactatagccaggttccggctgtatccgctgccatcctcctccaggcgcggcctcggagggcctcctg

SEQ ID NO: 410198 - DNA, 120 bp, Artificial Sequence
  ENSG00000148303_7 (sequence is synthesized)
ctcctcctggcgctaggagagccccactcggtgtggcacggagacaccgaggtggattagagccccacttggtgtggcacggagacattgagatggactagagccccgggcggccgagag

SEQ ID NO: 410199 - DNA, 120 bp, Artificial Sequence
  ENSG00000148303_8 (sequence is synthesized)
cggaatgcgttgttcccggtgtcgcagggctgggtgtcgcaggcctggagcaccgcagtgcggggctcggagccctagcgtctctcgggcttgctgggggccgctccagaggccttccga

SEQ ID NO: 410200 - DNA, 120 bp, Artificial Sequence
  ENSG00000148303_9 (sequence is synthesized)
accaggaagagagagtagacctaatgccaagtcagtgatgggaccgaagtgggtgagggcagtactgacacagatccaacacatgcgtggctcttgcaatgatgtgaatctctcactgaa

SEQ ID NO: 410201 - DNA, 120 bp, Artificial Sequence
  ENSG00000148303_10 (sequence is synthesized)
ttcaaccttgaagtgcgaatccatgagctttttaaccctgagcaattgttacaagctaactgaaatttgctgcttttggtcaaaatacagtcttcagctaatgctttcttccagctggtt

SEQ ID NO: 410202 - DNA, 120 bp, Artificial Sequence
  ENSG00000148303_11 (sequence is synthesized)
aacgaagagaccacctgtccttcgagcaggtgagtaggccccaccttagggtgaacactgggggcgggctgttgcagtgatgtaaaatttcttggcctgaaattactgtgaagagtaaaa

SEQ ID NO: 410203 - DNA, 120 bp, Artificial Sequence
  ENSG00000148303_12 (sequence is synthesized)
ccgagctttttaacactgagtcagcagctgagcccagcagcttcttgtgactagagcaggccctgtgagtgctcacaaagtggttgtgtgttctaggagttaacaccgtcaccaccttgg

SEQ ID NO: 410204 - DNA, 120 bp, Artificial Sequence
  ENSG00000148303_13 (sequence is synthesized)
caatgatggttaagaatttcttcacctgaataaaccatgtggtcagcattgcatctgaggcaaaagactgtcttgagctaaaaggtatttttgcattctaaaagggaaactaaggcaaaa

SEQ ID NO: 410205 - DNA, 70 bp, Artificial Sequence
  ENSG00000148303_14 (sequence is synthesized)
gccaagggaaagaaggtggctccggccccagctgtcgtgaagaagcaggaggctaagtgtttgtgtgcag

SEQ ID NO: 410206 - DNA, 120 bp, Artificial Sequence
  ENSG00000148303_15 (sequence is synthesized)
atgatgtaaaagaatatttgctatctgagagatggtgatgacattttaaaccaccaagatcgctgatgcaccaacacccttcctagtggccccagacatgaacttgacatggaatttgag

SEQ ID NO: 410207 - DNA, 120 bp, Artificial Sequence
  ENSG00000148303_16 (sequence is synthesized)
gagcctgtggggccgcgactcagaggagtcatgagtccggggtgtctcctgggtgggcgacgcgaagagagcgtggtctcgggcttagccttgctctggccactcggggttcccggggct

SEQ ID NO: 410208 - DNA, 120 bp, Artificial Sequence
  ENSG00000148308_0 (sequence is synthesized)
gaagtcgagggaggtttgtgtcttattatcctccgggtccctcgctggctagtaggagagactggtgcttgccccgcccggtggactaactcgcttaattttaaataaaaagtcgaggac

SEQ ID NO: 410209 - DNA, 120 bp, Artificial Sequence
  ENSG00000148308_1 (sequence is synthesized)
acggcggtcgttttcccgaagacatgggccctcccatgggccatttgctccctggaggccctcgcgtcttgctgagcccggggagttaggatgacgcgagcggtgagggagcccggaacg

SEQ ID NO: 410210 - DNA, 120 bp, Artificial Sequence
  ENSG00000148308_2 (sequence is synthesized)
attccttcgcggaacaattgaggcgaggcctttgggagtactttgtgggacggaccctggcgggccctgccagacgcacagggatggcggcggaggcggccgatttggggctgggggccg

SEQ ID NO: 410211 - DNA, 120 bp, Artificial Sequence
  ENSG00000148308_3 (sequence is synthesized)
ccgtccccgtggagctgaggcgggagcgacgcatggtgtgcgtggagtacccgggagtggtgcgtgatgtggctaagatgctgccgactctgggcggcgaggaaggcgtctcccggatct

SEQ ID NO: 410212 - DNA, 120 bp, Artificial Sequence
  ENSG00000148308_4 (sequence is synthesized)
acgcagaccccaccaagaggctggagctgtacttccggcccaaggacccatactgccacccagtgtgcgccaaccgcttcagtaccagcagcctgctgctccgcatcaggaagagaacga

SEQ ID NO: 410213 - DNA, 120 bp, Artificial Sequence
  ENSG00000148308_5 (sequence is synthesized)
ggcggcagaaaggggtgctgggcactgaggcccactccgaggtcacatttgacatggagatccttggcatcatctccaccatttacaaatttcaggggatgtctgacttccagtacttgg

SEQ ID NO: 410214 - DNA, 120 bp, Artificial Sequence
  ENSG00000148308_6 (sequence is synthesized)
ctgtgcatacggaagcaggcggcaagcatacgtcaatgtatgacaaggtgctcatgctccggcccgagaaggaggcctttttccaccaggagctgccgctctacatccccccacccatct

SEQ ID NO: 410215 - DNA, 120 bp, Artificial Sequence
  ENSG00000148308_7 (sequence is synthesized)
tctcccggctggacgccccggtggactacttctaccgaccagagacccagcaccgggaaggctacaacaatccccccatctcaggtgagaatctgattggcctgagcagagcccggcgcc

SEQ ID NO: 410216 - DNA, 120 bp, Artificial Sequence
  ENSG00000148308_8 (sequence is synthesized)
cccacaatgccatctttgtcaactttgaggatgaggaggtgcccaagcagccactggaggctgcagcccagacgtggaggagagtctgcactaaccccgtggaccggaaggtggaggagg

SEQ ID NO: 410217 - DNA, 120 bp, Artificial Sequence
  ENSG00000148308_9 (sequence is synthesized)
agctgaggaagctgtttgacatccgtcccatctggtcccgaaatgctgtcaaggccaacatcagcgtccacccagacaagctcaaggtcttgcttcccttcatagcctattacatgataa

SEQ ID NO: 410218 - DNA, 120 bp, Artificial Sequence
  ENSG00000148308_10 (sequence is synthesized)
cctggcgcagcctatggattcgatttgggtatgacccccgaaaaaacccagatgccaagatttatcaagtcctcgatttccgaatccgttgtggaatgaaacacggttacgcccccagtg

SEQ ID NO: 410219 - DNA, 120 bp, Artificial Sequence
  ENSG00000148308_11 (sequence is synthesized)
acttgccggtcaaagcaaagcgcagcacctacaactacagcctccccatcaccgtcaagaagacatccagccagcttgtcaccatgcatgacctgaagcagggcctgggcccgtcgggga

SEQ ID NO: 410220 - DNA, 120 bp, Artificial Sequence
  ENSG00000148308_12 (sequence is synthesized)
cgagtggtgctcggaaaccagcttccagcaagtacaagctcaaggactctgtctacatcttccgggaaggggccttgccaccctatcggcagatgttctaccagttatgcgacttgaatg

SEQ ID NO: 410221 - DNA, 120 bp, Artificial Sequence
  ENSG00000148308_13 (sequence is synthesized)
tggaagagttgcagaagatcattcaccgcaatgacggggcagagaattcctgcacagaacgggatgggtggtgcctccccaagaccagcgacgagctcagggacaccatgtccctcatga

SEQ ID NO: 410222 - DNA, 120 bp, Artificial Sequence
  ENSG00000148308_14 (sequence is synthesized)
tccggcagaccatccgctccaagaggcctgctctcttttccagctcagccaaggctgatggcggaaaagagcagctgacgtacgagtctggggaagacgaggaggatgaggaggaggagg

SEQ ID NO: 410223 - DNA, 120 bp, Artificial Sequence
  ENSG00000148308_15 (sequence is synthesized)
aagaggaggaggaggacttcaagccatccgacggcagtgaaaacgaaatggagacagagattctggactacgtgtgacagggcccaaggctgggcctccctgacccggccagactggtgt

SEQ ID NO: 410224 - DNA, 120 bp, Artificial Sequence
  ENSG00000148308_16 (sequence is synthesized)
ctggcctaatgagggagccggggctccccattgccacccacagtgcccggaatggccctaggaggccctctgaggagagctagagtcccagcaaagggtgcagctgaccctagcactggc

SEQ ID NO: 410225 - DNA, 120 bp, Artificial Sequence
  ENSG00000148308_17 (sequence is synthesized)
tgtgacatgctgcttggtgctgcctctggtcctgaggggttagggacatccccaaagggtataccctggctctgccacccatgaaccagcccagcatccagccagtgagtgggcacccaa

SEQ ID NO: 410226 - DNA, 120 bp, Artificial Sequence
  ENSG00000148308_18 (sequence is synthesized)
tgcctctcaggatgagaccagtaaatgccggaggtggagctgggcagctgtggagccccaggccacaggccagtctcgcttggctctcatgactgtggtggtggagatagcgtggggagc

SEQ ID NO: 410227 - DNA, 120 bp, Artificial Sequence
  ENSG00000148308_19 (sequence is synthesized)
ctcgcccatggtctcacgtggcaagaagtgcctttagctctggatcccaaccgtttggcacagctttggccacagccaggcccctctggaattgtccttattaaaccagtttcccgagaa

SEQ ID NO: 410228 - DNA, 120 bp, Artificial Sequence
  ENSG00000148308_20 (sequence is synthesized)
cagggctgtgtgtgttggggacatctggcgaagaggtggtgacaagtctcagggaagtctggcaccagcagctgcatgtggttgtccttctcgagccctttgggagcctgggcccccact

SEQ ID NO: 410229 - DNA, 120 bp, Artificial Sequence
  ENSG00000148308_21 (sequence is synthesized)
gagccacgtgaccactccgggaatgatcggaattgggcacacacaggaggacagagccagagcaggccatgtgggctgcagctgtggcaggagcctcactggctcacgtttccgtcagtg

SEQ ID NO: 410230 - DNA, 120 bp, Artificial Sequence
  ENSG00000148308_22 (sequence is synthesized)
cggttgcccagcgggggttggcggtttccagagctgttcccacattcaggctcccgcaagccgctccacagccctgggggaggccgagaagggggcatcccgcacggtggaatcacctgc

SEQ ID NO: 410231 - DNA, 120 bp, Artificial Sequence
  ENSG00000148308_23 (sequence is synthesized)
cctccgtggccttccagcctgtctgcccaacctgctcctggtgaccagccagctccctggagagaccccatgggagcctacatggagtctgcaacactggcagccccagggctctggctc

SEQ ID NO: 410232 - DNA, 120 bp, Artificial Sequence
  ENSG00000148308_24 (sequence is synthesized)
aagaaaatgggatgacagtagtactacccaacagacgtattgggattgaatttaaaaagtgtgtgcagttctcagcacagggctgagtacagaacagggccttagtaagcggtggcctgt

SEQ ID NO: 410233 - DNA, 120 bp, Artificial Sequence
  ENSG00000148308_25 (sequence is synthesized)
gtgatcgccaggttggcctcagtcctgaggacagtgcaaagaacgtgactgtgggacatgtgggttcctgctgagaaatgtcctttggcttaatcccctggtcattgctgaccagccagt

SEQ ID NO: 410234 - DNA, 120 bp, Artificial Sequence
  ENSG00000148308_26 (sequence is synthesized)
ttccctcttggggccgggcaccttgtgggtgacacctggggggctgtgattagggcagctctgcccaccggggcctcggcaccttgcttccttttaggtcagccttcagacactgagggt

SEQ ID NO: 410235 - DNA, 120 bp, Artificial Sequence
  ENSG00000148331_0 (sequence is synthesized)
gcggcttggactgaggagcggacccggccgggcgcaggggctggactggcggagcaggtggggtccgcggccgccggagcgttccggtcggcgtctgggcatctcggcctcggcagaaag

SEQ ID NO: 410236 - DNA, 120 bp, Artificial Sequence
  ENSG00000148331_1 (sequence is synthesized)
cgcgacggccctgctgcgcggggcccgcggcgatgccgttcctgcacggcttccggaggatcatcttcgagtaccagccgctggtggatgcgattctgggctccctggggatccaggacc

SEQ ID NO: 410237 - DNA, 120 bp, Artificial Sequence
  ENSG00000148331_2 (sequence is synthesized)
ccgagcggcaggagtctctggaccggcccagttatgtcgccagcgaggagagccgaatccttgttctcactgagctgctggagaggaaagcccactctcccttttaccaggaaggcgtga

SEQ ID NO: 410238 - DNA, 120 bp, Artificial Sequence
  ENSG00000148331_3 (sequence is synthesized)
gcaacgccctgctcaagatggctgagctggggctgacgcgggcggccgacgttctcttgcggcatggggccaatctcaactttgaagacccagtcacctactacacggccttgcacatcg

SEQ ID NO: 410239 - DNA, 120 bp, Artificial Sequence
  ENSG00000148331_4 (sequence is synthesized)
ccgtcctgcggaaccagccggacatggtggagctgctggtgcatcacggggccgacgttaatcggagggaccggatccacgagagtagccccttggacctggccagcgaggagcctgagc

SEQ ID NO: 410240 - DNA, 120 bp, Artificial Sequence
  ENSG00000148331_5 (sequence is synthesized)
gcctgccctgcctgcagcgcctcctggaccttggagctgatgtcaatgccgctgacaagcatggaaaaactgctctgctccatgctctggccagcagcgacggggtgcagatccacaata

SEQ ID NO: 410241 - DNA, 120 bp, Artificial Sequence
  ENSG00000148331_6 (sequence is synthesized)
ctgagaacattcgtctcttactggaaggaggggcagacgtcaaggccaccaccaaagatggggacacagtgttcacctgcatcatcttcctgcttggtgagaccgtgggaggggacaaag

SEQ ID NO: 410242 - DNA, 120 bp, Artificial Sequence
  ENSG00000148331_7 (sequence is synthesized)
aggaggcccagatgatcaaccgcttctgcttccaagtcacacggctgctgctggcacacggggccgaccccagcgagtgcccagcccacgagtccctcacccacatctgcctgaagagct

SEQ ID NO: 410243 - DNA, 120 bp, Artificial Sequence
  ENSG00000148331_8 (sequence is synthesized)
ttaaactgcacttccctctcctgcgcttcctcctggagtccggagccgcctacaactgctccctgcacggtgcgtcctgctggtctggctttcacatcatctttgagaggctctgttccc

SEQ ID NO: 410244 - DNA, 120 bp, Artificial Sequence
  ENSG00000148331_9 (sequence is synthesized)
acccaggctgcacggaagacgagagccatgcggacctcctgcgcaaagctgagactgtcctggatctcatggtgaccaactctcagaaactccagctgcccgaaaacttcgatatccacc

SEQ ID NO: 410245 - DNA, 120 bp, Artificial Sequence
  ENSG00000148331_10 (sequence is synthesized)
ctgtgggcagcctggcggaaaagatccaggccctccacttctccttgaggcagctggagagctatcccccgcccctcaagcacctgtgccgtgtggccatccggctctaccttcagccgt

SEQ ID NO: 410246 - DNA, 120 bp, Artificial Sequence
  ENSG00000148331_11 (sequence is synthesized)
ggcctgtggatgtgaaggtcaaagccctgcctctgcccgacaggctgaagtggtacctccttagcgagcacagtggctccgtggaagatgacatctgataggtctcaggctacaggaacg

SEQ ID NO: 410247 - DNA, 120 bp, Artificial Sequence
  ENSG00000148331_12 (sequence is synthesized)
ggggacacgggcagctcaggtcagcctgttggtagatgctgggacagcattagaagagggtctttttgatctgggagatgagacgggatccttcatgagaaaagccagccaggtagagcc

SEQ ID NO: 410248 - DNA, 120 bp, Artificial Sequence
  ENSG00000148331_13 (sequence is synthesized)
tgaagctgtgatcactccagtggtgaagggtgcagctctggttcttccagagagactgcccccttccctccagcggcactccaagtcccccccatgttggaaagaggaacagggcttgga

SEQ ID NO: 410249 - DNA, 120 bp, Artificial Sequence
  ENSG00000148331_14 (sequence is synthesized)
ttgatgtttataccctctgaattggagggcagtgccagggcatttgcagaagctgggaaggaccaagcctcagcaccccagggctgcggggctcttgttggccgcacgtggcagtgcagc

SEQ ID NO: 410250 - DNA, 120 bp, Artificial Sequence
  ENSG00000148331_15 (sequence is synthesized)
tggagaggaagcctggggcacgtcctgtgcggtgccaccaaggccccacccctgccccttttccttccaggttctgttactcacagaagtgtttctggtgggctctgcgggagaagacac

SEQ ID NO: 410251 - DNA, 120 bp, Artificial Sequence
  ENSG00000148331_16 (sequence is synthesized)
taagggccccacaggcttgtttcatggtgttgcaagccaagctggcccctgcctgttcctgtagctctggggccaggtcagccgtggccccacctaccagaactgtgctctgctggcagc

SEQ ID NO: 410252 - DNA, 120 bp, Artificial Sequence
  ENSG00000148331_17 (sequence is synthesized)
tgtgcttttgccaaacccagggcctcagcgaccatgacttctgctaaaaagcaatcatgagtgcgtggctggggacagacctctctgaagtgtctcctgttgtgaggggctcactttgga

SEQ ID NO: 410253 - DNA, 120 bp, Artificial Sequence
  ENSG00000148331_18 (sequence is synthesized)
gccactgaagagccgactgtgccacccacttgcgagcctcagtcccttccaagctgcactggtcattgggaattgtgtaaacacctctggggataagctgaggtgactaaatgatatatt

SEQ ID NO: 410254 - DNA, 120 bp, Artificial Sequence
  ENSG00000148331_19 (sequence is synthesized)
cttatataaaatttccaccccgcccctccatagttcaggatagaggctcccacagcagccggtaaggaagtgggtggcaggtgtgaggggatgctgtgtttggggggttgtttccaagtc

SEQ ID NO: 410255 - DNA, 120 bp, Artificial Sequence
  ENSG00000148331_20 (sequence is synthesized)
tgtttccaagtccctgcaaagaagcaccactctagactggcaagggcctccacagtgtggaggtcccattttattatttttttttttcgagacactctgtcacccaggctggagtgcaat

SEQ ID NO: 410256 - DNA, 120 bp, Artificial Sequence
  ENSG00000148331_21 (sequence is synthesized)
gcgtgagccaccgcgcccagccccattttattttttactttaaatgcctgccaaggagcagcctcaagcccagagaagactgaggctacggggaacttcccttgctgcaggctgttgtaa

SEQ ID NO: 410257 - DNA, 120 bp, Artificial Sequence
  ENSG00000148331_22 (sequence is synthesized)
tgaggctacggggaacttcccttgctgcaggctgttgtaacactttaagggccccaggtctccactgccaagcaggacttggcacatgagcacccaccccacagcaccatcaggcagcac

SEQ ID NO: 410258 - DNA, 120 bp, Artificial Sequence
  ENSG00000148331_23 (sequence is synthesized)
ccatgggctccaccagcccagctctgtccctcccctaggtaaagatcacactgaagtcttcaagtccccagcaaccaagttgggggtggtttccttcctcttcaggcagccaggcccatg

SEQ ID NO: 410259 - DNA, 120 bp, Artificial Sequence
  ENSG00000148331_24 (sequence is synthesized)
gctggaaggccgggctggaggcccagggaatcggttactgatgtggccaccctattcccacatggggagcaccaggagccctggagccccttccacccaatcccatctcgcaggagagca

SEQ ID NO: 410260 - DNA, 120 bp, Artificial Sequence
  ENSG00000148331_25 (sequence is synthesized)
gggtctgggctcctgcctcaccgctggttcagcagcaccctccccgccgggtcccaccttgccttttgaagaagagcccgcataatgagtggacggcagacagctatatttagtggtgcc

SEQ ID NO: 410261 - DNA, 120 bp, Artificial Sequence
  ENSG00000148331_26 (sequence is synthesized)
tcgacactcacgaaccgccagcgtggcgcctggatcttgcccagctgccagctccccccaccaggactgtggttcctcagtttctcctgccagccccggctcatctcagggcaaagctat

SEQ ID NO: 410262 - DNA, 120 bp, Artificial Sequence
  ENSG00000148331_27 (sequence is synthesized)
agacatggtagatctcatcggggaggttctcctgcctctcctcggccaggaggctgaggcctgcactgcagatgatcctgcggaccacgtcaaggtcccggcacacgctgctgtccacgt

SEQ ID NO: 410263 - DNA, 120 bp, Artificial Sequence
  ENSG00000148331_28 (sequence is synthesized)
cgtccagaatcacgccctcctgggccatgttgtctttgatgacgatgatgccgttggggcggaggctgcccttgcagcgccgcaggaactcggccaggtgctgatcggtgaggtggcctg

SEQ ID NO: 410264 - DNA, 120 bp, Artificial Sequence
  ENSG00000148331_29 (sequence is synthesized)
gggagggcagaggcaaggttaccagggcaccatgcaagcggatgtcggcactggatgggatgtacttctcagccccgctgagcccctcatttgtgcccagcattttgtgtgcacacatgg

SEQ ID NO: 410265 - DNA, 120 bp, Artificial Sequence
  ENSG00000148331_30 (sequence is synthesized)
cctcattggctctcagtcccgagagatttactaaaccccaattcatagaataggaaactgtggctcagaggtcatctacctaaagacacattaagccagaatttgacttgacgggatggc

SEQ ID NO: 410266 - DNA, 120 bp, Artificial Sequence
  ENSG00000148331_31 (sequence is synthesized)
ttacaagtcctgcctgatacctacacaccatgatgccccacccctgccaggcttggatcggaggagtgaacctgggctaagagtttggcattgcaggagctcccagagagactgccttcc

SEQ ID NO: 410267 - DNA, 120 bp, Artificial Sequence
  ENSG00000148331_32 (sequence is synthesized)
ctacactagaagtccccacaaaggcttctgagaccacaaaatacaaggccagacctagagtgtccacagcaggcctgtgctgcccgcctcaggaggtggccgactgctgctagcggcctg

SEQ ID NO: 410268 - DNA, 120 bp, Artificial Sequence
  ENSG00000148331_33 (sequence is synthesized)
ccgccacgtcagcagcccagggcacagcgctcgaggtgtgctgttaggctaagagggtgcagggctagacacgaagcttaaactattcatcttattaaaaataaaacccttataaaactc

SEQ ID NO: 410269 - DNA, 120 bp, Artificial Sequence
  ENSG00000148334_0 (sequence is synthesized)
gagcgaacatggacccggctgcgcgggtggtgcgggcgctgtggcctggtgggtgcgccttggcctggaggctgggaggccgcccccagccgctgctacccacgcagagccgggctggct

SEQ ID NO: 410270 - DNA, 120 bp, Artificial Sequence
  ENSG00000148334_1 (sequence is synthesized)
ccgagccccgtggctgcagctcgtaaggggagcccgcggctgctgggagctgcggcgctggccctggggggagccctggggctgtaccacacggcgcggtggcacctgcgcgcccaggac

SEQ ID NO: 410271 - DNA, 120 bp, Artificial Sequence
  ENSG00000148334_2 (sequence is synthesized)
cggtggcacctgcgcgcccaggacctccacgcagagcgctcagccgcgcagctctccctgtccagccgcctgcagctgaccctgtaccagtacaagacgtgtcccttctgcagcaaggtc

SEQ ID NO: 410272 - DNA, 120 bp, Artificial Sequence
  ENSG00000148334_3 (sequence is synthesized)
cgagccttcctcgacttccatgccctgccctaccaggtggtggaggtgaaccctgtgcgcagggctgagatcaagttctcctcctacagaaaggtgcccatcctggtggcccaggaagga

SEQ ID NO: 410273 - DNA, 120 bp, Artificial Sequence
  ENSG00000148334_4 (sequence is synthesized)
gaaagctcgcaacaactaaatgactcctctgtcatcatcagcgccctcaagacctacctggtgtcggggcagcccctggaagagatcatcacctactacccagccatgaaggctgtgaac

SEQ ID NO: 410274 - DNA, 120 bp, Artificial Sequence
  ENSG00000148334_5 (sequence is synthesized)
gagcagggcaaggaggtgaccgagttcggcaataagtactggctcatgctcaacgagaaggaggcccagcaagtgtatggtgggaaggaggccaggacggaggagatgaagtggcggcag

SEQ ID NO: 410275 - DNA, 120 bp, Artificial Sequence
  ENSG00000148334_6 (sequence is synthesized)
tgtgtaccgcacgcccaccgaggctctggcgtcctttgactacattgtccgcgagggcaagttcggagccgtggagggtgccgtggccaagtacatgggtgcagcggccatgtacctcat

SEQ ID NO: 410276 - DNA, 120 bp, Artificial Sequence
  ENSG00000148334_7 (sequence is synthesized)
cagcaagcgactcaagagcaggcaccgcctccaggacaacgtgcgcgaggacctctatgaggctgctgacaagtgggtggctgctgtgggcaaggaccggcccttcatggggggccagaa

SEQ ID NO: 410277 - DNA, 120 bp, Artificial Sequence
  ENSG00000148334_8 (sequence is synthesized)
gccgaatctcgctgatttggcggtgtatggcgtgctgcgtgtgatggaggggctggatgcgttcgatgacctgatgcagcacacgcacatccagccctggtacctgcgggtggagagggc

SEQ ID NO: 410278 - DNA, 120 bp, Artificial Sequence
  ENSG00000148334_9 (sequence is synthesized)
catcaccgaggcctccccagcgcactgaatgtccccgcgcagagcagagggaaggcagcggaagacgccagctgccagggcctggggccactgggccagcgcctggcgatactggttggg

SEQ ID NO: 410279 - DNA, 120 bp, Artificial Sequence
  ENSG00000148334_10 (sequence is synthesized)
ggcaggatcattctgccccttgtccacgcacccccaccagccctctcgcttctaacacagggcacctgctggggctcagggatgttagggacgagttccagccctgccactgccctgggg

SEQ ID NO: 410280 - DNA, 120 bp, Artificial Sequence
  ENSG00000148334_11 (sequence is synthesized)
cgacccctccctgtccctgcctccctgctctgccgcccctcttcctggaccctcagtggctgtcccatggctacatcctgtgggtgggggccctcgacaggacagcaggacggtttgttt

SEQ ID NO: 410281 - DNA, 120 bp, Artificial Sequence
  ENSG00000148334_12 (sequence is synthesized)
tcagtggaatcccatccctgggttcccctggttcccactcttcccaagcctcccgggactgggacatgtttgcaataaaggaaaggtttgtggcgcctgtcatggcaggcatctcatgga

SEQ ID NO: 410282 - DNA, 120 bp, Artificial Sequence
  ENSG00000148334_13 (sequence is synthesized)
gtgatcccatcacacccctcaggagaccagcgggaggccgaggcctagggcaggtgggaaacgcattatggattatgggtcccttggccaagatgggacttggacccagagctcctgctc

SEQ ID NO: 410283 - DNA, 120 bp, Artificial Sequence
  ENSG00000148334_14 (sequence is synthesized)
acctcccctggggacagcagggctggccttgaagccggaagcctgggccctgactggcgcctcctctgtggctttctccctggcctggtctcttgcctttaccacagcctccccgtctgg

SEQ ID NO: 410284 - DNA, 120 bp, Artificial Sequence
  ENSG00000148334_15 (sequence is synthesized)
agagagaaccgcaacacctggtgccgggtcgggtcgtttccggggctttcagtggccggaagtcgcggcgcctgtactgactctaggaagggctggagttgttttgaatgggcgcccgta

SEQ ID NO: 410285 - DNA, 120 bp, Artificial Sequence
  ENSG00000148334_16 (sequence is synthesized)
agagaggtgggcaactctccctgtccagccgcctgcagctgaccctgtaccagtacaagacgtgtcccttctgcagcaagaaaggtgcccatcctggtggcccaggaaggagaaagctcg

SEQ ID NO: 410286 - DNA, 120 bp, Artificial Sequence
  ENSG00000148334_17 (sequence is synthesized)
cgcctatgcggtggaggctccgggcttcagctagggcgggggagcccagcagaaggaccgagcagcctggcaccccactttgccatcctctccctggaaatctcggggtcggcgggccgg

SEQ ID NO: 410287 - DNA, 120 bp, Artificial Sequence
  ENSG00000148334_18 (sequence is synthesized)
ggccattgcttttggtggcttcctccagggaggcctcccctgagttccctcctgggagcacgtggagctgctgcttagatttccagagtacagagtggctcgcacctgtaatcccagcac

SEQ ID NO: 410288 - DNA, 120 bp, Artificial Sequence
  ENSG00000148335_0 (sequence is synthesized)
cgcgtccccaagaggtctacgggccggacctgggcagggactacggagcagtccatgggtcggggtacaggaggaaagtcaaggcactcaaagcccaggagagtcgcggttgctgatcgt

SEQ ID NO: 410289 - DNA, 120 bp, Artificial Sequence
  ENSG00000148335_1 (sequence is synthesized)
ggtgcttgagtagagccgtggttggtgacagcatgacgagcgaggtgatagaagacgagaagcaattctattccaaggccaagacctactggaaacaaatcccacccacggtggacggca

SEQ ID NO: 410290 - DNA, 120 bp, Artificial Sequence
  ENSG00000148335_2 (sequence is synthesized)
tgcttggggggtatggccacatctccagcatcgacatcaacagctcccggaagtttctgcagaggtttttgagggaaggcccgaacaagacaggaacgtcctgtgccctggactgtggag

SEQ ID NO: 410291 - DNA, 120 bp, Artificial Sequence
  ENSG00000148335_3 (sequence is synthesized)
ggatcaccaagcggctgctcctgccgctgttcagagaggtggatatggtcgacataacggaggacttcctggttcaagccaagacctacctgggggaggagggcaagagggtgaggaact

SEQ ID NO: 410292 - DNA, 120 bp, Artificial Sequence
  ENSG00000148335_4 (sequence is synthesized)
acttctgttgtgggctccaggacttcaccccggagccggactcttacgacgtgatctggatccagtgggtgataggccacctcaccgatcagcacctggccgagttcctgcggcgctgca

SEQ ID NO: 410293 - DNA, 120 bp, Artificial Sequence
  ENSG00000148335_5 (sequence is synthesized)
agggcagcctccgccccaacggcatcatcgtcatcaaagacaacatggcccaggagggcgtgattctggacgacgtggacagcagcgtgtgccgggaccttgacgtggtccgcaggatca

SEQ ID NO: 410294 - DNA, 120 bp, Artificial Sequence
  ENSG00000148335_6 (sequence is synthesized)
tctgcagtgcaggcctcagcctcctggccgaggagaggcaggagaacctccccgatgagatctaccatgtctatagctttgccctgagatgagccggggctggcaggagaaactgaggaa

SEQ ID NO: 410295 - DNA, 120 bp, Artificial Sequence
  ENSG00000148335_7 (sequence is synthesized)
gcgagctgtcgcgtctggtcgtggtctggcggagctgcggttggcttgtggcgtctccgccgccgccgccctcccttcctcttccccatcttcttctctcggtcccgggagcccccgccc

SEQ ID NO: 410296 - DNA, 120 bp, Artificial Sequence
  ENSG00000148335_8 (sequence is synthesized)
actaaatatagctgtctgccgtccactcattatgcgggctcttcttcaaaaggcaaggtgggacccggcggggagggtgctgctgaaccagcggtgaggcaggagcccagaccctgctct

SEQ ID NO: 410297 - DNA, 120 bp, Artificial Sequence
  ENSG00000148335_9 (sequence is synthesized)
cctgcgagatgggattgggtggaaggggctccagggctcctggtgctccccatgtgggaatagggtggccacatcagtaaccgattccctgggcctccagcccggccttccagccatggg

SEQ ID NO: 410298 - DNA, 120 bp, Artificial Sequence
  ENSG00000148335_10 (sequence is synthesized)
cctggctgcctgaagaggaaggaaaccacccccaacttggttgctggggacttgaagacttcagtgtgatctttacctaggggagggacagagctgggctggtggagcccatgggtgctg

SEQ ID NO: 410299 - DNA, 120 bp, Artificial Sequence
  ENSG00000148335_11 (sequence is synthesized)
gctccgaggtgccccatgtgcggcaggaagaagcagcctccacaggactgcgctcagcgggagacggggcttccccgtgaagaggtgctgagtgcgaatgcccactccaacacctggtca

SEQ ID NO: 410300 - DNA, 120 bp, Artificial Sequence
  ENSG00000148335_12 (sequence is synthesized)
ctgtgtgatcttgagaaagagttgagcctctctgggccctggcttccccaacaaccaaaggctgtacagagagcggcttaggagagagctcctgtgtgcgccgccgagggctctgctggc

SEQ ID NO: 410301 - DNA, 120 bp, Artificial Sequence
  ENSG00000148335_13 (sequence is synthesized)
caacagcctgcagcaagggaagttccccgtagcctcagtcttctctgggcttgaggctgctccttggcaggcatttaaagtaaaaaataaaatggggctgggcgcggtggctcacgcctg

SEQ ID NO: 410302 - DNA, 120 bp, Artificial Sequence
  ENSG00000148335_14 (sequence is synthesized)
ctgcctgggcgccgattcccgggacgcgccggccgacagcaggggaggcggcagcagggaccgcagcagcccccgcttccgcacggcccgccgggtcgcggagagtcgcggttgctgatc

SEQ ID NO: 410303 - DNA, 120 bp, Artificial Sequence
  ENSG00000148335_15 (sequence is synthesized)
ggcggagctgcggttggcttgtggcgtctccgccgccgccgccctcccttcctcttccccatcttcttctctcggtcccgggagcccccgcccggagaaggcccgaacaagacaggaacg

SEQ ID NO: 410304 - DNA, 120 bp, Artificial Sequence
  ENSG00000148335_16 (sequence is synthesized)
actgccgagtccatgtggggtgccaccttttacacatgtaacactgcaggattgttggctatctcttggtacctaccccaaagccttgaggagctgggctgggtgggcacagtggggtaa

SEQ ID NO: 410305 - DNA, 120 bp, Artificial Sequence
  ENSG00000148335_17 (sequence is synthesized)
tggctgttaggcagaattgaggtgcctgaattgggcaaacctctcttcaactgttgggttttgccagggacgaaacccttgctctcctgccatgtccacgggtgtttggactgagggtgt

SEQ ID NO: 410306 - DNA, 120 bp, Artificial Sequence
  ENSG00000148335_18 (sequence is synthesized)
tggctattctggacgaagactcctagttatgtgccatggtttccaccctctgctccacccccagccttttctgtaccaggctgggacccccagtcctggagccccccaccttcttgtctc

SEQ ID NO: 410307 - DNA, 120 bp, Artificial Sequence
  ENSG00000148335_19 (sequence is synthesized)
atggctggcactggaggctgctgttggccacctgctccatccagcgcctcccctccctccatgttccctctctgcacccttgttcacctgttgccccgcttccattctccccattcctct

SEQ ID NO: 410308 - DNA, 120 bp, Artificial Sequence
  ENSG00000148335_20 (sequence is synthesized)
ctgccgttgtttacctggagactcaggagagattagtgcacctgttcaagttatcacctttaagtggaaattagctttcatttagaaatgtgtggcccagggcaggggcagtggctcact

SEQ ID NO: 410309 - DNA, 67 bp, Artificial Sequence
  ENSG00000148335_21 (sequence is synthesized)
tttagaaatgtgtggcccagggcaggggcagtggctcactcctgtcatcccagccccttgggatgcc

SEQ ID NO: 410310 - DNA, 120 bp, Artificial Sequence
  ENSG00000148335_22 (sequence is synthesized)
gaatggttggacttttgtctgtaggattttcttagagtggaaaatgttagtcaatgcccacctggtatcaggcactgggctaatggtgtacaaggtaatgtctctacccccaggaagctg

SEQ ID NO: 410311 - DNA, 80 bp, Artificial Sequence
  ENSG00000148337_0 (sequence is synthesized)
cttacgagcccacaggccccggagtagcagcggggaggccgggagcccgcgggccggagccgcccggccgaggcgtgggg

SEQ ID NO: 410312 - DNA, 120 bp, Artificial Sequence
  ENSG00000148337_1 (sequence is synthesized)
gagggcgcgcggggaggcgagccaccatgttcagccagcagcagcagcagcagctccagcaacagcagcagcagctccagcagttacagcagcagcagctccagcagcagcaattgcagc

SEQ ID NO: 410313 - DNA, 120 bp, Artificial Sequence
  ENSG00000148337_2 (sequence is synthesized)
agcagcagttactgcagctccagcagctgctccagcagtccccaccacaggccccgttgcccatggctgtcagccgggggctccccccgcagcagccacagcagccgcttctgaatctcc

SEQ ID NO: 410314 - DNA, 120 bp, Artificial Sequence
  ENSG00000148337_3 (sequence is synthesized)
agggcaccaactcagcctccctcctcaacggctccatgctgcagagagctttgcttttacagcagttgcaaggactggaccagtttgcaatgccaccagccacgtatgacactgccggtc

SEQ ID NO: 410315 - DNA, 120 bp, Artificial Sequence
  ENSG00000148337_4 (sequence is synthesized)
tcaccatgcccacagcaacactgggtaacctccgaggctatggcatggcatccccaggcctcgcagcccccagcctcacacccccacaactggccactccaaatttgcaacagttctttc

SEQ ID NO: 410316 - DNA, 120 bp, Artificial Sequence
  ENSG00000148337_5 (sequence is synthesized)
cccaggccactcgccagtccttgctgggacctcctcctgttggggtccccatgaacccttcccagttcaacctttcaggacggaacccccagaaacaggcccggacctcctcctctacca

SEQ ID NO: 410317 - DNA, 120 bp, Artificial Sequence
  ENSG00000148337_6 (sequence is synthesized)
cccccaatcgaaaggattcttcttctcagacaatgcctgtggaagacaagtcagaccccccagaggggtctgaggaagccgcagagccccggatggacacaccagaagaccaagatttac

SEQ ID NO: 410318 - DNA, 120 bp, Artificial Sequence
  ENSG00000148337_7 (sequence is synthesized)
cgccctgcccagaggacatcgccaaggaaaaacgcactccagcacctgagcctgagccttgtgaggcgtccgagctgccagcaaagagattgaggagctcagaagagcccacagagaagg

SEQ ID NO: 410319 - DNA, 120 bp, Artificial Sequence
  ENSG00000148337_8 (sequence is synthesized)
aacctccagggcagttacaggtgaaggcccagccgcaggcccggatgacagtaccgaaacagacacagacaccagacctgctgcctgaggccctggaagcccaagtgctgccacgattcc

SEQ ID NO: 410320 - DNA, 120 bp, Artificial Sequence
  ENSG00000148337_9 (sequence is synthesized)
agccacgggtcctgcaggtccaggcccaggtgcagtcacagactcagccgcggataccatccacagacacccaggtgcagccaaagctgcagaagcaggcgcaaacacagacctctccag

SEQ ID NO: 410321 - DNA, 120 bp, Artificial Sequence
  ENSG00000148337_10 (sequence is synthesized)
agcacttagtgctgcaacagaagcaggtgcagccacagctgcagcaggaggcagagccacagaagcaggtgcagccacaggtacagccacaggcacattcacagggcccaaggcaggtgc

SEQ ID NO: 410322 - DNA, 120 bp, Artificial Sequence
  ENSG00000148337_11 (sequence is synthesized)
agctgcagcaggaggcagagccgctgaagcaggtgcagccacaggtgcagccccaggcacattcacagcccccaaggcaggtgcagctgcagctgcagaagcaggtccagacacagacat

SEQ ID NO: 410323 - DNA, 120 bp, Artificial Sequence
  ENSG00000148337_12 (sequence is synthesized)
cagcctcacacccagccgcaggtgtcgttgctggctccagagcaaacaccagttgtggttcatgtctgcgggctggagatgccacctgatgcagtagaagctggtggaggcatggaaaag

SEQ ID NO: 410324 - DNA, 120 bp, Artificial Sequence
  ENSG00000148337_13 (sequence is synthesized)
accttgccagagcctgtgggcacccaagtcagcatggaagagattcagaatgagtcggcctgtggcctagatgtgggagaatgtgaaaacagagcgagagagatgccaggggtatggggc

SEQ ID NO: 410325 - DNA, 120 bp, Artificial Sequence
  ENSG00000148337_14 (sequence is synthesized)
gccgggggctccctgaaggtcaccattctgcagagcagtgacagccgggcctttagcactgtacccctgacacctgtcccccgccccagtgactccgtctcctccacccctgcggctacc

SEQ ID NO: 410326 - DNA, 120 bp, Artificial Sequence
  ENSG00000148337_15 (sequence is synthesized)
agcactccctctaagcaggccctccagttcttctgctacatctgcaaggccagctgctccagccagcaggagttccaggaccacatgtcggagcctcagcaccagcagcggctaggggag

SEQ ID NO: 410327 - DNA, 120 bp, Artificial Sequence
  ENSG00000148337_16 (sequence is synthesized)
atccagcacatgagccaagcctgcctcctgtccctgctgcccgtgccccgggacgtcctggagacagaggatgaggagcctccaccaaggcgctggtgcaacacctgccagctctactac

SEQ ID NO: 410328 - DNA, 120 bp, Artificial Sequence
  ENSG00000148337_17 (sequence is synthesized)
atgggggacctgatccaacaccgcaggacacaggaccacaagattgccaaacaatccttgcgacccttctgcaccgtttgcaaccgctacttcaaaacccctcgcaagtttgtggagcac

SEQ ID NO: 410329 - DNA, 120 bp, Artificial Sequence
  ENSG00000148337_18 (sequence is synthesized)
gtgaagtcccaggggcataaggacaaagccaaggagctgaagtcgcttgagaaagaaattgctggccaagatgaggaccacttcattacagtggacgctgtgggttgcttcgagggtgat

SEQ ID NO: 410330 - DNA, 120 bp, Artificial Sequence
  ENSG00000148337_19 (sequence is synthesized)
gaagaagaggaagaggatgatgaggatgaagaagagatcgaggttgaggaggaactctgcaagcaggtgaggtccagagatatatccagagaggagtggaagggctcggagacctacagc

SEQ ID NO: 410331 - DNA, 120 bp, Artificial Sequence
  ENSG00000148337_20 (sequence is synthesized)
cccaatactgcatatggtgtggacttcctggtgcccgtgatgggctatatctgccgcatctgccacaagttctatcacagcaactcaggggcacagctctcccactgcaagtccctgggc

SEQ ID NO: 410332 - DNA, 120 bp, Artificial Sequence
  ENSG00000148337_21 (sequence is synthesized)
cactttgagaacctgcagaaatacaaggcggccaagaaccccagccccaccacccgacctgtgagccgccggtgcgcaatcaacgcccggaacgctttgacagccctgttcacctccagc

SEQ ID NO: 410333 - DNA, 120 bp, Artificial Sequence
  ENSG00000148337_22 (sequence is synthesized)
ggccgcccaccctcccagcccaacacccaggacaaaacacccagcaaggtgacggctcgaccctcccagcccccactacctcggcgctcaacccgcctcaaaacctgatagagggacctc

SEQ ID NO: 410334 - DNA, 120 bp, Artificial Sequence
  ENSG00000148337_23 (sequence is synthesized)
cctgtccctggcctgcctgggtccagatctgctaatgctttttaggagtctgcctggaaactttgacatggttcatgtttttactcaaaatccaataaaacaaggtagtttggctgtgca

SEQ ID NO: 410335 - DNA, 120 bp, Artificial Sequence
  ENSG00000148337_24 (sequence is synthesized)
tcgccgcgctgcgcacggatggcggcgggagccgcagaggtgtgtgtgtgctggcgggaggccgtgcccggtcctcgatgcccgcgggactacgtcctcttctagggactgggatgcggg

SEQ ID NO: 410336 - DNA, 120 bp, Artificial Sequence
  ENSG00000148337_25 (sequence is synthesized)
ggctgacctctgccacggcccaggaattcccatggggtttccttgtttctagaaggagaaagttggaacatgaattcaacaaatatttactaggtacctgctagaagccaggccctgtcc

SEQ ID NO: 410337 - DNA, 120 bp, Artificial Sequence
  ENSG00000148337_26 (sequence is synthesized)
taggcactgaagattcagcaacgaataagacagccaaggcctctgccctcatagatcttgcatcaagctggggagacagacagtaaataaaaatgggattatactaagtatcctatactg

SEQ ID NO: 410338 - DNA, 120 bp, Artificial Sequence
  ENSG00000148337_27 (sequence is synthesized)
atgggattatactaagtatcctatactgctgtatcactgatgccaggccagcagcctggcatcacatggagttggttgaaaagaagaatctcagggccaggtgcagtggcccacacctgt

SEQ ID NO: 410339 - DNA, 80 bp, Artificial Sequence
  ENSG00000148337_28 (sequence is synthesized)
caacatggcgaaacagcccgcacctgtaatcccaggtatggatcagtggctactatgtgccagatctcagcaagacagag

SEQ ID NO: 410340 - DNA, 120 bp, Artificial Sequence
  ENSG00000148337_29 (sequence is synthesized)
aacacgattcctctggccaggccaaggggagggcgacactgacaggcgccccccacccaggggccgtggcgaagcaaggggccggctgctcagaaaaggataagaagtggtttctcctcc

SEQ ID NO: 410341 - DNA, 120 bp, Artificial Sequence
  ENSG00000148337_30 (sequence is synthesized)
cagcaggaggcagagccgctgaagcaggtgcagccacaggtccacacacaggcacagccaagcgtccagccacaggagcatcctccagcgcaggtgtcagtacagccaccagagcagacc

SEQ ID NO: 410342 - DNA, 120 bp, Artificial Sequence
  ENSG00000148337_31 (sequence is synthesized)
gacacaggaccacaagccacccacaccacgaagagatgtgtttgcccacgttccagtgcaggggtggagcacagcccggcttgttacagatatgattgccaaacaatccttgcgaccctt

SEQ ID NO: 410343 - DNA, 120 bp, Artificial Sequence
  ENSG00000148337_32 (sequence is synthesized)
ctgtctctgcctggaaggtgctgggtcctcccatcttccttcccttctctcctcctggatgagtcccactcatccttcaagtctcagtatggatgtcaccaccgggagcccacccaatgc

SEQ ID NO: 410344 - DNA, 120 bp, Artificial Sequence
  ENSG00000148337_33 (sequence is synthesized)
cccagactggatcaggcctctatgctgagcccctagccctcctcagccctccacgaccttctctccaggattgactgctgtgcttatctgagtgctgttatgtttccccatgaaagatga

SEQ ID NO: 410345 - DNA, 120 bp, Artificial Sequence
  ENSG00000148337_34 (sequence is synthesized)
acggtcctgtgttcgctgctggctccctggtgccctcacagttttgcaataagcatttgttgaatgactgagtgagtgaatgaatgaagcctctgactttccagcctctccgccattgct

SEQ ID NO: 410346 - DNA, 120 bp, Artificial Sequence
  ENSG00000148337_35 (sequence is synthesized)
caactatccctgcaacctagaatgcctcaaccacaacagcccttcaaggaccagctcaaaatgcctcctccaagaagccttccctggtctccactagaaaccatcactccctcccctcca

SEQ ID NO: 410347 - DNA, 120 bp, Artificial Sequence
  ENSG00000148337_36 (sequence is synthesized)
cggccactccagagctgccctgctcagcaacacagtgtccctgaggactcaaggtctgggcctgtgcccactgcgggacccagttctgagccagcccatgactcacatacactcagctgc

SEQ ID NO: 410348 - DNA, 120 bp, Artificial Sequence
  ENSG00000148337_37 (sequence is synthesized)
cagcttgagaccaagggggaagcagccggtggaggagctggaggagcgtatctgggttatgggtgcatatgtgcctgtgttctaggaaagggcacccgttgcctagagccagccaccctc

SEQ ID NO: 410349 - DNA, 120 bp, Artificial Sequence
  ENSG00000148337_38 (sequence is synthesized)
acagacgacagcgtcctgggaaatcggctgcatcttaaagtccaaccccctcatggtatatagctagggaaaccgaggcctcagaaggaaggaacctgcccagggtcctccaggttggta

SEQ ID NO: 410350 - DNA, 120 bp, Artificial Sequence
  ENSG00000148337_39 (sequence is synthesized)
acagccgaaactcaggattggacttgggggtcagggtcacttgggtttgaatttcagctctgctttaccccagcaagttgtacctttctggaaaaaagggaaaataaaaaaggttgtgag

SEQ ID NO: 410351 - DNA, 71 bp, Artificial Sequence
  ENSG00000148337_40 (sequence is synthesized)
tacctttctggaaaaaagggaaaataaaaaaggttgtgaggattcaaacacatcaagagttcagacagtgg

SEQ ID NO: 410352 - DNA, 79 bp, Artificial Sequence
  ENSG00000148337_41 (sequence is synthesized)
aaaaaagctcagacaggatctggccacagcaagtacttagtggatggtcattattatcaatatttcgaactctgtgtcc

SEQ ID NO: 410353 - DNA, 120 bp, Artificial Sequence
  ENSG00000148337_42 (sequence is synthesized)
gtggatggtcattattatcaatatttcgaactctgtgtcctgggatacaggctaggaggaggaattggggaggcaggtgccccacacccctccaggccaggctttatctgtgtcaagggt

SEQ ID NO: 410354 - DNA, 120 bp, Artificial Sequence
  ENSG00000148337_43 (sequence is synthesized)
acttcccagttccaagcctttgcttctgcctgggacaccaccctcctccccactgttctaagtcctgtctgccaacatccacttaatgtgacctcctgggaagctcttcctgatgctccc

SEQ ID NO: 410355 - DNA, 120 bp, Artificial Sequence
  ENSG00000148337_44 (sequence is synthesized)
aacagcattgcccaatgcagagctacctgaaactattgtgatggatgtacaaccctgggaatacacaaaagcctactgaactgtacagtatgggtaagttgtatagctcaataaagctgt

SEQ ID NO: 410356 - DNA, 120 bp, Artificial Sequence
  ENSG00000148337_45 (sequence is synthesized)
tggtaaggccccagctctgagcccacctgcaggagcttcagcccttgggcccagcctccacatgaccctcccatatcccagccatggcattctggctgggaagccttctcttctgcccct

SEQ ID NO: 410357 - DNA, 120 bp, Artificial Sequence
  ENSG00000148337_46 (sequence is synthesized)
cctgtcctcccctggccacagacttagtcttaatccaagctgattcgggtggctagtggccactccctcttgtgcagggcctcaatccccaggcaccacccctgcaccaacagggagaga

SEQ ID NO: 410358 - DNA, 120 bp, Artificial Sequence
  ENSG00000148337_47 (sequence is synthesized)
gccgggggcggctgggtcgtggggctccgcctgcgagctggctgtgtctgcggaggaggcggctggcggggtgggagcgggcggagtggggcgcgaggaggtggcggtggtggagagaag

SEQ ID NO: 410359 - DNA, 120 bp, Artificial Sequence
  ENSG00000148337_48 (sequence is synthesized)
atgaggattcagtcaaatgacacatgatgtcttgggcacacctggcgtggattatggcgcctgtaggagcaggagggcttcctggaggagggggctagttgaacagagtctagaaagtat

SEQ ID NO: 410360 - DNA, 120 bp, Artificial Sequence
  ENSG00000148337_49 (sequence is synthesized)
agattgggaagagcactctgggaggcaggatcaccatgtgcaaaggctcagagaatgccacccactacctcctggaaatcaaggggattctgtgtgtccaagggcattggtggtctctag

SEQ ID NO: 410361 - DNA, 120 bp, Artificial Sequence
  ENSG00000148337_50 (sequence is synthesized)
gcccccgacctgtgtctgggaggtgtcaaggggaagccagatccgaggcccacacttgcatgttttcaggtgaggtccagagatatatccagagaggagtggaagggctcggagacctac

SEQ ID NO: 410362 - DNA, 120 bp, Artificial Sequence
  ENSG00000148337_51 (sequence is synthesized)
ggccagacactgggctggcatctgtgggcactaatgcatgccacaactgattactgtcaactgccttctgcatgactatgtaattatgcatgatgactagagagtggcagttaaaatatg

SEQ ID NO: 410363 - DNA, 120 bp, Artificial Sequence
  ENSG00000148337_52 (sequence is synthesized)
caaagcctgactgaaatttggacctgtgtggaggaagggaaagggaacagcatcagtaaaggcacggaggtgggaaactatgtagtgtgcaaaggaaaagtcagatgatggtgatgataa

SEQ ID NO: 410364 - DNA, 120 bp, Artificial Sequence
  ENSG00000148337_53 (sequence is synthesized)
ccctctaggaccaaggtcactgcagtattggataggacctcagggagttagcagggggctcatggttaagagtgtgaactacggcttagacctacagggttccctgcccagctcctccac

SEQ ID NO: 410365 - DNA, 120 bp, Artificial Sequence
  ENSG00000148337_54 (sequence is synthesized)
gatcagtggctactatgtgccagatctcagcaagacagaggaggatgaagaggttaataagacgcagggatcatcctgctggaatggaagtcacaggggaggggctaaggggaccaggaa

SEQ ID NO: 410366 - DNA, 120 bp, Artificial Sequence
  ENSG00000148337_55 (sequence is synthesized)
catgggacaagggcacctggcacagcctggggcagagtcgccgctgaggaaacagctgggtcaggctgggccttctctacatggttgcaggctgggcaccaatatttcctatgggctttg

SEQ ID NO: 410367 - DNA, 120 bp, Artificial Sequence
  ENSG00000148337_56 (sequence is synthesized)
gggctctggcagtccaggcgtctgtgcctgcaccaccttatctcctgttgaagggctccccatcagcctggaacagggcaggtgcccatgtgtgctgattgtgccatggttaggtctgaa

SEQ ID NO: 410368 - DNA, 120 bp, Artificial Sequence
  ENSG00000148337_57 (sequence is synthesized)
gccagaccgcctggtattcaaatcccacttctgtcactttctaacctgatgaccttgggcaaatcattttacctcccaaagcttcagtttcttcatctgtaaaagggggattataataac

SEQ ID NO: 410369 - DNA, 120 bp, Artificial Sequence
  ENSG00000148337_58 (sequence is synthesized)
tgtgaatcatgagagctacaaatagtgtcattataaccatcatcaccattgcactgtccaaagaaacttctccggtgttgcgaaggtagcagagggtgtgactggatgcggtaagggagg

SEQ ID NO: 410370 - DNA, 120 bp, Artificial Sequence
  ENSG00000148337_59 (sequence is synthesized)
agagagaatctgttatccacaagtctgtcctgtctggcacagttggccaaactagagccctaagtcaggacctaccctgggtcccccggaaggtaggggcagcaacaaggtcgtgcccat

SEQ ID NO: 410371 - DNA, 120 bp, Artificial Sequence
  ENSG00000148337_60 (sequence is synthesized)
tcggctattccctgcctctgtcctctgcctttcacactccatttatttttaggaaaaggcacaggtgagcgacagccactggggaggccaggtgataagcatatggtcttatgtatttct

SEQ ID NO: 410372 - DNA, 120 bp, Artificial Sequence
  ENSG00000148337_61 (sequence is synthesized)
ctgcctcttgtctgacttggagctgttgttgaatacagcctattcccagggattctgagctggggcatctgctgggggtgcccaccttatggcctatgctgggtgcctcactggaacttg

SEQ ID NO: 410373 - DNA, 120 bp, Artificial Sequence
  ENSG00000148337_62 (sequence is synthesized)
cctctgtagggtgatggacacagatataaaaggcgcgaagggctgctatgatgaacgctaacctgaggacagagggaagaaattgcatcctgaagcaatccattcattcattcatcattc

SEQ ID NO: 410374 - DNA, 120 bp, Artificial Sequence
  ENSG00000148337_63 (sequence is synthesized)
actaatttaatcagccttcaccacacaaacctgcgatgtgcagggttctgagctgggtcccaaggacatgaggacaacttggcaggtactttctaccatcaagggcacacgacattgctg

SEQ ID NO: 410375 - DNA, 120 bp, Artificial Sequence
  ENSG00000148337_64 (sequence is synthesized)
aggacagaaatagtgcaaggtggggaggtggcaggttacaagataaagaagctatagtcaattgccagttagaaagagtactgggaaaatagcaataatagctaccatagaaactgtgca

SEQ ID NO: 410376 - DNA, 120 bp, Artificial Sequence
  ENSG00000148337_65 (sequence is synthesized)
caataatagctaccatagaaactgtgcaagtactaggtgaagaggcctgtgaaactaacttactgcaaggcttgaataaatagagacattcgcggccaggtgcagtggctcatgcctgta

SEQ ID NO: 410377 - DNA, 120 bp, Artificial Sequence
  ENSG00000148339_0 (sequence is synthesized)
cggtgacgtcagccctgatctttgtgcctctcacttgagcaacctgatgccaccttctcccccgggctctgtgttcattggctgttggcaggacttgccgtgggagggcttttttctttt

SEQ ID NO: 410378 - DNA, 120 bp, Artificial Sequence
  ENSG00000148339_1 (sequence is synthesized)
ttcaattaagtaaaagggcagggcttaagcagccaatgacagctgaggccaggcttgtcttatgcaagtttcccgggaccggcagcatttagggaacttgctcccggtggtgagggcagt

SEQ ID NO: 410379 - DNA, 120 bp, Artificial Sequence
  ENSG00000148339_2 (sequence is synthesized)
ggagcacccagcaggccgccaacatgctctgtctgtgcctgtatgtgccggtcatcggggaagcccagaccgagttccagtactttgagtcgaaggggctccctgccgagctgaagtcca

SEQ ID NO: 410380 - DNA, 120 bp, Artificial Sequence
  ENSG00000148339_3 (sequence is synthesized)
ttttcaagctcagtgtcttcatcccctcccaggaattctccacctaccgccagtggaagcagaaaattgtacaagctggagataaggaccttgatgggcagctagactttgaagaatttg

SEQ ID NO: 410381 - DNA, 120 bp, Artificial Sequence
  ENSG00000148339_4 (sequence is synthesized)
tccattatctccaagatcatgagaagaagctgaggctggtgtttaagagtttggacaaaaagaatgatggacgcattgacgcgcaggagatcatgcagtccctgcgggacttgggagtca

SEQ ID NO: 410382 - DNA, 120 bp, Artificial Sequence
  ENSG00000148339_5 (sequence is synthesized)
agatatctgaacagcaggcagaaaaaattctcaagagcatggataaaaacggcacgatgaccattgactggaacgagtggagagactaccacctcctccaccccgtggaaaacatccccg

SEQ ID NO: 410383 - DNA, 120 bp, Artificial Sequence
  ENSG00000148339_6 (sequence is synthesized)
agatcatcctctactggaagcattccacgatctttgatgtgggtgagaatctaacggtcccggatgagttcacagtggaggagaggcagacggggatgtggtggagacacctggtggcag

SEQ ID NO: 410384 - DNA, 120 bp, Artificial Sequence
  ENSG00000148339_7 (sequence is synthesized)
gaggtggggcaggggccgtatccagaacctgcacggcccccctggacaggctcaaggtgctcatgcaggtccatgcctcccgcagcaacaacatgggcatcgttggtggcttcactcaga

SEQ ID NO: 410385 - DNA, 120 bp, Artificial Sequence
  ENSG00000148339_8 (sequence is synthesized)
tgattcgagaaggaggggccaggtcactctggcggggcaatggcatcaacgtcctcaaaattgcccccgaatcagccatcaaattcatggcctatgagcagatcaagcgccttgttggta

SEQ ID NO: 410386 - DNA, 120 bp, Artificial Sequence
  ENSG00000148339_9 (sequence is synthesized)
gtgaccaggagactctgaggattcacgagaggcttgtggcagggtccttggcaggggccatcgcccagagcagcatctacccaatggaggtcctgaagacccggatggcgctgcggaaga

SEQ ID NO: 410387 - DNA, 120 bp, Artificial Sequence
  ENSG00000148339_10 (sequence is synthesized)
caggccagtactcaggaatgctggactgcgccaggaggatcctggccagagagggggtggccgccttctacaaaggctatgtccccaacatgctgggcatcatcccctatgccggcatcg

SEQ ID NO: 410388 - DNA, 120 bp, Artificial Sequence
  ENSG00000148339_11 (sequence is synthesized)
accttgcagtctacgagacgctcaagaatgcctggctgcagcactatgcagtgaacagcgcggaccccggcgtgtttgtgctcctggcctgtggcaccatgtccagtacctgtggccagc

SEQ ID NO: 410389 - DNA, 120 bp, Artificial Sequence
  ENSG00000148339_12 (sequence is synthesized)
tggccagctaccccctggccctagtcaggacccggatgcaggcgcaagcctctattgagggcgctccggaggtgaccatgagcagcctcttcaaacatatcctgcggaccgagggggcct

SEQ ID NO: 410390 - DNA, 120 bp, Artificial Sequence
  ENSG00000148339_13 (sequence is synthesized)
tcgggctgtacagggggctggcccccaacttcatgaaggtcatcccagctgtgagcatcagctacgtggtctacgagaacctgaagatcaccctgggcgtgcagtcgcggtgacgggggg

SEQ ID NO: 410391 - DNA, 120 bp, Artificial Sequence
  ENSG00000148339_14 (sequence is synthesized)
agacgcacccgcagggagggtggggagagctggcaggcccagggcttgtcctgctgaccccagcagaccctcctgttggttccagcgaagaccacaggcattccttagggtccagggtca

SEQ ID NO: 410392 - DNA, 120 bp, Artificial Sequence
  ENSG00000148339_15 (sequence is synthesized)
gcaggctccgggctcacatgtgtaaggacaggacattttctgcagtgcctgccaatagcgagcttggagcctggaggccggcttagttcttccatttcacccttgcagccagctgttggc

SEQ ID NO: 410393 - DNA, 120 bp, Artificial Sequence
  ENSG00000148339_16 (sequence is synthesized)
cacggcccctgccctctggtctgccgtgcatctccctgtgccctcttgctgcctgcctgtctgctgaggtaaggtgggaggagggctacagcccacatcccaccccctcgtccaatccca

SEQ ID NO: 410394 - DNA, 120 bp, Artificial Sequence
  ENSG00000148339_17 (sequence is synthesized)
taatccatgatgaaaggtgaggtcacgtggcctcccaggcctgacttcccaacctacagcattgacgccaacttggctgtgaaggaagaggaaaggatctggccttgtggtcactggcat

SEQ ID NO: 410395 - DNA, 120 bp, Artificial Sequence
  ENSG00000148339_18 (sequence is synthesized)
ctgagccctgctgatggctggggctctcgggcatgcttgggagtgcagggggctcgggctgcctggcctggctgcacagaaggcaagtgctggggctcatggtgctctgagctggcctgg

SEQ ID NO: 410396 - DNA, 120 bp, Artificial Sequence
  ENSG00000148339_19 (sequence is synthesized)
accctgtcaggatgggccccacctcagaaccaaactcactgtccccactgtggcatgagggcagtggagcaccatgtttgagggcgaagggcagagcgtttgtgtgttctggggagggaa

SEQ ID NO: 410397 - DNA, 120 bp, Artificial Sequence
  ENSG00000148339_20 (sequence is synthesized)
ggaaaaggtgttggaggccttaattatggactgttgggaaaagggttttgtccagaaggacaagccggacaaatgagcgacttctgtgcttccagaggaagacgagggagcaggagcttg

SEQ ID NO: 410398 - DNA, 120 bp, Artificial Sequence
  ENSG00000148339_21 (sequence is synthesized)
gctgactgctcagagtctgttctgacgccctgggggttcctgtccaaccccagcaggggcgcagcgggaccagccccacattccacttgtgtcactgcttggaacctatttattttgtat

SEQ ID NO: 410399 - DNA, 120 bp, Artificial Sequence
  ENSG00000148339_22 (sequence is synthesized)
ttatttgaacagagttatgtcctaactatttttatagatttgtttaattaatagcttgtcattttcaagttcattttttattcatatttatgttcatggttgattgtaccttcccaagcc

SEQ ID NO: 410400 - DNA, 120 bp, Artificial Sequence
  ENSG00000148339_23 (sequence is synthesized)
cgcccagtgggatgggaggaggaggagaaggggggccttgggccgctgcagtcacatctgtccagagaaattccttttgggactggaggcagaaaagcggccagaaggcagcagccctgg

SEQ ID NO: 410401 - DNA, 120 bp, Artificial Sequence
  ENSG00000148339_24 (sequence is synthesized)
ctcctttcctttggcaggttggggaagggcttgcccccagccttaggatttcagggtttgactgggggcgtggagagagagggaggaacctcaataaccttgaaggtggaatccagttat

SEQ ID NO: 410402 - DNA, 120 bp, Artificial Sequence
  ENSG00000148339_25 (sequence is synthesized)
ttcctgcgctgcgagggtttctttatttcactcttttctgaatgtcaaggcagtgaggtgcctctcactgtgaatttgtggtgggcgggggctggaggagagggtgggggactggctccg

SEQ ID NO: 410403 - DNA, 120 bp, Artificial Sequence
  ENSG00000148339_26 (sequence is synthesized)
tccctcccagccttctgctgcccttgcttaacaatgccggccaactggcgacctcacggttgcacttccattccaccagaatgacctgatgaggaaatcttcaataggatgcaaagatca

SEQ ID NO: 410404 - DNA, 120 bp, Artificial Sequence
  ENSG00000148339_27 (sequence is synthesized)
atgcaaaaattgttatatatgaacatataactggagtcgtcaaaaagcaaattaagaaagaattggacgttagaagttgtcatttaaagcagccttctaataaagttgtttcaaagctga

SEQ ID NO: 410405 - DNA, 120 bp, Artificial Sequence
  ENSG00000148339_28 (sequence is synthesized)
gcgaggacagctgaataactgggagctcgaagttgcttgctgcctccgggagtggtctgcttggctgtcgcgttttccttttctttttttttttttttaaaaaaaagccaaacgtttgct

SEQ ID NO: 410406 - DNA, 120 bp, Artificial Sequence
  ENSG00000148339_29 (sequence is synthesized)
caccatcacctgcagaagtgagtttttattgaagaagctccagctgctttctccttattgccggcagcctggcaagcctcccttagagtgagctacttctcaggccgggcacgacagcag

SEQ ID NO: 410407 - DNA, 120 bp, Artificial Sequence
  ENSG00000148339_30 (sequence is synthesized)
tgctagcacatttgaaaaagcaggaaaccgcccctgcatgcagagcttccagcctgagaaccccaggcccgtcctcccagcagctgtgtagccagagagcgttggtactgtggtcacatc

SEQ ID NO: 410408 - DNA, 120 bp, Artificial Sequence
  ENSG00000148339_31 (sequence is synthesized)
cctcaaaagtgaacagtcgccatcagaggcgtttggaggagaccgtgatgttgcagatgctgtggcatttcctagctagctttttccccagggctgggtgccacggctccagagaggggg

SEQ ID NO: 410409 - DNA, 120 bp, Artificial Sequence
  ENSG00000148339_32 (sequence is synthesized)
acgatcgtgaagtcagaggcaccccagcccctgcctggagagaccagatggcaagctttttggggaaacaggacggaagggctgaggccacggaaaaaagacccaccattttgctggtgg

SEQ ID NO: 410410 - DNA, 80 bp, Artificial Sequence
  ENSG00000148339_33 (sequence is synthesized)
tcaccgccggcccgccgcccccgctcccgcccgcgcccggagcccctgcctcgcgcccgatggtgagcagtgtgttgtgc

SEQ ID NO: 410411 - DNA, 120 bp, Artificial Sequence
  ENSG00000148339_34 (sequence is synthesized)
tggtgagcagtgtgttgtgccgctgtgtggcctccccgccgccggacgccgccgccaccgccgcctcttcgtctgcctcatcgccggcgtccgtgggggacccctgcggcggcgctatct

SEQ ID NO: 410412 - DNA, 120 bp, Artificial Sequence
  ENSG00000148339_35 (sequence is synthesized)
gcgggggcccggaccaccggctgcgcctgtggagactctttcagacgctcgacgtcaaccgggacggcggcctgtgtgtcaacgacctggcggtggggctgcggcgcctgggactgcacc

SEQ ID NO: 410413 - DNA, 120 bp, Artificial Sequence
  ENSG00000148339_36 (sequence is synthesized)
agattggcccttgcctgggttctggccagcacctggggttctaggtggtggctctggcatgtaagtcgattgccatggtggctctgagagtggagcagaagcatcttgggtccttggggc

SEQ ID NO: 410414 - DNA, 120 bp, Artificial Sequence
  ENSG00000148339_37 (sequence is synthesized)
cagctctgctcgcaattagtgaagtcattgcctggggatggggccccacaagggacaaggaaaggctggtccaggagccaaaagacaaaatgttacctttcttttctagaaaattgtaca

SEQ ID NO: 410415 - DNA, 120 bp, Artificial Sequence
  ENSG00000148339_38 (sequence is synthesized)
tgcaggcgcaaggtaaggctggccctggacagtcccctgggaggtcggggggagcggacagaagcatctgactggtggcctccatcctgcagcctctattgagggcgctccggaggtgac

SEQ ID NO: 410416 - DNA, 120 bp, Artificial Sequence
  ENSG00000148341_0 (sequence is synthesized)
ggctgggccgggggctgccggctgcgctcgggccgtgcgcggcggccgtgcgggcacgccatggacttcaacatgaagaagctggcgtcggacgcgggcatcttcttcacccgggcggtg

SEQ ID NO: 410417 - DNA, 120 bp, Artificial Sequence
  ENSG00000148341_1 (sequence is synthesized)
cagttcacggaggagaaatttggccaggctgagaagactgagcttgatgcccactttgaaaaccttctggcccgggcagacagcaccaagaactggacagagaagatcttgaggcagaca

SEQ ID NO: 410418 - DNA, 120 bp, Artificial Sequence
  ENSG00000148341_2 (sequence is synthesized)
gaggtgctgctgcagcccaaccccagtgcccgagtggaggagttcctgtatgagaagctggacaggaaggtcccctcaagggtcaccaacggggagctgctggctcagtacatggcagac

SEQ ID NO: 410419 - DNA, 120 bp, Artificial Sequence
  ENSG00000148341_3 (sequence is synthesized)
gcggccagtgagctggggccgaccaccccctatgggaagacactgatcaaggtggcagaagctgaaaagcaactgggagccgcggagagggattttatccacacggcctccatcagcttc

SEQ ID NO: 410420 - DNA, 120 bp, Artificial Sequence
  ENSG00000148341_4 (sequence is synthesized)
ctcacacccttgcgcaacttcctggagggggactggaagaccatctcgaaggagaggcggctcctccaaaaccggcgtctggacttggatgcctgcaaagcgaggctgaagaaggccaag

SEQ ID NO: 410421 - DNA, 120 bp, Artificial Sequence
  ENSG00000148341_5 (sequence is synthesized)
agacctcgtaattacattctctcggccagcgcctccgcgctctggaatgatgaagtggacaaggccgagcaggagctccgcgtggcccagacagagtttgaccggcaagcagaagtgacc

SEQ ID NO: 410422 - DNA, 120 bp, Artificial Sequence
  ENSG00000148341_6 (sequence is synthesized)
cgtctcttgctggagggaatcagtagcactcacgtgaaccacctgcgctgcctccacgagttcgtcaagtctcagacaacctactacgcacagtgctaccgccacatgctggacttgcag

SEQ ID NO: 410423 - DNA, 120 bp, Artificial Sequence
  ENSG00000148341_7 (sequence is synthesized)
aagcagctgggcagatttcccggcaccttcgtgggcaccacagagcccgcctccccacccctgagcagcacctcacccaccactgctgcggccactatgcctgtggtgccctctgtggcc

SEQ ID NO: 410424 - DNA, 120 bp, Artificial Sequence
  ENSG00000148341_8 (sequence is synthesized)
agcctggcccctccgggggaggcctcgctctgcctggaagaggtggccccccctgccagtgggacccgcaaagctcgggtgctctatgactacgaggcagccgacagcagtgagctggcc

SEQ ID NO: 410425 - DNA, 120 bp, Artificial Sequence
  ENSG00000148341_9 (sequence is synthesized)
ctgctggctgatgagctcatcactgtctacagcctgcctggcatggaccctgactggctcattggcgagagaggcaacaagaagggcaaggtccctgtcacctacttggaactgctcagc

SEQ ID NO: 410426 - DNA, 120 bp, Artificial Sequence
  ENSG00000148341_10 (sequence is synthesized)
tagctcaagccaagtccagcggccgcagtcttcacctctccacactcactttttatctggtgtttttacttctgcctgcgtttgctctctagccaataaaccgtccttgtgtgcgagtca

SEQ ID NO: 410427 - DNA, 120 bp, Artificial Sequence
  ENSG00000148341_11 (sequence is synthesized)
ggagcccctgcccctgcctgcatccccgagcaccccaccctccaggctccactaaggagggaggggctgtctgcagcagctgcactcagcacctaggccagggtggggccgccgcagatg

SEQ ID NO: 410428 - DNA, 120 bp, Artificial Sequence
  ENSG00000148341_12 (sequence is synthesized)
ggctcaggaagccccaggtgcactcagcgagagccctgcctttcagttgccaaaagctgcatcaggggaatgcggcaaggcacacagggctctggcagcccctggggactgggcgctgcc

SEQ ID NO: 410429 - DNA, 120 bp, Artificial Sequence
  ENSG00000148341_13 (sequence is synthesized)
cctgggaggggagagcctggccagggctggtgttgggcccggagcagcatcttccggtgctatcctcccctcccacccctcacagctcaagccaagtccagcggccgcagtcttcacctc

SEQ ID NO: 410430 - DNA, 120 bp, Artificial Sequence
  ENSG00000148341_14 (sequence is synthesized)
tccacactcactttttatctggtgtttttacttctgcctgcgtttgctctctagccaataaaccgtccttgtgtgcgagtcacctgggctcctgtcagggcctggccctgagggtggtaa

SEQ ID NO: 410431 - DNA, 120 bp, Artificial Sequence
  ENSG00000148341_15 (sequence is synthesized)
agggaaaggtagactcaccctctgccccactcttccacagagtgagcaggggccctgtggctgccccggcccccagctctctagttgggaagaagtgcagccctccctgtcttctgcggg

SEQ ID NO: 410432 - DNA, 120 bp, Artificial Sequence
  ENSG00000148341_16 (sequence is synthesized)
gcctgtgcctctcagagggcagtgctgttcctggacatgaagccgcacaaggaacgttttattcctaagaaaaagtttcctaaatttggattgtggagcggactgtagaatgcgtctgac

SEQ ID NO: 410433 - DNA, 120 bp, Artificial Sequence
  ENSG00000148341_17 (sequence is synthesized)
agttcagttcaagcacaagaagtgggtagcggtcagtgctgtctgcaggtcgggcgtttcacccagcatgtgcccccgtgccatgggttctcatgccgtcctcagtgtccacatttcaca

SEQ ID NO: 410434 - DNA, 120 bp, Artificial Sequence
  ENSG00000148341_18 (sequence is synthesized)
gatgagatcagcaagacagtcagctcctcaagggaccacagttggcaagtggccaagcagggactgaagcccaggcagcctgattctagaaaccctaagtgatgtctgtgttttagatgg

SEQ ID NO: 410435 - DNA, 120 bp, Artificial Sequence
  ENSG00000148341_19 (sequence is synthesized)
cccctagcaggacctagcattctgacttcagtcctgagaaggccaacagccagtaggccccactgttggggcttctgaagaggggatcgggggatgacgggggcacggggctataaatag

SEQ ID NO: 410436 - DNA, 120 bp, Artificial Sequence
  ENSG00000148341_20 (sequence is synthesized)
gaaggcacagagcttcaagaaaggctcacccagggatgagctcagcccactgggccaatgaaagcagggtcaaggacaggaccagcgcaggccaaggaagggaatatctgacagcgccca

SEQ ID NO: 410437 - DNA, 120 bp, Artificial Sequence
  ENSG00000148341_21 (sequence is synthesized)
cccagccaaaccctcagcccaaggacaggaatgaggagatgctggtgaactagccatccatcagtacctgccttcccccgaggctgcagccccactcccaggcgcctggccaggggagtt

SEQ ID NO: 410438 - DNA, 120 bp, Artificial Sequence
  ENSG00000148341_22 (sequence is synthesized)
ttctaggttctgagagccacgttgtcatccctgggctttgaagttaaacatcacacagctgtctataaacaagattttaatatctgtataaatagaccacagaattaccaaaactgcaaa

SEQ ID NO: 410439 - DNA, 120 bp, Artificial Sequence
  ENSG00000148341_23 (sequence is synthesized)
atgggcgcagccctgccacttaacttgtttgttggtgacacagttgttcagagtggggagaattcaccccattctgtccctgcccctagtcacctagctgtgagggtgcctgaggctgaa

SEQ ID NO: 410440 - DNA, 120 bp, Artificial Sequence
  ENSG00000148341_24 (sequence is synthesized)
tccgaggggtcccatgagattggatagggcctgggccatctggcgcccccttcactcccagctcactgaggcctgttcagcctggctgggtcaatgggacgcagcctgggacagtgtgcc

SEQ ID NO: 410441 - DNA, 120 bp, Artificial Sequence
  ENSG00000148341_25 (sequence is synthesized)
cagggcgaggccaggattggaggagctgggcccaagggtgaacaccctcctggcacaagaggttgctcagggctgccaggcctaaaggctgcctcataccttgcagagggaactcccagg

SEQ ID NO: 410442 - DNA, 120 bp, Artificial Sequence
  ENSG00000148341_26 (sequence is synthesized)
cccaggcctactagggagatggctacctgtggctgccagctgattagccgagggaggccaggcctagcctgggctcacagctgcccatgcaccttgcgttcccctcccatagtgtggccc

SEQ ID NO: 410443 - DNA, 120 bp, Artificial Sequence
  ENSG00000148341_27 (sequence is synthesized)
cagagccagcactgcccctggcgagaaccgtctcaggtcactcaagtgtgtggggtctagatcagaggcaggggtgtagttgtttcaatcttggggttggctagggtgacctgtgcctat

SEQ ID NO: 410444 - DNA, 120 bp, Artificial Sequence
  ENSG00000148341_28 (sequence is synthesized)
tgggatgacctcttctaaggcacctgaacaggacagtctcccccgtcacttcgggccagacaccgtctctggagtaactcagccagaacacactctctccatcagccaggccagaggagc

SEQ ID NO: 410445 - DNA, 120 bp, Artificial Sequence
  ENSG00000148341_29 (sequence is synthesized)
ctttcctgtcattgcagtggtgtggcctctccctcacctggtgggcctggacaacctcacatcctggggttgggccaggccacctttccagagctaggacttgggcagccccaggaacag

SEQ ID NO: 410446 - DNA, 120 bp, Artificial Sequence
  ENSG00000148341_30 (sequence is synthesized)
cattccagaggactcaagctccacagctctgtccccataagcacgcacacgttaggactcttcaggagggcaggctgtggtgcctccctccgcccgaccgcctggtgtcccctcccactg

SEQ ID NO: 410447 - DNA, 120 bp, Artificial Sequence
  ENSG00000148341_31 (sequence is synthesized)
gggcctggggggcctgctcctgcctgcgctgtggactcactaactctttgtttttgttcctttccgtcctgctttgggtaacttggctcagtgtgagggagatgtgagtatacctgtccc

SEQ ID NO: 410448 - DNA, 120 bp, Artificial Sequence
  ENSG00000148341_32 (sequence is synthesized)
acgcgctgtgctgcttccggtctgcccatcttgcccgtggacccacggtgccatggccagcccacgtccttggggcattttgcaagcagctggtctccccgccagagcctctactgtgca

SEQ ID NO: 410449 - DNA, 120 bp, Artificial Sequence
  ENSG00000148341_33 (sequence is synthesized)
gggcctctggtttagggggggatgccaggcgttggggcctgtgagtcagctttttgcaaatgttggacgcctgtcactctgtctgcccatgcatccatctgtccaccttcattgtcggga

SEQ ID NO: 410450 - DNA, 120 bp, Artificial Sequence
  ENSG00000148341_34 (sequence is synthesized)
ggggcctggcccttgatgcaggagcaagagatgtggtgtgcggattctgggatggaaaaagccatcccagttgggggtgggctgtgtttgcgggaccctggggcatctgagtgccactgg

SEQ ID NO: 410451 - DNA, 120 bp, Artificial Sequence
  ENSG00000148341_35 (sequence is synthesized)
tctggggaggagggggctgtggcccctggcaggggagagcccagcctgtgacttgctcaggcagcctcggccatctcctcaccgcatttgctctcctgagctccagtgcctgcagccact

SEQ ID NO: 410452 - DNA, 120 bp, Artificial Sequence
  ENSG00000148341_36 (sequence is synthesized)
tgatctttgtctggactctccaagtccctaggcccctcatctccaggtggttggagtcgggagaagggggtttgtgttgtgtttgtatccccgtccctggggtcaggcctcttggcatct

SEQ ID NO: 410453 - DNA, 120 bp, Artificial Sequence
  ENSG00000148341_37 (sequence is synthesized)
ccttgtgcaagactctggggtagcctcctgacctcgaccctggccctggcccagggtgaccccctccccacatgaactctgttccccgccagacggtgcctgactttcaggagactagac

SEQ ID NO: 410454 - DNA, 120 bp, Artificial Sequence
  ENSG00000148341_38 (sequence is synthesized)
ctcgtaattacattctctcggccagcgcctccgcggtaagcgcaccccacccccaccccacccctcgtcctcctctctccccacgtcccacaccactgcctctgactgcacaggagctag

SEQ ID NO: 410455 - DNA, 120 bp, Artificial Sequence
  ENSG00000148341_39 (sequence is synthesized)
aagccagcttgggtaaggcgggggcactgccatgtgatcaggtcagtcctgagacactggggaggggcagcagcccccacctctgtccacggcctggccccggtgccctgtggccatgga

SEQ ID NO: 410456 - DNA, 120 bp, Artificial Sequence
  ENSG00000148341_40 (sequence is synthesized)
gctggacttgtttccctctgcaaaacgctggagctggcggcagggccagccacactgagtagtgtggagaactcagggcggcagctgtcccatccccagggcccctccacctcctgctgt

SEQ ID NO: 410457 - DNA, 120 bp, Artificial Sequence
  ENSG00000148341_41 (sequence is synthesized)
ctctgaatgccaggccctggggaggccctgaggatagaggaggaggcctggccgtgcctttctggagttcacagacccctaaagacaggaggcagggatggcgtcgtaggcctggagagc

SEQ ID NO: 410458 - DNA, 120 bp, Artificial Sequence
  ENSG00000148341_42 (sequence is synthesized)
gcctggggggcgggagggcctgaggctgtgcttaaggcccagaggtcctggagcagggcatgtcttgtcctgaggcttaggcagggcccccaggggagttggggcaggaggtggggagga

SEQ ID NO: 410459 - DNA, 120 bp, Artificial Sequence
  ENSG00000148341_43 (sequence is synthesized)
caggatcgtggaggcttcgcatgtcatggtgtctgttggtttttaggctttcttgggaagtctggtgtttcctatgtagtttggggactaggccacacctctccctcatgcttgtcacca

SEQ ID NO: 410460 - DNA, 120 bp, Artificial Sequence
  ENSG00000148341_44 (sequence is synthesized)
tccttcccgcccctggaggtgagaccctcacctctctcgtgagcatgctgcctcatgtcttccgtgccgtcgttctgtggctgggtgactgtccctcaggccgccaaccctagttggctc

SEQ ID NO: 410461 - DNA, 120 bp, Artificial Sequence
  ENSG00000148341_45 (sequence is synthesized)
tcacagcaacttccagtgctcctggacggggacttcctaagcagcatgggggccacacgggccggccacgcacactggcctgggtccgcattccctatttcaggctgttgtctcgggtca

SEQ ID NO: 410462 - DNA, 120 bp, Artificial Sequence
  ENSG00000148341_46 (sequence is synthesized)
gatctccggaagcggcaggagcgctgggtctcctggtcgtggccgggcagcgtctttcttcttcagggtctggatgccacttcccgcctcctccctgtgcccagtggaaggagaaacatc

SEQ ID NO: 410463 - DNA, 120 bp, Artificial Sequence
  ENSG00000148341_47 (sequence is synthesized)
ctagagggtggagactgccctgtttttcttttgccattgagtcccagtgtgactcaagcacgaggccacctttctctgccagaggacagaaagcttcagtgactggcccagggtcacaca

SEQ ID NO: 410464 - DNA, 120 bp, Artificial Sequence
  ENSG00000148341_48 (sequence is synthesized)
gttctgccgcccagcccagcagcctgagccagcagtcaggatggggtggggacactccgtctctcttgagaccccactcagagaatggggctgacactgtaggagaaatataagcaggac

SEQ ID NO: 410465 - DNA, 120 bp, Artificial Sequence
  ENSG00000148341_49 (sequence is synthesized)
tcctgctggctgctcccctcctgcatgaggcatgttagagggactgggaccgccagcccccagctcccatgccgggcctcggcccagtctcagctcctgtttgggagggggggcagaggg

SEQ ID NO: 410466 - DNA, 120 bp, Artificial Sequence
  ENSG00000148341_50 (sequence is synthesized)
gcaggggggcagaagttgagtctgggagctggggcagggcacaggctctagggtccagctgtcctcctctcccctcccctgctggccactcctgctgccgtctccacagctctggaatga

SEQ ID NO: 410467 - DNA, 120 bp, Artificial Sequence
  ENSG00000148341_51 (sequence is synthesized)
tgaagtggacaaggtaagttggggcctggggggctgggctcgaggaagaaggggtggcggggtgcaggcacacttgctgctgtggggtctgatctgtttctcactctgccccacacccac

SEQ ID NO: 410468 - DNA, 120 bp, Artificial Sequence
  ENSG00000148341_52 (sequence is synthesized)
tggggaggggttactgctttccctccctgggcctcagtttcccctctgtggggaaatgttttctccacagtaccctgtagcacacagtaggccctcaggatgcacttgctgggtggattt

SEQ ID NO: 410469 - DNA, 120 bp, Artificial Sequence
  ENSG00000148341_53 (sequence is synthesized)
ctccgatgggtgatggaggaagggtctgtcactgcagctgcctgtggggtcctgagtggggctctagcttctctggggttggggctccaggtgtgaagtcaggcatagacccagaaggct

SEQ ID NO: 410470 - DNA, 120 bp, Artificial Sequence
  ENSG00000148341_54 (sequence is synthesized)
ctctgtgttcccaggggaaagggacaggcggctcccaggtaggctccaggagaagactgcggggaagctggtgggtggtgtgtgggtgctcatggctgccctgccctgcccaggccgagc

SEQ ID NO: 410471 - DNA, 90 bp, Artificial Sequence
  ENSG00000148341_55 (sequence is synthesized)
tactactatagcctcaaactcctgggttcaaatgatccttccgcctgggcctcccagagtattgggattacagggaagacactgatcaag

SEQ ID NO: 410472 - DNA, 120 bp, Artificial Sequence
  ENSG00000148343_0 (sequence is synthesized)
aggtacccgatccgaggcggggagagcacccgggatggaaggagcaggcgtgcgggccgtgagcggcgccagagggtacctggctctgtggaggggccctctggtatgtgtgtccctgtc

SEQ ID NO: 410473 - DNA, 120 bp, Artificial Sequence
  ENSG00000148343_1 (sequence is synthesized)
cttctggggcgtggatggtgcctgggacccagctggcaaccagttgaagacgttctccttggaagctcttggccctgaggactttgcctggggcattggccctgccatggcgttccggag

SEQ ID NO: 410474 - DNA, 120 bp, Artificial Sequence
  ENSG00000148343_2 (sequence is synthesized)
ggccgagggcacgtctatgatccaggccctggccatgacggtggccgagatccccgtgttcctgtacacgacgtttgggcagtctgcattctcccagctacggttgacgccaggcctgcg

SEQ ID NO: 410475 - DNA, 120 bp, Artificial Sequence
  ENSG00000148343_3 (sequence is synthesized)
gaaagtcctctttgccacggccctggggactgtggccctggccctggctgcccaccagctgaagaggcgacggaggaggaagaagcaggttggtcccgagatgggaggggagcagctggg

SEQ ID NO: 410476 - DNA, 120 bp, Artificial Sequence
  ENSG00000148343_4 (sequence is synthesized)
cacggtgcccctccctatcctcttggccaggaaggtcccttcagtgaagaaaggatactccagccggagagtccagagccccagcagcaagagcaacgacaccctgagtggcatctcttc

SEQ ID NO: 410477 - DNA, 120 bp, Artificial Sequence
  ENSG00000148343_5 (sequence is synthesized)
cattgagcccagcaagcactcgggctcctcccacagtgtggcctcgatgatggcagtgaactcatccagccccacagccgcgtgctcgggactatgggatgccagagggatggaggagtc

SEQ ID NO: 410478 - DNA, 120 bp, Artificial Sequence
  ENSG00000148343_6 (sequence is synthesized)
tctgaccaccagcgacggcaatgcagagagcctgtacatgcaaggcatggagctgtttgaggaagctctgcagaagtgggagcaggcactaagcgtgggccagcggggggacagcggcag

SEQ ID NO: 410479 - DNA, 120 bp, Artificial Sequence
  ENSG00000148343_7 (sequence is synthesized)
cacccccatgcccagggacggcctccggaacccagagactgcatcagagccactgtctgagccagagtcacagcggaaggagtttgcagagaagctggagtccctgctgcaccgtgccta

SEQ ID NO: 410480 - DNA, 120 bp, Artificial Sequence
  ENSG00000148343_8 (sequence is synthesized)
ccacctgcaggaggagttcggctccaccttccccgcagacagcatgctgctagacctcgagaggaccctcatgctgcccctgaccgagggctcgctgcggctgcgggcggacgatgagga

SEQ ID NO: 410481 - DNA, 120 bp, Artificial Sequence
  ENSG00000148343_9 (sequence is synthesized)
cagcctgacttcagaggattccttcttctccgccaccgagctctttgagtccctgcagactggagattacccgatcccactctccagacccgccgctgcctatgaggaggccctgcagct

SEQ ID NO: 410482 - DNA, 120 bp, Artificial Sequence
  ENSG00000148343_10 (sequence is synthesized)
ggtgaaggaggggagagtgccttgccggaccctcaggacggagctgctgggctgctacagtgaccaggactttctggccaagctgcactgtgtgcggcaggccttcgaggggcttctgga

SEQ ID NO: 410483 - DNA, 120 bp, Artificial Sequence
  ENSG00000148343_11 (sequence is synthesized)
agacaagagtaaccagcttttcttcgggaaagtgggccgacagatggtgacaggcctgatgaccaaggctgagaagagccccaaaggcttcctggagagctacgaggagatgctgagcta

SEQ ID NO: 410484 - DNA, 120 bp, Artificial Sequence
  ENSG00000148343_12 (sequence is synthesized)
tgccctgcggcccgagacctgggccacaacacggctggagctggagggccgaggggtggtatgcatgagcttcttcgacatcgtgctggacttcatcctcatggacgccttcgaggacct

SEQ ID NO: 410485 - DNA, 120 bp, Artificial Sequence
  ENSG00000148343_13 (sequence is synthesized)
ggagaaccctccggcctcggtgctcgccgtcctgcggaaccgctggctgtcagacagcttcaaggagacggccttggccactgcttgctggtcggtcctgaaagccaagaggaggctgct

SEQ ID NO: 410486 - DNA, 120 bp, Artificial Sequence
  ENSG00000148343_14 (sequence is synthesized)
gatggtgcctgatggcttcatctcccatttctactccgtatcggagcatgtgagccctgtcctagccttcggcttccttggacccaagcctcagcttgctgaagtctgtgctttcttcaa

SEQ ID NO: 410487 - DNA, 120 bp, Artificial Sequence
  ENSG00000148343_15 (sequence is synthesized)
ctggacaatgtgcgctacacgtcactgcccgcgctggcagacgacatcctgcagctgtcccggcgccgcagcgagatattgctggggtacctgggggtgcccgcggccagcagcgcaggc

SEQ ID NO: 410488 - DNA, 120 bp, Artificial Sequence
  ENSG00000148343_16 (sequence is synthesized)
gtgaatggggcgctgccccgagagaatgggcccctgggggagctgcagtagaggcggcacgggctggggggtggcagagagaaggctcctcctcccttccctgggttggtatctgacagc

SEQ ID NO: 410489 - DNA, 120 bp, Artificial Sequence
  ENSG00000148343_17 (sequence is synthesized)
tgtggtggctgagggccgttgcccctgactttgccccacccccatcatctgggagtccccaaggcccagaggggacatttccatggagaagaacggttcctgggggaagcagaggccagg

SEQ ID NO: 410490 - DNA, 120 bp, Artificial Sequence
  ENSG00000148343_18 (sequence is synthesized)
accagtggggcctgtgggagagaaaggctgtgagagagggggttgttgtggagaattgggacaggcagagccaggatgccccaggtgggggaccccaaaacctcccatcgctccagggct

SEQ ID NO: 410491 - DNA, 120 bp, Artificial Sequence
  ENSG00000148343_19 (sequence is synthesized)
gctgacaagggtgctgggagggtggaggtgaaggatggggcctagagccctgtggtgaaggtcacagtgtcctgagctagaagccacctgtggctatatggtctcagcatccagctggcc

SEQ ID NO: 410492 - DNA, 120 bp, Artificial Sequence
  ENSG00000148343_20 (sequence is synthesized)
tgtcctgatgccctccccacctcaaccgccttctcagagagtttgcaactccagagaaggagagtggggccaccttagtgggcagcaggcctgggccatccagagatggggcagaggtgg

SEQ ID NO: 410493 - DNA, 120 bp, Artificial Sequence
  ENSG00000148343_21 (sequence is synthesized)
gcctcccactcctgtgctctcttctgagcaggaactgggcccttgacagtgtcctttgacattccctcgccctaccaaagatcgtcttttctcctcccacctctgtcaccaccaaagacg

SEQ ID NO: 410494 - DNA, 120 bp, Artificial Sequence
  ENSG00000148343_22 (sequence is synthesized)
ggcggaggtggggctgggccctcctgcccccgcccatcccccttccatgagcccagacctccctgggtggtgctaggctctgagctgggggctcagaccagggatcgctcaggcccctgt

SEQ ID NO: 410495 - DNA, 120 bp, Artificial Sequence
  ENSG00000148343_23 (sequence is synthesized)
cacctgtgggcccggggaccacttgggggaggtcagaggatgtatgtggccggaccagcttccccaccttcattaggacaagaaactgcccagcactttgccttcagttcaacgcacaaa

SEQ ID NO: 410496 - DNA, 120 bp, Artificial Sequence
  ENSG00000148343_24 (sequence is synthesized)
cgctcctggggcctcatgggggcagagcctcccctgggcctgcagagagtcctgttagcagcgacgtccccccgccgcggggtcctgtcagcccggcagtgtcttctcagtgtcttcacc

SEQ ID NO: 410497 - DNA, 120 bp, Artificial Sequence
  ENSG00000148343_25 (sequence is synthesized)
tgagcgagtgtctgtggccccaacgcgttctgctgtggctctgccctttccaggttgagaggcctgcaggagaaacacactcccctcctgggtttccacactcaggaggtcagaggactg

SEQ ID NO: 410498 - DNA, 120 bp, Artificial Sequence
  ENSG00000148343_26 (sequence is synthesized)
gctcctgtgaccagggcccctctcccctgaatgggaaaggggtctggggatgggagggcgcaccacagagaggagatgatgctgggtgtggcccatcttctgtgggccccttcccagaca

SEQ ID NO: 410499 - DNA, 120 bp, Artificial Sequence
  ENSG00000148343_27 (sequence is synthesized)
ccggatccatgggcactaacccgcctcccaggctgatgcccggaggcagcttcctgggcaggagggttccatgggcactaacccacctcccaggctgatgcctggaggcagcctccaggg

SEQ ID NO: 410500 - DNA, 120 bp, Artificial Sequence
  ENSG00000148343_28 (sequence is synthesized)
caggaaggaccctgtgctccccgccccccatcctgacatcctgttcttttgcacttaccctgtgctgtgaatgtaacagtgggccttggccccgcccactctgatttgcattttcatttg

SEQ ID NO: 410501 - DNA, 120 bp, Artificial Sequence
  ENSG00000148343_29 (sequence is synthesized)
tgtttgtttacacatccatgcactgcctgtagcagtcgattgtcacagcttcgacttttggatggtagagtgtgtgcactgactgtgagtcgaataaacaattgagacgatttccttcca

SEQ ID NO: 410502 - DNA, 120 bp, Artificial Sequence
  ENSG00000148343_30 (sequence is synthesized)
cgacatcccgggctcccctgcatctgagcagcaagggggttcttgtgccgagctctagctcagttccaagcggctgagacggttccatcactgctcatagtccccggttcctgccctgcc

SEQ ID NO: 410503 - DNA, 120 bp, Artificial Sequence
  ENSG00000148343_31 (sequence is synthesized)
cagagcttaggcacctggccccatcttcctgcttggagtggggccttggccactgcttgctggtcggtcctgaaagccaagaggaggctgctgatggtgagtgactggcaggcccggggg

SEQ ID NO: 410504 - DNA, 120 bp, Artificial Sequence
  ENSG00000148343_32 (sequence is synthesized)
agcacgagctgggctctgaggcagcgtggtggggagcggagcgggtgcagggtggctcgctgggccacttggccttcaccgctcacagtcctggcccccttgttccgccgttacctctcc

SEQ ID NO: 410505 - DNA, 120 bp, Artificial Sequence
  ENSG00000148343_33 (sequence is synthesized)
ctgtgccaggagctccctggaggctcgtgtagacccacttcctctcctccccaggcccagcacagagcaggccactggggaggggaacggataccctagggtagtggccacagggctggc

SEQ ID NO: 410506 - DNA, 120 bp, Artificial Sequence
  ENSG00000148343_34 (sequence is synthesized)
ccctcctgccctttccccgccccagtcaggcccctgtaatctccgctcccaggcagcgactggctgtgctatctggcctgtggtttgtcgttcccctctgcgggccaggctctgttgcct

SEQ ID NO: 410507 - DNA, 120 bp, Artificial Sequence
  ENSG00000148343_35 (sequence is synthesized)
agctgataccagctgccgtggccacgtgctccaggcacttcccgcggagccactatggccccacctcttgcagtactcacagcggcccatggttaccctgtctgcagaagttaaaatggg

SEQ ID NO: 410508 - DNA, 120 bp, Artificial Sequence
  ENSG00000148343_36 (sequence is synthesized)
cttcgaaagcttgagtcactgcccagggtcatctagcaggaaagtacatgagctggggcgacctctaaagcccagccctttatgcgacacctgggcctggtgccctcatcctacctgggc

SEQ ID NO: 410509 - DNA, 120 bp, Artificial Sequence
  ENSG00000148343_37 (sequence is synthesized)
ggctgcctctcagtctctcatctggtcggcagatgtgccggagagccggtgtgtgtcccgtccctgaggtgctctggggcggtcctgctgccttggaccttccccagggaggtgtaaccg

SEQ ID NO: 410510 - DNA, 120 bp, Artificial Sequence
  ENSG00000148343_38 (sequence is synthesized)
gcagcgtctcctcttccctgcagtctgcattctcccagctacggttgacgccaggcctgcggaaagtcctctttgccacggccctggggactgtggccctggccctggctgcccaccagc

SEQ ID NO: 410511 - DNA, 120 bp, Artificial Sequence
  ENSG00000148343_39 (sequence is synthesized)
aaagtgagatcacactgtcacactgggcactcctggaagttagcaggtgctcagcagaggagctggcttgagacctgactgggtgccctggttctctggagaagcctgctgtgctgagta

SEQ ID NO: 410512 - DNA, 120 bp, Artificial Sequence
  ENSG00000148343_40 (sequence is synthesized)
ggagacacttctctgccacgttttctctgtgcctgctgcgtggggatgggccccagccgtgccttggcatgtcccccatccacaggccagcctgtccctgtgggtcttgtccagtgacca

SEQ ID NO: 410513 - DNA, 120 bp, Artificial Sequence
  ENSG00000148343_41 (sequence is synthesized)
cttcctggagagctacgaggagatgctgagctatgccctgcggcccgagacctgggccacaacacggctggagctggagggccgaggggccaaggcagagggaggaatggcctcagctac

SEQ ID NO: 410514 - DNA, 120 bp, Artificial Sequence
  ENSG00000148343_42 (sequence is synthesized)
acccgttgcacagcagagcgggaaagacgtgtcccccccacgtgtgctcatgccctggaccccagcttcagtctccccatctggaaagtggccccgaggctccggcagtgcccccatgca

SEQ ID NO: 410515 - DNA, 120 bp, Artificial Sequence
  ENSG00000148343_43 (sequence is synthesized)
gtaccgggattccagctgagcactgtgtggggagtctcagccccgctttctctcactgctcttcccagagaggaccctcatgctgcccctgaccgagggctcgctgcggctgcgggcgga

SEQ ID NO: 410516 - DNA, 120 bp, Artificial Sequence
  ENSG00000148343_44 (sequence is synthesized)
ggctgtcagacagcttcaaggagacggtgggtcactgccctgctctcagacccacacttgctcacatcagcccgtgtggttgcctggctccgtcccctctgtccctagcactggcaccag

SEQ ID NO: 410517 - DNA, 120 bp, Artificial Sequence
  ENSG00000148343_45 (sequence is synthesized)
ggctgggcccccaccccctagatccgcggctgccaggcctgggagaccagagtctgccctggagaagcctccagggtgccccgttgctgcctggtgccccagtttagaaccaacatggtg

SEQ ID NO: 410518 - DNA, 120 bp, Artificial Sequence
  ENSG00000148343_46 (sequence is synthesized)
tgcgctttcttcctattgtgtggttttacttttgtgctggtatgaattcgattccattttaatgcatcctgttaaatcaagttaaaagaggggaaagcaaaaccaaaaggaaaaaaaggc

SEQ ID NO: 410519 - DNA, 120 bp, Artificial Sequence
  ENSG00000148343_47 (sequence is synthesized)
acagagtgagagacaacccagcacaggacccccaggaaggcaagcagtaacgctccagcagccgggctgtgctgcctgggcccaggcttctgcgaggtggtttacaggcgggaaccattg

SEQ ID NO: 410520 - DNA, 120 bp, Artificial Sequence
  ENSG00000148343_48 (sequence is synthesized)
gagtgctgtgttgtgcccctttacagaagaggagaccgaggctcagagaagatccagcagtaagattagagtcaagattcaagtttaggtatgtctgagtccaaaatcagaggaggaagc

SEQ ID NO: 410521 - DNA, 70 bp, Artificial Sequence
  ENSG00000148343_49 (sequence is synthesized)
agtctcaccctgtcgcccaggctggagtgttctcctcctcagcctaccaagtagctgggattacaaacag

SEQ ID NO: 410522 - DNA, 120 bp, Artificial Sequence
  ENSG00000148344_0 (sequence is synthesized)
acacccacagttgagctgcgctggccagagatgcctgcccacagcctggtgatgagcagcccggccctcccggccttcctgctctgcagcacgctgctggtcatcaagatgtacgtggtg

SEQ ID NO: 410523 - DNA, 120 bp, Artificial Sequence
  ENSG00000148344_1 (sequence is synthesized)
gccatcatcacgggccaagtgaggctgcggaagaaggcctttgccaaccccgaggatgccctgagacacggaggcccccagtattgcaggagcgaccccgacgtggaacgctgcctcagg

SEQ ID NO: 410524 - DNA, 120 bp, Artificial Sequence
  ENSG00000148344_2 (sequence is synthesized)
gcccaccggaacgacatggagaccatctaccccttccttttcctgggcttcgtctactcctttctgggtcctaacccttttgtcgcctggatgcacttcctggtcttcctcgtgggccgt

SEQ ID NO: 410525 - DNA, 120 bp, Artificial Sequence
  ENSG00000148344_3 (sequence is synthesized)
gtggcacacaccgtggcctacctggggaagctgcgggcacccatccgctccgtgacctacaccctggcccagctcccctgcgcctccatggctctgcagatcctctgggaagcggcccgc

SEQ ID NO: 410526 - DNA, 120 bp, Artificial Sequence
  ENSG00000148344_4 (sequence is synthesized)
cacctgtgaccagcagctgatgcctccttggccaccagaccatgggccaagagccgccgtggctatacctggggacttgatgttccttccagattgtggtgggccctgagtcctggtttc

SEQ ID NO: 410527 - DNA, 120 bp, Artificial Sequence
  ENSG00000148344_5 (sequence is synthesized)
ctggcagcctgctgcgcgtgtgggtctctgggcacagtgggcctgtgtgtgtgcccgtgtgtgtgtatgtgtgtgtgtatgtttcttagccccttggattcctgcacgaagtggctgatg

SEQ ID NO: 410528 - DNA, 120 bp, Artificial Sequence
  ENSG00000148344_6 (sequence is synthesized)
ggaaccatttcaagacagattgtgaagattgatagaaaatccttcagctaaagtaacagagcatcaaaaacatcactccctctccctccctaacagtgaaaagagagaagggagactcta

SEQ ID NO: 410529 - DNA, 120 bp, Artificial Sequence
  ENSG00000148344_7 (sequence is synthesized)
gaatgcagacttttcagactgaccccagaaattctggcccagccaatctagaggcaagcctggccatctgtatttttttttttccaagacagagtcttgctctgttgcccaagctggagt

SEQ ID NO: 410530 - DNA, 80 bp, Artificial Sequence
  ENSG00000148344_8 (sequence is synthesized)
atcactgtgctcagccaccatctggagttttaaaaggctcccatgtgagtccctgtgatggccaggccaggggacccctg

SEQ ID NO: 410531 - DNA, 120 bp, Artificial Sequence
  ENSG00000148344_9 (sequence is synthesized)
ccatgtgagtccctgtgatggccaggccaggggacccctgccagttctctgtggaagcaaggctggggtcttgggttcctgtatggtggaagctgggtgagccaaggacagggctggctc

SEQ ID NO: 410532 - DNA, 120 bp, Artificial Sequence
  ENSG00000148344_10 (sequence is synthesized)
ctctgcccccgctgacgcttcccttgccgttggctttggatgtctttgctgcagtcttctctctggctcaggtgtgggtgggaggggcccacaggaagctcagccttctcctcccaaggt

SEQ ID NO: 410533 - DNA, 120 bp, Artificial Sequence
  ENSG00000148344_11 (sequence is synthesized)
ttgagtccctccaaagggcagtgggtggaggaccgggagctttgggtgaccagccactcaaaggaactttctggtcccttcagtatcttcaaggtttggaaactgcaaatgtccccttga

SEQ ID NO: 410534 - DNA, 60 bp, Artificial Sequence
  ENSG00000148344_12 (sequence is synthesized)
tggggtagacccgtgacctgagatgtgtgatttttagtcattaaatggaagtgtctgcca

SEQ ID NO: 410535 - DNA, 78 bp, Artificial Sequence
  ENSG00000148344_13 (sequence is synthesized)
tgcagtggcaagatcacggctcattgtctcctgccaagtagctgggaccacaggcctttgccaaccccgaggatgccc

SEQ ID NO: 410536 - DNA, 120 bp, Artificial Sequence
  ENSG00000148346_0 (sequence is synthesized)
actcgccacctcctcttccacccctgccaggcccagcagccaccacagcgcctgcttcctcggccctgaaatcatgcccctaggtctcctgtggctgggcctagccctgttgggggctct

SEQ ID NO: 410537 - DNA, 120 bp, Artificial Sequence
  ENSG00000148346_1 (sequence is synthesized)
gcatgcccaggcccaggactccacctcagacctgatcccagccccacctctgagcaaggtccctctgcagcagaacttccaggacaaccaattccaggggaagtggtatgtggtaggcct

SEQ ID NO: 410538 - DNA, 120 bp, Artificial Sequence
  ENSG00000148346_2 (sequence is synthesized)
ggcagggaatgcaattctcagagaagacaaagacccgcaaaagatgtatgccaccatctatgagctgaaagaagacaagagctacaatgtcacctccgtcctgtttaggaaaaagaagtg

SEQ ID NO: 410539 - DNA, 120 bp, Artificial Sequence
  ENSG00000148346_3 (sequence is synthesized)
gtggtgagcaccaactacaaccagcatgctatggtgttcttcaagaaagtttctcaaaacagggagtacttcaagatcaccctctacgggagaaccaaggagctgacttcggaactaaag

SEQ ID NO: 410540 - DNA, 120 bp, Artificial Sequence
  ENSG00000148346_4 (sequence is synthesized)
gagaacttcatccgcttctccaaatctctgggcctccctgaaaaccacatcgtcttccctgtcccaatcgaccagtgtatcgacggctgagtgcacaggtgccgccagctgccgcaccag

SEQ ID NO: 410541 - DNA, 120 bp, Artificial Sequence
  ENSG00000148346_5 (sequence is synthesized)
cccgaacaccattgagggagctgggagaccctccccacagtgccacccatgcagctgctccccaggccaccccgctgatggagccccaccttgtctgctaaataaacatgtgccctcagg

SEQ ID NO: 410542 - DNA, 120 bp, Artificial Sequence
  ENSG00000148346_6 (sequence is synthesized)
ggcattcattctttcctttctgtgggtgtggggaggggaccacagggcacataccccaccctgggatccagctgagcaggggggtcagagatgacagctcttccggctcacaggccaccg

SEQ ID NO: 410543 - DNA, 120 bp, Artificial Sequence
  ENSG00000148346_7 (sequence is synthesized)
accaagtgagggccgacatctcctgggggtgtgagagtcagactgacgtcacaggcaagggatggccaaagctgagggatcctgtcgttcacctcgctgttctgcccggaattcatctgt

SEQ ID NO: 410544 - DNA, 120 bp, Artificial Sequence
  ENSG00000148346_8 (sequence is synthesized)
gttcatccttcctctgttccttagagcaacgtttatagcacatttccatgcagacacacagacagtggtggggatggacatgcacagtcgttagaaaacaagacggagagaggaggggtg

SEQ ID NO: 410545 - DNA, 120 bp, Artificial Sequence
  ENSG00000148346_9 (sequence is synthesized)
cctgccccccagcactgctgctgtctttattctgctgtccccatctcgggtgcctcccatttccccacccatcaccctcatatccacctctgtccagggtgccgccagctgccgcaccag

SEQ ID NO: 410546 - DNA, 120 bp, Artificial Sequence
  ENSG00000148346_10 (sequence is synthesized)
gtgggggatgagctgtcacgggttgggccggactgagagcaacagaaccctgctgctgccctggccccaccttgtccagcacaggaggcccaagcctgggttgtctcccctctcacccac

SEQ ID NO: 410547 - DNA, 120 bp, Artificial Sequence
  ENSG00000148346_11 (sequence is synthesized)
ccatctctccctcccaaggaaaaagaagtgtgactactggatcaggacttttgttccaggttgccagcccggcgagttcacgctgggcaacattaagagttaccctggattaacgagtta

SEQ ID NO: 410548 - DNA, 120 bp, Artificial Sequence
  ENSG00000148356_0 (sequence is synthesized)
agagacgcccttgtcgccatgtttgttgtgggcaggcgcctgaggctgacggctggcaagcagggcaccgcggtgcgctgaagctagagattccgaaagggggttcgggtagttcgctcc

SEQ ID NO: 410549 - DNA, 120 bp, Artificial Sequence
  ENSG00000148356_1 (sequence is synthesized)
ggagaagtctgagaagggtggctccggtgatcccagccctagctgtttcccatattcctttatccacctgcctttgaaggagaccagactccggctccgcccggcccgtgccgggtggtc

SEQ ID NO: 410550 - DNA, 120 bp, Artificial Sequence
  ENSG00000148356_2 (sequence is synthesized)
tgcggccccgagtccgtgaccaagccctccgagtgatcggcctgccctcgggtgcacccgcgggtcccaacgtgggggatccctccatccgcaaagccagggtcctaaagatcgctctgg

SEQ ID NO: 410551 - DNA, 120 bp, Artificial Sequence
  ENSG00000148356_3 (sequence is synthesized)
gaaaagggaaggatgccgctcttcttccggaagcggaaacccagtgaggaggctcggaaacgcctggagtaccagatgtgtttggcaaaagaagctggggcagatgacattctcgacatc

SEQ ID NO: 410552 - DNA, 120 bp, Artificial Sequence
  ENSG00000148356_4 (sequence is synthesized)
tctaaatgtgagctctcagagattccatttggagcttttgcaacatgcaaagttctgcagaagaaggtgctgatcgtccacacgaatcacctcacttccctgcttcccaaatcctgcagc

SEQ ID NO: 410553 - DNA, 120 bp, Artificial Sequence
  ENSG00000148356_5 (sequence is synthesized)
ctcctgagtctggcaaccatcaaggttctagatctccacgataatcagctgacagcccttcctgacgatctggggcagctgactgccctccaggtcttaaacgtggaaaggaatcaactg

SEQ ID NO: 410554 - DNA, 120 bp, Artificial Sequence
  ENSG00000148356_6 (sequence is synthesized)
atgcagctcccacgttccattgggaacctgacccagctccagactctcaatgttaaagacaacaagctgaaggagcttccagacaccgtgggggagcttcgaagcctgcgtaccctcaac

SEQ ID NO: 410555 - DNA, 120 bp, Artificial Sequence
  ENSG00000148356_7 (sequence is synthesized)
atcagtggaaacgagatccagagattgccgcagatgctggctcacgttcgaaccctggagatgctgagccttgacgcctcggccatggtctacccgccgcgggaggtgtgtggtgccggc

SEQ ID NO: 410556 - DNA, 120 bp, Artificial Sequence
  ENSG00000148356_8 (sequence is synthesized)
actgcggccatcttgcagttcctctgcaaagagtcagggctggaatactaccccccttctcagtacttgctgccaattctggagcaagatggaatcgagaactctcgggacagccctgat

SEQ ID NO: 410557 - DNA, 120 bp, Artificial Sequence
  ENSG00000148356_9 (sequence is synthesized)
gggcccacggacagattctcaagggaggagttagagtggcagaacaggttctcagactatgagaagaggaaggaacagaagatgctggagaaactcgagtttgaacggcgcctggaactg

SEQ ID NO: 410558 - DNA, 120 bp, Artificial Sequence
  ENSG00000148356_10 (sequence is synthesized)
gggcagcgggagcacacccagctccttcagcagagcagcagccagaaggatgagatccttcagacggtcaaggaggagcagtcccggctggagcagggcctgagtgagcaccagcgccac

SEQ ID NO: 410559 - DNA, 120 bp, Artificial Sequence
  ENSG00000148356_11 (sequence is synthesized)
ctcaacgcagagcggcagcggctgcaggagcagctgaagcagacggaacagaacatttccagccggatccagaagctgctgcaggacaatcagagacaaaagaaaagctccgagattttg

SEQ ID NO: 410560 - DNA, 120 bp, Artificial Sequence
  ENSG00000148356_12 (sequence is synthesized)
aaatcgctggaaaatgaaagaataagaatggaacagttgatgtccataacccaggaggagactgagagcctgcggcgacgtgacgttgcctccgccatgcagcagatgctgactgagagc

SEQ ID NO: 410561 - DNA, 120 bp, Artificial Sequence
  ENSG00000148356_13 (sequence is synthesized)
ctacgaatctcagaggcagaacttggtccagcaggcctgttccagcatggccgaaatggatgaacgattccagcagattctgtcgtggcagcaaatggatcagaacaaagccatcagcca

SEQ ID NO: 410562 - DNA, 120 bp, Artificial Sequence
  ENSG00000148356_14 (sequence is synthesized)
gatcctgcaggagagcgcgatgcagaaggctgcgttcgaggcactccaggtgaagaaagacctgatgcatcggcagatcaggagccagattaagttaatagaaactgagttattgcagct

SEQ ID NO: 410563 - DNA, 120 bp, Artificial Sequence
  ENSG00000148356_15 (sequence is synthesized)
gacacagctggagttaaagaggaagtccctggacacagagtcactccaggagatgatctcggagcagcgctgggccctcagctccctgctccagcagctgctcaaagagaagcagcagcg

SEQ ID NO: 410564 - DNA, 120 bp, Artificial Sequence
  ENSG00000148356_16 (sequence is synthesized)
agaggaagagctccgggaaatcctgacggagttagaagccaaaagtgaaaccaggcaggaaaattactggctgattcagtatcaacggcttttgaaccagaagcccttgtccttgaagct

SEQ ID NO: 410565 - DNA, 120 bp, Artificial Sequence
  ENSG00000148356_17 (sequence is synthesized)
gcaagaagaggggatggagcgccagctggtggccctcctggaggagctgtcggctgagcactacctgcccatctttgcgcaccaccgcctctcactggacctgctgagccaaatgagccc

SEQ ID NO: 410566 - DNA, 120 bp, Artificial Sequence
  ENSG00000148356_18 (sequence is synthesized)
aggggacctggccaaggtgggcgtctcagaagctggcctgcagcacgagatcctccggagagtccaggaactgctggatgcagccaggatccagccagagctgaaaccaccaatgggtga

SEQ ID NO: 410567 - DNA, 120 bp, Artificial Sequence
  ENSG00000148356_19 (sequence is synthesized)
ggtcgtcacccctacggccccccaggagcctcctgagtctgtgaggccatccgctccccctgcagagctggaggtgcaggcctcagagtgtgtcgtgtgcctggaacgggaggcccagat

SEQ ID NO: 410568 - DNA, 120 bp, Artificial Sequence
  ENSG00000148356_20 (sequence is synthesized)
gatcttcctcaactgtggccacgtctgctgctgccagcagtgctgccagccactgcgcacctgcccgctgtgccgccaggacatcgcccagcgcctccgcatctaccacagcagctgagt

SEQ ID NO: 410569 - DNA, 120 bp, Artificial Sequence
  ENSG00000148356_21 (sequence is synthesized)
gctgcccgcccacctgggcctggtcctagccctgcctcggccactgtgagccccgggctcctgctcagccttgtgccagccagactcgtatgaggctcccccctgccctgggccccttcc

SEQ ID NO: 410570 - DNA, 120 bp, Artificial Sequence
  ENSG00000148356_22 (sequence is synthesized)
ccactgcccaggagcccccatcctaagctccaagcatgtctgggccaggcagaggtgctcctcatccatgacaccaccagtctgaatggtcctgggggctggggctggagaggccgctgc

SEQ ID NO: 410571 - DNA, 120 bp, Artificial Sequence
  ENSG00000148356_23 (sequence is synthesized)
accaccacccgagcctgggagccagcgtcccagcctaatcacggatctgctgcctcccagctgtcttgactgaaggccaccgcccctgcaggagcttgggtcctcatctgggggccatgc

SEQ ID NO: 410572 - DNA, 120 bp, Artificial Sequence
  ENSG00000148356_24 (sequence is synthesized)
acaggcccgtcccaccctgcatgtgggaagggagcaggagggcctggctgggtgaggggaggccttcctgggaaggcgtgtggtgcaggcctgtgctcacagtggcaccagcaaccctgg

SEQ ID NO: 410573 - DNA, 120 bp, Artificial Sequence
  ENSG00000148356_25 (sequence is synthesized)
gtctccctctctgctgctccccagaaccccggggccctcctgctctccacaactgtccctccttaccccatgtagctcgatccgaagcaggagtgtcaataaacctgtcttcagtgcgct

SEQ ID NO: 410574 - DNA, 120 bp, Artificial Sequence
  ENSG00000148356_26 (sequence is synthesized)
tgatcccagccctagctgtttcccatattcctttatcgtgagtgtcaccccggtccccgtcacccaatcccagagccccgcccctcccctgaggggtccgtagtcccattccgagacccc

SEQ ID NO: 410575 - DNA, 120 bp, Artificial Sequence
  ENSG00000148356_27 (sequence is synthesized)
agtaccgcggcgacccctgctccctcgagcacttgttgtgtgcactttagttatcaaaacagtctatgtggaaatccagtcccgctcttcattcggagagtccgcgattcctagagcctc

SEQ ID NO: 410576 - DNA, 120 bp, Artificial Sequence
  ENSG00000148356_28 (sequence is synthesized)
ccaggttccacaggtgcccagcagagccagtggggaaaactcagtgctcaggagccccagacagggacaggccagcagccctggatgccctgtttttcctcccatgcatgtggctggcac

SEQ ID NO: 410577 - DNA, 120 bp, Artificial Sequence
  ENSG00000148356_29 (sequence is synthesized)
tgctgccaccctccagggcgcctggactgtgcgggcctcccctgggtccctgcagatgtgggaatttctcccccctttcctgatatgtgacactgtgcttaggagttgcaagcgcagggg

SEQ ID NO: 410578 - DNA, 120 bp, Artificial Sequence
  ENSG00000148356_30 (sequence is synthesized)
tcaaacagacctggatccaggtcccacttctgcttactaaccgtgaggtctcaggccatgggattcagacagactcagtgtctgtggcccacccagggcccggctcccagcaggtactcc

SEQ ID NO: 410579 - DNA, 120 bp, Artificial Sequence
  ENSG00000148356_31 (sequence is synthesized)
tccctagaacaggaaaaggataatgccaaggcctcactatgggtcggtggcaaatatgggccccaacccaggtcatctggcttgtctgtctccacctcatcctgctgctcaatgtttagt

SEQ ID NO: 410580 - DNA, 120 bp, Artificial Sequence
  ENSG00000148356_32 (sequence is synthesized)
caacaaagaacaaggagtactgagtgcctgctgtgggctcaggacacagatggaagaactagaaagacgcagcccctcacctcatggaattcactagaaagatgtggcccctgaccccat

SEQ ID NO: 410581 - DNA, 120 bp, Artificial Sequence
  ENSG00000148356_33 (sequence is synthesized)
ggaactcactagaaagatgtggcccctgcccccatggaactccatgaaactaggaagacgcagtccctggctccatggaactcgctagaaagacactgacccttaccccatggaactcac

SEQ ID NO: 410582 - DNA, 120 bp, Artificial Sequence
  ENSG00000148357_0 (sequence is synthesized)
ccggggcgccgctcctgcggctgctgaccgcggtctctgcggcagtggcagtggcagtggccggggcgcccgggacggtaatgccccccaccacgggggacgccaccctggccttcgtct

SEQ ID NO: 410583 - DNA, 120 bp, Artificial Sequence
  ENSG00000148357_1 (sequence is synthesized)
gtcttcgacgtcaccggctccatgtgggacgaactgatgcaggtgatcgatggcgcctcgcgcattctggaacgcagtctgagccgccgcagccaggccatcgccaactacgcgctggtg

SEQ ID NO: 410584 - DNA, 120 bp, Artificial Sequence
  ENSG00000148357_2 (sequence is synthesized)
cccttccacgacccagatattggcccagtgaccctcacggcggaccccacagtgtttcagagggagctgagagaactctacgtgcagggaggtggtgactgcccggagatgagtgtgggg

SEQ ID NO: 410585 - DNA, 120 bp, Artificial Sequence
  ENSG00000148357_3 (sequence is synthesized)
gccattaaggctgccgtggaggttgccaaccccggatccttcatctacgtcttttcggatgcccgcgccaaagactatcacaagaaggaagagctgctgcggctcctgcagctcaagcaa

SEQ ID NO: 410586 - DNA, 120 bp, Artificial Sequence
  ENSG00000148357_4 (sequence is synthesized)
tcacaggtggtctttgtgctgacgggggactgtggcgaccgcacccatcctggctacctggcttatgaggagatcgctgccaccagctctgggcaggtgttccacctggacaagcagcaa

SEQ ID NO: 410587 - DNA, 120 bp, Artificial Sequence
  ENSG00000148357_5 (sequence is synthesized)
gtgacagaggtgctgaagtgggtggagtcagcgatccaggcctccaaggtgcacctgctgtccacagaccacgaggaggagggggagcacacatggagactcccctttgaccccagcctg

SEQ ID NO: 410588 - DNA, 120 bp, Artificial Sequence
  ENSG00000148357_6 (sequence is synthesized)
aaggaggtcaccatctcattgagtgggccagggcctgagattgaagtccaagatccgctggggaggatcctgcaggaggacgagggcctcaacgtgcttctcaacatccctgactcggcc

SEQ ID NO: 410589 - DNA, 120 bp, Artificial Sequence
  ENSG00000148357_7 (sequence is synthesized)
aaggtcgtagcctttaagcctgagcatccggggctgtggtccatcaaggtctatagcagtggccgccattcagtgaggatcacaggcgtcagcaacattgacttccgagccggcttctcc

SEQ ID NO: 410590 - DNA, 120 bp, Artificial Sequence
  ENSG00000148357_8 (sequence is synthesized)
actcagcccttgctggacctcaaccacaccctcgagtggcccttgcaaggagtccccatctccctggtgatcaattccacgggcctgaaggcacccggccgcctagactcggtggagctg

SEQ ID NO: 410591 - DNA, 120 bp, Artificial Sequence
  ENSG00000148357_9 (sequence is synthesized)
gcacaaagctcagggaagcccctcctgactctgcccacgaagcccctctccaatggctccacccatcagctgtggggcgggccgcccttccacacccccaaggagcgcttctacctcaag

SEQ ID NO: 410592 - DNA, 120 bp, Artificial Sequence
  ENSG00000148357_10 (sequence is synthesized)
gtgaagggcaaggaccatgagggaaaccccctccttcgtgtctctggagtgtcctacagtggggtggccccaggcgctcccctcgtcagcatggcccccaggatccatggctacctgcac

SEQ ID NO: 410593 - DNA, 120 bp, Artificial Sequence
  ENSG00000148357_11 (sequence is synthesized)
cagcccctgctggtctcctgctcggtgcacagtgcccttcccttccggctgcagctgcggcgaggtgaagccaggctgggcgaagagaggcactttcaggagtcgggaaacagcagctgg

SEQ ID NO: 410594 - DNA, 120 bp, Artificial Sequence
  ENSG00000148357_12 (sequence is synthesized)
gagatcctgcgggcctccaaggccgaggagggcacgtacgagtgcacagccgtcagcagggctgggaccgggcgagcaaaggcccagattgttgtcacagaccccccgccgcagctggtc

SEQ ID NO: 410595 - DNA, 120 bp, Artificial Sequence
  ENSG00000148357_13 (sequence is synthesized)
cctgctcccaacgtgaccgtgtccccaggggagactgccgtcctatcctgccgggtcctaggcgaggccccctacaacctgacgtgggtccgggactggcgagtcctgccggcctcgacg

SEQ ID NO: 410596 - DNA, 120 bp, Artificial Sequence
  ENSG00000148357_14 (sequence is synthesized)
ggccgagttgcccagctggctgacctgtccctggagatcagtggcatcatccccacagacggcgggaggtaccagtgtgtggccagcaatgccaatggggtcacaagggcatccgtctgg

SEQ ID NO: 410597 - DNA, 120 bp, Artificial Sequence
  ENSG00000148357_15 (sequence is synthesized)
ctcctggtgcgagaggccccacaggtcagcatccacaccagctcccagcacttctcccaaggtgtggaggtgaaggtcagctgctcagcctctggataccccacaccccacatctcctgg

SEQ ID NO: 410598 - DNA, 120 bp, Artificial Sequence
  ENSG00000148357_16 (sequence is synthesized)
agccgtgagagccaagccctacaagaggacagcagaatccatgtggacgcacagggaaccctgattattcagggggtagccccagaggatgctgggaattacagctgccaggcgactaat

SEQ ID NO: 410599 - DNA, 120 bp, Artificial Sequence
  ENSG00000148357_17 (sequence is synthesized)
gaggttggcactgaccaggagacggtcaccctctactacacagacccaccgtcggtctctgctgtaaatgccgtggtgctggtggccgttggggaggaggctgtgttggtgtgtgaggca

SEQ ID NO: 410600 - DNA, 120 bp, Artificial Sequence
  ENSG00000148357_18 (sequence is synthesized)
tctggggttcccccgccccgagtcatctggtatcgagggggtcttgaaatgatcctggcccctgagggctccagctctgggaagctgcggatcccggcggctcaggagagggatgctggc

SEQ ID NO: 410601 - DNA, 120 bp, Artificial Sequence
  ENSG00000148357_19 (sequence is synthesized)
acctacacctgccgggctgtcaatgagttgggtgacgcctctgcagaaatccagctggcggttggacatgcgccccagctgacggagctgccccgggatgtcactgtggaactggggagg

SEQ ID NO: 410602 - DNA, 120 bp, Artificial Sequence
  ENSG00000148357_20 (sequence is synthesized)
agtgccctcttggcatgccgggcaacaggccgcccgcccccgacggtcacctggcgccgcggagatggccagcctctgggactcaggctgggggccgggcgaggcagtaggtctcggcag

SEQ ID NO: 410603 - DNA, 120 bp, Artificial Sequence
  ENSG00000148357_21 (sequence is synthesized)
ccggattcgggagtgctgttctttgaaagtgtggccccagaagaccaggccccatatgtctgtgaagctcgaaacgtctttgggaaggtccaggctgaggcccggctcatcgtcactggt

SEQ ID NO: 410604 - DNA, 120 bp, Artificial Sequence
  ENSG00000148357_22 (sequence is synthesized)
cacgccccgccacagatcgccagcagcgcccccaccgtccgggtcctggaggggcagcccgtgtccctgccctgcatcgtcctagctgggcggcccctcccggaaaggcactggctcaag

SEQ ID NO: 410605 - DNA, 120 bp, Artificial Sequence
  ENSG00000148357_23 (sequence is synthesized)
gacggccggcccctcccacctggcagccggcattccatccgagcagacggcagcctccaccttgaccgagcattgcaggagcacgcggggaggtacagctgtgtggccaccaacacggcc

SEQ ID NO: 410606 - DNA, 120 bp, Artificial Sequence
  ENSG00000148357_24 (sequence is synthesized)
ggctctcagcaccgggacgtggagctggtggtccaggtgccacctagaatccatcccactgccacccaccatatcaccaatgaaggggttgcggcctctcttccctgcgtcgcttcagga

SEQ ID NO: 410607 - DNA, 120 bp, Artificial Sequence
  ENSG00000148357_25 (sequence is synthesized)
gttcccgcccccaccatcacgtggaccaaggaaaccaatgccctgacctccagaggtccccactacaatgtgagtaaggagggcaccctgctcatcgcccagccgtctgcccaggacgca

SEQ ID NO: 410608 - DNA, 120 bp, Artificial Sequence
  ENSG00000148357_26 (sequence is synthesized)
ggggcctacgtctgcacggccaccaacaccgtgggcttttctagccaggagatgcgactttctgtcaacaccaaacccaggatccatatgaacgggtcacgtaatgcagatgtgcctctg

SEQ ID NO: 410609 - DNA, 120 bp, Artificial Sequence
  ENSG00000148357_27 (sequence is synthesized)
caagtcacagcgaaggctggcgaagaggtgaccctggactgcgaggccaagggctccccacccccactggtcacctggacgaaggactcccgccctgtaccgcccatcaccaacaggtat

SEQ ID NO: 410610 - DNA, 120 bp, Artificial Sequence
  ENSG00000148357_28 (sequence is synthesized)
ggcctcctcccgtctggctccctgcgtctggcccaggtgcaggtgggtgacagcggccactacgagtgcacagccagtaaccccgccgggtccgcctcccatcgctacgtccttggggtg

SEQ ID NO: 410611 - DNA, 120 bp, Artificial Sequence
  ENSG00000148357_29 (sequence is synthesized)
caagtcccccctcaggtgcagccaggccctcgggttctgaaggtgctggtgggagaagccctggatctgaactgtgtggctgagggcaacccagagccccagctgagctggtccaaggat

SEQ ID NO: 410612 - DNA, 120 bp, Artificial Sequence
  ENSG00000148357_30 (sequence is synthesized)
ggcgtggtgttgcagggccgggggcctcagggctccgtccacttcgcagccatcagaacctctgatgccgggaggtaccgctgtgaagcctccaacagcgccggggtggatgcctgggag

SEQ ID NO: 410613 - DNA, 120 bp, Artificial Sequence
  ENSG00000148357_31 (sequence is synthesized)
gtggagctcagggtgctggagccaccacactggggggctgatgagaccagcggcctgctggagcgagtggccggagagaatgccagcctgccgtgccctgccagaggaacgcccaagccg

SEQ ID NO: 410614 - DNA, 120 bp, Artificial Sequence
  ENSG00000148357_32 (sequence is synthesized)
caggtcacatggaggaagggcccgtcctcggagcccctgcatggccagccaggtgtggcagtgctggaggaggggtctctgttcctggcctccgtctcacctgcggatagtggagactac

SEQ ID NO: 410615 - DNA, 120 bp, Artificial Sequence
  ENSG00000148357_33 (sequence is synthesized)
gagtgccaggccaccaacgaggtgggctccacgtccaggagagccaagctggtggtctatgtgccccccagcatccgggaggacgggcgcaaggccaacgtgtcgggtatggccgggcag

SEQ ID NO: 410616 - DNA, 120 bp, Artificial Sequence
  ENSG00000148357_34 (sequence is synthesized)
tccctgacgctggagtgtgacgcgaacggctttccagtccctgagatcgtgtggctgaaggacgcgcagctgattcctaaggtgggcggccaccgcctcctggacgagggccagtccctc

SEQ ID NO: 410617 - DNA, 120 bp, Artificial Sequence
  ENSG00000148357_35 (sequence is synthesized)
cacttccccaggatccaggagggtgattctgggctctactcctgccgggcagagaaccaggctggcaccgcccagagggacttccatctccttgtgctcacccctccttccgtgcttgga

SEQ ID NO: 410618 - DNA, 120 bp, Artificial Sequence
  ENSG00000148357_36 (sequence is synthesized)
gccggggccgctcaggaggtgctaggattggccggtgcagacgtggagctgcagtgttggacctcaggggtccccacgccccaggtggagtggaccaaggacaggcagcctgtccttccg

SEQ ID NO: 410619 - DNA, 120 bp, Artificial Sequence
  ENSG00000148357_37 (sequence is synthesized)
ggaggccctcacctgcaggtccaggaggatggccaggttctcaggatcaccggcagtcacgtgggggatgagggacgataccagtgcgtggccttcagcccagctggtcagcaggccagg

SEQ ID NO: 410620 - DNA, 120 bp, Artificial Sequence
  ENSG00000148357_38 (sequence is synthesized)
gacttccagctccgagttcatgcgccccccactatctggggctccaacgagacaggcgaggtggccgtcatggaggaccacctagtgcagctcctgtgtgaggctcgaggagtgcccacc

SEQ ID NO: 410621 - DNA, 120 bp, Artificial Sequence
  ENSG00000148357_39 (sequence is synthesized)
ccaaacatcacctggttcaaggacggggccctgctccccaccagcaccaaggtggtctacactaggggcggtcggcagttgcagctggggagggcccagagctccgatgccggcgtctac

SEQ ID NO: 410622 - DNA, 120 bp, Artificial Sequence
  ENSG00000148357_40 (sequence is synthesized)
acctgcaaggccagcaatgctgtgggggccgcagagaaggccaccaggctggatgtttatgtcccacctaccatcgagggcgccggtggaagaccatacgtggtgaaggctgtggctggg

SEQ ID NO: 410623 - DNA, 120 bp, Artificial Sequence
  ENSG00000148357_41 (sequence is synthesized)
aggcctgtggcgctggagtgcgtggccagaggccacccgtcccccaccctctcctggcaccacgaggggctgcccgtggcagagagcaacgagtcgcggctggagacagacgggagtgtg

SEQ ID NO: 410624 - DNA, 120 bp, Artificial Sequence
  ENSG00000148357_42 (sequence is synthesized)
ctgaggctggagagcccgggggaggcatccagtggcctgtacagctgtgtggccagcagtcctgccggggaagccgtcctgcagtactccgtggaggttcaggtgcccccacagctcctg

SEQ ID NO: 410625 - DNA, 120 bp, Artificial Sequence
  ENSG00000148357_43 (sequence is synthesized)
gtggctgaaggcttgggacaggtgaccaccatcgtgggacagcccctggaacttccctgccaggcctcaggctccccagtacccactatccagtggctgcagaatggccgcccagccgag

SEQ ID NO: 410626 - DNA, 120 bp, Artificial Sequence
  ENSG00000148357_44 (sequence is synthesized)
gagctggctggggtgcaggtggcctcgcaggggaccacactgcacattgaccatgtggagctggaccactcaggcctcttcgcctgccaggccaccaatgaggcgggcactgccggggcc

SEQ ID NO: 410627 - DNA, 120 bp, Artificial Sequence
  ENSG00000148357_45 (sequence is synthesized)
gaggtggaggtgtctgtgcatgagttcccatcggtcagtatcattgggggtgagaacatcacagctcctttcctgcagcctgtgaccctccagtgcataggggatggggtgcccacccca

SEQ ID NO: 410628 - DNA, 120 bp, Artificial Sequence
  ENSG00000148357_46 (sequence is synthesized)
agcctccgttggtggaaggatggtgtagccctggcagcctttggggggaacctacagattgagaaggtggacctgagggacgagggcatctacacttgtgctgctaccaacctggctggg

SEQ ID NO: 410629 - DNA, 120 bp, Artificial Sequence
  ENSG00000148357_47 (sequence is synthesized)
gagagcaagagggaagtggcgctgaaagttttggtgccccccaacatcgagccaggcccagtcaacaaggcagtgctggaaaatgcctcagtgaccttggagtgtctggcttcgggcgtg

SEQ ID NO: 410630 - DNA, 120 bp, Artificial Sequence
  ENSG00000148357_48 (sequence is synthesized)
ccccctcctgatgtctcctggttcaagggccaccaacctgtctcttcatggatgggagtgacagtatcagtggatgggagagttctccgcattgagcaagcccagctttctgatgctggg

SEQ ID NO: 410631 - DNA, 120 bp, Artificial Sequence
  ENSG00000148357_49 (sequence is synthesized)
agctaccgctgtgtggcatccaatgtggcaggtagcacagagctgcggtatggcctacgggtcaatgtgccccctcgaatcacactgccacccagcctgccaggccctgtgttggtcaac

SEQ ID NO: 410632 - DNA, 120 bp, Artificial Sequence
  ENSG00000148357_50 (sequence is synthesized)
acccctgtccggctgacctgcaatgccaccggtgcccccagccccacactgatgtggctgaaggatggaaaccctgtgtcccctgcagggacccctggcctgcaggtcttccctgggggc

SEQ ID NO: 410633 - DNA, 120 bp, Artificial Sequence
  ENSG00000148357_51 (sequence is synthesized)
cgggtcctcaccttggctagtgcccgggcctccgactctgggaggtactcctgcgtggctgtgagcgcggtgggcgaggaccgccaggatgttgtcctgcaagtccacatgcccccgagt

SEQ ID NO: 410634 - DNA, 120 bp, Artificial Sequence
  ENSG00000148357_52 (sequence is synthesized)
atccttggagaagagctgaatgtgtccgttgtggccaatgagtcagtggccctggagtgccagagccacgccatgccccctcctgtgctgagctggtggaaggacgggcggcccctggaa

SEQ ID NO: 410635 - DNA, 120 bp, Artificial Sequence
  ENSG00000148357_53 (sequence is synthesized)
ccacggcctggagtccacctctccgcagacaaagccttgctgcaggtggacagagccgatgtgtgggatgcgggccattacacctgtgaggcactgaaccaggccggccactcagagaaa

SEQ ID NO: 410636 - DNA, 120 bp, Artificial Sequence
  ENSG00000148357_54 (sequence is synthesized)
cactacaatctgaacgtctgggttgctccagtgttccccttgagggaatcccacaccctgactgtgagagaggggcaccctaccaggctgtcctgcgaatgccggggtgtccccttcccc

SEQ ID NO: 410637 - DNA, 120 bp, Artificial Sequence
  ENSG00000148357_55 (sequence is synthesized)
aagatctcctggaggaaggacggtcaacccctccccggggagggggctggcctccagcacgtgtcggctgtggggaggctgttgtacctgggacaggcccagctggctcaggaaggaaca

SEQ ID NO: 410638 - DNA, 120 bp, Artificial Sequence
  ENSG00000148357_56 (sequence is synthesized)
tacacctgtgaatgcagcaacgtggtggggaacagcagccaggacctgcagctggaggtgcacgttccccctcagattgccggtccccgggagcctcccacacaagtctctgtggtccag

SEQ ID NO: 410639 - DNA, 120 bp, Artificial Sequence
  ENSG00000148357_57 (sequence is synthesized)
gatggagtggccactctggagtgcaacgccacagggaaaccccctccgacagtgacatgggagcgggacggccagcccgtgggggctgaactgggcctgcagctgcagaaccagggtcag

SEQ ID NO: 410640 - DNA, 120 bp, Artificial Sequence
  ENSG00000148357_58 (sequence is synthesized)
agcctgcatgtggagcgggcccaggctgcccacactggacgctacagctgtgtggccgagaacctggctgggagggcagagaggaagtttgagctctccgtactggtgcccccagagctc

SEQ ID NO: 410641 - DNA, 120 bp, Artificial Sequence
  ENSG00000148357_59 (sequence is synthesized)
attggagacttggacccgctgaccaacatcactgctgccttgcacagccccttaactctgctctgtgaagccatggggatcccacctccagccatccgctggttccgaggggaggagcct

SEQ ID NO: 410642 - DNA, 120 bp, Artificial Sequence
  ENSG00000148357_60 (sequence is synthesized)
gtcagccccggggaggacacctacctgctggcaggtggctggatgctgaagatgactcagacacaggagcaagacagtggcctctactcatgcctggcaagcaacgaggctggggaggca

SEQ ID NO: 410643 - DNA, 120 bp, Artificial Sequence
  ENSG00000148357_61 (sequence is synthesized)
cggaggaacttcagtgtggaggtgctggttcctcccagtattgagaacgaggacttggaggaggtgatcaaggtccttgatggacagactgcccatcttatgtgcaacgtcacaggccac

SEQ ID NO: 410644 - DNA, 120 bp, Artificial Sequence
  ENSG00000148357_62 (sequence is synthesized)
ccacagcccaagctcacatggttcaaagatggccggcctctggctaggggagatgctcaccacatctccccagacggagtcctcctgcaggtcctccaggcaaacctgtccagtgctggc

SEQ ID NO: 410645 - DNA, 120 bp, Artificial Sequence
  ENSG00000148357_63 (sequence is synthesized)
cactactcctgcattgcagccaacgctgttggggagaagaccaaacacttccagctcagtgtcctgttggctcccaccatcctgggaggggccgaggacagtgcagatgaggaggtgacc

SEQ ID NO: 410646 - DNA, 120 bp, Artificial Sequence
  ENSG00000148357_64 (sequence is synthesized)
gtgactgtcaacaaccccatctctctgatctgcgaggccctggccttcccttcccccaacatcacctggatgaaggacggggccccgtttgaggcctccaggaacatccagctgctccca

SEQ ID NO: 410647 - DNA, 120 bp, Artificial Sequence
  ENSG00000148357_65 (sequence is synthesized)
ggctgcagatcctgaatgcccagaaggaagatgctggccagtacacctgcgtggtcaccaatgagctcggggaggccgtgaaaaactaccatgtggaagtgctcatccccccttccatct

SEQ ID NO: 410648 - DNA, 120 bp, Artificial Sequence
  ENSG00000148357_66 (sequence is synthesized)
ccaaagacgaccccttggcggaggtcggcgtgaaggaggtgaagaccaaggtcaacagcaccttgaccttggagtgtgagagctgggctgtgcccccgcccaccatccgctggtacaagg

SEQ ID NO: 410649 - DNA, 120 bp, Artificial Sequence
  ENSG00000148357_67 (sequence is synthesized)
atggacagcccgtgacccccagctcgcggctgcaggtcctgggtgaagggcgactgctccagatccagcccacacaggtctcagactcggggcggtacctgtgtgtggccaccaatgtgg

SEQ ID NO: 410650 - DNA, 120 bp, Artificial Sequence
  ENSG00000148357_68 (sequence is synthesized)
ctggcgaggacgaccaggacttcaacgtgctcatccaggtgccccccatgttccagaaggtgggtgatttcagtgcagccttcgagatcctgtcccgggaggaggaggcccggggcggag

SEQ ID NO: 410651 - DNA, 120 bp, Artificial Sequence
  ENSG00000148357_69 (sequence is synthesized)
tcacggaatacagggagatcgtggagaacaacccagcctacctgtactgcgacaccaacgcgatcccacccccggacctcacctggtacagagaggatcagcccctctcggccggggatg

SEQ ID NO: 410652 - DNA, 120 bp, Artificial Sequence
  ENSG00000148357_70 (sequence is synthesized)
aggtgtctgtgctgcaaggaggccgggtcctgcagatccccctggtgcgggcagagaacgccgggaggtactcgtgcaaggcctccaacgaggtgggcgaggactggctgcactacgagc

SEQ ID NO: 410653 - DNA, 120 bp, Artificial Sequence
  ENSG00000148357_71 (sequence is synthesized)
tgctggtgctgaccccacctgtgatcctgggtgacacagaggagctggtggaagaggtgacagtcaatgccagcagcaccgtcagcctgcagtgcccggccctgggaaaccccgtgccca

SEQ ID NO: 410654 - DNA, 120 bp, Artificial Sequence
  ENSG00000148357_72 (sequence is synthesized)
ccatctcatggctccagaatgggctgcctttctccccgagcccacggctgcaggtcctggaggacgggcaagtcttgcaggtttccacggcagaggtggccgacgccgccagctacatgt

SEQ ID NO: 410655 - DNA, 120 bp, Artificial Sequence
  ENSG00000148357_73 (sequence is synthesized)
gtgtggccgagaaccaggcgggctccgctgagaagctcttcaccctcagggttcaagtcccgccacgaatcgcaggcctggacttggagcaggtcactgccatcctcaacagcagcgtct

SEQ ID NO: 410656 - DNA, 120 bp, Artificial Sequence
  ENSG00000148357_74 (sequence is synthesized)
ccctcccttgcgacgtccacgctcacccaaaccccgaggtcacgtggtacaaggacagccaggccctctccctgggtgaagaggtcttcctcctgcctggcacccacacgctgcagctgg

SEQ ID NO: 410657 - DNA, 120 bp, Artificial Sequence
  ENSG00000148357_75 (sequence is synthesized)
ggagagcacggctgtcggactccgggatgtacacatgcgaagccctcaatgctgccggccgagaccagaagctggtgcagctcagtgttctggttcccccggccttcaggcaggctccca

SEQ ID NO: 410658 - DNA, 120 bp, Artificial Sequence
  ENSG00000148357_76 (sequence is synthesized)
gaggtccccaggatgcggtcctggtgagggtcggggacaaagctgtcctgagctgcgagacagatgcgctccctgagccaactgtgacctggtacaaggatgggcagcccctggtcctgg

SEQ ID NO: 410659 - DNA, 120 bp, Artificial Sequence
  ENSG00000148357_77 (sequence is synthesized)
cacagcggacccaggctctgcggggtgggcagaggctggagatccaggaagcccaggtatcggataaaggtttatacagctgtaaagtcagcaacgtggctggggaggccgtgcggacct

SEQ ID NO: 410660 - DNA, 120 bp, Artificial Sequence
  ENSG00000148357_78 (sequence is synthesized)
tcaccctcaccgtccaggtgcccccaacatttgagaaccccaagacagagacagtgagccaggtggctgggagccccctggtcctgacctgtgatgtgtccggggtccctgcacccacgg

SEQ ID NO: 410661 - DNA, 120 bp, Artificial Sequence
  ENSG00000148357_79 (sequence is synthesized)
tcacttggctgaaggacaggatgcctgtggagagcagcgcggtgcacggtgtggtctcccgggggggccgcctccagctgagccgcctgcaaccggcccaggcgggcacctacacgtgcg

SEQ ID NO: 410662 - DNA, 120 bp, Artificial Sequence
  ENSG00000148357_80 (sequence is synthesized)
tggctgagaacacccaggctgaggcccgcaaggacttcgtggtagcagtgctggtggccccccggatccggagctcgggcgtggcgcgggagcaccatgtcttggaagggcaggaggtgc

SEQ ID NO: 410663 - DNA, 120 bp, Artificial Sequence
  ENSG00000148357_81 (sequence is synthesized)
ggctggactgtgaggccgatgggcagccgccgccggacgtggcctggctgaaggacggcagcccgctgggccaggacatgggcccccacctccggttctacctggacggcggctccctgg

SEQ ID NO: 410664 - DNA, 120 bp, Artificial Sequence
  ENSG00000148357_82 (sequence is synthesized)
tgctaaaaggcctgagggcctcggacgcgggtgcctacacctgcgtggcccacaacccagccggggaggacgccaggctgcacacggtgaatgtgctggttcctcccaccatcaagcagg

SEQ ID NO: 410665 - DNA, 120 bp, Artificial Sequence
  ENSG00000148357_83 (sequence is synthesized)
gagcagacggctcggggaccctggtgagcaggcctggggagctggtgaccatggtgtgccctgtgcggggctccccgcccatccacgtgagctggctcaaggacggcctgcccctcccgc

SEQ ID NO: 410666 - DNA, 120 bp, Artificial Sequence
  ENSG00000148357_84 (sequence is synthesized)
tctcccagcgcaccctcctccacggctctggccacaccctcaggatttccaaggtgcaattggcagacgctggcatcttcacctgtgtggccgcaagcccagctggcgtggcggacagga

SEQ ID NO: 410667 - DNA, 120 bp, Artificial Sequence
  ENSG00000148357_85 (sequence is synthesized)
acttcaccttgcaggtgcaggtgccccctgtcctggagccggtggagttccagaatgacgtggtggtggttcgtggctccctggtggaactcccgtgcgaggcccggggcgttcccctgc

SEQ ID NO: 410668 - DNA, 120 bp, Artificial Sequence
  ENSG00000148357_86 (sequence is synthesized)
ctctcgtgtcgtggatgaaggatggggaacccttgttgtcccagagcctcgagcaggggcccagcctgcagctggaggcagtgggagctggtgactcggggacctactcctgtgtggccg

SEQ ID NO: 410669 - DNA, 120 bp, Artificial Sequence
  ENSG00000148357_87 (sequence is synthesized)
tgagcgaggcgggggaagccaggaggcatttccagctgaccgtcatggagccccctcacattgaggactcaggccagcctacagagctgtcgctgacccccggcgcccccatggagctcc

SEQ ID NO: 410670 - DNA, 120 bp, Artificial Sequence
  ENSG00000148357_88 (sequence is synthesized)
tctgtgatgcccagggcaccccccagcccaacatcacctggcataaggacgggcaggccctgaccaggctggagaacaacagcagagccacacgggtgctccgggtggagaatgtgcagg

SEQ ID NO: 410671 - DNA, 120 bp, Artificial Sequence
  ENSG00000148357_89 (sequence is synthesized)
ttagggatgctgggctgtacacttgtctggctgaaagccctgcaggtgcaattgagaagagcttccgggtcagggttcaagcccctccaaacattgttgggccccgaggcccccgctttg

SEQ ID NO: 410672 - DNA, 120 bp, Artificial Sequence
  ENSG00000148357_90 (sequence is synthesized)
tggtcggcctggccccagggcagctggtcctggagtgttcggtggaggcagagccagcgcccaagatcacgtggcaccgagacggcattgtgctgcaggaggacgcccacacacaattcc

SEQ ID NO: 410673 - DNA, 120 bp, Artificial Sequence
  ENSG00000148357_91 (sequence is synthesized)
cggagcggggcaggttcctccagctgcaggccctgagcacggctgacagcggcgactacagctgcacagcccgcaacgccgcaggcagcactagtgtcgccttccgcgtggagatccaca

SEQ ID NO: 410674 - DNA, 120 bp, Artificial Sequence
  ENSG00000148357_92 (sequence is synthesized)
cggtgcccaccatccggtcaggaccacctgcagtgaacgtctcagtgaaccagacagccctgctgccttgccaggccgacggcgtgcccgcacccctcgtgagctggcggaaggacaggg

SEQ ID NO: 410675 - DNA, 120 bp, Artificial Sequence
  ENSG00000148357_93 (sequence is synthesized)
tccccctggatcccaggagccccaggtttgaaattctgcctgagggttccctgagaatccagccagtccttgcccaggacgccggccactacctctgcctggcatccaactctgctggct

SEQ ID NO: 410676 - DNA, 120 bp, Artificial Sequence
  ENSG00000148357_94 (sequence is synthesized)
ccgatcgtcaaggccgtgacctacgggtcttggccttgctgccctgcgaggccagcggctcccctaagcccctggtggtctggtggaaggacggacagaagctggacttccgcctgcagc

SEQ ID NO: 410677 - DNA, 120 bp, Artificial Sequence
  ENSG00000148357_95 (sequence is synthesized)
agggcgcctaccggctcctgccctccaacgccctgctcctcacggcccccggcccccaggactcagcccagtttgaatgcgtggtgagcaatgaggtgggcgaggcccacaggctctacc

SEQ ID NO: 410678 - DNA, 120 bp, Artificial Sequence
  ENSG00000148357_96 (sequence is synthesized)
aggtgaccgtccatgtgcctcccaccattgccgatgaccagacagacttcaccgtgaccatgatggcacctgtggtcctcacatgtcacagcacgggtataccagctccgaccgtgtcct

SEQ ID NO: 410679 - DNA, 120 bp, Artificial Sequence
  ENSG00000148357_97 (sequence is synthesized)
ggagcaaggcaggcgcccagctaggagctcgggggagtggctatcgtgtctcaccatcgggcgccctggagatcgggcaggccctccccatccacgcaggccgctacacctgctcagccc

SEQ ID NO: 410680 - DNA, 120 bp, Artificial Sequence
  ENSG00000148357_98 (sequence is synthesized)
gcaactctgccggcgtagcccacaagcacgtcttcctcactgtgcaagcctccccggtggtgaagccgctgcccagcgtggttcgggcagtggcagaggaggaggtgctgctgccctgcg

SEQ ID NO: 410681 - DNA, 120 bp, Artificial Sequence
  ENSG00000148357_99 (sequence is synthesized)
aggcctcaggcatcccccggccgaccatcacctggcagaaggaagggctcaacgtcgctactggagtgagtacccaggtcctaccaggcggacagctgcggattgcccatgccagcccag

SEQ ID NO: 410682 - DNA, 120 bp, Artificial Sequence
  ENSG00000148357_100 (sequence is synthesized)
aggatgctggaaactatctctgcatcgctaagaacagtgcgggcagtgccatggggaagacgcggctggtggtgcaagtcccaccagtgatcgagaatggcctcccagacctgtccacca

SEQ ID NO: 410683 - DNA, 120 bp, Artificial Sequence
  ENSG00000148357_101 (sequence is synthesized)
ccgaaggctcccacgccttcttgccttgcaaggcgaggggcagtcctgagcccaacatcacctgggacaaagatggccagcctgtgtcgggcgccgaggggaagttcaccatccagcctt

SEQ ID NO: 410684 - DNA, 120 bp, Artificial Sequence
  ENSG00000148357_102 (sequence is synthesized)
ctggggagttgctggtgaagaacttggagggccaggacgcaggcacctatacctgtaccgctgagaacgccgtgggccgggcccgccgccgcgtgcacctcaccatcctggtactgcctg

SEQ ID NO: 410685 - DNA, 120 bp, Artificial Sequence
  ENSG00000148357_103 (sequence is synthesized)
tgttcaccaccctgcctggggaccgcagcctgcgccttggggacaggctgtggcttcgctgtgcagcccggggcagccccacccctcgcattggctggactgtcaacgaccggccagtca

SEQ ID NO: 410686 - DNA, 120 bp, Artificial Sequence
  ENSG00000148357_104 (sequence is synthesized)
cagaaggggtgtctgagcaggatggaggcagcacgctgcagcgggccgctgtctccagagaagacagcgggacctatgtctgctgggcggagaacagagtgggccgcacgcaggcggtca

SEQ ID NO: 410687 - DNA, 120 bp, Artificial Sequence
  ENSG00000148357_105 (sequence is synthesized)
gcttcgtccacgtgaaggaggctcctgtcctacaaggggaggctttctcctacctggtggaacctgtaggaggcagcattcagctagactgtgtggtgcgtggagacccagtgccggaca

SEQ ID NO: 410688 - DNA, 120 bp, Artificial Sequence
  ENSG00000148357_106 (sequence is synthesized)
tccactggatcaaagatggccttccactgcggggcagccacctccggcaccagctgcagaatggctcgctgaccatccgcaggactgagagggacgatgcgggacggtaccagtgcctgg

SEQ ID NO: 410689 - DNA, 120 bp, Artificial Sequence
  ENSG00000148357_107 (sequence is synthesized)
cagagaatgagatgggcgtggcgaagaaagtggtgatcctcgtcctgcagagtgctccggtgttccaggtggagccccaggacatgacagtgagatctggggatgacgtggccctgcggt

SEQ ID NO: 410690 - DNA, 120 bp, Artificial Sequence
  ENSG00000148357_108 (sequence is synthesized)
gccaggccactggagagcccacacccaccattgaatggctacaggcgggtcaacccttgcgggccagccggcggctccggaccctgcccgatgggagcctgtggctggagaacgtggaga

SEQ ID NO: 410691 - DNA, 120 bp, Artificial Sequence
  ENSG00000148357_109 (sequence is synthesized)
ctggggatgcaggcacctacgactgcgtcgctcacaacctcctgggctctgccacagcccgggcgttcctggtcgtgagaggggagccccaggggagctggggcagcatgactggggtga

SEQ ID NO: 410692 - DNA, 120 bp, Artificial Sequence
  ENSG00000148357_110 (sequence is synthesized)
taaatggccggaaatttggcgtggccacactcaacaccagcgtgatgcaggaggcacactccggggtcagcagcatccacagcagcatccgccatgtcccagcaaacgtggggcctctga

SEQ ID NO: 410693 - DNA, 120 bp, Artificial Sequence
  ENSG00000148357_111 (sequence is synthesized)
tgcgggtgctcgtggtcaccatcgcccccatctactgggccctggccagagagagtggggaagccctgaatggccactctctgactgggggcaggttccggcaggagtcacacgtggagt

SEQ ID NO: 410694 - DNA, 120 bp, Artificial Sequence
  ENSG00000148357_112 (sequence is synthesized)
ttgctacaggggagctgctcacgatgacccaggtggcccggggtctggatcccgatggcctcctgctcctcgacgtggtggtcaatggcgttgtccccgagagcctggctgacgcagatc

SEQ ID NO: 410695 - DNA, 120 bp, Artificial Sequence
  ENSG00000148357_113 (sequence is synthesized)
ttcaagtgcaggactttgaggagcactacgtgcaaacagggcctggccagctgttcgtgggctccacacagcgcttcttccagggcggcctcccctcgttcctacgctgcaaccacagca

SEQ ID NO: 410696 - DNA, 120 bp, Artificial Sequence
  ENSG00000148357_114 (sequence is synthesized)
tccagtacaacgcggcccggggcccccagccccagctggtgcagcacctgcgggcctcagctatcagctcggcctttgatccagaggccgaggccctgcgcttccagctcgctacagccc

SEQ ID NO: 410697 - DNA, 120 bp, Artificial Sequence
  ENSG00000148357_115 (sequence is synthesized)
tgcaggcggaggagaacgaggtcggctgccccgagggctttgagctggactcccagggagcgttttgtgtggacagggacgagtgctcaggaggccctagcccctgctcccatgcctgcc

SEQ ID NO: 410698 - DNA, 120 bp, Artificial Sequence
  ENSG00000148357_116 (sequence is synthesized)
ttaatgcacccggccgcttctcctgcacctgccccactggcttcgccctggcctgggatgacaggaactgcagagatgtggacgagtgtgcgtgggatgctcacctctgccgagagggac

SEQ ID NO: 410699 - DNA, 120 bp, Artificial Sequence
  ENSG00000148357_117 (sequence is synthesized)
agcgctgtgtgaacctgctcgggtcctaccgctgcctccccgactgtgggcctggcttccgggtggctgatggggccggctgtgaagatgtggacgaatgcctggaggggttggacgact

SEQ ID NO: 410700 - DNA, 120 bp, Artificial Sequence
  ENSG00000148357_118 (sequence is synthesized)
gtcactacaaccagctctgcgagaacaccccaggcggtcaccgctgcagctgccccaggggttaccggatgcagggccccagcctgccctgcctagatgtcaatgagtgcctgcagctgc

SEQ ID NO: 410701 - DNA, 120 bp, Artificial Sequence
  ENSG00000148357_119 (sequence is synthesized)
ccaaggcctgcgcctaccagtgccacaacctccagggcagctaccgctgcctgtgccccccaggccagaccctccttcgcgacggcaaggcctgcacctcactggagcggaatggacaaa

SEQ ID NO: 410702 - DNA, 120 bp, Artificial Sequence
  ENSG00000148357_120 (sequence is synthesized)
atgtgaccaccgtcagccaccgaggccctctattgccctggctgcggccctgggcctcgatccccggtacctcctaccacgcctgggtctctctccgtccgggtcccatggccctgagca

SEQ ID NO: 410703 - DNA, 120 bp, Artificial Sequence
  ENSG00000148357_121 (sequence is synthesized)
gtgtgggccgggcctggtgccctcctggtttcatcaggcagaacggagtctgcacagaccttgacgagtgccgcgtgaggaacctgtgtcagcacgcctgccgcaacactgagggcagct

SEQ ID NO: 410704 - DNA, 120 bp, Artificial Sequence
  ENSG00000148357_122 (sequence is synthesized)
accagtgcctgtgccccgccggctaccgtctgctccccagcgggaagaactgccaggacatcaacgagtgcgaggaggagagcatcgagtgtggacccggccagatgtgcttcaacaccc

SEQ ID NO: 410705 - DNA, 120 bp, Artificial Sequence
  ENSG00000148357_123 (sequence is synthesized)
gtggcagctaccagtgtgtggacacaccctgtcctgccacctaccggcagggccccagccctgggacgtgcttccggcgctgctcgcaggactgcggcacgggcggcccctctacgctgc

SEQ ID NO: 410706 - DNA, 120 bp, Artificial Sequence
  ENSG00000148357_124 (sequence is synthesized)
agtaccggctgctgccgctgcccctgggcgtgcgcgcccaccacgacgtggcccgcctcaccgccttctccgaggtcggcgtccccgccaaccgcaccgagctcagcatgctggagcccg

SEQ ID NO: 410707 - DNA, 120 bp, Artificial Sequence
  ENSG00000148357_125 (sequence is synthesized)
agccccttcgcgctgcgtccgctgcgcgcgggccttggcgcggtctacacccgtcgcgcgctcacccgcgccggcctctaccggctcaccgtgcgtgctgcggcaccgcgccaccaaagc

SEQ ID NO: 410708 - DNA, 120 bp, Artificial Sequence
  ENSG00000148357_126 (sequence is synthesized)
accaaagcgtcttcgtcttgctcatcgccgtgtccccctacccctactaaacgggagagggcattggcggccgccctggcgtgacccccgaggaaggggtcgaggagaagcttggtccac

SEQ ID NO: 410709 - DNA, 120 bp, Artificial Sequence
  ENSG00000148357_127 (sequence is synthesized)
gccacctgctgtggcaagcggagcgtcatcgtctcccgccccgtgcgtcagcgagaccttgggtcaacacgaccctgcgcacagccttgacccccgacagcgaggacctgacctcacaga

SEQ ID NO: 410710 - DNA, 120 bp, Artificial Sequence
  ENSG00000148357_128 (sequence is synthesized)
gggaggcgtccagggcggcccttgggtggccagtcccgcaggcagggcccggggaagcccggatcagacctccaggtctgatccgcccctcagtgggagcgggacagggacacagggcac

SEQ ID NO: 410711 - DNA, 120 bp, Artificial Sequence
  ENSG00000148357_129 (sequence is synthesized)
ctggacgcgcgggagagggggcagaccccgcgttaggggtggcagcagctgtcgcccggccacacctggtggtgtcattctgaaccctgttgcaatataaagggatttttttttaaccaa

SEQ ID NO: 410712 - DNA, 120 bp, Artificial Sequence
  ENSG00000148357_130 (sequence is synthesized)
ttcttagctcttcccacataccaggctcccctcctcaccacgaccccatgaagaggtcacatctttaccctctttatggatgaggaaactgaggctcagagagggagagttccttgccca

SEQ ID NO: 410713 - DNA, 120 bp, Artificial Sequence
  ENSG00000148357_131 (sequence is synthesized)
agggctagaatatggagagctcagcggaacccaggactctgcccacaaagggcctttcagccccttcctttctctgggacctggaaccctgttgacctccaacctggtataactggggga

SEQ ID NO: 410714 - DNA, 120 bp, Artificial Sequence
  ENSG00000148357_132 (sequence is synthesized)
ggtgctgtgagggcggccatgcagcctggtggcactgaaactggagaaggggacagggaggaggcccagatatggagggggatggtccgtcccttgggggaggggccctgggctagacct

SEQ ID NO: 410715 - DNA, 120 bp, Artificial Sequence
  ENSG00000148357_133 (sequence is synthesized)
ctagttacggggacacccaccctctggccagcacctcagctcaggggctgagggtgtctaaggcgccagtgctgttgagttctgagaataaccaaacagcagccgacactttgcactcac

SEQ ID NO: 410716 - DNA, 120 bp, Artificial Sequence
  ENSG00000148357_134 (sequence is synthesized)
tgggtgcctgcctgtgcaccaaaacctcagcctgaccctgtggggtcatcttccggggaatttcaggagggggaggactgtggaggcaagtgggtgtatctcagagaggcttaggagagg

SEQ ID NO: 410717 - DNA, 120 bp, Artificial Sequence
  ENSG00000148357_135 (sequence is synthesized)
gaatggatctaactggggcactgaagggctgagggggagctggagtctgggacgaggctgagagctggggaggctgggcctctgggagctgtaggtggaatcggagaggaggctggagtt

SEQ ID NO: 410718 - DNA, 120 bp, Artificial Sequence
  ENSG00000148357_136 (sequence is synthesized)
ggtccgggagagggggatgcagcgtggctcacatgcagcatgggagtggctggattctagggaatgccaacaagagagaaggcagggccaggcaatggctgcaggctgcaggggaacctg

SEQ ID NO: 410719 - DNA, 120 bp, Artificial Sequence
  ENSG00000148357_137 (sequence is synthesized)
taaggccaggccctgaccatccacgggacactgccgttatgggctcttgggcccctagggtgggtgtgcaggtgtcacccaccgagttcagaaacccagaccttccaggcaagtggggtg

SEQ ID NO: 410720 - DNA, 120 bp, Artificial Sequence
  ENSG00000148357_138 (sequence is synthesized)
agtggtgtggtggatggtggcttctccaatgcagggtgtctcagagccttggctgtgctattgggcagggggcttccaagatggtgtggactattttttaaaccatttgacttcaggaca

SEQ ID NO: 410721 - DNA, 120 bp, Artificial Sequence
  ENSG00000148357_139 (sequence is synthesized)
ctttgcccagagggagggcatcctaggcaagtggtcctgggaaccccctttgagaaacactcctcttagcactcagagggaaagcagtcagggagggagattttcaggggtgaaggagaa

SEQ ID NO: 410722 - DNA, 120 bp, Artificial Sequence
  ENSG00000148357_140 (sequence is synthesized)
tgttccaggtagacatgagaatgtgacaagggactgctgggtagaggggggtgggggtgggggatggcccctggaccctgcagagagggacaaagaggaggtggcctgccccagggctga

SEQ ID NO: 410723 - DNA, 120 bp, Artificial Sequence
  ENSG00000148357_141 (sequence is synthesized)
cttctatgccttggtgagcacggggtaggtaaggtggggctcctccctctcagcaagcacagggactcccccaacccctgaacctgggctgggaggggcaggacagggagaaggagcagg

SEQ ID NO: 410724 - DNA, 120 bp, Artificial Sequence
  ENSG00000148357_142 (sequence is synthesized)
gcagctccagagcccagcgggcaggtgtgtggccacgttggtgtctgtggctcagtgcgtctctctgcccccatcccccacctgccccacccccatgcccgggccagaccttgacgagtg

SEQ ID NO: 410725 - DNA, 120 bp, Artificial Sequence
  ENSG00000148357_143 (sequence is synthesized)
gctgagttggcagggcctcgtgccctcaggaaaagcacatttttcagtcactgggggtgcaggctggccctgtcattgtcactccccacacaagtgatgcaggcaggaacgcacggagcc

SEQ ID NO: 410726 - DNA, 120 bp, Artificial Sequence
  ENSG00000148357_144 (sequence is synthesized)
ctgggggcagggagaggccagagtgggagagaacggggacacaggagcacacacaccaaaccccagacacaggaccaccatgcagactcacacaaccccaggacaaaactcagacacgcc

SEQ ID NO: 410727 - DNA, 120 bp, Artificial Sequence
  ENSG00000148357_145 (sequence is synthesized)
agcaccaaacccatctcctccacgccactcacagcggccacggacactcatcaagacacacggagacatggggaccttaggggtggcagctgctgccctggaaaggtttctcccggcggg

SEQ ID NO: 410728 - DNA, 120 bp, Artificial Sequence
  ENSG00000148357_146 (sequence is synthesized)
tgacctgccccaggccttacaactagaaacgtaggctggggttggaagcagatgcccgcggcaaggctaagcgcagtctccacctccaaccccgcccccgcagggcaaatccagactggg

SEQ ID NO: 410729 - DNA, 120 bp, Artificial Sequence
  ENSG00000148357_147 (sequence is synthesized)
tgacttggcccaggggcacatcgctcccctgtgtctgctgggcttccctggggcatggatcccgaaagtccgctggagggaccatgaaagggcaggcctctggcttctctgggcttcagt

SEQ ID NO: 410730 - DNA, 120 bp, Artificial Sequence
  ENSG00000148357_148 (sequence is synthesized)
ttgttgaactctaaaacgggctagcgtgggagcctgcagagaaggcgtgtggggctctgcgggagaaggacgggcagcgcgtgggcggaactgcaggggctggcagggaggtctgagtta

SEQ ID NO: 410731 - DNA, 120 bp, Artificial Sequence
  ENSG00000148357_149 (sequence is synthesized)
cgcggatgggccacgctccgaccgcacccccgagtccgcctgtccgtgtgtctgtgccgcccgcaggacgtgcttccggcgctgctcgcaggactgcggcacgggcggcccctctacgct

SEQ ID NO: 410732 - DNA, 120 bp, Artificial Sequence
  ENSG00000148357_150 (sequence is synthesized)
tctgtcacctctccctccgtgcgcctctgccacctccttttgccacccccacttcctgtctctctcaggcctgtctctcctcctccaccctttctctccacctctccccataccccttga

SEQ ID NO: 410733 - DNA, 120 bp, Artificial Sequence
  ENSG00000148357_151 (sequence is synthesized)
ggggtcctggagacgctgttcagaggcccccaacaacacagggcagagcacagtggggacttgggtttgggaggacaggggtcagaggggaacccatgaaggtgggtctgagagggtctc

SEQ ID NO: 410734 - DNA, 120 bp, Artificial Sequence
  ENSG00000148357_152 (sequence is synthesized)
tgcctggtacgcgaggcccagctgggagcccagggtgtggcgatgggaagaggcctgtgaggtgccacagagcccctcctgctgggagcatcttaatgcccccaagaggcccttctgagc

SEQ ID NO: 410735 - DNA, 120 bp, Artificial Sequence
  ENSG00000148357_153 (sequence is synthesized)
ccctgctcccaccactgccatcaacaaggcactttgtgcacctataacagtgggtgccgctctctctccatgtatcccttcctctagtccaaggcccctacgtaccccactgtgcctctg

SEQ ID NO: 410736 - DNA, 120 bp, Artificial Sequence
  ENSG00000148357_154 (sequence is synthesized)
gggtctgctgggcatgggtgggacagagagccaggacaccgggaggttaagaagggagggcaggtggggagacccaacctagtggaaaggaagaggttgtcagccagccctgttggttct

SEQ ID NO: 410737 - DNA, 120 bp, Artificial Sequence
  ENSG00000148357_155 (sequence is synthesized)
gggtcttccaacgtggccctatgtagggggacagggcaaacccagctgtggccatatgtgacaagccatatatcagagctggcaagaggccacctgagaagactcaacccagagacctca

SEQ ID NO: 410738 - DNA, 120 bp, Artificial Sequence
  ENSG00000148357_156 (sequence is synthesized)
gggccaggaaggggaggcctgtgttctagtccagagctgctgctcccattgtgggaccctcagcaaaccccttttgctgggggcccgtggggactctgtcctcctaccggaaacccaggt

SEQ ID NO: 410739 - DNA, 120 bp, Artificial Sequence
  ENSG00000148357_157 (sequence is synthesized)
gatgtctagggagacacagggcctgtggagtacctgctgggtactcaatgtttgctgaattgataaattgctaagtcccctccactgcaaaatgatactttcctacattaggatatgaca

SEQ ID NO: 410740 - DNA, 120 bp, Artificial Sequence
  ENSG00000148357_158 (sequence is synthesized)
tcacacattcctaactctgagtccccaggtgtggaatacccgtgctcacctgtggtgaaggctttgctcggctccaccacttcctggggagggaccttgggcaggtataatagttcagcc

SEQ ID NO: 410741 - DNA, 120 bp, Artificial Sequence
  ENSG00000148357_159 (sequence is synthesized)
tgtctgagcgccgctctccatctgtcaaatggacataaccaggggtcctgaggacagaatgacaatggaggggccgtgctcggcacaggcctggcccggagtagatgcccaattgatggt

SEQ ID NO: 410742 - DNA, 120 bp, Artificial Sequence
  ENSG00000148357_160 (sequence is synthesized)
gtagatgcccaattgatggtactgcttgtctgtattcctctcctagaggtgatggcccaccccaaaggaaaagttcattattagaatccttctctcggctgggcgcggtggctcacgcct

SEQ ID NO: 410743 - DNA, 120 bp, Artificial Sequence
  ENSG00000148357_161 (sequence is synthesized)
tgtgtggtgcttatgggagacctgtcccctgccttgccagctccccacctcttccctttgcttcatcacaagcccagaatgaacccctaccctgcccgtttacagttgggtaaactgaat

SEQ ID NO: 410744 - DNA, 120 bp, Artificial Sequence
  ENSG00000148357_162 (sequence is synthesized)
cttggaggtgctgtttgctgctcatcttggacagggaacacaggttgttcctgcttaactggcacaaatgcatgtcctctgtctggacactgcacagcccctggaagcaggcagaggaag

SEQ ID NO: 410745 - DNA, 120 bp, Artificial Sequence
  ENSG00000148357_163 (sequence is synthesized)
acaagggcatccccggtgccctcgggggctgctgtgaaaagtctgtgcatcagtgcatgtcccaggcatcacacattgcctggccgtggcaggtggttggaaaagaaatggcttcctggt

SEQ ID NO: 410746 - DNA, 120 bp, Artificial Sequence
  ENSG00000148357_164 (sequence is synthesized)
gggatggacccctgccatctcgattcctcaatcagctcccttctaccttgggtcagaccaactttaaaattaagaaaagatctatcctgagaaaccacagtaaatggattcagacctgca

SEQ ID NO: 410747 - DNA, 120 bp, Artificial Sequence
  ENSG00000148358_0 (sequence is synthesized)
attattgcaaccatttcgcttgtatttgagtgtgaagcgcctagaaaaccacaggacccctacggcgagccgggaatttttagatattttcctccgagtcaacgctcagtgaaatcagtt

SEQ ID NO: 410748 - DNA, 120 bp, Artificial Sequence
  ENSG00000148358_1 (sequence is synthesized)
caatcagtggcccgacaccgtgcggctgacacagcttatcccccgaccctgagatcaggggtccccggagcccaaggtcgcttccaaagctcagcgaggcggaggtgcggcccgggctgg

SEQ ID NO: 410749 - DNA, 120 bp, Artificial Sequence
  ENSG00000148358_2 (sequence is synthesized)
tctggttcggccaccgttgttatggcaaccgccaataggttggcttcatctctaactgaaagtctgcacaggagcggccgatcgaagggccccgaggtgggcagcacaggctcctcgacg

SEQ ID NO: 410750 - DNA, 120 bp, Artificial Sequence
  ENSG00000148358_3 (sequence is synthesized)
acttcctaggtcgcaatctccaggaaaacgaccacagggtcagcggagctagccgccgagccccgctccccgggcccttccggcggctgcgccctttcaccccggacgtgggcgggagag

SEQ ID NO: 410751 - DNA, 120 bp, Artificial Sequence
  ENSG00000148358_4 (sequence is synthesized)
gaagcggctggtgatgctggaacaaacatggccgctctggcgcccgtcggctcccccgcctcccgcggtcctaggctggccgcgggcctccggctgctcccaatgctgggtttgctgcag

SEQ ID NO: 410752 - DNA, 120 bp, Artificial Sequence
  ENSG00000148358_5 (sequence is synthesized)
ttgctggccgagcctggcctgggccgcgtccatcacctggcactcaaggatgatgtgaggcataaagttcatctgaacacctttggcttcttcaaggatgggtacatggtggtgaatgtc

SEQ ID NO: 410753 - DNA, 120 bp, Artificial Sequence
  ENSG00000148358_6 (sequence is synthesized)
agtagcctctcactgaatgagcctgaagacaaggatgtgactattggatttagcctagaccgtacaaagaatgatggcttttcttcttacctggatgaagatgtgaattactgtatttta

SEQ ID NO: 410754 - DNA, 120 bp, Artificial Sequence
  ENSG00000148358_7 (sequence is synthesized)
aagaaacagtctgtctctgtcacccttttaatcctagacatctccagaagtgaggtaagagtaaagtctccaccagaagctggtacccagttaccaaagatcatcttcagcagggatgag

SEQ ID NO: 410755 - DNA, 120 bp, Artificial Sequence
  ENSG00000148358_8 (sequence is synthesized)
aaagtccttggtcagagccaggagcctaatgttaaccctgcttcagcaggcaaccagacccagaagacacaagatggtggaaagtctaaaagaagtacagtggattcaaaggccatggga

SEQ ID NO: 410756 - DNA, 120 bp, Artificial Sequence
  ENSG00000148358_9 (sequence is synthesized)
gagaaatccttttctgttcataataatggtggggcagtgtcatttcagtttttctttaacatcagcactgatgaccaagaaggcctttacagtctttattttcataaatgccttggaaaa

SEQ ID NO: 410757 - DNA, 120 bp, Artificial Sequence
  ENSG00000148358_10 (sequence is synthesized)
gaattgccaagtgacaagtttacattcagccttgatattgagatcacagagaagaatcctgacagctacctctcagcaggagaaattcctctccccaaattatacatctcaatggccttt

SEQ ID NO: 410758 - DNA, 120 bp, Artificial Sequence
  ENSG00000148358_11 (sequence is synthesized)
ttcttctttctttctgggaccatctggattcatatccttcgaaaacgacggaatgatgtatttaaaatccactggctgatggcggcccttcctttcaccaagtctctttccttggtgttc

SEQ ID NO: 410759 - DNA, 120 bp, Artificial Sequence
  ENSG00000148358_12 (sequence is synthesized)
catgcaattgactaccactacatctcctcccagggcttccctatcgaaggctgggctgttgtgtactacataactcaccttttgaaaggggcgctactcttcatcaccattgcactcatt

SEQ ID NO: 410760 - DNA, 120 bp, Artificial Sequence
  ENSG00000148358_13 (sequence is synthesized)
ggcactggctgggctttcattaagcacatcctttctgataaagacaaaaagatcttcatgattgtcattccactccaggtcctggcaaatgtagcctacatcatcatagagtccaccgag

SEQ ID NO: 410761 - DNA, 120 bp, Artificial Sequence
  ENSG00000148358_14 (sequence is synthesized)
gagggcacgactgaatatggcttgtggaaggactctctatttctggtcgacctgttgtgttgtggtgccatcctcttcccagtggtgtggtcaatcagacatttacaagaagcatcagca

SEQ ID NO: 410762 - DNA, 120 bp, Artificial Sequence
  ENSG00000148358_15 (sequence is synthesized)
acagatggaaaagctgctattaacttagcaaagctgaaacttttcagacattattacgtcttgattgtgtgttacatatacttcactaggatcattgcatttctcctcaaactcgctgtt

SEQ ID NO: 410763 - DNA, 120 bp, Artificial Sequence
  ENSG00000148358_16 (sequence is synthesized)
ccattccagtggaagtggctctaccagctcctggatgaaacggccacactggtcttctttgttctaacggggtataaattccgtccggcttcagataacccctacctacaactttctcag

SEQ ID NO: 410764 - DNA, 120 bp, Artificial Sequence
  ENSG00000148358_17 (sequence is synthesized)
gaagaagaagacttggaaatggagtccgttgtgacaacatctggggtgatggaaagtatgaagaaagtcaagaaggtgaccaacggctccgtggagccccagggcgagtgggaaggcgcc

SEQ ID NO: 410765 - DNA, 120 bp, Artificial Sequence
  ENSG00000148358_18 (sequence is synthesized)
gtgtgacagagccgaccctgaggatggcactgtccaaggaaactgttaacttattcatagtcctattggacagcaggagcagctcctacagtgaactattggcaccaccgacagtgacac

SEQ ID NO: 410766 - DNA, 120 bp, Artificial Sequence
  ENSG00000148358_19 (sequence is synthesized)
cagggcacatggctggagcacagtgccgcggaaacctgattttgtactctcttttatggaaacgatctgtggctgtttagaggcagctggatcctctttcaggcgggaatgggagggcgg

SEQ ID NO: 410767 - DNA, 120 bp, Artificial Sequence
  ENSG00000148358_20 (sequence is synthesized)
gcacagggaggaggagaggaagagaaaaggaagaattcatttttaatttaggtttctttttttcttcttcatttcggagctctaaggtgtatgcagttgtgaccccatgtgtggggaagt

SEQ ID NO: 410768 - DNA, 120 bp, Artificial Sequence
  ENSG00000148358_21 (sequence is synthesized)
gtagcaaggacggctggtggagggggaaggagggtgcgaggtgtctgtctgatgctttaggaaatgtctactgaggaccctgggacttaagaagaagggcggggagagtgccattgcctg

SEQ ID NO: 410769 - DNA, 120 bp, Artificial Sequence
  ENSG00000148358_22 (sequence is synthesized)
tttgggagacaaaaatgaacgaaaacaggtgactttggaaagcaaagtcaaaacccagtttaggatgtagcacctgccccaggattcctgccctcggctttgccccagacccttattcca

SEQ ID NO: 410770 - DNA, 120 bp, Artificial Sequence
  ENSG00000148358_23 (sequence is synthesized)
gatgctgagagtgaccaggacagcagctcctgaggcccagtggtcttctttccaacaggaaaagaaggctgtgatgtcgctgtcaggatcatgccctgtggcacagcacaggtggtggga

SEQ ID NO: 410771 - DNA, 120 bp, Artificial Sequence
  ENSG00000148358_24 (sequence is synthesized)
ggtggttttctgactgagatgttgcctgatggatggaaagaaatgtatttttaagttcaaaaagcattatcctgtggcgttgcctggacatccactccctgacagcccagagcagcactg

SEQ ID NO: 410772 - DNA, 120 bp, Artificial Sequence
  ENSG00000148358_25 (sequence is synthesized)
tctggcttcccttcatgcttgtggctttgttgtgtttgatcagaattttgggggaaatggaaagttttcctcaaggagcagctgggggcagaataggtagtatttaagcaaatacttaag

SEQ ID NO: 410773 - DNA, 120 bp, Artificial Sequence
  ENSG00000148358_26 (sequence is synthesized)
tccaagcaaatcatccccattaaaaagcttttcctgtaggctagtaggatttctaaatagatgaattcaacagacttggtccccatagtccaagagtatgtatgtgaagaaagtgagcat

SEQ ID NO: 410774 - DNA, 120 bp, Artificial Sequence
  ENSG00000148358_27 (sequence is synthesized)
gattcaacagtttcactctcagggattttaggatggcaaaatacttcacagaaactcaatgattaagttcccttccacacttccagagcttgaatgaacacaggtagccacctaaattga

SEQ ID NO: 410775 - DNA, 120 bp, Artificial Sequence
  ENSG00000148358_28 (sequence is synthesized)
gcagtattgcaactcagagagaaaatcatctgaatagtaggacaagctcagaaggtacattgtgactgagggcttaaaaggagaccaaaacatggccccatcagggaagcttcttaatgc

SEQ ID NO: 410776 - DNA, 120 bp, Artificial Sequence
  ENSG00000148358_29 (sequence is synthesized)
ttggggggccagctaggtagggttgcttccaaaagctggagcccacccctgcctaggggttgtcagagagccacacctgcaggggaacaggtacctccgagggtgagagtcgtggtctct

SEQ ID NO: 410777 - DNA, 120 bp, Artificial Sequence
  ENSG00000148358_30 (sequence is synthesized)
tttctcacctctggcttagaagggtcaggcagaaaccacaggatgtggggtcacactcactgtcccaagtttgggaacctgaaaaagtctccattcagaacatggttgttctccctgtcc

SEQ ID NO: 410778 - DNA, 120 bp, Artificial Sequence
  ENSG00000148358_31 (sequence is synthesized)
catgctatcttatcttcctaaatgactaatgaggaagcgggtgttctttttctgcactttgattcgccatctgggttctgtagggtgctctgaaggtgtgatctgccttctggctgatgt

SEQ ID NO: 410779 - DNA, 120 bp, Artificial Sequence
  ENSG00000148358_32 (sequence is synthesized)
ggaggaagagcaagcgccttcccaggccacagctgctcacctctcggcagatattttaggcaagcatccgtgtgtcttcccatcttcaggagaaaggtaaatgcaccctaagtgttcact

SEQ ID NO: 410780 - DNA, 120 bp, Artificial Sequence
  ENSG00000148358_33 (sequence is synthesized)
tctggacctttttcaagttcacttgggactgtgtgacagaagggagttggagggaggatgggaatatttttaacactttgttttcctgtgcagaaacataataccagttttcgcagaaat

SEQ ID NO: 410781 - DNA, 120 bp, Artificial Sequence
  ENSG00000148358_34 (sequence is synthesized)
gtgtctcaatctgtgactaccaaagccctcctcagtccttccctcagagggacacatttgctgtttctcccgcaagcagatgttgtggatgaggcgatagactccttggcaagaacgaaa

SEQ ID NO: 410782 - DNA, 120 bp, Artificial Sequence
  ENSG00000148358_35 (sequence is synthesized)
ggtgtgatgaaacctccctgctcggaagggtctccgtggaggtgtcctcatttcacatgctgggttttgcaagcgaggaagccaggcagtggaggaactagagagaggcaggcgtgtgtg

SEQ ID NO: 410783 - DNA, 120 bp, Artificial Sequence
  ENSG00000148358_36 (sequence is synthesized)
tggacaagcgctggagccgcagccctcagactggcacgggaacgccagcgttgggtgttcagattccacgcgtatgtctgggctcactcacagcatggccgagtgtctgcagtgctggtc

SEQ ID NO: 410784 - DNA, 120 bp, Artificial Sequence
  ENSG00000148358_37 (sequence is synthesized)
ctgacccttccagagcagcagtggacagatgagataagactgtttcagaaacaaagatggccacagccttcctaacaagcaggtcatctggccatgtctgtattgtaactggtaaaaggc

SEQ ID NO: 410785 - DNA, 120 bp, Artificial Sequence
  ENSG00000148358_38 (sequence is synthesized)
ttcaagtcagattgatgatcaagaaaagtcaaaaccccagcccaagattgggaaagcaggtggtggttccaagcttttaaaaaattattgaagctctccatcctgttctgtgagtgtgtc

SEQ ID NO: 410786 - DNA, 120 bp, Artificial Sequence
  ENSG00000148358_39 (sequence is synthesized)
ttctctttctccttcacgtcatagccgtgacccaccgttcatctctgctcttgcgtaaagatgaccgatggagtccaaagccaagtggcttcaccagctgacaagccaccctcctgcagc

SEQ ID NO: 410787 - DNA, 120 bp, Artificial Sequence
  ENSG00000148358_40 (sequence is synthesized)
ctgagtttcacagtccactgggttcgttgtcatgcggtgtttgaatggttaagcccttgcagtatttcagatcgggcaaaaaatatcggatgcacatagcagaaccattggtggtattta

SEQ ID NO: 410788 - DNA, 120 bp, Artificial Sequence
  ENSG00000148358_41 (sequence is synthesized)
tagctttgctttgtactcctcactgtttctgcctacgcaaaatatccatgtttcctctgagaaatctgttgtggactgaaagcgctgctggctgtgaaatttaataaagtgtgtatgctt

SEQ ID NO: 410789 - DNA, 120 bp, Artificial Sequence
  ENSG00000148358_42 (sequence is synthesized)
tgctagaaaattatttcttggacaataggaacagtcattgatctgtaaatcctggctcttaacagtgagtggccaaggacttgatcagcccatttcttggtccctcagtgctttaaaatt

SEQ ID NO: 410790 - DNA, 120 bp, Artificial Sequence
  ENSG00000148358_43 (sequence is synthesized)
taagtagcactgcattttgtaatgttgaatatgactctagtgacttgtaggaggcacttgtgaggagatgcttgcttcagtgtaaaagatgctcatggcctgagtcagttgagttttctt

SEQ ID NO: 410791 - DNA, 120 bp, Artificial Sequence
  ENSG00000148358_44 (sequence is synthesized)
tcaagaaaccacttcagagtgaaatatccagggtttccccgccctggacatgtccagcctgcccaggcagcacacagccctgtaagtccacctcgtgtgggtgagatttcctcctgcgtg

SEQ ID NO: 410792 - DNA, 120 bp, Artificial Sequence
  ENSG00000148358_45 (sequence is synthesized)
atgacctcatcgccatctctgctgtctcattccacagcctccctccctcttctctcctcctctgccctcgcccttcccccttccccatcccctccccctcctcctctgccctcgccctta

SEQ ID NO: 410793 - DNA, 120 bp, Artificial Sequence
  ENSG00000148358_46 (sequence is synthesized)
cccctcccccttccccttccgctcctcctccctcctccacctctttctcctcctccttccctcctcctccctcctcttcccttctctgccatctttctccccgtgcctattgatcccaca

SEQ ID NO: 410794 - DNA, 120 bp, Artificial Sequence
  ENSG00000148358_47 (sequence is synthesized)
taggctcattctgggtacaccggctaaaggctttggtgcattgcagcgttttctcccagcagctgtgtgaaagatgcattttctaagctaaggagaattttctcaagagtggcatactca

SEQ ID NO: 410795 - DNA, 120 bp, Artificial Sequence
  ENSG00000148358_48 (sequence is synthesized)
tgccaaatattattgctctgggccatataggctggtcttcctccacactaaaatgggtgtcttgttttggtacttaaaacagtctactccaggcatccagtccttacagaccaaggaaga

SEQ ID NO: 410796 - DNA, 120 bp, Artificial Sequence
  ENSG00000148358_49 (sequence is synthesized)
gcatagcgatgcctgttggaattgcagatgcattctggccttctcccccgtcctgaaacattttctttgaggaaggctcttagaacattagatagtctgctgaggttgttggcccagctc

SEQ ID NO: 410797 - DNA, 120 bp, Artificial Sequence
  ENSG00000148358_50 (sequence is synthesized)
catacacccagtagaacagtggaacaactcatgcttcatgctgccaagctgctgtacttcaaaggaaacagatctagcacactgctgcacccctgcttccacactccacacttcaccccg

SEQ ID NO: 410798 - DNA, 120 bp, Artificial Sequence
  ENSG00000148358_51 (sequence is synthesized)
ctgcttttctctgacccgcccctggccttgtaagactcacgtaagctaagtccaggatgcctgtggcctgcggcttgattcttccctttaggattcagcaagttaatggcttcctcgcta

SEQ ID NO: 410799 - DNA, 120 bp, Artificial Sequence
  ENSG00000148358_52 (sequence is synthesized)
tagaagtgagactttgacttgatgcctcttggtatatcaaaaagatattcatccagaaagtaccaaatgttctgaaagacccgctcttcactccagttttccctagggtgtttctggcag

SEQ ID NO: 410800 - DNA, 120 bp, Artificial Sequence
  ENSG00000148358_53 (sequence is synthesized)
ggcgtttttaaaaggcatctacctgagttgacgctaatacttgtcaccacctggaacgtagttatcggtcggcaggctgaacatactccagattccccagaggccacttctgtagcccag

SEQ ID NO: 410801 - DNA, 120 bp, Artificial Sequence
  ENSG00000148358_54 (sequence is synthesized)
cgatgcatctgagcctctctgcgtggtttatgcttgaaaaatagataatgcttttagatggttcactgccaggccatgggccccacacatctcaggccctgtgtgagggagcacactgag

SEQ ID NO: 410802 - DNA, 120 bp, Artificial Sequence
  ENSG00000148358_55 (sequence is synthesized)
atggtgcaggagtgaatgggcatggcttggcctcgctacctcggggacctgttggagttctggcagcagggtgtctgcaggtgggacggcgttctgggcagagtcagaatggtcagaatg

SEQ ID NO: 410803 - DNA, 120 bp, Artificial Sequence
  ENSG00000148358_56 (sequence is synthesized)
aaacagaacagccaactcacccacaggacagcttattttgaggcaaggttttggattttggaggaagcagccagatgaggcggtgagcctccagaaggtcagcctttggagcacgtaaga

SEQ ID NO: 410804 - DNA, 120 bp, Artificial Sequence
  ENSG00000148358_57 (sequence is synthesized)
tactgttacagggtccagaaatcgtgttcacatgggggctttgactcttcaaacagcttttgcagatcgtaaattgcatttgcctagtcgtgtgacctcaaaagaagtcagacatattta

SEQ ID NO: 410805 - DNA, 120 bp, Artificial Sequence
  ENSG00000148358_58 (sequence is synthesized)
atccagaaatagtttcgtttgagggagggcttgcaggtctgtaaatagcatttgctttcctggttagagattgggatgcagaaggagttttcagtattttttttaaaacactaatgatca

SEQ ID NO: 410806 - DNA, 120 bp, Artificial Sequence
  ENSG00000148358_59 (sequence is synthesized)
ttgaagagtatttatgtaaacatacaacgtataatgggtgggggatccgatcatggtgatgtacggggtgaattctcttgccgtgttgcaaatgtgtaaaataaagattatctggcagaa

SEQ ID NO: 410807 - DNA, 120 bp, Artificial Sequence
  ENSG00000148358_60 (sequence is synthesized)
gaagcatcagcaacagatggaaaaggtgacagcatgggacctcttcagcagagagcgaatctaagagcaggaagtcgcatagagtctcaccattttgcccaggctgatcttgaactcctg

SEQ ID NO: 410808 - DNA, 120 bp, Artificial Sequence
  ENSG00000148358_61 (sequence is synthesized)
gcgggcgccaaacagcatctccccatgcagaggaagaaacacctccttctaaacagtggagaggagtgcaggaggcccatcagctgtgcctttcccagaagtggcaggatctgagcaagt

SEQ ID NO: 410809 - DNA, 120 bp, Artificial Sequence
  ENSG00000148358_62 (sequence is synthesized)
gtctgttggttgaagaggcacacatgtcaggctggcaaccagcagcatcaggaaataacctaagacgcggtgtgtttatcattcccctgctgggagcctttggcttggtccgtccgcata

SEQ ID NO: 410810 - DNA, 120 bp, Artificial Sequence
  ENSG00000148358_63 (sequence is synthesized)
agcatcgtctcctttactgcattgtactccacagtcgtaatgggaggttcccgcttcccacatcctttccctcagccgttacatcttggagcctggatgcattatgaagatcctctgcat

SEQ ID NO: 410811 - DNA, 120 bp, Artificial Sequence
  ENSG00000148358_64 (sequence is synthesized)
ctcatgacgggcttcctggcttccccgattccccggcagagggattcttctcagcccgagccatcaccgaacccggttcccagcactcctgtctctgttggaagtggctttgcagggttg

SEQ ID NO: 410812 - DNA, 120 bp, Artificial Sequence
  ENSG00000148358_65 (sequence is synthesized)
ctgtggaagaccatctcttctcctgggctgtgggctccgaagagcaataagaccacttctttttccttgatgacctagcatgaggcctgtcttgaagaataaaagttgttttctcacttg

SEQ ID NO: 410813 - DNA, 120 bp, Artificial Sequence
  ENSG00000148358_66 (sequence is synthesized)
tgtgaatcgggtcggctgctctcagcatttcgtggctgcaggggtggttcctctatttttagcagaaggaagcggacactggagccccaggctgtctgatctggtttgaagtacagtatc

SEQ ID NO: 410814 - DNA, 120 bp, Artificial Sequence
  ENSG00000148358_67 (sequence is synthesized)
tgccaaacctagctgggtcttgtcagggaagatggaacttgccgttccactaagcatcattggagcctgctttcaagaactcagtggcaagaacttaggaatatacgtggccagttcacg

SEQ ID NO: 410815 - DNA, 120 bp, Artificial Sequence
  ENSG00000148358_68 (sequence is synthesized)
agggagaacagggggccgactttctgtcaggcccgccatcaggcgcttacgtctgaaaatggaatcttctgagtcatctctaagtctgctaatgatcctcagacatcctctatcgtcaga

SEQ ID NO: 410816 - DNA, 120 bp, Artificial Sequence
  ENSG00000148358_69 (sequence is synthesized)
taactgcgtggcttttcacagcacaatgactttgacctatatctgagcactaataggggcttttctgagtcacacagtgaatgactctagggtcctattttctgggaaagggccatcatt

SEQ ID NO: 410817 - DNA, 120 bp, Artificial Sequence
  ENSG00000148358_70 (sequence is synthesized)
gtctagaaaaatgagtagtgattaagcatatttgcttgttaactgaaatttgataagccaggtcaatgctgtgtttgatgattagcctaaggcagagttttcccttcttggttcactggt

SEQ ID NO: 410818 - DNA, 120 bp, Artificial Sequence
  ENSG00000148358_71 (sequence is synthesized)
atcaagtgttctgcccccagccctggcagcctttgaattcttcccaattcagaggctgagactcggcccatgctaagctctgcttggctgtcagcgggtcaggcagcatgggacagctct

SEQ ID NO: 410819 - DNA, 120 bp, Artificial Sequence
  ENSG00000148358_72 (sequence is synthesized)
taagctagaatatccagaaatgaattctgttgttactattaccggttactagataccatttataatataacaaggtctaatttgctgcttcgacagtacaagaattatgttttgggacct

SEQ ID NO: 410820 - DNA, 120 bp, Artificial Sequence
  ENSG00000148358_73 (sequence is synthesized)
gtttaattatttgatattagacaagctgaagcctcataaaatgatactgtaatatatatatgtatctgtaagttgagtcatgcagcactctcttttaaatgttcttgcttctagatggtg

SEQ ID NO: 410821 - DNA, 120 bp, Artificial Sequence
  ENSG00000148362_0 (sequence is synthesized)
gggttcccgctcgcccggcgccatggatccgctgtcgccgccgctctgcacgctgccgccgggccccgagccgccccgcttcgtgtgctactgcgaaggggaggaaagcggggaggggga

SEQ ID NO: 410822 - DNA, 120 bp, Artificial Sequence
  ENSG00000148362_1 (sequence is synthesized)
ccgcggcggcttcaacctctacgtgaccgacgccgcggagctttggagcacctgcttcacgccggacagcctggcggccctcaaagcccgttttggcctgagtgcggctgaggacatcac

SEQ ID NO: 410823 - DNA, 120 bp, Artificial Sequence
  ENSG00000148362_2 (sequence is synthesized)
cccccggttcagggcagcctgtgagcagcaagctgtggctctgactctgcaggaggacagagcatccctgacgctttcaggggggccctcggcactggcctttgacctctccaaggtacc

SEQ ID NO: 410824 - DNA, 120 bp, Artificial Sequence
  ENSG00000148362_3 (sequence is synthesized)
gaagagacagctgtcagcccgaggaagagcccccggcctgcagggcctcagctcttcttaccagacccagatccccagagaggtggccctggacctggagtcaggaggcggtgtccagga

SEQ ID NO: 410825 - DNA, 120 bp, Artificial Sequence
  ENSG00000148362_4 (sequence is synthesized)
gagtcgctcatcaaccccgggttcaagagtaagaaaccagctggtggcgtggacttcgatgagacctgaaggtgcagcacaagcgtggccccgcggggagtccgcctatgaggggagagg

SEQ ID NO: 410826 - DNA, 120 bp, Artificial Sequence
  ENSG00000148362_5 (sequence is synthesized)
cagtctttgaggcccccatcagagaccccccgccaccacctccacctgcctgtcctgggccaggactaacacggctcctcaaattccttccctgtcaaataaacagctcccttggttgga

SEQ ID NO: 410827 - DNA, 120 bp, Artificial Sequence
  ENSG00000148362_6 (sequence is synthesized)
cggcctgcagggcctcagctcttcttaccaggtaaggcatgtccgcctgtgactcaagtagggctgtgctctttaacctggaactcagtttccccccaaacaagactcacgctccagaga

SEQ ID NO: 410828 - DNA, 120 bp, Artificial Sequence
  ENSG00000148362_7 (sequence is synthesized)
gaatgcctatctattcggagaaggttgtggttgggatgctgccaggttcaggagctgcccctgtcctgttttcccccagacccagatccccagagaggtggccctggacctggagtcagg

SEQ ID NO: 410829 - DNA, 120 bp, Artificial Sequence
  ENSG00000148362_8 (sequence is synthesized)
cgtgaccgacgccgcggagctttggagcacctgcttcacgccggacagcctggcggccctcaaagcccgttttggcctgagtgcggctgaggacatcaccccccggttcaggtgagaccc

SEQ ID NO: 410830 - DNA, 120 bp, Artificial Sequence
  ENSG00000148362_9 (sequence is synthesized)
cctggcggccctcgtgggtaactgggcgggtctgggagccgccacacccctccttgcagtgcagatcgtctatggggcgacagacatctgggattccccagaaggctctgacaccctctg

SEQ ID NO: 410831 - DNA, 120 bp, Artificial Sequence
  ENSG00000148362_10 (sequence is synthesized)
cccgccctgtagctgtagtcctcccattggctagggctctggggtcgggcaggtttcgggtgcccccagtgggcctcgggttccaggcagctcgtgacaagcccctgtgctctctagaaa

SEQ ID NO: 410832 - DNA, 120 bp, Artificial Sequence
  ENSG00000148362_11 (sequence is synthesized)
gatccgctgtcgccgccgctctgcacgctgccgccgggccccgagccgccccgcttcgtgtgctactgcgaaggggaggaaagcggggagggggaccgcggcggcttcaacctctaaaag

SEQ ID NO: 410833 - DNA, 120 bp, Artificial Sequence
  ENSG00000148362_12 (sequence is synthesized)
agtgagtgggggtccgcggggaggtaggggtgcagggagctccgcgggcggccccgcctgacaggccttctcccccagcgtgaccgacgccgcggagctttggagcacctgcttcacgcc

SEQ ID NO: 410834 - DNA, 120 bp, Artificial Sequence
  ENSG00000148362_13 (sequence is synthesized)
aggctgcgggcgctgacactgggcctggcaaaacgcgtgtggagcctggagcggcgactggcagacccagatccccagagaggtggccctggacctggagtcaggaggcggtgtccagga

SEQ ID NO: 410835 - DNA, 120 bp, Artificial Sequence
  ENSG00000148377_0 (sequence is synthesized)
gagttccacatctgatacccaggagtctccagcttccaagagaggtcgggtcacagccagcagctatgtctgacataaatcttgactgggttgacaggcgtcagttgcagcgcttggagg

SEQ ID NO: 410836 - DNA, 120 bp, Artificial Sequence
  ENSG00000148377_1 (sequence is synthesized)
aaatgctgattgttgtggatgagaatgataaggttattggtgccgacaccaagaggaattgccatctgaacgaaaacattgagaaagggctgctgcaccgagccttcagcgttgtcttgt

SEQ ID NO: 410837 - DNA, 120 bp, Artificial Sequence
  ENSG00000148377_2 (sequence is synthesized)
ttaacaccaagaatcgaatcctgatacagcagaggtcggacacgaaagtcacgtttcctgggtattttaccgactcctgtagtagccacccattatacaacccagcagaactggaagaaa

SEQ ID NO: 410838 - DNA, 120 bp, Artificial Sequence
  ENSG00000148377_3 (sequence is synthesized)
aggatgccatcggagtgaggagggcagcccagaggcgtctgcaagcagagctgggaattcctggggagcagatttctccagaggacattgtgttcatgacaatctatcaccacaaggcaa

SEQ ID NO: 410839 - DNA, 120 bp, Artificial Sequence
  ENSG00000148377_4 (sequence is synthesized)
aatcagacagaatttggggagagcatgaaatttgttaccttctgcttgtgaggaaaaacgtcactctgaacccggatcccagtgaaacgaaaagcatcctctacctgtcccaggaggagc

SEQ ID NO: 410840 - DNA, 120 bp, Artificial Sequence
  ENSG00000148377_5 (sequence is synthesized)
tcaaagtcaccccctggctaagaaccattgccgagaggtttctgtaccggtggtggcctcacctggatgacgtgaccccgtttgtggagcttcacaaaatacacagagtgtgagaggcag

SEQ ID NO: 410841 - DNA, 120 bp, Artificial Sequence
  ENSG00000148377_6 (sequence is synthesized)
ggaggtcgagtcagccatgtgtaatgccctcagtgcaggcagacgcaccattgaggcaatgatacaccctctccaaaaaacagggcaaaaggggcacttgattgcccatcatgtataaat

SEQ ID NO: 410842 - DNA, 120 bp, Artificial Sequence
  ENSG00000148377_7 (sequence is synthesized)
cactatttcaaccttttcatcaactttgtcatatcttcattttcccttttccttatttccatatttctcatctgcctggttgcagggaggaaatttaacatttcctttgtcccaatttcc

SEQ ID NO: 410843 - DNA, 120 bp, Artificial Sequence
  ENSG00000148377_8 (sequence is synthesized)
attttataagcacttgtttgattaacagcagctgatcctgaaagtcttggggagatcttgagagtcctgaagcaggcggactagcctggctggaccatgaggctgtctccccacagcttt

SEQ ID NO: 410844 - DNA, 120 bp, Artificial Sequence
  ENSG00000148377_9 (sequence is synthesized)
atccaagcctccaaggtcaggatgggatctctgtatcatgtttttctttttaaatcacttatttcagagtgcaacacaaggctgcatttttaaaaaaaagacacattcaatcttgcatcc

SEQ ID NO: 410845 - DNA, 120 bp, Artificial Sequence
  ENSG00000148377_10 (sequence is synthesized)
taatacaagcagtacggaagatgcgtatggtctcagccaagtgactcgacgtttatccacttctgttcatttgatcgtttcagtaatatgcttacaaataaagacatacttgctttaaaa

SEQ ID NO: 410846 - DNA, 120 bp, Artificial Sequence
  ENSG00000148384_0 (sequence is synthesized)
gcggcggcggttgctgggtcccggccgggctgactccgcttctgggcggccgggcctccgcgagtaccgggtcgacttcggagtctgcgagcccagccaggggtgcccgcttcccacccc

SEQ ID NO: 410847 - DNA, 120 bp, Artificial Sequence
  ENSG00000148384_1 (sequence is synthesized)
tctccccgagcggcgtccccgtcggggtcgaacctcccccgcgacaggcgcccagccgcctgttcccccaggccttgcctgcggaccgccctgggaacggcgtctgggagccccgagggg

SEQ ID NO: 410848 - DNA, 80 bp, Artificial Sequence
  ENSG00000148384_2 (sequence is synthesized)
cgcccctccgcgaccatccccggcccaagcgggagccgcagcggcgtttctgctcctcgctgcgccggcgaccccggacc

SEQ ID NO: 410849 - DNA, 120 bp, Artificial Sequence
  ENSG00000148384_3 (sequence is synthesized)
cggcacccgtgacccctcgcgctgcctgcggcctcgcgccgaggcctgccccgggagagaccgtccatgccgtccaaggcggagaatctgcggccctccgagccggccccgcagccgccg

SEQ ID NO: 410850 - DNA, 120 bp, Artificial Sequence
  ENSG00000148384_4 (sequence is synthesized)
gaagggaggacgctccaaggacagcttcccggcgctccgccggcccagcgcgcggggtccccacccgatgctccgggctccgagagccccgcgcttgcctgcagcactccggccacgccc

SEQ ID NO: 410851 - DNA, 120 bp, Artificial Sequence
  ENSG00000148384_5 (sequence is synthesized)
agcggcgaggacccgccagcccgagcagcacccatcgccccgcggccccccgccaggcctcgactggagcgagccctgtccctggacgacaagggctggaggaggaggcgttttcgaggc

SEQ ID NO: 410852 - DNA, 120 bp, Artificial Sequence
  ENSG00000148384_6 (sequence is synthesized)
agccaggaggacctggaagcccggaatgggaccagtccctccaggggctcagtgcagagcgagggccccggggcccccgcccacagctgctccccgccctgcctgagcacctccttgcag

SEQ ID NO: 410853 - DNA, 120 bp, Artificial Sequence
  ENSG00000148384_7 (sequence is synthesized)
gaaatccccaagtcccgcggggtcctgagcagtgagagagggagcccgtcctcggggggtaaccctctctctggggtggccagcagctccccgaacctcccgcacagagacgccgccgtg

SEQ ID NO: 410854 - DNA, 120 bp, Artificial Sequence
  ENSG00000148384_8 (sequence is synthesized)
gcggggagctcgcccaggctgcccagcctgctgcccccgcgcccaccgcctgccctgagcctggacatcgcctccgactccctgaggacagcaaacaaggtcgactcggatcttgcagac

SEQ ID NO: 410855 - DNA, 120 bp, Artificial Sequence
  ENSG00000148384_9 (sequence is synthesized)
tacaagctccgcgcgcagccgctcctggtgcgggcccacagcagcctgggccccggccggccgcggagccccctggcctgcgacgactgttcccttcgctcggccaaatcctccttcagc

SEQ ID NO: 410856 - DNA, 120 bp, Artificial Sequence
  ENSG00000148384_10 (sequence is synthesized)
ctcctggcgcccatccgcagcaaggacgtccgcagcaggagttacctggagggcagcctcctggccagcggggccctgttgggggcggatgagctggcccgctacttcccagaccggaac

SEQ ID NO: 410857 - DNA, 120 bp, Artificial Sequence
  ENSG00000148384_11 (sequence is synthesized)
gtggcactcttcgtggccacctggaacatgcagggccagaaggagctcccgcccagcctggacgagttcctgctcccagccgaggccgactatgcccaggacctgtatgtcatcggggtc

SEQ ID NO: 410858 - DNA, 120 bp, Artificial Sequence
  ENSG00000148384_12 (sequence is synthesized)
caggagggctgttctgacaggcgggagtgggagactcgtctgcaggagacgctgggcccgcactatgtgctgctgtcctcggcggcccacggcgtgctctacatgtcgctcttcatccgc

SEQ ID NO: 410859 - DNA, 120 bp, Artificial Sequence
  ENSG00000148384_13 (sequence is synthesized)
agggacctcatctggttctgctcagaggtggagtgctccacggtgaccacacgcatcgtgtctcagatcaagaccaagggggccttgggcatcagcttcaccttttttggcacttccttc

SEQ ID NO: 410860 - DNA, 120 bp, Artificial Sequence
  ENSG00000148384_14 (sequence is synthesized)
gactacaccaggactgtacaagccctggtcctgcccagaaatgtgcccgacaccaacccctatcgctccagcgcagcggacgtcaccacccgcttcgatgaggtgttctggtttggagac

SEQ ID NO: 410861 - DNA, 120 bp, Artificial Sequence
  ENSG00000148384_15 (sequence is synthesized)
ttcaacttccgcctgagtggcgggcgcacagtcgtggacgccctcctgtgccagggcctggtggtggacgtgccggcgctgctgcagcacgaccagctcatccgggagatgcggaaaggg

SEQ ID NO: 410862 - DNA, 120 bp, Artificial Sequence
  ENSG00000148384_16 (sequence is synthesized)
tccatcttcaagggcttccaggagccggacatccacttcctcccatcatacaagtttgacatcgggaaggacacgtacgacagcacctccaagcagaggacgccctcatacacggaccgc

SEQ ID NO: 410863 - DNA, 120 bp, Artificial Sequence
  ENSG00000148384_17 (sequence is synthesized)
gtcttgtacagaagccgccacaagggtgacatctgtcctgtgagctactcttcctgccccgggatcaagacgtccgaccaccgccctgtgtatggcctcttccgggtgaaagtgaggccg

SEQ ID NO: 410864 - DNA, 120 bp, Artificial Sequence
  ENSG00000148384_18 (sequence is synthesized)
gggcgagacaacattccgttggcagctggcaaatttgatagagaactgtacttactaggaattaaaagacggatttcgaaggagattcagaggcagcaagcactacagagtcagaactcc

SEQ ID NO: 410865 - DNA, 120 bp, Artificial Sequence
  ENSG00000148384_19 (sequence is synthesized)
agcaccatctgctccgtttcttgaagtttgctgaacgaggactcacagctgcaacgtggggtgattgtattgatcaaaacccactgggaaggacaaagagtttgccgcctttcggggatc

SEQ ID NO: 410866 - DNA, 120 bp, Artificial Sequence
  ENSG00000148384_20 (sequence is synthesized)
cgagggactgtggcgaccgtgcctctgtgccagcgtcccaggaaggaagccaaccctgagcgagcctgtcctctgtggcaggtccacacggtgtgggtgggcagggcttggacccccgtc

SEQ ID NO: 410867 - DNA, 120 bp, Artificial Sequence
  ENSG00000148384_21 (sequence is synthesized)
tccatggcaggtccatacagcatgggtggcagggtttggacccgcccagcagcaccacggaccccagccactctcgggggcagacgtcagaatccgttcctgagcagctcctgtgccctg

SEQ ID NO: 410868 - DNA, 120 bp, Artificial Sequence
  ENSG00000148384_22 (sequence is synthesized)
ggggcagtcacagagccccccaacacccccgtgctctgcaccagcctctccctccacacccgaagcaggcgtccatctgtgtcctcctggcagcccctcaaacacacaccaccccatgtc

SEQ ID NO: 410869 - DNA, 120 bp, Artificial Sequence
  ENSG00000148384_23 (sequence is synthesized)
acacgggtatccagagcaaggctggatctgggctaggtgacccctggggcctcagacctctgagtgggccccagagcccagctgaggaagccacacagcctccaggacgtggcacggttc

SEQ ID NO: 410870 - DNA, 120 bp, Artificial Sequence
  ENSG00000148384_24 (sequence is synthesized)
ccctccacttggctgcaagtcgcctgccatggggcgaggaggcctgcaccccagtataagggcctccccagctgagtaagaagctgcttcccctcctctcataggccaagcctattgtgt

SEQ ID NO: 410871 - DNA, 120 bp, Artificial Sequence
  ENSG00000148384_25 (sequence is synthesized)
gaaaccatctcatggtcttggtgacgtagaccatttttgaaaccgtctcatggtcttggtgacgtagaccgtttgcttctttaactccagccgcggaatgacattagtggaaccgggcta

SEQ ID NO: 410872 - DNA, 120 bp, Artificial Sequence
  ENSG00000148384_26 (sequence is synthesized)
gggaactgctggaagttcaggatgccaccaccttgaacacctaggccagggatccccaccatgtcccgggtttctttcttcgagagtatagaaccgttcattcttgctttgtgtcccatt

SEQ ID NO: 410873 - DNA, 120 bp, Artificial Sequence
  ENSG00000148384_27 (sequence is synthesized)
ccatctcttgaaaaaatgtagtctttgaatgtgtgaaaatctagggacattcaatctagtcttttaaattatttttccatatttatatttttaaataaatgcatatattgagtcttaaaa

SEQ ID NO: 410874 - DNA, 120 bp, Artificial Sequence
  ENSG00000148384_28 (sequence is synthesized)
aggacgtccgcagcaggtagggagggcctggcgggtgcagcgcccgcgccgccttcgttgtagtgttcaggctgctggaacctcgtgagaccgttcccatcagcagcgtttaagatgcct

SEQ ID NO: 410875 - DNA, 120 bp, Artificial Sequence
  ENSG00000148384_29 (sequence is synthesized)
aaccggaaagaacgaagcgggtctcccgcagccaccccatctcccagccccaccccacagcagcgcccttcccagaacttttcctgtgcgtttcagaaccattcgtgggcgtgacgttgt

SEQ ID NO: 410876 - DNA, 120 bp, Artificial Sequence
  ENSG00000148384_30 (sequence is synthesized)
gttaaggtagacaggatggcatcctgcatacaattacgtatctggcgctttttcttgtttagtcttgggaaatgtcgtcaatgtatacgatccgcccctttggttgtttttgtttgttac

SEQ ID NO: 410877 - DNA, 89 bp, Artificial Sequence
  ENSG00000148384_31 (sequence is synthesized)
acccagctaaattttgtatttttagtaggggcggggtttcgccgtgttggcgaggctggtctcgaactcccggcgtgggccactgcgcc

SEQ ID NO: 410878 - DNA, 120 bp, Artificial Sequence
  ENSG00000148384_32 (sequence is synthesized)
actgcgcccggcctgccccctttgtttttttctgcggcaagaggccccagatgtgttgaggctactttcgtttagccacttgctcatgaggaacattttggtgggctccagctgttgctg

SEQ ID NO: 410879 - DNA, 120 bp, Artificial Sequence
  ENSG00000148384_33 (sequence is synthesized)
gaaggaactgcagctgaacccatgacctctcccaagcctggtcttgtcttggggtctcagtctgggggcctgtcctgagatgctcccactatgacttggcagagtcacctgcacccttct

SEQ ID NO: 410880 - DNA, 120 bp, Artificial Sequence
  ENSG00000148384_34 (sequence is synthesized)
cctggggccgttgtaactcatgaccacagactgggaggcttgcaacagcagagctggactctctcccagttctagaggccagaagtctaaaatcaaggtgtggccacgcagcctctctcc

SEQ ID NO: 410881 - DNA, 120 bp, Artificial Sequence
  ENSG00000148384_35 (sequence is synthesized)
agaggctcaggggagggtcctcccgctgcctcccgctcctggggccccacttgttccttggcttgtggccgcatgctccagtctctgcctctgtctttatgtggcctcttccctgtctct

SEQ ID NO: 410882 - DNA, 120 bp, Artificial Sequence
  ENSG00000148384_36 (sequence is synthesized)
ctgtgttcccctctctttttataaggacaccagtcattgaatttactgcctaccctaaatccagggtggtcttatctcgagatccttaattaaacacgtttgcaaagaccccgtttccga

SEQ ID NO: 410883 - DNA, 120 bp, Artificial Sequence
  ENSG00000148384_37 (sequence is synthesized)
ataaggtcccattccaaggttctggggctctgggagtggacatggctttggggatcactgttcagctcaccacagtccccgaaggtagcctcacttccccgcgtctgtggtgcaccagca

SEQ ID NO: 410884 - DNA, 120 bp, Artificial Sequence
  ENSG00000148384_38 (sequence is synthesized)
ggcaggtgggctcaggcctggagtgagggcccgtgcctggcgcccccaccatactctcctcctgtcatggatggagcaggtgcgatcacatccagggcaagactgctgcttttgttaaaa

SEQ ID NO: 410885 - DNA, 120 bp, Artificial Sequence
  ENSG00000148384_39 (sequence is synthesized)
taattcactgcagggcttctcgtaaagagtgagatttcttagtgcatctaaagcatcacattttaaaattagatccggttgacgtagatacacctgttagagaaaaggacagtcgtgtct

SEQ ID NO: 410886 - DNA, 120 bp, Artificial Sequence
  ENSG00000148384_40 (sequence is synthesized)
caaatttggaccctcaagtcattgttttcaaacaaccaggaaacgagggttgacgtggatcctttaacccagttctgctgcctaacagcttcccatttccagacctccggtctgttctag

SEQ ID NO: 410887 - DNA, 120 bp, Artificial Sequence
  ENSG00000148384_41 (sequence is synthesized)
aataggagtcggcgcactctttctgtcaagggggagacacagacagtggggaccaaagggcgtctgtgtgccagtgagtctattagggacatacattggaacctcgctcttttttctttc

SEQ ID NO: 410888 - DNA, 120 bp, Artificial Sequence
  ENSG00000148384_42 (sequence is synthesized)
tctgccgttccacacagtaaaacccattctgagtttgcgggccgcgtgtgcacgggctgggtccgccctgtttgagaatggctgctggcttttgccagtgccttggggctgccagggcgg

SEQ ID NO: 410889 - DNA, 120 bp, Artificial Sequence
  ENSG00000148384_43 (sequence is synthesized)
gttagggggcctttccccacccgttccttttgctcggagagctggcccaggctgtggcagccagcctgagcgtcctcatgcagaagctgtgcagtgtcctggccctggatgggggtccga

SEQ ID NO: 410890 - DNA, 120 bp, Artificial Sequence
  ENSG00000148384_44 (sequence is synthesized)
ggcagctctgcccctgcccgtgtctagacacaggaatggctgtgagggccgcccctggcctgctgttactaaccatgctctggacagagctgggcagactgaccacgtggctgctggtgt

SEQ ID NO: 410891 - DNA, 120 bp, Artificial Sequence
  ENSG00000148384_45 (sequence is synthesized)
ggacatgatgggcgctgccggcaaaggggccgtgggcctccagcctggtgaccgaggagcccctgctgggcccgggatcacttgacaggggtgcccacaggaacgctctctgtcccgaat

SEQ ID NO: 410892 - DNA, 120 bp, Artificial Sequence
  ENSG00000148384_46 (sequence is synthesized)
gaccactgtgtgaacacagctgtcccgaccgggattgtcgacagttttaggggtgaggtagcgaggttcctccctgctgacatgatttaacgtgtccagtgaagcttggtgagccgcagc

SEQ ID NO: 410893 - DNA, 120 bp, Artificial Sequence
  ENSG00000148384_47 (sequence is synthesized)
cagggttgaagaagttctcgcgggaggtcacaggaatccggcactatgctctcgtgtccccttgcggaagggaaccatgtcagaagacggcgtatccagaaggagccgcacaagtgttac

SEQ ID NO: 410894 - DNA, 120 bp, Artificial Sequence
  ENSG00000148384_48 (sequence is synthesized)
ttagagagggagcggggaggacggctggcaagcctagcccacggcgtttctgtatagtcggcgagctgagaacgggttttacatttccaaatggttggaaaaagtcaaaaccattctaat

SEQ ID NO: 410895 - DNA, 120 bp, Artificial Sequence
  ENSG00000148384_49 (sequence is synthesized)
gatgtttcatagtacaagaaaattgtaaaattcagatttcagtgtctgtaaatcaagcgtctcgggcacacggctgcaccccttgtgtccacatcccctggtggctcttgcaccaccgta

SEQ ID NO: 410896 - DNA, 120 bp, Artificial Sequence
  ENSG00000148384_50 (sequence is synthesized)
gcagagcccacggcgacagacactggatgtcccacggagcggcaggcgtgtgcggttgcctcttgacgggttaccagccctcgtggcagaaggtgctgagtgtggggaggggcagggacg

SEQ ID NO: 410897 - DNA, 120 bp, Artificial Sequence
  ENSG00000148384_51 (sequence is synthesized)
ttgctgtgccacacggtgtttaaccatctgtgtgcaccgccgtattaaaatctgaaagcatcagcctggacaacgtggcgagaccctgtttctacaaaaataaaaaataaataaataact

SEQ ID NO: 410898 - DNA, 120 bp, Artificial Sequence
  ENSG00000148386_0 (sequence is synthesized)
atggctctgcttctgctgagcctggggctgagcctcatcgcagcccaggagttcgatccccacaccgttatgcagaggaactacaacgtggccagggtttcaggggtctggtattctatt

SEQ ID NO: 410899 - DNA, 120 bp, Artificial Sequence
  ENSG00000148386_1 (sequence is synthesized)
ttcatggcctcagatgacctgaatcggattaaagaaaatggagacctgagggtcttcgtccggaatattgaacacttgaagaacggcagcctaatatttgatttcgaatacatggtgcag

SEQ ID NO: 410900 - DNA, 120 bp, Artificial Sequence
  ENSG00000148386_2 (sequence is synthesized)
gaatactccatcaactatgagggccagaacacagtggccgtctcggagactgactacaggctgttcatcaccttccacctccagaacttcaggaacgggaccgagacccacacgctggcg

SEQ ID NO: 410901 - DNA, 120 bp, Artificial Sequence
  ENSG00000148386_3 (sequence is synthesized)
ctctatgaaacctgcgaaaagtacggacttggctcacaaaatatcatcgacttgaccaacaaagatccctgctactccaagcattacaggagcccgcccaggcctcccatgcggtggtaa

SEQ ID NO: 410902 - DNA, 120 bp, Artificial Sequence
  ENSG00000148386_4 (sequence is synthesized)
ctgctactccaagcattacaggagcccgcccaggcctcccatgcgtgagctgcgactcgggacgggcagggggctggatggggagagcttggggccaacgtcagaggctgcggggtccca

SEQ ID NO: 410903 - DNA, 120 bp, Artificial Sequence
  ENSG00000148386_5 (sequence is synthesized)
tcctggagtcggggcagtgatggggccttccagggtggtaaggtctgagcaggaagtgagatggggccctgtgtgagtctccaggggctgatgtcaccatatgcgggtgactaggacaac

SEQ ID NO: 410904 - DNA, 120 bp, Artificial Sequence
  ENSG00000148386_6 (sequence is synthesized)
caggatttactttctcacagcctggagcccgaggtctgaaacccgaggtccgcagggctgtgctccctccaccagctcccgggaagggtccttcctgcctcttccggctgctgggggctc

SEQ ID NO: 410905 - DNA, 120 bp, Artificial Sequence
  ENSG00000148386_7 (sequence is synthesized)
caggcatccctggcttgtggctgtcactccagcctctgcctctgtctgtgtctcctcttctgtctcttctaaggacacttgtcattggatttcgggcccatcttcatgcagaatgatctc

SEQ ID NO: 410906 - DNA, 120 bp, Artificial Sequence
  ENSG00000148396_0 (sequence is synthesized)
tccagctccaattaaggaacagctatatcctgcttccttctgtaagcagcatcgacttgtgcaagggttcagtcatgcagccaccgccccagacggtcccgtctggcatggctgggccac

SEQ ID NO: 410907 - DNA, 120 bp, Artificial Sequence
  ENSG00000148396_1 (sequence is synthesized)
ctccagccgggaatcctcggagcgtgttctgggctagcagcccttacaggagacgggctaataataatgcagcagtggctccgacaacttgcccgttgcagccggtcacggatccatttg

SEQ ID NO: 410908 - DNA, 120 bp, Artificial Sequence
  ENSG00000148396_2 (sequence is synthesized)
cttttagtagacaggcgctccaaagtacaccactgggcagttcgtccaaaagcagtccacctgtcttgcaaggcccagcccccgcagggttttctcagcaccccggtttgcttgttcctc

SEQ ID NO: 410909 - DNA, 120 bp, Artificial Sequence
  ENSG00000148396_3 (sequence is synthesized)
acacacatgccagagatagctctcagggaccctgtgagcccctgcctggacctctgacacagcccagagcacatgccagtccgttttctggtgcattgacaccttcagcacctcctgggc

SEQ ID NO: 410910 - DNA, 120 bp, Artificial Sequence
  ENSG00000148396_4 (sequence is synthesized)
ctgagatgaacaggagtgcagaggtcggtcccagttcagagcctgaagttcagactctgccatatcttcctcactacattccaggagtggatcctgaaacgtctcatgggggccaccctc

SEQ ID NO: 410911 - DNA, 120 bp, Artificial Sequence
  ENSG00000148396_5 (sequence is synthesized)
atgggaacatgcctgggctcgaccgacccctgagcaggcaaaacccacatgacggtgtggtcaccccagcagcatccccttccctccctcagcctggtctgcagatgccaggacagtggg

SEQ ID NO: 410912 - DNA, 120 bp, Artificial Sequence
  ENSG00000148396_6 (sequence is synthesized)
ggccagtgcagggaggcccacagccctcggggcaacatcgttcaccctgccctgaaggacctgttcccagcggggtgccctgtgccaccagcgttcctcatttccccaccccgtccatcc

SEQ ID NO: 410913 - DNA, 120 bp, Artificial Sequence
  ENSG00000148396_7 (sequence is synthesized)
tacatcagggccctggtcatgagcaacacagccctctggtggctcccccagcagccttgcccagtgacggaagagacgaggtgagccacttgcaaagtggaagccacctggccaataact

SEQ ID NO: 410914 - DNA, 120 bp, Artificial Sequence
  ENSG00000148396_8 (sequence is synthesized)
ctgatcctgaaagtacattcaggcaaaatcccagaattgtgaatcactgggcaagcccagagctcaggcagaatccaggagtgaagaatgagcaccggcccgcctctgctcttgtgaacc

SEQ ID NO: 410915 - DNA, 120 bp, Artificial Sequence
  ENSG00000148396_9 (sequence is synthesized)
ccctcgcccggggagatagcccagaaaaccgtacgcaccacccactgggggctggggccgggtctggctgtgccccgctagaagcagactcaggagcttcaggagctctggcgatgtttt

SEQ ID NO: 410916 - DNA, 120 bp, Artificial Sequence
  ENSG00000148396_10 (sequence is synthesized)
tccaagggggagagacagaaaatgaggagaatctctcatctgaaaaagcaggcttatctggtcaagcggactttgacgatttctgctccagccctgggctaggccgtccgcccgcaccta

SEQ ID NO: 410917 - DNA, 120 bp, Artificial Sequence
  ENSG00000148396_11 (sequence is synthesized)
cacacgtgggggcaggcagcctctgccaggcccttctcccaggccccagcaatgaggctgctggtgatgtgtggggtgacacagcgagcacaggggtgccggatgccagcggctcgcagt

SEQ ID NO: 410918 - DNA, 120 bp, Artificial Sequence
  ENSG00000148396_12 (sequence is synthesized)
atgagaatgttgagaacttagaatttgttcagaatcaagaagttctgccaagtgagcccctcaatttggacccttcctccccgagtgaccagttcagatatgggccccttcctgggccag

SEQ ID NO: 410919 - DNA, 120 bp, Artificial Sequence
  ENSG00000148396_13 (sequence is synthesized)
ctgtgcccaggcatggtgctgtgtgccacaccggagcccctgatgccacactgcatacagtgcaccctgacagcgtgtcatccagctatagcagcagaagccacggaaggctctcaggct

SEQ ID NO: 410920 - DNA, 120 bp, Artificial Sequence
  ENSG00000148396_14 (sequence is synthesized)
cagccaggccccaggagctggttggcacattcattcagcaagaagttggaaaacccgaggatgaagcttcaggtagtttttttaagcaaatcgattcttctcccgtaggaggtgaaacag

SEQ ID NO: 410921 - DNA, 120 bp, Artificial Sequence
  ENSG00000148396_15 (sequence is synthesized)
acgagaccactgtgagccagaattaccgtggcagcgtgtcccagccctcaaccccgagccccccgaaacctacaggaatatttcagacaagtgcaaatagttctttcgaaccggtaaaat

SEQ ID NO: 410922 - DNA, 120 bp, Artificial Sequence
  ENSG00000148396_16 (sequence is synthesized)
ctcacttagttggggtaaaaccatttgaggcagatcgcgccaacgtggttggtgaagtaagggagacctgtgtccgccagaagcagtgcagaccagctgccgccctgcccgatgcttccc

SEQ ID NO: 410923 - DNA, 120 bp, Artificial Sequence
  ENSG00000148396_17 (sequence is synthesized)
ctggcaacctggagcagccaccagacaacatggagaccctctgtgcaccccaggtctgtcccctgcctcttaactccaccacggaagctgtgcacatgcttccgcacgcaggggcaccgc

SEQ ID NO: 410924 - DNA, 120 bp, Artificial Sequence
  ENSG00000148396_18 (sequence is synthesized)
ccttggatactgtgtatccagcacccgagaagaggccttcagccaggacccaggggcccgtgaagtgtgagagcccagcaacgactctgtgggcgcaaagtgagctgccagattttggag

SEQ ID NO: 410925 - DNA, 120 bp, Artificial Sequence
  ENSG00000148396_19 (sequence is synthesized)
gcaacgtccttctggcccctgcagccccggcgctttatgtgtgtgcaaaacctcagccacctgttgttcagcctccagaagaggcgatgtccgggcagcagtcacggaacccaagctcgg

SEQ ID NO: 410926 - DNA, 120 bp, Artificial Sequence
  ENSG00000148396_20 (sequence is synthesized)
cggccccggtgcagagccgaggtggcattggtgcttctgagaaccttgagaatcctcccaaaatgggagaggaggaggcccttcagtcccaggcgagttctggttatgcaagtttattat

SEQ ID NO: 410927 - DNA, 120 bp, Artificial Sequence
  ENSG00000148396_21 (sequence is synthesized)
cctcaccgcccactgagtctctgcagaatcctccagtcttgattgctcagcctgatcacagctataatctggctcagcccattaacttttctgtgtccttatcgaactctcatgagaaga

SEQ ID NO: 410928 - DNA, 120 bp, Artificial Sequence
  ENSG00000148396_22 (sequence is synthesized)
atcagtcctggagagaggctttggtgggggatagacctgcagtcagcagttgggctctcggtggtgattctggggagaacacttctttgtctgggattccaaccagctctgtccttagct

SEQ ID NO: 410929 - DNA, 120 bp, Artificial Sequence
  ENSG00000148396_23 (sequence is synthesized)
tgtctctgcctagcagtgttgcccaaagtaattttccacaaggttctggtgcttccgaaatggtttctaatcagcctgctaatttgctggttcaaccaccatcccagccagttccagaga

SEQ ID NO: 410930 - DNA, 120 bp, Artificial Sequence
  ENSG00000148396_24 (sequence is synthesized)
acttggttccagaaagtcaaaaggatcgtaaggcaggaagtgctcttcccggatttgctaatagccctgctggaagcacaagtgtggtgttagttccacctgcacacggcaccctggtgc

SEQ ID NO: 410931 - DNA, 120 bp, Artificial Sequence
  ENSG00000148396_25 (sequence is synthesized)
ctgatggtaataaggcaaaccattccagtcatcaggaagacacttacggagccctagactttaccttaagcaggactttggaaaatcctgtaaacgtgtacaacccgtcccattctgaca

SEQ ID NO: 410932 - DNA, 120 bp, Artificial Sequence
  ENSG00000148396_26 (sequence is synthesized)
gcctcgcttctcagcaaagtgttgccagtcatcccagacaatctgggcctggggcgcctaaccttgaccgtttttatcagcaggtcacgaaagatgcccagggccagcctggcctcgaaa

SEQ ID NO: 410933 - DNA, 120 bp, Artificial Sequence
  ENSG00000148396_27 (sequence is synthesized)
gagcccagcaggagctggtgccaccccagcaacaggcttctcccccacaactacccaaagccatgttttcggagctgtcaaatccagaaagtctgcccgcacagggacaggcccagaact

SEQ ID NO: 410934 - DNA, 120 bp, Artificial Sequence
  ENSG00000148396_28 (sequence is synthesized)
cagcacagtcaccagcaagtctggttctggtcgacgcgggtcagcagctgccccctcggcctcctcagtcctctagcgtgtctctggtgtccagtggctccggccaggcagctgtgccgt

SEQ ID NO: 410935 - DNA, 120 bp, Artificial Sequence
  ENSG00000148396_29 (sequence is synthesized)
cagagcagccgtggccacagccagtgcctgcacttgcccccggcccaccgcctcaggacctggccgcctactactactaccggcctttgtacgatgcctaccagcctcagtactctttgc

SEQ ID NO: 410936 - DNA, 120 bp, Artificial Sequence
  ENSG00000148396_30 (sequence is synthesized)
cgtacccaccggagcctggcgcagcctccctctattaccaggatgtctacagcctctatgagcctcgatacaggccctatgatggtgctgcgtctgcttacgcccagaactaccgctatc

SEQ ID NO: 410937 - DNA, 120 bp, Artificial Sequence
  ENSG00000148396_31 (sequence is synthesized)
ccgagcccgagcggcccagctcccgagccagccactcctcggaacggccacctcccaggcaaggatatcctgaaggatactatagttccaaaagtggatggagcagtcagagcgattact

SEQ ID NO: 410938 - DNA, 120 bp, Artificial Sequence
  ENSG00000148396_32 (sequence is synthesized)
atgcaagctattactccagccagtacgattatggagatccaggtcactgggatcgttaccactacagtgctagagtcagggacccccgcacctatgaccggaggtattggtgtgatgcag

SEQ ID NO: 410939 - DNA, 120 bp, Artificial Sequence
  ENSG00000148396_33 (sequence is synthesized)
agtatgacgcatacaggagagagcactctgccttcggggacaggcccgagaaacgtgacaacaactggaggtacgatcctcgcttcacggggagttttgacgatgaccccgatccgcaca

SEQ ID NO: 410940 - DNA, 120 bp, Artificial Sequence
  ENSG00000148396_34 (sequence is synthesized)
gagacccttatggggaagaggtggaccggcgcagcgtccacagcgagcactcggcacggagcctgcacagcgcacacagcctggccagccgccgcagcagcctcagctcccactcgcacc

SEQ ID NO: 410941 - DNA, 120 bp, Artificial Sequence
  ENSG00000148396_35 (sequence is synthesized)
agagtcagatttacagaagccacaatgtggctgccggttcctacgaggccccgcttcctccaggctcctttcacggcgattttgcctacggcacctaccgcagcaatttcagcagtggcc

SEQ ID NO: 410942 - DNA, 120 bp, Artificial Sequence
  ENSG00000148396_36 (sequence is synthesized)
catggagcaagtttcatcaagaccaacttctcctgaaaaattttcagtgcctcatgtctgtgccaggtttggccctggcggtcagcttatcaaagtgattcccaatctgccttcagaagg

SEQ ID NO: 410943 - DNA, 120 bp, Artificial Sequence
  ENSG00000148396_37 (sequence is synthesized)
acagccggccttggtggaggtccacagcatggaggccttgctgcagcacacgtctgagcaggaggagatgcgggcgttcccgggacccctggccaaagacgacacccataaggtggatgt

SEQ ID NO: 410944 - DNA, 120 bp, Artificial Sequence
  ENSG00000148396_38 (sequence is synthesized)
cattaattttgcacagaacaaagctatgaaatgtttgcagaatgaaaacttaattgacaaagagtctgcaagtcttctttggaattttattgttctcttatgcagacaaaatgggaccgt

SEQ ID NO: 410945 - DNA, 120 bp, Artificial Sequence
  ENSG00000148396_39 (sequence is synthesized)
ggtagggaccgacattgcggagcttctgttacgagaccacagaacagtgtggcttcctgggaagtcgcccaatgaagcaaacctgattgatttcacgaatgaggcagtggagcaggtgga

SEQ ID NO: 410946 - DNA, 120 bp, Artificial Sequence
  ENSG00000148396_40 (sequence is synthesized)
agaggaggagtctggtgaggcccagctctctttcctcactggtggtccggcggctgccgccagctcgctcgagagagagaccgagaggttcagggagctgttgctgtatggccgtaagaa

SEQ ID NO: 410947 - DNA, 120 bp, Artificial Sequence
  ENSG00000148396_41 (sequence is synthesized)
ggatgctttggagtctgcaatgaagaatggcctgtggggtcacgctctgctacttgcaagtaagatggacagccggacacacgcccgagtcatgaccaggtttgctaacagcctcccaat

SEQ ID NO: 410948 - DNA, 120 bp, Artificial Sequence
  ENSG00000148396_42 (sequence is synthesized)
caacgaccctctgcagacagtctaccagctcatgtccggacggatgcctgccgcgtccacgtgctgtggagacgagaaatggggagattggaggccgcacctcgccatggtcttgtccaa

SEQ ID NO: 410949 - DNA, 120 bp, Artificial Sequence
  ENSG00000148396_43 (sequence is synthesized)
cttgaacaacaacatggacgtcgagtccaggacgatggctaccatgggcgacactctggcttcaaggggcctcttggatgcggcccacttctgctacctcatggcccaggcgggatttgg

SEQ ID NO: 410950 - DNA, 120 bp, Artificial Sequence
  ENSG00000148396_44 (sequence is synthesized)
tgtttacacgaagaaaactacaaagcttgtcttaatcggatccaatcacagtttgccattcttaaagttcgcaaccaacgaagcaatccagaggacggaagcctatgagtacgcccagtc

SEQ ID NO: 410951 - DNA, 120 bp, Artificial Sequence
  ENSG00000148396_45 (sequence is synthesized)
cctgggtgccgagacctgccccctgcctagtttccaggtgtttaagttcatctactcctgccgcctggcggaaatggggctggccacgcaagccttccactactgtgaggccatcgcgaa

SEQ ID NO: 410952 - DNA, 120 bp, Artificial Sequence
  ENSG00000148396_46 (sequence is synthesized)
gagcatcctgacgcagccgcacctgtattccccggtgttgatcagccagcttgtgcagatggcttcccagttacgactcttcgatccccagctgaaagagaagccagaagaggagtcctt

SEQ ID NO: 410953 - DNA, 120 bp, Artificial Sequence
  ENSG00000148396_47 (sequence is synthesized)
ggccgcacccacgtggctggttcacctgcagcaggtggagcggcagattaaggagggggctggagtatggcatcaggatggagccctcccgcagcagtgtcctggcactccgagttccga

SEQ ID NO: 410954 - DNA, 120 bp, Artificial Sequence
  ENSG00000148396_48 (sequence is synthesized)
gatggagcagttggacaggccaggactcagtcagccaggagccctggggatcgccaaccctctgctggcggtgcctgcaccgagccctgagcactcgagcccgagcgtgcggctgctgcc

SEQ ID NO: 410955 - DNA, 120 bp, Artificial Sequence
  ENSG00000148396_49 (sequence is synthesized)
ctcagctccgcagacgctccctgacggcccattggccagtcctgccagagtgccgatgttcccagtgccactgcccccggggcccctggagccgggtcctggctgtgtgaccccagggcc

SEQ ID NO: 410956 - DNA, 120 bp, Artificial Sequence
  ENSG00000148396_50 (sequence is synthesized)
tgcacttggcttcctggagccctccgggcctggcctcccacctggtgtgccacctctgcaggaaaggagacacttgctccaggaagccaggagcccagacccagggatagtgccgcagga

SEQ ID NO: 410957 - DNA, 120 bp, Artificial Sequence
  ENSG00000148396_51 (sequence is synthesized)
ggcgcctgttggaaactcactttccgagctaagcgaagaaaattttgatggaaaatttgctaatctgaccccctcgaggacggtgccagactcggaggcccccccagggtgggatcgtgc

SEQ ID NO: 410958 - DNA, 120 bp, Artificial Sequence
  ENSG00000148396_52 (sequence is synthesized)
cgactcgggtcccacgcagccacctctgtctctctcacccgctcccgaaacaaagagacccggacaggcagccaagaaagaaacgaaggaacctaagaagggtgaatcctggttctttcg

SEQ ID NO: 410959 - DNA, 120 bp, Artificial Sequence
  ENSG00000148396_53 (sequence is synthesized)
ttggctacctggaaagaaaaagacagaagcttatttgccagatgacaagaacaaatcgattgtttgggatgaaaagaaaaaccagtgggtgaatttaaatgagccagaagaggagaagaa

SEQ ID NO: 410960 - DNA, 120 bp, Artificial Sequence
  ENSG00000148396_54 (sequence is synthesized)
agccccgcccccacctccaacctcgatgcccaagactgtgcaagctgccccgcctgccctcccagggcctcctggagcccccgtgaacatgtactctagaagagcagcaggaaccagagc

SEQ ID NO: 410961 - DNA, 120 bp, Artificial Sequence
  ENSG00000148396_55 (sequence is synthesized)
tcgctacgttgacgtcctgaacccaagcgggacccagcggagcgagccggctctcgctcctgcggactttgtcgctccactcgcgccactcccaattccttctaacttgttcgtgccaac

SEQ ID NO: 410962 - DNA, 120 bp, Artificial Sequence
  ENSG00000148396_56 (sequence is synthesized)
cccagatgcagaagaaccacagcttccagacgggactggcagggaagggcctgcagcagctaggggcctggccaatccagagcctgccccagagcccaaggttttaagctctgcagcgtc

SEQ ID NO: 410963 - DNA, 120 bp, Artificial Sequence
  ENSG00000148396_57 (sequence is synthesized)
actccctggctctgaactcccctcctccaggcctgagggttcccagggaggagagctttcgcgctgtagttcaatgagttcattatcacgtgaagtgagccagcattttaatcaggctcc

SEQ ID NO: 410964 - DNA, 120 bp, Artificial Sequence
  ENSG00000148396_58 (sequence is synthesized)
tggcgacctccctgctgcagggggccctcccagcggggccatgcccttctacaaccctgctcagctggcacaggcctgcgccacctccgggagctcaaggctagggaggattggccagag

SEQ ID NO: 410965 - DNA, 120 bp, Artificial Sequence
  ENSG00000148396_59 (sequence is synthesized)
gaagcacctggtgctgaactaggcttgccctgctgtgaacttgcacttggagccctgacgctgctgttctccccgaagaacccgaccgacctccgcgatctccgtcccgcccccagggag

SEQ ID NO: 410966 - DNA, 120 bp, Artificial Sequence
  ENSG00000148396_60 (sequence is synthesized)
acacagcagtgactcagagctggtcgcacactgtgcctccctcctcaccgcccatcgtaatgaattattttgaaaattaattccaccatcctttcagattctggatggaaagactgaatc

SEQ ID NO: 410967 - DNA, 120 bp, Artificial Sequence
  ENSG00000148396_61 (sequence is synthesized)
tttgactcagaattgtttgccgaaaagaatgatgtgactttcttagtcatttaggatgatttaaggatatagtattcctggtcatttaagaatgttcattcattgaagccggagctgtct

SEQ ID NO: 410968 - DNA, 120 bp, Artificial Sequence
  ENSG00000148396_62 (sequence is synthesized)
ctgccacaggagagccacatggtcggtagtaaccagggcctctccaagcccagctgtgagtcactgcccagtgagtcccgcgcttcctttaaggtgctgggagcaaagagagggtgactg

SEQ ID NO: 410969 - DNA, 120 bp, Artificial Sequence
  ENSG00000148396_63 (sequence is synthesized)
aggcagaccccaacccctgctctgcaccatctgggccctcgccgtgtttgaacctggctgaatgagtggagggcgctgtgttctcaatcagcgcctccgaggagccgtggggttccttcg

SEQ ID NO: 410970 - DNA, 120 bp, Artificial Sequence
  ENSG00000148396_64 (sequence is synthesized)
gcattagttcacggtttttgagagaggccttagttactgcagtgaatttctttcctgttgcaaagacgcttccagcctcactttactttctgtggcctgatgaggaccatgggtgatttt

SEQ ID NO: 410971 - DNA, 120 bp, Artificial Sequence
  ENSG00000148396_65 (sequence is synthesized)
gtgtacccaaagcgctggggactgcccaccgtgtggcccagtcactgggaaggagccccagagagccggctgtctgacatgatggctcagggtggtcatccaggttgaaaactgaccgtg

SEQ ID NO: 410972 - DNA, 120 bp, Artificial Sequence
  ENSG00000148396_66 (sequence is synthesized)
tgatgtttgatttgggcttcatttcgtgtgtaggagcacggttagactcactgttaaggaagctggatgcacttctctaaaaggctgcactttccgtgagcacttttcgtggtacaatcc

SEQ ID NO: 410973 - DNA, 120 bp, Artificial Sequence
  ENSG00000148396_67 (sequence is synthesized)
acatgacccactttctcccctgggggacgttggttcagaggttggtagcacttggggagagtatcttaacacagtttcttgacagcagctctggaacttagtatttctgccccgagtttt

SEQ ID NO: 410974 - DNA, 120 bp, Artificial Sequence
  ENSG00000148396_68 (sequence is synthesized)
gccacactgagactttgagtagctcctggtggactcaaccctgttcaactcagagacgggcctcctctcactgatgcaaagctttaaggcttctctgactgttctgaaactcttcgtatt

SEQ ID NO: 410975 - DNA, 120 bp, Artificial Sequence
  ENSG00000148396_69 (sequence is synthesized)
cttgtcaagtctaaagagactgaagaaaagatttaaatactaataaaaatcagtagataatttctgtaggttctgctggaggaatacaaactgtttggtgttttaaatttaagtgtagaa

SEQ ID NO: 410976 - DNA, 120 bp, Artificial Sequence
  ENSG00000148396_70 (sequence is synthesized)
attgtagaatgtggaattagcacagatccttcctggctttctgtttcacttgatcatttagcccagaccacccaggatgttttccaaaatgttccacaggcgtgtcccgctggatccatt

SEQ ID NO: 410977 - DNA, 120 bp, Artificial Sequence
  ENSG00000148396_71 (sequence is synthesized)
tgtccttgtcacttggagaaaggccagtccctgtgacggggcagccctctctgtccctcggtcagctcgtgtgaatcctgggacctcttccggtcggctctgcccgctgttctggggtcg

SEQ ID NO: 410978 - DNA, 120 bp, Artificial Sequence
  ENSG00000148396_72 (sequence is synthesized)
actgccacgacttttgattcaagaagcttcctccaggcgggagcggctatttttcctaaatgagaattgttacattgcaaattgttgaataaaatattttgcgctccttcaagcaccttc

SEQ ID NO: 410979 - DNA, 120 bp, Artificial Sequence
  ENSG00000148396_73 (sequence is synthesized)
gcgaggagcgcgcccgcgtcagggccccgcgcttctcagctgggcggagtagccgttctcggtgcgtgagcctgctggcatcggtcctgcagactgatttcccgcttgtggccttgattg

SEQ ID NO: 410980 - DNA, 120 bp, Artificial Sequence
  ENSG00000148396_74 (sequence is synthesized)
aagaatcccatctcttctcacatcttaaaacgaaaaaagactgggagaaagagccagcgtaaacagggcgacgtactgggacggccccggcgcgcctggccgggcaggtggcgaggggcg

SEQ ID NO: 410981 - DNA, 120 bp, Artificial Sequence
  ENSG00000148396_75 (sequence is synthesized)
ccatttttctctgaaccattaaataactaaatccagtgttgcaagaagtgtcttggatctgcttctgtagcttatgtaaaagtactgtaaatcccacccagaagcggtgtctgtatctgc

SEQ ID NO: 410982 - DNA, 75 bp, Artificial Sequence
  ENSG00000148396_76 (sequence is synthesized)
catcctcctggtgtctctgtggatctgcccccgacctccattctcctggtgtctcgctccccacctccatcctcc

SEQ ID NO: 410983 - DNA, 90 bp, Artificial Sequence
  ENSG00000148396_77 (sequence is synthesized)
gctccccacctccatcctcctggtgtgtctggatctgctccccacctccatcctggtgtctctacgtctctgtggatctgctcccacctc

SEQ ID NO: 410984 - DNA, 120 bp, Artificial Sequence
  ENSG00000148396_78 (sequence is synthesized)
ctccatcctcctggtgtctctgtggatctgctcccacctccattctcctggtgtctctgtggatctggcgactctggggcctcacagaaggtgaatcctggttctttcgttggctacctg

SEQ ID NO: 410985 - DNA, 120 bp, Artificial Sequence
  ENSG00000148396_79 (sequence is synthesized)
acctaccgcagcaatttcagcagtggccccggcttcccagagtatggctaccctgccgacaccgtctggcctgccatggagcaagtgcctcatgtctgtgccaggtttggccctggcggt

SEQ ID NO: 410986 - DNA, 80 bp, Artificial Sequence
  ENSG00000148399_0 (sequence is synthesized)
agtcgcgagagaggcggcccgcgctgacggtgtccctggggctctgcgctcgtccggccggccccggcctcgccgccccg

SEQ ID NO: 410987 - DNA, 120 bp, Artificial Sequence
  ENSG00000148399_1 (sequence is synthesized)
cggctccgcgcccttccccgagggctggatgatgggctgtttcgccctgcaaacggtggacaccgagctgaccgcggactcggtggagtggtgcccgctgcaaggctgcaggcacctgct

SEQ ID NO: 410988 - DNA, 120 bp, Artificial Sequence
  ENSG00000148399_2 (sequence is synthesized)
ggcgtgcgggacctaccagctgcggcggccggaggaccggcctgccggcccccagaacaagggtggaatggaagttaaggagcctcaggtccgtttaggccgtctcttcctgtacagttt

SEQ ID NO: 410989 - DNA, 120 bp, Artificial Sequence
  ENSG00000148399_3 (sequence is synthesized)
caatgacaacaactctattcaccctctggtcgaggtccaaagaaaagatacttctgcaatcctggacatgaaatggtgtcacatcccggtggctggacatgccctcttgggcttggcaga

SEQ ID NO: 410990 - DNA, 120 bp, Artificial Sequence
  ENSG00000148399_4 (sequence is synthesized)
tgccagtggatccatacaactgctccgcctggtggaatctgagaagagccacgtgctggagccattgtccagccttgccctggaggagcagtgtctggctttgtccctagattggtccac

SEQ ID NO: 410991 - DNA, 120 bp, Artificial Sequence
  ENSG00000148399_5 (sequence is synthesized)
tgggaaaactggaagggccggggaccagcccttgaagatcatcagcagtgactccacagggcagctccacctcctgatggtgaatgagacgaggcccaggctgcagaaagtggcctcatg

SEQ ID NO: 410992 - DNA, 120 bp, Artificial Sequence
  ENSG00000148399_6 (sequence is synthesized)
gcaggcacatcaattcgaggcctggattgctgctttcaattactggcatccagaaattgtgtattcagggggcgacgatggccttctgaggggctgggacaccagggtacccggcaaatt

SEQ ID NO: 410993 - DNA, 120 bp, Artificial Sequence
  ENSG00000148399_7 (sequence is synthesized)
tctcttcaccagcaaaagacacaccatgggtgtgtgcagcatccagagcagccctcatcgggagcacatcctggccacgggaagctatgatgaacacatcctactgtgggacacacgaaa

SEQ ID NO: 410994 - DNA, 120 bp, Artificial Sequence
  ENSG00000148399_8 (sequence is synthesized)
catgaagcagccgttggcagatacgcctgtgcagggtggggtatggagaatcaagtggcaccctttccaccaccacctgctcctggccgcctgcatgcacagtggctttaagatcctcaa

SEQ ID NO: 410995 - DNA, 120 bp, Artificial Sequence
  ENSG00000148399_9 (sequence is synthesized)
aggcaggaggcgacggtcctgacatctcacacattgcccgactcgctggtgtatggagccgactggtcctggctgctcttccgttctctgcagcgggccccctcgtggtcctttcctagc

SEQ ID NO: 410996 - DNA, 120 bp, Artificial Sequence
  ENSG00000148399_10 (sequence is synthesized)
aacctaggaaccaagacggcagacctgaagggtgcaagcgagttgccaacaccctgtcatgaatgcagagaggataacgatggggagggccatgccagaccccagagtggaatgaagcca

SEQ ID NO: 410997 - DNA, 120 bp, Artificial Sequence
  ENSG00000148399_11 (sequence is synthesized)
ctcacagagggcatgaggaagaatggcacctggctgcaggctacagcagccaccacacgtgactgtggcgtgaacccagaagaagcagactcagccttcagcctcctggccacctgctcc

SEQ ID NO: 410998 - DNA, 120 bp, Artificial Sequence
  ENSG00000148399_12 (sequence is synthesized)
ttctatgaccatgcgctccacctctgggagtgggaggggaactgagcttgaaatcatgaagccccttcccacaaggaaaccaggagggagactgcgagtgagtgcccgggaccacctcat

SEQ ID NO: 410999 - DNA, 120 bp, Artificial Sequence
  ENSG00000148399_13 (sequence is synthesized)
cagagatgcttactgcagccctgcaggtgcctgtgcactgatggaatccacagtgtagtcagaaaagctgttgacttctcttaaatcagcttccctgctgggcccctgaaagtggactgg

SEQ ID NO: 411000 - DNA, 120 bp, Artificial Sequence
  ENSG00000148399_14 (sequence is synthesized)
gtgattctgtctggcagagagtggggaaaagacgcggtttccagcttgcagatttgttaagtttctcaggcagattttgactttcagcctttcatacttgtttaagcaactatttgtatt

SEQ ID NO: 411001 - DNA, 120 bp, Artificial Sequence
  ENSG00000148399_15 (sequence is synthesized)
aaatgaagttttttgaaaaacacgagtttataacatgtttaaaatgaacattttatgcctcatcatggcaccagaaatgcttgtatagattgagcacagccagtccaaaaatccaaaatc

SEQ ID NO: 411002 - DNA, 120 bp, Artificial Sequence
  ENSG00000148399_16 (sequence is synthesized)
ccaaaacttttggaaaatcccgcagctgaactcatgtgacgggttgcatatattattaaaactactgagcacagtcacagtggcctgtaatcccagcactttggaaggggctgaggcagg

SEQ ID NO: 411003 - DNA, 89 bp, Artificial Sequence
  ENSG00000148399_17 (sequence is synthesized)
ccagcctgggcaacatagcaaaacccagtctctataaaaagtaaaacaaaaattagccaggtgtggtgcatgtgcctatggattgttga

SEQ ID NO: 411004 - DNA, 120 bp, Artificial Sequence
  ENSG00000148399_18 (sequence is synthesized)
tgggaggctgaggcaggaggattgttgagcccaggaggtcgaggctgcaatgagccaggggcaacagagcaagactcttatctctaaaaattaaataataaaaaattgtataaacaataa

SEQ ID NO: 411005 - DNA, 120 bp, Artificial Sequence
  ENSG00000148399_19 (sequence is synthesized)
cagacatcaacggcctaactgagaacactcatttcctgtcattagtggtgttgatgcttctctttctccacacagggggcgacgatggccttctgaggggctgggacaccagggtacccg

SEQ ID NO: 411006 - DNA, 120 bp, Artificial Sequence
  ENSG00000148399_20 (sequence is synthesized)
cccaagggacagtaacggcctccccaggggcttcctcccgagggtcgccccacacatgctgctcgagggcccctgtggctgtctctgaacattcagcatctcactcctcctcggagccac

SEQ ID NO: 411007 - DNA, 120 bp, Artificial Sequence
  ENSG00000148399_21 (sequence is synthesized)
tgtgtgctggacactggttcagaagccgcctctgcttgcagacacaccatgggtgtgtgcagcatccagagcagccctcatcgggagcacatcctggccacgggaaggtgagtccccagg

SEQ ID NO: 411008 - DNA, 120 bp, Artificial Sequence
  ENSG00000148399_22 (sequence is synthesized)
aggctctcgggcccttctcgtctctttcgctgtccccggggggctcctgggcccttcttccctctttcgctgcctttcctcctggcaccattgcagcatttcgtctgccagtgcttcgcc

SEQ ID NO: 411009 - DNA, 120 bp, Artificial Sequence
  ENSG00000148399_23 (sequence is synthesized)
ggagtgtaggtatatgggtttggtaaaggggactttgtcctcgagggatgcatgggacaggtctctgggagacgttctgtgccccccaggggccttgtggaacaggtgagcctgggcttt

SEQ ID NO: 411010 - DNA, 120 bp, Artificial Sequence
  ENSG00000148399_24 (sequence is synthesized)
tgcagtaacatgctgtaaggtttgtggcataggagcagtgggccataccatataatcaaggtgtcacatcccggtggctggacatgccctcttgggcttggcagatgccagtggatccat

SEQ ID NO: 411011 - DNA, 120 bp, Artificial Sequence
  ENSG00000148399_25 (sequence is synthesized)
gtggccctggaggcctggggtgggaaactgtgtgtgccactgtggtctggagcctgcacaggcatctcgacagcatctaggagcgcaaggatggcaagggggtgtgaaagggagggagac

SEQ ID NO: 411012 - DNA, 120 bp, Artificial Sequence
  ENSG00000148399_26 (sequence is synthesized)
catgccccaagatcaagcctgtgggaaagttgtcctgcaagtgtgaggagtgtgagctccagtgtccccaggtcttctcggggcccctagcaggggtttcagtgttaggtggaggtgtga

SEQ ID NO: 411013 - DNA, 120 bp, Artificial Sequence
  ENSG00000148399_27 (sequence is synthesized)
ctcagtgactgatgtacttcattcgcataggttgtaaatgagggaacgatgacttccctgcaggagaggaaaagtcttttgggggttctggggcggctacttccctttgatggagtttct

SEQ ID NO: 411014 - DNA, 120 bp, Artificial Sequence
  ENSG00000148399_28 (sequence is synthesized)
gtggaatctgaggtcagtgacttgcacttgttctgtggggcagaagggacctgaatagagagggttggggaggaggctgtgctgatacagacatttttctaaaacgatctctcttcaatg

SEQ ID NO: 411015 - DNA, 120 bp, Artificial Sequence
  ENSG00000148399_29 (sequence is synthesized)
atttttaagttgtattgcgttctacatccaactccaagaggaagtcacctcatgtgtcaccagcagaagggctgaagtgacaggatgttcattgacctgtcagtggatctgaaagttctc

SEQ ID NO: 411016 - DNA, 120 bp, Artificial Sequence
  ENSG00000148399_30 (sequence is synthesized)
taaggagagcctgggcaagcattcttaggttgatgctggggcccagagtagcagtgagcatcctgtgtgaagatggcatttctcactgattattggaaaagcacgtgagtcctgtgtgaa

SEQ ID NO: 411017 - DNA, 120 bp, Artificial Sequence
  ENSG00000148399_31 (sequence is synthesized)
tttttccgagtttctcacagtgctctggagccatgcattaacaaagtgacttcatctgatagctgtcggggaggagaacggggatgtcccgtagtggggtgatgtaaacagcctgaaacc

SEQ ID NO: 411018 - DNA, 120 bp, Artificial Sequence
  ENSG00000148399_32 (sequence is synthesized)
acgccctcactccgatgcagatgctgcaggcggggctgggccaaccgagggcctgtgtaggaaaaggccttgcttaaggcagcttagagcagttgccctgtcttagaaaggagggaaaga

SEQ ID NO: 411019 - DNA, 120 bp, Artificial Sequence
  ENSG00000148399_33 (sequence is synthesized)
ggatggagttaagcactggccaggctgtttaggaaatgaaatttatatagatctgcataaagagcaaccacgttctcatggctgctcgcggcttctgaagtggaaaccagaggagtttcc

SEQ ID NO: 411020 - DNA, 120 bp, Artificial Sequence
  ENSG00000148399_34 (sequence is synthesized)
aagggccaggcttggtcaggggtcctgagtctttctctgagaaccacttccacttttcaggctagagggctccagccaccttcagcgagctgcgactgtgctcctcagccctgacatcat

SEQ ID NO: 411021 - DNA, 120 bp, Artificial Sequence
  ENSG00000148399_35 (sequence is synthesized)
cactgccagtcctattatgaaaaaaaggtcccccattttagatacatagcgatagtgtttttacctagagaagtcgacactggtgtctttgacaagcttagcagtggttgtgatcttagc

SEQ ID NO: 411022 - DNA, 120 bp, Artificial Sequence
  ENSG00000148399_36 (sequence is synthesized)
cgccagtctcttaaggggcatatccgcatcccagggctgtggagaccgtctctcaggacttgtttgggaaccagaagaggctgacgaataacattctgccgggcttcttcatgggttccc

SEQ ID NO: 411023 - DNA, 80 bp, Artificial Sequence
  ENSG00000148400_0 (sequence is synthesized)
cgggcgcgagcgcagcgaaggaacgagccgggcgcggagccgggcccgggggcctgcgagagcacagcgccgccagccag

SEQ ID NO: 411024 - DNA, 80 bp, Artificial Sequence
  ENSG00000148400_1 (sequence is synthesized)
cagcgccgccagccagccggggaagagagggcgggaccgtccgccgccgccccgggaccgtacgccgcgcgtgtgcgtcc

SEQ ID NO: 411025 - DNA, 120 bp, Artificial Sequence
  ENSG00000148400_2 (sequence is synthesized)
agagggcagccggtggggaggcatgccgccgctcctggcgcccctgctctgcctggcgctgctgcccgcgctcgccgcacgaggcccgcgatgctcccagcccggtgagacctgcctgaa

SEQ ID NO: 411026 - DNA, 120 bp, Artificial Sequence
  ENSG00000148400_3 (sequence is synthesized)
tggcgggaagtgtgaagcggccaatggcacggaggcctgcgtctgtggcggggccttcgtgggcccgcgatgccaggaccccaacccgtgcctcagcaccccctgcaagaacgccgggac

SEQ ID NO: 411027 - DNA, 120 bp, Artificial Sequence
  ENSG00000148400_4 (sequence is synthesized)
atgccacgtggtggaccgcagaggcgtggcagactatgcctgcagctgtgccctgggcttctctgggcccctctgcctgacacccctggacaatgcctgcctcaccaacccctgccgcaa

SEQ ID NO: 411028 - DNA, 120 bp, Artificial Sequence
  ENSG00000148400_5 (sequence is synthesized)
cgggggcacctgcgacctgctcacgctgacggagtacaagtgccgctgcccgcccggctggtcagggaaatcgtgccagcaggctgacccgtgcgcctccaacccctgcgccaacggtgg

SEQ ID NO: 411029 - DNA, 120 bp, Artificial Sequence
  ENSG00000148400_6 (sequence is synthesized)
ccagtgcctgcccttcgaggcctcctacatctgccactgcccacccagcttccatggccccacctgccggcaggatgtcaacgagtgtggccagaagcccgggctttgccgccacggagg

SEQ ID NO: 411030 - DNA, 120 bp, Artificial Sequence
  ENSG00000148400_7 (sequence is synthesized)
cacctgccacaacgaggtcggctcctaccgctgcgtctgccgcgccacccacactggccccaactgcgagcggccctacgtgccctgcagcccctcgccctgccagaacgggggcacctg

SEQ ID NO: 411031 - DNA, 120 bp, Artificial Sequence
  ENSG00000148400_8 (sequence is synthesized)
ccgccccacgggcgacgtcacccacgagtgtgcctgcctgccaggcttcaccggccagaactgtgaggaaaatatcgacgattgtccaggaaacaactgcaagaacgggggtgcctgtgt

SEQ ID NO: 411032 - DNA, 120 bp, Artificial Sequence
  ENSG00000148400_9 (sequence is synthesized)
ggacggcgtgaacacctacaactgccgctgcccgccagagtggacaggtcagtactgtaccgaggatgtggacgagtgccagctgatgccaaatgcctgccagaacggcgggacctgcca

SEQ ID NO: 411033 - DNA, 120 bp, Artificial Sequence
  ENSG00000148400_10 (sequence is synthesized)
caacacccacggtggctacaactgcgtgtgtgtcaacggctggactggtgaggactgcagcgagaacattgatgactgtgccagcgccgcctgcttccacggcgccacctgccatgaccg

SEQ ID NO: 411034 - DNA, 120 bp, Artificial Sequence
  ENSG00000148400_11 (sequence is synthesized)
tgtggcctccttctactgcgagtgtccccatggccgcacaggtctgctgtgccacctcaacgacgcatgcatcagcaacccctgtaacgagggctccaactgcgacaccaaccctgtcaa

SEQ ID NO: 411035 - DNA, 120 bp, Artificial Sequence
  ENSG00000148400_12 (sequence is synthesized)
tggcaaggccatctgcacctgcccctcggggtacacgggcccggcctgcagccaggacgtggatgagtgctcgctgggtgccaacccctgcgagcatgcgggcaagtgcatcaacacgct

SEQ ID NO: 411036 - DNA, 120 bp, Artificial Sequence
  ENSG00000148400_13 (sequence is synthesized)
gggctccttcgagtgccagtgtctgcagggctacacgggcccccgatgcgagatcgacgtcaacgagtgcgtctcgaacccgtgccagaacgacgccacctgcctggaccagattgggga

SEQ ID NO: 411037 - DNA, 120 bp, Artificial Sequence
  ENSG00000148400_14 (sequence is synthesized)
gttccagtgcatctgcatgcccggctacgagggtgtgcactgcgaggtcaacacagacgagtgtgccagcagcccctgcctgcacaatggccgctgcctggacaagatcaatgagttcca

SEQ ID NO: 411038 - DNA, 120 bp, Artificial Sequence
  ENSG00000148400_15 (sequence is synthesized)
gtgcgagtgccccacgggcttcactgggcatctgtgccagtacgatgtggacgagtgtgccagcaccccctgcaagaatggtgccaagtgcctggacggacccaacacttacacctgtgt

SEQ ID NO: 411039 - DNA, 120 bp, Artificial Sequence
  ENSG00000148400_16 (sequence is synthesized)
gtgcacggaagggtacacggggacgcactgcgaggtggacatcgatgagtgcgaccccgacccctgccactacggctcctgcaaggacggcgtcgccaccttcacctgcctctgccgccc

SEQ ID NO: 411040 - DNA, 120 bp, Artificial Sequence
  ENSG00000148400_17 (sequence is synthesized)
aggctacacgggccaccactgcgagaccaacatcaacgagtgctccagccagccctgccgccacgggggcacctgccaggaccgcgacaacgcctacctctgcttctgcctgaaggggac

SEQ ID NO: 411041 - DNA, 120 bp, Artificial Sequence
  ENSG00000148400_18 (sequence is synthesized)
cacaggacccaactgcgagatcaacctggatgactgtgccagcagcccctgcgactcgggcacctgtctggacaagatcgatggctacgagtgtgcctgtgagccgggctacacagggag

SEQ ID NO: 411042 - DNA, 120 bp, Artificial Sequence
  ENSG00000148400_19 (sequence is synthesized)
catgtgtaacatcaacatcgatgagtgtgcgggcaacccctgccacaacgggggcacctgcgaggacggcatcaatggcttcacctgccgctgccccgagggctaccacgaccccacctg

SEQ ID NO: 411043 - DNA, 120 bp, Artificial Sequence
  ENSG00000148400_20 (sequence is synthesized)
cctgtctgaggtcaatgagtgcaacagcaacccctgcgtccacggggcctgccgggacagcctcaacgggtacaagtgcgactgtgaccctgggtggagtgggaccaactgtgacatcaa

SEQ ID NO: 411044 - DNA, 120 bp, Artificial Sequence
  ENSG00000148400_21 (sequence is synthesized)
caacaatgagtgtgaatccaacccttgtgtcaacggcggcacctgcaaagacatgaccagtggctacgtgtgcacctgccgggagggcttcagcggtcccaactgccagaccaacatcaa

SEQ ID NO: 411045 - DNA, 120 bp, Artificial Sequence
  ENSG00000148400_22 (sequence is synthesized)
cgagtgtgcgtccaacccatgtctgaaccagggcacgtgtattgacgacgttgccgggtacaagtgcaactgcctgctgccctacacaggtgccacgtgtgaggtggtgctggccccgtg

SEQ ID NO: 411046 - DNA, 120 bp, Artificial Sequence
  ENSG00000148400_23 (sequence is synthesized)
tgcccccagcccctgcagaaacggcggggagtgcaggcaatccgaggactatgagagcttctcctgtgtctgccccacgggctggcaagggcagacctgtgaggtcgacatcaacgagtg

SEQ ID NO: 411047 - DNA, 120 bp, Artificial Sequence
  ENSG00000148400_24 (sequence is synthesized)
cgttctgagcccgtgccggcacggcgcatcctgccagaacacccacggcggctaccgctgccactgccaggccggctacagtgggcgcaactgcgagaccgacatcgacgactgccggcc

SEQ ID NO: 411048 - DNA, 120 bp, Artificial Sequence
  ENSG00000148400_25 (sequence is synthesized)
caacccgtgtcacaacgggggctcctgcacagacggcatcaacacggccttctgcgactgcctgcccggcttccggggcactttctgtgaggaggacatcaacgagtgtgccagtgaccc

SEQ ID NO: 411049 - DNA, 120 bp, Artificial Sequence
  ENSG00000148400_26 (sequence is synthesized)
ctgccgcaacggggccaactgcacggactgcgtggacagctacacgtgcacctgccccgcaggcttcagcgggatccactgtgagaacaacacgcctgactgcacagagagctcctgctt

SEQ ID NO: 411050 - DNA, 120 bp, Artificial Sequence
  ENSG00000148400_27 (sequence is synthesized)
caacggtggcacctgcgtggacggcatcaactcgttcacctgcctgtgtccacccggcttcacgggcagctactgccagcacgatgtcaatgagtgcgactcacagccctgcctgcatgg

SEQ ID NO: 411051 - DNA, 120 bp, Artificial Sequence
  ENSG00000148400_28 (sequence is synthesized)
cggcacctgtcaggacggctgcggctcctacaggtgcacctgcccccagggctacactggccccaactgccagaaccttgtgcactggtgtgactcctcgccctgcaagaacggcggcaa

SEQ ID NO: 411052 - DNA, 120 bp, Artificial Sequence
  ENSG00000148400_29 (sequence is synthesized)
atgctggcagacccacacccagtaccgctgcgagtgccccagcggctggaccggcctttactgcgacgtgcccagcgtgtcctgtgaggtggctgcgcagcgacaaggtgttgacgttgc

SEQ ID NO: 411053 - DNA, 120 bp, Artificial Sequence
  ENSG00000148400_30 (sequence is synthesized)
ccgcctgtgccagcatggagggctctgtgtggacgcgggcaacacgcaccactgccgctgccaggcgggctacacaggcagctactgtgaggacctggtggacgagtgctcacccagccc

SEQ ID NO: 411054 - DNA, 120 bp, Artificial Sequence
  ENSG00000148400_31 (sequence is synthesized)
ctgccagaacggggccacctgcacggactacctgggcggctactcctgcaagtgcgtggccggctaccacggggtgaactgctctgaggagatcgacgagtgcctctcccacccctgcca

SEQ ID NO: 411055 - DNA, 120 bp, Artificial Sequence
  ENSG00000148400_32 (sequence is synthesized)
gaacgggggcacctgcctcgacctccccaacacctacaagtgctcctgcccacggggcactcagggtgtgcactgtgagatcaacgtggacgactgcaatccccccgttgaccccgtgtc

SEQ ID NO: 411056 - DNA, 120 bp, Artificial Sequence
  ENSG00000148400_33 (sequence is synthesized)
ccggagccccaagtgctttaacaacggcacctgcgtggaccaggtgggcggctacagctgcacctgcccgccgggcttcgtgggtgagcgctgtgagggggatgtcaacgagtgcctgtc

SEQ ID NO: 411057 - DNA, 120 bp, Artificial Sequence
  ENSG00000148400_34 (sequence is synthesized)
caatccctgcgacgcccgtggcacccagaactgcgtgcagcgcgtcaatgacttccactgcgagtgccgtgctggtcacaccgggcgccgctgcgagtccgtcatcaatggctgcaaagg

SEQ ID NO: 411058 - DNA, 120 bp, Artificial Sequence
  ENSG00000148400_35 (sequence is synthesized)
caagccctgcaagaatgggggcacctgcgccgtggcctccaacaccgcccgcgggttcatctgcaagtgccctgcgggcttcgagggcgccacgtgtgagaatgacgctcgtacctgcgg

SEQ ID NO: 411059 - DNA, 120 bp, Artificial Sequence
  ENSG00000148400_36 (sequence is synthesized)
cagcctgcgctgcctcaacggcggcacatgcatctccggcccgcgcagccccacctgcctgtgcctgggccccttcacgggccccgaatgccagttcccggccagcagcccctgcctggg

SEQ ID NO: 411060 - DNA, 120 bp, Artificial Sequence
  ENSG00000148400_37 (sequence is synthesized)
cggcaacccctgctacaaccaggggacctgtgagcccacatccgagagccccttctaccgttgcctgtgccccgccaaattcaacgggctcttgtgccacatcctggactacagcttcgg

SEQ ID NO: 411061 - DNA, 120 bp, Artificial Sequence
  ENSG00000148400_38 (sequence is synthesized)
gggtggggccgggcgcgacatccccccgccgctgatcgaggaggcgtgcgagctgcccgagtgccaggaggacgcgggcaacaaggtctgcagcctgcagtgcaacaaccacgcgtgcgg

SEQ ID NO: 411062 - DNA, 120 bp, Artificial Sequence
  ENSG00000148400_39 (sequence is synthesized)
ggccactgtgacagccagtgcaactcagccggctgcctcttcgacggctttgactgccagcgtgcggaaggccagtgcaaccccctgtacgaccagtactgcaaggaccacttcagcgac

SEQ ID NO: 411063 - DNA, 120 bp, Artificial Sequence
  ENSG00000148400_40 (sequence is synthesized)
gggcactgcgaccagggctgcaacagcgcggagtgcgagtgggacgggctggactgtgcggagcatgtacccgagaggctggcggccggcacgctggtggtggtggtgctgatgccgccg

SEQ ID NO: 411064 - DNA, 120 bp, Artificial Sequence
  ENSG00000148400_41 (sequence is synthesized)
gagcagctgcgcaacagctccttccacttcctgcgggagctcagccgcgtgctgcacaccaacgtggtcttcaagcgtgacgcacacggccagcagatgatcttcccctactacggccgc

SEQ ID NO: 411065 - DNA, 120 bp, Artificial Sequence
  ENSG00000148400_42 (sequence is synthesized)
gaggaggagctgcgcaagcaccccatcaagcgtgccgccgagggctgggccgcacctgacgccctgctgggccaggtgaaggcctcgctgctccctggtggcagcgagggtgggcggcgg

SEQ ID NO: 411066 - DNA, 120 bp, Artificial Sequence
  ENSG00000148400_43 (sequence is synthesized)
cggagggagctggaccccatggacgtccgcggctccatcgtctacctggagattgacaaccggcagtgtgtgcaggcctcctcgcagtgcttccagagtgccaccgacgtggccgcattc

SEQ ID NO: 411067 - DNA, 120 bp, Artificial Sequence
  ENSG00000148400_44 (sequence is synthesized)
ctgggagcgctcgcctcgctgggcagcctcaacatcccctacaagatcgaggccgtgcagagtgagaccgtggagccgcccccgccggcgcagctgcacttcatgtacgtggcggcggcc

SEQ ID NO: 411068 - DNA, 120 bp, Artificial Sequence
  ENSG00000148400_45 (sequence is synthesized)
gcctttgtgcttctgttcttcgtgggctgcggggtgctgctgtcccgcaagcgccggcggcagcatggccagctctggttccctgagggcttcaaagtgtctgaggccagcaagaagaag

SEQ ID NO: 411069 - DNA, 120 bp, Artificial Sequence
  ENSG00000148400_46 (sequence is synthesized)
cggcgggagcccctcggcgaggactccgtgggcctcaagcccctgaagaacgcttcagacggtgccctcatggacgacaaccagaatgagtggggggacgaggacctggagaccaagaag

SEQ ID NO: 411070 - DNA, 120 bp, Artificial Sequence
  ENSG00000148400_47 (sequence is synthesized)
ttccggttcgaggagcccgtggttctgcctgacctggacgaccagacagaccaccggcagtggactcagcagcacctggatgccgctgacctgcgcatgtctgccatggcccccacaccg

SEQ ID NO: 411071 - DNA, 120 bp, Artificial Sequence
  ENSG00000148400_48 (sequence is synthesized)
ccccagggtgaggttgacgccgactgcatggacgtcaatgtccgcgggcctgatggcttcaccccgctcatgatcgcctcctgcagcgggggcggcctggagacgggcaacagcgaggaa

SEQ ID NO: 411072 - DNA, 120 bp, Artificial Sequence
  ENSG00000148400_49 (sequence is synthesized)
gaggaggacgcgccggccgtcatctccgacttcatctaccagggcgccagcctgcacaaccagacagaccgcacgggcgagaccgccttgcacctggccgcccgctactcacgctctgat

SEQ ID NO: 411073 - DNA, 120 bp, Artificial Sequence
  ENSG00000148400_50 (sequence is synthesized)
gccgccaagcgcctgctggaggccagcgcagatgccaacatccaggacaacatgggccgcaccccgctgcatgcggctgtgtctgccgacgcacaaggtgtcttccagatcctgatccgg

SEQ ID NO: 411074 - DNA, 120 bp, Artificial Sequence
  ENSG00000148400_51 (sequence is synthesized)
aaccgagccacagacctggatgcccgcatgcatgatggcacgacgccactgatcctggctgcccgcctggccgtggagggcatgctggaggacctcatcaactcacacgccgacgtcaac

SEQ ID NO: 411075 - DNA, 120 bp, Artificial Sequence
  ENSG00000148400_52 (sequence is synthesized)
gccgtagatgacctgggcaagtccgccctgcactgggccgccgccgtgaacaatgtggatgccgcagttgtgctcctgaagaacggggctaacaaagatatgcagaacaacagggaggag

SEQ ID NO: 411076 - DNA, 120 bp, Artificial Sequence
  ENSG00000148400_53 (sequence is synthesized)
acacccctgtttctggccgcccgggagggcagctacgagaccgccaaggtgctgctggaccactttgccaaccgggacatcacggatcatatggaccgcctgccgcgcgacatcgcacag

SEQ ID NO: 411077 - DNA, 120 bp, Artificial Sequence
  ENSG00000148400_54 (sequence is synthesized)
gagcgcatgcatcacgacatcgtgaggctgctggacgagtacaacctggtgcgcagcccgcagctgcacggagccccgctggggggcacgcccaccctgtcgcccccgctctgctcgccc

SEQ ID NO: 411078 - DNA, 120 bp, Artificial Sequence
  ENSG00000148400_55 (sequence is synthesized)
aacggctacctgggcagcctcaagcccggcgtgcagggcaagaaggtccgcaagcccagcagcaaaggcctggcctgtggaagcaaggaggccaaggacctcaaggcacggaggaagaag

SEQ ID NO: 411079 - DNA, 120 bp, Artificial Sequence
  ENSG00000148400_56 (sequence is synthesized)
tcccaggacggcaagggctgcctgctggacagctccggcatgctctcgcccgtggactccctggagtcaccccatggctacctgtcagacgtggcctcgccgccactgctgccctccccg

SEQ ID NO: 411080 - DNA, 120 bp, Artificial Sequence
  ENSG00000148400_57 (sequence is synthesized)
ttccagcagtctccgtccgtgcccctcaaccacctgcctgggatgcccgacacccacctgggcatcgggcacctgaacgtggcggccaagcccgagatggcggcgctgggtgggggcggc

SEQ ID NO: 411081 - DNA, 120 bp, Artificial Sequence
  ENSG00000148400_58 (sequence is synthesized)
cggctggcctttgagactggcccacctcgtctctcccacctgcctgtggcctctggcaccagcaccgtcctgggctccagcagcggaggggccctgaatttcactgtgggcgggtccacc

SEQ ID NO: 411082 - DNA, 120 bp, Artificial Sequence
  ENSG00000148400_59 (sequence is synthesized)
agtttgaatggtcaatgcgagtggctgtcccggctgcagagcggcatggtgccgaaccaatacaaccctctgcgggggagtgtggcaccaggccccctgagcacacaggccccctccctg

SEQ ID NO: 411083 - DNA, 120 bp, Artificial Sequence
  ENSG00000148400_60 (sequence is synthesized)
cagcatggcatggtaggcccgctgcacagtagccttgctgccagcgccctgtcccagatgatgagctaccagggcctgcccagcacccggctggccacccagcctcacctggtgcagacc

SEQ ID NO: 411084 - DNA, 120 bp, Artificial Sequence
  ENSG00000148400_61 (sequence is synthesized)
cagcaggtgcagccacaaaacttacagatgcagcagcagaacctgcagccagcaaacatccagcagcagcaaagcctgcagccgccaccaccaccaccacagccgcaccttggcgtgagc

SEQ ID NO: 411085 - DNA, 120 bp, Artificial Sequence
  ENSG00000148400_62 (sequence is synthesized)
tcagcagccagcggccacctgggccggagcttcctgagtggagagccgagccaggcagacgtgcagccactgggccccagcagcctggcggtgcacactattctgccccaggagagcccc

SEQ ID NO: 411086 - DNA, 120 bp, Artificial Sequence
  ENSG00000148400_63 (sequence is synthesized)
gccctgcccacgtcgctgccatcctcgctggtcccacccgtgaccgcagcccagttcctgacgcccccctcgcagcacagctactcctcgcctgtggacaacacccccagccaccagcta

SEQ ID NO: 411087 - DNA, 120 bp, Artificial Sequence
  ENSG00000148400_64 (sequence is synthesized)
caggtgcctgagcaccccttcctcaccccgtcccctgagtcccctgaccagtggtccagctcgtccccgcattccaacgtctccgactggtccgagggcgtctccagccctcccaccagc

SEQ ID NO: 411088 - DNA, 120 bp, Artificial Sequence
  ENSG00000148400_65 (sequence is synthesized)
atgcagtcccagatcgcccgcattccggaggccttcaagtaaacggcgcgccccacgagaccccggcttcctttcccaagccttcgggcgtctgtgtgcgctctgtggatgccagggccg

SEQ ID NO: 411089 - DNA, 120 bp, Artificial Sequence
  ENSG00000148400_66 (sequence is synthesized)
accagaggagcctttttaaaacacatgtttttatacaaaataagaacgaggattttaattttttttagtatttatttatgtacttttattttacacagaaacactgcctttttatttata

SEQ ID NO: 411090 - DNA, 120 bp, Artificial Sequence
  ENSG00000148400_67 (sequence is synthesized)
tgtactgttttatctggccccaggtagaaacttttatctattctgagaaaacaagcaagttctgagagccagggttttcctacgtaggatgaaaagattcttctgtgtttataaaatata

SEQ ID NO: 411091 - DNA, 120 bp, Artificial Sequence
  ENSG00000148400_68 (sequence is synthesized)
aacaaagattcatgatttataaatgccatttatttattgattccttttttcaaaatccaaaaagaaatgatgttggagaagggaagttgaacgagcatagtccaaaaagctcctggggcg

SEQ ID NO: 411092 - DNA, 120 bp, Artificial Sequence
  ENSG00000148400_69 (sequence is synthesized)
tccaggccgcgccctttccccgacgcccacccaaccccaagccagcccggccgctccaccagcatcacctgcctgttaggagaagctgcatccagaggcaaacggaggcaaagctggctc

SEQ ID NO: 411093 - DNA, 120 bp, Artificial Sequence
  ENSG00000148400_70 (sequence is synthesized)
accttccgcacgcggattaatttgcatctgaaataggaaacaagtgaaagcatatgggttagatgttgccatgtgttttagatggtttcttgcaagcatgcttgtgaaaatgtgttctcg

SEQ ID NO: 411094 - DNA, 120 bp, Artificial Sequence
  ENSG00000148400_71 (sequence is synthesized)
gagtgtgtatgccaagagtgcacccatggtaccaatcatgaatctttgtttcaggttcagtattatgtagttgttcgttggttatacaagttcttggtccctccagaaccaccccggccc

SEQ ID NO: 411095 - DNA, 120 bp, Artificial Sequence
  ENSG00000148400_72 (sequence is synthesized)
cctgcccgttcttgaaatgtaggcatcatgcatgtcaaacatgagatgtgtggactgtggcacttgcctgggtcacacacggaggcatcctacccttttctggggaaagacactgcctgg

SEQ ID NO: 411096 - DNA, 120 bp, Artificial Sequence
  ENSG00000148400_73 (sequence is synthesized)
gctgaccccggtggcggccccagcacctcagcctgcacagtgtcccccaggttccgaagaagatgctccagcaacacagcctgggccccagctcgcgggacccgaccccccgtgggctcc

SEQ ID NO: 411097 - DNA, 120 bp, Artificial Sequence
  ENSG00000148400_74 (sequence is synthesized)
cgtgttttgtaggagacttgccagagccgggcacattgagctgtgcaacgccgtgggctgcgtcctttggtcctgtccccgcagccctggcagggggcatgcggtcgggcaggggctgga

SEQ ID NO: 411098 - DNA, 120 bp, Artificial Sequence
  ENSG00000148400_75 (sequence is synthesized)
gggaggcgggggctgcccttgggccacccctcctagtttgggaggagcagatttttgcaataccaagtatagcctatggcagaaaaaatgtctgtaaatatgtttttaaaggtggatttt

SEQ ID NO: 411099 - DNA, 120 bp, Artificial Sequence
  ENSG00000148400_76 (sequence is synthesized)
gtttaaaaaatcttaatgaatgagtctgttgtgtgtcatgccagtgagggacgtcagacttggctcagctcggggagccttagccgcccatgcactggggacgctccgctgccgtgccgc

SEQ ID NO: 411100 - DNA, 120 bp, Artificial Sequence
  ENSG00000148400_77 (sequence is synthesized)
ctgcactcctcagggcagcctcccccggctctacgggggccgcgtggtgccatccccagggggcatgaccagatgcgtcccaagatgttgatttttactgtgttttataaaatagagtgt

SEQ ID NO: 411101 - DNA, 120 bp, Artificial Sequence
  ENSG00000148400_78 (sequence is synthesized)
agtttacagaaaaagactttaaaagtgatctacatgaggaactgtagatgatgtatttttttcatcttttttgttaactgatttgcaataaaaatgatactgatggtgatctggcttcca

SEQ ID NO: 411102 - DNA, 120 bp, Artificial Sequence
  ENSG00000148400_79 (sequence is synthesized)
cctcctccaggaagctctcaggcctcagttcccccgggcagggttggtgcgcatggtgctggccataagcacccagggaggccggagtgtggccggggagggttgggtcaggtgtggggg

SEQ ID NO: 411103 - DNA, 120 bp, Artificial Sequence
  ENSG00000148400_80 (sequence is synthesized)
aggctctgcctgcagggggtgccatccccccgtgccccagacacgctggctgtttgtgccagttgctacccacgggtgtgagcgttgccgtccgagttggggtagggcttttctggaatt

SEQ ID NO: 411104 - DNA, 120 bp, Artificial Sequence
  ENSG00000148400_81 (sequence is synthesized)
ttctgaatggcactccgcccccacctgcggcggtcacagctgccggtggagccacctgggaacgagtccagccacgggaaagtgggtgcctgcttctctccccaccctttcctcctgaat

SEQ ID NO: 411105 - DNA, 120 bp, Artificial Sequence
  ENSG00000148400_82 (sequence is synthesized)
tttctttgttgggtattatttcaaaatcattacggctttttttaaagaaaaaaaaagagagagagagaagaattgatcggtgtcatgtgaagtgttgaagtttgtatcttgaaaatccct

SEQ ID NO: 411106 - DNA, 120 bp, Artificial Sequence
  ENSG00000148400_83 (sequence is synthesized)
ctaaatcctttgtcttaacagctcagtgcgagtgcagcgatttgaagttgactaatcctccttccttaaaggagaaaaaagtaaaagccgtctccagatagagtcggctggtgcaggaga

SEQ ID NO: 411107 - DNA, 120 bp, Artificial Sequence
  ENSG00000148400_84 (sequence is synthesized)
gaatttagcgatagtttgcaattctgattaatcgcgtagaaaatgaccttattttggagggcgggatggaggagagtgggtgaggaggcgcccggacgcggagccagtccgccgcccccc

SEQ ID NO: 411108 - DNA, 120 bp, Artificial Sequence
  ENSG00000148400_85 (sequence is synthesized)
ggccaccagcctgctgcgtagccgctgcctgatgtccgggcacctgcccctggcccccgtgcccgcaggtgagaccgtggagccgcccccgccggcgcagctgcacttcatgtacgtggc

SEQ ID NO: 411109 - DNA, 120 bp, Artificial Sequence
  ENSG00000148400_86 (sequence is synthesized)
cacgagtgtgcctgcctgccaggtagtgctgcccgctggccggggtgcacgagcccctccccggctgccaggcccagggggtgggaacggggcgcctggtgtaggggcagccctgggagg

SEQ ID NO: 411110 - DNA, 120 bp, Artificial Sequence
  ENSG00000148400_87 (sequence is synthesized)
atggcggggagttgggaaggcgggatggcgagttccccagactgcgtgtggtgtcggggggacgcgtctggagcggggtgtgcgctgggaggaggcttgcacagggtccaggtgccagcc

SEQ ID NO: 411111 - DNA, 80 bp, Artificial Sequence
  ENSG00000148408_0 (sequence is synthesized)
cgaggtccgctgcggtcccggcggctccgtggctgctccgctctgagcgcctggcgcgccccgcgccctccctgccgggg

SEQ ID NO: 411112 - DNA, 80 bp, Artificial Sequence
  ENSG00000148408_1 (sequence is synthesized)
ccgctgggccggggatgcacgcggggcccgggagccatggtccgcttcggggacgagctgggcggccgctatgggggccc

SEQ ID NO: 411113 - DNA, 120 bp, Artificial Sequence
  ENSG00000148408_2 (sequence is synthesized)
ggggcccgggtcccggggggctgcagcccggccagcgggtcctctacaagcaatcgatcgcgcagcgcgcgcggaccatggcgctgtacaaccccatcccggtcaagcagaactgcttca

SEQ ID NO: 411114 - DNA, 120 bp, Artificial Sequence
  ENSG00000148408_3 (sequence is synthesized)
ccgtcaaccgctcgctcttcgtcttcagcgaggacaacgtcgtccgcaaatacgcgaagcgcatcaccgagtggcctccattcgagtatatgatcctggccaccatcatcgccaactgca

SEQ ID NO: 411115 - DNA, 120 bp, Artificial Sequence
  ENSG00000148408_4 (sequence is synthesized)
tcgtgctggccctggagcagcacctccctgatggggacaaaacgcccatgtccgagcggctggacgacacggagccctatttcatcgggatcttttgcttcgaggcagggatcaaaatca

SEQ ID NO: 411116 - DNA, 120 bp, Artificial Sequence
  ENSG00000148408_5 (sequence is synthesized)
tcgctctgggctttgtcttccacaagggctcttacctgcggaacggctggaacgtcatggacttcgtggtcgtcctcacagggatccttgccacggctggaactgacttcgacctgcgaa

SEQ ID NO: 411117 - DNA, 120 bp, Artificial Sequence
  ENSG00000148408_6 (sequence is synthesized)
cactgagggctgtgcgtgtgctgaggcccctgaagctggtgtctgggattccaagtttgcaggtggtgctcaagtccatcatgaaggccatggttccactcctgcagattgggctgcttc

SEQ ID NO: 411118 - DNA, 120 bp, Artificial Sequence
  ENSG00000148408_7 (sequence is synthesized)
tcttctttgccatcctcatgtttgccatcattggcctggagttctacatgggcaagttccacaaggcctgtttccccaacagcacagatgcggagcccgtgggtgacttcccctgtggca

SEQ ID NO: 411119 - DNA, 120 bp, Artificial Sequence
  ENSG00000148408_8 (sequence is synthesized)
aggaggccccagcccggctgtgcgagggcgacactgagtgccgggagtactggccaggacccaactttggcatcaccaactttgacaatatcctgtttgccatcttgacggtgttccagt

SEQ ID NO: 411120 - DNA, 120 bp, Artificial Sequence
  ENSG00000148408_9 (sequence is synthesized)
gcatcaccatggagggctggactgacatcctctataatacaaacgatgcggccggcaacacctggaactggctctacttcatccctctcatcatcatcggctccttcttcatgctcaacc

SEQ ID NO: 411121 - DNA, 120 bp, Artificial Sequence
  ENSG00000148408_10 (sequence is synthesized)
tggtgctgggcgtgctctcgggggagtttgccaaggagcgagagagggtggagaaccgccgcgccttcctgaagctgcgccggcagcagcagatcgagcgagagctcaacgggtacctgg

SEQ ID NO: 411122 - DNA, 120 bp, Artificial Sequence
  ENSG00000148408_11 (sequence is synthesized)
agtggatcttcaaggcggaggaagtcatgctggccgaggaggacaggaatgcagaggagaagtcccctttggacgtgctgaagagagcggccaccaagaagagcagaaatgacctgatcc

SEQ ID NO: 411123 - DNA, 120 bp, Artificial Sequence
  ENSG00000148408_12 (sequence is synthesized)
acgcagaggagggagaggaccggtttgcagatctctgtgctgttggatcccccttcgcccgcgccagcctcaagagcgggaagacagagagctcgtcatacttccggaggaaggagaaga

SEQ ID NO: 411124 - DNA, 120 bp, Artificial Sequence
  ENSG00000148408_13 (sequence is synthesized)
tgttccggttttttatccggcgcatggtgaaggctcagagcttctactgggtggtgctgtgcgtggtggccctgaacacactgtgtgtggccatggtgcattacaaccagccgcggcggc

SEQ ID NO: 411125 - DNA, 120 bp, Artificial Sequence
  ENSG00000148408_14 (sequence is synthesized)
ttaccacgaccctgtattttgcagagtttgttttcctgggtctcttcctcacagagatgtccctgaagatgtatggcctggggcccagaagctacttccggtcctccttcaactgcttcg

SEQ ID NO: 411126 - DNA, 120 bp, Artificial Sequence
  ENSG00000148408_15 (sequence is synthesized)
actttggggtcatcgtggggagcgtctttgaagtggtctgggcggccatcaagccgggaagctcctttgggatcagtgtgctgcgggccctccgcctgctgaggatcttcaaagtcacga

SEQ ID NO: 411127 - DNA, 120 bp, Artificial Sequence
  ENSG00000148408_16 (sequence is synthesized)
agtactggagctccctgcggaacctggtggtgtccctgctgaactccatgaagtccatcatcagcctgctcttcttgctcttcctgttcattgtggtcttcgccctgctggggatgcagc

SEQ ID NO: 411128 - DNA, 120 bp, Artificial Sequence
  ENSG00000148408_17 (sequence is synthesized)
tgtttgggggacagttcaacttccaggatgagactcccacaaccaacttcgacaccttccctgccgccatcctcactgtcttccagatcctgacgggagaggactggaatgcagtgatgt

SEQ ID NO: 411129 - DNA, 120 bp, Artificial Sequence
  ENSG00000148408_18 (sequence is synthesized)
atcacgggatcgaatcgcaaggcggcgtcagcaaaggcatgttctcgtccttttacttcattgtcctgacactgttcggaaactacactctgctgaatgtctttctggccatcgctgtgg

SEQ ID NO: 411130 - DNA, 120 bp, Artificial Sequence
  ENSG00000148408_19 (sequence is synthesized)
acaacctggccaacgcccaagagctgaccaaggatgaagaggagatggaagaagcagccaatcagaagcttgctctgcaaaaggccaaagaagtggctgaagtcagccccatgtctgccg

SEQ ID NO: 411131 - DNA, 120 bp, Artificial Sequence
  ENSG00000148408_20 (sequence is synthesized)
cgaacatctccatcgccgccaggcagcagaactcggccaaggcgcgctcggtgtgggagcagcgggccagccagctacggctgcagaacctgcgggccagctgcgaggcgctgtacagcg

SEQ ID NO: 411132 - DNA, 120 bp, Artificial Sequence
  ENSG00000148408_21 (sequence is synthesized)
agatggaccccgaggagcggctgcgcttcgccactacgcgccacctgcggcccgacatgaagacgcacctggaccggccgctggtggtggagctgggccgcgacggcgcgcgggggcccg

SEQ ID NO: 411133 - DNA, 120 bp, Artificial Sequence
  ENSG00000148408_22 (sequence is synthesized)
tgggaggcaaagcccgacctgaggctgcggaggcccccgagggcgtcgaccctccgcgcaggcaccaccggcaccgcgacaaggacaagacccccgcggcgggggaccaggaccgagcag

SEQ ID NO: 411134 - DNA, 80 bp, Artificial Sequence
  ENSG00000148408_23 (sequence is synthesized)
aggccccgaaggcggagagcggggagcccggtgcccgggaggagcggccgcggccgcaccgcagccacagcaaggaggcc

SEQ ID NO: 411135 - DNA, 80 bp, Artificial Sequence
  ENSG00000148408_24 (sequence is synthesized)
cccggaggaggcggccgagcgggagccccgacgccaccgcgcgcaccggcaccaggatccgagcaaggagtgcgccggcg

SEQ ID NO: 411136 - DNA, 120 bp, Artificial Sequence
  ENSG00000148408_25 (sequence is synthesized)
ggcccccgagcggggccccgggaggcggagagcggggaggagccggcgcggcggcaccgggcccggcacaaggcgcagcctgctcacgaggctgtggagaaggagaccacggagaaggag

SEQ ID NO: 411137 - DNA, 120 bp, Artificial Sequence
  ENSG00000148408_26 (sequence is synthesized)
aggctgtggagaaggagaccacggagaaggaggccacggagaaggaggctgagatagtggaagccgacaaggaaaaggagctccggaaccaccagccccgggagccacactgtgacctgg

SEQ ID NO: 411138 - DNA, 120 bp, Artificial Sequence
  ENSG00000148408_27 (sequence is synthesized)
agaccagtgggactgtgactgtgggtcccatgcacacactgcccagcacctgtctccagaaggtggaggaacagccagaggatgcagacaatcagcggaacgtcactcgcatgggcagtc

SEQ ID NO: 411139 - DNA, 120 bp, Artificial Sequence
  ENSG00000148408_28 (sequence is synthesized)
agcccccagacccgaacactattgtacatatcccagtgatgctgacgggccctcttggggaagccacggtcgttcccagtggtaacgtggacctggaaagccaagcagaggggaagaagg

SEQ ID NO: 411140 - DNA, 120 bp, Artificial Sequence
  ENSG00000148408_29 (sequence is synthesized)
aggtggaagcggatgacgtgatgaggagcggcccccggcctatcgtcccatacagctccatgttctgtttaagccccaccaacctgctccgccgcttctgccactacatcgtgaccatga

SEQ ID NO: 411141 - DNA, 120 bp, Artificial Sequence
  ENSG00000148408_30 (sequence is synthesized)
ggtacttcgaggtggtcattctcgtggtcatcgccttgagcagcatcgccctggctgctgaggacccagtgcgcacagactcgcccaggaacaacgctctgaaatacctggattacattt

SEQ ID NO: 411142 - DNA, 120 bp, Artificial Sequence
  ENSG00000148408_31 (sequence is synthesized)
tcactggtgtctttacctttgagatggtgataaagatgatcgacttgggactgctgcttcaccctggagcctatttccgggacttgtggaacattctggacttcattgtggtcagtggcg

SEQ ID NO: 411143 - DNA, 120 bp, Artificial Sequence
  ENSG00000148408_32 (sequence is synthesized)
ccctggtggcgtttgctttctcaggatccaaagggaaagacatcaataccatcaagtctctgagagtccttcgtgtcctgcggcccctcaagaccatcaaacggctgcccaagctcaagg

SEQ ID NO: 411144 - DNA, 120 bp, Artificial Sequence
  ENSG00000148408_33 (sequence is synthesized)
ctgtgtttgactgtgtggtgaactccctgaagaatgtcctcaacatcttgattgtctacatgctcttcatgttcatatttgccgtcattgcggtgcagctcttcaaagggaagtttttct

SEQ ID NO: 411145 - DNA, 120 bp, Artificial Sequence
  ENSG00000148408_34 (sequence is synthesized)
actgcacagatgaatccaaggagctggagagggactgcaggggtcagtatttggattatgagaaggaggaagtggaagctcagcccaggcagtggaagaaatacgactttcactacgaca

SEQ ID NO: 411146 - DNA, 120 bp, Artificial Sequence
  ENSG00000148408_35 (sequence is synthesized)
atgtgctctgggctctgctgacgctgttcacagtgtccacgggagaaggctggcccatggtgctgaaacactccgtggatgccacctatgaggagcagggtccaagccctgggtaccgca

SEQ ID NO: 411147 - DNA, 120 bp, Artificial Sequence
  ENSG00000148408_36 (sequence is synthesized)
tggagctgtccatcttctacgtggtctactttgtggtctttcccttcttcttcgtcaacatctttgtggctttgatcatcatcaccttccaggagcagggggacaaggtgatgtctgaat

SEQ ID NO: 411148 - DNA, 120 bp, Artificial Sequence
  ENSG00000148408_37 (sequence is synthesized)
gcagcctggagaagaacgagagggcttgcattgacttcgccatcagcgccaaacccctgacacggtacatgccccaaaaccggcagtcgttccagtataagacgtggacatttgtggtct

SEQ ID NO: 411149 - DNA, 120 bp, Artificial Sequence
  ENSG00000148408_38 (sequence is synthesized)
ccccgccctttgaatacttcatcatggccatgatagccctcaacactgtggtgctgatgatgaagttctatgatgcaccctatgagtacgagctgatgctgaaatgcctgaacatcgtgt

SEQ ID NO: 411150 - DNA, 120 bp, Artificial Sequence
  ENSG00000148408_39 (sequence is synthesized)
tcacatccatgttctccatggaatgcgtgctgaagatcatcgcctttggggtgctgaactatttcagagatgcctggaatgtctttgactttgtcactgtgttgggaagtattactgata

SEQ ID NO: 411151 - DNA, 120 bp, Artificial Sequence
  ENSG00000148408_40 (sequence is synthesized)
ggctgatcaagctgctccgccagggctacaccatccgcatcctgctgtggacctttgtccagtccttcaaggccctgccctacgtgtgtctgctcattgccatgctgttcttcatctacg

SEQ ID NO: 411152 - DNA, 120 bp, Artificial Sequence
  ENSG00000148408_41 (sequence is synthesized)
ccatcatcggcatgcaggtgtttgggaatattgccctggatgatgacaccagcatcaaccgccacaacaacttccggacgtttttgcaagccctgatgctgctgttcaggagcgccacgg

SEQ ID NO: 411153 - DNA, 120 bp, Artificial Sequence
  ENSG00000148408_42 (sequence is synthesized)
gggaggcctggcacgagatcatgctgtcctgcctgagcaaccaggcctgtgatgagcaggccaatgccaccgagtgtggaagtgactttgcctacttctacttcgtctccttcatcttcc

SEQ ID NO: 411154 - DNA, 120 bp, Artificial Sequence
  ENSG00000148408_43 (sequence is synthesized)
tgtgctcctttctgatgttgaacctctttgtggctgtgatcatggacaattttgagtacctcacgcgggactcttccatcctaggtcctcaccacttggatgagttcatccgggtctggg

SEQ ID NO: 411155 - DNA, 120 bp, Artificial Sequence
  ENSG00000148408_44 (sequence is synthesized)
ctgaatacgacccggctgcgtgtgggcgcatcagttacaatgacatgtttgagatgctgaaacacatgtccccgcctctggggctggggaagaaatgccctgctcgagttgcttacaagc

SEQ ID NO: 411156 - DNA, 120 bp, Artificial Sequence
  ENSG00000148408_45 (sequence is synthesized)
gcctggttcgcatgaacatgcccatctccaacgaggacatgactgttcacttcacgtccacgctgatggccctcatccggacggcactggagatcaagctggccccagctgggacaaagc

SEQ ID NO: 411157 - DNA, 120 bp, Artificial Sequence
  ENSG00000148408_46 (sequence is synthesized)
agcatcagtgtgacgcggagttgaggaaggagatttccgttgtgtgggccaatctgccccagaagactttggacttgctggtaccaccccataagcctgatgagatgacagtggggaagg

SEQ ID NO: 411158 - DNA, 120 bp, Artificial Sequence
  ENSG00000148408_47 (sequence is synthesized)
tttatgcagctctgatgatattcgacttctacaagcagaacaaaaccaccagagaccagatgcagcaggctcctggaggcctctcccagatgggtcctgtgtccctgttccaccctctga

SEQ ID NO: 411159 - DNA, 120 bp, Artificial Sequence
  ENSG00000148408_48 (sequence is synthesized)
aggccaccctggagcagacacagccggctgtgctccgaggagcccgggttttccttcgacagaagagttccacctccctcagcaatggcggggccatacaaaaccaagagagtggcatca

SEQ ID NO: 411160 - DNA, 120 bp, Artificial Sequence
  ENSG00000148408_49 (sequence is synthesized)
aagagtctgtctcctggggcactcaaaggacccaggatgcaccccatgaggccaggccacccctggagcgtggccactccacagagatccctgtggggcggtcaggagcactggctgtgg

SEQ ID NO: 411161 - DNA, 120 bp, Artificial Sequence
  ENSG00000148408_50 (sequence is synthesized)
acgttcagatgcagagcataacccggaggggccctgatggggagccccagcctgggctggagagccagggtcgagcggcctccatgccccgccttgcggccgagactcagcccgtcacag

SEQ ID NO: 411162 - DNA, 120 bp, Artificial Sequence
  ENSG00000148408_51 (sequence is synthesized)
atgccagccccatgaagcgctccatctccacgctggcccagcggccccgtgggactcatctttgcagcaccaccccggaccgcccaccccctagccaggcgtcgtcgcaccaccaccacc

SEQ ID NO: 411163 - DNA, 120 bp, Artificial Sequence
  ENSG00000148408_52 (sequence is synthesized)
accgctgccaccgccgcagggacaggaagcagaggtccctggagaaggggcccagcctgtctgccgatatggatggcgcaccaagcagtgctgtggggccggggctgcccccgggagagg

SEQ ID NO: 411164 - DNA, 120 bp, Artificial Sequence
  ENSG00000148408_53 (sequence is synthesized)
ggcctacaggctgccggcgggaacgagagcgccggcaggagcggggccggtcccaggagcggaggcagccctcatcctcctcctcggagaagcagcgcttctactcctgcgaccgctttg

SEQ ID NO: 411165 - DNA, 120 bp, Artificial Sequence
  ENSG00000148408_54 (sequence is synthesized)
ggggccgtgagcccccgaagcccaagccctccctcagcagccacccaacgtcgccaacagctggccaggagccgggaccccacccacagggcagtggttccgtgaatgggagccccttgc

SEQ ID NO: 411166 - DNA, 120 bp, Artificial Sequence
  ENSG00000148408_55 (sequence is synthesized)
tgtcaacatctggtgctagcacccccggccgcggtgggcggaggcagctcccccagacgcccctgactccccgccccagcatcacctacaagacggccaactcctcacccatccacttcg

SEQ ID NO: 411167 - DNA, 120 bp, Artificial Sequence
  ENSG00000148408_56 (sequence is synthesized)
ccggggctcagaccagcctccctgccttctccccaggccggctcagccgtgggctttccgaacacaacgccctgctgcagagagaccccctcagccagcccctggcccctggctctcgaa

SEQ ID NO: 411168 - DNA, 120 bp, Artificial Sequence
  ENSG00000148408_57 (sequence is synthesized)
ttggctctgacccttacctggggcagcgtctggacagtgaggcctctgtccacgccctgcctgaggacactctcactttcgaggaggctgtggccaccaactcgggccgctcctccagga

SEQ ID NO: 411169 - DNA, 120 bp, Artificial Sequence
  ENSG00000148408_58 (sequence is synthesized)
cttcctacgtgtcctccctgacctcccagtctcaccctctccgccgcgtgcccaacggttaccactgcaccctgggactcagctcgggtggccgagcacggcacagctaccaccaccctg

SEQ ID NO: 411170 - DNA, 120 bp, Artificial Sequence
  ENSG00000148408_59 (sequence is synthesized)
accaagaccactggtgctagctgcaccgtgaccgctcagacgcctgcatgcagcaggcgtgtgttccagtggatgagttttatcatccacacggggcagccggccctcgggggaggcctt

SEQ ID NO: 411171 - DNA, 120 bp, Artificial Sequence
  ENSG00000148408_60 (sequence is synthesized)
gcccaccttggtgaggctcctgtggcccctccctccccctcctcccctcttttactctagacgacgaataaagccctgttagaggatgcggctctctctgtccccttcctgtcctgcctt

SEQ ID NO: 411172 - DNA, 120 bp, Artificial Sequence
  ENSG00000148408_61 (sequence is synthesized)
cctgggtctcgtaccacacaccagaccctaaaccgcaggctgctgtgtgtggctgagaaggacccaggagtccaaatcccgtgtcctgggactcagcatccagcatgggtgcttggagcc

SEQ ID NO: 411173 - DNA, 120 bp, Artificial Sequence
  ENSG00000148408_62 (sequence is synthesized)
gttgtgaggagctctgcgtcctgtggggagcacccttcacgtggccgtgcggcacagagaagcagggcccacctgaaagtgcgccgagacctcgggacggaggggatggggagggggaca

SEQ ID NO: 411174 - DNA, 120 bp, Artificial Sequence
  ENSG00000148408_63 (sequence is synthesized)
cagtcgtggcttgtgcagcccgccagtgtcagcgaatgctcactcaggcaagctctgtcctccctggacaccgtcagccccacaggaaccgagctgggaagtgttcttgctgtggttgtg

SEQ ID NO: 411175 - DNA, 120 bp, Artificial Sequence
  ENSG00000148408_64 (sequence is synthesized)
atttttaattgcaacacctctcattcttgtcacttctatatacgtgatgtagaaaaaatggaaaaccagaaaaatggggaaggaaatgttcacataactttaaaaaatcaaacctgtgaa

SEQ ID NO: 411176 - DNA, 120 bp, Artificial Sequence
  ENSG00000148408_65 (sequence is synthesized)
agaaagatgtcagctttttgccacgtgtctttgtggcttatgcgaggagactccctgtgcagccctgtccggtccaggtggacgtagacggcccctggctctgctgctcttgaccaagtg

SEQ ID NO: 411177 - DNA, 120 bp, Artificial Sequence
  ENSG00000148408_66 (sequence is synthesized)
cctgaccgccaggccctcacacccaggctcctgggcactgtggtgtgaggcgaggcctcgggatccatcaccgcaggatgctgtgaaaagtactcgcgatggcagccaggtagcaagccc

SEQ ID NO: 411178 - DNA, 120 bp, Artificial Sequence
  ENSG00000148408_67 (sequence is synthesized)
ttgccagtggagagcactggatgtcatggtggcaaacaaggcagccatttgctgtcctcctcccacgagtggaaggggtttccaaggaagccacagggcagctgaccacgtgcttgtgtg

SEQ ID NO: 411179 - DNA, 120 bp, Artificial Sequence
  ENSG00000148408_68 (sequence is synthesized)
aggcattttcagtctgttctgcatatgattctcagggcacactctgtggtatgtgaaataggtttccttccacatacagcagaagagaggcaaaggctggtaggaaggaggaagacattg

SEQ ID NO: 411180 - DNA, 120 bp, Artificial Sequence
  ENSG00000148408_69 (sequence is synthesized)
gctgggggcttggatgtggggccgtcagggcaggagggaggaagccccagctggaatgaaactcagagcaagtgaccgagggaggacacggctcctgccactgaggccgggcacctgatg

SEQ ID NO: 411181 - DNA, 120 bp, Artificial Sequence
  ENSG00000148408_70 (sequence is synthesized)
cccagcactgtcctggcgccagacacagggagcaggcagtcaagtgaggtctgacccccatggccacgctcaggagagaaagaccatgctcaggacactgtccaaggtgcacaagatgct

SEQ ID NO: 411182 - DNA, 120 bp, Artificial Sequence
  ENSG00000148408_71 (sequence is synthesized)
gggaggtcccttgtttggtgaagaaagggagcatttagagcagttgatggtggtgtgtcctccgtgttctgaaattccagatgatctgtgttggattcttggcttctaccccatgattct

SEQ ID NO: 411183 - DNA, 120 bp, Artificial Sequence
  ENSG00000148408_72 (sequence is synthesized)
gtgtgtgtgtgtgtgtgtgtgtctgtgtcacaggagatgcagtgcctgtacaggtgtgttcagtgtgtggatgtcattaacccatagggctatgcaacaaaagacacatttaatagaagt

SEQ ID NO: 411184 - DNA, 120 bp, Artificial Sequence
  ENSG00000148408_73 (sequence is synthesized)
tgcaacaaaagacacatttaatagaagtaaaacacacaagaccgctgcctggtctcggggttcagcatgattgtgaccaaacctttttatagaatttccttacctgaaggcacaacactc

SEQ ID NO: 411185 - DNA, 120 bp, Artificial Sequence
  ENSG00000148408_74 (sequence is synthesized)
tgaaactttaaagataacagagtattttattccaatagaataaaccaggaatctcggactgtgcatgtgatcactgtgctcctgttgcaaagtagaaggatgtgtattttgacactgacg

SEQ ID NO: 411186 - DNA, 120 bp, Artificial Sequence
  ENSG00000148408_75 (sequence is synthesized)
ttttgtctcttgttccccagcccccagcccatgttatcttgggtgtcgaatgtgtccattccatgcagaaccacagccatttccccaggcagtgttgggtcgagaatccacttttctaaa

SEQ ID NO: 411187 - DNA, 120 bp, Artificial Sequence
  ENSG00000148408_76 (sequence is synthesized)
cccacacagcctagctggcttgtctagactcttctaggcattggaattgatgaaaactacagggagcggggaaaggagacattatgtcttgttttcctgactttgggttttgtttctcac

SEQ ID NO: 411188 - DNA, 120 bp, Artificial Sequence
  ENSG00000148408_77 (sequence is synthesized)
tgtgtcttctccggctatcatatatgtcccctgaatctcatagtgagctgccaaatttgaagtgcatcacccagttgtctgcatctggaaccagtcaagcagtggctgtagtttgaacaa

SEQ ID NO: 411189 - DNA, 120 bp, Artificial Sequence
  ENSG00000148408_78 (sequence is synthesized)
ttgaacaagttatgtgtgcatgtaacatatatacatatatacatatatacaagtatgtgcatgataatgtatatcttcgtactttttgatacaatgtattcatttgttaatttttaatta

SEQ ID NO: 411190 - DNA, 120 bp, Artificial Sequence
  ENSG00000148408_79 (sequence is synthesized)
ataaatcaaaggtttgttgcaaaactttatatttaagaagtgttaaaaaaaaaaaaaagtcccaaccatgcaacacaactgggacctacttaaaaagaaattctgtgattgactagtttg

SEQ ID NO: 411191 - DNA, 120 bp, Artificial Sequence
  ENSG00000148408_80 (sequence is synthesized)
ctgcctgagtcatatttatcagccaaactttggattctgctgttgtttctacaatgacattttgtatgaagcaaagtccttgaattaaaataaaaacttagcaaaaaatcaaaaacaaaa

SEQ ID NO: 411192 - DNA, 120 bp, Artificial Sequence
  ENSG00000148408_81 (sequence is synthesized)
tggcttagggaagaactgccctcgtaggttggcctacaagcgcctggttcgcatgaacatgcccatctccaacgaggacatgactgttcacttcacgtccacgctgatggccctcatccg

SEQ ID NO: 411193 - DNA, 80 bp, Artificial Sequence
  ENSG00000148411_0 (sequence is synthesized)
ggagaaagtccatgggagccggagcgccgggacgccaagcacttcctgccgcgggcggcgcgccgcagctgcccaggccg

SEQ ID NO: 411194 - DNA, 120 bp, Artificial Sequence
  ENSG00000148411_1 (sequence is synthesized)
ccccgcgctgagagcccagccccgccgctgcccgcccgccatgtctcagatgctgcacatcgagatccccaacttcgggaacacagtgctgggctgcctgaacgagcagcgcctgctggg

SEQ ID NO: 411195 - DNA, 120 bp, Artificial Sequence
  ENSG00000148411_2 (sequence is synthesized)
cctctactgcgatgtgtccatcgtggtcaagggccaggccttcaaggcccaccgggcggtgctggccgccagcagcctctacttccgcgacctgttcagcggcaacagcaagagcgcctt

SEQ ID NO: 411196 - DNA, 120 bp, Artificial Sequence
  ENSG00000148411_3 (sequence is synthesized)
cgagctgcccggctccgtgccgcccgcctgcttccagcagatcctgtccttctgctacacgggcaggctcaccatgacggccagcgagcagctcgtggtcatgtacacggccggcttcct

SEQ ID NO: 411197 - DNA, 120 bp, Artificial Sequence
  ENSG00000148411_4 (sequence is synthesized)
gcagatccagcacatcgtggagcgcggcaccgacctcatgttcaaggtgagctcgccccactgcgactcgcagaccgctgtgatcgaggacgccggctccgagccccagagcccctgcaa

SEQ ID NO: 411198 - DNA, 120 bp, Artificial Sequence
  ENSG00000148411_5 (sequence is synthesized)
ccagctgcagccggccgccgccgccgcggccccctacgtcgtgtccccctcggtgcccatcccgctgctgacccgagtaaagcatgaagccatggagctgccgccggccggcccaggcct

SEQ ID NO: 411199 - DNA, 120 bp, Artificial Sequence
  ENSG00000148411_6 (sequence is synthesized)
cccaagcgcccgctggagacggggccccgggacggcgtggcggtggccgcgggggctgcggtggcggcgggcacagcccctctcaaactgccccgtgtctcctactacggggtgcccagc

SEQ ID NO: 411200 - DNA, 120 bp, Artificial Sequence
  ENSG00000148411_7 (sequence is synthesized)
cagcctggccaccctcatccccggcatccagcagatgccctacccccagggggagcggaccagtccaggcgccagcagcctgcccaccaccgacagccccacctcgtaccacaacgagga

SEQ ID NO: 411201 - DNA, 120 bp, Artificial Sequence
  ENSG00000148411_8 (sequence is synthesized)
ggacgaggaggacgacgaggcctacgacaccatggtggaggagcagtacggccagatgtacatcaaggcctccggcagctatgcagtgcaagagaagcctgagccagtgccgctggagag

SEQ ID NO: 411202 - DNA, 120 bp, Artificial Sequence
  ENSG00000148411_9 (sequence is synthesized)
ccgctcctgcgtcctcatccgccgcgacctcgtggccctacctgccagcctcatcagccagatcggataccgctgccatcccaagctctactcggaaggggaccccggggagaagctgga

SEQ ID NO: 411203 - DNA, 120 bp, Artificial Sequence
  ENSG00000148411_10 (sequence is synthesized)
gctggtggcaggctctggggtctacatcacacgcggccagctgatgaactgccacctgtgtgcaggggtgaagcataaggtcttgctgcggaggctcctggccaccttctttgacaggaa

SEQ ID NO: 411204 - DNA, 120 bp, Artificial Sequence
  ENSG00000148411_11 (sequence is synthesized)
cacgctggccaacagctgcgggactggcatccgctcgtccaccagcgaccccagccggaagccgctggacagccgggtcctgaacgctgtgaaattgtactgtcagaacttcgcccccag

SEQ ID NO: 411205 - DNA, 120 bp, Artificial Sequence
  ENSG00000148411_12 (sequence is synthesized)
cttcaaggagagcgagatgaacgtgatcgccgcggacatgtgcaccaacgcccgccgcgttcgcaagcgctggctgcccaagatcaagtccatgctgccggagggcgtggagatgtaccg

SEQ ID NO: 411206 - DNA, 120 bp, Artificial Sequence
  ENSG00000148411_13 (sequence is synthesized)
cacggtcatgggctccgccgccgccagcgtgcccctcgaccccgagttcccgcctgccgcggcacaggtgttcgagcaacgcatctacgccgagcggcggggcgacgccgccaccatcgt

SEQ ID NO: 411207 - DNA, 120 bp, Artificial Sequence
  ENSG00000148411_14 (sequence is synthesized)
ggctctgagaactgacgccgtgaatgttgacctgagtgccgccgccaaccccgccttcgacgccggcgaggaggtggacggggctggctcggtcatccaggaggtggccgcccccgagcc

SEQ ID NO: 411208 - DNA, 120 bp, Artificial Sequence
  ENSG00000148411_15 (sequence is synthesized)
ccgatggccagagccccccacagccctttgagcagggcgggggcggccccagcaggccccagacgccggcggccgcggcccggaggccggagggcacctatgcagggaccttgtaagcgg

SEQ ID NO: 411209 - DNA, 120 bp, Artificial Sequence
  ENSG00000148411_16 (sequence is synthesized)
gtaagcggagctgggtggctgcgcgagggaccgagtactagagctgcttgcatgcgttactaatacaaacaaatgtgatcaagccacttacctactgaactgctactgttgcctgagaaa

SEQ ID NO: 411210 - DNA, 120 bp, Artificial Sequence
  ENSG00000148411_17 (sequence is synthesized)
aatgtgatttttattctgcttgtatttaaaattgatgaaggaaacaaatgcattcattatactgtaaacaattaggccactggcagcctcctgcgaggaagttcccagggctcccttttg

SEQ ID NO: 411211 - DNA, 120 bp, Artificial Sequence
  ENSG00000148411_18 (sequence is synthesized)
atattcacaaggtcagcctccaagtgtagcttccctcccccttcttggggagggtgggaggccgccaggcccctggtgcccagccctgccccttcctccctgcccttcctgctcctcctg

SEQ ID NO: 411212 - DNA, 120 bp, Artificial Sequence
  ENSG00000148411_19 (sequence is synthesized)
cccggaagacgaagcaggggccggcggtggtctgtggcgagggggctgggctgtgcgtcactgacccttccttccttccccatggaacctctctggggcgacggggcagggctcaggctc

SEQ ID NO: 411213 - DNA, 120 bp, Artificial Sequence
  ENSG00000148411_20 (sequence is synthesized)
cagggcctaactcctcgtttttccttctttcggagactcggggccaggcccaccgggccttccacctgtgtggggtgtgtgcacgagtgtgtgtgtgtgcgtgtgtgtgcaggggtgtgg

SEQ ID NO: 411214 - DNA, 120 bp, Artificial Sequence
  ENSG00000148411_21 (sequence is synthesized)
tgagggggcagtgatggctgtggcccacccctcggggtggagaaaagggtactttactctgcccccacaccctgtccttgttctgcccgatccgtctcggctctgcagcccctcggtccc

SEQ ID NO: 411215 - DNA, 120 bp, Artificial Sequence
  ENSG00000148411_22 (sequence is synthesized)
ctgacccccagggcaccgctgaccccgcctggcctcccactgtcccgcccgggcccactgtgggacgtgcacagctgatgtagcacacgctgccctctgccgcctcagccactttgggat

SEQ ID NO: 411216 - DNA, 120 bp, Artificial Sequence
  ENSG00000148411_23 (sequence is synthesized)
tatgcttgtcttgttttttttaggttttgttgtaatttagatctatttcatatatggtttggaaactttcagactcaatagaacaaaaactttgggtgggatgggtgtccctgtccccag

SEQ ID NO: 411217 - DNA, 120 bp, Artificial Sequence
  ENSG00000148411_24 (sequence is synthesized)
cccaccatggcttggggtgggtcatctgtggccgttagggtgcgtccccctgctcccccgcccagggccagggaccactcgtctcccactgggggaaaaagggggtcccgggtgggcgac

SEQ ID NO: 411218 - DNA, 120 bp, Artificial Sequence
  ENSG00000148411_25 (sequence is synthesized)
tagtacgtgtgaagctgagctcagggccggacctggggagcgggggactccgctcgggcaggaggcagcggccagggctgggccagggcgagagtcggtcctcccggtgctgggctcccc

SEQ ID NO: 411219 - DNA, 120 bp, Artificial Sequence
  ENSG00000148411_26 (sequence is synthesized)
gtctgccttgaggggtgtgcatggatggagggtgcctgaggctgcaggcaggggatgaccgggacaggcctgggctggggcagttggaggtatgggcactggtaggggacagagggttag

SEQ ID NO: 411220 - DNA, 120 bp, Artificial Sequence
  ENSG00000148411_27 (sequence is synthesized)
ggatcatgttggggggccagggacagtggaggaagggcccatggaagatggggctgtttggtttgaggctggagtgcttcctttgaaatttaattactgttttttaagtggtagggctca

SEQ ID NO: 411221 - DNA, 120 bp, Artificial Sequence
  ENSG00000148411_28 (sequence is synthesized)
tgttttggaggcctgtgtccttgtccaggggcagccctccttcccaggtgtggccagaagaaccccccatcccaagacttgaaatgtctgttgctcacctctgtccctccagaactcggc

SEQ ID NO: 411222 - DNA, 120 bp, Artificial Sequence
  ENSG00000148411_29 (sequence is synthesized)
ttccccatcttcacttgcaaaacaagtgcagccctgcgcccatcagcaccccctccggtgtgcacacaggccagtgagcggtggccgaccagcgcaccccactcccccaacctccacaac

SEQ ID NO: 411223 - DNA, 120 bp, Artificial Sequence
  ENSG00000148411_30 (sequence is synthesized)
ccatcaagcggaggccgcctccgctaggggaggaccatgtgctgcaccctggcctggggacctacagggtgtgggttagacgcattcccactgggcggctcctttctgccccgaagccca

SEQ ID NO: 411224 - DNA, 120 bp, Artificial Sequence
  ENSG00000148411_31 (sequence is synthesized)
cccctgtggcgaggccctaggagacctcccgtggggccgcctctacagacagcactcagcctcctgggctgcctccagccaggcccagcacatgcctgccctccagaaaaatacgttgct

SEQ ID NO: 411225 - DNA, 120 bp, Artificial Sequence
  ENSG00000148411_32 (sequence is synthesized)
ttccagaaggaggtgggggaccatgggcaggcactgtggacgctaacctcggcccctccacccattcctcagggcccacgtccagggggaccaagacctgcattcctagggctgcaggtg

SEQ ID NO: 411226 - DNA, 120 bp, Artificial Sequence
  ENSG00000148411_33 (sequence is synthesized)
gctcagtggtgcagaggcatccagaccttctgctgaactaagaaccacccagcctagagggagcctttctctgcctcttcctcccctgtcttgggcacaggtggggttggagcccccatg

SEQ ID NO: 411227 - DNA, 120 bp, Artificial Sequence
  ENSG00000148411_34 (sequence is synthesized)
gggcccgctgggaacctggaccaagccttcctcggagatgggaggaagccgcggggtggagcaggggcaggtaggtgaggttgagctgcacttgagttccctctggagtttccttcatct

SEQ ID NO: 411228 - DNA, 120 bp, Artificial Sequence
  ENSG00000148411_35 (sequence is synthesized)
gccccacacccaaatttgcactttaatttgaccatccctgggggcctggctgctgacagaagggctctctctgccctccactccaaagtgggtgcccccccacccttggccaggacaggg

SEQ ID NO: 411229 - DNA, 120 bp, Artificial Sequence
  ENSG00000148411_36 (sequence is synthesized)
agggagccgctggctgctgccggaggtggtggctgcacagaggacgcctgactgctgttcaggcccgcacaatgtcccgtgccccttcctcactcgtttgtaatcgccgtctgttttgtt

SEQ ID NO: 411230 - DNA, 120 bp, Artificial Sequence
  ENSG00000148411_37 (sequence is synthesized)
ctgggtaaggaaggcaagagctatagataaaacttaaataataataatttaatgtgaatgggttctgagctctccctgcgccccgggcgggccaggccgagcattttgcactaatgtgtc

SEQ ID NO: 411231 - DNA, 120 bp, Artificial Sequence
  ENSG00000148411_38 (sequence is synthesized)
ccacggtgggcgtgagtcgggagtgtctgtggacgtgcgtggctgctgagcggacctgctgtgtgctccctccacgtcctgaatgtaccgtggggcgggggcggcggcccgggctcagag

SEQ ID NO: 411232 - DNA, 120 bp, Artificial Sequence
  ENSG00000148411_39 (sequence is synthesized)
gggccttccagagtgccttagcatcctttgatcatttttcccaaggaaaccaattaagaaagccggacccttccctcctttgtttacaagatgactaattctagaatccggggttgtcct

SEQ ID NO: 411233 - DNA, 120 bp, Artificial Sequence
  ENSG00000148411_40 (sequence is synthesized)
gtcctgtgagtgtgaccctgactcatccagaccctgtagagagagacgagccactcagtatttatgagatgtctgcacctttatccctaagcctgactattagcaatacgcatatcctat

SEQ ID NO: 411234 - DNA, 120 bp, Artificial Sequence
  ENSG00000148411_41 (sequence is synthesized)
atagaatctattacagagctacgttatctccacaccttttgaggaggacagaagggactggaccgtgttggagctgccgcctggcaggtggtgggcctgggatctagccgcctctcctgc

SEQ ID NO: 411235 - DNA, 120 bp, Artificial Sequence
  ENSG00000148411_42 (sequence is synthesized)
cctgccttcctcttccccaaggggatgggcccaggaggcagctgggttgcatggagaggtccaggagggaccggaggtgtgacagatactgtgagcccggcgggccgcgcctggctgggt

SEQ ID NO: 411236 - DNA, 120 bp, Artificial Sequence
  ENSG00000148411_43 (sequence is synthesized)
gcctcggtacttgaattctgtcttgttttccgcattgtgtctgtccacccgagttctctgtcgtcacttaactttgcattggatttggttgttgtactttgcccctgaatgtggacaaag

SEQ ID NO: 411237 - DNA, 120 bp, Artificial Sequence
  ENSG00000148411_44 (sequence is synthesized)
ctgtgggcaagaggtcagcaggacccgcctgggggtgccggcgttggtgactgcgggtcggggctcctagaacataggagccggctgcctggcctcctttctcctccaggaagagtcatt

SEQ ID NO: 411238 - DNA, 120 bp, Artificial Sequence
  ENSG00000148411_45 (sequence is synthesized)
ctttggcatttgtgtttagagccaggaggaaggcggaaggtagggagggagggctggtccccctctgagggggctctagtgcctgaccctgacctgtcctcattcgacagctgaaactgt

SEQ ID NO: 411239 - DNA, 120 bp, Artificial Sequence
  ENSG00000148411_46 (sequence is synthesized)
taagcgctggcccagtccccccaccccacccagccgtgtactgcctgggctcccctcaaagggaaatttttatggaaacatcttggcagcaagtggaaaaagatctatggcccatgaacc

SEQ ID NO: 411240 - DNA, 120 bp, Artificial Sequence
  ENSG00000148411_47 (sequence is synthesized)
aactgaaaactccaagaaccctctgtctgcctctgccagcagcgagtcctaagcgcagaatccagagctcgtagctgtcctcagctgtaactactgtttcagaatgttgctgctgcatac

SEQ ID NO: 411241 - DNA, 120 bp, Artificial Sequence
  ENSG00000148411_48 (sequence is synthesized)
ttttgtcatgtcagccagccagctccgtgggtgagagtgtgcgtgtgcgcgtgtctgtgtgtgtgtgcgtgtctgtgtgtgcacgtctgtgcgtctgtgtgtgcgcgtctgtgcatgtgt

SEQ ID NO: 411242 - DNA, 120 bp, Artificial Sequence
  ENSG00000148411_49 (sequence is synthesized)
gtgtctgtgcgtgtgtgcgtctgtgtgtgtgcgtctgtgtgcgcgtgtgtgtgcgcgtctgtgtgtatgtgtgcacgcgcgtctgtgtgcacgtgcgtgtctctgcacgcgtgtctgtgt

SEQ ID NO: 411243 - DNA, 120 bp, Artificial Sequence
  ENSG00000148411_50 (sequence is synthesized)
atgtgtgcacgcgtgtgtctgtgtgtgtgcacgcgcgtgcacgtcaccaccggagcatttagggtttggtacaagatggttctaaaatggcaaaggtttttcgtgtttgtttgttttgtt

SEQ ID NO: 411244 - DNA, 120 bp, Artificial Sequence
  ENSG00000148411_51 (sequence is synthesized)
tctttggaaaaagaaaaggaaaggaaaatcatgcagaatcgcaagcattcagactggacgaccggctcgtattccgatcagtcgcttccattgttagcatcgtacacgattgtgattttt

SEQ ID NO: 411245 - DNA, 120 bp, Artificial Sequence
  ENSG00000148411_52 (sequence is synthesized)
atgtcaaaagaagccaaaacttgcaatactatttttagcagacaaaaaaaagaactaagtataaaatgtataaatatttttgacttgaagatttggatggcactgggtgcaagtagagca

SEQ ID NO: 411246 - DNA, 120 bp, Artificial Sequence
  ENSG00000148411_53 (sequence is synthesized)
tccatccttcggatggaatgtttggaaaaaagagacttttaaaaaggagacggttgttttaaagagtctgtttaggggttaaagtactgtaactcacgactgttaaaaaataaattttcc

SEQ ID NO: 411247 - DNA, 120 bp, Artificial Sequence
  ENSG00000148411_54 (sequence is synthesized)
tgtgctgtaaaggaaggtttcacagtaccactgagttagatttcagccacagatgcttagctttttttttttgtcttttttttaaggaggaagcctttgttttgttttcctgagccctca

SEQ ID NO: 411248 - DNA, 120 bp, Artificial Sequence
  ENSG00000148411_55 (sequence is synthesized)
ctctgtttttgtgctgttactcggtagagtcaagactgttactttttagccatggctgacattgtatcaataactaaaactgaaacattcaaaagcgaacagggaaaccgagggcttcaa

SEQ ID NO: 411249 - DNA, 120 bp, Artificial Sequence
  ENSG00000148411_56 (sequence is synthesized)
gcgtgctcagagccgtttcagacagtggaaatccatgacaaacaaaaggatgtgatcattaattgtaaagcgctttgtaaaattcacatttacaaaataataaagtcagttcaaacctaa

SEQ ID NO: 411250 - DNA, 120 bp, Artificial Sequence
  ENSG00000148411_57 (sequence is synthesized)
gaaggtggcagttctgctacagcggccagtcctggggtgacaggaggccacgggtcccccagtacccgagacccaggctcaggagggacctcagtgtgaccggcaggggcctcttccttg

SEQ ID NO: 411251 - DNA, 120 bp, Artificial Sequence
  ENSG00000148411_58 (sequence is synthesized)
agggatgagccgtcctgtctctgccatgaacaagtctctctgcgggttctccgttaaagcccagttgtagcctggaccttgaagctcagctcctgcagaggtgcaagagaagcctgagcc

SEQ ID NO: 411252 - DNA, 120 bp, Artificial Sequence
  ENSG00000148426_0 (sequence is synthesized)
gagagcgcgcggcggggcgtcccggaacagtctgcgccagacgggcggcggcgtgagggctccgggtcgctggcggcgtggacacctgagtcccggggtaggggtctcccgcgaggagtg

SEQ ID NO: 411253 - DNA, 120 bp, Artificial Sequence
  ENSG00000148426_1 (sequence is synthesized)
agctgttgccgcagaatgggctgctggctcctgccctgcttcctgtgatcgagccggccctgaggactctgtggagatgcctgtaacccaccggaaatcagacgcatctgacatgaactc

SEQ ID NO: 411254 - DNA, 120 bp, Artificial Sequence
  ENSG00000148426_2 (sequence is synthesized)
agacacgtcccccagctgcaggctccgagccttcagcagaggcggcagcctggagagtcgaagcagcagctctcgctccagaagcttcactttggatgatgagagcctgaagtacctcac

SEQ ID NO: 411255 - DNA, 120 bp, Artificial Sequence
  ENSG00000148426_3 (sequence is synthesized)
ccatgaggaaaaggatgtgctcctgttttttgaagagacgattgactccctagacgaggactttgaggagccagtgctgtgcgatggaggagtgtgctgcctctgctccccgtctctgga

SEQ ID NO: 411256 - DNA, 120 bp, Artificial Sequence
  ENSG00000148426_4 (sequence is synthesized)
ggagagcacctccagtccctccgagcctgaagatgtcatcgacttagtgcagccagcacctggcgccggggaagccgagggccttccagaggggacccaggcagcagggcctgcacctgc

SEQ ID NO: 411257 - DNA, 120 bp, Artificial Sequence
  ENSG00000148426_5 (sequence is synthesized)
tgggaaggagcacaggaaacaagatgctgagactcctccacctccagaccccccggctcccgagacccttcttgcgccaccacccctgcctagcacccccgatccccccaggagggagct

SEQ ID NO: 411258 - DNA, 120 bp, Artificial Sequence
  ENSG00000148426_6 (sequence is synthesized)
gcgcgccccctccccgccggtggagcaccccagactcctgcgctctgttcccacgcccctcgttatggcgcagaagatttccgagaggatggcggggaacgaagccctctcgcccacctc

SEQ ID NO: 411259 - DNA, 120 bp, Artificial Sequence
  ENSG00000148426_7 (sequence is synthesized)
cggcccggggagtggaggacacctgccgcccgggggccccgcagtggagaccctggcccggggcccagccacccggcgcagcccaaggcaccccgcttccccagcaacatcatcgtcacc

SEQ ID NO: 411260 - DNA, 120 bp, Artificial Sequence
  ENSG00000148426_8 (sequence is synthesized)
caacatcatcgtcaccaacggcgcggcccgggagccccgcaggaccctgtccagggcggccgtcagcgtgcaggagcgcagggcgcaggtgttggccaccatccacggccacgccggcgc

SEQ ID NO: 411261 - DNA, 80 bp, Artificial Sequence
  ENSG00000148426_9 (sequence is synthesized)
gctcctccccggagcgggtggcgcgtggccggggcctgccgggccccgctgagagtctccgggcagggggtcaggctccg

SEQ ID NO: 411262 - DNA, 120 bp, Artificial Sequence
  ENSG00000148426_10 (sequence is synthesized)
tccgcggggcccggcgctggccaacggcttcccaagtgcgcacgaggccctgaagagcgcacccagctccttcgcgcccgctgggaagtccctctgcttccgccctggcccggccctgcc

SEQ ID NO: 411263 - DNA, 120 bp, Artificial Sequence
  ENSG00000148426_11 (sequence is synthesized)
cccaacggcgcccaggactggcgccgcgcagactccctgccccggccccagggcatcaccgtgcagttcgcgggccgcggctcctcggaggaggcgcgcagggaggccctgcggaagctg

SEQ ID NO: 411264 - DNA, 120 bp, Artificial Sequence
  ENSG00000148426_12 (sequence is synthesized)
ctcctcggaggaggcgcgcagggaggccctgcggaagctggggctgctcagggagagttcgtgagggccgcgcgggctccagtccaccccgtttctccccaccctgaagagagggtgaaa

SEQ ID NO: 411265 - DNA, 120 bp, Artificial Sequence
  ENSG00000148426_13 (sequence is synthesized)
gagtcgctgcacccaggagctgtttggtctaaaatggaagtgacagcgggagcccctgccctctgtggcacatcggagtctagaggtgcctggctggggcctcctggctgagcacgcacc

SEQ ID NO: 411266 - DNA, 120 bp, Artificial Sequence
  ENSG00000148426_14 (sequence is synthesized)
cggcacagagaactcttccctaaaggaatctggccgagggcttgtctcccttttcccaagaactgagagagagagaataacctgttagacccataggtttccgtgatgtgtaaatgccat

SEQ ID NO: 411267 - DNA, 120 bp, Artificial Sequence
  ENSG00000148426_15 (sequence is synthesized)
cttttgggggttgggaggagtaggactggtctgattatcattcttgagtctcatctaccctcttctcgaagtacatgacatgaaagttcagatcccttccactcaggattctcgccgcct

SEQ ID NO: 411268 - DNA, 120 bp, Artificial Sequence
  ENSG00000148426_16 (sequence is synthesized)
tttctaagaaaataataaaaaaaaatgcttgtttcattttttaatgtcttaatatacttgcttttgtttttgaagggtgaggcatcatggtactttgcttttgtttcttgacgtacttta

SEQ ID NO: 411269 - DNA, 120 bp, Artificial Sequence
  ENSG00000148426_17 (sequence is synthesized)
gtttgcccagttttgttttttactgaaaactgaaatgaaacctttagatattgagttttgggagtgaaatggaaaggtggtaattttgagaaagcaagtctcatcagactctgaggtctg

SEQ ID NO: 411270 - DNA, 120 bp, Artificial Sequence
  ENSG00000148426_18 (sequence is synthesized)
ggacgtgtgcgtgagcctgtgtttgtgtgtgtatgtttttagatacgtacgtgtcaacacatacatgcataggtatcctgtgtgtccacatgcatcattattatataaatagaaacttct

SEQ ID NO: 411271 - DNA, 120 bp, Artificial Sequence
  ENSG00000148426_19 (sequence is synthesized)
gaacaccctcctaagtcactacaggatgccagcgcttcctattcttgggtagacagagccacctcagcatcctgatggatgatacaagaaattgttacttcctagtatggaagtgtctta

SEQ ID NO: 411272 - DNA, 120 bp, Artificial Sequence
  ENSG00000148426_20 (sequence is synthesized)
aggacacgtctccatgatattttggtgaaccaaaagtgctttatcctcaacaaaatgttcctctgttcccagttaaagtaatattccctgcttccaagtaagcaagactgttcactaaag

SEQ ID NO: 411273 - DNA, 120 bp, Artificial Sequence
  ENSG00000148426_21 (sequence is synthesized)
aaggaactttttagaaaactaatctcctttatcatccaattttagttctgcatgttccgaggtagccagtcaacagaaggaagcaaaagattcttaaagatccaccgactgtcatgttcc

SEQ ID NO: 411274 - DNA, 120 bp, Artificial Sequence
  ENSG00000148426_22 (sequence is synthesized)
acaagcaagatctcagggtagggaaaaaccagtgaatgaggttacacagcaggaaaagaaccggtttcctcccagactatgtcttacacgctgagttatgccacaagcgttatcatcaaa

SEQ ID NO: 411275 - DNA, 120 bp, Artificial Sequence
  ENSG00000148426_23 (sequence is synthesized)
actatttaaggctggagtcttagacctctaaaaatagacaggaagggctgccctgagcagtgacacctttgtgtttttatgtctccgccagcgccgtaacagagcctgtttctttcccgt

SEQ ID NO: 411276 - DNA, 120 bp, Artificial Sequence
  ENSG00000148426_24 (sequence is synthesized)
tgagtattacttaaattcaggcttaaatgtgctatgaagggcatttttcatagtatcccatttgccttgtaagttatataaagtgcatgattataattttttccttagaaatgcaatatt

SEQ ID NO: 411277 - DNA, 120 bp, Artificial Sequence
  ENSG00000148426_25 (sequence is synthesized)
tagtttcatccagctcttatgaataataacctcatagattcctgatcttaatttaaataggtgctttaattttacagctttcaaaagtagttactgtaaattttactcctgttaatgctg

SEQ ID NO: 411278 - DNA, 120 bp, Artificial Sequence
  ENSG00000148426_26 (sequence is synthesized)
gattggtttaaaggatttataagggctgtgtttgctctttacaaggcaagatgccatacagtgttcaataatagaaggtcttgatacaaccgacattttaaatattctttatacatgagg

SEQ ID NO: 411279 - DNA, 120 bp, Artificial Sequence
  ENSG00000148426_27 (sequence is synthesized)
actgcatctttttcactgaccctatgatttcactgtgagtagggtgaactggactgcatattagtttatttgttgccataatcacatttttgaaaaataaatttaagagttttttcttaa

SEQ ID NO: 411280 - DNA, 120 bp, Artificial Sequence
  ENSG00000148426_28 (sequence is synthesized)
ccctgccgaaagcaagtgtcagtcagtacaaccacttcggaaagctgtgtccacccacccaagcagacacacatcttcagacccggcgattgtgcataggtttatatccaacaggatgat

SEQ ID NO: 411281 - DNA, 120 bp, Artificial Sequence
  ENSG00000148426_29 (sequence is synthesized)
ccaatcagatgtctggtcaagattgttttcaggtgagattttactttaggaaaatctggttttggtatctttttcagtgatggcgaaccgacactaggaaacttcttccctcgaggcctg

SEQ ID NO: 411282 - DNA, 120 bp, Artificial Sequence
  ENSG00000148429_0 (sequence is synthesized)
actataaaataataatgaaatcttggaatagataagttactctatgaggactgaagctgttgttaattcccaaggccagactgattatctcacaaaggattcagaccaggatgtagcact

SEQ ID NO: 411283 - DNA, 120 bp, Artificial Sequence
  ENSG00000148429_1 (sequence is synthesized)
caaacttgcccaggagcgagctgaaatagttgctaaatatgacagaggacgagaaggtgcagagattgaaccttgggaagatgctgattaccttgtttacaaagtcacagatagatttgg

SEQ ID NO: 411284 - DNA, 120 bp, Artificial Sequence
  ENSG00000148429_2 (sequence is synthesized)
ctttttacatgaggaggagctcccagatcataatgtggctgtggaacggcaaaagcacctggaaattgaaagaactaccaaatggctgaaaatgctgaaaggatgggaaaaatacaagaa

SEQ ID NO: 411285 - DNA, 120 bp, Artificial Sequence
  ENSG00000148429_3 (sequence is synthesized)
cactgaaaagtttcataggcgaatttacaaaggaataccactccagctcagaggtgaagtctgggccctccttcttgagatccctaaaatgaaagaagaaacaagggacctgtatagtaa

SEQ ID NO: 411286 - DNA, 120 bp, Artificial Sequence
  ENSG00000148429_4 (sequence is synthesized)
attaaaacacagagcacggggctgttcacctgacatcagacaaatagacctggatgtcaaccgcacatttcgggaccacattatgtttagagacagatatggtgttaagcaacaatcctt

SEQ ID NO: 411287 - DNA, 120 bp, Artificial Sequence
  ENSG00000148429_5 (sequence is synthesized)
attccatgtgcttgctgcctattctatttataacacggaagtcgggtattgtcaggggatgagccagatcacagctttactcctcatgtatatgaacgaggaagatgccttctgggccct

SEQ ID NO: 411288 - DNA, 120 bp, Artificial Sequence
  ENSG00000148429_6 (sequence is synthesized)
ggtcaaactcttctcaggccctaaacatgccatgcatggcttttttgtccaaggttttcctaaactcttgaggtttcaagaacatcatgaaaaaatactgaacaaatttctgtccaagct

SEQ ID NO: 411289 - DNA, 120 bp, Artificial Sequence
  ENSG00000148429_7 (sequence is synthesized)
taagcaacacttggattctcaagaaatctacacaagtttttacacaatgaaatggttttttcagtgtttccttgatcgtactccctttacactaaacctcagaatatgggatatctacat

SEQ ID NO: 411290 - DNA, 120 bp, Artificial Sequence
  ENSG00000148429_8 (sequence is synthesized)
ctttgaaggagaacgagttcttactgctatgtcttacaccatcttaaaattacacaaaaaacatctaatgaaattgtccatggaagaacttgtagaattttttcaggagaccctggcaaa

SEQ ID NO: 411291 - DNA, 120 bp, Artificial Sequence
  ENSG00000148429_9 (sequence is synthesized)
ggattttttctttgaagatgattttgtgatagagcaacttcagatttctatgacagaactaaagcgggcaaagttagaccttccagaacctggtaaagaggatgaatatccaaagaagcc

SEQ ID NO: 411292 - DNA, 120 bp, Artificial Sequence
  ENSG00000148429_10 (sequence is synthesized)
cttggggcagcttccacctgaacttcagtcttggggcgtccatcacttgagcaacggacagaggagcgtgggccggccgagcccgctggccagcggcaggagggagagcggggcgcccca

SEQ ID NO: 411293 - DNA, 120 bp, Artificial Sequence
  ENSG00000148429_11 (sequence is synthesized)
caggaggcacgagcactccccgcacccccagagcaggaccgggacgcccgagagagcacagccgccaagacggaaatcggtggaggaggagagcaaaaagcttaaagatgaggcagattt

SEQ ID NO: 411294 - DNA, 120 bp, Artificial Sequence
  ENSG00000148429_12 (sequence is synthesized)
tcaaagaaaactcccatcgggtccacaggacagttccaggcaatataatcacgcagctgccaaccaaaatagcaacgccacttcaaatatcaggaaggagtttgtgcccaaatggaataa

SEQ ID NO: 411295 - DNA, 120 bp, Artificial Sequence
  ENSG00000148429_13 (sequence is synthesized)
accgtcagacgtctcagctacagagagaactgccaaatacaccatggaaggcaaaggtcgagcagcgcaccccgcgctcgcagttaccgtcccaggtcctgccgaggtgcgggtgtcaaa

SEQ ID NO: 411296 - DNA, 120 bp, Artificial Sequence
  ENSG00000148429_14 (sequence is synthesized)
cgtgcggccaaagatgaaggccctggatgctgaggacgggaagcggggctccactgcatcgcagtacgacaacgtgccaggcccggagctggacagcggcgcttccgtggaggaggcgct

SEQ ID NO: 411297 - DNA, 120 bp, Artificial Sequence
  ENSG00000148429_15 (sequence is synthesized)
ggaaagggcttactcccagagcccccggcatgccctttaccctcctagcccgagaaagcacgctgagccaagttctagtccatcaaaagtatccaacaagtttacttttaaagtacagcc

SEQ ID NO: 411298 - DNA, 120 bp, Artificial Sequence
  ENSG00000148429_16 (sequence is synthesized)
tccaagtcatgcacgatatccgtcccagctagatggggaagcccgagggctagctcatcccccctcctacagcaatccccccgtttaccacggaaactctcccaaacacttccctactgc

SEQ ID NO: 411299 - DNA, 120 bp, Artificial Sequence
  ENSG00000148429_17 (sequence is synthesized)
caacagcagctttgcttctccacagtttagccctgggactcaactgaatccttccaggagacctcatggttctactctttccgtcagtgcttctccggagaaatcttacagccgcccaag

SEQ ID NO: 411300 - DNA, 120 bp, Artificial Sequence
  ENSG00000148429_18 (sequence is synthesized)
ttcagggtcaccaaagaatggaaaattgatcattccaccagtggattacttgccagataacagaacatggtcagaagttagttatacatacagacctgagacgcagggacaatcatggac

SEQ ID NO: 411301 - DNA, 120 bp, Artificial Sequence
  ENSG00000148429_19 (sequence is synthesized)
ccgagatgctagccgtggcaatttaccaaaatactcagcctttcaactcgcaccctttcaggaccatggcctccctgcagtttctgtagatagtcccgtgagatataaagcttcaccggc

SEQ ID NO: 411302 - DNA, 120 bp, Artificial Sequence
  ENSG00000148429_20 (sequence is synthesized)
cgcagaagatgccagtccatctggatatccatattcagggcccccgcctccagcctaccactacaggaatcgggacgggctttccatccaagagtcagtgttgctgtgagatttgacgtg

SEQ ID NO: 411303 - DNA, 120 bp, Artificial Sequence
  ENSG00000148429_21 (sequence is synthesized)
tacttgctaaagacgagagagaaaccacgtgaaacctacattgctatgttcataattgccaaagcagtatttatactattgtaaacaactcgcacatctctcctgtctgttagtagtaag

SEQ ID NO: 411304 - DNA, 120 bp, Artificial Sequence
  ENSG00000148429_22 (sequence is synthesized)
aatacagggaaatgtcttcagccccacgtagatgctgcttaagatgagcgtttcaattgcatcatcactgacctgttagaatttaacccggaaacatcgcaatagcatttagggatgcac

SEQ ID NO: 411305 - DNA, 120 bp, Artificial Sequence
  ENSG00000148429_23 (sequence is synthesized)
gcacagtggtaatttattactcagttccggttatgtttttctccaaaacctgaacatttttactctgttggctcattctattttgactaatgttacaaagtactgaaaaaactgtagaat

SEQ ID NO: 411306 - DNA, 120 bp, Artificial Sequence
  ENSG00000148429_24 (sequence is synthesized)
agatatttttaaggctatatgtagtgtatgtgtcttttaatagatataggcatctgttcatccacatttgaacacagagctaaagaaacgttttttaaaaaactacttttaatccagatc

SEQ ID NO: 411307 - DNA, 120 bp, Artificial Sequence
  ENSG00000148429_25 (sequence is synthesized)
catggaataatatgtaattcttgttttccttgtcttttagtccagtttttctttttccctctcatatatttgtaacctgggtcctaaactgactgaagagtttgtcctgactttattaat

SEQ ID NO: 411308 - DNA, 120 bp, Artificial Sequence
  ENSG00000148429_26 (sequence is synthesized)
tgcagtctcacagaatgctcatcattctccttcagctgttgccattttctttcaatctgaaaattaaagacattggagagaaaggctaaccacttaatggtgcttaaaaatcggggcact

SEQ ID NO: 411309 - DNA, 120 bp, Artificial Sequence
  ENSG00000148429_27 (sequence is synthesized)
taaaataagtttacggccaaaggtgcagcagtgcttatcacatccacatactaagagattggtcttagtgcgtttgtgccctttgttctggtctgactcttgcgaatctcagagcaggag

SEQ ID NO: 411310 - DNA, 120 bp, Artificial Sequence
  ENSG00000148429_28 (sequence is synthesized)
aagttgcagcttactgatccctcagtgctcacagtactcatgtggggcagccacactaactgcattagcagtgtggttacttctttcttctgcctcgactcacatggcttctccccacga

SEQ ID NO: 411311 - DNA, 120 bp, Artificial Sequence
  ENSG00000148429_29 (sequence is synthesized)
aggtcccagggtggccatttatacaatccatttctgtcctctttatggaatgtagtcgacggatattgctgcacctcatcaggccattacattgtccatgttaaaattataaaaatgatc

SEQ ID NO: 411312 - DNA, 120 bp, Artificial Sequence
  ENSG00000148429_30 (sequence is synthesized)
ctagtttttcataggagtctaggattttgatcttttaaaaaatacagtgtgatttcatgcttttgaacatctttttttcattgaaacaaattcaagttcttggcttaaaaaaaaattagt

SEQ ID NO: 411313 - DNA, 120 bp, Artificial Sequence
  ENSG00000148429_31 (sequence is synthesized)
gatgtctttaaaaaatattctgttacactacagataccaaaacactgacaaagatttaggcactccaagagagtatgacttcgtgtttaattggggagcttgttttcaacattgcttata

SEQ ID NO: 411314 - DNA, 120 bp, Artificial Sequence
  ENSG00000148429_32 (sequence is synthesized)
tttgaatagtagaaaacccgacattgatgtttcttcctgttgcaaggtggggctttaaactttcaaggtacaaaagtatgtcttttaaaatggaagtaacgtttgtttagctagtgaatg

SEQ ID NO: 411315 - DNA, 120 bp, Artificial Sequence
  ENSG00000148429_33 (sequence is synthesized)
tgacaatatattttatgtatataatgagtctaatgtaattttgatcaacttggtaatgatgttattaaatagcaaaacaagtgcagtgtattaaagctaaacactacattgaaacgcaaa

SEQ ID NO: 411316 - DNA, 120 bp, Artificial Sequence
  ENSG00000148429_34 (sequence is synthesized)
caaaattctggtgaaataactgggctgttgatgcaggtcaggtggaagctgagaaataaatgtatataaatatgtagctgaggatattaattcccattatataaccataattctgtgact

SEQ ID NO: 411317 - DNA, 120 bp, Artificial Sequence
  ENSG00000148429_35 (sequence is synthesized)
ctgtgacttgtaataaaccaagctgtacaatttagtttataatagcagtatctgagctgctccaaaatatatatatcaacagtggtaaatactgtagatttttatatatatatatatata

SEQ ID NO: 411318 - DNA, 80 bp, Artificial Sequence
  ENSG00000148429_36 (sequence is synthesized)
acacaagcactattttcttatgtcatttatgacattttttatctgtatacttttttgatgtgattgttttttaacatgct

SEQ ID NO: 411319 - DNA, 120 bp, Artificial Sequence
  ENSG00000148429_37 (sequence is synthesized)
gatgaaacctgttggatttctagaggaagcagctggagtctttggcttgttaactagcaatgattcaagtcttgcagattgtaaaggagctggtgacaccatcaaggcaaaaagcagcca

SEQ ID NO: 411320 - DNA, 80 bp, Artificial Sequence
  ENSG00000148429_38 (sequence is synthesized)
ggccggaggcgcggaggcggggtcccgggcgagccgccctgggaggcgggggccgtttccatagcggcggcaggaggtgt

SEQ ID NO: 411321 - DNA, 120 bp, Artificial Sequence
  ENSG00000148429_39 (sequence is synthesized)
gtgtcgcgccggggaacttcctggttcccgggctcggcttcgccgggatcctcttggaagggaaacaatggggcggagggcactgcggtagccgccgccgccgccgcgccgcgccgcgcc

SEQ ID NO: 411322 - DNA, 120 bp, Artificial Sequence
  ENSG00000148429_40 (sequence is synthesized)
ggatctgctcggccgcccgggaccgccagctctgtccgctgcccacagcctagcagtcgggaccgtactgaggacatgtattcctctgagaaaccttggacagcagattttggtttaata

SEQ ID NO: 411323 - DNA, 120 bp, Artificial Sequence
  ENSG00000148429_41 (sequence is synthesized)
ctgtgttactttgtatatgtcacagttctatgtttaatgctttactaatttccagtaagactatatttaaaactacatagtctttccttattttatttagtatgacattgtcaatagtaa

SEQ ID NO: 411324 - DNA, 120 bp, Artificial Sequence
  ENSG00000148429_42 (sequence is synthesized)
taaggtagcatttctagtcttcctcattacaaaatgtagctgttttctaagtaggaaaatgtaatttgaaattatcttgccaccatacagttttactttttcaaatttattttttaataa

SEQ ID NO: 411325 - DNA, 120 bp, Artificial Sequence
  ENSG00000148429_43 (sequence is synthesized)
gagataatgaaataatgatataaaaagattggtaaagtatatttatgaaaaacccatttagtacagattttcatagtgtagagactgattttgccctgtaactgcatgtacatggtgtat

SEQ ID NO: 411326 - DNA, 120 bp, Artificial Sequence
  ENSG00000148429_44 (sequence is synthesized)
tttgccattaagtcttttatttgtggcaattttgccttagtaggcgcttggcgtagtttctattttatagaatatttagtctgagaagttaaagaaactagacctaggatctcaaaagtt

SEQ ID NO: 411327 - DNA, 120 bp, Artificial Sequence
  ENSG00000148429_45 (sequence is synthesized)
ttaaaactttgacgttttcatatgtttgtttattaataggattttaaaaaaaatgaacatctttttaaagctgggaaatgtatataaattcaggtatcagtatcaataatagactgtttc

SEQ ID NO: 411328 - DNA, 120 bp, Artificial Sequence
  ENSG00000148429_46 (sequence is synthesized)
ttcaggtatcagtatcaataatagactgtttcattgaaagaatgaaaagaggccaggtgaagtagtaatttataaatttagtatttgcagtggttcacgcctgtaatcccaccactttgg

SEQ ID NO: 411329 - DNA, 120 bp, Artificial Sequence
  ENSG00000148429_47 (sequence is synthesized)
agagattcaaccaagaggacagctctggagcagaaaaatacatgtttataggatgcgattgtttcaactttctttttccattttaagaagattccatttcggaagaagatgccgaaattt

SEQ ID NO: 411330 - DNA, 120 bp, Artificial Sequence
  ENSG00000148429_48 (sequence is synthesized)
acaaatttcgccatactcagtgggactctcaagtagactttcatagttgcagtcacttcaggtctctccctcgggttcccttaggatgcaagcacaagaacagacacctggtcagcatgg

SEQ ID NO: 411331 - DNA, 120 bp, Artificial Sequence
  ENSG00000148429_49 (sequence is synthesized)
tgctgaaacccctttctcttcactgtcatggtgcgagaaaagcatgccatgtctacgagtaggatctcttcacggaggacctgcagcttcatcttctggattggagattattcttggtta

SEQ ID NO: 411332 - DNA, 120 bp, Artificial Sequence
  ENSG00000148429_50 (sequence is synthesized)
tgttttggaatcagtcctttatcttagtgtgcacttgattgtgagttttaagattatggttttaggatttcttttattttttgtcttttaaattgttctttaatggattttaaatgtctg

SEQ ID NO: 411333 - DNA, 120 bp, Artificial Sequence
  ENSG00000148429_51 (sequence is synthesized)
ttgtcttttaaattgttctttaatggattttaaatgtctgtatctaatgtgggtattaatgctttttggccaagtggattttaagaagtgaaactttttttttttttttttttttttgag

SEQ ID NO: 411334 - DNA, 120 bp, Artificial Sequence
  ENSG00000148429_52 (sequence is synthesized)
gccactgtgcccagcccaaacttttaagatgacccaaagtcgtgagaataggaaaaaggaatctgattaacatttatgcattttattttcagaaggactttcagttatccataaatctaa

SEQ ID NO: 411335 - DNA, 120 bp, Artificial Sequence
  ENSG00000148429_53 (sequence is synthesized)
gcataactgctaccatttatacatgagaaaatgacagaggaactaatataagagcagatcttgacccttgctgggtcactataattctttagaattactgagtgaactttaaaaaaattt

SEQ ID NO: 411336 - DNA, 120 bp, Artificial Sequence
  ENSG00000148429_54 (sequence is synthesized)
tctgcataggttatatcccagaccacttaaatcagaatatcttggatggaacccagacatcagattattgtattttcccccataatttaaagttcagtcattaagctgttacatccctct

SEQ ID NO: 411337 - DNA, 120 bp, Artificial Sequence
  ENSG00000148429_55 (sequence is synthesized)
gaagttgattgtcttatattcccgctatgagatatctcaaagattcttaatcaagagtttcagagtttagaaactcggatgttgggcaagttaggaaatattccaccagcaaaattaaca

SEQ ID NO: 411338 - DNA, 120 bp, Artificial Sequence
  ENSG00000148429_56 (sequence is synthesized)
ttaccagccatctctgcaaatgctcctgaactgctgacagttacggcatcaaacggaagacggcaggccctgtccttccactcaggtgctgcttgcagtgctcctcaacagagggagagt

SEQ ID NO: 411339 - DNA, 120 bp, Artificial Sequence
  ENSG00000148429_57 (sequence is synthesized)
ctccctaagatttccatgttcctagacaaagtcctaagctgtttggaagtctgtgagcattttcagtatatgaggagctgagaaagcgctgcctgtctggtccttcatttggccagctaa

SEQ ID NO: 411340 - DNA, 120 bp, Artificial Sequence
  ENSG00000148429_58 (sequence is synthesized)
cattctgtcgagcacctgcattgtgctggattcatgcttccagatgtgagatgtgtgttctaatctgacagtgtgttttgtaatctgtcaatcagtgttggagatatgcccaggctatta

SEQ ID NO: 411341 - DNA, 120 bp, Artificial Sequence
  ENSG00000148429_59 (sequence is synthesized)
caggcatattatggacaaatataaaggccaactagtgatcccagcccaagaggttcagggaagtcttatgaaggatttgtctcagctgagcctgacaggacaagcatatagaaagacaag

SEQ ID NO: 411342 - DNA, 120 bp, Artificial Sequence
  ENSG00000148429_60 (sequence is synthesized)
agggggagagagcagggcattctgcagaggggaccgatggcaagagcagctgcatgggatgtgtgaggaaatttgccactgtgatgtgtatgtggggtaggcatgggggtggacaggggt

SEQ ID NO: 411343 - DNA, 120 bp, Artificial Sequence
  ENSG00000148429_61 (sequence is synthesized)
gacgggctccacagagacaggatggtggagggagttgtgtgcagttgaacttgatcctgtagttggttttgacctggtgtggtccctccatgctgtggaagtgaaatgtgagggaacagg

SEQ ID NO: 411344 - DNA, 120 bp, Artificial Sequence
  ENSG00000148429_62 (sequence is synthesized)
cctgggggcagtgagggagacaggacaagcctttcatctaaaaggtggcacagagcttaaggccagggaagaaggtatgaagaaaaggtgattgagaactaattaccaagggaaactggc

SEQ ID NO: 411345 - DNA, 120 bp, Artificial Sequence
  ENSG00000148429_63 (sequence is synthesized)
aagacaactggatgcgtgtaatccgaatggtcataatgagacaacagctaacactgaatgcttgctgtgtgtttggcactctgctagacgttttactggtattaaccgatttaatcctca

SEQ ID NO: 411346 - DNA, 120 bp, Artificial Sequence
  ENSG00000148429_64 (sequence is synthesized)
caataacgaagtatgtactactataattgccagtttacagacgagaaaactaaggcacaaagtttaacttgccccaagcgacagagtggataagtaaaagggcgaggactgggaccctgg

SEQ ID NO: 411347 - DNA, 120 bp, Artificial Sequence
  ENSG00000148429_65 (sequence is synthesized)
tactctgaatgaagagcctgtgcctccctctctcccctaacagttttaaggagatacaatttacctgccacaaaatttacccattttaggtttatacttagatggttgttcagtaagttt

SEQ ID NO: 411348 - DNA, 120 bp, Artificial Sequence
  ENSG00000148429_66 (sequence is synthesized)
atagagttgtgcaactatcacaaccaatgttagaacaactcaaaaaaaaaaaaaatcttattccagtttgcaattaagccccatttccatttccacacagcaactgatcggctttctgtc

SEQ ID NO: 411349 - DNA, 120 bp, Artificial Sequence
  ENSG00000148429_67 (sequence is synthesized)
cttcaggtttgccatttctgaacatttcctataaatggaatcagacatggtcttttgtgtctggcttctttcactcagtaatgtttctgaagttcctccctgtagtggcatctatcagta

SEQ ID NO: 411350 - DNA, 120 bp, Artificial Sequence
  ENSG00000148429_68 (sequence is synthesized)
attgctttcctttttattgctgggctgaatgctgttccattgtatggctgtgtcagattttgtttgttcattcaccagttgatagacatgtagattgttttcatgctgctgtgaccattt

SEQ ID NO: 411351 - DNA, 120 bp, Artificial Sequence
  ENSG00000148429_69 (sequence is synthesized)
gtgtacaagtgtttgtgcagacatatgtttaactttttaggaaattgccagactgttttccaaagaagctgcaccattttacatttgcaccagcaatgtaggagggttctgatatctcca

SEQ ID NO: 411352 - DNA, 120 bp, Artificial Sequence
  ENSG00000148429_70 (sequence is synthesized)
cgtcctcaccaacacttgtgattatgtgtcttttaaaattatagccatccttgtggatgtgaagtggtaactcattgtggctttgatttacatttccttgatagctaatgatgagcattt

SEQ ID NO: 411353 - DNA, 120 bp, Artificial Sequence
  ENSG00000148429_71 (sequence is synthesized)
ttcatgtgcttatgggccgtttatatacctttggtgaaatgtctatttaaatcttttgctcacttttcagttgggttttttttcttattaaatagtaagagttcttaatatattctggat

SEQ ID NO: 411354 - DNA, 120 bp, Artificial Sequence
  ENSG00000148429_72 (sequence is synthesized)
acaagtccttttaagacatgatttgcaaatattttctcccagtctgtggcttatcttttcctaatggtgtcttttgaaatgcacttgtttttaattttaatgaagcctaatgtattagtt

SEQ ID NO: 411355 - DNA, 120 bp, Artificial Sequence
  ENSG00000148429_73 (sequence is synthesized)
tccttatacgagttatgcttttagtactgtatctctctctgcttaactaaaggtcacaaagattttctcctatgttttgttctggaagttttatagttttagctcttaaatttgggcctg

SEQ ID NO: 411356 - DNA, 120 bp, Artificial Sequence
  ENSG00000148429_74 (sequence is synthesized)
tgagctgttttaaattaatttttatatatggtatgaggtaaagatctaaattcctatggatattcagtggtcttagcaccatgtgttaaaaggactgcttttccccactgtgtccctgtc

SEQ ID NO: 411357 - DNA, 120 bp, Artificial Sequence
  ENSG00000148429_75 (sequence is synthesized)
aaaaatcaactgaacatatatgtaagagttatttaaattttgaaattgggacgtatacattctccattctttttgacattattttggctaatctgggtcctctgcatttctgtataactt

SEQ ID NO: 411358 - DNA, 120 bp, Artificial Sequence
  ENSG00000148429_76 (sequence is synthesized)
acaaggtctggttgtcagtttttgcaaaaaggcctgctggggtttccatagggaatgttttgaatctatagatgagtcaaggaagaactgccatcttaacagtattgggtcttccgattt

SEQ ID NO: 411359 - DNA, 120 bp, Artificial Sequence
  ENSG00000148429_77 (sequence is synthesized)
ataaacatggaatgcctctccatttattttgatctttaatttctctcagcaatgttgtataatatcagaatatgtcttgtacttctatggttaaaattagtactgctttctctcgtgaat

SEQ ID NO: 411360 - DNA, 120 bp, Artificial Sequence
  ENSG00000148429_78 (sequence is synthesized)
ggagctgttttcttcagagcctttgctctgaaacatcacgctcccctgtatggggagaagaagggtcaagatggatttctgcagttcctgcgttgggcagtagggtgaagagtggggcca

SEQ ID NO: 411361 - DNA, 120 bp, Artificial Sequence
  ENSG00000148429_79 (sequence is synthesized)
tcatctcataaaaggaattcagaaggtgctggtttaggtttagtgggaaaacgacttctgttttgacatgtagagtttgaagattaggagattgacagatgatgttgtctgacaggtggt

SEQ ID NO: 411362 - DNA, 120 bp, Artificial Sequence
  ENSG00000148429_80 (sequence is synthesized)
tggctgtcccagagagagatagagactccccagcatgtagggggcagagtcacaagagtgctggcctgggagatatgccagccaaggtggggcacctgggacaacagcacagctgagccg

SEQ ID NO: 411363 - DNA, 120 bp, Artificial Sequence
  ENSG00000148429_81 (sequence is synthesized)
cagacacgaagacatttgttaagttatcagccacgtctgcatcacagactacaggtactaccatttagcggagttatctttgaaaagacatcaacatccctgtgcatttgtcagtctggt

SEQ ID NO: 411364 - DNA, 120 bp, Artificial Sequence
  ENSG00000148429_82 (sequence is synthesized)
agagtggactggaggttgtcaagtctgcattgtagtctgagtgtgccacatgttagcaatgtgaccttgggccacacacctcttctgggccttactttgctctgctgtaaggtgtgggca

SEQ ID NO: 411365 - DNA, 120 bp, Artificial Sequence
  ENSG00000148429_83 (sequence is synthesized)
tttaagaggtaccagagggaaaggagcctccgaaggactcgcaggggcagtcgcagctgatgtttgagtgccctgggatgggagtcagactggctgaggtttcaattttgcattcatggc

SEQ ID NO: 411366 - DNA, 120 bp, Artificial Sequence
  ENSG00000148429_84 (sequence is synthesized)
cagccaccgttccaggtcctgttgagatcatcatgtaacaggacaacaaagtccctgtcctcatggggcttatattctgatccatttcctcatctatgaaatgaagattgtagtttttat

SEQ ID NO: 411367 - DNA, 120 bp, Artificial Sequence
  ENSG00000148429_85 (sequence is synthesized)
ttcatagagtcatgaagattgagttaatctctgaaatatccacacagtgttgtcactcaggaatgatttggaatgttagggatagtcacccaccaccacagtgctaggtttcagtgacca

SEQ ID NO: 411368 - DNA, 120 bp, Artificial Sequence
  ENSG00000148429_86 (sequence is synthesized)
ggagcgatgtggagctgagtctagtgggagtccagaggtaaagacacagtaaggtcacatgtgacccaggagggaggaggcacaggcagggcaatctgaggagactgtgccatggctgga

SEQ ID NO: 411369 - DNA, 120 bp, Artificial Sequence
  ENSG00000148429_87 (sequence is synthesized)
ggagcaggggctccaggaaggaggcagcatctgcactggaaatgcagcaggagggcccagtgagggaggcctggaaagtccacttggacttgacaatgaggagctctctgctgtcacctg

SEQ ID NO: 411370 - DNA, 120 bp, Artificial Sequence
  ENSG00000148429_88 (sequence is synthesized)
ctgtgattcctagagtcagaatcagactgcagtggccacaggcacaagtgggaagtgatgcagctcaaaggtttggatgagatgggatgtgcagcgattgagtcgtagctggagcgaagg

SEQ ID NO: 411371 - DNA, 120 bp, Artificial Sequence
  ENSG00000148429_89 (sequence is synthesized)
atgtgctaagttagggattggaggggcgtgcatttacatgggaaagtaatgctaattagaaatcagttggacttcaacattctcaagtacttccacaaagcatcccttggttttattcca

SEQ ID NO: 411372 - DNA, 120 bp, Artificial Sequence
  ENSG00000148429_90 (sequence is synthesized)
gtttgttgctttacgtatttgtaagtattaaacaccaattactaaattatctgtaattcagatttgtcatttggaggaaaatcaacataatctgaatataaagcaggcagcattgagaaa

SEQ ID NO: 411373 - DNA, 120 bp, Artificial Sequence
  ENSG00000148429_91 (sequence is synthesized)
attcttaaaggatgctgattttatcttggtttcttgcttttttaagttatctctcatgttctttgatttgctctatgttgcttctttctgtggtcttcttgggtatactcaagtgtgtat

SEQ ID NO: 411374 - DNA, 120 bp, Artificial Sequence
  ENSG00000148429_92 (sequence is synthesized)
cgcatatgtttaacaaaggaaaaatagtgttaaaagaaaaagtatcacttaatataagaagcaaaacttagtttttgtttctatgatagtgacatccaggtatgatttaggttatttttc

SEQ ID NO: 411375 - DNA, 120 bp, Artificial Sequence
  ENSG00000148429_93 (sequence is synthesized)
acgtgagaaaaaaactgtagaaacgttaactcctgtagaatgatgactatctgtggtgtagtaagatcatacaacttctctacttgttactgtgagttgcttaataaatggcagtacaag

SEQ ID NO: 411376 - DNA, 120 bp, Artificial Sequence
  ENSG00000148429_94 (sequence is synthesized)
tgtcaaatccataattagtcaatatcaagagctgcattttggattgcatgtactgtcccaaatatatgttgtgcaagttactttgtatcatgttaatggagaaaagagtggatattatga

SEQ ID NO: 411377 - DNA, 120 bp, Artificial Sequence
  ENSG00000148429_95 (sequence is synthesized)
aatcagcaatataaatcaaatgtatatgtggtcctgcaatgtaattgaaggtactcagtgttctcagacactcatgcaatatcttgtgttgctttctcagattttttaggtgtatcatag

SEQ ID NO: 411378 - DNA, 120 bp, Artificial Sequence
  ENSG00000148429_96 (sequence is synthesized)
gggatagctgggaactggtagagcagaggtactaagttccacctggaaatgctttagagtagctctttgaatatgtctttacttattatcttacagcgtatgtgtatatgattattttct

SEQ ID NO: 411379 - DNA, 120 bp, Artificial Sequence
  ENSG00000148429_97 (sequence is synthesized)
agagggtcgtaccctttattaagctgtgagcttcttgagggcaaggactgcaattcattaatcattttggagaaaagtgaataattctgaagaattcggtggttcatgagcttgcctggt

SEQ ID NO: 411380 - DNA, 120 bp, Artificial Sequence
  ENSG00000148429_98 (sequence is synthesized)
atttgtttctctatggcttatcatctaagtgagataacagatagtagataattgataaatttaatctgttacctaattactgagaggattcgattcttgctttatgttattactgaaaca

SEQ ID NO: 411381 - DNA, 120 bp, Artificial Sequence
  ENSG00000148429_99 (sequence is synthesized)
gactgcccagtaatcttctctagagagcaattaggtttgcaatgagttattttattgagaatgctacttgaaattaaatgtttatagcactatcttgatataatttaaatataatttaaa

SEQ ID NO: 411382 - DNA, 120 bp, Artificial Sequence
  ENSG00000148429_100 (sequence is synthesized)
tgtgctgaagtatcttcattcagataacttgttaccccttaacaaaaggctgcttgagtattgtttctctcccatttggcaaacaccagatgcagtgattaataaaggtcattatgctac

SEQ ID NO: 411383 - DNA, 120 bp, Artificial Sequence
  ENSG00000148429_101 (sequence is synthesized)
aaaatctggcttggactaatctaaatgactacctaagaacatttgaatattccctgaagttttattaattgtgagaaagcccttatctttctgtaatgtgaacaatccaaaatgtcaaca

SEQ ID NO: 411384 - DNA, 120 bp, Artificial Sequence
  ENSG00000148429_102 (sequence is synthesized)
aaatgctaatttggaatggctgtccttgacaatctcagcttcctgagggctgcatgctcaggggctgggagtcgtctgtgtagagtcgatggagaccctggctctcttgcacttctgatt

SEQ ID NO: 411385 - DNA, 120 bp, Artificial Sequence
  ENSG00000148429_103 (sequence is synthesized)
atcatgggaagcctcgccttggaaatgtgggactggagttgagctgaaaagaaggaaaaactttacctagactctgcagggagcaagttgaaaagcagagaatgggtatattaattatgg

SEQ ID NO: 411386 - DNA, 120 bp, Artificial Sequence
  ENSG00000148429_104 (sequence is synthesized)
ggtttttgaaaacagcactaagtacttttcagaaaaacttattttgaaataattatggattcataggaaattgcaaaacagtaccgagaaatcccatgtactttttactcagtttcctcc

SEQ ID NO: 411387 - DNA, 120 bp, Artificial Sequence
  ENSG00000148429_105 (sequence is synthesized)
atttttatgtaactttagttaaatatcaaaccaggatattgatattggtacaatccacagactttattcagatttcattagttttacatgcatgtgtgtggtgtatgtgtgacatttgtg

SEQ ID NO: 411388 - DNA, 120 bp, Artificial Sequence
  ENSG00000148429_106 (sequence is synthesized)
tgtatgtgtgtgtgtgtgtggtgggtcctcggcaattttatcatgtgtagatttgtgtaaccgtcatcagaaccaaggttacagaagagtttcatcaccacaggtttccttaacgctatg

SEQ ID NO: 411389 - DNA, 120 bp, Artificial Sequence
  ENSG00000148429_107 (sequence is synthesized)
ccctttctatcatacccttcccacacctccctgcacttccctaaccccttgcaatgaatttgttctccatctctataaatttaccatcttgagaatgctatataaatggaatcatatatt

SEQ ID NO: 411390 - DNA, 120 bp, Artificial Sequence
  ENSG00000148444_0 (sequence is synthesized)
gtgcgtgtcgaaggtcacggcgcgctcacaatggagctctcggagtctgtgcagaaaggcttccagatgctggcggatccccgctccttcgactccaacgccttcacgcttctcctccgg

SEQ ID NO: 411391 - DNA, 120 bp, Artificial Sequence
  ENSG00000148444_1 (sequence is synthesized)
gcggcattccagagtctgctggacgcccaggcggacgaggccgtgttagatcatccagacttgaaacatatcgacccagtggttttaaaacattgtcatgcagcagctgcaacttacata

SEQ ID NO: 411392 - DNA, 120 bp, Artificial Sequence
  ENSG00000148444_2 (sequence is synthesized)
ctagaggcaggaaagcaccgagctgacaagtcaactctaagcacttatctagaagactgtaaatttgacagagagcgaatagaactgttttgcacggaatatcagaataataagaattcc

SEQ ID NO: 411393 - DNA, 120 bp, Artificial Sequence
  ENSG00000148444_3 (sequence is synthesized)
tcaacttcataggatgtacagacctgcatatttggtgaccttaagtgtacagaacactgattccccatcctatccagagattagttttagttgcagcatggaacaattacaggacttggt

SEQ ID NO: 411394 - DNA, 120 bp, Artificial Sequence
  ENSG00000148444_4 (sequence is synthesized)
ggggaaacttaaagatgcttcgaaaagcctggaaagagcaactcagttgtaacttggggaagttaacgatccgcccgagtgcagaggaaaaccagaaacgccttgccttcagctgaacca

SEQ ID NO: 411395 - DNA, 120 bp, Artificial Sequence
  ENSG00000148444_5 (sequence is synthesized)
ccgtttgtgcgagctggatgtccttttcagtagaaaagaattttccttttgaatttataccattcatcaattttgacactttaaaaacgtgtgaaagggttaagagggaaagatactgcc

SEQ ID NO: 411396 - DNA, 120 bp, Artificial Sequence
  ENSG00000148444_6 (sequence is synthesized)
caagtatttgaatcgtttagtagtaactgtccatttatcctattttgatctttttcaagtcttctgaaaggaagtagacagtattacaccctgaataaataaggtgttgttttccacaaa

SEQ ID NO: 411397 - DNA, 120 bp, Artificial Sequence
  ENSG00000148444_7 (sequence is synthesized)
actgggaaggtaggtactgtataaggtgtcaagctgaggcacttttcacttgcaggtatgaatggagagtgttggtgtgaaacaagatcttcgggatcttgacccaaagaaaaggagcca

SEQ ID NO: 411398 - DNA, 120 bp, Artificial Sequence
  ENSG00000148444_8 (sequence is synthesized)
aagggcatgtcaagcaattgaagttaagctcatgtttttaaagatcgtttattgagatgattttgaaatgctcctttaccattcataatttaaaaataaagtttaacaatggtttaaatt

SEQ ID NO: 411399 - DNA, 120 bp, Artificial Sequence
  ENSG00000148444_9 (sequence is synthesized)
gggtggaaagtagagccattcttagtaaatataaataactgaaaagttcttctgaggagactatgtacgaagttatcattgcatctttcagtataggcagatctctccctcatataacgg

SEQ ID NO: 411400 - DNA, 120 bp, Artificial Sequence
  ENSG00000148444_10 (sequence is synthesized)
atgtttcttggcgcttggaatatcagataaaggtaaagtttaagaaacttctctagcgggggatttagggaacttcttaaaacctagagttaaaagctgttgcgtgtttgttgtgttatt

SEQ ID NO: 411401 - DNA, 120 bp, Artificial Sequence
  ENSG00000148444_11 (sequence is synthesized)
ttagaccaatcaacttcataggatgtacagacctgcatatttggtgaccttaagtgtacaggtatttatagataagtcttatccaataatgaaatttataatttcattgatttaaataaa

SEQ ID NO: 411402 - DNA, 120 bp, Artificial Sequence
  ENSG00000148444_12 (sequence is synthesized)
attcctgtctttttataaatgtttacttgagagttatactcttgggaagttcaaaagaaaattaatctaaccatttgtcagcagataatgaagattggttaaggatttaatgggaaaggg

SEQ ID NO: 411403 - DNA, 120 bp, Artificial Sequence
  ENSG00000148444_13 (sequence is synthesized)
gcatcaaaagtagtattttaagataggcttcacttgaaattaagatgttattaatagagaattggtctgtatttgctgttcttgctgattgaaataaacttctgtagtgtttagtgtaaa

SEQ ID NO: 411404 - DNA, 120 bp, Artificial Sequence
  ENSG00000148444_14 (sequence is synthesized)
gatttcaatttcagttttaaaaatggagacagaactttggctttttttttctttcttctagcacttatctagaagactgtaaatttgacagagagcgaatagaactgttttgcacggaat

SEQ ID NO: 411405 - DNA, 120 bp, Artificial Sequence
  ENSG00000148444_15 (sequence is synthesized)
atcaggttacttactttaaaatttttaattaacagtactatttttcttttactttgtttgtaaagatgtttttttttctttctttcttgctttcttttttctctccagaataataagaat

SEQ ID NO: 411406 - DNA, 120 bp, Artificial Sequence
  ENSG00000148444_16 (sequence is synthesized)
tgtctttgctttcagaaattgaattaaactgtcaaaattggattttgaaactttttaaatgactttataaagggggaagtatacataacattctaaaactgtttatattgcccatttaag

SEQ ID NO: 411407 - DNA, 120 bp, Artificial Sequence
  ENSG00000148444_17 (sequence is synthesized)
actgggaaaattcaaaactacatttattagtggatatgacaacgaatttatttcatagtttttaaaaaatgaagctcattactggaaatttaagtgaaattgaatttttcaaaggcatct

SEQ ID NO: 411408 - DNA, 120 bp, Artificial Sequence
  ENSG00000148444_18 (sequence is synthesized)
tctgcagagtcgttttaatgtaactatgaatcaaactttcaactttcagaaaatgtgtatacagcataacctttgttagataacttgagaaaattcagatgtatctgggcggttaaggat

SEQ ID NO: 411409 - DNA, 120 bp, Artificial Sequence
  ENSG00000148444_19 (sequence is synthesized)
ccggttagaaatcatgtttcagtgtgagggcaaataaccgatttgaacatgaggtatttccgaggaaacgctttttttgcccgatagtagtttgtcaaaagttaaaatcttgttgaattt

SEQ ID NO: 411410 - DNA, 120 bp, Artificial Sequence
  ENSG00000148444_20 (sequence is synthesized)
taaacttgtttggaaggtgtgtcctgattttttttcttgcatctttcttgagcttggatacttctttccatgttttatcctaaaaacgtggtattgtatacacgtcttttaggacttggt

SEQ ID NO: 411411 - DNA, 120 bp, Artificial Sequence
  ENSG00000148444_21 (sequence is synthesized)
gcattgttttggccccacttggcacctgcatagagccaactccacgttcctggcccggtttccctcccagtctctttgttcttttgtaaagccggtgttcaagtcttgtttgtggcctaa

SEQ ID NO: 411412 - DNA, 120 bp, Artificial Sequence
  ENSG00000148444_22 (sequence is synthesized)
acatctaaggtgtttagccttgtctgaggctgcggctgttttgacagttggacttcatctggggagctccctgcaattcaagcttccagggctaggctagcaaaggtttaaggatcatcc

SEQ ID NO: 411413 - DNA, 120 bp, Artificial Sequence
  ENSG00000148444_23 (sequence is synthesized)
ggcttccagatgctggcggatccccgctccttcgactccaacgccttcacgcttctcctccgggcggcattccagagtctgctggacgcccaggcggacgaggccgtgttagcacttatc

SEQ ID NO: 411414 - DNA, 80 bp, Artificial Sequence
  ENSG00000148450_0 (sequence is synthesized)
agagggcggagcggcgccggagcgggcgtcatggcgcggctcctctggttgctccggggcctgaccctcggaactgcgcc

SEQ ID NO: 411415 - DNA, 120 bp, Artificial Sequence
  ENSG00000148450_1 (sequence is synthesized)
ggcaccgggccgggactgggggaggcagggtctcttgcaacgtgtgagctgcctcttgccaagagtgagtggcaaaagaaactaaccccggagcagttctacgtcacaagagaaaaggga

SEQ ID NO: 411416 - DNA, 120 bp, Artificial Sequence
  ENSG00000148450_2 (sequence is synthesized)
acggaaccgcctttcagtgggatctacctgaataacaaggaagcaggaatgtatcattgcgtgtgctgcgacagtccactcttcagttctgagaaaaagtactgctctggcactgggtgg

SEQ ID NO: 411417 - DNA, 120 bp, Artificial Sequence
  ENSG00000148450_3 (sequence is synthesized)
ccttcgttttccgaggctcatggtacgtctggctctgatgaaagccacacagggatcctgagacgtctggatacctcgttaggatcagctcgcacagaggttgtctgcaagcagtgtgaa

SEQ ID NO: 411418 - DNA, 120 bp, Artificial Sequence
  ENSG00000148450_4 (sequence is synthesized)
gctcatctaggtcacgtgtttcctgatggacctgggcccaatggtcagaggttttgcatcaacagtgtggctttgaagttcaaaccaaggaaacactgaccatcttcaagagtcccgttc

SEQ ID NO: 411419 - DNA, 120 bp, Artificial Sequence
  ENSG00000148450_5 (sequence is synthesized)
ccttgccaccccttcacgtgcaccctcaatttccacaattcacttgaatgacttgttttatttgcaataaaactgggctgaatttgctgctgtctccagcgagtcattgcttctcttaat

SEQ ID NO: 411420 - DNA, 120 bp, Artificial Sequence
  ENSG00000148450_6 (sequence is synthesized)
ttatttacctggaatcaacttaatcctgtgtgttaggctgttcttgtgttgctataaagaagtacctgatcaggatctgggagaatttgaaaaaaaaagaaaaactagaaaaataaacaa

SEQ ID NO: 411421 - DNA, 120 bp, Artificial Sequence
  ENSG00000148450_7 (sequence is synthesized)
aggtttaattgactcacagttctgcagggtgtacagaaagcatggtgccagcatttgctcggattctggggagacctgagggagcttttactcatggcagaaggtgaagggggagccggc

SEQ ID NO: 411422 - DNA, 120 bp, Artificial Sequence
  ENSG00000148450_8 (sequence is synthesized)
gtctcacatggcaaagcaggagcaagagagagtggtagggaggtgccacatacttttaaacagccagatctctcaagaactcactcactgtcaccaggacagcaccaagccatgagggat

SEQ ID NO: 411423 - DNA, 120 bp, Artificial Sequence
  ENSG00000148450_9 (sequence is synthesized)
ccaccctcatgacccagttacctcccggcagggcccacctccggcactaggaattatacttcaacataagatttggagagggaaaacatccaaaccatatcacccaactcccacttggag

SEQ ID NO: 411424 - DNA, 120 bp, Artificial Sequence
  ENSG00000148450_10 (sequence is synthesized)
tagaacttcacaaaacgacagagggacagctgtttccatcaaacacttccacagcttcacctgagacgagggcatgactctgggaacatcaggaggctgatggactattaagccaaacaa

SEQ ID NO: 411425 - DNA, 120 bp, Artificial Sequence
  ENSG00000148450_11 (sequence is synthesized)
ttcctacaaaaattccctgcaccttccactgcgtttcagtccttgacagacataagtaagggatcaagtgagaagaggaaggaaaatacaggatccaaggaatcaacaatgctagcactg

SEQ ID NO: 411426 - DNA, 120 bp, Artificial Sequence
  ENSG00000148450_12 (sequence is synthesized)
aagagcaggattacggaggagctgtgctctgggagcatatatggtgatcaatcagatgcatgacttttttttcaaaattttaaatgtcttgagcatgctacttccaaccattctacccac

SEQ ID NO: 411427 - DNA, 120 bp, Artificial Sequence
  ENSG00000148450_13 (sequence is synthesized)
aaataaactgcaataggacttggttagatttcaatgattatgaataaatgttcaccttcataccttctggttacaaagctaaactttaaaatgtccaaataaaatattcactaaaattta

SEQ ID NO: 411428 - DNA, 120 bp, Artificial Sequence
  ENSG00000148450_14 (sequence is synthesized)
ggacgattccggggggactgactgtcgaataactgggcatgggatctggcagaggagagtgggaacagatcctgctgcctggaacaacacatcggggcacctcttggcatgttaatgaca

SEQ ID NO: 411429 - DNA, 80 bp, Artificial Sequence
  ENSG00000148459_0 (sequence is synthesized)
agactccgaccatggcctcgcgctggtggcggtggcggcgcggctgctcctggaagccggcggcgcggagccccgggccc

SEQ ID NO: 411430 - DNA, 120 bp, Artificial Sequence
  ENSG00000148459_1 (sequence is synthesized)
ctgccgaagtccgcgcgcaggttcataggcggaagggacttgacttgtctcagataccctatattaatcttgtgaagcatttaacatctgcctgtccaaatgtatgtcgtatatcacggt

SEQ ID NO: 411431 - DNA, 120 bp, Artificial Sequence
  ENSG00000148459_2 (sequence is synthesized)
ttcatcacacaaccccagacagtaaaacacacagtggtgaaaaatacaccgatcctttcaaactcggttggagagacttgaaaggtctgtatgaggacattagaaaggaactgcttatat

SEQ ID NO: 411432 - DNA, 120 bp, Artificial Sequence
  ENSG00000148459_3 (sequence is synthesized)
caacatcagaacttaaggaaatgtctgagtactactttgatgggaaagggaaagcctttcgaccaattattgtggcgctaatggcccgagcatgcaatattcatcataacaactcccgac

SEQ ID NO: 411433 - DNA, 120 bp, Artificial Sequence
  ENSG00000148459_4 (sequence is synthesized)
atgtgcaagccagccagcgcgccatagccttaattgcagaaatgatccacactgctagtctggttcacgatgacgttattgacgatgcaagttctcgaagaggaaaacacacagttaata

SEQ ID NO: 411434 - DNA, 120 bp, Artificial Sequence
  ENSG00000148459_5 (sequence is synthesized)
agatctggggtgaaaagaaggctgttcttgctggagatttaattctttctgcagcatctatagctctggcacgaattggaaatacaactgttatatctattttaacccaagttattgaag

SEQ ID NO: 411435 - DNA, 120 bp, Artificial Sequence
  ENSG00000148459_6 (sequence is synthesized)
agctcgggtcaaaagaaaatgagaatgaaagatttgcacactaccttgagaagacattcaagaagaccgccagcctgatagccaacagttgtaaagcagtctctgttctaggatgtcccg

SEQ ID NO: 411436 - DNA, 120 bp, Artificial Sequence
  ENSG00000148459_7 (sequence is synthesized)
acccagtggtgcatgagatcgcctatcagtacggaaaaaatgtaggaatagcttttcagctaatagatgatgtattggacttcacctcgtgttctgaccagatgggcaaaccaacatcag

SEQ ID NO: 411437 - DNA, 120 bp, Artificial Sequence
  ENSG00000148459_8 (sequence is synthesized)
ctgatctgaagctcgggttagccactggtcctgtcctgtttgcctgtcagcagttcccagaaatgaatgctatgatcatgcgacggttcagtttgcctggagatgtagacagagctcgac

SEQ ID NO: 411438 - DNA, 120 bp, Artificial Sequence
  ENSG00000148459_9 (sequence is synthesized)
agtatgtactacagagtgatggtgtgcaacaaacaacctacctcgcccagcagtactgccatgaagcaataagagagatcagtaaacttcgaccatccccagaaagagatgccctcattc

SEQ ID NO: 411439 - DNA, 120 bp, Artificial Sequence
  ENSG00000148459_10 (sequence is synthesized)
agctttcagaaattgtactcacaagagataaatgacaactctttctgttctttctggcagctatcttaccagactgtgcctaaagaattttgtggaatacactttgtttgcttcatgtgc

SEQ ID NO: 411440 - DNA, 120 bp, Artificial Sequence
  ENSG00000148459_11 (sequence is synthesized)
agataaccaaaaatcattttaaaagatatcaaacttattgatgggcaatttatttttttttattgcaaaagttttttcagaaaactttttaaatgtaattaataaaccacctgaatctgt

SEQ ID NO: 411441 - DNA, 120 bp, Artificial Sequence
  ENSG00000148459_12 (sequence is synthesized)
cattctagtcctataaattataatcaaggtatcttgatggttatatgtggtattgtttacactgttaatatccacatgtaaggccattacacaaataaataaccaatgttaaaattcaaa

SEQ ID NO: 411442 - DNA, 120 bp, Artificial Sequence
  ENSG00000148459_13 (sequence is synthesized)
tgtttgcctgtcagcaggttcactgccagggaaaaactggcagctgctgtaagcactgacgtggccaaaatcaaacacatcttacctcttccgtggagccatagactgttagagctcaag

SEQ ID NO: 411443 - DNA, 120 bp, Artificial Sequence
  ENSG00000148459_14 (sequence is synthesized)
ggcttccagtcatgaagatgagaagcctaagaccccaggggctaaggaagtcactcggctgtggcagctgttcccagaaatgaatgctatgatcatgcgacggttcagtttgcctggaga

SEQ ID NO: 411444 - DNA, 80 bp, Artificial Sequence
  ENSG00000148468_0 (sequence is synthesized)
gccgcccggcccgctctcggcgagcccgagccgccgccggccccgcggcggagatgagcaggtccgcgacgctgctgctg

SEQ ID NO: 411445 - DNA, 120 bp, Artificial Sequence
  ENSG00000148468_1 (sequence is synthesized)
agcaggtccgcgacgctgctgctgtgcctgctgggctgccacgtctggaaggcggtgaccaagacgctgcgggagcccggcgccggagcccaagaggtgacgttaaaggtgcacatcagc

SEQ ID NO: 411446 - DNA, 120 bp, Artificial Sequence
  ENSG00000148468_2 (sequence is synthesized)
gacgccagcacccaccagcccgtagcagatgcgctcatcgagatcttcaccaaccaggcctccatagcctctggcacctcggggactgatggcgtcgcctttatcaagttccagtataag

SEQ ID NO: 411447 - DNA, 120 bp, Artificial Sequence
  ENSG00000148468_3 (sequence is synthesized)
ctgggcagtcagttgattgtcaccgcctcgaagcatgcctacgtgccaaactctgccccatggaagccaatccggttacctgtattttcctctctgagccttggcctgcttccagaacgc

SEQ ID NO: 411448 - DNA, 120 bp, Artificial Sequence
  ENSG00000148468_4 (sequence is synthesized)
tctgccactctaatggtatatgaagatgtcgtccaaatagtatcaggattccaaggtgcccggccacagcctcgcgttcatttccagagaagggctctgaggttgcctgagaacaccagc

SEQ ID NO: 411449 - DNA, 120 bp, Artificial Sequence
  ENSG00000148468_5 (sequence is synthesized)
tacagtgacctgaccgcgtttctcacggccgccagctccccttcggaggtggacagttttccttatttgcgaggattagacggaaatggaacaggaaacagcaccaggcatgacctgacc

SEQ ID NO: 411450 - DNA, 120 bp, Artificial Sequence
  ENSG00000148468_6 (sequence is synthesized)
ccagtcacagccgtcagcgtccacttgctgagcagtaatggaacgccggtgctggtggatggtcccatctatgtcactgtgcccctggccacgcagagcagcctgaggcacaatgcctat

SEQ ID NO: 411451 - DNA, 120 bp, Artificial Sequence
  ENSG00000148468_7 (sequence is synthesized)
gtcgcggcgtggcggtttgaccagaagctgggaacgtggctgaagagcggtctgggtcttgtgcaccaggaaggcagccagctgacgtggacatacattgccccccagttggggtactgg

SEQ ID NO: 411452 - DNA, 120 bp, Artificial Sequence
  ENSG00000148468_8 (sequence is synthesized)
gtggccgccatgtcccctcccatcccaggtcccgttgtaacacaggacattaccacgtatcacacggtgtttcttttggccattttaggaggaatggctttcatacttttggttttgctg

SEQ ID NO: 411453 - DNA, 120 bp, Artificial Sequence
  ENSG00000148468_9 (sequence is synthesized)
tgtctccttttatattattgcaggaggaagtgcttgaaacctcgtcagcaccacagaaaactgcagctccctgcaggactggagagttccaaaagagaccagtccacgtccatgtcacac

SEQ ID NO: 411454 - DNA, 120 bp, Artificial Sequence
  ENSG00000148468_10 (sequence is synthesized)
attaacttgctgttttcacgccgagcgtcagaattccctggcccgctgtccgtcaccagccacggccgccccgaggcccccggcacgaaggaactgatgagtggagtccatttggaaatg

SEQ ID NO: 411455 - DNA, 120 bp, Artificial Sequence
  ENSG00000148468_11 (sequence is synthesized)
atgtctccgggcggcgaaggggacctgcacacccccatgctcaagctctcctacagcacctcccaggaatttagctcccgggaggagctcctctcttgcaaggaagaggataaaagccag

SEQ ID NO: 411456 - DNA, 120 bp, Artificial Sequence
  ENSG00000148468_12 (sequence is synthesized)
atctcctttgataacctcactccaagtgggacgctggggaaagactaccataagtcagtggaggtttttcccttaaaggcaagaaaatctatggaaagagaaggctacgagtcctcgggc

SEQ ID NO: 411457 - DNA, 120 bp, Artificial Sequence
  ENSG00000148468_13 (sequence is synthesized)
aatgatgactacaggggtagttacaacaccgtgctctcacagcctttatttgaaaagcaggacagagaaggtccagcctccacgggaagcaaactcaccattcaggaacatctgtacccc

SEQ ID NO: 411458 - DNA, 120 bp, Artificial Sequence
  ENSG00000148468_14 (sequence is synthesized)
gcgccttcatcacctgagaaagaacagctgctggaccgcagacccactgaatgtatgatgtcgcgatcagtagatcacctcgagagacctacgtccttcccacggcccggccagttaatc

SEQ ID NO: 411459 - DNA, 120 bp, Artificial Sequence
  ENSG00000148468_15 (sequence is synthesized)
tgctgcagttctgtcgaccaggtcaatgacagcgtttacaggaaagtactgcctgccttggtcatcccggctcattatatgaaactccccggggaccactcctatgtcagccagcccctc

SEQ ID NO: 411460 - DNA, 120 bp, Artificial Sequence
  ENSG00000148468_16 (sequence is synthesized)
cagcccctgtcttcccaggccatctctcagcagcacctgcaggatgcgggcacccgggagtggagccctcagaacgcatccatgtcggagtctctctccatcccagcttccctgaacgac

SEQ ID NO: 411461 - DNA, 120 bp, Artificial Sequence
  ENSG00000148468_17 (sequence is synthesized)
gcggctttggctcagatgaacagtgaggtgcagctcctgactgaaaaggccctgatggagcttgggggtgggaagccgcttccgcacccccgggcgtggttcgtctccttggatggcagg

SEQ ID NO: 411462 - DNA, 120 bp, Artificial Sequence
  ENSG00000148468_18 (sequence is synthesized)
tccaacgctcacgttagacattcatacattgatctccaaagagctggaaggaacggaagtaatgatgccagtttggactctggcgtagatatgaatgaaccaaaatcagcccggaaggga

SEQ ID NO: 411463 - DNA, 120 bp, Artificial Sequence
  ENSG00000148468_19 (sequence is synthesized)
aggggagatgctttgtctctgcagcagaactacccgcccgtccaagagcaccagcagaaagagcctcgagccccagacagcacggcctacacgcagctcgtgtacctggatgacgtggaa

SEQ ID NO: 411464 - DNA, 120 bp, Artificial Sequence
  ENSG00000148468_20 (sequence is synthesized)
cagagtggtagcgaatgtgggaccacggtctgtacccccgaggacagtgccctgcgatgcttgttggaggggtcgagtcggagaagtggtggccagctgcccagcctgcaggaggagacg

SEQ ID NO: 411465 - DNA, 120 bp, Artificial Sequence
  ENSG00000148468_21 (sequence is synthesized)
accagacggactgcggatgccccctcggagccagcagccagcccccaccagagaagatctgcccacgaggaagaggaagacgatgatgatgatgaccaaggagaagacaagaaaagcccc

SEQ ID NO: 411466 - DNA, 120 bp, Artificial Sequence
  ENSG00000148468_22 (sequence is synthesized)
tggcagaaacgggaggagaggcccctgatggcgtttaacattaaatgagctatcgcagacccacctgactgtggaatataaaattgccaaatatcctttctcatggaagcgcgtacccgt

SEQ ID NO: 411467 - DNA, 120 bp, Artificial Sequence
  ENSG00000148468_23 (sequence is synthesized)
tcgtggaggaaacggaacggcagcccagccgtgggacggacgtggacgtttactgcattcctgtttgccgtgtaaatgttagaaaggaattaaagttattactcggaataaaggatgact

SEQ ID NO: 411468 - DNA, 120 bp, Artificial Sequence
  ENSG00000148468_24 (sequence is synthesized)
ttggcggatgtcgcccctgcaaggaggtggctgaaagtggtgtccagatgtccttccgaggactcggcgtatccgccaccagggacattaagaaaccgcacgtgatgtcgctatgctcta

SEQ ID NO: 411469 - DNA, 120 bp, Artificial Sequence
  ENSG00000148468_25 (sequence is synthesized)
acgatcacctcagttctccctcggattctgggaacagatgaaactttttgcatcgcttgagtcatttttatcacaataatcctactgtgaagctgtcgttgagaacttaggttggcacgt

SEQ ID NO: 411470 - DNA, 120 bp, Artificial Sequence
  ENSG00000148468_26 (sequence is synthesized)
agcgtctcaaggtatgcgttctctcaaaggaaagctatgcatcgctgcttcgttgtctgattttgcttagattttgctttggttaggttgcgttttggggtttgcctttttttgttgtcg

SEQ ID NO: 411471 - DNA, 120 bp, Artificial Sequence
  ENSG00000148468_27 (sequence is synthesized)
cttaaatgcaatttggttgtaaagatttgattcctttgtgttcatctgttccgcttctcagcggtccatctcagcgtctcccttcaggaaccgctgagtgtcctctcttaacatccaagc

SEQ ID NO: 411472 - DNA, 120 bp, Artificial Sequence
  ENSG00000148468_28 (sequence is synthesized)
cttttaatgaaatcgtactgaaatctgtatcagctaagagtcctccaatcctggtcccattaactccaagtgcctttttgacagtgacaacagacagtccctcgctttttgttgttgttg

SEQ ID NO: 411473 - DNA, 120 bp, Artificial Sequence
  ENSG00000148468_29 (sequence is synthesized)
gttttcttaacccctttaatggaactgcctggattttatacagttattaaaggatgtctcttttgctttaaactgcatgctgccaagtgccatttggggtcagcatcctcgtttcaacac

SEQ ID NO: 411474 - DNA, 120 bp, Artificial Sequence
  ENSG00000148468_30 (sequence is synthesized)
agtgtgctctctagttatcatgtgtaacgtgggttctgtttagcgaagatagactagaggacacgttagagatgcccttccctgctccatccctgtggcaccattatggttttttggctg

SEQ ID NO: 411475 - DNA, 120 bp, Artificial Sequence
  ENSG00000148468_31 (sequence is synthesized)
tttgtatatacggttacgtattaactctggaatcctatgggctcatcttgctcacccaatgtgggagtctggtttgagcaagcgagctgaatgtgactattaaaaaaaatttaaaaaaaa

SEQ ID NO: 411476 - DNA, 120 bp, Artificial Sequence
  ENSG00000148468_32 (sequence is synthesized)
aaaagaaaatcttatgtactatccaaaagtgccagaatgactcttctgtgcattcttcttaaagagctgcttggttatccaaaaatgaaaattcaaaataaactctgaagaaaaggaaaa

SEQ ID NO: 411477 - DNA, 120 bp, Artificial Sequence
  ENSG00000148481_0 (sequence is synthesized)
acttccggtacggaaaactcgctgctgccccaacctggcttgacaggcttggtctctgcaagtggctctcagccccttcttctttcctgcctcaccttccaattcgtttgccgccgccgt

SEQ ID NO: 411478 - DNA, 120 bp, Artificial Sequence
  ENSG00000148481_1 (sequence is synthesized)
cccgcagctgctgtttccggagttgccccttccccatgttccggggcaggagtccgcaaagcgaagatccgcccgccggttcctcatcatgtccgaactgactaaagagctgatggagct

SEQ ID NO: 411479 - DNA, 120 bp, Artificial Sequence
  ENSG00000148481_2 (sequence is synthesized)
ggtgtggggcaccaagagcagccccggtctctcggacaccattttctgccgctggacgcaagggtttgtgtttagtgaatcagagggatctgcattagaacagtttgaaggtggcccctg

SEQ ID NO: 411480 - DNA, 120 bp, Artificial Sequence
  ENSG00000148481_3 (sequence is synthesized)
tgctgttattgcacctgttcaggcatttcttttgaagaagctcctgttttcttcggagaagtcttcttggcgggattgttcagaggaagagcagaaggaactcctttgtcataccttgtg

SEQ ID NO: 411481 - DNA, 120 bp, Artificial Sequence
  ENSG00000148481_4 (sequence is synthesized)
tgatattttagaaagtgcttgttgtgaccactctggatcatactgcttggtttcatggttaagaggaaagacaactgaggaaactgctagtatttctgggagtcctgcagagtctagttg

SEQ ID NO: 411482 - DNA, 120 bp, Artificial Sequence
  ENSG00000148481_5 (sequence is synthesized)
ccaagtggaacattcttctgccttggctgtcgaagagcttggctttgagcgatttcatgcattaattcaaaaaagatcgttcagaagtttaccagaattaaaagatgctgtcttggacca

SEQ ID NO: 411483 - DNA, 120 bp, Artificial Sequence
  ENSG00000148481_6 (sequence is synthesized)
gtattcaatgtggggaaataaatttggagtattgctttttctgtattctgtattactgacaaagggcattgaaaacataaaaaacgaaattgaagatgcaagtgaacccttgatagatcc

SEQ ID NO: 411484 - DNA, 120 bp, Artificial Sequence
  ENSG00000148481_7 (sequence is synthesized)
tgtatatggacatggcagccaaagtttaattaatctcctgctgacgggacatgctgtttctaatgtatgggatggtgatagagagtgctcaggaatgaaacttcttggtatacatgaaca

SEQ ID NO: 411485 - DNA, 120 bp, Artificial Sequence
  ENSG00000148481_8 (sequence is synthesized)
agcagcagtaggatttttaacactaatggaagctttaagatactgtaaggttggttcttacttgaaatctccaaaattccctatttggattgttggcagtgagactcacctcaccgtatt

SEQ ID NO: 411486 - DNA, 120 bp, Artificial Sequence
  ENSG00000148481_9 (sequence is synthesized)
taatggattcatacccgattcacttctggaagatgtgatgaaagcattggaccttgtttcagatcctgaatatataaatctcatgaagaataaattagatccagaaggattaggaatcat

SEQ ID NO: 411487 - DNA, 120 bp, Artificial Sequence
  ENSG00000148481_10 (sequence is synthesized)
attattgggcccatttcttcaagaattttttcctgatcagggctccagtggtccagaatcttttactgtctaccactacaatggattgaagcagtcaaattataatgaaaaggtcatgta

SEQ ID NO: 411488 - DNA, 120 bp, Artificial Sequence
  ENSG00000148481_11 (sequence is synthesized)
cgtagaagggactgcagttgtgatgggttttgaagatcccatgctacagacagatgacactcctattaaacgctgtctgcaaaccaaatggccatacattgagttactctggaccacaga

SEQ ID NO: 411489 - DNA, 120 bp, Artificial Sequence
  ENSG00000148481_12 (sequence is synthesized)
tcgctctccttcactaaattaatttgtctaagtatttataaggaagatcttaataacagatgttgaaagaaggagtcaagactggcaattggctggattaagctaaacactggtatcact

SEQ ID NO: 411490 - DNA, 120 bp, Artificial Sequence
  ENSG00000148481_13 (sequence is synthesized)
gattaactgtaaataacaattaaaaacacattttcagtgtttatgatatgtttaaattatttgtcctaaagctttatgttaaagattatcctattttaccccttcgtgtgaaatttacta

SEQ ID NO: 411491 - DNA, 120 bp, Artificial Sequence
  ENSG00000148481_14 (sequence is synthesized)
gcaaaattaagctttcatcaaagttcatcacttttgcattcagatacttggtcatttacttaccaaattacaaacgcaatactacagcatttgtatattaagtatcacagttactattga

SEQ ID NO: 411492 - DNA, 120 bp, Artificial Sequence
  ENSG00000148481_15 (sequence is synthesized)
taaactacttttgggttttatttcattgaggcactttttttattgtttgaatgattccggcttgtaatatatcagcctctacaatgaaatgcagaagagttcatttttctaagatctgtt

SEQ ID NO: 411493 - DNA, 120 bp, Artificial Sequence
  ENSG00000148481_16 (sequence is synthesized)
tttcattagaaatattgacaaataacacattgtcaacctggatcctttgacaatttacttaactctggcatgttcacaaaaagtagaaactctaagagaccattaccatttattcacaga

SEQ ID NO: 411494 - DNA, 120 bp, Artificial Sequence
  ENSG00000148481_17 (sequence is synthesized)
tgtataggggatgtattctaaaaactgacagaaaagagaatctgatagtcaacactgttaacttttactgtgtaattgccaaatacacttttccaaatttgtcccaacagccctgtaagc

SEQ ID NO: 411495 - DNA, 120 bp, Artificial Sequence
  ENSG00000148481_18 (sequence is synthesized)
cagctttcttctatatttataaacacgataaatgcatgagaagatctgttattacattagtatattacgttatttattatgatcctagttgatggcctaaataaacacctttttctttaa

SEQ ID NO: 411496 - DNA, 120 bp, Artificial Sequence
  ENSG00000148481_19 (sequence is synthesized)
atattgtacattttttgcctttttaaaaatctatatctgcatatatgaagcatagcaatctatgtaaggcaaagattaagaaatcgaactaatccaatattatagcagacttgacatact

SEQ ID NO: 411497 - DNA, 120 bp, Artificial Sequence
  ENSG00000148481_20 (sequence is synthesized)
taaattgagtttcctttcccacccagcaattactgtcctgctttttaaaaaatgctaaaagtgtctttctataaactttaaaaagtttctctgcaaacacttccccacgtcttaaaattt

SEQ ID NO: 411498 - DNA, 120 bp, Artificial Sequence
  ENSG00000148481_21 (sequence is synthesized)
tatgtgacattagtatcttcagtaaagtaatgacggttctgtgtagatggtgctagttgccctgcttaaataaccagcaggcctctgactttccctcttaaataaagatgatcaaagata

SEQ ID NO: 411499 - DNA, 120 bp, Artificial Sequence
  ENSG00000148481_22 (sequence is synthesized)
cccagtcaaaggataaggatttgagaaacatgcattttactttcagttgattagaaattgcctgatataaatataatttaaagtgttaatagtcctttatttataatagggctccagtgg

SEQ ID NO: 411500 - DNA, 120 bp, Artificial Sequence
  ENSG00000148481_23 (sequence is synthesized)
ctgccttggctgtcgaagagcttggctttgagcgatttcatgcattaattcaaaggccactctattctttaaataactgtatattattgaagaatttactgatgccagacagttcaccta

SEQ ID NO: 411501 - DNA, 120 bp, Artificial Sequence
  ENSG00000148481_24 (sequence is synthesized)
ctctgctgttcccaaaccatccttcctactttactggctcaacattgccacattagcacatctaactcatccctcccatcataggacaaaaatactagtttctctgtccatggatacaaa

SEQ ID NO: 411502 - DNA, 120 bp, Artificial Sequence
  ENSG00000148481_25 (sequence is synthesized)
agagtacctattttccacttccctcctagtgataagaataaattccacagggccagggtggtggttgaagcaggggctgctggctgattaggaaagaatttttggcctgactgccacaaa

SEQ ID NO: 411503 - DNA, 120 bp, Artificial Sequence
  ENSG00000148481_26 (sequence is synthesized)
cagccacttggaattccccaattataggcagtctgtaagaaaaaggaaaatgcagcaaattgtattgctaagattcgtcatttttaagttaaagtttctgtcttcatatgagagtggaat

SEQ ID NO: 411504 - DNA, 120 bp, Artificial Sequence
  ENSG00000148481_27 (sequence is synthesized)
tgagtggtgtgaacgtgttgggtttcataagtctattctgtttgtttagtattaaactttttttttctcagtcacacacacacaatcgtgttctcaagtttttggtatagtaatgttcac

SEQ ID NO: 411505 - DNA, 120 bp, Artificial Sequence
  ENSG00000148481_28 (sequence is synthesized)
agattatgtaaccttgagagcagagtacaaatacagctttttatacattttaaagagactgttcatactgtgaaactttgaacctaccttctatcatgaagagtcaaataacaggacact

SEQ ID NO: 411506 - DNA, 120 bp, Artificial Sequence
  ENSG00000148481_29 (sequence is synthesized)
tacatacttaaatggtttaaattgtaatttttcttgattatttgggagcaaagatgttctttccctttgattattcataaatctactcatttgataaactataattattttccttataaa

SEQ ID NO: 411507 - DNA, 120 bp, Artificial Sequence
  ENSG00000148481_30 (sequence is synthesized)
gttattatcgtcaagtttatagttttagggtttgaggtttcatgctgaaattctaagaagtggtcattttatctaggaactttagcaaaacctgagaatgactcttagggctaaatagtt

SEQ ID NO: 411508 - DNA, 120 bp, Artificial Sequence
  ENSG00000148481_31 (sequence is synthesized)
atctccagctgtgttaaatctatattgttgttgttttaatgtcaaagcacaatataagctcagtactgacagtcttctaacactcatttttacattcagcatttgatctctatgggtgaa

SEQ ID NO: 411509 - DNA, 120 bp, Artificial Sequence
  ENSG00000148481_32 (sequence is synthesized)
gtgctcgggcacaatacattatttcagttaaatacaaattggacactttatgcttcagatatttatgggcaaataagaggcagtataaatttttaatttgtttatttgttttattttgct

SEQ ID NO: 411510 - DNA, 120 bp, Artificial Sequence
  ENSG00000148482_0 (sequence is synthesized)
aaataatcctctctagctcccagtgcacagtcaaagaattttaaaaacagggaactttgtaactgtgaaatactctccaggatttaaaaggctgtggagctccagataaagaatcgttta

SEQ ID NO: 411511 - DNA, 120 bp, Artificial Sequence
  ENSG00000148482_1 (sequence is synthesized)
tctttcttctgaagaaattcctttggttacaagtttaccccataaacggcaacacactcacctccatccaagacagactcaaggtggaggaagcgtggaaatgtgcttccggacaaagct

SEQ ID NO: 411512 - DNA, 120 bp, Artificial Sequence
  ENSG00000148482_2 (sequence is synthesized)
ctcagtatcctgggtgccattgtttcttctactcagccgtgttttttctactgagacagacaaaccctcagcccaggatagcagaagccgtgggagttcaggccaaccggcagacctgct

SEQ ID NO: 411513 - DNA, 120 bp, Artificial Sequence
  ENSG00000148482_3 (sequence is synthesized)
acaggttctctctgctggtgaccacccaccccacaaccactcaagaagcctcatcaaaacattgttggagaaaactgggtgcccacggaggagaaacggaatgcaaggagattgcaatct

SEQ ID NO: 411514 - DNA, 120 bp, Artificial Sequence
  ENSG00000148482_4 (sequence is synthesized)
gtgctttgaaccagatgcactattactaatagctggaggaaattttgaagatcagcttagagaagaagtggtccagagagtttctcttctccttctctattacattattcatcaggaaga

SEQ ID NO: 411515 - DNA, 120 bp, Artificial Sequence
  ENSG00000148482_5 (sequence is synthesized)
gatctgttcttcaaagctcaacatgagtaataaagagtataaattttacctacacagcctactgagcctcaggcaggatgaagattcctctttcctttcacagaatgagacagaagatat

SEQ ID NO: 411516 - DNA, 120 bp, Artificial Sequence
  ENSG00000148482_6 (sequence is synthesized)
cttggctttcaccaggcagtactttgacacttctcaaagccagtgtatggaaaccaaaacgctgcagaaaaaatctggaatagtgagcagtgaaggtgctaatgaaagtacgcttcctca

SEQ ID NO: 411517 - DNA, 120 bp, Artificial Sequence
  ENSG00000148482_7 (sequence is synthesized)
gttggcagccatgatcattactttgtccctccagggtgtttgtctgggacaaggaaacttgccttccccagactactttacagaatatattttcagttccttgaatcgtacgaataccct

SEQ ID NO: 411518 - DNA, 120 bp, Artificial Sequence
  ENSG00000148482_8 (sequence is synthesized)
ccgcctatcagaactagaccaactcctcaacactctctggaccagaagtacttgtatcaaaaatgagaaaatccatcaatttcaaaggaaacaaaacaacataataacccatgatcagga

SEQ ID NO: 411519 - DNA, 120 bp, Artificial Sequence
  ENSG00000148482_9 (sequence is synthesized)
ctattctaatttctcttcatccatggaaaaagagtctgaggatggtccagtttcctgggatcagacctgcttctctgctaggcagctggtggagatatttctacagaagggcctctcact

SEQ ID NO: 411520 - DNA, 120 bp, Artificial Sequence
  ENSG00000148482_10 (sequence is synthesized)
acggctacagcacggtggctgtcacccttctcacactgggctccatgctggggacagcgctggtccttttccatagctgtgaggagaactacaggcttatcttacagctgtttgtgggct

SEQ ID NO: 411521 - DNA, 120 bp, Artificial Sequence
  ENSG00000148482_11 (sequence is synthesized)
tggccgtcgggacactgtctggggacgctctgctccaccttatccctcaggttcttggtttacataagcaggaagccccagaatttgggcatttccatgaaagcaaaggtcatatttgga

SEQ ID NO: 411522 - DNA, 120 bp, Artificial Sequence
  ENSG00000148482_12 (sequence is synthesized)
aactgatgggattaattggaggcatccatggatttttcttgatagaaaaatgttttattcttcttgtatcaccaaatgacaagaaaagcccagaagattcacaggcagctgaaatgccta

SEQ ID NO: 411523 - DNA, 120 bp, Artificial Sequence
  ENSG00000148482_13 (sequence is synthesized)
taggcagtatgacagcctccaacagaaaatgtaaagccattagcttgttagcaatcatgattctggttggggacagcctgcataattttgcagatggcctagccataggagcagccttct

SEQ ID NO: 411524 - DNA, 120 bp, Artificial Sequence
  ENSG00000148482_14 (sequence is synthesized)
catcatcatccgagtcaggagtgaccactacgattgctatcttgtgtcatgaaatcccacatgaaatgggagactttgccgtgctcttaagctctggactttctatgaagactgccatcc

SEQ ID NO: 411525 - DNA, 120 bp, Artificial Sequence
  ENSG00000148482_15 (sequence is synthesized)
tgatgaattttataagctccctaactgccttcatgggattatacattggcctttccgtgtcagctgatccatgtgttcaagactggatcttcacagtcactgctgggatgttcttatatt

SEQ ID NO: 411526 - DNA, 120 bp, Artificial Sequence
  ENSG00000148482_16 (sequence is synthesized)
tatccttggttgaaatgcttcctgaaatgactcatgttcaaacacaacgaccctggatgatgtttctcctgcaaaactttggattgatcctaggttggctttctctcctgctcttggcta

SEQ ID NO: 411527 - DNA, 120 bp, Artificial Sequence
  ENSG00000148482_17 (sequence is synthesized)
tatatgagcaaaatattaaaatataagtgaggatcttcaacatctttcaaaaatgcatttatatagtcttactttgtttctttcattgcactctataatgatttttaaattaagaatttt

SEQ ID NO: 411528 - DNA, 120 bp, Artificial Sequence
  ENSG00000148482_18 (sequence is synthesized)
ttatcttaggcaaagtgtgtctctttcaattcattaacttattaattttataatgcagttttatttttggaaacatataaatatcagactgtccttaattgaaattttgtctttggtttc

SEQ ID NO: 411529 - DNA, 120 bp, Artificial Sequence
  ENSG00000148482_19 (sequence is synthesized)
caacaccatgatgaagctcttgctttttaaaaagtagttagtaaattctgcatgaattttagtaaactttaaaaaatagattttttccctaagaaagaatgtttgtagaatttaaagtgg

SEQ ID NO: 411530 - DNA, 120 bp, Artificial Sequence
  ENSG00000148482_20 (sequence is synthesized)
acagatgcctgttggagtaaaatcaactgcaactttttgatgttaatttttttccctgtgcaattataaactataagcaagttaagtgacaagcaaatgtaataaagactagttttaata

SEQ ID NO: 411531 - DNA, 120 bp, Artificial Sequence
  ENSG00000148482_21 (sequence is synthesized)
cgtgggtcattcccaccatcttgcactcaactctgaattaagtgaccaggcaggcagaggcaaatctgcttcaactatccagttgaaaagcccagaagattcacaggcagctgaaatgcc

SEQ ID NO: 411532 - DNA, 120 bp, Artificial Sequence
  ENSG00000148483_0 (sequence is synthesized)
aaggaacttgatcccagttcagtgtctgtgggtccatatgctgcccacagtcaaagagggagtcccaggttcttggcagcttgcttttcctcaggatggcttctggaaggctcattaagt

SEQ ID NO: 411533 - DNA, 120 bp, Artificial Sequence
  ENSG00000148483_1 (sequence is synthesized)
tcgtggtttttgagctcctagagtttgccgctttctccatccccacactcgtgatcacagaacagtttgccaccgcctaccaaggaacaagggctagatctgacaacacacactactggc

SEQ ID NO: 411534 - DNA, 120 bp, Artificial Sequence
  ENSG00000148483_2 (sequence is synthesized)
tgatcatctcctgttctattgcctatgttgcgttagtgactctactgatctgggttcctgtaaaagttatcctgcacaagaaacgttatatttacagaaaaattaaaggatggagacctg

SEQ ID NO: 411535 - DNA, 120 bp, Artificial Sequence
  ENSG00000148483_3 (sequence is synthesized)
ttctgatgatgtgtgtggtcctcaccacactgccctgcctcaccttttccatagcagtgactgaggttcaaaagagcattaatgggtccgctgatgtcttacctgatatgttacctgacc

SEQ ID NO: 411536 - DNA, 120 bp, Artificial Sequence
  ENSG00000148483_4 (sequence is synthesized)
tgcccgtatctctggttctgttatccctgatcatggttgatattattgaaaaactcaggatatatcctcttagagggagtcaaaagagtagtgaaaatggacacatccattcaacctctt

SEQ ID NO: 411537 - DNA, 120 bp, Artificial Sequence
  ENSG00000148483_5 (sequence is synthesized)
tgcaacacataaaaactgtgacggagcaagtgaggcaaagtccagaaaacgctgcatctccccaggcaaccaacagcacccaggtgtcgcagccatcaggagccatgacacggagccagg

SEQ ID NO: 411538 - DNA, 120 bp, Artificial Sequence
  ENSG00000148483_6 (sequence is synthesized)
agtctgtgttcatgggaccccaggagccctcctgtgactccggaatcctgagaatgatgtcccggcgagatgtccgggcagagttattcttatggagctttctcctgtggtctgacacga

SEQ ID NO: 411539 - DNA, 120 bp, Artificial Sequence
  ENSG00000148483_7 (sequence is synthesized)
tagaaatggtgcgtgtggctggtcaccccaacgtgtacaagtcaagctggctatacccagtctacatattcagttttatttctctccttcgaattacattcactccccaaaaccctcttc

SEQ ID NO: 411540 - DNA, 120 bp, Artificial Sequence
  ENSG00000148483_8 (sequence is synthesized)
tcaattccctgagcgtcctgctgcaagatttaccattcgtttttgttagacttggtttaatcattgccctggggactatcacacccgtactgggcctgtgtaaaaatatcctcgtgactc

SEQ ID NO: 411541 - DNA, 120 bp, Artificial Sequence
  ENSG00000148483_9 (sequence is synthesized)
tctcttacatttacttcaattacctaaccagaatcaggattttttctgcctttgaaatgtctccattttaaaaaggaaatgggatctagtaaggcctctttgtgatacctgtgtgcacat

SEQ ID NO: 411542 - DNA, 120 bp, Artificial Sequence
  ENSG00000148483_10 (sequence is synthesized)
ttgtaatccttctttttttcttggggcgtaggtgtttgcactataaaggaaatgactagattgtagagaataagccatttttactaactctagcatatcagtttttttttttacatatac

SEQ ID NO: 411543 - DNA, 120 bp, Artificial Sequence
  ENSG00000148483_11 (sequence is synthesized)
aaatggtgctaaatttaagtaaagtaatattcttataagttggctctcaggtatttctagaaaatgttagcagctaattttagttagttatgtatactgaggtccccaacccctggacca

SEQ ID NO: 411544 - DNA, 120 bp, Artificial Sequence
  ENSG00000148483_12 (sequence is synthesized)
accatggtcccagtactggtccgtgatctgttagcaagcagaccgcacagcacgtggtgaacctcaaactgagcgttcccgcctgcattccgcctcctgtcagatcagcagcagcattag

SEQ ID NO: 411545 - DNA, 120 bp, Artificial Sequence
  ENSG00000148483_13 (sequence is synthesized)
tcataggagcccaaaccctattgtgaactgcgtatgcaagggatctagctttcgctctttaagaaaatctaatacctgatgatctgaggtgggacagtttcatcccagaacccaacccca

SEQ ID NO: 411546 - DNA, 88 bp, Artificial Sequence
  ENSG00000148483_14 (sequence is synthesized)
taatgtataccacgctttttctaagaatactcttcaacggagccctttaaaaaactaagaaccttttccatcaagttagcccaagaat

SEQ ID NO: 411547 - DNA, 120 bp, Artificial Sequence
  ENSG00000148483_15 (sequence is synthesized)
aaaaaactaagaaccttttccatcaagttagcccaagaataagatttttatcttttatatagatagcattatatgaattgattgattaaatttagttttaaaaaacacacttgaaattat

SEQ ID NO: 411548 - DNA, 120 bp, Artificial Sequence
  ENSG00000148483_16 (sequence is synthesized)
tgaataatttttaggttatacttttttttttttttttgagacgatgtctcgctcttgtcccctaggctggagtgcgatggcgcgttctcagctcactgcaacctgtatctcccgggttca

SEQ ID NO: 411549 - DNA, 80 bp, Artificial Sequence
  ENSG00000148483_17 (sequence is synthesized)
gattatactttttaaaaatttgaaaattgtagttttaggggttccttcaaaggtggaattatattctttattccattgtg

SEQ ID NO: 411550 - DNA, 120 bp, Artificial Sequence
  ENSG00000148483_18 (sequence is synthesized)
gttccttcaaaggtggaattatattctttattccattgtggcaagggacttttattcaataaattgatttcagcataaaaagcaattcactttaacagatatttggctcagtttaaggct

SEQ ID NO: 411551 - DNA, 120 bp, Artificial Sequence
  ENSG00000148483_19 (sequence is synthesized)
tagctgtattgccagtactgaagtactaatatgagtgttgtttagtataatgaagtcaaggtacatcagtaataccaagataaagtttcataataaaaagccataaagtgaagacagaga

SEQ ID NO: 411552 - DNA, 120 bp, Artificial Sequence
  ENSG00000148483_20 (sequence is synthesized)
tttcaaagtaaaagaatattttatttgtggaatttgatactttgataaataatcaaagtacaagccctgtttaaaattaaaagttcggcttacaaatataatagccaatgtatcagtgtc

SEQ ID NO: 411553 - DNA, 120 bp, Artificial Sequence
  ENSG00000148483_21 (sequence is synthesized)
agtaattttcagatgctagagagatttgtgagaggctgataatgcaagagtaatgatttatgtagccagtttcttcaatgatctgtgataacaaatcattaagaatgagacatatggctt

SEQ ID NO: 411554 - DNA, 80 bp, Artificial Sequence
  ENSG00000148483_22 (sequence is synthesized)
atctgtgataacaaatcattaagaatgagacatatggcttaagaatgaagcttaagaatttgacatatggccggctgagg

SEQ ID NO: 411555 - DNA, 83 bp, Artificial Sequence
  ENSG00000148483_23 (sequence is synthesized)
agattctactctgcaactatagtcccagctacttaggaggctggggcaggaagattgcttgagcccaggaggtcaaggctaca

SEQ ID NO: 411556 - DNA, 120 bp, Artificial Sequence
  ENSG00000148483_24 (sequence is synthesized)
tgcactccagactgggcaacagagtgacacccatctaaaaaaaataaaagagaatttgacgttgtgttattctacgctccaccaaatacctctccccttgccaccctgtctccctttccc

SEQ ID NO: 411557 - DNA, 120 bp, Artificial Sequence
  ENSG00000148483_25 (sequence is synthesized)
cctctccccttgccaccctgtctccctttccctctgttttaggatttttctcacactgtaaaagaagatttactcacagttgttaaaagcttgccttccagctttctaatttgaggtagg

SEQ ID NO: 411558 - DNA, 120 bp, Artificial Sequence
  ENSG00000148483_26 (sequence is synthesized)
ttctataacctctgtgggtccccgtttccacatgtaaaagatgaacataatactagtactacattaatagggttaggagggttaaagggtaaagagtcctttgagcacattttctggcaa

SEQ ID NO: 411559 - DNA, 120 bp, Artificial Sequence
  ENSG00000148483_27 (sequence is synthesized)
accataataacttgataaatgctaagcattggaacgggtaccaagtctccaagaaacaagtatctcaatgcagttttagaaatttcctgttttattcttttctgtggccctgctcaccct

SEQ ID NO: 411560 - DNA, 120 bp, Artificial Sequence
  ENSG00000148483_28 (sequence is synthesized)
ctgggaataatcatttcaactttgcatttgtgaaaaataatacatacaatcttaaggttacttcagactatactttttcatcgaggagtattgtattcaaaagtgatcgatctgctgaat

SEQ ID NO: 411561 - DNA, 120 bp, Artificial Sequence
  ENSG00000148483_29 (sequence is synthesized)
atataaattaaaatggacacaagccttcattcatcagacatttgagtgtctgtcctctgagttcccatagaatctgaattacaccactttattcacacttacattatgtgtttacttttc

SEQ ID NO: 411562 - DNA, 120 bp, Artificial Sequence
  ENSG00000148483_30 (sequence is synthesized)
tgagtgtcctattaatctttattccttaaaggaaagcctgagggcatcttgtttaacaatgcatctctctcttcatcaatcaacgctgcaggtgcttacaagacttataacttaaaaaaa

SEQ ID NO: 411563 - DNA, 120 bp, Artificial Sequence
  ENSG00000148483_31 (sequence is synthesized)
ttataacttaaaaaaattataatacaaggctcagcgcagtgcctcaagtgccaacagtttcggaggccttggcaggcggatcacttgaggccaagagttcgagactagcctggccaacat

SEQ ID NO: 411564 - DNA, 120 bp, Artificial Sequence
  ENSG00000148483_32 (sequence is synthesized)
tgcgccattgcacaccagcctgggtgacaagagtctcaaaaaaaaaattataatacaagtaattactttcgaattctgccatgggtatctttttattattaagaaaagcctgtcatcaag

SEQ ID NO: 411565 - DNA, 120 bp, Artificial Sequence
  ENSG00000148483_33 (sequence is synthesized)
ggattcatttatgatattcctaaatatgaaaatattttgtgtaagtatatatttatctccatattagaacttagcaacagtgctcagataaactcaaaagtattacttgagtttagaatg

SEQ ID NO: 411566 - DNA, 120 bp, Artificial Sequence
  ENSG00000148483_34 (sequence is synthesized)
cattttgtatctaatattttaatatgaatgtgcctgatattttcggaagtcacaacactatacaaataatgaaggcatgtacagaagattatgtgtaggaggaaaattgagtagctaatt

SEQ ID NO: 411567 - DNA, 120 bp, Artificial Sequence
  ENSG00000148483_35 (sequence is synthesized)
taatttcatttaatattttacttagagtgtatacatgtttatagactgcaagtctatgggatttaatagatattacagcaaattacactgcgaaaacattgatagttctacactgtaatt

SEQ ID NO: 411568 - DNA, 80 bp, Artificial Sequence
  ENSG00000148483_36 (sequence is synthesized)
aattacactgcgaaaacattgatagttctacactgtaattaaatgttatatatattattaaaagaaagtggtggtgcatg

SEQ ID NO: 411569 - DNA, 69 bp, Artificial Sequence
  ENSG00000148483_37 (sequence is synthesized)
tctcgccactatcaagtacagttagttaaaggaatgtgcatttaaaaattaatctatgattaggctatt

SEQ ID NO: 411570 - DNA, 120 bp, Artificial Sequence
  ENSG00000148483_38 (sequence is synthesized)
aattttatttattttataattttacaaaaaattctaatacctgtaatacactttttagtgccttttctttctaaaagttaatgtttgaaattacaatgtgtaaatgttatctcgtcttgt

SEQ ID NO: 411571 - DNA, 120 bp, Artificial Sequence
  ENSG00000148483_39 (sequence is synthesized)
ttgtttttcttattagggccccatttcactgaatgacaattgcaatgaggcataggaaagaaaagggaaatgaaattgcttgctgaagtcctactatgttctgggcactatgctgtttgc

SEQ ID NO: 411572 - DNA, 120 bp, Artificial Sequence
  ENSG00000148483_40 (sequence is synthesized)
ctaatacataattgccttgtgctgtgtaccttggagcagggccttacatagtgaatatatcaatagttgttcacaaaaagagcaatataccacttagaagctacaaaacttaaaaatggc

SEQ ID NO: 411573 - DNA, 120 bp, Artificial Sequence
  ENSG00000148483_41 (sequence is synthesized)
tacttatactccatagaagatatagtaaataatagaagaaaaaaatgaaatggctaaagacattttgttttacaatggggctgtttttacatgttaattaaaattctatgtttaaacaaa

SEQ ID NO: 411574 - DNA, 120 bp, Artificial Sequence
  ENSG00000148484_0 (sequence is synthesized)
agggcgtgttcgctgttcagtgccggtgttgcagggagtgagggcagctggagtgcgttctgccgaagcttgtggttgcacgcccatcgtcttaggggctaccttccgtgaccatgtcca

SEQ ID NO: 411575 - DNA, 120 bp, Artificial Sequence
  ENSG00000148484_1 (sequence is synthesized)
agtctctgaagaagttggtggaggagagccgggagaagaaccagcccgaggtggacatgagtgaccggggcatctccaacatgctggatgtcaacggcctctttaccttatcccatatca

SEQ ID NO: 411576 - DNA, 120 bp, Artificial Sequence
  ENSG00000148484_2 (sequence is synthesized)
cacaactggtcctcagccataacaagctaacaatggtgccaccgaacatcgcagaactgaagaatttggaggtgctcaacttttttaataaccaaatcgaggagctgcccacacagatca

SEQ ID NO: 411577 - DNA, 120 bp, Artificial Sequence
  ENSG00000148484_3 (sequence is synthesized)
gtagccttcagaaactcaaacacctgaaccttggcatgaacaggctgaacactttgccacgaggcttcggctccctgccagctcttgaggttctggacttgacgtacaacaacttgagcg

SEQ ID NO: 411578 - DNA, 120 bp, Artificial Sequence
  ENSG00000148484_4 (sequence is synthesized)
aaaattctcttcctggaaacttcttctacctgaccaccctgcgtgcactctatctaagtgacaacgattttgaaatcctgccgccagatattgggaagctcacaaagttgcagatactca

SEQ ID NO: 411579 - DNA, 120 bp, Artificial Sequence
  ENSG00000148484_5 (sequence is synthesized)
gccttagggataacgacctgatctcgctgcctaaggaaatcggggagcttacccagcttaaagagctccacattcaggggaaccgcctcaccgttctgcccccagaactaggaaacttgg

SEQ ID NO: 411580 - DNA, 120 bp, Artificial Sequence
  ENSG00000148484_6 (sequence is synthesized)
atttaactggccagaagcaggtattcaaagcagagaacaatccctgggtgacccccattgcagaccagttccagcttggcgtgtcccatgtttttgagtatatccgttctgagacataca

SEQ ID NO: 411581 - DNA, 120 bp, Artificial Sequence
  ENSG00000148484_7 (sequence is synthesized)
aatacctctacggcagacacatgcaggccaacccagaaccaccgaagaagaataatgacaaatcgaaaaagatcagccggaaacccctggcagccaagaacagataaggaagggattggc

SEQ ID NO: 411582 - DNA, 120 bp, Artificial Sequence
  ENSG00000148484_8 (sequence is synthesized)
atcggctggccttccagcaccttctctctccaacacttcattctctcttgccctgtctctcaaataaacccaatgctgcgtgtgaggccttttttatttttcttttcactctctttctaa

SEQ ID NO: 411583 - DNA, 120 bp, Artificial Sequence
  ENSG00000148484_9 (sequence is synthesized)
tgcttcccaccttaccttttagattcttttgctaggtgggagattgttataaggtctttaaaccatttccatttgtttctttaacattaccaaaagcagggaacaaagctcttattcaac

SEQ ID NO: 411584 - DNA, 120 bp, Artificial Sequence
  ENSG00000148484_10 (sequence is synthesized)
tgcgaattccatagtgggctctggcttttcttgaatagatatcacaaggttgcttattatcaaaagaataattaaaatcatgtaaccatttaaatgtcactgttaacacttttcactctt

SEQ ID NO: 411585 - DNA, 120 bp, Artificial Sequence
  ENSG00000148484_11 (sequence is synthesized)
tctgttgattcacctaactcattattttgctttattaaaagtcttccttcaccaccgagatatgctaatttaacttacaaatgattttaataaaatcttgagtttgtatcacatgttact

SEQ ID NO: 411586 - DNA, 120 bp, Artificial Sequence
  ENSG00000148484_12 (sequence is synthesized)
tattgactcagaataaaagaacagtctgatcttggggtataacacattttcatttacttttctcccccaaaatcatcttatccaattttattggttatacatgataaacttttcatgaaa

SEQ ID NO: 411587 - DNA, 120 bp, Artificial Sequence
  ENSG00000148484_13 (sequence is synthesized)
gaaatgcaaaattaaatcacagttcgtttcttctcacattaatttgtcaagttttttttttctttgaagactttctaaattaggaagcagaaaaacaaatctctaggagattctgccaaa

SEQ ID NO: 411588 - DNA, 120 bp, Artificial Sequence
  ENSG00000148484_14 (sequence is synthesized)
ggattttggaaagtagcattccttcgccgaagaaatggtgatttctgccaggggctggtagacaagaactgtgaaagagagagagaaaaaacctcaactgtgtattttgtcacggcggaa

SEQ ID NO: 411589 - DNA, 120 bp, Artificial Sequence
  ENSG00000148484_15 (sequence is synthesized)
catcgaagcattcttctaagcgacttcgatgccaaggaagttgtgtaaatgtgcacgcgctacaccacacccagggtggaaaccacagttgcagagtcattaaacaatcaattgtttgtt

SEQ ID NO: 411590 - DNA, 120 bp, Artificial Sequence
  ENSG00000148484_16 (sequence is synthesized)
taacatctgtgataggcagctttccttcttttcaacagtgatacctacgaaaatcaaaataaatgcaagctgaggttttgtgctcactgaaagggctgtcaaccccagaaggccgacaca

SEQ ID NO: 411591 - DNA, 120 bp, Artificial Sequence
  ENSG00000148484_17 (sequence is synthesized)
aaaaaaatggtatgtgaagatgcaccgtcttttcaaatggcctgggagagtcaaatggcctgggagagggggcctgcccttctctgctgtgtcctttcggcttcccagttgagctcccaa

SEQ ID NO: 411592 - DNA, 120 bp, Artificial Sequence
  ENSG00000148484_18 (sequence is synthesized)
gaccaggacccactggggcatataaaatctctgctgtatcctttcggcttcccagttgagctcccaagaccaggacccactggggcatataaaaaagtcaaaaatcaaaatcaaacaaca

SEQ ID NO: 411593 - DNA, 120 bp, Artificial Sequence
  ENSG00000148484_19 (sequence is synthesized)
agttctgagttacttaggaaacagacttcgcatttcaatcagagaggccacagagcaaggtctaaacttctggcttctagacaaattcctgatagaacatttaaatgtgggaagtggctt

SEQ ID NO: 411594 - DNA, 120 bp, Artificial Sequence
  ENSG00000148484_20 (sequence is synthesized)
ccccaggtcccatcccctgtttagggatagagttgatatcatttttataggtgccatgtatgcctctgcctgaatttttttaattgacttttgagcttttgagattgcacgagggagaac

SEQ ID NO: 411595 - DNA, 120 bp, Artificial Sequence
  ENSG00000148484_21 (sequence is synthesized)
aaggcctttgctgttgtggataggaaagacttaacctaaaattaaaccagcaagaaagcattagtaaaaatctaacaatatgaagggctcttatgagtcatttttttcaaaagatgaaaa

SEQ ID NO: 411596 - DNA, 120 bp, Artificial Sequence
  ENSG00000148484_22 (sequence is synthesized)
ctccagaaacgcacaggaacgaaatacctcccagaaacatgaagcaatcatcgaagactcactggtaatatttttaaaaagtatacagatcaaagcaaaaagaagccatgtgtaacaaag

SEQ ID NO: 411597 - DNA, 120 bp, Artificial Sequence
  ENSG00000148484_23 (sequence is synthesized)
agaaatgtgcaaatattttttaaggcagtattaagtgcaagaggagtaacatgaaataaacattctttcacatggctactgggaatataaatttcgctccagaaaggccgtagcagtttg

SEQ ID NO: 411598 - DNA, 120 bp, Artificial Sequence
  ENSG00000148484_24 (sequence is synthesized)
acgataggtggcaaaaccttaagattgtgtactggggcccagaatttttatttctaggaatgtatcctgaggaaattatccgagatccccacaaactgcaatgtttaggaattgtcctta

SEQ ID NO: 411599 - DNA, 120 bp, Artificial Sequence
  ENSG00000148484_25 (sequence is synthesized)
tagcattgcatacacaagaaaaacagagaaaagcctgatccctgtcagtggaaaaggggttcaatgaattacggtgtgtctgcatgaggcttttatgacattaaaaattgttgaacaacg

SEQ ID NO: 411600 - DNA, 61 bp, Artificial Sequence
  ENSG00000148484_26 (sequence is synthesized)
tgcatgaggcttttatgacattaaaaattgttgaacaagattgcctgagctcaggagtttg

SEQ ID NO: 411601 - DNA, 120 bp, Artificial Sequence
  ENSG00000148484_27 (sequence is synthesized)
gcctgggcgacagagcaagattccgttcccaagaaaaaaaaattgttcaacaataagggcaaagggagagaatcataacatctgattaaacagaaaaagcaagatttttaaaactaacta

SEQ ID NO: 411602 - DNA, 120 bp, Artificial Sequence
  ENSG00000148484_28 (sequence is synthesized)
taaaactaactatataaggatggtcccagctgtgtcaaaaggaagcttgtttgtaatacgtgtgcataaaaattaaatagaggtgaacacaattattttaaggcagttaaattatctctg

SEQ ID NO: 411603 - DNA, 120 bp, Artificial Sequence
  ENSG00000148484_29 (sequence is synthesized)
tctgtattgtgaactaagactttctagaattttacttattcattctgtacttaaattttttctaatgaacacatatacttttgtaatcagaaaatattaaatgcatgtatttttcaaaat

SEQ ID NO: 411604 - DNA, 120 bp, Artificial Sequence
  ENSG00000148484_30 (sequence is synthesized)
gggcagctggagtgcgttctgccgaagcttgtggttgcacgcccatcgtcttaggggctaccttccgtggtgagtgtgtgcggtgttgcacttggggttgcttctcgctgcgtggccgca

SEQ ID NO: 411605 - DNA, 120 bp, Artificial Sequence
  ENSG00000148484_31 (sequence is synthesized)
gcggggctgaacccttcccactccatcccctccccgcacccggaccagcccctgggacgccctcggacgcccacccgctccaaccctggggaagcctcagagtggcagcgaaggcctctt

SEQ ID NO: 411606 - DNA, 120 bp, Artificial Sequence
  ENSG00000148484_32 (sequence is synthesized)
gctgttcagtgccggtgttgcagggagtgagggcagctggagtgcgttctgccgaagcttgtggttgcacgcccatcgtcttaggggctaccttccgtgtggtgccaccgaacatcgcag

SEQ ID NO: 411607 - DNA, 120 bp, Artificial Sequence
  ENSG00000148484_33 (sequence is synthesized)
gatgggaggccacatcctgttcccttgtggtaggcatcttggcaaaaaccaccaactggcagcctgtgttgtgaggaatgcacattaattagttccttgaaactcttccctcattaactt

SEQ ID NO: 411608 - DNA, 120 bp, Artificial Sequence
  ENSG00000148484_34 (sequence is synthesized)
ggcagcggcgctgtgtgcgcctgcgcggggcgccgagacagggcgtgttcgctgttcagtgccggtgttgcagggagtgagggcagctggagtgcgttctgccgaagcttgtggttgcac

SEQ ID NO: 411609 - DNA, 120 bp, Artificial Sequence
  ENSG00000148488_0 (sequence is synthesized)
agcagcagtggcagcggcgaccggagcccgcagcagctccgagcgcctccgggaggacaggcggcgagctcggcgaatcgtcatctgccagccgatcgcggcgctccgcgggccggggcc

SEQ ID NO: 411610 - DNA, 80 bp, Artificial Sequence
  ENSG00000148488_1 (sequence is synthesized)
gggagcccggggcgagcccgaacgcggcttcttctccgcccgccgcggagactctgccgggtgggctgcgggcgcccctc

SEQ ID NO: 411611 - DNA, 80 bp, Artificial Sequence
  ENSG00000148488_2 (sequence is synthesized)
gcccgggctgtgcttcgccccggcagcagcggtggcggcggcgcctgtggctcaggatgcggccggggggcgcactgctc

SEQ ID NO: 411612 - DNA, 120 bp, Artificial Sequence
  ENSG00000148488_3 (sequence is synthesized)
gctcgccctgctcgccagcctgctgctgctgctgctgctgcgcctgctctggtgcccggcagacgcgcccggccgcgccaggattctggtggaggaaagcagggaggccacccacggcac

SEQ ID NO: 411613 - DNA, 120 bp, Artificial Sequence
  ENSG00000148488_4 (sequence is synthesized)
ccccgcagcgctgaggacgctccggagcccggcgaccgcggtaccgcgcgccactaacagcacatatctgaatgagaagtcgctccaactgacggagaaatgcaaaaatctgcaatatgg

SEQ ID NO: 411614 - DNA, 120 bp, Artificial Sequence
  ENSG00000148488_5 (sequence is synthesized)
cattgagtctttctctaacaaaacgaaagggtattcagagaacgactaccttcagattatcacagatatacagagttgtccatggaaacggcaagcagaagaatatgcaaattttagagc

SEQ ID NO: 411615 - DNA, 120 bp, Artificial Sequence
  ENSG00000148488_6 (sequence is synthesized)
caaacttgcttcctgctgtgatgctgttcaaaactttgttgtttctcagaataacactccagttgggactaatatgagttacgaggtggaaagcaaaaaagaaatcccaattaagaagaa

SEQ ID NO: 411616 - DNA, 120 bp, Artificial Sequence
  ENSG00000148488_7 (sequence is synthesized)
catttttcatatgtttccagtgtcccagccttttgtggactacccttataatcagtgtgcagtggtcggaaatgggggaattctgaataagtctctctgtggaactgaaatagataaatc

SEQ ID NO: 411617 - DNA, 120 bp, Artificial Sequence
  ENSG00000148488_8 (sequence is synthesized)
cgacttcgtttttaggtgtaacctacccccaaccacaggagatgttagtaaagatgttggcagtaaaacaaatcttgtgactataaatccaagcatcataactctgaaatatgggaactt

SEQ ID NO: 411618 - DNA, 120 bp, Artificial Sequence
  ENSG00000148488_9 (sequence is synthesized)
aaaggaaaaaaaagccctatttctggaggacattgcaacctatggagatgcattttttcttctgccagcattttccttcagggccaacacgggtacctctttcaaagtatactacacgct

SEQ ID NO: 411619 - DNA, 120 bp, Artificial Sequence
  ENSG00000148488_10 (sequence is synthesized)
cgaagagtctaaagcaagacaaaaggttctatttttccatcccaagtacctgaaagatctggcccttttctggagaactaaaggtgtgactgcataccgcttgtccaccggcttgatgat

SEQ ID NO: 411620 - DNA, 120 bp, Artificial Sequence
  ENSG00000148488_11 (sequence is synthesized)
cacaagtgttgcagtggaactgtgtaaaaatgtgaagctgtatggattctggcccttctctaaaactgtagaagacatacctgtcagccatcactattatgacaacaagctacctaaaca

SEQ ID NO: 411621 - DNA, 120 bp, Artificial Sequence
  ENSG00000148488_12 (sequence is synthesized)
tggtttccatcagatgcccaaagaatacagccagatcctccaacttcacatgaaaggaatcctcaaactgcaatttagcaaatgtgaagtcgcctaaacaaagtatcttaaaatgggaat

SEQ ID NO: 411622 - DNA, 120 bp, Artificial Sequence
  ENSG00000148488_13 (sequence is synthesized)
aattttaatataatgcagtaggtgattaacaatgtctccaaacaccaaaggaggtggctaaagagtattttgagatgagccccaaaatttggtttgaccaaagcttccccactcattttg

SEQ ID NO: 411623 - DNA, 120 bp, Artificial Sequence
  ENSG00000148488_14 (sequence is synthesized)
caatgatggcaagtcattcaatccttctcatcttcattttttctccttataacatggacaccatatctgactcatacaaatttttataatttatgaaaattattggcatggcctttggtg

SEQ ID NO: 411624 - DNA, 120 bp, Artificial Sequence
  ENSG00000148488_15 (sequence is synthesized)
tgaggtagggactcaaagaatatttctttcttactatttataccagccatctccaccttcaccagaccgataataaaagcatgctttcttggagatctcttctaaagagaatagctgcat

SEQ ID NO: 411625 - DNA, 120 bp, Artificial Sequence
  ENSG00000148488_16 (sequence is synthesized)
taccagtatccattggatttctttctgtggcaggtctctatcaataatatccttcccatttttctgtctcaaagactgcatgcaagaaaattatatacttaagcaaaaagttcttgatca

SEQ ID NO: 411626 - DNA, 120 bp, Artificial Sequence
  ENSG00000148488_17 (sequence is synthesized)
ttcgggaatgaaattcttctctgagtatggcagtatgcctgcttctgattaaattcacttttaatagtagctgtgatgatattttggttgaatttaagccatttattttcctcttatgtc

SEQ ID NO: 411627 - DNA, 120 bp, Artificial Sequence
  ENSG00000148488_18 (sequence is synthesized)
tacatttcttcatcacttaataattttattttaacttcctgcctcattcttacacttttttctctctcacttatacgatatacttcaaggacgtgaacagttacaatacccagtctttct

SEQ ID NO: 411628 - DNA, 120 bp, Artificial Sequence
  ENSG00000148488_19 (sequence is synthesized)
tacctgttgtcttgcctgtggggtcactcactcaattttattttaaaattactgaataactacttcatgccaggccctgcaccaggctctgtgagaggacaagaaggattattgcctctt

SEQ ID NO: 411629 - DNA, 120 bp, Artificial Sequence
  ENSG00000148488_20 (sequence is synthesized)
gtaggagaaaacagatgtgcatatcattaattatgatggggtatgataagtattacaatgacaaaagctatgaataaagtgctacaaggaacagaagcagggataattaaatccatttca

SEQ ID NO: 411630 - DNA, 120 bp, Artificial Sequence
  ENSG00000148488_21 (sequence is synthesized)
gtggaatctatttcaatgtacaatagtctcccctaatctgcagatatgggaagaccccctgtggatgcctgaaaccattgatgatattagaaatatgtaattgattagtaaaagtaacaa

SEQ ID NO: 411631 - DNA, 120 bp, Artificial Sequence
  ENSG00000148488_22 (sequence is synthesized)
acaaaatatactgaaataattaaatatacaatgtggggactttatatgctattttaataaaacttacatatagttaggacatttagagcttacttttttttcccatataatatcctatct

SEQ ID NO: 411632 - DNA, 120 bp, Artificial Sequence
  ENSG00000148488_23 (sequence is synthesized)
aatttttctttagaacatcaaaacagaatctctagtatcactgatatggatttcagaaatattccaaatggtgtgagatcaaacagcatagtgatacccatgttccagtaaaagcttagg

SEQ ID NO: 411633 - DNA, 120 bp, Artificial Sequence
  ENSG00000148488_24 (sequence is synthesized)
agaaaaagaatgtttgcgggttttcttttgtggagaaaattgtagacatttccaagttaacacatctgaagtttctggttcgacatctgtgttgccatcctaaaagcacgtgtgaaattt

SEQ ID NO: 411634 - DNA, 120 bp, Artificial Sequence
  ENSG00000148488_25 (sequence is synthesized)
tacaacaatcctacctagattcacgttagccaaaaatctttggctaaacagacaccccgagatttcataaagtgtgttatagtcagaattggtggtaattaatctacaaatctgcaaaat

SEQ ID NO: 411635 - DNA, 120 bp, Artificial Sequence
  ENSG00000148488_26 (sequence is synthesized)
agtgttcatagtttttctttttattttgatcttggtgaaaaacttgcagtaactcaccattacagagcgacaagaactgtgacgcatgttttatgatttacatagctgatgtggtgtatt

SEQ ID NO: 411636 - DNA, 120 bp, Artificial Sequence
  ENSG00000148488_27 (sequence is synthesized)
atcgatatccataatctgtcatatttagacacattcattgtgacacatataacatgtgcattctttttatctttttctcaagtgggtctatagttgtgatttcacagcagattggggttg

SEQ ID NO: 411637 - DNA, 120 bp, Artificial Sequence
  ENSG00000148488_28 (sequence is synthesized)
ttggccattgtttgaagctctcctactctctttctagcatagtcagtgtgttgcagagaactaaagggagtaaaagacacagtgcctcattgaatcctaacattttcttcctggtagggc

SEQ ID NO: 411638 - DNA, 120 bp, Artificial Sequence
  ENSG00000148488_29 (sequence is synthesized)
tgccaataatgttcttttgttccaaaacagaacattacttagaactttctaaaatatgatagaacatgaatgtttacaatacagcatgtcagctatgtaaactgtaaaacgtaagtcaca

SEQ ID NO: 411639 - DNA, 120 bp, Artificial Sequence
  ENSG00000148488_30 (sequence is synthesized)
gttctttttgttctgtattggtgaatcattgcaaatttttcaccaagtgcaaaacaaaaagaaaaactataaactccatcttgtagatttgtagattcgccacaaccaagtctgactgtg

SEQ ID NO: 411640 - DNA, 120 bp, Artificial Sequence
  ENSG00000148488_31 (sequence is synthesized)
acactcccaagaaatctgtatgtaatcagcattgcttaaatattgttagatctaatgtgatcttctgctcttaaaactcaagtacatctaagggcattgagaatggaaagtctgagttct

SEQ ID NO: 411641 - DNA, 63 bp, Artificial Sequence
  ENSG00000148488_32 (sequence is synthesized)
agtacatctaagggcattgagaatggaaagtctgagttctggtactagacaagagcagccctt

SEQ ID NO: 411642 - DNA, 82 bp, Artificial Sequence
  ENSG00000148488_33 (sequence is synthesized)
agctgagcataaggagggaggttcactggagcccaggaggtagaggctgcagtgagctgtgatcttaccactgcattctagc

SEQ ID NO: 411643 - DNA, 77 bp, Artificial Sequence
  ENSG00000148488_34 (sequence is synthesized)
gggaggctaaggagggaggttcactggagcccaggaggtagaggctgcagtgagctgtgatcttaccactgcattct

SEQ ID NO: 411644 - DNA, 120 bp, Artificial Sequence
  ENSG00000148488_35 (sequence is synthesized)
gcatactaccagtttctaagagaaatactagcttgctggattctattttccacttgttgttcagcctcattgagcaatgaaacagaataacaagattccaatataattttcagccaaatc

SEQ ID NO: 411645 - DNA, 120 bp, Artificial Sequence
  ENSG00000148488_36 (sequence is synthesized)
caaaggcaaggcagaaatattcatttaagtatatagtccatagtactctgtggtccctgcaaagggcttcatgatcaattgcatagtgttaatttttgcgcagtgtaataatcctcgaac

SEQ ID NO: 411646 - DNA, 120 bp, Artificial Sequence
  ENSG00000148488_37 (sequence is synthesized)
atccttgaagtctctggtgcttttcccttggaacaaaaggcaatgacaaatagatcatggctttcactaaaggatatttccttcttcatgtaagtcctaacccagtaactgcgtgggctc

SEQ ID NO: 411647 - DNA, 120 bp, Artificial Sequence
  ENSG00000148488_38 (sequence is synthesized)
tcagccaggtaatcagtcaaaaagtctttttttgaggactctctgtagaatacagaattaagcagcaaatcagacctgtgtttgcctaaatttttccttgcttataaaaaatttaccagc

SEQ ID NO: 411648 - DNA, 120 bp, Artificial Sequence
  ENSG00000148488_39 (sequence is synthesized)
taagtattatgtaatgtcaagtaccgtaaatcactccatgaattaggaagctttgggaaaagtggaaaattttgtggaaaacaggtccactaacatcctaaacagctactgcagaagtat

SEQ ID NO: 411649 - DNA, 120 bp, Artificial Sequence
  ENSG00000148488_40 (sequence is synthesized)
agttaagatgtgatatataatatattgtgatcttcaagacattttatttatctaacatgacatggaaacacattattatgccattaaaaattgaaggcattgtaggaattcatctgatat

SEQ ID NO: 411650 - DNA, 120 bp, Artificial Sequence
  ENSG00000148488_41 (sequence is synthesized)
atctgatgcacttgatctgataaatccacttgaggctgctaggagtgttgaagatttcctatttacatgtggcttcagaaggctgatcccatagcgaggaacagtgtcaccagtaccctc

SEQ ID NO: 411651 - DNA, 120 bp, Artificial Sequence
  ENSG00000148488_42 (sequence is synthesized)
ctgagagtggaaaggcaagaatatttctcatggtctttcttattttgggtcatcactcttccagaagcattcttctttttataaaaaaaatgtgggtgatatatgataaagatgcgctac

SEQ ID NO: 411652 - DNA, 120 bp, Artificial Sequence
  ENSG00000148488_43 (sequence is synthesized)
ttatgtaatggagacagggcaaactctttagcagataatattgaaacattggctcactctatggagaaaaataaatgcctacattgcaccatataaaaagttgggctccagagggatgaa

SEQ ID NO: 411653 - DNA, 120 bp, Artificial Sequence
  ENSG00000148488_44 (sequence is synthesized)
aacgatggattaaaaagaaaactttaaagctcatagaagaaaatgtaggagaattatgtttgagatacaggtgaggaactgtacttcttcaacatgacccaaaaatatctttttaaatag

SEQ ID NO: 411654 - DNA, 120 bp, Artificial Sequence
  ENSG00000148488_45 (sequence is synthesized)
ttgggttaagaaaggatggctatgactgtattaaaatgaaagagttctagtcagtgaatgacaccttaaagttaataggctggggacagactgaaatagcttttagtaatgcataaaatt

SEQ ID NO: 411655 - DNA, 120 bp, Artificial Sequence
  ENSG00000148488_46 (sequence is synthesized)
aatgacattaatagagagacattccaaggaattgtaaatcaacaagtaaaagacaggaaactcaatataaaaatgaacaaaagataagaatgtgatttacaaaggggaaagctgagtagc

SEQ ID NO: 411656 - DNA, 120 bp, Artificial Sequence
  ENSG00000148488_47 (sequence is synthesized)
taataagaataggaagtgatactcaaatttaccagtaacctgagaaatgcaaatgaaagtgagatactacatccattgcattggtaaaaatgagtaaggtcattaacttcaagtgtggaa

SEQ ID NO: 411657 - DNA, 120 bp, Artificial Sequence
  ENSG00000148488_48 (sequence is synthesized)
gtataagctgattgaatcattttggaaagcaacctaggagtactgagttagtaaaattcatcatatgtctgtcctatagtccagtaattgcacttttgcatatacagccaagaggacctg

SEQ ID NO: 411658 - DNA, 120 bp, Artificial Sequence
  ENSG00000148488_49 (sequence is synthesized)
ttctgatccacacaaaaaaacaagtattaaggtatttattccattatggtttgcggtagtaagtagacaaattggactcacagatatctgtctcttcggaagtcagtgaactaacttgac

SEQ ID NO: 411659 - DNA, 120 bp, Artificial Sequence
  ENSG00000148488_50 (sequence is synthesized)
tggatccatagtgtggaatatgatacagcagttagaagcaacttactggacatatatacagaaataagggtatgtcctttaaatttagcataaagggaaaacaaaagctttagcacaatg

SEQ ID NO: 411660 - DNA, 120 bp, Artificial Sequence
  ENSG00000148488_51 (sequence is synthesized)
ccatttaattactttaaagcgtatgcatgcatacatacaaacatattcaaggctacgtgtcaaatacaagaagggtacccattaagaagagggtaatcggagtgggtttagggataaaga

SEQ ID NO: 411661 - DNA, 120 bp, Artificial Sequence
  ENSG00000148488_52 (sequence is synthesized)
atatttaatacagcaagcctttgacatatatattcttatactcacatatgatattcttactactacataaataaatatagaagctgactcaaaattgtaagtaacttatataaggttgca

SEQ ID NO: 411662 - DNA, 120 bp, Artificial Sequence
  ENSG00000148488_53 (sequence is synthesized)
gtaacttatataaggttgcattatatataagagcagagctagtattcaactcatatgtctgactctaaagccaatattatttccattatgcaattataaaatgaaaagaaaaatcagtat

SEQ ID NO: 411663 - DNA, 120 bp, Artificial Sequence
  ENSG00000148488_54 (sequence is synthesized)
tatcccatgtcattgacatgtaataaatggcacatatttatgtacatgcatatacccatgaaaccgtctctccaattaagacaatgtatatattcattaccccaaaatgttttcttgtgc

SEQ ID NO: 411664 - DNA, 120 bp, Artificial Sequence
  ENSG00000148488_55 (sequence is synthesized)
tactttgtaatccctccctcttcttcctccctgtccatcccaccctcgtccccagaaaattcctaatctgtttttctatagacatttacatttttacactatagactgtttacatttttt

SEQ ID NO: 411665 - DNA, 120 bp, Artificial Sequence
  ENSG00000148488_56 (sequence is synthesized)
agaattttatataaatggaatcttactgtctgtactcatttcttgtcttgcacttttgctcgacataataatattaaaactcattcatgttgattgtgtatctgtagtttatgcctttat

SEQ ID NO: 411666 - DNA, 120 bp, Artificial Sequence
  ENSG00000148488_57 (sequence is synthesized)
ttactgagtagaattatgttatatggatggaccacagttggcttatctgctcatttgttgatgaacattttactatctcctggttttggctattacaaataaaggtatcatgaacattaa

SEQ ID NO: 411667 - DNA, 80 bp, Artificial Sequence
  ENSG00000148498_0 (sequence is synthesized)
cgaacaggtggccggaggctgcgggcgccgcggcggggagaggcgaggcaagccccgggcgaagcgaggcgaggcgaggg

SEQ ID NO: 411668 - DNA, 80 bp, Artificial Sequence
  ENSG00000148498_1 (sequence is synthesized)
cgcccctagccgcccgcgcgcccgagtccccagcggctcctccgcgcccagcgtcctcggtcccggcctcggctgctccg

SEQ ID NO: 411669 - DNA, 120 bp, Artificial Sequence
  ENSG00000148498_2 (sequence is synthesized)
ctgctccggctgcgctcggcgaggggcgcgggcccgcccgcggcggcggcggcatgaaagtgaccgtgtgcttcggacggacccgggtggtcgtgccgtgcggggacggccacatgaaag

SEQ ID NO: 411670 - DNA, 120 bp, Artificial Sequence
  ENSG00000148498_3 (sequence is synthesized)
catgaaagttttcagcctcatccagcaggcggtgacccgctaccggaaggccatcgccaaggatccaaactactggatacaggtgcatcgcttggaacatggagatggaggaatactaga

SEQ ID NO: 411671 - DNA, 120 bp, Artificial Sequence
  ENSG00000148498_4 (sequence is synthesized)
ccttgatgacattctttgtgatgtagcagacgataaagacagactggtagcagtgtttgatgagcaggatccacatcacggaggtgatggcaccagtgccagttccacgggtacccagag

SEQ ID NO: 411672 - DNA, 120 bp, Artificial Sequence
  ENSG00000148498_5 (sequence is synthesized)
cccagagatatttggtagtgagcttggcaccaacaatgtctcagcctttcagccttaccaagcaacaagtgaaattgaggtcacaccttcagtccttcgagcaaatatgcctcttcatgt

SEQ ID NO: 411673 - DNA, 120 bp, Artificial Sequence
  ENSG00000148498_6 (sequence is synthesized)
tcgacgcagtagtgacccagctctaattggcctctccacttctgtcagtgatagtaatttttcctctgaagagccttcaaggaaaaatcccacacgctggtcaacaacagctggcttcct

SEQ ID NO: 411674 - DNA, 120 bp, Artificial Sequence
  ENSG00000148498_7 (sequence is synthesized)
caagcagaacactgctgggagtcctaaaacctgcgacaggaagaaagatgaaaactacagaagcctcccgcgggatactagtaactggtctaaccaatttcagagagacaatgctcgctc

SEQ ID NO: 411675 - DNA, 120 bp, Artificial Sequence
  ENSG00000148498_8 (sequence is synthesized)
gtctctgagtgccagtcacccaatggtgggcaagtggctggagaaacaagaacaggatgaggatgggacagaagaggataacagtcgtgttgaacctgttggacatgctgacacgggttt

SEQ ID NO: 411676 - DNA, 120 bp, Artificial Sequence
  ENSG00000148498_9 (sequence is synthesized)
ggagcatatacccaacttttctctggatgatatggtaaagctcgtagaagtccccaacgatggagggcctctgggaatccacgtagtgcctttcagtgctcgaggcggcagaaccctggg

SEQ ID NO: 411677 - DNA, 120 bp, Artificial Sequence
  ENSG00000148498_10 (sequence is synthesized)
gttattagtaaaacgattggagaaaggtggtaaagctgaacatgaaaatctttttcgtgagaatgattgcattgtcaggattaatgatggcgaccttcgaaatagaagatttgaacaagc

SEQ ID NO: 411678 - DNA, 120 bp, Artificial Sequence
  ENSG00000148498_11 (sequence is synthesized)
acaacatatgtttcgccaagccatgcgtacacccatcatttggttccatgtggttcctgcagcaaataaagagcagtatgaacaactatcccaaagtgagaagaacaattactattcaag

SEQ ID NO: 411679 - DNA, 120 bp, Artificial Sequence
  ENSG00000148498_12 (sequence is synthesized)
ccgttttagccctgacagccagtatattgacaacaggagtgtgaacagtgcagggcttcacacggtgcagagagcaccccgactgaaccacccgcctgagcagatagactctcactcaag

SEQ ID NO: 411680 - DNA, 120 bp, Artificial Sequence
  ENSG00000148498_13 (sequence is synthesized)
actacctcatagcgcacacccctcgggaaaaccaccatccgctccagcctcggcacctcagaatgtatttagtacgactgtaagcagtggttataacaccaaaaaaataggcaagaggct

SEQ ID NO: 411681 - DNA, 120 bp, Artificial Sequence
  ENSG00000148498_14 (sequence is synthesized)
taatatccagcttaagaaaggtacagaaggtttgggattcagcatcacttccagagatgtaacaataggtggctcagctccaatctatgtgaaaaacattctcccccggggggcggccat

SEQ ID NO: 411682 - DNA, 120 bp, Artificial Sequence
  ENSG00000148498_15 (sequence is synthesized)
tcaggatggccgacttaaggcaggagacagacttatagaggtaaatggagtagatttagtgggcaaatcccaagaggaagttgtttcgctgttgagaagcaccaagatggaaggaactgt

SEQ ID NO: 411683 - DNA, 120 bp, Artificial Sequence
  ENSG00000148498_16 (sequence is synthesized)
gagccttctggtctttcgccaggaagacgccttccacccaagggaactgaatgcagagccaagccagatgcagattccaaaagaaacgaaagcagaagatgaggatattgttcttacacc

SEQ ID NO: 411684 - DNA, 120 bp, Artificial Sequence
  ENSG00000148498_17 (sequence is synthesized)
tgatggcaccagggaatttctgacatttgaagtcccacttaatgattcaggatctgcaggccttggtgtcagtgtcaaaggtaaccggtcaaaagagaaccacgcagatttgggaatctt

SEQ ID NO: 411685 - DNA, 120 bp, Artificial Sequence
  ENSG00000148498_18 (sequence is synthesized)
tgtcaagtccattattaatggaggagcagcatctaaagatggaaggcttcgggtgaatgatcaactgatagcagtaaatggagaatccctgttgggcaagacaaaccaagatgccatgga

SEQ ID NO: 411686 - DNA, 120 bp, Artificial Sequence
  ENSG00000148498_19 (sequence is synthesized)
aaccctaagaaggtctatgtctactgaaggcaataaacgaggaatgatccagcttattgttgcaaggagaataagcaagtgcaatgagctgaagtcacctgggagcccccctggacctga

SEQ ID NO: 411687 - DNA, 120 bp, Artificial Sequence
  ENSG00000148498_20 (sequence is synthesized)
gctgcccattgaaacagcgttggatgatagagaacgaagaatttcccattccctctacagtgggattgaggggcttgatgaatcgcccagcagaaatgctgccctcagtaggataatggg

SEQ ID NO: 411688 - DNA, 120 bp, Artificial Sequence
  ENSG00000148498_21 (sequence is synthesized)
tgagtcaggtaaataccagctgtcccctacagtgaatatgccccaagatgacactgtcattatagaagatgacaggttgccagtgcttcctccacatctctctgaccagtcctcttccag

SEQ ID NO: 411689 - DNA, 120 bp, Artificial Sequence
  ENSG00000148498_22 (sequence is synthesized)
ctcccatgatgatgtggggtttgtgacggcagatgctggtacttgggccaaggctgcaatcagtgattcagccgactgctctttgagtccagatgttgatccagttcttgcttttcaacg

SEQ ID NO: 411690 - DNA, 120 bp, Artificial Sequence
  ENSG00000148498_23 (sequence is synthesized)
agaaggatttggacgtcagagtatgtcagaaaaacgcacaaagcaattttcagatgccagtcaattggatttcgttaaaacacgaaaatcaaaaagcatggatttaggtatagctgacga

SEQ ID NO: 411691 - DNA, 120 bp, Artificial Sequence
  ENSG00000148498_24 (sequence is synthesized)
cagaccgcagttgccgaggtgactttgaatggggatattcctttccatcgtccacggccgcggataatcagaggcaggggatgcaatgagagcttcagagctgccatcgacaaatcttat

SEQ ID NO: 411692 - DNA, 120 bp, Artificial Sequence
  ENSG00000148498_25 (sequence is synthesized)
gataaacccgcggtagatgatgatgatgaaggcatggagaccttggaagaagacacagaagaaagttcaagatcagggagagagtctgtatccacagccagtgatcagccttcccactct

SEQ ID NO: 411693 - DNA, 120 bp, Artificial Sequence
  ENSG00000148498_26 (sequence is synthesized)
ctggagagacaaatgaatggaaaccaagagaaaggtgataagactgatagaaaaaaggataaaactggaaaagaaaagaagaaagatagagataaggagaaggataaaatgaaagccaag

SEQ ID NO: 411694 - DNA, 120 bp, Artificial Sequence
  ENSG00000148498_27 (sequence is synthesized)
aagggaatgctgaagggcttgggagacatgttcaggtttggcaaacatcgaaaagatgacaagattgagaaaacgggtaaaataaaaatacaggaatcctttacatcagaagaggagagg

SEQ ID NO: 411695 - DNA, 120 bp, Artificial Sequence
  ENSG00000148498_28 (sequence is synthesized)
atacgaatgaagcaggagcaggagaggattcaagccaaaactcgagaatttagggaacgacaagctcgagagcgtgactatgctgaaattcaagattttcatcggacatttggctgtgat

SEQ ID NO: 411696 - DNA, 120 bp, Artificial Sequence
  ENSG00000148498_29 (sequence is synthesized)
gatgagttaatgtatgggggagtttcttcttatgaaggttccatggctctcaacgctagacctcagagcccacgagaagggcatatgatggatgctttgtatgcccaagtcaagaagccg

SEQ ID NO: 411697 - DNA, 120 bp, Artificial Sequence
  ENSG00000148498_30 (sequence is synthesized)
cggaattccaaaccctcacctgtagacagtaacagatcaactcctagcaatcatgatcggatacagcgtctgaggcaagaatttcagcaagcaaagcaagatgaagatgtagaagatcgt

SEQ ID NO: 411698 - DNA, 120 bp, Artificial Sequence
  ENSG00000148498_31 (sequence is synthesized)
cggcggacctatagttttgagcaaccctggccgaacgcacggccggcgacgcagagcgggcgacactcggtgtccgtggaggtgcagatgcagcggcagcggcaggaggagcgcgagagc

SEQ ID NO: 411699 - DNA, 120 bp, Artificial Sequence
  ENSG00000148498_32 (sequence is synthesized)
tcccagcaggcccagcgccagtacagctctctgcctcggcaaagcaggaaaaatgccagctcggtctcccaggactcttgggagcagaactactcccctggggaaggcttccagagtgcc

SEQ ID NO: 411700 - DNA, 120 bp, Artificial Sequence
  ENSG00000148498_33 (sequence is synthesized)
aaagagaaccccaggtactccagctaccaaggctccaggaacggctacctgggaggacatggcttcaacgccagggtcatgctggaaactcaggagctccttcgccaggaacagaggcgg

SEQ ID NO: 411701 - DNA, 120 bp, Artificial Sequence
  ENSG00000148498_34 (sequence is synthesized)
aaggagcagcagatgaagaagcagcctccttccgaggggcccagcaactatgactcgtataagaaagtccaggaccccagttacgcccctcccaaggggcccttccggcaagatgtgccc

SEQ ID NO: 411702 - DNA, 120 bp, Artificial Sequence
  ENSG00000148498_35 (sequence is synthesized)
ccctccccttctcaggttgcgaggctgaacagacttcagactcctgagaaagggaggcccttctattcctgagcacgcaaataacggatgcttcatgtcgcgcaataaaagacattttcc

SEQ ID NO: 411703 - DNA, 120 bp, Artificial Sequence
  ENSG00000148498_36 (sequence is synthesized)
tatgaagacttgtattttgggagtttttttaaaacctcgatggtactatggagtatttctgttgttggtatcagtgcctttaagcggtgtaggcaaagaaatggaaggccttaatgtctt

SEQ ID NO: 411704 - DNA, 120 bp, Artificial Sequence
  ENSG00000148498_37 (sequence is synthesized)
tgccactatgtctcaagtgtctgtttcatggaaggatttcccaccctgtgacaatcatctgtttgaggtgttcatatgctctgcgcctctccacagtaccaggaatctcggccctactca

SEQ ID NO: 411705 - DNA, 120 bp, Artificial Sequence
  ENSG00000148498_38 (sequence is synthesized)
tgagttgtccgcggcttggttgtaacatccctgcaccacttgcagtgacaaattcacctgaagtggaggatgacgtgcggccctgtttctccctctaagttctcttagctatgggatgac

SEQ ID NO: 411706 - DNA, 120 bp, Artificial Sequence
  ENSG00000148498_39 (sequence is synthesized)
atcttagtctctggtggaggaaaagtgggcgacatacaccaaaaattggggctttctggtacttcacagcacagccatttgtcgtactttgtcatcactgtggttttctctttcctttct

SEQ ID NO: 411707 - DNA, 120 bp, Artificial Sequence
  ENSG00000148498_40 (sequence is synthesized)
cagctctttgtgacgggagagtcggtcatcctattacagaagctaagccatagtccaacattgtttggtcaccatgggggtccttttgtaactgccttatgactcaacattaccaataaa

SEQ ID NO: 411708 - DNA, 120 bp, Artificial Sequence
  ENSG00000148498_41 (sequence is synthesized)
gtgatgatcctggtctgcgtttatacatacgcttgttcggtcctgttcctgacacgtgggttgagtcaccacagctctgtgtggggaacgtgggagacaggagtggctcctgccggggga

SEQ ID NO: 411709 - DNA, 120 bp, Artificial Sequence
  ENSG00000148498_42 (sequence is synthesized)
agctgggcctgccattggccctgtgtctatcatgaggggagagctaagaaagaaattctcctaggaagagctcatggcccagtacatcctagtaattattttaattagtttttgttctga

SEQ ID NO: 411710 - DNA, 120 bp, Artificial Sequence
  ENSG00000148498_43 (sequence is synthesized)
cagcttgtcaggaagggcacagaatgggacagagataaaccagacagtcattttgatctgctctctacggtttttcaagtcagaggcaattgatgcttgtctaatgcatccacacactgc

SEQ ID NO: 411711 - DNA, 120 bp, Artificial Sequence
  ENSG00000148498_44 (sequence is synthesized)
atgtctgactggcgatgccgcgctcctaagtagttctgccatgaaacataaaagacaaaggaaaagccgttacacatcacacagagaacattttcgggtcccacagcggtggtggcagga

SEQ ID NO: 411712 - DNA, 120 bp, Artificial Sequence
  ENSG00000148498_45 (sequence is synthesized)
agctcactctcgcgtcagtattagagtgtgtgtgtgggtctcggggatctcggtggctcccatcttccttcattgttctgaacatcctgtattgtaaaccatggctggggtgctaaagtg

SEQ ID NO: 411713 - DNA, 120 bp, Artificial Sequence
  ENSG00000148498_46 (sequence is synthesized)
cctgtgaatcccgatgtggaaaaagctggaggtgaaagctcagcataccatgtatttactttaaaaacagaaaaaaagacatgtatggatatgtctattttttttttattggcacattgt

SEQ ID NO: 411714 - DNA, 120 bp, Artificial Sequence
  ENSG00000148498_47 (sequence is synthesized)
atttttgtgttgacttgtttttagaaatgatgtgtccacacacgtacccgtgtctcttctgcatttctgtgtcatggttctgtttcttaatcacgtgcggcggtgtctaagtggtgttac

SEQ ID NO: 411715 - DNA, 120 bp, Artificial Sequence
  ENSG00000148498_48 (sequence is synthesized)
cagtgtacgcgcagtgaccttggatgacagtggctctttctcacagcctcccctgagctgtgagaaacagctttctctgtacatatgcaactcctaataaaaggcatatttcttcctgtt

SEQ ID NO: 411716 - DNA, 120 bp, Artificial Sequence
  ENSG00000148498_49 (sequence is synthesized)
tgccaaactgaagcccgagaagagatgaacaacaaagcgattcaaaacatgtcttgaacagcacatattgcacagttgttgttttttttaaacaaacaataaatttacttttaatgaatt

SEQ ID NO: 411717 - DNA, 120 bp, Artificial Sequence
  ENSG00000148498_50 (sequence is synthesized)
tgccatactgaatcagaccattggtccaccagttcctgtaacctgcgtcctgcctccaatccctgatgcttcagaggaaggcgaaaaactaaaactaaaactcaaaccaaaaaaatccct

SEQ ID NO: 411718 - DNA, 120 bp, Artificial Sequence
  ENSG00000148498_51 (sequence is synthesized)
aaattcagctagtgaccttttgaaatgctgtatatatgagttgaagagtcattcattttcttcctagtctgttgccccgattttgttagctacagcttcattagtcctcttcggtttgca

SEQ ID NO: 411719 - DNA, 120 bp, Artificial Sequence
  ENSG00000148498_52 (sequence is synthesized)
aagatctgggaatggtggaagcatggtgggctatgggaactaactgggctaactattatacatttaccttttaacagtagctgacgagactaaactcaatacagtggatgaccagaaagc

SEQ ID NO: 411720 - DNA, 120 bp, Artificial Sequence
  ENSG00000148513_0 (sequence is synthesized)
ctagtctataccagcaacgactcctacatcgtccactctggggatcttagaaagatccataaagctgcctcccggggacaagtccggaagctggagaagatgacaaagaggaagaagacc

SEQ ID NO: 411721 - DNA, 120 bp, Artificial Sequence
  ENSG00000148513_1 (sequence is synthesized)
atcaaccttaatatacaagacgcccagaagaggactgctctacactgggcctgtgtcaatggccatgaggaagtagtaacatttctggtagacagaaagtgccagcttgacgtccttgat

SEQ ID NO: 411722 - DNA, 120 bp, Artificial Sequence
  ENSG00000148513_2 (sequence is synthesized)
ggcgaacacaggacacctctgatgaaggctctacaatgccatcaggaggcttgtgcaaatattctgatagattctggtgccgatataaatctcgtagatgtgtatggcaacacggctctc

SEQ ID NO: 411723 - DNA, 120 bp, Artificial Sequence
  ENSG00000148513_3 (sequence is synthesized)
cattatgctgtttatagtgagattttgtcagtggtggcaaaactgctgtcccatggtgcagtcatcgaagtgcacaacaaggctagcctcacaccacttttactatccataacgaaaaga

SEQ ID NO: 411724 - DNA, 120 bp, Artificial Sequence
  ENSG00000148513_4 (sequence is synthesized)
agtgagcaaattgtggaatttttgctgataaaaaatgcaaatgcgaatgcagttaataagtataaatgcacagccctcatgcttgctgtatgtcatggatcatcagagatagttggcatg

SEQ ID NO: 411725 - DNA, 120 bp, Artificial Sequence
  ENSG00000148513_5 (sequence is synthesized)
cttcttcagcaaaatgttgacgtctttgctgcagatatatgtggagtaactgcagaacattatgctgttacttgtggatttcatcacattcatgaacaaattatggaatatatacgaaaa

SEQ ID NO: 411726 - DNA, 120 bp, Artificial Sequence
  ENSG00000148513_6 (sequence is synthesized)
ttatctaaaaatcatcaaaataccaatccagaaggaacatctgcaggaacacctgatgaggctgcacccttggcggaaagaacacctgacacagctgaaagcttggtggaaaaaacacct

SEQ ID NO: 411727 - DNA, 120 bp, Artificial Sequence
  ENSG00000148513_7 (sequence is synthesized)
gatgaggctgcacccttggtggaaagaacacctgacacggctgaaagcttggtggaaaaaacacctgatgaggctgcatccttggtggagggaacatctgacaaaattcaatgtttggag

SEQ ID NO: 411728 - DNA, 120 bp, Artificial Sequence
  ENSG00000148513_8 (sequence is synthesized)
aaagcgacatctggaaagttcgaacagtcagcagaagaaacacctagggaaattacgagtcctgcaaaagaaacatctgagaaatttacgtggccagcaaaaggaagacctaggaagatc

SEQ ID NO: 411729 - DNA, 120 bp, Artificial Sequence
  ENSG00000148513_9 (sequence is synthesized)
gcatgggagaaaaaagaagacacacctagggaaattatgagtcccgcaaaagaaacatctgagaaatttacgtgggcagcaaaaggaagacctaggaagatcgcatgggagaaaaaagaa

SEQ ID NO: 411730 - DNA, 120 bp, Artificial Sequence
  ENSG00000148513_10 (sequence is synthesized)
acacctgtaaagactggatgcgtggcaagagtaacatctaataaaactaaagttttggaaaaaggaagatctaagatgattgcatgtcctacaaaagaatcatctacaaaagcaagtgcc

SEQ ID NO: 411731 - DNA, 120 bp, Artificial Sequence
  ENSG00000148513_11 (sequence is synthesized)
aatgatcagaggttcccatcagaatccaaacaagaggaagatgaagaatattcttgtgattctcggagtctctttgagagttctgcaaagattcaagtgtgtatacctgagtctatatat

SEQ ID NO: 411732 - DNA, 120 bp, Artificial Sequence
  ENSG00000148513_12 (sequence is synthesized)
caaaaagtaatggagataaatagagaagtagaagagcctcctaagaagccatctgccttcaagcctgccattgaaatgcaaaactctgttccaaataaagcctttgaattgaagaatgaa

SEQ ID NO: 411733 - DNA, 120 bp, Artificial Sequence
  ENSG00000148513_13 (sequence is synthesized)
caaacattgagagcagatccgatgttcccaccagaatccaaacaaaaggactatgaagaaaattcttgggattctgagagtctctgtgagactgtttcacagaaggatgtgtgtttaccc

SEQ ID NO: 411734 - DNA, 120 bp, Artificial Sequence
  ENSG00000148513_14 (sequence is synthesized)
aaggctacacatcaaaaagaaatagataaaataaatggaaaattagaagagtctcctaataaagatggtcttctgaaggctacctgcggaatgaaagtttctattccaactaaagcctta

SEQ ID NO: 411735 - DNA, 120 bp, Artificial Sequence
  ENSG00000148513_15 (sequence is synthesized)
gaattgaaggacatgcaaactttcaaagcagagcctccggggaagccatctgccttcgagcctgccactgaaatgcaaaagtctgtcccaaataaagccttggaattgaaaaatgaacaa

SEQ ID NO: 411736 - DNA, 120 bp, Artificial Sequence
  ENSG00000148513_16 (sequence is synthesized)
acattgagagcagatgagatactcccatcagaatccaaacaaaaggactatgaagaaaattcttgggatactgagagtctctgtgagactgtttcacagaaggatgtgtgtttacccaag

SEQ ID NO: 411737 - DNA, 120 bp, Artificial Sequence
  ENSG00000148513_17 (sequence is synthesized)
gctgcgcatcaaaaagaaatagataaaataaatggaaaattagaagggtctcctgttaaagatggtcttctgaaggctaactgcggaatgaaagtttctattccaactaaagccttagaa

SEQ ID NO: 411738 - DNA, 120 bp, Artificial Sequence
  ENSG00000148513_18 (sequence is synthesized)
caaataaagccttggaattgaagaatgaacaaacattgagagcagatgagatactcccatcagaatccaaacaaaaggactatgaagaaagttcttgggattctgagagtctctgtgaga

SEQ ID NO: 411739 - DNA, 120 bp, Artificial Sequence
  ENSG00000148513_19 (sequence is synthesized)
ctgtttcacagaaggatgtgtgtttacccaaggctacgcatcaaaaagaaatagataaaataaatggaaaattagaagagtctcctgataatgatggttttctgaaggctccctgcagaa

SEQ ID NO: 411740 - DNA, 120 bp, Artificial Sequence
  ENSG00000148513_20 (sequence is synthesized)
tgaaagtttctattccaactaaagccttagaattgatggacatgcaaactttcaaagcagagcctcccgagaagccatctgccttcgagcctgccattgaaatgcaaaagtctgttccaa

SEQ ID NO: 411741 - DNA, 120 bp, Artificial Sequence
  ENSG00000148513_21 (sequence is synthesized)
ataaagccttggaattgaagaatgaacaaacattgagagcagatcagatgttcccttcagaatcaaaacaaaagaaggttgaagaaaattcttgggattctgagagtctccgtgagactg

SEQ ID NO: 411742 - DNA, 120 bp, Artificial Sequence
  ENSG00000148513_22 (sequence is synthesized)
tttcacagaaggatgtgtgtgtacccaaggctacacatcaaaaagaaatggataaaataagtggaaaattagaagattcaactagcctatcaaaaatcttggatacagttcattcttgtg

SEQ ID NO: 411743 - DNA, 120 bp, Artificial Sequence
  ENSG00000148513_23 (sequence is synthesized)
aaagagcaagggaacttcaaaaagatcactgtgaacaacgtacaggaaaaatggaacaaatgaaaaagaagttttgtgtactgaaaaagaaactgtcagaagcaaaagaaataaaatcac

SEQ ID NO: 411744 - DNA, 120 bp, Artificial Sequence
  ENSG00000148513_24 (sequence is synthesized)
agttagagaaccaaaaagttaaatgggaacaagagctctgcagtgtgagattgactttaaaccaagaagaagagaagagaagaaatgccgatatattaaatgaaaaaattagggaagaat

SEQ ID NO: 411745 - DNA, 120 bp, Artificial Sequence
  ENSG00000148513_25 (sequence is synthesized)
taggaagaatcgaagagcagcataggaaagagttagaagtgaaacaacaacttgaacaggctctcagaatacaagatatagaattgaagagtgtagaaagtaatttgaatcaggtttctc

SEQ ID NO: 411746 - DNA, 120 bp, Artificial Sequence
  ENSG00000148513_26 (sequence is synthesized)
acactcatgaaaatgaaaattatctcttacatgaaaattgcatgttgaaaaaggaaattgccatgctaaaactggaaatagccacactgaaacaccaataccaggaaaaggaaaataaat

SEQ ID NO: 411747 - DNA, 120 bp, Artificial Sequence
  ENSG00000148513_27 (sequence is synthesized)
actttgaggacattaagattttaaaagaaaagaatgctgaacttcagatgaccctaaaactgaaagaggaatcattaactaaaagggcatctcaatatagtgggcagcttaaagttctga

SEQ ID NO: 411748 - DNA, 120 bp, Artificial Sequence
  ENSG00000148513_28 (sequence is synthesized)
tagctgagaacacaatgctcacttctaaattgaaggaaaaacaagacaaagaaatactagaggcagaaattgaatcacaccatcctagactggcttctgctgtacaagaccatgatcaaa

SEQ ID NO: 411749 - DNA, 120 bp, Artificial Sequence
  ENSG00000148513_29 (sequence is synthesized)
ttgtgacatcaagaaaaagtcaagaacctgctttccacattgcaggagatgcttgtttgcaaagaaaaatgaatgttgatgtgagtagtacgatatataacaatgaggtgctccatcaac

SEQ ID NO: 411750 - DNA, 120 bp, Artificial Sequence
  ENSG00000148513_30 (sequence is synthesized)
cactttctgaagctcaaaggaaatccaaaagcctaaaaattaatctcaattatgcaggagatgctctaagagaaaatacattggtttcagaacatgcacaaagagaccaacgtgaaacac

SEQ ID NO: 411751 - DNA, 120 bp, Artificial Sequence
  ENSG00000148513_31 (sequence is synthesized)
agtgtcaaatgaaggaagctgaacacatgtatcaaaacgaacaagataatgtgaacaaacacactgaacagcaggagtctctagatcagaaattatttcaactacaaagcaaaaatatgt

SEQ ID NO: 411752 - DNA, 120 bp, Artificial Sequence
  ENSG00000148513_32 (sequence is synthesized)
ggcttcaacagcaattagttcatgcacataagaaagctgacaacaaaagcaagataacaattgatattcattttcttgagaggaaaatgcaacatcatctcctaaaagagaaaaatgagg

SEQ ID NO: 411753 - DNA, 120 bp, Artificial Sequence
  ENSG00000148513_33 (sequence is synthesized)
agatatttaattacaataaccatttaaaaaaccgtatatatcaatatgaaaaagagaaagcagaaacagaaaactcatgagagacaagcagtaagaaacttcttttggagaaacaacaga

SEQ ID NO: 411754 - DNA, 120 bp, Artificial Sequence
  ENSG00000148513_34 (sequence is synthesized)
ccagatctttactcacaactcatgctaggaggccagtcctagcatcaccttatgttgaaaatcttaccaatagtctgtgtcaacagaatacttattttagaagaaaaattcatgatttct

SEQ ID NO: 411755 - DNA, 120 bp, Artificial Sequence
  ENSG00000148513_35 (sequence is synthesized)
tcctgaagcctacagacataaaataacagtgtgaagaattacttgttcacgaattgcataaagctgcacaggattcccatctaccctgatgatgcagcagacatcattcaatccaaccag

SEQ ID NO: 411756 - DNA, 120 bp, Artificial Sequence
  ENSG00000148513_36 (sequence is synthesized)
gggggtggtggctgggaagggcgatcgggaggcgcgggcactctctagcaggtggccgcagccatggaggagatctctgccgccgctgtcaaggtcgtgccgggcccggagcgcccgagc

SEQ ID NO: 411757 - DNA, 120 bp, Artificial Sequence
  ENSG00000148513_37 (sequence is synthesized)
gaacagttgagtgaactcacttcagatgcatgtagattatttgcactccagaatgtagactgtgggcactccagagactaccagaattgggggaaccacagtgactcattaggtttctct

SEQ ID NO: 411758 - DNA, 120 bp, Artificial Sequence
  ENSG00000148516_0 (sequence is synthesized)
gtaaaccaggtgcggtggggaggggggaggggtggaggcggaggggtgggggggaagggggagggagggggaggaggtgactcgagcatttagacacaagcgagaggatcatggcggatg

SEQ ID NO: 411759 - DNA, 120 bp, Artificial Sequence
  ENSG00000148516_1 (sequence is synthesized)
gccccaggtgtaagcgcagaaagcaggcgaacccgcggcgcaataacgttacaaattataatactgtggtagaaacaaattcagattcagatgatgaagacaaactgcatattgtggaag

SEQ ID NO: 411760 - DNA, 120 bp, Artificial Sequence
  ENSG00000148516_2 (sequence is synthesized)
aagaaagtgttacagatgcagctgactgtgaaggtgtaccagaggatgacctgccaacagaccagacagtgttaccagggaggagcagtgaaagagaagggaatgctaagaactgctggg

SEQ ID NO: 411761 - DNA, 120 bp, Artificial Sequence
  ENSG00000148516_3 (sequence is synthesized)
aggatgacagaaaggaagggcaagaaatcctggggcctgaagctcaggcagatgaagcaggatgtacagtaaaagatgatgaatgcgagtcagatgcagaaaatgagcaaaaccatgatc

SEQ ID NO: 411762 - DNA, 120 bp, Artificial Sequence
  ENSG00000148516_4 (sequence is synthesized)
ctaatgttgaagagtttctacaacaacaagacactgctgtcatttttcctgaggcacctgaagaggaccagaggcagggcacaccagaagccagtggtcatgatgaaaatggaacaccag

SEQ ID NO: 411763 - DNA, 120 bp, Artificial Sequence
  ENSG00000148516_5 (sequence is synthesized)
atgcattttcacaattactcacctgtccatattgtgatagaggctataaacgctttacctctctgaaagaacacattaaatatcgtcatgaaaagaatgaagataactttagttgctccc

SEQ ID NO: 411764 - DNA, 120 bp, Artificial Sequence
  ENSG00000148516_6 (sequence is synthesized)
tgtgcagttacacctttgcatacagaacccaacttgaacgtcacatgacatcacataaatcaggaagagatcaaagacatgtgacgcagtctgggtgtaatcgtaaattcaaatgcactg

SEQ ID NO: 411765 - DNA, 120 bp, Artificial Sequence
  ENSG00000148516_7 (sequence is synthesized)
agtgtggaaaagctttcaaatacaaacatcacctaaaagagcacttaagaattcacagtggagagaagccatatgaatgcccaaactgcaagaaacgcttttcccattctggctcctata

SEQ ID NO: 411766 - DNA, 120 bp, Artificial Sequence
  ENSG00000148516_8 (sequence is synthesized)
gctcacacataagcagtaagaaatgtatcagcttgatacctgtgaatgggcgaccaagaacaggactcaagacatctcagtgttcttcaccgtctctttcagcatcaccaggcagtccca

SEQ ID NO: 411767 - DNA, 120 bp, Artificial Sequence
  ENSG00000148516_9 (sequence is synthesized)
cacgaccacagatacggcaaaagatagagaataaaccccttcaagaacaactttctgttaaccaaattaaaactgaacctgtggattatgaattcaaacccatagtggttgcttcaggaa

SEQ ID NO: 411768 - DNA, 120 bp, Artificial Sequence
  ENSG00000148516_10 (sequence is synthesized)
tcaactgttcaacccctttacaaaatggggttttcactggtggtggcccattacaggcaaccagttctcctcagggcatggtgcaagctgttgttctgccaacagttggtttggtgtctc

SEQ ID NO: 411769 - DNA, 120 bp, Artificial Sequence
  ENSG00000148516_11 (sequence is synthesized)
ccataagtatcaatttaagtgatattcagaatgtacttaaagtggcggtagatggtaatgtaataaggcaagtgttggagaataatcaagccaatcttgcatccaaagaacaagaaacaa

SEQ ID NO: 411770 - DNA, 120 bp, Artificial Sequence
  ENSG00000148516_12 (sequence is synthesized)
tcaatgcttcacccatacaacaaggtggccattctgttatttcagccatcagtcttcctttggttgatcaagatggaacaaccaaaattatcatcaactacagtcttgagcagcctagcc

SEQ ID NO: 411771 - DNA, 120 bp, Artificial Sequence
  ENSG00000148516_13 (sequence is synthesized)
aacttcaagttgttcctcaaaatttaaaaaaagaaaatccagtcgctacaaacagttgtaaaagtgaaaagttaccagaagatcttactgttaagtctgagaaggacaaaagctttgaag

SEQ ID NO: 411772 - DNA, 120 bp, Artificial Sequence
  ENSG00000148516_14 (sequence is synthesized)
ggggggtgaatgatagcacttgtcttctgtgtgatgattgtccaggagatattaatgcacttccagaattaaagcactatgacctaaagcagcctactcagcctcctccactccctgcag

SEQ ID NO: 411773 - DNA, 120 bp, Artificial Sequence
  ENSG00000148516_15 (sequence is synthesized)
cagaagctgagaagcctgagtcctctgtttcatcagctactggagatggcaatttgtctcctagtcagccacctttaaagaacctcttgtctctcctaaaagcatattatgctttgaatg

SEQ ID NO: 411774 - DNA, 120 bp, Artificial Sequence
  ENSG00000148516_16 (sequence is synthesized)
cacaaccaagtgcagaagagctctcaaaaattgctgattcagtaaacctaccactggatgtagtaaaaaagtggtttgaaaagatgcaagctggacagatttcagtgcagtcttctgaac

SEQ ID NO: 411775 - DNA, 120 bp, Artificial Sequence
  ENSG00000148516_17 (sequence is synthesized)
catcttctcctgaaccaggcaaagtaaatatccctgccaagaacaatgatcagcctcaatctgcaaatgcaaatgaaccccaggacagcacagtaaatctacaaagtcctttgaagatga

SEQ ID NO: 411776 - DNA, 120 bp, Artificial Sequence
  ENSG00000148516_18 (sequence is synthesized)
ctaactccccagttttaccagtgggatcaaccaccaatggttccagaagtagtacaccatccccatcacctctaaacctttcctcatccagaaatacacagggttacttgtacacagctg

SEQ ID NO: 411777 - DNA, 120 bp, Artificial Sequence
  ENSG00000148516_19 (sequence is synthesized)
agggtgcacaagaagagccacaagtagaacctcttgatctttcactaccaaagcaacagggagaattattagaaaggtcaactatcactagtgtttaccagaacagtgtttattctgtcc

SEQ ID NO: 411778 - DNA, 120 bp, Artificial Sequence
  ENSG00000148516_20 (sequence is synthesized)
aggaagaacccttgaacttgtcttgcgcaaaaaaggagccacaaaaggacagttgtgttacagactcagaaccagttgtaaatgtaatcccaccaagtgccaaccccataaatatcgcta

SEQ ID NO: 411779 - DNA, 120 bp, Artificial Sequence
  ENSG00000148516_21 (sequence is synthesized)
tacctacagtcactgcccagttacccacaatcgtggccattgctgaccagaacagtgttccatgcttaagagcgctagctgccaataagcaaacgattctgattccccaggtggcataca

SEQ ID NO: 411780 - DNA, 120 bp, Artificial Sequence
  ENSG00000148516_22 (sequence is synthesized)
gcagtccaagaaccacccttgaaagtgatccagccaaatggaaatcaggatgaaagacaagatactagctcagaaggagtatcaaatgtagaggatcagaatgactctgattctacaccg

SEQ ID NO: 411781 - DNA, 120 bp, Artificial Sequence
  ENSG00000148516_23 (sequence is synthesized)
cccaaaaagaaaatgcggaagacagaaaatggaatgtatgcttgtgatttgtgtgacaagatattccaaaagagtagttcattattgagacataaatatgaacacacaggtaaaagacct

SEQ ID NO: 411782 - DNA, 120 bp, Artificial Sequence
  ENSG00000148516_24 (sequence is synthesized)
catgagtgtggaatctgtaaaaaggcatttaaacacaaacatcatttgattgaacacatgcgattacattctggagaaaagccctatcaatgtgacaaatgtggaaagcgcttctcacac

SEQ ID NO: 411783 - DNA, 120 bp, Artificial Sequence
  ENSG00000148516_25 (sequence is synthesized)
tctgggtcttattctcaacacatgaatcatcgctactcctactgtaagagagaagcggaagaacgtgacagcacagagcaggaagaggcagggcctgaaatcctctcgaatgagcacgtg

SEQ ID NO: 411784 - DNA, 120 bp, Artificial Sequence
  ENSG00000148516_26 (sequence is synthesized)
ggtgccagggcgtctccctcacagggcgactcggacgagagagagagtttgacaagggaagaggatgaagacagtgaaaaagaggaagaggaggaggataaagagatggaagaattgcag

SEQ ID NO: 411785 - DNA, 120 bp, Artificial Sequence
  ENSG00000148516_27 (sequence is synthesized)
gaagaaaaagaatgtgaaaaaccacaaggggatgaggaagaggaggaggaggaggaagaagtggaagaagaagaggtagaagaggcagagaatgagggagaagaagcaaaaactgaaggt

SEQ ID NO: 411786 - DNA, 120 bp, Artificial Sequence
  ENSG00000148516_28 (sequence is synthesized)
ctgatgaaggatgacagggctgaaagtcaagcaagcagcttaggacaaaaagtaggcgagagtagtgagcaagtgtctgaagaaaagacaaatgaagcctaatcgtttttctagaaggaa

SEQ ID NO: 411787 - DNA, 120 bp, Artificial Sequence
  ENSG00000148516_29 (sequence is synthesized)
aataaattctaattgataatgaatttcgttcaatattatccttgcttttcatggaaacacagtaacctgtatgctgtgattcctgttcactactgtgtaaagtaaaaactaaaaaaatac

SEQ ID NO: 411788 - DNA, 120 bp, Artificial Sequence
  ENSG00000148516_30 (sequence is synthesized)
acacacacacacacacacaaaataaatccgggtgtgcctgaacctcagacctagtaatttttcatgcagttttcaaagttaggaacaagtttgtaacatgcagcagattagaaaacctta

SEQ ID NO: 411789 - DNA, 120 bp, Artificial Sequence
  ENSG00000148516_31 (sequence is synthesized)
gtttgtaacatgcagcagattagaaaaccttaatgactcagagagcaacaatacaagaggttaaaggaagctgattaattagatatgcatctggcattgttttatcttatcagtattatc

SEQ ID NO: 411790 - DNA, 120 bp, Artificial Sequence
  ENSG00000148516_32 (sequence is synthesized)
actcttatgttggtttattcttaagctgtacaattgggagaaattttataattttttattggtaaacatatgctaaatccgcttcagtattttattatgttttttaaaatgtgagaactt

SEQ ID NO: 411791 - DNA, 120 bp, Artificial Sequence
  ENSG00000148516_33 (sequence is synthesized)
ctgcactacaaaattcccttcacagagaagtataatgtagttccaacccgtgctaactaccttttataaattcagtctagaaggtagtaatttctaatatttagatgtcttagtagagcg

SEQ ID NO: 411792 - DNA, 120 bp, Artificial Sequence
  ENSG00000148516_34 (sequence is synthesized)
tattatcatttaaagtgtattgttagccttaagaaagcagctgatagaagaactgaagtttcttactcacgtggtttaaaatggagttcaaaagattgccattgagttctgattgcaggg

SEQ ID NO: 411793 - DNA, 120 bp, Artificial Sequence
  ENSG00000148516_35 (sequence is synthesized)
actaacaatgttaatctgataaggacagcaaaatcatcagaatcagtgtttgtgattgtgtttgaatatgtggtaacatatgaaggatatgacatgaagctttgtatctcctttggcctt

SEQ ID NO: 411794 - DNA, 120 bp, Artificial Sequence
  ENSG00000148516_36 (sequence is synthesized)
aagcaagacctgtgtgctgtaagtgccatttctcagtattttcaaggctctaacccgccttcatccaatgtgtggcctacaataactagcatttgttgatttgtctcttgtatcaaaatt

SEQ ID NO: 411795 - DNA, 120 bp, Artificial Sequence
  ENSG00000148516_37 (sequence is synthesized)
cccaaataaaacttaaaaccactgactctgtcagagaaactgaaacactgggacatttcatccttcaattcctcggtattgattttatgttgattgattttcagaatttctctacagaaa

SEQ ID NO: 411796 - DNA, 120 bp, Artificial Sequence
  ENSG00000148516_38 (sequence is synthesized)
cgaaagggaaattttctaatctgctttatccatgtacttgcatttcagacatggacatgctattgttatttggctcataactgtttccaaatgttagttattatggacccaatttattaa

SEQ ID NO: 411797 - DNA, 120 bp, Artificial Sequence
  ENSG00000148516_39 (sequence is synthesized)
caacattagctgatttttacctatcagtattattttatttcttttagtttatagatctgtgcaacatttttgtactgtatgtcttcaaacctggcagtattaatacccttcttactgaca

SEQ ID NO: 411798 - DNA, 120 bp, Artificial Sequence
  ENSG00000148516_40 (sequence is synthesized)
acctggcagtattaatacccttcttactgacatatgtacttttagttttagaaaacttttatatttatgtgtcttatttttatatttctttatttattacacagtgtagtgtataatact

SEQ ID NO: 411799 - DNA, 120 bp, Artificial Sequence
  ENSG00000148516_41 (sequence is synthesized)
tatgaaaatttggaaagttgataagatttaaagtagagatgcaattggttctcctgcattgagatttgatttaacagtgttatgttaacatttatacttgccttggactgtagaacagaa

SEQ ID NO: 411800 - DNA, 120 bp, Artificial Sequence
  ENSG00000148516_42 (sequence is synthesized)
cttaaatgggaatgtattagttttacaactacaatcaagtcattttacctttacccagtttttaatataaaacttaaattttgaaattcactgtgtgactaatagcatgatgctctgcag

SEQ ID NO: 411801 - DNA, 120 bp, Artificial Sequence
  ENSG00000148516_43 (sequence is synthesized)
ttttattaagaaatcagcctaaccatacaactctcatttccttagtaagccaaattaggattaacttctataaacagtgttgggaacaatgtttaacattttgtgccaatttgttcctgt

SEQ ID NO: 411802 - DNA, 120 bp, Artificial Sequence
  ENSG00000148516_44 (sequence is synthesized)
attcatgtatgtaagttacagatctgactcttcatttttaagttccttgttacatcatggtcattttctagttttttaccagactcccatctcacaataaaatgcatcaacaagcctgaa

SEQ ID NO: 411803 - DNA, 120 bp, Artificial Sequence
  ENSG00000148516_45 (sequence is synthesized)
cttttcatcattatcagtattttctttggaaaactgtgaaatggggtacattgtcatcctgcatttgattcatcttgagctgaatttgggtaacactaaatgttttagacattctccact

SEQ ID NO: 411804 - DNA, 120 bp, Artificial Sequence
  ENSG00000148516_46 (sequence is synthesized)
aaattatggattttcttgtggctaaatgtttctggagaggtcagagttgacaaaacctcttcacaggttgctccttcttcctgaaatccttaatcctccgcatttcatgcttcaggtcat

SEQ ID NO: 411805 - DNA, 120 bp, Artificial Sequence
  ENSG00000148516_47 (sequence is synthesized)
ttcagggaagcctgggtttagatgcctttctgactctcagctcctgcacttctgtcatcatacctctgatactattatttatattccttccccactaggaacaggaaccacatttgtcat

SEQ ID NO: 411806 - DNA, 120 bp, Artificial Sequence
  ENSG00000148516_48 (sequence is synthesized)
agtcactctcacattcctcactgcctaacagggtgcctggcataagttgggacaacagatatttgttgaataaaaatataatttgcatgtttatggagctcagctatgttctcacttttt

SEQ ID NO: 411807 - DNA, 120 bp, Artificial Sequence
  ENSG00000148516_49 (sequence is synthesized)
ttgcttctaattccagaatatatgttaaatgatctaataatttgattattttcttataagtcttattaaacactagtcataatagacacaataaattatgccttctttttctattgcctt

SEQ ID NO: 411808 - DNA, 120 bp, Artificial Sequence
  ENSG00000148516_50 (sequence is synthesized)
tttctccctcccctctgggatgcgaaacgcgaggttttgtaacctttcctggcaattttagattttgtgtgggatttcctgtctagaagcagatacgaagatttttaagctgtttcaaga

SEQ ID NO: 411809 - DNA, 120 bp, Artificial Sequence
  ENSG00000148516_51 (sequence is synthesized)
tgtttccttccaatccataattatatttttaatatattcgagccatcattaaaatcactgctttcgtgattttaattattcaaataaacacttgcattttaaagacgtctgttgattata

SEQ ID NO: 411810 - DNA, 120 bp, Artificial Sequence
  ENSG00000148516_52 (sequence is synthesized)
aacgaaaggtattttggtattctcattgtggagagatgacttgttatagcaaggagtggagcataggctattgcaattttaatttcctgttttagcgtcaaatagtgtgtgttccatatt

SEQ ID NO: 411811 - DNA, 120 bp, Artificial Sequence
  ENSG00000148516_53 (sequence is synthesized)
agagttaaaaaaaaagagagacagcccgagggatcgagacctgaacatgtggtggtggttgcacagtcgccttttccagtttggagagacgttgacaaccttaaacttccaccacaagag

SEQ ID NO: 411812 - DNA, 120 bp, Artificial Sequence
  ENSG00000148516_54 (sequence is synthesized)
gaatataaagaggtccctcctgcaccaagaaagatctgcagatctttttcagtgttcttggaggtgtggggtgtgagaacttgatcagtttgtgtcagccaccttgttctctaaagttac

SEQ ID NO: 411813 - DNA, 120 bp, Artificial Sequence
  ENSG00000148516_55 (sequence is synthesized)
gcagccgcggcgggtgtggccagcgcggaggcaggacgccgccgagcctccaactttacctttccaactccgacagcccgtcgcctttctgaccgcgtccctacggtttcccggcatccg

SEQ ID NO: 411814 - DNA, 120 bp, Artificial Sequence
  ENSG00000148516_56 (sequence is synthesized)
cctccctctccccaccacacctgaggaaaacttttccctcgcccctcaattcaaattcagcagtgcccacggttgccgcaaaccgcccggtccctagcaacaaggttccggccgtagagc

SEQ ID NO: 411815 - DNA, 120 bp, Artificial Sequence
  ENSG00000148516_57 (sequence is synthesized)
gagagcctctaggtgtaaggaaggtgatgtcgtaaagccgggagtgtcgtaaaccagttttcagtttaaattctcaactggcaattggccgaaaactcccatctgaagacatgatcatcc

SEQ ID NO: 411816 - DNA, 120 bp, Artificial Sequence
  ENSG00000148516_58 (sequence is synthesized)
aaatgtcattttgtgatttggctactgtctgcttgacataggaaagcactatcaagaaagactaatggagtgactatcaaaaggaagtcaatggacaaccttaaacttccaccacaagag

SEQ ID NO: 411817 - DNA, 72 bp, Artificial Sequence
  ENSG00000148516_59 (sequence is synthesized)
cactttgggaggccaaggaggcaaccttaaacttccaccacaagaggaatataaagaggtccctcctgcacc

SEQ ID NO: 411818 - DNA, 120 bp, Artificial Sequence
  ENSG00000148516_60 (sequence is synthesized)
aaaagagatgggacaacaaagaaattctagcctttggagacatctagaccagcactatatggtacaaagataattcgagccataaatagaagctacttacaaattataatactgtggtag

SEQ ID NO: 411819 - DNA, 120 bp, Artificial Sequence
  ENSG00000148516_61 (sequence is synthesized)
agagccccggcctggggactccgcggcgagccccgcgagtggggtccacgtttggcggggcgcggcggggcggcgcggggaacaaggcaggaaagcagctgtttaaggaagacagagcag

SEQ ID NO: 411820 - DNA, 120 bp, Artificial Sequence
  ENSG00000148516_62 (sequence is synthesized)
gcattggataatattcttattaaggaaaggaagggcaagaaatcctggggcctgaagctcaggcagatgaagcaggatgtacagatgatgaatgcgagtcagatgcagaaaatgagcaaa

SEQ ID NO: 411821 - DNA, 120 bp, Artificial Sequence
  ENSG00000148516_63 (sequence is synthesized)
atgtgtgtgacatgtgagtctgaaccacccagcgtctgtgcagctgctgtaaacatgtttacctgaacaggaaagaatggatttttctccttgagatcctgtgatatgaatattacactc

SEQ ID NO: 411822 - DNA, 120 bp, Artificial Sequence
  ENSG00000148516_64 (sequence is synthesized)
gtaaggcatatcaacagatgacttaaggggggaaaagcgatcctgaaagatacttgaaatcaacaggaaagagaggttcttgatcgctgcagcaaatggcaacttgtgcagttacaaatt

SEQ ID NO: 411823 - DNA, 120 bp, Artificial Sequence
  ENSG00000148516_65 (sequence is synthesized)
agacacaagcgagaggatcatggcggatggccccaggtgtaagcgcagaaagcaggcgaacccgcggcgcaataacgttttcagtttaaattctcaactggcaattggccgaaaactccc

SEQ ID NO: 411824 - DNA, 120 bp, Artificial Sequence
  ENSG00000148516_66 (sequence is synthesized)
agtgtttattgatttgtgctgctgtgccaagggaaacacacacccctctgcctggcgtgagagttaaaaaaaaagagagacagcccgagggatcgagacctgaacatgtggtggtggttg

SEQ ID NO: 411825 - DNA, 120 bp, Artificial Sequence
  ENSG00000148516_67 (sequence is synthesized)
ggggactccgcggcgagccccgcgagtggggtccacgtttggcggggcgcggcggggcggcgcggggaacaaggcaggaaagttacaaattataatactgtggtagaaacaaattcagat

SEQ ID NO: 411826 - DNA, 120 bp, Artificial Sequence
  ENSG00000148516_68 (sequence is synthesized)
acaaaacgtcttgtctgcagtatgcattactctcagaaaacaaaaggtgtttaagatagcactgtactactacagcagctgtttaaggaagacagagcaggcattggataatattcttat

SEQ ID NO: 411827 - DNA, 120 bp, Artificial Sequence
  ENSG00000148516_69 (sequence is synthesized)
taagctcaggacagtcagcttaccctgaggcgcattgaccactgggagagatgtggatatagaaatccaatcatggatcattaggaagaaggaagcgttggataggctctcagcatggtc

SEQ ID NO: 411828 - DNA, 120 bp, Artificial Sequence
  ENSG00000148516_70 (sequence is synthesized)
tccctagtgaatctactctctgactcctgtgtttcaagcaccctcattagcagagcttatatagttcggagttgaagaatttttttttcccaaaaattctcttctcatttaatagacacc

SEQ ID NO: 411829 - DNA, 120 bp, Artificial Sequence
  ENSG00000148516_71 (sequence is synthesized)
tgtctgtagagtaaactatgcaggccataaatggaacaaagatagtttaggaaaatacagtttcttaaataaattacttttaaaaagtatattttctctcagctcttctctccaaaggag

SEQ ID NO: 411830 - DNA, 120 bp, Artificial Sequence
  ENSG00000148516_72 (sequence is synthesized)
gaagtcacttcccatcccggttcgcttggggggaaaccaggcgtccctggaagggaagggaagggagtccgggctgcgcgggtcagcccgtcgcctttctgaccgcgtccctacggtttc

SEQ ID NO: 411831 - DNA, 120 bp, Artificial Sequence
  ENSG00000148516_73 (sequence is synthesized)
aacaaaaccctgtcaaagcagcattcttacgtgagaatttcacttacgggagagttcttacaggatttcaagaaggaaagccctgaagagggacactgatttcctcaactgaatttaaaa

SEQ ID NO: 411832 - DNA, 120 bp, Artificial Sequence
  ENSG00000148516_74 (sequence is synthesized)
atttagacacaagcgagaggatcatggcggatggccccaggtgtaagcgcagaaagcaggcgaacccgcggcgcaataacgctgtttaaggaagacagagcaggcattggataatattct

SEQ ID NO: 411833 - DNA, 120 bp, Artificial Sequence
  ENSG00000148541_0 (sequence is synthesized)
ggagacttgccttgcaatgccatgtttgtgtatgtgctctaactcccggagagcaatcagggagacggctccccggccagacttggctgatgttttcttgtttctgtttcagccttcagg

SEQ ID NO: 411834 - DNA, 120 bp, Artificial Sequence
  ENSG00000148541_1 (sequence is synthesized)
ataattccttcagcagcaccactgtaacagagtgtgacgaagatccagtctctctacatgaagaccagactgattgctccagtctcagagatgaaaacaataaagagaactaccccgacg

SEQ ID NO: 411835 - DNA, 120 bp, Artificial Sequence
  ENSG00000148541_2 (sequence is synthesized)
caggggctctggtagaagagcacgcgccgccctcttgggagccgcagcagcagaatgtagaggcgaccgtgctggtggacagcgtattgcgacccagcatgggcaacttcaagtccagga

SEQ ID NO: 411836 - DNA, 120 bp, Artificial Sequence
  ENSG00000148541_3 (sequence is synthesized)
agcccaagtccatcttcaaagcggagagcgggaggagccacggagaaagtcaggagacagagcatgtggtatccagccagtcagagtgtcaggtgagagcaggaacaccagctcatgaga

SEQ ID NO: 411837 - DNA, 120 bp, Artificial Sequence
  ENSG00000148541_4 (sequence is synthesized)
gtccacaaaacaatgccttcaagtgccaagaaacagtgcgacttcaaccaagaatagaccagaggactgccatttcgccaaaggatgcttttgaaactcggcaggacttaaatgaggaag

SEQ ID NO: 411838 - DNA, 120 bp, Artificial Sequence
  ENSG00000148541_5 (sequence is synthesized)
aagctgctcaggtgcatggagtcaaggacccggcgccagcatcaacccagagcgtgcttgccgatgggacagattctgcagacccctcaccagtccacaaagatgggcagaatgaggccg

SEQ ID NO: 411839 - DNA, 120 bp, Artificial Sequence
  ENSG00000148541_6 (sequence is synthesized)
acagtgcaccagaagacctccactctgtggggaccagcaggctgctctatcacatcactgatggtgataacccactgctgtcgccacgatgctccatcttcagccaaagccagagattca

SEQ ID NO: 411840 - DNA, 120 bp, Artificial Sequence
  ENSG00000148541_7 (sequence is synthesized)
acttagaccccgagtcagccccatctccacccagcactcagcagtttatgatgccgcggagttcttcacgctgcagctgtggagatggcaaggagccacagaccatcacccagctcacca

SEQ ID NO: 411841 - DNA, 120 bp, Artificial Sequence
  ENSG00000148541_8 (sequence is synthesized)
agcacatccagagcctcaagcggaaaattcggaaatttgaagaaaaatttgaacaagaaaagaaataccggccttcacatggtgacaagacttctaatcctgaagtcctgaaatggatga

SEQ ID NO: 411842 - DNA, 120 bp, Artificial Sequence
  ENSG00000148541_9 (sequence is synthesized)
atgatttggctaaaggtcgtaaacagctcaaagaactaaagctaaagctgtcagaagaacaagggagtgctcccaaaggtccacctagaaacctgttgtgtgagcaacccacagtcccca

SEQ ID NO: 411843 - DNA, 120 bp, Artificial Sequence
  ENSG00000148541_10 (sequence is synthesized)
gagaaaatgggaaaccggaagctgcgggcccggagccaagctcctctggagaagagactccagatgctgccttgacatgcctgaaggagagaagagagcaacttcctccccaggaggatt

SEQ ID NO: 411844 - DNA, 120 bp, Artificial Sequence
  ENSG00000148541_11 (sequence is synthesized)
ctaaggtaactaagcaagacaagaacctcataaagccgctttatgaccgatacagaattatcaagcaaatcttgtcaacaccttcccttattccaacaattcaggaggaagaggactctg

SEQ ID NO: 411845 - DNA, 120 bp, Artificial Sequence
  ENSG00000148541_12 (sequence is synthesized)
atgaagaccgtccacagggaagccaacaaccttctttggcagatccagcatctcaccttcctgttggtgaccacctcacctactctaatgagactgagcctgttagggcccttttaccag

SEQ ID NO: 411846 - DNA, 120 bp, Artificial Sequence
  ENSG00000148541_13 (sequence is synthesized)
aactagggctgacaagaagagactgcggaaagccttaagagaatttgaagaacagttttttaaacaaacaggaagaagtccacaaaaggaagataggataccaatggcagatgagtatta

SEQ ID NO: 411847 - DNA, 120 bp, Artificial Sequence
  ENSG00000148541_14 (sequence is synthesized)
tgaatataagcacataaaagccaaactgagactattagaggtcctcatcagcaagcaagatgtggccaaaactatttgaggttcaggaaatgttatgatcactttcacccatgatataaa

SEQ ID NO: 411848 - DNA, 120 bp, Artificial Sequence
  ENSG00000148541_15 (sequence is synthesized)
gtaaagtttattttcctctgccatccttgctaagtagttttgacacaatgaaaatggaagcactttagtggtagtattagctgtttttaagaaggaatagcaagtttaattatatacaag

SEQ ID NO: 411849 - DNA, 120 bp, Artificial Sequence
  ENSG00000148541_16 (sequence is synthesized)
gagaagggatttaaacggggggaagaatacaacaggtagccatataattgggaaaaaattcagtgtcctccatgccaagcagaaaactcatagtcaatacaagtatttttaaaaatgtct

SEQ ID NO: 411850 - DNA, 120 bp, Artificial Sequence
  ENSG00000148541_17 (sequence is synthesized)
aatattttatcaaatctaaataacatagctaggacacttgttagggaaagtttatttagtatccaaagactgtttatgttgatgtatggaaaagagcatgattttaaaaaatcaatcata

SEQ ID NO: 411851 - DNA, 120 bp, Artificial Sequence
  ENSG00000148541_18 (sequence is synthesized)
ggaggaaaagaaattcgcttttcaagtaggaaggaatacagctagcaagaaagcaatttatttgaaacttctaatggatttttgagtgataaaacatttactaccttgtcctttaagtct

SEQ ID NO: 411852 - DNA, 120 bp, Artificial Sequence
  ENSG00000148541_19 (sequence is synthesized)
gctaggctctcagtaccctaaaataaactagattgtgttgctatttttttctttctctataaaaataacacattattttatccgttatttgaaattttacatttctggttaccaaagttc

SEQ ID NO: 411853 - DNA, 120 bp, Artificial Sequence
  ENSG00000148541_20 (sequence is synthesized)
ctggttaccaaagttcattctgatagcatgtactttgtgaattattatctttgtctataactgacagatgtttatattaaaataaaatattgtattaaaaatttaaaataggtattttgg

SEQ ID NO: 411854 - DNA, 120 bp, Artificial Sequence
  ENSG00000148541_21 (sequence is synthesized)
agtatataatctaatgtgtccatagtattattgctaatcttttggtttactataagatgatataactattttttcattgggaatatacatttttcttaatgttccaacatctatactttg

SEQ ID NO: 411855 - DNA, 120 bp, Artificial Sequence
  ENSG00000148541_22 (sequence is synthesized)
taaagtcaaaacatttcccatgagctgtagttattcatccttctgtacaaaatgaaaagtttggaaattgtttgccctgataccttgaaaaagaagccagaatatttatttgcttcatca

SEQ ID NO: 411856 - DNA, 120 bp, Artificial Sequence
  ENSG00000148541_23 (sequence is synthesized)
acttcagtgtatatcattttgtgttattttatacgaaaacatgtttattattttcatttttgtaaaaggaagtaaaaggtcaacattttctctcatgtaccaaccttgtttgtatttcta

SEQ ID NO: 411857 - DNA, 120 bp, Artificial Sequence
  ENSG00000148541_24 (sequence is synthesized)
ttttctgtaatgtttaagtatgatgttgaagaaattcacattctcttatagtttggatgggaagactattgactatttcagaaacagacttatttcagaggcttattgttttctctgtat

SEQ ID NO: 411858 - DNA, 120 bp, Artificial Sequence
  ENSG00000148541_25 (sequence is synthesized)
ttacctaatattttataacttttatgaatcagaataatgtccttcataaatttgtttaattgaagtcatctacttctaacaggacagatacacaactatttgaggtttacaaattacatc

SEQ ID NO: 411859 - DNA, 120 bp, Artificial Sequence
  ENSG00000148541_26 (sequence is synthesized)
catctttgataagggaaatggtttcgtgacatgtacacagttgctattaaaatgtaactctatatattctatatgattgtaaatattttatacaacaatacaaataaaatatttttctat

SEQ ID NO: 411860 - DNA, 120 bp, Artificial Sequence
  ENSG00000148541_27 (sequence is synthesized)
gtactgatgtgtagttaacaggatgtcacatagtagtacaagagttataaaagacccttcatggcagtatatactgcaaacaaggctagttgtcatttcaaaaagtgaaaatttggtctt

SEQ ID NO: 411861 - DNA, 120 bp, Artificial Sequence
  ENSG00000148541_28 (sequence is synthesized)
ctctaaccccattactatatttaacagtggctgatattagaactattgtaaaataggaacatatagcacttgtatgtctagagccaattttaacatttgctttcattatcttgggtgaaa

SEQ ID NO: 411862 - DNA, 120 bp, Artificial Sequence
  ENSG00000148541_29 (sequence is synthesized)
agaaatgatagatttcagtttggcattttctaatttgtaacacagctagacaaaacagagcctttctgttctgtgtgttggttaattttttcctttaatcagaaaattaacaatatattc

SEQ ID NO: 411863 - DNA, 120 bp, Artificial Sequence
  ENSG00000148541_30 (sequence is synthesized)
ttgatataatgcaacatttgtttttggtaccatttgaccatactgtacaagatatgagaagatttatttcaatagaaaatataagtactgaaattgaattaggctacttttaataaagaa

SEQ ID NO: 411864 - DNA, 120 bp, Artificial Sequence
  ENSG00000148541_31 (sequence is synthesized)
tgatttatgggaatacagaactagaaaagcatcacaaatcctactccatcaatatcaaaacagttacttgttcaagatatcaatataaaaaggaataaatattaacaaatataaatttaa

SEQ ID NO: 411865 - DNA, 120 bp, Artificial Sequence
  ENSG00000148541_32 (sequence is synthesized)
ttgctgttaaaaatgagctgcaattttttgcaggaacggtgactttttacaaaatgtatataatttccacactggcttagactcaggatttgtccaatgcaacattctaatagtgccagt

SEQ ID NO: 411866 - DNA, 120 bp, Artificial Sequence
  ENSG00000148541_33 (sequence is synthesized)
attagggatgtttcatgggacatggtagctgtcaggtatgacatcaatctgtaaaaaataaaggataaactccaaaaatctctaactttgcacaataaatctcatcataaataaatgaat

SEQ ID NO: 411867 - DNA, 120 bp, Artificial Sequence
  ENSG00000148541_34 (sequence is synthesized)
ttatttaaacctttaaaaaaatctgttgatttttttagcccacataactgctttgttgttggtttcttagttccacaagttactccctaatttattaaataataattccttatttgcttt

SEQ ID NO: 411868 - DNA, 120 bp, Artificial Sequence
  ENSG00000148541_35 (sequence is synthesized)
aaaattggtaggagacatgtggaagaaagcaagtctcccgggtatttcagcacttcggcagaaacactggggcattctcattgccagcctcggggggtggctggcacaaagagcccaaga

SEQ ID NO: 411869 - DNA, 120 bp, Artificial Sequence
  ENSG00000148541_36 (sequence is synthesized)
ttaaacgcggcgcctgggctggcgaggtcggggtcgtgtggtaactctccaggtgctcctcgctggatcccggggtcccagccccgccgccgcgccccgcccagctctgtccccgcagcc

SEQ ID NO: 411870 - DNA, 120 bp, Artificial Sequence
  ENSG00000148541_37 (sequence is synthesized)
agaaacagtgcgacttcaaccaagggggtgaactatatagattgacccacattctttcacacagtttctgttatggccaaaatttgggagaccagaaaagaccttggggaaacttgaagg

SEQ ID NO: 411871 - DNA, 120 bp, Artificial Sequence
  ENSG00000148541_38 (sequence is synthesized)
gtggaatgatgcgtatatgattctggcacaaccagttctttccctgaagcagctgttgccaccaccctcttcctgccaggcagtggaggaaggtgcttgcgggagctgcggacacactgt

SEQ ID NO: 411872 - DNA, 120 bp, Artificial Sequence
  ENSG00000148541_39 (sequence is synthesized)
tttccacctgtgccctcttgcaccttgttttctgcttagactgtaactcccttttgaaataaagcaccctgtatctctgtcattgtttggccccatgtaataaacctccttacaaagaaa

SEQ ID NO: 411873 - DNA, 120 bp, Artificial Sequence
  ENSG00000148541_40 (sequence is synthesized)
actagcagaacctaaaacatctgaaaaaggcaagcacaagttctctgatactgcattgtgctccctttatgagtgctttgtccatttatgcccaaggttgcaatgttttgaatttttgca

SEQ ID NO: 411874 - DNA, 83 bp, Artificial Sequence
  ENSG00000148541_41 (sequence is synthesized)
aactcccacatgcttcgagtgagaggataatagcatctctttaatggaaagaatattactgtaactctattctgaagactcca

SEQ ID NO: 411875 - DNA, 120 bp, Artificial Sequence
  ENSG00000148541_42 (sequence is synthesized)
ccaagcatggcaggtgcagattctgtgctgacccgagtgtcttccagtgaccttagccctgacatagccccaggatggcctctctagcctgctagacctgctggagacagccctggatcc

SEQ ID NO: 411876 - DNA, 120 bp, Artificial Sequence
  ENSG00000148541_43 (sequence is synthesized)
agggcaaggatgtgggtggaaagcagcctgcagaaaggttggcatgacattctgatgggagcctggcattgcagctgtctatggaaagtctcttctggaaataaacagaagaaagaattc

SEQ ID NO: 411877 - DNA, 120 bp, Artificial Sequence
  ENSG00000148541_44 (sequence is synthesized)
cctttgttttgttaacagctttgtaatattttctgtccaggttctgtgagaataaacatgacaatattttgaaagcttttcatatccccagaaggaagaaatgacaaagaggcaagccat

SEQ ID NO: 411878 - DNA, 120 bp, Artificial Sequence
  ENSG00000148541_45 (sequence is synthesized)
tataatgaatgcttatgatctttatttaggaacatgacagtctcaagccctctgtcacttctaagtcttgatgatttgtctcatttgcccagacccctcaccagtccacaaagatgggca

SEQ ID NO: 411879 - DNA, 120 bp, Artificial Sequence
  ENSG00000148541_46 (sequence is synthesized)
atttgggagaccagaaaagaccttggggaaacttgaaggacgtgcaatatgaatgggacagagatcatcaaagagggtggatgtgttcacactcatggattgaaatgtcctgtatcattc

SEQ ID NO: 411880 - DNA, 120 bp, Artificial Sequence
  ENSG00000148541_47 (sequence is synthesized)
atttctcaacttattgaacaccaaactcttttatggaagaaccacctaataacatttctttaggcgacagagtctctatggaacacaaatgggaaacattgctatatttttaatggggat

SEQ ID NO: 411881 - DNA, 120 bp, Artificial Sequence
  ENSG00000148541_48 (sequence is synthesized)
agaaaatacatacagaaaagtgcacaggtcataggtatacagctgaatgaattcttacaaagtgtgcaaccagcacataaatcaagaaacaaaatattaccagcatcccagatgcctctt

SEQ ID NO: 411882 - DNA, 120 bp, Artificial Sequence
  ENSG00000148541_49 (sequence is synthesized)
tgtaattccttccagtcgctactctcctatgaagataactagtattttttagtgttttattcatggattacatatgctcttttgtgtctggcttcgtttgctccatattatattcatgag

SEQ ID NO: 411883 - DNA, 120 bp, Artificial Sequence
  ENSG00000148541_50 (sequence is synthesized)
attcacagctctgtagtccggggctgggcgcttcctctctgggactgaaataagagcgctctagacagatcagccttcaggataattccttcagcagcaccactgtaacagagcctgaga

SEQ ID NO: 411884 - DNA, 120 bp, Artificial Sequence
  ENSG00000148541_51 (sequence is synthesized)
ataccctactttaatgttctacaatttttgagccgaatgttacagccgattctaaacagagtgatgaagcttaaatgggcaaaggagacagagcatgtggtatccagccagtcagagtgt

SEQ ID NO: 411885 - DNA, 120 bp, Artificial Sequence
  ENSG00000148572_0 (sequence is synthesized)
gctccttcagcgcctatcgctggctcttggggcgcagagaggggccgcagtctccgcggctgcgtcgagctcccttgcagtcccctccatgttccccggcgccactactccccttcctaa

SEQ ID NO: 411886 - DNA, 120 bp, Artificial Sequence
  ENSG00000148572_1 (sequence is synthesized)
ggccgccgcttaccccggggtctatggaagtaatggaaggacccctcaacctggctcatcaacagagcagacgagcagaccgtttattagctgcaggcaaatacgaagaggctatttctt

SEQ ID NO: 411887 - DNA, 120 bp, Artificial Sequence
  ENSG00000148572_2 (sequence is synthesized)
gtcacaaaaaggctgcagcatatctttctgaagccatgaagctgacacagtcagagcaggctcatctttcactggaattgcaaagggatagccatatgaaacagctcctcctcatccaag

SEQ ID NO: 411888 - DNA, 120 bp, Artificial Sequence
  ENSG00000148572_3 (sequence is synthesized)
agagatggaaaagggcccagcgtgaagaaagattgaaagcccagcagaacacagacaaggatgcagctgcccatcttcagacatctcacaaaccctctgcagaggatgcagagggccaga

SEQ ID NO: 411889 - DNA, 120 bp, Artificial Sequence
  ENSG00000148572_4 (sequence is synthesized)
gtcccctttctcagaagtacagcccttccacagagaaatgcctgcctgagattcaggggatctttgacagggatccagacacactactttatttacttcagcaaaagagtgagccagcag

SEQ ID NO: 411890 - DNA, 120 bp, Artificial Sequence
  ENSG00000148572_5 (sequence is synthesized)
agccatgtattggaagcaaagccccaaaagatgataaaacaattatagaggagcaggcaaccaaaattgcagatttgaagaggcatgtggaattccttgtggctgagaatgaaagattaa

SEQ ID NO: 411891 - DNA, 120 bp, Artificial Sequence
  ENSG00000148572_6 (sequence is synthesized)
ggaaagaaaataaacaactaaaggctgaaaaggccagacttctaaaaggtccaatagaaaaggagctggatgtagatgctgattttgtagaaacgtcagagttatggagcttgccaccac

SEQ ID NO: 411892 - DNA, 120 bp, Artificial Sequence
  ENSG00000148572_7 (sequence is synthesized)
tacagcctcctcaacctggcagaagttcgcagcaaatactgggaaagccaaggacattccaatccccaatcttcctcccttggattttccatctccagaacttcctcttatggagctctc

SEQ ID NO: 411893 - DNA, 120 bp, Artificial Sequence
  ENSG00000148572_8 (sequence is synthesized)
tgaggatattctgaaaggatttatgaataattaaaatggaaggccacagaaaaggggaaaagaggaaataatacagtaatcgttaatccagcaaaaagaaatgaaaagggaaaaccacat

SEQ ID NO: 411894 - DNA, 120 bp, Artificial Sequence
  ENSG00000148572_9 (sequence is synthesized)
agaagggtaatcccggaaatgcttcatctggtggactgtgggagcagaggcattgccaggacttgggaaacagtcactgtgaaatgcgctgcgtatctcattcactcacttcagctaatg

SEQ ID NO: 411895 - DNA, 120 bp, Artificial Sequence
  ENSG00000148572_10 (sequence is synthesized)
attccgacttggcagacgctaaactcatggaggttcggtttctcctgatacaaaccaaatggctacctggaagaatttctttcaagcaacagttatttttcttatcttcagggttaaaat

SEQ ID NO: 411896 - DNA, 120 bp, Artificial Sequence
  ENSG00000148572_11 (sequence is synthesized)
gtataaaagttatgtgtaattaatctataatgccataaatgataatgcaaaacctaaataatatggtggccggaggggctgccttatatttgaaacatgctttctatcatgcattgactg

SEQ ID NO: 411897 - DNA, 120 bp, Artificial Sequence
  ENSG00000148572_12 (sequence is synthesized)
tatgcattttgttaatgcacattctgtttgtttaaggtgtgtaagatacacacccttctagatgaaactatatgtgccacactttgcactactcataatgataacctcaagactatcaga

SEQ ID NO: 411898 - DNA, 120 bp, Artificial Sequence
  ENSG00000148572_13 (sequence is synthesized)
agaaatatttaaatttccattttatgaagaaaggaaccaaattattatgctttttaaaacaaattaccagtttacataattaatcagggtgcattttaagttctaacttcgtttattgta

SEQ ID NO: 411899 - DNA, 120 bp, Artificial Sequence
  ENSG00000148572_14 (sequence is synthesized)
taatgcatcatttgaaaataccaaggaggaaataccctttgtttttaatgatgcaagagtggacgtaatgctagttggcagtattttattgtaagaaatcaataaagtaattgtgtttta

SEQ ID NO: 411900 - DNA, 120 bp, Artificial Sequence
  ENSG00000148584_0 (sequence is synthesized)
tgagcaaccctaattaacctgattttttgctgataatcactctcaatggaatcaaatcacaaatccggggatggattgagcggcactcagaaggaagcagccctccgcgcactggtccag

SEQ ID NO: 411901 - DNA, 120 bp, Artificial Sequence
  ENSG00000148584_1 (sequence is synthesized)
cgcacaggatatagcttggtccaggaaaatggacaaagaaaatatggtggccctccacctggttgggatgctgcaccccctgaaaggggctgtgaaatttttattggaaaacttccccga

SEQ ID NO: 411902 - DNA, 120 bp, Artificial Sequence
  ENSG00000148584_2 (sequence is synthesized)
gacctttttgaggatgagcttataccattatgtgaaaaaatcggtaaaatttatgaaatgagaatgatgatggattttaatggcaacaatagaggatatgcatttgtaacattttcaaat

SEQ ID NO: 411903 - DNA, 120 bp, Artificial Sequence
  ENSG00000148584_3 (sequence is synthesized)
aaagtggaagccaagaatgcaatcaagcaacttaataattatgaaattagaaatgggcgcctcttaggggtttgtgccagtgtggacaactgccgattatttgttgggggcatcccaaaa

SEQ ID NO: 411904 - DNA, 120 bp, Artificial Sequence
  ENSG00000148584_4 (sequence is synthesized)
accaaaaagagagaagaaatcttatcggagatgaaaaaggttactgaaggtgttgtcgatgtcatcgtctacccaagcgctgcagataaaaccaaaaaccgaggctttgccttcgtggag

SEQ ID NO: 411905 - DNA, 120 bp, Artificial Sequence
  ENSG00000148584_5 (sequence is synthesized)
tatgagagtcatcgagcagctgccatggcgaggaggaaactgctaccaggaagaattcagttatggggacatggtattgcagtagactgggcagagccagaagtagaagttgatgaagat

SEQ ID NO: 411906 - DNA, 120 bp, Artificial Sequence
  ENSG00000148584_6 (sequence is synthesized)
acaatgtcttcagtgaaaatcctatatgtaagaaatcttatgctgtctacctctgaagagatgattgaaaaggaattcaacaatatcaaaccaggtgctgtggagagggtgaagaaaatt

SEQ ID NO: 411907 - DNA, 120 bp, Artificial Sequence
  ENSG00000148584_7 (sequence is synthesized)
cgagactatgcttttgtgcacttcagtaaccgagaagatgcagttgaggctatgaaagctttaaatggcaaggtgctggatggttcccccattgaagtcaccctagcaaaaccagtggac

SEQ ID NO: 411908 - DNA, 120 bp, Artificial Sequence
  ENSG00000148584_8 (sequence is synthesized)
gggccaagtttatgatcccaccacaacctaccttggagctcctgtcttctatgccccccagacctatgcagcaattcccagtcttcatttcccagccaccaaaggacatctcagcaacag

SEQ ID NO: 411909 - DNA, 120 bp, Artificial Sequence
  ENSG00000148584_9 (sequence is synthesized)
agccattatccgagccccttctgttagagaaatttacatgaatgtacctgtaggggctgcgggagtgagaggactgggcggccgtggctatttggcatacacaggcctgggtcgaggata

SEQ ID NO: 411910 - DNA, 120 bp, Artificial Sequence
  ENSG00000148584_10 (sequence is synthesized)
ccaggtcaaaggagacaaaagagaagacaaactctatgacattttacctgggatggagctcaccccaatgaatcctgtcacattaaaaccccaaggaattaaactcgctccccagatatt

SEQ ID NO: 411911 - DNA, 120 bp, Artificial Sequence
  ENSG00000148584_11 (sequence is synthesized)
agaagagatttgtcagaaaaataactggggacagccagtgtaccagctgcactctgctattggacaagaccaaagacagctattcttgtacaaaataactattcctgctctagccagcca

SEQ ID NO: 411912 - DNA, 120 bp, Artificial Sequence
  ENSG00000148584_12 (sequence is synthesized)
gaatcctgcaatccaccctttcacacctccaaagctgagtgcctttgtggatgaagcaaagacgtatgcagccgaatacaccctgcagaccctgggcatccccactgatggaggcgatgg

SEQ ID NO: 411913 - DNA, 120 bp, Artificial Sequence
  ENSG00000148584_13 (sequence is synthesized)
caccatggctactgctgctgctgctgctactgctttcccaggatatgctgtccctaatgcaactgcacccgtgtctgcagcccagctcaagcaagcggtaacccttggacaagacttagc

SEQ ID NO: 411914 - DNA, 120 bp, Artificial Sequence
  ENSG00000148584_14 (sequence is synthesized)
agcatatacaacctatgaggtctacccaacttttgcagtgactgcccgaggggatggatatggcaccttctgaagatgcttttttaaatttaagaataagacacacaaaactctattaaa

SEQ ID NO: 411915 - DNA, 120 bp, Artificial Sequence
  ENSG00000148584_15 (sequence is synthesized)
aaaaaaaaagaaataaacctctaactcggtccccaatgatcataaataatatgtttcctaaagaaatgcctttccagagactgtatagcttataccaattatagaatcatgaagtaagaa

SEQ ID NO: 411916 - DNA, 120 bp, Artificial Sequence
  ENSG00000148584_16 (sequence is synthesized)
tttgatatgacgattagagcataacccgagtgacacgttgaattcgccataatcaaggaaaccttttccgggtggggatctctgaaattactcagataacagtgctgtgccaaaaacctg

SEQ ID NO: 411917 - DNA, 120 bp, Artificial Sequence
  ENSG00000148584_17 (sequence is synthesized)
aaagttgttcttccagtcttcctgagtgtttggggagtatgtttacaaatcctgccagggtgaagagagatcttgtagctggcaagatttgggagggatggagcagacctgggcagtcag

SEQ ID NO: 411918 - DNA, 120 bp, Artificial Sequence
  ENSG00000148584_18 (sequence is synthesized)
taataatcaagggaagccaagtaaactccagagtcttacctctggctcacagctgcttttgtgatacacaaagtcacaaagaggaaaagggaagggaggaggttgcttttcaaaatgcat

SEQ ID NO: 411919 - DNA, 120 bp, Artificial Sequence
  ENSG00000148584_19 (sequence is synthesized)
tcaccatggctcactgtgtggggcatgattgcaggcctgagctcatgaaagactgtccaagattttgtggtttcaacctctcttcagcctgaaaattccatccagtcgatttgtcacaga

SEQ ID NO: 411920 - DNA, 120 bp, Artificial Sequence
  ENSG00000148584_20 (sequence is synthesized)
tcaggatcttcctgtcccctgcagcccatggggacttcctagaaatagatatgatatgttgtagatgtggttaaaacaaatccaggccccattgtttattcagctcattagtccacacct

SEQ ID NO: 411921 - DNA, 120 bp, Artificial Sequence
  ENSG00000148584_21 (sequence is synthesized)
atttttccctagaactcctaccttttccaataatcatgccagcatgaaatgaccttttctactttaaaattttttgacttgttcatattgcttgattttcatcatctcagactcattttt

SEQ ID NO: 411922 - DNA, 120 bp, Artificial Sequence
  ENSG00000148584_22 (sequence is synthesized)
ctcctacctaatatcataaaaaagtaaatcagatatacagaatatcatttatgatacttcttcctttcagcaaattgactgaaaagtcattttaaagagagaagtgcagatttgctctca

SEQ ID NO: 411923 - DNA, 120 bp, Artificial Sequence
  ENSG00000148584_23 (sequence is synthesized)
tttctttgatattgttgcagtatccaccccaccatctagcaatcagagatgcttatattaacttgggattagctttgcattatctaacccatttattttaaatctgccaggaaatcctct

SEQ ID NO: 411924 - DNA, 120 bp, Artificial Sequence
  ENSG00000148584_24 (sequence is synthesized)
aactttccttcctttttgtttcagtaagtatcaggcagcttcaccatacctgagtccttttgtcttgaagctgccacagaaaaatcttacagcaatcattgctgattagaaactgtttca

SEQ ID NO: 411925 - DNA, 120 bp, Artificial Sequence
  ENSG00000148584_25 (sequence is synthesized)
gacaatcagcatgggtgttatttaccaaattccccccagagtcctaggcctcttctccagaaatatctgatgatgaagtgaggggagggcaacggtgctacaaaacacggaacagaggta

SEQ ID NO: 411926 - DNA, 120 bp, Artificial Sequence
  ENSG00000148584_26 (sequence is synthesized)
aagagaaggcactactttcttgccatacttgtaaatgattgctttgttcaaacataaataatcttaagtccaacaccaaatacctgttactcctacatcaatctcattagtggtttaaga

SEQ ID NO: 411927 - DNA, 120 bp, Artificial Sequence
  ENSG00000148584_27 (sequence is synthesized)
cacagtactagaattttcattttttaaaatcccttggcccttaaaaaaatttacagaacacaaaggaaaacataaacacaaagacatggaaaattttgtcaactccttaatggaattctg

SEQ ID NO: 411928 - DNA, 120 bp, Artificial Sequence
  ENSG00000148584_28 (sequence is synthesized)
tgatcaaaaagcaggccagattctaatcaaaatcaggtaaattttaatcacaatcagaagtacttgtaacatttcagttgtcctaactccaatgagataacaaagcctccaaggctacag

SEQ ID NO: 411929 - DNA, 120 bp, Artificial Sequence
  ENSG00000148584_29 (sequence is synthesized)
ctgaaactctgaaaggccctgtgctttctactttacatttagcgtctaatatttcctaggacagtagttcccaaagtaggctgtacattagaatctcctggagagctttttaaatgctaa

SEQ ID NO: 411930 - DNA, 120 bp, Artificial Sequence
  ENSG00000148584_30 (sequence is synthesized)
tgccaataacatatctcataaaatttacactagaatttccttggatgggtgcctggcatcagtattttttaatgatccctaggtgatttcaatgtgcacctaggtttgggaattgctata

SEQ ID NO: 411931 - DNA, 120 bp, Artificial Sequence
  ENSG00000148584_31 (sequence is synthesized)
ttcttgtatttatactctatctctttatttcttttcctttttatttcacttttagtaaatagaaaaatgcaattaaaaaatcatctaagttaagacaaatagccaaatcatatttatccc

SEQ ID NO: 411932 - DNA, 120 bp, Artificial Sequence
  ENSG00000148584_32 (sequence is synthesized)
ataaatagtatgaatttaaatgtaacttacgtaggcttcaaactaactctaaaaatgagaaagtaaaacaatcttgtcctaaaacaattcttagatccaaatttacactcccctacagat

SEQ ID NO: 411933 - DNA, 120 bp, Artificial Sequence
  ENSG00000148584_33 (sequence is synthesized)
ctgcttttattctcaaagacagtgattacattgacataacaaatgtccattggggcaggcaaatttctactgagtctaaaaagcattccaaattctaggagcaaaagttctgattttcct

SEQ ID NO: 411934 - DNA, 120 bp, Artificial Sequence
  ENSG00000148584_34 (sequence is synthesized)
taaaatctttgcaaataaacagcaaagggtattctggatgtcttgtcaatgcaaattaggtttgatttagagaagttttaaatttaatcgcaatgaaaagattagttaatacatgaatct

SEQ ID NO: 411935 - DNA, 120 bp, Artificial Sequence
  ENSG00000148584_35 (sequence is synthesized)
ttttatgagaaaaaatcattattctggataaagtcataattgtttgtttacaatattaagagcagacacctaaacatacaataataccaaagtattgagaaaattaccactggaacacca

SEQ ID NO: 411936 - DNA, 120 bp, Artificial Sequence
  ENSG00000148584_36 (sequence is synthesized)
atactttgaattccattaaaataccttcatagaaagtgttaatgtgtctaccatgccatatgtttatttttactttccccaagttaggtagatagagcaagtcctgctaccataagttta

SEQ ID NO: 411937 - DNA, 120 bp, Artificial Sequence
  ENSG00000148584_37 (sequence is synthesized)
aaattattaagacaacgggcttttttaaattgctggtagaaccaaaggctaattttgcataggtttatatttttagacttaagaaattagcacctatataataccttcataccttctgca

SEQ ID NO: 411938 - DNA, 120 bp, Artificial Sequence
  ENSG00000148584_38 (sequence is synthesized)
tcactatcaatttttctgtaatttcttatttgaatgcttcctaattctttacagaaaaaattaaaatttgtcacccaaccaggtgataataacaaaacaataatttaggaacatccagta

SEQ ID NO: 411939 - DNA, 120 bp, Artificial Sequence
  ENSG00000148584_39 (sequence is synthesized)
aatttgaattagttctctaaattttggtaattaatagcttattgataattaaaatcagcctaatgttgcttaagtaggaggaaattgatcagcaatgggattgggtatctattttctttc

SEQ ID NO: 411940 - DNA, 120 bp, Artificial Sequence
  ENSG00000148584_40 (sequence is synthesized)
ctataaaagtgctgcctcttctcaaattgctttatttctctcccactgcattagtatatctagaacagcaccttcaactgcaacaaaatataattctcctagatgactaggatatcctcc

SEQ ID NO: 411941 - DNA, 120 bp, Artificial Sequence
  ENSG00000148584_41 (sequence is synthesized)
aatctggtatcatgccaaacaacactatgtttggggaacagcacccgaaatgctgctaaaaagctacctcatgtcaagaaaatatggatttcaaaaaatatctggcacagtggcccatgc

SEQ ID NO: 411942 - DNA, 77 bp, Artificial Sequence
  ENSG00000148584_42 (sequence is synthesized)
gactccgcctctacaaaaaaaaaaaaaacaaatttaatttaattggccagttgtggtggcgtgggcctgtggtccca

SEQ ID NO: 411943 - DNA, 120 bp, Artificial Sequence
  ENSG00000148584_43 (sequence is synthesized)
tttaattggccagttgtggtggcgtgggcctgtggtcccagctacttgggaagctaaggcaggaggattgctggaggcctggagggcaaggctgcagtgagccatgttcacatcgctgca

SEQ ID NO: 411944 - DNA, 120 bp, Artificial Sequence
  ENSG00000148584_44 (sequence is synthesized)
tgacagagcaagaccctgtctccaaaaaagcaaaaataaatatctaacaaaaaggaacctgtttccaaaccacagtttcttaactttttcatgatggaatagaaattaaactataagtat

SEQ ID NO: 411945 - DNA, 120 bp, Artificial Sequence
  ENSG00000148584_45 (sequence is synthesized)
aactataagtatatactgataatagctgtgcaggaaattggtttttattttacttaaaagtattttttagaaaaaatgttattctgattgcatagattagcaaaatattgcatcaatata

SEQ ID NO: 411946 - DNA, 120 bp, Artificial Sequence
  ENSG00000148584_46 (sequence is synthesized)
atgttccatttttattaatttttgttatattctaaatgaccgttttataattctgtcttggacaactgggccacagttagaatccacatagacagggaggttcttaggtgtgccatttgt

SEQ ID NO: 411947 - DNA, 120 bp, Artificial Sequence
  ENSG00000148584_47 (sequence is synthesized)
agaataaagggcaatcaagttaatattcggggtaaattttcattgcattctaacctatgaagtttgataaagtatattattattgaacaactctaacactaagatttcctaaaagtaact

SEQ ID NO: 411948 - DNA, 120 bp, Artificial Sequence
  ENSG00000148584_48 (sequence is synthesized)
tacaacaaaaaatgaactatgtgctcaatattcacataaagtcatgattattctcttcttgcattcatataaaagttcccagggggaagaaaatatatctaaaaattagactagaaactt

SEQ ID NO: 411949 - DNA, 120 bp, Artificial Sequence
  ENSG00000148584_49 (sequence is synthesized)
ggcactttttatgtattgtagatacactttcatatattgtaaatacatctgttaaagataaaactaagtttctaacatagcactacaaggaaactttggataaatatttttaaaaagaaa

SEQ ID NO: 411950 - DNA, 120 bp, Artificial Sequence
  ENSG00000148584_50 (sequence is synthesized)
atgttaataggataacttaagattttgtatatacttattggaagacaggaagaaactaggcagtaaatattcctacctgacgtgcaaccattgtcaatcaggttttgttaaactgtcaaa

SEQ ID NO: 411951 - DNA, 120 bp, Artificial Sequence
  ENSG00000148584_51 (sequence is synthesized)
tttgattttgaaattttagtttgcccaaataatatcttgaaaatgctctgaattttactagaacatattcatagaaagtgtaatgtatctaccaggctctatgtttgtgtttgccaacat

SEQ ID NO: 411952 - DNA, 120 bp, Artificial Sequence
  ENSG00000148584_52 (sequence is synthesized)
tagaaaaacaaagtaagttgcgctataatgagtgaaactaaggaaaatgagatttttctgactcccattccctctcttaaaaagtaaaatatttaagctttttttattaaaggaaaaatg

SEQ ID NO: 411953 - DNA, 120 bp, Artificial Sequence
  ENSG00000148584_53 (sequence is synthesized)
ggtacagaatactctattgccctccaaatgtccaacatttttaaagccatgttgtccaacaatgtttatacagaaaatagaatgcataggtttaatatagatagcaatgtatatgtaggc

SEQ ID NO: 411954 - DNA, 120 bp, Artificial Sequence
  ENSG00000148584_54 (sequence is synthesized)
tcatttgtgggagattgcaaactttatgtgcccccagttctccttggttttgtaggaaagctaaaagaaaaccttgtactctcactaataatgaaattcatagccaatttagaaagggaa

SEQ ID NO: 411955 - DNA, 120 bp, Artificial Sequence
  ENSG00000148584_55 (sequence is synthesized)
aataacctgaaaaccaaaatacctcattcatctgaagatgcctggaataaaatatggaattcttctgtacctacctcccccttacagacttttctcctattttgagagagaaattcaaga

SEQ ID NO: 411956 - DNA, 120 bp, Artificial Sequence
  ENSG00000148584_56 (sequence is synthesized)
agaagaatacagcttgttctctttccacaaatgatactttgtctaagggaataggagataccaagaaacagtatctttaaaaaagtaagctgcccacaggccttcttggagaatgaagaa

SEQ ID NO: 411957 - DNA, 120 bp, Artificial Sequence
  ENSG00000148584_57 (sequence is synthesized)
tatcagccccattcagggtttaccaatgtctctctgaggtgacaatacattctggttttccaggacagtcctggcttaggtctgctgtccttctataaatattaacaatgatccctctta

SEQ ID NO: 411958 - DNA, 120 bp, Artificial Sequence
  ENSG00000148584_58 (sequence is synthesized)
tttccaaacgtgtcccagtttagacaacaaattatacagtgtctgcccccaacacacacacacacaccccaccatctttatgggttgttgttgttttcttgttgtttttaattttgtaga

SEQ ID NO: 411959 - DNA, 120 bp, Artificial Sequence
  ENSG00000148584_59 (sequence is synthesized)
attggctttgtcttctccaaagcagataacagcttaaactaaagagcctagctacttctttctgactgagcagggtcatagtaaacagagaagaatggatcacttcctcctctgaaatct

SEQ ID NO: 411960 - DNA, 120 bp, Artificial Sequence
  ENSG00000148584_60 (sequence is synthesized)
ccatcaatccactttctgtccaactatctctctacccagcctatttttggtcctagttttcctctcataacccctgggctgtgagtcctgagttctgccttcatatggcagagcaagcta

SEQ ID NO: 411961 - DNA, 120 bp, Artificial Sequence
  ENSG00000148584_61 (sequence is synthesized)
gtcattattatgccaggttaggtggtggggcaagacaaaagatagctcttggggacacttgcttggtctgtagagatccacagggcactagtagggtattagagcatttattggtttctt

SEQ ID NO: 411962 - DNA, 120 bp, Artificial Sequence
  ENSG00000148584_62 (sequence is synthesized)
tcttccttgagttgagttacttctatcccaaaacagacaggtcttacgttaaccttcaccttaaaaaggatattgccttttttccttctgcttcacaaatttgctccaacactaattccc

SEQ ID NO: 411963 - DNA, 120 bp, Artificial Sequence
  ENSG00000148584_63 (sequence is synthesized)
ttgcatttgatttcatcattatgattgttcatcaaccattcttcacgaaaaatcctcacatcacgtcatataaaggttttattatttttaatggaaaataacattgagagattattttcc

SEQ ID NO: 411964 - DNA, 120 bp, Artificial Sequence
  ENSG00000148584_64 (sequence is synthesized)
tttttcataaaatttccctttttccctccctctattctcttcactaacattggaaattaaacaagttttacaggctctattgttattaaccctcaaatctattcttcagagaatatatga

SEQ ID NO: 411965 - DNA, 120 bp, Artificial Sequence
  ENSG00000148584_65 (sequence is synthesized)
tcagcctgtgtttactatgcacctactcttataccagaaactgtgaatacaaatacatatatttcctacttctctctttaattggggcacacagtcccatggtccattctgcatttttca

SEQ ID NO: 411966 - DNA, 120 bp, Artificial Sequence
  ENSG00000148584_66 (sequence is synthesized)
aaattgaatataattgcaacacctgataggttttgccacttagaattctgaaaataaatcaactctgttctaaaccttaagtttccactattattgccaaactctggactgatacaataa

SEQ ID NO: 411967 - DNA, 120 bp, Artificial Sequence
  ENSG00000148584_67 (sequence is synthesized)
gccttttaaaaggtgaatttaacacttcacctattatggttatttaagtaaaatgagttttcaaatatttcccccaggagaaatataaaggactatgcaaaaatagaaggagaaaaaggt

SEQ ID NO: 411968 - DNA, 120 bp, Artificial Sequence
  ENSG00000148584_68 (sequence is synthesized)
tagttagaggtccagaaggagaattaaaacatggaattgataaattcacctactgatttatgatgttaatgagcaggtacctatacattttatttacttgaaaacattttggccattaac

SEQ ID NO: 411969 - DNA, 120 bp, Artificial Sequence
  ENSG00000148584_69 (sequence is synthesized)
tctgttttctaaatacatttgtgtttataaaattttaaaatctatatcacaagacttagacatgcctttctttgcaataaagtatatatacctttttacaaatgtaaattttattttgaa

SEQ ID NO: 411970 - DNA, 120 bp, Artificial Sequence
  ENSG00000148584_70 (sequence is synthesized)
tgaaacttggcattttctttataattcctaagatatctttgggcacacagactacagataaatctatttaaatcaattcatcattatcactggtttaaatatttaatgtaaccattggaa

SEQ ID NO: 411971 - DNA, 120 bp, Artificial Sequence
  ENSG00000148584_71 (sequence is synthesized)
tttttattcttattccttcagagaattctccttttcttctatgtttctgactgcaatacagcccgatattgttattccctatatcttaatgaaaagcaagctgtcagcaaaatgcattta

SEQ ID NO: 411972 - DNA, 120 bp, Artificial Sequence
  ENSG00000148584_72 (sequence is synthesized)
tagtttccagatgtttaacaatctctttcttcttttcttttttgttattatttttatttatgtgaagttagttagctgaggtaccaaaaaagagacaaagacagtattaaaaagtgtgca

SEQ ID NO: 411973 - DNA, 120 bp, Artificial Sequence
  ENSG00000148584_73 (sequence is synthesized)
taaagcacttatttttgtactttagtacaatgttttatagaactttgtgatctatctaaatatattaagtaaaattacaccattcacttgttgggaaaataatctttggtttggaagata

SEQ ID NO: 411974 - DNA, 120 bp, Artificial Sequence
  ENSG00000148584_74 (sequence is synthesized)
ttaacataatgggcatcttagaatcataaatcacatgaaatgagagacaatgcaatattgtataattcctggatgatgcaattgttttaattgaattttcaagtgccattataaagtttt

SEQ ID NO: 411975 - DNA, 120 bp, Artificial Sequence
  ENSG00000148584_75 (sequence is synthesized)
caggatatagcttggtccaggaatttagaggttcctatagatggaagcagtgtgtctgggcacatgcccagagccagaagcgagcatgagcacagcaattcctggcctcaaaaaaggaaa

SEQ ID NO: 411976 - DNA, 120 bp, Artificial Sequence
  ENSG00000148584_76 (sequence is synthesized)
ctccacttggaatgtctcttaagatcaacactcaccagttttaatggtcttcttgctcattcaagacctcaagggaagaattcagttatggggacatggtattgcagtagactgggcaga

SEQ ID NO: 411977 - DNA, 120 bp, Artificial Sequence
  ENSG00000148600_0 (sequence is synthesized)
gctaattggtctcgtcaggcggccggcaggagcagatccgagccgtgtcatcctcttagcgccctcacgccacccgccgctcccgccccgtgccccctcccgccgcggctgcagtcgccg

SEQ ID NO: 411978 - DNA, 120 bp, Artificial Sequence
  ENSG00000148600_1 (sequence is synthesized)
ctacccccattgtggtctctgccctccccgcgggcccagggcatgctccgtgcccctgcgcccggtctcggcggcggcaggcgacactccgcgccggcggagacatgaggcgctgccggt

SEQ ID NO: 411979 - DNA, 120 bp, Artificial Sequence
  ENSG00000148600_2 (sequence is synthesized)
gggccgccctggccctggggctgctgcgcctctgcttggctcaggccaacttcgccccgcacttcttcgacaacggggtcggcagcaccaacggaaacatggctctgttcagcctcccag

SEQ ID NO: 411980 - DNA, 120 bp, Artificial Sequence
  ENSG00000148600_3 (sequence is synthesized)
aggacacccctgtaggctctcacgtatacaccctgaatgggacagaccctgagggagaccccatctcctaccacatcagctttgaccccagcactagaagcgtcttttctgttgacccca

SEQ ID NO: 411981 - DNA, 120 bp, Artificial Sequence
  ENSG00000148600_4 (sequence is synthesized)
cttttggaaacatcaccctggttgaagagctggacagagagagggaagatgagattgaagccatcatcagcatttctgatggcctgaatctggtggccgaaaaagtcgtgatcctggtga

SEQ ID NO: 411982 - DNA, 120 bp, Artificial Sequence
  ENSG00000148600_5 (sequence is synthesized)
ccgatgccaatgatgaggcgcccaggttcatccaggagccttatgttgccctggttcccgaggacatacctgctgggagcatcatctttaaggtccatgcagtggacagggacacaggct

SEQ ID NO: 411983 - DNA, 120 bp, Artificial Sequence
  ENSG00000148600_6 (sequence is synthesized)
ctggagggagtgtcacctacttcctgcagaacctgcactccccatttgccgtggaccgccacagcggtgtgctgcgcctccaggctggggccactctggactacgagaggtcccggaccc

SEQ ID NO: 411984 - DNA, 120 bp, Artificial Sequence
  ENSG00000148600_7 (sequence is synthesized)
actacatcaccgtggtcgccaaggatggcggtgggaggcttcatggggctgatgtggtgttctcagccaccaccacggtcacggtcaatgtggaggatgttcaggacatggcccctgtct

SEQ ID NO: 411985 - DNA, 120 bp, Artificial Sequence
  ENSG00000148600_8 (sequence is synthesized)
tcgtgggcacaccctactatggctatgtgtacgaggacacccttccgggctcggaggtactgaaggtggtcgccatggatggagaccggggcaaacccaatcgaattctctacagccttg

SEQ ID NO: 411986 - DNA, 120 bp, Artificial Sequence
  ENSG00000148600_9 (sequence is synthesized)
taaatgggaacgatggagcctttgaaattaatgagacatctggagccatctccatcactcagagcccggcccagctccagagagaggtgtatgagctgcatgtacaggtgactgaaatga

SEQ ID NO: 411987 - DNA, 120 bp, Artificial Sequence
  ENSG00000148600_10 (sequence is synthesized)
gccctgcggggagcccagctgcccaggccaccgtcccagtcaccatcaggattgtggacctcaacaaccacccgccaacattctatggagagagcggaccccaaaacaggtttgagctgt

SEQ ID NO: 411988 - DNA, 120 bp, Artificial Sequence
  ENSG00000148600_11 (sequence is synthesized)
ccatgaatgagcacccaccccagggagagatcctgcggggcctcaagatcaccgtcaatgactccgaccagggagccaatgccaaattcaacttgcagctggtgggacccaggggcatct

SEQ ID NO: 411989 - DNA, 120 bp, Artificial Sequence
  ENSG00000148600_12 (sequence is synthesized)
tccgagtggttccacagacagtcctgaatgaagcccaagtcacaatcattgtggagaactcagctgccattgactttgaaaagtccaaagtattaaccttcaagctcctggctgttgaag

SEQ ID NO: 411990 - DNA, 120 bp, Artificial Sequence
  ENSG00000148600_13 (sequence is synthesized)
tgaacaccccagagaagttcagttccacagcggatgttgtgatccagctcctggacaccaatgacaatgtccccaagttcgactccctctactacgttgccaggattcctgagaacgccc

SEQ ID NO: 411991 - DNA, 120 bp, Artificial Sequence
  ENSG00000148600_14 (sequence is synthesized)
cagggggctccagcgtggtggctgtcacagctgtggatccagatacaggaccctggggcgaagtgaaatattccacctatgggactggggcagacctcttcctgatccacccatccactg

SEQ ID NO: 411992 - DNA, 120 bp, Artificial Sequence
  ENSG00000148600_15 (sequence is synthesized)
ggcttatctacacccagccctgggctagcctggacgctgaggccactgccaggtacaacttctatgtgaaggcagaggacatggaaggcaagtacagcgtagctgaggtgtttatcacac

SEQ ID NO: 411993 - DNA, 120 bp, Artificial Sequence
  ENSG00000148600_16 (sequence is synthesized)
tgctggatgtcaatgaccacccccctcagtttggaaagagcgttcagaagaagacgatggtgctagggaccccagtgaaaattgaggccatagacgaggatgcagaggaacccaacaacc

SEQ ID NO: 411994 - DNA, 120 bp, Artificial Sequence
  ENSG00000148600_17 (sequence is synthesized)
tggtggactattccatcacccatgcagagcccgccaacgtgttcgacatcaattcccacacgggggagatctggctcaagaattccatccgctccctggatgccctgcacaacatcacac

SEQ ID NO: 411995 - DNA, 120 bp, Artificial Sequence
  ENSG00000148600_18 (sequence is synthesized)
ctggaagggactgcctatggtccctagaggtgcaggccaaggaccggggctccccatccttcagcaccacagccttactcaagattgacatcacagatgctgagaccctctcccggagcc

SEQ ID NO: 411996 - DNA, 120 bp, Artificial Sequence
  ENSG00000148600_19 (sequence is synthesized)
ccatggctgccttcctgatacagaccaaggacaaccccatgaaggccgtgggtgtgctggccggcaccatggccaccgtcgtggccatcactgtcctcatctccaccgccaccttctggc

SEQ ID NO: 411997 - DNA, 120 bp, Artificial Sequence
  ENSG00000148600_20 (sequence is synthesized)
gcaacaagaagtctaacaaggtcctgccaatgcggcgggtgctccgcaagcggcccagccctgcgccccgcaccatccgcattgagtggctcaagtccaagagcaccaaagccgctacca

SEQ ID NO: 411998 - DNA, 120 bp, Artificial Sequence
  ENSG00000148600_21 (sequence is synthesized)
agttcatgctcaaagagaaacctcccaatgagaactgtaacaacaacagcccagaaagctctctgctcccgagagctccggctctccctccaccacccagcgtggcgcccagcactggcg

SEQ ID NO: 411999 - DNA, 120 bp, Artificial Sequence
  ENSG00000148600_22 (sequence is synthesized)
cagcccagtggaccgtgcctactgtctctggctctctcactccgcagccgacccaacccccgccaaaacccaaaactatgggaagccccgtccagtcaactctgatctctgagctcaagc

SEQ ID NO: 412000 - DNA, 120 bp, Artificial Sequence
  ENSG00000148600_23 (sequence is synthesized)
aaaagtttgagaagaagagtgtgcacaacaaggcttacttctagtgtatgccctatgaccccccatctttcctccgcccctgacccccaccaccctgctgctcggactatgctccccttc

SEQ ID NO: 412001 - DNA, 120 bp, Artificial Sequence
  ENSG00000148600_24 (sequence is synthesized)
ctctgctccttaaggtcactgacccctgttttgcacaatggtataatccccactgtcctcatctctaccgccaccttctggcgcaacaagaagttgcgctctgacagggctctagtcagg

SEQ ID NO: 412002 - DNA, 120 bp, Artificial Sequence
  ENSG00000148600_25 (sequence is synthesized)
gccttgggcaagacattgggctctaggatgcaattggcaaatacgtccccgttactcaaatccttggcactactacaatgccctccattcttcagggctgagaattgacgagaagccagc

SEQ ID NO: 412003 - DNA, 120 bp, Artificial Sequence
  ENSG00000148600_26 (sequence is synthesized)
tcacccatcccagacctcacagtccctcaggttctactgggatctcatcatcatccttagtcaagcagcagggccctggccacgtggagcaacactgactagaatctggatcctgacgcc

SEQ ID NO: 412004 - DNA, 120 bp, Artificial Sequence
  ENSG00000148600_27 (sequence is synthesized)
tgcagctgagagcaggagcaggaaaaggaggctcagcactgtctcaggctggaggtcagcgaacctcgtgggctgtaggaaagcaaatgtaggtaaggggagagcaaggatgcacagaaa

SEQ ID NO: 412005 - DNA, 120 bp, Artificial Sequence
  ENSG00000148600_28 (sequence is synthesized)
aaagatagagcattctgtctgggcagagactgtggaccctggtatgcccacgtgggacagaggacacagaggtggaagattgatcttgccaagagtgagggcagatgtctccagccagga

SEQ ID NO: 412006 - DNA, 120 bp, Artificial Sequence
  ENSG00000148600_29 (sequence is synthesized)
ctgccctgagccgcaaaatgtcaaagctggagctatagaggtagccctaaaggcaactagaagagcatcagggctgctctctgaggagctgccccaccagccatccttgaagagacaatt

SEQ ID NO: 412007 - DNA, 120 bp, Artificial Sequence
  ENSG00000148600_30 (sequence is synthesized)
cagggcagttgatgaatatcagggctgagatgtggtgagacttccgtttttatccagctcttttgctcacatcgcgtaaccttgggaaagctgtttaaagtcgctgatcatcctcttcct

SEQ ID NO: 412008 - DNA, 120 bp, Artificial Sequence
  ENSG00000148600_31 (sequence is synthesized)
catctgtaaatgaagaaagtaggccctgtctacctcacatgcaggtctagggtgaggattgaagaaaatagtggtgatgagggctttaaccaagtgcaaagcggcatgaatgcaaagtat

SEQ ID NO: 412009 - DNA, 120 bp, Artificial Sequence
  ENSG00000148600_32 (sequence is synthesized)
ttttctgcagcccagttctgtgggtgcagctcttccagaaagtattaggagcctcacatctactctgccaagcgccccagcaggcactgtgctgggcttaggggctaccactggatgatg

SEQ ID NO: 412010 - DNA, 120 bp, Artificial Sequence
  ENSG00000148600_33 (sequence is synthesized)
gcattgccgtgactcacacacctctacttctgttcttccctcactccatccccgctaccgtcctggccagctaccgtcagagagaaccagagctccaagtctttaatttgccaagatgaa

SEQ ID NO: 412011 - DNA, 120 bp, Artificial Sequence
  ENSG00000148600_34 (sequence is synthesized)
gaaaatgagttctcaaggagggaatgctttgcttgaggccacacagcaggttggtagcaaagatcttgtctagccagggcagcccttatcagcttgtgacaaccttccccaggacagaag

SEQ ID NO: 412012 - DNA, 120 bp, Artificial Sequence
  ENSG00000148600_35 (sequence is synthesized)
tcatacaaggcctctggggttaatacaaataggttgtgccctgctttaaggaacctgctatcaggaaatctacatgtgtgcacagagagagaaaagtagaacagttctttgcatttggct

SEQ ID NO: 412013 - DNA, 120 bp, Artificial Sequence
  ENSG00000148600_36 (sequence is synthesized)
ctacttactaacaacccctctagaatacattggtgatttcatttaaagagattgtatgcatttgtggctttcctgatttctgagtctgtgtttggaggtgttactgagatgtgccagtgt

SEQ ID NO: 412014 - DNA, 120 bp, Artificial Sequence
  ENSG00000148600_37 (sequence is synthesized)
gcagaatccttgctggggtttctacagtccccaacgtgaacagtattaagcaagaggtggactcgagcaatccaggagcccagactgagcaaataagtactttccagcctgtgtttcagg

SEQ ID NO: 412015 - DNA, 120 bp, Artificial Sequence
  ENSG00000148600_38 (sequence is synthesized)
agaggactgtgctggatcatgcttgccctccacagggaatacagcatccttacagcttgcatgcaatcaacctcttttgtaaatggaaaataaagtctgttacccaaaggccatgctgat

SEQ ID NO: 412016 - DNA, 120 bp, Artificial Sequence
  ENSG00000148600_39 (sequence is synthesized)
cccctgctccctgctttcatttatgtttgctgacctgtggagaccagtctttctgacacacagtgaagctcaacttgcctcctggctgcttcagcaggtggatccattcttcgaccccca

SEQ ID NO: 412017 - DNA, 120 bp, Artificial Sequence
  ENSG00000148600_40 (sequence is synthesized)
gatgtgactctaaagaaggctgaaaatttttgtccaaattgccatgcagatatcttgaacagcaggacatttgcaggccttgtctactggacttttctcccaaacaggacaagcccaggc

SEQ ID NO: 412018 - DNA, 120 bp, Artificial Sequence
  ENSG00000148600_41 (sequence is synthesized)
agggctgcatggagaggaatggaacctggagctagaattaattgcccactctcccaccctaccagtgcagcccggcaagggcaggaattgggaggcctagggtgggcatgaaagcttggg

SEQ ID NO: 412019 - DNA, 120 bp, Artificial Sequence
  ENSG00000148600_42 (sequence is synthesized)
aagcactgtcgtctctcagacaggcgtcctaaagacctctaggctggaagcttgggcttgcaagtggatccgggaccgagggtggtctcttggacaaccccaggaacttggaccaaggca

SEQ ID NO: 412020 - DNA, 120 bp, Artificial Sequence
  ENSG00000148600_43 (sequence is synthesized)
gagccaatcttgcaaactggccatggatggggaagtgcccggtagccagcatgagccacactaggaaagaggaggagggtgcagccaaacttaaggcaccggcaagtgttgtcagcactg

SEQ ID NO: 412021 - DNA, 120 bp, Artificial Sequence
  ENSG00000148600_44 (sequence is synthesized)
gaggagaccccgccagtggggtgaggccagccaagtccctgtgttacgaatggtgggccaaggggctgtctgctaggtcccagtaggacaggcagagctccaggctggcaccatggtagg

SEQ ID NO: 412022 - DNA, 120 bp, Artificial Sequence
  ENSG00000148600_45 (sequence is synthesized)
cctccagggaaagagctgggaggcaggaatggcacactgggcaggcttgcccattcctggccctgagaatggagctgtagcctcatggacaataaatggatgtgacaccaaatactctgc

SEQ ID NO: 412023 - DNA, 120 bp, Artificial Sequence
  ENSG00000148600_46 (sequence is synthesized)
agagtcattttcctcctgcggctgagctcagatcttccaatcacgtgaaataacaaagtcctttacagtttgacagccctaggtctgaattctggttctgccattaattgtgactttggg

SEQ ID NO: 412024 - DNA, 120 bp, Artificial Sequence
  ENSG00000148600_47 (sequence is synthesized)
caagaggtcaagtctctctgggcctcactttcctcattaacacagggtgcaaagtatggttgcagagaggatgaaaagatctaatatatgtaaagtgcctagcaccggctttgtatctac

SEQ ID NO: 412025 - DNA, 120 bp, Artificial Sequence
  ENSG00000148600_48 (sequence is synthesized)
ttacacaagctcagtagacacttgccgtgactgtggcccacatactagaacaccatgtcctgaaagagaggaccccctccatgcatcctcaccccccaggatgtttccacccacctgtag

SEQ ID NO: 412026 - DNA, 120 bp, Artificial Sequence
  ENSG00000148600_49 (sequence is synthesized)
gtccagaagcttttacttcatgctagaaaaagagaagagagtggatccagaggggagtggaggacagggcagatgccacagcatctgtggcctgtgtagccggcagcctgcatttgggcg

SEQ ID NO: 412027 - DNA, 120 bp, Artificial Sequence
  ENSG00000148600_50 (sequence is synthesized)
ttgacattccaggggagttaggaacaatgagaggtctctaagaacttgtggcactctgtcctcaagcagctgtccctcagaatcctgctagaaaagtgtgatcagagctgggaaggagcc

SEQ ID NO: 412028 - DNA, 120 bp, Artificial Sequence
  ENSG00000148600_51 (sequence is synthesized)
accatgctctgcttctctaaggatttcggtgattctatttttagggactgaaggcgttgagggaatccaaggccagtccacctgccaggggtgttggcatctgttgacaggcagtggcac

SEQ ID NO: 412029 - DNA, 120 bp, Artificial Sequence
  ENSG00000148600_52 (sequence is synthesized)
atcctgacagtcttcaaggccttggccaccaagggatggagagggagaatggagaagatgccacatgaggaatgaggcaggagactggcatgtgccacatggaggaccccttaggaaact

SEQ ID NO: 412030 - DNA, 120 bp, Artificial Sequence
  ENSG00000148600_53 (sequence is synthesized)
cacaaacaacctagggaggggttctctgaagggcctagtttccagaatgaggcggtcatggcttaagcgaccatcatttgatcaataaagcagagtagcaacaggctgatgttggggaca

SEQ ID NO: 412031 - DNA, 120 bp, Artificial Sequence
  ENSG00000148600_54 (sequence is synthesized)
tcggtttgatgttataaaatcgtgcacatgtaccccttttgaggcctgaatgaggttcggttatttattcatttctcaataatttactcagccattcctagggtgacaagtttggagtat

SEQ ID NO: 412032 - DNA, 120 bp, Artificial Sequence
  ENSG00000148600_55 (sequence is synthesized)
atcttctgtgccaggctctcttctaggtgttaggtgtatgtctctaacaagatagaaggaaagaagaaaagaaaaagaacaacattcctctctttaattgctaatcgcctgggcctaggg

SEQ ID NO: 412033 - DNA, 120 bp, Artificial Sequence
  ENSG00000148600_56 (sequence is synthesized)
agtcttcattttaaaagcaagtagccctgcttacaaatgtctcctcaatcaaaggcatttgccttaaacttgtatggtctaaactctaaataaataagcttctcaagggcatgacaacta

SEQ ID NO: 412034 - DNA, 120 bp, Artificial Sequence
  ENSG00000148600_57 (sequence is synthesized)
ccaaaatttaagcccaagaaaccacattccagccagggtctgttcttgcatccccactgcgaaattgccttattcaatctgagtaatgtgaatctgtactctagagtttttcaaggggca

SEQ ID NO: 412035 - DNA, 120 bp, Artificial Sequence
  ENSG00000148600_58 (sequence is synthesized)
gcccaagcatcttaaaaagtatcagattctcagaaatcctccctagaccattttccctctccctaaatttctatgtttacagaagcaactgaatacttccctacccaccaacatgctcct

SEQ ID NO: 412036 - DNA, 120 bp, Artificial Sequence
  ENSG00000148600_59 (sequence is synthesized)
ggctctcccctgcactgcttgctgctcttccacagcccttctctcatcctgacccctctgtctcatgtgcaccaccaagcttcttttgcttggcttgaaggtctgaacatccactctcac

SEQ ID NO: 412037 - DNA, 120 bp, Artificial Sequence
  ENSG00000148600_60 (sequence is synthesized)
cttcatggtagcccaggctatttcatgatggtgacaccctcaagatccgtagaccactgtattagttcgttctcatgctgctaataaagatacccgagactgggtaatttatagaggaaa

SEQ ID NO: 412038 - DNA, 120 bp, Artificial Sequence
  ENSG00000148600_61 (sequence is synthesized)
gataatggaatcggctagcccatgtgtaagacctacgtaaaccctggcttataggagagcatgcattctgttcctttcccaactcaatcctctcaaaataggatcaggaccatttcccat

SEQ ID NO: 412039 - DNA, 120 bp, Artificial Sequence
  ENSG00000148600_62 (sequence is synthesized)
caacccagcaagccccatatgacgtgctgatttagccagagtacacaaggattgtccccaaagcccagctctgtctgtctctccctgcgcacaggccatagacgaggatgcagaggaacc

SEQ ID NO: 412040 - DNA, 120 bp, Artificial Sequence
  ENSG00000148600_63 (sequence is synthesized)
catggatggagaccggggcaaacccaatcgaattctctacagccttgtaaatgacttccctaggcaatgcaggacgatcctgtggcacgactcccctgcgcctccctgtggtcctgtgca

SEQ ID NO: 412041 - DNA, 120 bp, Artificial Sequence
  ENSG00000148602_0 (sequence is synthesized)
gtgtaaggggctggcgagcaagtgggcagctgctgagcttgctgggccggtgggacggagcggtccagggacaggcccctgcctgggccagagaggagccaggagccatgagggtggcat

SEQ ID NO: 412042 - DNA, 120 bp, Artificial Sequence
  ENSG00000148602_1 (sequence is synthesized)
taggcatgctctggctcttggcccttgcgtggcccccccaggcccggggcttctgcccctctcaatgcagctgcagcctccatatcatgggtgatggcagcaaggccaggacagtagtgt

SEQ ID NO: 412043 - DNA, 120 bp, Artificial Sequence
  ENSG00000148602_2 (sequence is synthesized)
gcaacgaccccgacatgaccctgcccccggcgtccatccccccggacacctccagactgcgcctggagcggacggccatacgcagggttcctggcgaggccttcaggcccctgggccgcc

SEQ ID NO: 412044 - DNA, 120 bp, Artificial Sequence
  ENSG00000148602_3 (sequence is synthesized)
tggagcagctgtggctgccttacaacgccctcagcgagctcaacgccctcatgctgcggggcctgcgacgcctgcgggagctgcggctgcccgggaaccgcctggccgccttcccctggg

SEQ ID NO: 412045 - DNA, 120 bp, Artificial Sequence
  ENSG00000148602_4 (sequence is synthesized)
cggcgctcagggacgcccccaagctgcggctgctggacctgcaggccaaccgcctctcggctgtgcccgctgaggccgcgcgcttcctggagaacctcaccttcctcgacctctccagca

SEQ ID NO: 412046 - DNA, 120 bp, Artificial Sequence
  ENSG00000148602_5 (sequence is synthesized)
accagctgatgaggctcccgcaggagctcatcgtctcctgggctcacctggagaccggtatctttcctcccggccaccaccccaggcgggtcctagggctacaggacaacccctgggcat

SEQ ID NO: 412047 - DNA, 120 bp, Artificial Sequence
  ENSG00000148602_6 (sequence is synthesized)
gtgactgccgactctatgacctggttcatcttttggatggctgggccccaaacttggccttcattgagactgaactgagatgtgccagcccacgtagcctggccggagtggccttcagcc

SEQ ID NO: 412048 - DNA, 120 bp, Artificial Sequence
  ENSG00000148602_7 (sequence is synthesized)
agcttgaactgaggaagtgccagggcccagagctccatccaggagtggccagcatcaggtcccttttgggtggcacagcactgctacgctgtggagctactggagtccctgggcccgaga

SEQ ID NO: 412049 - DNA, 120 bp, Artificial Sequence
  ENSG00000148602_8 (sequence is synthesized)
tgagctggaggagggccaatggcaggccccttaatggtacagtgcaccaggaagtctccagtgacggcacgagctggactctgctgggcctgcctgcagtgtcccaccttgactccggag

SEQ ID NO: 412050 - DNA, 120 bp, Artificial Sequence
  ENSG00000148602_9 (sequence is synthesized)
actatgggcaaggacaggtggcggaggggaagctgctgcttacaacaacaagctggtggccaggcatgtcccccagattcccaaacccgctgtcctggccactggaccctctgtgcccag

SEQ ID NO: 412051 - DNA, 120 bp, Artificial Sequence
  ENSG00000148602_10 (sequence is synthesized)
cacaaaggaggagctgacccttgagcacttccagatggatgccctgggagagctctctgatgggcgggcaggaccctcagaggcacgaatggtgaggtctgtgaaggtggtgggggacac

SEQ ID NO: 412052 - DNA, 120 bp, Artificial Sequence
  ENSG00000148602_11 (sequence is synthesized)
ttaccacagcgtgtccttggtgtggaaggcaccccaggctaagaacacaactgccttcagtgtcctctacgcggtctttgggcagcacagcatgcggcgggtgattgtgcagcctgggaa

SEQ ID NO: 412053 - DNA, 120 bp, Artificial Sequence
  ENSG00000148602_12 (sequence is synthesized)
gaccagagtgaccatcactgggctgttgcccaagaccaagtatgtggcgtgtgtctgtgtgcagggcctggtgccccggaaggagcagtgtgttattttctccaccaatgaagtggtgga

SEQ ID NO: 412054 - DNA, 120 bp, Artificial Sequence
  ENSG00000148602_13 (sequence is synthesized)
tgctgagaacactcagcagcttatcaatgtggtggtgatcagtgtggccatcgtcattgccctgcctctcacgctgcttgtctgctgcagtgctcttcagaagcgctgccgaaagtgctt

SEQ ID NO: 412055 - DNA, 120 bp, Artificial Sequence
  ENSG00000148602_14 (sequence is synthesized)
caacaaggactccactgaggccacagttacctacgtcaacctagagagactgggctacagcgaggacggcttggaggagctgtcccggcacagtgtcagcgaggctgacaggcttctctc

SEQ ID NO: 412056 - DNA, 120 bp, Artificial Sequence
  ENSG00000148602_15 (sequence is synthesized)
agctcgttccagtgtggactttcaggcctttggagtcaaagggggcaggagaatcaatgagtacttctgctgagggatatgcctccgcaactcacacacctgcctgcccacgctccttct

SEQ ID NO: 412057 - DNA, 120 bp, Artificial Sequence
  ENSG00000148602_16 (sequence is synthesized)
ttagctctgacacctgagtacacgatcacccactcttacctgctcgggtacctgcttactcagatacttacacacaacaacagcagcagcagctgctactgcaacaaccgctaacacttg

SEQ ID NO: 412058 - DNA, 120 bp, Artificial Sequence
  ENSG00000148602_17 (sequence is synthesized)
ttaagcacttactacagactagaaagtgttctaagtgctaaattcttgtaacaatcatttgcagcaggcatcactattctctccatttccctggggtggggggttaagaaacttgcctgt

SEQ ID NO: 412059 - DNA, 120 bp, Artificial Sequence
  ENSG00000148602_18 (sequence is synthesized)
atcagtcagcttttgctgtataacaaatgaaagcaaaatcttggtgatgtatagcagtgaacacttattttcacactcacaggcctgtgggttgattagggtggctctgctctgtgtgtt

SEQ ID NO: 412060 - DNA, 120 bp, Artificial Sequence
  ENSG00000148604_0 (sequence is synthesized)
gggagagtgaggatggcagagaccagtgccctgcccactggcttcggggagctcgaggtgctggctgtggggatggtgctactggtggaagctctctccggtctcagcctcaataccctg

SEQ ID NO: 412061 - DNA, 120 bp, Artificial Sequence
  ENSG00000148604_1 (sequence is synthesized)
accatcttctctttctgcaagaccccggagctgcggactccctgccacctactggtgctgagcttggctcttgcggacagtgggatcagcctgaatgccctcgttgcagccacatccagc

SEQ ID NO: 412062 - DNA, 120 bp, Artificial Sequence
  ENSG00000148604_2 (sequence is synthesized)
cttctccgtgtctcccacaggcgctggccctacggctcggacggctgccaggctcacggcttccagggctttgtgacagcgttggccagcatctgcagcagtgcagccatcgcatggggg

SEQ ID NO: 412063 - DNA, 120 bp, Artificial Sequence
  ENSG00000148604_3 (sequence is synthesized)
cgttatcaccactactgcacccgtagccagctggcctggaactcagccgtctctctggtgctcttcgtgtggctgtcttctgccttctgggcagctctgccccttctgggttggggtcac

SEQ ID NO: 412064 - DNA, 120 bp, Artificial Sequence
  ENSG00000148604_4 (sequence is synthesized)
tacgactatgagccactggggacatgctgcaccctggactactccaagggggacagaaacttcaccagcttcctcttcaccatgtccttcttcaacttcgccatgcccctcttcatcacg

SEQ ID NO: 412065 - DNA, 120 bp, Artificial Sequence
  ENSG00000148604_5 (sequence is synthesized)
atcacttcctacagtctcatggagcagaaactggggaagagtggccatctccaggtaaacaccactctgccagcaaggacgctgctgctcggctggggcccctatgccatcctgtatcta

SEQ ID NO: 412066 - DNA, 120 bp, Artificial Sequence
  ENSG00000148604_6 (sequence is synthesized)
tacgcagtcatcgcagacgtgacttccatctcccccaaactgcagatggtgcccgccctcattgccaaaatggtgcccacgatcaatgccatcaactatgccctgggcaatgagatggtc

SEQ ID NO: 412067 - DNA, 120 bp, Artificial Sequence
  ENSG00000148604_7 (sequence is synthesized)
tgcaggggaatctggcagtgcctctcaccgcagaagagggagaaggaccgaaccaagtgagcctgccaccctggagtgagccccaggccaggaggctgttccaggagtcctgcccagcag

SEQ ID NO: 412068 - DNA, 120 bp, Artificial Sequence
  ENSG00000148604_8 (sequence is synthesized)
cctcagtggccaagcccagacactcacccaccttccccagtggccccgtggatcctggtcctaggctggacacaggattcagaaagacaccaggctgcacagaaagagccagatggacct

SEQ ID NO: 412069 - DNA, 120 bp, Artificial Sequence
  ENSG00000148604_9 (sequence is synthesized)
taaaaataataataaatgtaagggggtacagtgcagttttgttacatggatagattgcctagtggtgaagtctgggcttttagtgtaaccatcaccctaataatatacgttgtacccatt

SEQ ID NO: 412070 - DNA, 120 bp, Artificial Sequence
  ENSG00000148604_10 (sequence is synthesized)
aagttatttctcatccctcaccccctcccaccttgtcacccttctgagtctccaatgtctattattccacactccatgtccacgtgtacacattatttagctcccacttacaagtgagaa

SEQ ID NO: 412071 - DNA, 120 bp, Artificial Sequence
  ENSG00000148604_11 (sequence is synthesized)
catgtggtatttgactttctgtttttgagttatttcacttaaaataatgacctccagtttcatccatgttgctgcaaaagacatgatctcgttcttttttatggcagtgtagtattccat

SEQ ID NO: 412072 - DNA, 120 bp, Artificial Sequence
  ENSG00000148604_12 (sequence is synthesized)
tccatatacatatataaacgttatatatatgtaacgttttctttatccaatcatctgttgatggatagattccatatctttgctactgtaaacagctgtgataagcatacaagtgcaggt

SEQ ID NO: 412073 - DNA, 120 bp, Artificial Sequence
  ENSG00000148604_13 (sequence is synthesized)
ttctttttgatatactgatttcttttcctttgggtagataccagtagtaggactgctggatcaaatggtagctctatttttaagacagtatggagaaatcaccatactgttttccatagg

SEQ ID NO: 412074 - DNA, 120 bp, Artificial Sequence
  ENSG00000148604_14 (sequence is synthesized)
accatactgttttccataggggttgtactaatttacagtcccaccaacagtgtataggtgttcccttttctctgcatccttaccaatatctgtaattttttgactttttaataatagcca

SEQ ID NO: 412075 - DNA, 120 bp, Artificial Sequence
  ENSG00000148604_15 (sequence is synthesized)
ggtctcattgtggttttaatttccatttctctgatgacttttgatgttaagcattttttcatatgcttcttagccacgtgtatgtattctttttgaaaaaatgtttattcatgtcttttg

SEQ ID NO: 412076 - DNA, 120 bp, Artificial Sequence
  ENSG00000148604_16 (sequence is synthesized)
cccactttttaatggcattatttggattttttttgttgagttatttgagtttcttatatattctggataatagtctggataatatattctggataatatataatagtcttatatattctg

SEQ ID NO: 412077 - DNA, 120 bp, Artificial Sequence
  ENSG00000148604_17 (sequence is synthesized)
gatatattctggatacatggtttgcaaatattttctccggttctgcacgttgttcattctgttgatggtttattttgctgtgcagaaacttttttagtttaattaagtcccatttgtcta

SEQ ID NO: 412078 - DNA, 120 bp, Artificial Sequence
  ENSG00000148604_18 (sequence is synthesized)
tactggtggaaggaggttgctgatgttccatccaccccacacacactgttctgaccccagctgggcctcagcagccccaatgccagcccccacccttcctttcagctctctccggtctca

SEQ ID NO: 412079 - DNA, 120 bp, Artificial Sequence
  ENSG00000148604_19 (sequence is synthesized)
ggaccatttgcagcggggaggcatccagaaacagcccaaggtccaacataataacctgcatgtgcctccacgcacatgggatggccctttaaaagggagggcctggctgtgggaagccag

SEQ ID NO: 412080 - DNA, 120 bp, Artificial Sequence
  ENSG00000148604_20 (sequence is synthesized)
tcagtgatcaagagaaaatccagcttgtgcacagcataggatgttagaactggaaaccaccctccctttgctcagatcgccaaggcctggggagcaaggatcaggactgctcagattcac

SEQ ID NO: 412081 - DNA, 120 bp, Artificial Sequence
  ENSG00000148604_21 (sequence is synthesized)
ccagaccccgtaactctggggaccagggctccctactggacacatccgtgctgttccacttaactcttgccaaggatgtgaggtaaacaccactctgccagcaaggacgctgctgctcgg

SEQ ID NO: 412082 - DNA, 120 bp, Artificial Sequence
  ENSG00000148604_22 (sequence is synthesized)
agagacagctgggccactggcagtgagggagagtgaggatggcagagaccagtgccctgcccactggcttcggggagctcgaggtgctggctgtggggatggtgctactggtggaagacc

SEQ ID NO: 412083 - DNA, 120 bp, Artificial Sequence
  ENSG00000148604_23 (sequence is synthesized)
cccctgggccctgggcagccaggccaagggcatttttactacttacagaaaattggccaagggcagagggtgggcaggctaaaatgggctgaattccagattgattctgaagaacgacag

SEQ ID NO: 412084 - DNA, 120 bp, Artificial Sequence
  ENSG00000148604_24 (sequence is synthesized)
ctgatttctggaagacaggggttgctgaaacctgatgaaagagatggtaggctgtagagatcaatggtgtgggttctgtaaccaagcaacctaggtttgcattctggcttcagcatttct

SEQ ID NO: 412085 - DNA, 120 bp, Artificial Sequence
  ENSG00000148604_25 (sequence is synthesized)
agttctgggcttcttccataaatcggatattatttcctaactcatataggtggttggaagtatttacttctattatgtgtaaataacttaaaataatgcttgatacctaggactctacgt

SEQ ID NO: 412086 - DNA, 120 bp, Artificial Sequence
  ENSG00000148604_26 (sequence is synthesized)
aagtgtttgtgaacacaaatgggggcgttatcaccactactgcacccgtatgtatctgggctcctggagtggagggacaccgatgcagtgtggagaggataagaggcagggaggggcagt

SEQ ID NO: 412087 - DNA, 120 bp, Artificial Sequence
  ENSG00000148604_27 (sequence is synthesized)
cataactagctagtgtctaatacctccttatacaaaaaccagggtcttccatcacagcttcagaaggtgtttataaaattgttttctgaagcagactggacattctcattctggttttgg

SEQ ID NO: 412088 - DNA, 120 bp, Artificial Sequence
  ENSG00000148604_28 (sequence is synthesized)
acactacagacggaggctggagcccccccggatgtgcatgctcagtgctgaccagcctggggggtctgcatcagtgagaactcttcctcccacagagaattgaagtttccacctttgctt

SEQ ID NO: 412089 - DNA, 120 bp, Artificial Sequence
  ENSG00000148604_29 (sequence is synthesized)
gcccttttaggctggggaggcctgggatctcccctctgactttgccttcatcttctgtgtgaccttggcttcagtatctttgcctctttgaatgtcagtttccccacctatcaaatacag

SEQ ID NO: 412090 - DNA, 120 bp, Artificial Sequence
  ENSG00000148604_30 (sequence is synthesized)
gcatgagctctcctgtgacagagggatctgatcacgcagagagagcctatggcccaaccatggtgcagtcaaagtcacccagcctggagagtgtgcattgggctccaccccttcagccca

SEQ ID NO: 412091 - DNA, 120 bp, Artificial Sequence
  ENSG00000148604_31 (sequence is synthesized)
tggagcagaaactggggaagagtggccatctccaggctgcctaatctctagccagcatctgccttttgattgatagggacaccagggaatatgaacaatgtgacagacagcaaccagggg

SEQ ID NO: 412092 - DNA, 120 bp, Artificial Sequence
  ENSG00000148604_32 (sequence is synthesized)
aaatgctacttttaaaccgctttgagatgtttaatttaatcacagtcacagggtggtgcccaaaagataaaaatcaacctataagcacatttgtccaagaaatacaatacttcaaaataa

SEQ ID NO: 412093 - DNA, 120 bp, Artificial Sequence
  ENSG00000148604_33 (sequence is synthesized)
ggcgataggttagccctcttgtccacttggcctcagagcacttctcccactccttacatcccagcccctgcccctaatgctcccttggaccatcttatacacacacacacacacacacac

SEQ ID NO: 412094 - DNA, 120 bp, Artificial Sequence
  ENSG00000148604_34 (sequence is synthesized)
tagcaacaggcttctctgcctcaatatagaacagttaatccctgtgccagaggccttagatcaaagccctttctatactgagagcatggcagagcagtgtgaaggcaggcaaaggggaat

SEQ ID NO: 412095 - DNA, 120 bp, Artificial Sequence
  ENSG00000148604_35 (sequence is synthesized)
gaggaggtctgaattcatctactccatccctgggtggttgtaggcatgtcaccttggccatctgtttctaaagctgaaagtctgaggcagcacaatggtccaggtagatattaattattg

SEQ ID NO: 412096 - DNA, 120 bp, Artificial Sequence
  ENSG00000148604_36 (sequence is synthesized)
gaacattcactttccccagtgcacagagacaacatctcagtggtttcctagctccaagaaaaagcaaacagcaattttcctttgaagtaacttgatgagcaaccaggaaggctccgagac

SEQ ID NO: 412097 - DNA, 120 bp, Artificial Sequence
  ENSG00000148604_37 (sequence is synthesized)
accctcaagaacccaggctgcacaatcacccgccgcatgctgtgctgcccaaagaccgcgtagaggacactgaaggcagttgtgttcttagcctggggtgccttccacaccaaggacacg

SEQ ID NO: 412098 - DNA, 120 bp, Artificial Sequence
  ENSG00000148604_38 (sequence is synthesized)
gggccactggcagtgagggagagtgaggatggcagagaccagtgccctgcccactggcttcggggagctcgaggtgctggctgtggggatggtgctactggtggaaggcgctggccctac

SEQ ID NO: 412099 - DNA, 120 bp, Artificial Sequence
  ENSG00000148606_0 (sequence is synthesized)
gcagatgtgttagcggcgagtccagaagcagccccaggaggtgctgggggcatcgtttctctaatctggcctcccgagtgccaaggaggcgtcccggcagcggtcatcatggtgaaggag

SEQ ID NO: 412100 - DNA, 120 bp, Artificial Sequence
  ENSG00000148606_1 (sequence is synthesized)
cagttccgggagacggatgtggccaagaaaataagccacatctgttttggaatgaagtcacctgaggagatgcgccagcaggcgcacatccaagttgtgagtaagaacctgtacagccag

SEQ ID NO: 412101 - DNA, 120 bp, Artificial Sequence
  ENSG00000148606_2 (sequence is synthesized)
gacaaccaacatgcccccttgctatatggggtgctcgaccataggatgggtacgagtgagaaggatcgtccatgtgaaacctgtgggaaaaacttggctgactgtctaggccactatggg

SEQ ID NO: 412102 - DNA, 120 bp, Artificial Sequence
  ENSG00000148606_3 (sequence is synthesized)
tatatcgacctggagttgccgtgttttcatgtagggtacttcagagcagtcataggcatcttacagatgatctgcaaaacctgctgccacatcatgctgtcccaagaggagaagaagcag

SEQ ID NO: 412103 - DNA, 120 bp, Artificial Sequence
  ENSG00000148606_4 (sequence is synthesized)
tttctggactatctaaagaggcccggcctgacctaccttcagaagcgaggactgaaaaagaaaatctctgacaagtgccggaagaaaaacatctgccatcactgtggcgcttttaatggt

SEQ ID NO: 412104 - DNA, 120 bp, Artificial Sequence
  ENSG00000148606_5 (sequence is synthesized)
accgtaaagaagtgtggactgctgaaaataattcatgagaaatacaagaccaacaaaaaagtggtggatcccattgtatcaaatttccttcagtcttttgaaacagccattgaacataat

SEQ ID NO: 412105 - DNA, 120 bp, Artificial Sequence
  ENSG00000148606_6 (sequence is synthesized)
aaagaagtggagcctctgctgggaagggcacaggaaaacttgaatcccttagtagttctgaatttatttaaacgaatcccagctgaagatgttcctctacttctgatgaacccagaagcc

SEQ ID NO: 412106 - DNA, 120 bp, Artificial Sequence
  ENSG00000148606_7 (sequence is synthesized)
ggaaagccgtctgatttgattctcacacgacttttggtgcctcctttgtgtatcagaccctccgttgtgagtgatttgaagtctggcaccaatgaagatgatctgacaatgaaactgaca

SEQ ID NO: 412107 - DNA, 120 bp, Artificial Sequence
  ENSG00000148606_8 (sequence is synthesized)
gaaatcattttcctaaacgatgttattaaaaagcatcggatctcaggagccaagacccagatgatcatggaggactgggatttcctgcagctgcagtgtgccctctacattaacagtgag

SEQ ID NO: 412108 - DNA, 120 bp, Artificial Sequence
  ENSG00000148606_9 (sequence is synthesized)
ctctcgggcattcccctcaacatggcacccaagaagtggaccagaggcttcgtccaacgcctgaagggaaaacagggtcgatttagaggaaatctctcaggaaagagagtggatttttct

SEQ ID NO: 412109 - DNA, 120 bp, Artificial Sequence
  ENSG00000148606_10 (sequence is synthesized)
ggcagaacagtcatctcgcccgaccccaacctccggattgatgaggtagctgtgccagttcatgtggccaaaattctaacttttcctgagaaggtaaacaaagcaaacatcaatttcttg

SEQ ID NO: 412110 - DNA, 120 bp, Artificial Sequence
  ENSG00000148606_11 (sequence is synthesized)
aggaaactggttcaaaacggccctgaggttcacccaggagcaaacttcattcagcagagacatacgcagatgaaaaggtttttgaaatacggaaatcgagaaaagatggctcaagagctc

SEQ ID NO: 412111 - DNA, 120 bp, Artificial Sequence
  ENSG00000148606_12 (sequence is synthesized)
aagtatggtgacatcgtagagagacacctcatcgatggagatgtggtgctgttcaatcggcagccctcgctgcacaaattgagcattatggctcatctggccagggtcaagccccaccgg

SEQ ID NO: 412112 - DNA, 120 bp, Artificial Sequence
  ENSG00000148606_13 (sequence is synthesized)
accttcagatttaatgagtgtgtctgtacaccctataatgctgactttgatggtgatgaaatgaaccttcatcttcctcaaacagaagaagctaaagcagaggcccttgttctgatgggg

SEQ ID NO: 412113 - DNA, 120 bp, Artificial Sequence
  ENSG00000148606_14 (sequence is synthesized)
actaaagcaaatcttgtaaccccgaggaatggggaaccgctgattgctgctattcaggattttctaacaggtgcctatctcctcactctcaaggacactttctttgatcgagccaaggct

SEQ ID NO: 412114 - DNA, 120 bp, Artificial Sequence
  ENSG00000148606_15 (sequence is synthesized)
tgccaaatcattgcttcaatactggttggcaaggatgagaaaattaaagttcgcctcccaccgcctacaatcctaaagcctgtcaccctgtggacgggaaagcagatcttcagtgtcatc

SEQ ID NO: 412115 - DNA, 120 bp, Artificial Sequence
  ENSG00000148606_16 (sequence is synthesized)
ctcaggcctagcgatgacaatccagtgagggccaacctgcgaaccaagggcaagcagtactgtggcaaaggggaagatctctgtgccaatgattcctatgttacaatccagaacagtgag

SEQ ID NO: 412116 - DNA, 120 bp, Artificial Sequence
  ENSG00000148606_17 (sequence is synthesized)
ttgatgagtggcagcatggacaaaggaaccctagggtcaggatccaagaacaatattttttacattttgctgcgagactggggacagaatgaagctgcagatgccatgtcacggctcgcc

SEQ ID NO: 412117 - DNA, 120 bp, Artificial Sequence
  ENSG00000148606_18 (sequence is synthesized)
aggctggctcctgtctacctgtctaaccgtggtttctcaattgggatcggtgatgtcacacctggccaaggactgctgaaggccaagtatgagttgctgaatgccggctacaagaaatgt

SEQ ID NO: 412118 - DNA, 120 bp, Artificial Sequence
  ENSG00000148606_19 (sequence is synthesized)
gatgagtacatcgaagccctgaacacgggcaagctgcagcagcagcctggctgcactgctgaggagaccctggaggcactgatcctgaaggagctgtctgtgatccgtgaccacgctggc

SEQ ID NO: 412119 - DNA, 120 bp, Artificial Sequence
  ENSG00000148606_20 (sequence is synthesized)
agtgcctgcctccgggagctggacaagagcaacagccccctcaccatggctctgtgcggctccaaaggttccttcattaacatatcacagatgattgcctgtgtgggacagcaggccatc

SEQ ID NO: 412120 - DNA, 120 bp, Artificial Sequence
  ENSG00000148606_21 (sequence is synthesized)
agtggctctcgagtgccagacggctttgaaaacaggtccttgcctcattttgaaaaacactcaaagctcccagctgccaaaggctttgtggctaatagcttttattccggtttgacacca

SEQ ID NO: 412121 - DNA, 120 bp, Artificial Sequence
  ENSG00000148606_22 (sequence is synthesized)
actgagtttttcttccacacaatggccggccgggaaggtctagtcgacacggctgtaaagacagctgaaacgggatacatgcagcgaaggcttgtcaaatctcttgaagatctttgctcc

SEQ ID NO: 412122 - DNA, 120 bp, Artificial Sequence
  ENSG00000148606_23 (sequence is synthesized)
cagtatgatctgacagtccgaagctctactggcgatattatccagttcatttatggaggagatggcttagatcctgcagctatggagggaaaagatgaacctttggagtttaaaagggtt

SEQ ID NO: 412123 - DNA, 120 bp, Artificial Sequence
  ENSG00000148606_24 (sequence is synthesized)
ctggacaacatcaaagcagtcttcccgtgtcccagtgagcctgctctcagcaaaaacgagctgatcctgaccacagagtccatcatgaagaagagtgagttcctctgctgccaggacagc

SEQ ID NO: 412124 - DNA, 120 bp, Artificial Sequence
  ENSG00000148606_25 (sequence is synthesized)
ttcctgcaggaaataaaaaaattcattaagggggtctctgagaagatcaagaaaaccagagataaatatggcatcaatgataacggcacaacagagccccgtgtgctgtaccagctggac

SEQ ID NO: 412125 - DNA, 120 bp, Artificial Sequence
  ENSG00000148606_26 (sequence is synthesized)
cgcatcacccccacccaagtagaaaagtttctggagacctgtagggacaagtacatgagggcacagatggagccaggttctgcagtgggtgctctgtgtgcccagagcattggtgagcca

SEQ ID NO: 412126 - DNA, 120 bp, Artificial Sequence
  ENSG00000148606_27 (sequence is synthesized)
tgaccctgaagactttccactttgcaggtgtggcctccatgaacatcaccctgggcgtgccccggattaaagagatcatcaacgcttccaaggccatcagcactccaattatcacagcac

SEQ ID NO: 412127 - DNA, 120 bp, Artificial Sequence
  ENSG00000148606_28 (sequence is synthesized)
agctagacaaggatgacgacgcggattatgctcgcctcgtgaaagggagaattgagaaaaccctcttgggagagatttccgagtatattgaagaagtgtttcttcctgatgactgcttta

SEQ ID NO: 412128 - DNA, 120 bp, Artificial Sequence
  ENSG00000148606_29 (sequence is synthesized)
ttctcgtcaagctctccctggaacggattaggcttctgagactggaagtgaacgctgagacagtgagatattccatctgcacatccaagctccgtgtgaagcccggtgatgtggctgttc

SEQ ID NO: 412129 - DNA, 120 bp, Artificial Sequence
  ENSG00000148606_30 (sequence is synthesized)
atggtgaggctgtggtgtgtgtcacccccagagagaacagcaagagctccatgtactacgtgctgcagttcctgaaagaggatctccccaaggtggtggtgcagggcattccagaggtgt

SEQ ID NO: 412130 - DNA, 120 bp, Artificial Sequence
  ENSG00000148606_31 (sequence is synthesized)
ccagagctgtcatccacattgacgagcagagtggaaaggagaagtacaagcttctggtggaaggtgataacctgcgggcagtcatggccacacacggtgtgaagggcacccgaaccacct

SEQ ID NO: 412131 - DNA, 120 bp, Artificial Sequence
  ENSG00000148606_32 (sequence is synthesized)
ccaataacacctatgaggtggagaaaactctgggcatcgaggccgcccggacaacgatcatcaatgaaatccagtacaccatggtgaaccacggcatgagcatcgacaggaggcacgtga

SEQ ID NO: 412132 - DNA, 120 bp, Artificial Sequence
  ENSG00000148606_33 (sequence is synthesized)
tgctgctctccgacctcatgacctacaagggtgaagtcctgggcatcactaggtttggcctggccaagatgaaggagagtgtgctgatgctggcctcctttgagaagacggctgaccatc

SEQ ID NO: 412133 - DNA, 120 bp, Artificial Sequence
  ENSG00000148606_34 (sequence is synthesized)
tctttgacgctgcctacttcgggcagaaggactctgtgtgtggggtgtctgagtgcatcatcatgggaatcccaatgaacattggaaccgggctcttcaagctgcttcacaaggctgaca

SEQ ID NO: 412134 - DNA, 120 bp, Artificial Sequence
  ENSG00000148606_35 (sequence is synthesized)
gggacccgaaccctcccaagaggcccctgatcttcgacacaaatgaattccacatcccccttgtcacatagtccaaagaaagaggggaccatgcctgaccttgactccttgtcctgtctc

SEQ ID NO: 412135 - DNA, 120 bp, Artificial Sequence
  ENSG00000148606_36 (sequence is synthesized)
cagctgatgtataaagagttttgtgctccctgggacgggggtcctgaggtccccacctatgccagcaatcagagaagccctcttggcatccccaggagcagcttctcctctgatagggtg

SEQ ID NO: 412136 - DNA, 120 bp, Artificial Sequence
  ENSG00000148606_37 (sequence is synthesized)
cagctcacaccagtgaccctgactgtgccacgctgctcgggagagctgagggttttattgtttgcttgcttgaaacctaatctatagacggccccacagctcgtgcacacactgcttccc

SEQ ID NO: 412137 - DNA, 120 bp, Artificial Sequence
  ENSG00000148606_38 (sequence is synthesized)
tggacttaaagcccagccaggtgtcatggtccatcccagctcactgcatacatccatcggctccccatggtgtcttcacacctgacgatgagccaggcctgagccccacacaggccaggg

SEQ ID NO: 412138 - DNA, 120 bp, Artificial Sequence
  ENSG00000148606_39 (sequence is synthesized)
cacattcttggattttccattccttggtcatgctggaatctctcaatgtgacatacttatgtaaatattgttactattatttatttgttccatttgagggatttggaatttttgttattt

SEQ ID NO: 412139 - DNA, 120 bp, Artificial Sequence
  ENSG00000148606_40 (sequence is synthesized)
tagttttatttttgaaaccaagcatctatagaaaccaagaaagtcagcatgtaagcgtcactggaaaaactggtttaagcaaatagagccgtctgggatttgtaactgaggtgcaactgt

SEQ ID NO: 412140 - DNA, 120 bp, Artificial Sequence
  ENSG00000148606_41 (sequence is synthesized)
catgaggcccaggcagctctgtaacatcttctatagatgcccctggctaccctgttgttttcatctacctcagacccctatcatggggctctaccctgtgacaagagccaaacccattct

SEQ ID NO: 412141 - DNA, 120 bp, Artificial Sequence
  ENSG00000148606_42 (sequence is synthesized)
ccatggcctatggaagcctcactggagtttggggcctgctgcaatggggatgagatggttttttgtagaattatacttacgttccttggatgatctctagttgattttttaagttctgag

SEQ ID NO: 412142 - DNA, 120 bp, Artificial Sequence
  ENSG00000148606_43 (sequence is synthesized)
ttgatgctgttaaggtacccggggtagccattggttcttggatctgtgttagaatgagtgctttcccttcctactgatgtgattgtggattaggaattcgtgaccgagtgatttttggcc

SEQ ID NO: 412143 - DNA, 89 bp, Artificial Sequence
  ENSG00000148606_44 (sequence is synthesized)
gattgtggattaggaattcgtgaccgagtgatttttggccagtggttgggtttaaaattctattaaaatttgtagtttgggctgggtgc

SEQ ID NO: 412144 - DNA, 80 bp, Artificial Sequence
  ENSG00000148606_45 (sequence is synthesized)
agatcacttgagcccaggagttcgagagcagcctgggcaacatgacgaaaccccgtctctacagagtacctgctattggt

SEQ ID NO: 412145 - DNA, 120 bp, Artificial Sequence
  ENSG00000148606_46 (sequence is synthesized)
agtttttataaaaaattatagtttgaccttttgatttccctgcatctacaaggtagacctattaacttctcttggggtatcagtgatgtggaaaaaaaatgccatttttcttaatgttta

SEQ ID NO: 412146 - DNA, 120 bp, Artificial Sequence
  ENSG00000148606_47 (sequence is synthesized)
acccccctttatctttgaattgagctagagcctggtttaggacaaaggattaagtttgttaatgaacactaattcagggcttctacttgagaccccaccgagatcaccagttctcatgta

SEQ ID NO: 412147 - DNA, 120 bp, Artificial Sequence
  ENSG00000148606_48 (sequence is synthesized)
acctgggaagagccataaaggggtaccccccaccccaactgccttcctggaagcatgcctgggaagtaagctgtaggcctgatccgagccaggaccactgggatccgtgcaaaggccagg

SEQ ID NO: 412148 - DNA, 120 bp, Artificial Sequence
  ENSG00000148606_49 (sequence is synthesized)
ggagggtagaattgaatcataggagtgaactccggcacctgttgtcttctgcgggtgacgcacactttaaatggaagagaggttgtggctataacttgtggctgggaataataaagatgg

SEQ ID NO: 412149 - DNA, 120 bp, Artificial Sequence
  ENSG00000148606_50 (sequence is synthesized)
caccgccaaggagcctcaccttgcgtgagtgagtactcagttgggcgctgcagggtctggagtctgtgtgagacgtgtgtgattgtgatgggtgcgaatcagcgtatagcacttgagaac

SEQ ID NO: 412150 - DNA, 120 bp, Artificial Sequence
  ENSG00000148606_51 (sequence is synthesized)
aaggcagaccttggagcagaatggttatgtgaaggatcacatcacccatgggtagggggggaagtcatacgtcctggaggtgctggtcctcctcctggaactgccagccttgctaggact

SEQ ID NO: 412151 - DNA, 120 bp, Artificial Sequence
  ENSG00000148606_52 (sequence is synthesized)
atcaacatcaacagcattgcctggtaaaccctactgtttgtgctccccactgtgtcccatgactggtgttaaaattctccctactttgatcatctgccctgcccaggccttgggctttat

SEQ ID NO: 412152 - DNA, 120 bp, Artificial Sequence
  ENSG00000148606_53 (sequence is synthesized)
gccagcacagagctcaaaggccaggtagcagcacatcctcaagcatgagagctcaaagggttacatttgagtctctgtacctgcttggaagaaataaaaatacgtgtgaattccatctca

SEQ ID NO: 412153 - DNA, 120 bp, Artificial Sequence
  ENSG00000148606_54 (sequence is synthesized)
acaggcgtgagctaccatgcccagcccatacttttttttttttttttaaattgaggtctaggtaactgcagggcctgctaacgagaatattgattagctttacctatgagactcacagtt

SEQ ID NO: 412154 - DNA, 120 bp, Artificial Sequence
  ENSG00000148606_55 (sequence is synthesized)
tatgagactcacagttagcccagatcatagatgttcctggtcagcttgtgttgtgtgtcctcagttgagttactaatgatccaagagttaacttctccaaaatggtgttccacaagacag

SEQ ID NO: 412155 - DNA, 120 bp, Artificial Sequence
  ENSG00000148606_56 (sequence is synthesized)
ttgtttaagaggttccagaacacattcaatgcagaccagggcttgtggtgctggtgtcacaacttttaaaccttacaagcccccagtaagttattgcagatcaagtcgccacctgtttct

SEQ ID NO: 412156 - DNA, 120 bp, Artificial Sequence
  ENSG00000148606_57 (sequence is synthesized)
aggatcacagaaggttcctatagatcagtctagcctacccgttttaccagtgaggaaaccaagcaccaggaaaggaattggccatgtcactcagtgagcaaacagctgagttgacactgg

SEQ ID NO: 412157 - DNA, 120 bp, Artificial Sequence
  ENSG00000148606_58 (sequence is synthesized)
aagctggaagcttgtttgccagtctgttgttcacattatactcaagaccataggcagcaggctgcccaggatgcctctctttctcctagaatctgaacaaggaaagtaaagattaagacg

SEQ ID NO: 412158 - DNA, 120 bp, Artificial Sequence
  ENSG00000148606_59 (sequence is synthesized)
ctaacaacgccaaagaagccaggctctttctgttcttaaaccgaccactaactgcctatatatctctctttttattggtttcttttgagcctttgaagaatctcttagaaattatagtat

SEQ ID NO: 412159 - DNA, 120 bp, Artificial Sequence
  ENSG00000148606_60 (sequence is synthesized)
atacatgagagttagggtctgtaacagatgcgttgaggggattttctggcctataaatgtgggttctgggagaaaatgtatacatgagggccagttatgacaaggtaagaaaagaatata

SEQ ID NO: 412160 - DNA, 120 bp, Artificial Sequence
  ENSG00000148606_61 (sequence is synthesized)
gcaatatcaatgttggctgtcacaggggaagaagatgtcctacctaagtaaattttccagtagctgaagattctttaagcaccagcacattttattgaacattctgaatggaaaccttcc

SEQ ID NO: 412161 - DNA, 120 bp, Artificial Sequence
  ENSG00000148606_62 (sequence is synthesized)
taaactatattacatacttcgtcttcttagaggatgcagtattatacataatgataataactcttaccaccactttatttgacaaatgcataaggagtgcccagtagatgctgcaggaga

SEQ ID NO: 412162 - DNA, 120 bp, Artificial Sequence
  ENSG00000148606_63 (sequence is synthesized)
cgctgcctacttcgggcagaaggactctgtgtgtgcctggccccaaccctgagacctgtatgaaggtggatagtccacactcagaaaagagaagcaggatggtagtcatggaagctggaa

SEQ ID NO: 412163 - DNA, 120 bp, Artificial Sequence
  ENSG00000148606_64 (sequence is synthesized)
ggaatctgccaaggagtatggaacaactcaccagccaaatgaactcgtcctaaaaatatggatctaatttttttaaaaaagaaaaggccaagtgcagtggctcacacccataatcccagc

SEQ ID NO: 412164 - DNA, 120 bp, Artificial Sequence
  ENSG00000148606_65 (sequence is synthesized)
ggaggctgaagcatgagaatcgcttggacctgggaggcagaggctgcggtgagccaaaattgcgccaatgcactccagcctgggtgacagaagaagaccctgtttcagggggaaaaaaaa

SEQ ID NO: 412165 - DNA, 120 bp, Artificial Sequence
  ENSG00000148606_66 (sequence is synthesized)
accctgtttcagggggaaaaaaaagaaaaagaaaggaaagggaaaaaacatgaagagagcccagtgtatccagacccgagtctcatcaccttctcaggaagctttttgggttgtccaggc

SEQ ID NO: 412166 - DNA, 120 bp, Artificial Sequence
  ENSG00000148606_67 (sequence is synthesized)
cttaagtaggcctgtgcttccaaacttcatttctgggaggagtgccagtgggctggggaagtcggaggctagaagaagcctgttcttgtaccttgcagtctgttccaccaccgaggaaca

SEQ ID NO: 412167 - DNA, 120 bp, Artificial Sequence
  ENSG00000148606_68 (sequence is synthesized)
ggcctgacccgagtggcctgcagtaaagctccgagtcagggagcatggtataatcacctgacactggtgttacaggtaaatcacaatctctccccatagacaacatgatcttcctcatgt

SEQ ID NO: 412168 - DNA, 120 bp, Artificial Sequence
  ENSG00000148634_0 (sequence is synthesized)
acttccggccagcccctcccccgcctccctcgcgtggccacctccccctctgccttctcctacccagtctcttccccaactctccccacccctggtgctctccgccccgcttgcctcccg

SEQ ID NO: 412169 - DNA, 120 bp, Artificial Sequence
  ENSG00000148634_1 (sequence is synthesized)
ttcttccccgcccgctccatccgggtcgctgacggctgtctctggactggacagcagtggcgtccgcttttctctaaggaacccgataagaactccattttctgttgatgtggagacata

SEQ ID NO: 412170 - DNA, 120 bp, Artificial Sequence
  ENSG00000148634_2 (sequence is synthesized)
gggtacctccaactttccggggtttcagaagagaattttttattgaaactggaagaccaaaataattacaagcatgttgtgctggggaaatgcatcctttgggcagctaggtttgggtgg

SEQ ID NO: 412171 - DNA, 120 bp, Artificial Sequence
  ENSG00000148634_3 (sequence is synthesized)
aattgatgaagaaattgtactagagcccagaaaaagtgacttctttataaataaaagggtccgagatgtaggatgtggactcagacatactgtgtttgttctggatgatggaacagtgta

SEQ ID NO: 412172 - DNA, 120 bp, Artificial Sequence
  ENSG00000148634_4 (sequence is synthesized)
cacatgtggatgtaatgatctaggacagctaggtcatgaaaaatccagaaagaaaccagagcaggttgttgccctggatgcccaaaatattgtagctgtttcatgtggagaagctcatac

SEQ ID NO: 412173 - DNA, 120 bp, Artificial Sequence
  ENSG00000148634_5 (sequence is synthesized)
gttagcgctaaatgacaaaggccaggtgtatgcttggggtctcgattctgatggacagcttggcctggtaggatcagaggaatgcatcagagtacccagaaatattaaaagtttgtcaga

SEQ ID NO: 412174 - DNA, 120 bp, Artificial Sequence
  ENSG00000148634_6 (sequence is synthesized)
tatccagattgtacaggttgcttgtggttactatcattcacttgcactttctaaagcaagtgaagtcttctgttggggacagaataaatatggccaattgggtttaggtactgactgtaa

SEQ ID NO: 412175 - DNA, 120 bp, Artificial Sequence
  ENSG00000148634_7 (sequence is synthesized)
aaagcaaacttcaccgcagctgcttaagtctttgcttggaatccctttcatgcaagttgcagcaggaggagcccatagttttgtactcaccctttctggagctatctttggatggggacg

SEQ ID NO: 412176 - DNA, 120 bp, Artificial Sequence
  ENSG00000148634_8 (sequence is synthesized)
caacaagtttggtcagctaggtcttaatgatgaaaatgataggtatgttcctaatttactaaagtcactaagatctcagaaaatagtttatatttgttgtggagaagatcatactgctgc

SEQ ID NO: 412177 - DNA, 120 bp, Artificial Sequence
  ENSG00000148634_9 (sequence is synthesized)
tctaaccaaggaaggtggagtgtttacttttggagctggagggtatggtcagttgggccataattctaccagtcatgaaataaacccaaggaaagtttttgaacttatgggaagcattgt

SEQ ID NO: 412178 - DNA, 120 bp, Artificial Sequence
  ENSG00000148634_10 (sequence is synthesized)
cactgagattgcttgtggacggcagcacacttctgcttttgttccttcatcaggacgaatttactcttttgggcttggtggtaatgggcagctgggaaccggttcaacaagcaacaggaa

SEQ ID NO: 412179 - DNA, 120 bp, Artificial Sequence
  ENSG00000148634_11 (sequence is synthesized)
aagcccctttactgtaaaaggaaattggtacccctataatgggcagtgtctaccagatattgattctgaagaatatttctgtgtaaaaagaattttctcagggggagatcaaagcttttc

SEQ ID NO: 412180 - DNA, 120 bp, Artificial Sequence
  ENSG00000148634_12 (sequence is synthesized)
acattactctagtccccagaactgtgggccaccagatgacttcagatgtcccaatccgacaaagcagatctggacagtgaatgaagctctaattcagaaatggctgagctatccttctgg

SEQ ID NO: 412181 - DNA, 120 bp, Artificial Sequence
  ENSG00000148634_13 (sequence is synthesized)
aaggtttcctgtggagatagccaatgagatagatggaacgttttcttcctctggttgcctaaatggaagttttttagctgttagcaatgatgatcactatagaacaggtaccagattttc

SEQ ID NO: 412182 - DNA, 120 bp, Artificial Sequence
  ENSG00000148634_14 (sequence is synthesized)
aggggttgatatgaatgctgctaggcttttattccacaaacttatacaacctgatcatccgcagatatctcagcaggtggcagctagtttggaaaagaatcttattcctaaactgactag

SEQ ID NO: 412183 - DNA, 120 bp, Artificial Sequence
  ENSG00000148634_15 (sequence is synthesized)
ctccttacctgatgttgaagcattgaggttttatcttactctaccagaatgtcccctgatgagtgattccaacaatttcacaacaatagcaattccctttggtacagctcttgtgaacct

SEQ ID NO: 412184 - DNA, 120 bp, Artificial Sequence
  ENSG00000148634_16 (sequence is synthesized)
agatagtagaactttttaaggaagttgtggtacatcttttgaaactctacaagatcggtattcccccttctgaaagaagaattttcaacagttttcttcatactgcattaaaggttttag

SEQ ID NO: 412185 - DNA, 120 bp, Artificial Sequence
  ENSG00000148634_17 (sequence is synthesized)
aaatactacatagggtaaatgagaaaatgggacagattatacagtatgataaattttatatacatgaagtacaagaattgatagacataagaaatgattatatcaactgggtccaacagc

SEQ ID NO: 412186 - DNA, 120 bp, Artificial Sequence
  ENSG00000148634_18 (sequence is synthesized)
aggcctatggaatgttggcagatatccctgttacaatctgtacatatccatttgtatttgatgcccaagcaaaaactactctgttacagaccgatgcagtcttacagatgcagatggcta

SEQ ID NO: 412187 - DNA, 120 bp, Artificial Sequence
  ENSG00000148634_19 (sequence is synthesized)
ttgatcaggcccacaggcagaatgtctcctctctttttctcccagtgattgaatctgtgaatccctgcttaattctagtggtgcgtagagaaaatattgtaggagatgcaatggaagtcc

SEQ ID NO: 412188 - DNA, 120 bp, Artificial Sequence
  ENSG00000148634_20 (sequence is synthesized)
ttaggaaaacaaagaacatagattacaagaagccactcaaggttatatttgttggagaagatgctgtggatgcaggaggggtgcgcaaagaatttttcttgctcatcatgagggaattat

SEQ ID NO: 412189 - DNA, 120 bp, Artificial Sequence
  ENSG00000148634_21 (sequence is synthesized)
tggatcctaaatacggcatgtttaggtattatgaagattccaggctcatttggttttctgataagacatttgaagacagtgatttgttccatttgattggtgttatctgtggcttagcaa

SEQ ID NO: 412190 - DNA, 120 bp, Artificial Sequence
  ENSG00000148634_22 (sequence is synthesized)
tttataattgtaccattgtggacctccattttcctttggctttatataagaaactactgaaaaagaagccatccttggatgatttgaaagaactaatgcctgatgttgggagaagcatgc

SEQ ID NO: 412191 - DNA, 120 bp, Artificial Sequence
  ENSG00000148634_23 (sequence is synthesized)
aacagttactggattatccagaagatgacatagaggaaacattttgtcttaattttacgatcacagttgaaaactttggtgcaacagaagtgaaagagctggttctaaatggtgcagaca

SEQ ID NO: 412192 - DNA, 120 bp, Artificial Sequence
  ENSG00000148634_24 (sequence is synthesized)
cagctgttaacaaacaaaatcggcaagagtttgtcgatgcttatgtggattacatattcaataaatcagtggcttccttatttgatgcttttcatgcgggctttcataaggtctgtggag

SEQ ID NO: 412193 - DNA, 120 bp, Artificial Sequence
  ENSG00000148634_25 (sequence is synthesized)
gaaaagtccttctgctctttcagcctaatgaactacaagcaatggtcattggaaatacaaattatgattggaaggaactggaaaagaatacagaatacaaaggggaatattgggcagaac

SEQ ID NO: 412194 - DNA, 120 bp, Artificial Sequence
  ENSG00000148634_26 (sequence is synthesized)
atcctacgataaaaattttttgggaagtatttcacgaattaccattggaaaagaagaaacagtttctgttatttttgacaggtagtgatcgcattcctattcttggtatgaagagtctga

SEQ ID NO: 412195 - DNA, 120 bp, Artificial Sequence
  ENSG00000148634_27 (sequence is synthesized)
aactagtcatccagtccacaggaggtggtgaggagtatctcccagtttcccatacttgttttaatcttctggatcttccaaaatatacagaaaaagaaactctacgctctaaactgatcc

SEQ ID NO: 412196 - DNA, 120 bp, Artificial Sequence
  ENSG00000148634_28 (sequence is synthesized)
aagctattgatcacaatgaaggcttcagtttaatataactttggagttataactattcagtttagtgcaaaagcattaaactatttgtgtttttcttgtggtgatgaattcagcaaggtg

SEQ ID NO: 412197 - DNA, 120 bp, Artificial Sequence
  ENSG00000148634_29 (sequence is synthesized)
acagaggtactattataattcttacttgcagaatgttcaatctacgagtgttcatggaagccaaaaaatattaaaggaaaatgaacaaactgttaatattattgtacagaaccatggatt

SEQ ID NO: 412198 - DNA, 120 bp, Artificial Sequence
  ENSG00000148634_30 (sequence is synthesized)
ttttttgaccatcttctaataaacatagcaagtattatgaatacattaaagttttactaacatgaattttaagagtttgcatatttcagaaatgatctggtgtgagtgcatggaaatatt

SEQ ID NO: 412199 - DNA, 120 bp, Artificial Sequence
  ENSG00000148634_31 (sequence is synthesized)
gcttaatttttcttcaatcattgagtgaaaaacctttaactttggcctgcaatagtcatttgattattttttcattttgtaaataatgttaagttttgtaataaaatagttatgttctga

SEQ ID NO: 412200 - DNA, 120 bp, Artificial Sequence
  ENSG00000148634_32 (sequence is synthesized)
aaggtagcatggtggaaacactatcttttcttttttgctagaataagtgtctttgtgcaaacctaaatcacagatagggaatatactacataacctgcagttcttttctttgtgaatcct

SEQ ID NO: 412201 - DNA, 120 bp, Artificial Sequence
  ENSG00000148634_33 (sequence is synthesized)
gacacactgatagatgggggattgtcgatcagagaacttattaatatttagtactggaagaactctgtctccacagttgccagtaataaaaagaaacattggctactatgagcaccaatc

SEQ ID NO: 412202 - DNA, 120 bp, Artificial Sequence
  ENSG00000148634_34 (sequence is synthesized)
actgggttatagctttcaaaattattgatgctgcagtgctttagagctatttccttgaatttaagaaacaaatcttaacagttttatggtgctgatgcttagttgtctcatgccattaaa

SEQ ID NO: 412203 - DNA, 120 bp, Artificial Sequence
  ENSG00000148634_35 (sequence is synthesized)
ttgtaaaagtgagttgatgcaatacatgtgactttctgctataatgcaaatatttattttttaaatttattttaaaatgccgtgaaaactgtttaataaagatttattgttttaatattt

SEQ ID NO: 412204 - DNA, 120 bp, Artificial Sequence
  ENSG00000148634_36 (sequence is synthesized)
aggaatttcaagagcattacacaataactcatggttcctttcaaaatgcttgtgacacaatttgcaagaattatcctcatcttaggggataaatttacggagaaatggcagcacacgttg

SEQ ID NO: 412205 - DNA, 120 bp, Artificial Sequence
  ENSG00000148634_37 (sequence is synthesized)
tttttttttttttgtatctagctcttgtttactgattttagcataaatttttggtacgctaaaattgagcttgtatgaaaaaaaataatatgacctatgtgcatatagtaggccatcaat

SEQ ID NO: 412206 - DNA, 120 bp, Artificial Sequence
  ENSG00000148634_38 (sequence is synthesized)
agtgtgctggaaagttctacagatttcgccatcagactatccattcctattcttgaaaaatctgcagtgctggagttatttgcaattcccccccgccaatctttaaataattgtctcaga

SEQ ID NO: 412207 - DNA, 120 bp, Artificial Sequence
  ENSG00000148634_39 (sequence is synthesized)
gatatagatagatatagattgcccacgggtgatttttttaatcccggttaccacttgtaataaaagaggttgaattttggagagaattgatatttaaattgcatgtttttttttctgtat

SEQ ID NO: 412208 - DNA, 120 bp, Artificial Sequence
  ENSG00000148634_40 (sequence is synthesized)
agggcgctttctccgcgcttcctgggggtgaggggcgtggggcgagggcagggctgtggctccctggccccggggctggaatgtctcatctgcctggggatgggcttctctcaggttgag

SEQ ID NO: 412209 - DNA, 120 bp, Artificial Sequence
  ENSG00000148634_41 (sequence is synthesized)
gccgcgcactgccaagcctcggccgccggcctctgaagctgttgcgagcggccggttgcggtagtcgtctgcttggctgcgaggttggataagaactccattttctgttgatgtggagac

SEQ ID NO: 412210 - DNA, 120 bp, Artificial Sequence
  ENSG00000148634_42 (sequence is synthesized)
gagggtttttttttttaattgtttctttgatgtttctggacagtaaatatttgaaattttcctaggatcagtaatgaaggtacacaaagtactttgggtagctataaagaagactgctgc

SEQ ID NO: 412211 - DNA, 120 bp, Artificial Sequence
  ENSG00000148634_43 (sequence is synthesized)
atgtgatatgtatattcttatgagaacatttataaaaaaaggttgcagtgaaaatggaataacttaacctataatcattttatatattaaaaattgtataagcctctttcattacagaaa

SEQ ID NO: 412212 - DNA, 120 bp, Artificial Sequence
  ENSG00000148634_44 (sequence is synthesized)
tattcaatctttataaaccgttttactagtttacttgataagatgttggtttgtttcaaaatcttgtttcattatatgtcccctttttatatgcttggtaagagatggaagtcactagag

SEQ ID NO: 412213 - DNA, 120 bp, Artificial Sequence
  ENSG00000148634_45 (sequence is synthesized)
gtgagagatgttaaaagtaggaagcatttgatctcgttaggaagaagatgtgaaatttccttgaagaaagtttcaataataaggtattaaacatgttcctggggttggtcaccattatct

SEQ ID NO: 412214 - DNA, 120 bp, Artificial Sequence
  ENSG00000148634_46 (sequence is synthesized)
cctattcctctttcttttccccttcctatcaccctttcccatccattttatgttgagagttctttcatttatagagaggattttttaaactaattcatattatgactttaaagggttaca

SEQ ID NO: 412215 - DNA, 120 bp, Artificial Sequence
  ENSG00000148634_47 (sequence is synthesized)
gtaagtttgctttatcatttgatcctgtaaataaaaaagattttgagctgcttcctctggtatagaatatctgactataccaactaaggattaaggaaaggatgaaaagaaagcttgaat

SEQ ID NO: 412216 - DNA, 120 bp, Artificial Sequence
  ENSG00000148634_48 (sequence is synthesized)
aatagtctaaaaatattttaaaaaattaaaaaccttcaaatcttggtaaccatttttattctgttcaaataaatgcatttggtattctaaatatttttgtagtgttctatactaacagct

SEQ ID NO: 412217 - DNA, 120 bp, Artificial Sequence
  ENSG00000148634_49 (sequence is synthesized)
agctagtaagccaattttttggaggtctttgttaaaacgataagttaataacttggtgattttaccatgggatattccattttagaacaagaactcagggagaaccataataaaagaaca

SEQ ID NO: 412218 - DNA, 120 bp, Artificial Sequence
  ENSG00000148634_50 (sequence is synthesized)
aaagttttaaatggtaaaagtcaaatccttggttcgtgagcacataccatgatcacttagttaagtgaatttgtgtaatgcttccttagccagatcattccttattctttgttttttatt

SEQ ID NO: 412219 - DNA, 78 bp, Artificial Sequence
  ENSG00000148634_51 (sequence is synthesized)
cttattctttgttttttatttagtgcagtggtacagtctcagctcactggaacctctgccttccaggttcaagtgatt

SEQ ID NO: 412220 - DNA, 120 bp, Artificial Sequence
  ENSG00000148634_52 (sequence is synthesized)
cactgcgcccagcctgttccttatactctttaaaggtttgtttttgctcctccctctttaccctcccctccagtgaatgttttttagaaaaaccaatgctcagatttatcagtattacta

SEQ ID NO: 412221 - DNA, 120 bp, Artificial Sequence
  ENSG00000148634_53 (sequence is synthesized)
ccgttctgtactggcttactctaatggtgttatgagttatacattatacattagtataaaaacattcaaaagggtactctttatgctcagtttattaagttttatgctgtacgggatact

SEQ ID NO: 412222 - DNA, 120 bp, Artificial Sequence
  ENSG00000148634_54 (sequence is synthesized)
gttaggtgctatgttaattcagtagcataggaattatagaatacctgtaactaataggtagaggttagcttgtttcagtcacagtagctttattgtagcattgctgttaaaatgttaatc

SEQ ID NO: 412223 - DNA, 120 bp, Artificial Sequence
  ENSG00000148634_55 (sequence is synthesized)
tatacccatgtatttatacctgtatgtatcaagttaattcagtaaataaggaattactactggatccctaacatataagatctgctttattacaatttgagaaattataaactttggact

SEQ ID NO: 412224 - DNA, 120 bp, Artificial Sequence
  ENSG00000148634_56 (sequence is synthesized)
tggagttgtcaaaatacatttgatgcttaccacacattttaaattaacaaaataaattaagagatggttagccagaaaataatgttgactattccttctgctgatttcaatttgaggatt

SEQ ID NO: 412225 - DNA, 120 bp, Artificial Sequence
  ENSG00000148634_57 (sequence is synthesized)
gaataataatcaccagattaacttttctgttgggaaaaattaatttatcattagggatcattgatttatctaccttgtcatttagagcaggtcagcagactatagcccattaatctcaaa

SEQ ID NO: 412226 - DNA, 120 bp, Artificial Sequence
  ENSG00000148634_58 (sequence is synthesized)
attttgatttgaaatctgggatctttggaggtgatttaagattatggtttggtaagagaatcttcattttctctctgggctaaagagtaattgggagagtcgtttaaattgtggaaaatt

SEQ ID NO: 412227 - DNA, 120 bp, Artificial Sequence
  ENSG00000148634_59 (sequence is synthesized)
gctttaaatttccattattggttttatttctgttacagataagaactccattttctgttgatgtggagacatagggtacctccaactttccggggtttcagaagagaattttttattgaa

SEQ ID NO: 412228 - DNA, 120 bp, Artificial Sequence
  ENSG00000148634_60 (sequence is synthesized)
caggcatgagccactgctcctggcctaagatgttttttaaataatgtttttaactaaattttaagaatgtttttaactaaagttatttatatttggaataattcgttaatgatttgtgtc

SEQ ID NO: 412229 - DNA, 120 bp, Artificial Sequence
  ENSG00000148634_61 (sequence is synthesized)
tgtcatttccccaacccctttttaaatttgtgaatttgaggactggattaaaagataaaaagttgttggatcttatttattttaaagtcttctggtaattgagcaagttggttatatttc

SEQ ID NO: 412230 - DNA, 120 bp, Artificial Sequence
  ENSG00000148634_62 (sequence is synthesized)
tggtaattgagcaagttggttatatttctgggacaatgtaataaacatagttcatttcccaggaggtttttgttttgttttgttttgtttcgttttgtttgagacagagtctcactctgt

SEQ ID NO: 412231 - DNA, 71 bp, Artificial Sequence
  ENSG00000148634_63 (sequence is synthesized)
gtgggactataggggcgtgccaccatgcccgggtaattttttatatttttagtagggacggggtttcaccg

SEQ ID NO: 412232 - DNA, 120 bp, Artificial Sequence
  ENSG00000148634_64 (sequence is synthesized)
caagaactttaaacttgtgtcagaaagcacatggaatggagggaactaagaattgtttctttacataggttggctttataaatatacatattccataactaataaggaatgaaggagaaa

SEQ ID NO: 412233 - DNA, 120 bp, Artificial Sequence
  ENSG00000148634_65 (sequence is synthesized)
gaggtagccttattaaggataaattattctcgagattcataataacctactggaggacttggcctgacaatgtagtgaatagatttaacctgtggcctattgaaaagaggtgtttctgtt

SEQ ID NO: 412234 - DNA, 120 bp, Artificial Sequence
  ENSG00000148634_66 (sequence is synthesized)
ctggactttttagggaccacacagaaagatttaactgaattcctttattatactaaaggtgcagattatgttcatgttcatctctgttgtcttgtatatgtatgtccttttctatcacta

SEQ ID NO: 412235 - DNA, 120 bp, Artificial Sequence
  ENSG00000148634_67 (sequence is synthesized)
gaagtgaatgtctgtttcactttcatgtttttttcttcataagaactttaaaatactttttaagctaatgtctcaatttttaaatttatagctaacaaatatatttaatcttcagtgcgc

SEQ ID NO: 412236 - DNA, 120 bp, Artificial Sequence
  ENSG00000148634_68 (sequence is synthesized)
tagaccaatccatttaaatgaattgttgtttttttatactttcaaattcagttctgaagattttaagtatgggaagtatacttttctttacaagatccttttcttactgtgtatctaatc

SEQ ID NO: 412237 - DNA, 120 bp, Artificial Sequence
  ENSG00000148634_69 (sequence is synthesized)
ataggtataatttggtgaccatggttatgttttgcacattgatttccatttgtttcatgttagaaacagtactaaactgttctgtgaccataatttgtaaataaagtggtgttctgttta

SEQ ID NO: 412238 - DNA, 120 bp, Artificial Sequence
  ENSG00000148634_70 (sequence is synthesized)
aaaacaagccctgttatctaaaaaacagttttttgtgttttacaacattctttcaaatggagtatctcatttaattctcacaacagttgtatgtagctaaggcaggtatcatggtccgca

SEQ ID NO: 412239 - DNA, 120 bp, Artificial Sequence
  ENSG00000148634_71 (sequence is synthesized)
ttttacagatgaggacactgaggttaaaagagattaagagactaatagggtcacttggctagcacatcttgagaccaccctaaatcttgtggtttttatccttaatctcacaaatctttt

SEQ ID NO: 412240 - DNA, 120 bp, Artificial Sequence
  ENSG00000148634_72 (sequence is synthesized)
cctttgctacatttagaaggtaaaagaatatttgttcacctttgaggaagctggtttccatcagtattttattgtaattctgagggttttttattttttatatttttttgagatggggtc

SEQ ID NO: 412241 - DNA, 120 bp, Artificial Sequence
  ENSG00000148634_73 (sequence is synthesized)
ggttttttattttttatatttttttgagatggggtcttattctgttgcttagggtagagtgcagtggcgtgataatagctcactgtagccttggactcctgggctcaagtgatcctcctg

SEQ ID NO: 412242 - DNA, 73 bp, Artificial Sequence
  ENSG00000148634_74 (sequence is synthesized)
atttttttatgtttgttagagaagggggtctccctatgttgcccagtctggtctcaaactccagtcctcaagc

SEQ ID NO: 412243 - DNA, 120 bp, Artificial Sequence
  ENSG00000148634_75 (sequence is synthesized)
ctatgttgcccagtctggtctcaaactccagtcctcaagctatcctcctgtcctggcttccccaaattgctgggatttatagggatgagctactgtggcagccaagaaaaatctttaaaa

SEQ ID NO: 412244 - DNA, 120 bp, Artificial Sequence
  ENSG00000148634_76 (sequence is synthesized)
aattactatcttataactaagcttatacaatgaagacagcatattttattgtcttcccccttgtacacaaacttaaaaatcattttaagaactgataagaagatcgagagttctattttc

SEQ ID NO: 412245 - DNA, 120 bp, Artificial Sequence
  ENSG00000148634_77 (sequence is synthesized)
aagatgtaatattgtaccaacaaaagctaaaaaattcaaatatgtatagtgtattactgaatggaagactaactcgattggcagagtttataggtaatagttttaatagtatgataaaat

SEQ ID NO: 412246 - DNA, 120 bp, Artificial Sequence
  ENSG00000148634_78 (sequence is synthesized)
ttattgtggtttatgttgaactctttttaaagatgatgagcattgattctttgttttccatatcctcgaatggtaatttctactgttgagtcattccaataaaagcattttggtcacata

SEQ ID NO: 412247 - DNA, 120 bp, Artificial Sequence
  ENSG00000148634_79 (sequence is synthesized)
gtatatgtatctaataaaaaaagaaacaattgcttggttttgaaatgagaaagttttttcagaacttttatccagaacttactttttaaataataacacattgcaaaggagtgctatata

SEQ ID NO: 412248 - DNA, 120 bp, Artificial Sequence
  ENSG00000148634_80 (sequence is synthesized)
ttttacaatatttatatgcaaacattctactcttttaccaaagccaaaccaaagaaatggattacactgtaaaacaaaacaaaacaagacaaaaaaaacctacaagtgtgaaatggattt

SEQ ID NO: 412249 - DNA, 120 bp, Artificial Sequence
  ENSG00000148634_81 (sequence is synthesized)
ttaactcttttattttccatgaggttgcctcttatttctccagtgttgaaaatactggcattcttcatactggaactcctaagaatgcattattgttgtgaaattggtgcttcaagacta

SEQ ID NO: 412250 - DNA, 88 bp, Artificial Sequence
  ENSG00000148634_82 (sequence is synthesized)
tgtagcctgaggcaggtggattccctgagctcgggatttcaagaccagcctcggcaacatgacgaaatcccatctctactaaaaatac

SEQ ID NO: 412251 - DNA, 120 bp, Artificial Sequence
  ENSG00000148634_83 (sequence is synthesized)
gattatgtgtttacttttatttcagatttttaatataaatgtgggtgcgtacatctttttatgcagctaagtctttaataactagacactatcccattaaaatagtaccatggtcttata

SEQ ID NO: 412252 - DNA, 120 bp, Artificial Sequence
  ENSG00000148634_84 (sequence is synthesized)
caaaatatttaggtttactactcttatttgctagccatttgtgtatacttgaggcccacttttctgtacccaggtaatttaatatgtgtgcagcagttatataatagaagggtgagtaac

SEQ ID NO: 412253 - DNA, 120 bp, Artificial Sequence
  ENSG00000148634_85 (sequence is synthesized)
ttttcattgcttgctaggcaccagctgtaagctccttgtggatgggtgctcttgtcagtcaaccagcacctctgacagtgtctagaatatgtctagtaagcactaaaaaagtacagtagt

SEQ ID NO: 412254 - DNA, 120 bp, Artificial Sequence
  ENSG00000148634_86 (sequence is synthesized)
ttttgaatggcaatctggttagtgcacgctgtttttaggatactcccaccttccggaatcaggttgcttctagacatcttttccttccctagtgtacttgggtctggactgggagagact

SEQ ID NO: 412255 - DNA, 120 bp, Artificial Sequence
  ENSG00000148634_87 (sequence is synthesized)
cattgacttttctcctgagtcactttgaggctgggtcaggtttatagccattctatagatttaggtctattcatttgcttattcaacaaacaatgagaatctgttatataacaggcactg

SEQ ID NO: 412256 - DNA, 120 bp, Artificial Sequence
  ENSG00000148634_88 (sequence is synthesized)
atttaggtattggaaatacagtggtgaaccagacagagccttgtttctcatggaattcgtaatctactgggcaagattggcaatagtcaaacaaagcaaaaaataccagctaataatatg

SEQ ID NO: 412257 - DNA, 120 bp, Artificial Sequence
  ENSG00000148634_89 (sequence is synthesized)
tattattaaaatgaggggacttagtaaagataggtttcagaaaagacttatctaatgaagtatgagtactaatctgaatgacaaggagcagccctttaagatcagggcagagagaatttc

SEQ ID NO: 412258 - DNA, 120 bp, Artificial Sequence
  ENSG00000148634_90 (sequence is synthesized)
aagaacaacgaacatttggtaaaatacctgaggtgaaaacaagcttgacatgattgaaggacagaaaaaagccagcattaggccaggtgtggtggctcacgcctggaatccctgcatttt

SEQ ID NO: 412259 - DNA, 120 bp, Artificial Sequence
  ENSG00000148634_91 (sequence is synthesized)
gtggttagtagcgataaatgctctgaaggaaaaaacatacagtactgtgagaatgtagtattttgaaatgtttcatttgcaaaattgtacttgatactcagaatagtgtttttttttcct

SEQ ID NO: 412260 - DNA, 120 bp, Artificial Sequence
  ENSG00000148634_92 (sequence is synthesized)
aaaatacttaatatgctgaacaggtcaatgtatcatctgcctagtatgcataaacaataacagtaaatgtttagtaatttgagcacagttgggtatgttcatgtattttttattccttac

SEQ ID NO: 412261 - DNA, 120 bp, Artificial Sequence
  ENSG00000148634_93 (sequence is synthesized)
tctgtttgcattgccagtgtttgattttgctatttcaaagaaatggcattttgttgagtttgaaaatttgaaggtgcattggatcctgctaatttgttggattctgctaaattgtagcag

SEQ ID NO: 412262 - DNA, 120 bp, Artificial Sequence
  ENSG00000148634_94 (sequence is synthesized)
tacagctctcaggttttgtagttaagagcataacttcactaaataaaaatatttttaatacaataatatggaatcagagtaactctcctttttcctgctcaaactttgatttgctgaagc

SEQ ID NO: 412263 - DNA, 89 bp, Artificial Sequence
  ENSG00000148634_95 (sequence is synthesized)
tgaatgagcatcaatgcctactaccaccacaaaaaagaactcagtgaaaattcttctcaaaggaattatgtgtttcctgatggaactac

SEQ ID NO: 412264 - DNA, 120 bp, Artificial Sequence
  ENSG00000148634_96 (sequence is synthesized)
attcttctcaaaggaattatgtgtttcctgatggaactactctcctgcctccatgtagtagttttactgaaataaccaaatggtgattgaaacctgtctagattcaaccaccaatttaca

SEQ ID NO: 412265 - DNA, 120 bp, Artificial Sequence
  ENSG00000148634_97 (sequence is synthesized)
gaacagaagaccaagccaaatgttaggagaaaccacaaagataaagtcagcaaaatccagtctgcataaagttgtacaggacaaatgactaggtttctcaaactttttcgagtagtgatt

SEQ ID NO: 412266 - DNA, 120 bp, Artificial Sequence
  ENSG00000148634_98 (sequence is synthesized)
agcctgaccaaaatggtgaaaccccatctgtactaaatacaaaaattagatgtggtggtgggcgcctgtaatctcagttactcgggaggctgaggttgcagtaagccgagatcatgccac

SEQ ID NO: 412267 - DNA, 89 bp, Artificial Sequence
  ENSG00000148634_99 (sequence is synthesized)
gtaagccgagatcatgccactgcactccaacccgggcgacagagtgagacctgtctcaaaaaataaaaattctgacactttgggaggct

SEQ ID NO: 412268 - DNA, 85 bp, Artificial Sequence
  ENSG00000148634_100 (sequence is synthesized)
aaaattaatcaggagtggtggcctgggacaatcgcttgaacttgggagatggaggttgcggtgaaccaagatcgcgccactgcac

SEQ ID NO: 412269 - DNA, 76 bp, Artificial Sequence
  ENSG00000148634_101 (sequence is synthesized)
taaataaaaataaaaaaaggaaattaaggaaacttaacttttggtacctaactcatagcctccagaaacccattca

SEQ ID NO: 412270 - DNA, 120 bp, Artificial Sequence
  ENSG00000148634_102 (sequence is synthesized)
acttttggtacctaactcatagcctccagaaacccattcatgtactgtagattagtcaaccatcttgtagggaattgtttatagagggcacaatcacattttaagagtaaataaataaca

SEQ ID NO: 412271 - DNA, 120 bp, Artificial Sequence
  ENSG00000148634_103 (sequence is synthesized)
tcctgctaaatcttttgaggaaatgagcaattccatatagatttgtgagaattatttagaaaaaagattttaggttgaataattggcttatttaataaagatttacccttttattctatt

SEQ ID NO: 412272 - DNA, 120 bp, Artificial Sequence
  ENSG00000148634_104 (sequence is synthesized)
cttaaaacttgtttttggccttagggtattcttgtgacttacggaaaatttgatagtaattatcaaattattgttctaaactctgaagctcatttttggtataacctagataacaattgc

SEQ ID NO: 412273 - DNA, 120 bp, Artificial Sequence
  ENSG00000148634_105 (sequence is synthesized)
atatttgtatggacaggtatttactgatttcttttacaaataaaacattgtgcttgcttgtaaggaataatcaaggaaattaacatgtggtcatttccttgaaaagaatggataattcta

SEQ ID NO: 412274 - DNA, 120 bp, Artificial Sequence
  ENSG00000148634_106 (sequence is synthesized)
tagcagccatggtcacaaataatacaaggtgaagaattagtcaactaaggaatgggaataggataacagggatagactatggactagccaagcaatatttttggtaatagatactctttc

SEQ ID NO: 412275 - DNA, 120 bp, Artificial Sequence
  ENSG00000148634_107 (sequence is synthesized)
cagtttggggagcagaagaaaagaaaaaaaagaggcccggaatatctttttcaaaagaaactttgttgccctttctttattcctaataaatttgcttattaatgtattcactttggggcc

SEQ ID NO: 412276 - DNA, 120 bp, Artificial Sequence
  ENSG00000148634_108 (sequence is synthesized)
taatttggcttttactgacaaatagctgccaacaaagagctgtatgtattatcttgtacacctatattgaaaaaaaaaattctgcattatgaaatatttactccagaagttttaattttt

SEQ ID NO: 412277 - DNA, 120 bp, Artificial Sequence
  ENSG00000148634_109 (sequence is synthesized)
gtttgctgtttctttttaagaataattttttttttttttagagatgggtcttgctatgttgcttgctggagtgcagtggctagtcacagatgcagtcatagcatactgcagctttgaact

SEQ ID NO: 412278 - DNA, 87 bp, Artificial Sequence
  ENSG00000148634_110 (sequence is synthesized)
tgtagcccagttcaattctttcttttttttttttttttgaggtggagtcttatgctctggcccaggctggagtgcagtggggtgatc

SEQ ID NO: 412279 - DNA, 120 bp, Artificial Sequence
  ENSG00000148634_111 (sequence is synthesized)
actcttgatttttatttccttctagctatcttttgtagcttttgttctattttttttaaatcatctttggtttaaactgaaatatactgagatgcagattagaaaaagctttttttcttg

SEQ ID NO: 412280 - DNA, 120 bp, Artificial Sequence
  ENSG00000148634_112 (sequence is synthesized)
gtgcagggcagaagaaaggcttgtaaacttcaccaaatgctgcttatgcttgtgggatcgtttaatgttcatcatttggtcagtctcatccccatagcagtcagaatatttcaagtcact

SEQ ID NO: 412281 - DNA, 120 bp, Artificial Sequence
  ENSG00000148634_113 (sequence is synthesized)
ttataccatgaagtccatgaatgggaggccttattaaataagatgattatgtgaaaatctaatggcatattgatgctctgaaatatgttatgtaaatcttggcttttaattttttacatt

SEQ ID NO: 412282 - DNA, 120 bp, Artificial Sequence
  ENSG00000148655_0 (sequence is synthesized)
gttgaagaaagaggatctggctgaaagacccgcaactttcacttgttgagaacctttagccagcgccggcgtgcatgtgttttagttttattctttttcccttgcccccaaagccgtgga

SEQ ID NO: 412283 - DNA, 120 bp, Artificial Sequence
  ENSG00000148655_1 (sequence is synthesized)
gtacctgctgttgctctcatgcctcttgccaacagtggcatctgctcagtgtagccatcaagaatttgaatgtcaatatctttgccttgaaatgaatggaaaagtatttgtcactcagcg

SEQ ID NO: 412284 - DNA, 120 bp, Artificial Sequence
  ENSG00000148655_2 (sequence is synthesized)
gcaatcattcttcaaataaaaggtcactggaaggactgagcgcattcaggagcctggaggaactcatcttggacaacaatcagctgggggacgaccttgtgttgccagggttacccagac

SEQ ID NO: 412285 - DNA, 120 bp, Artificial Sequence
  ENSG00000148655_3 (sequence is synthesized)
ttggcagaagtgacaccagctctggagtacctcagtctgctgggcaacgtggcctgtcccaacgagctggtcagcttggaaaaggatgaggaagactacaagagatacagatgctttgtt

SEQ ID NO: 412286 - DNA, 120 bp, Artificial Sequence
  ENSG00000148655_4 (sequence is synthesized)
ctgtacaagctgcccaacttgaaatttctggatgcccagaaagtaaccagacaagaacgagaggaggcgttggtcagaggagtcttcatgaaggtggtgaagcccaaggcttctagtgag

SEQ ID NO: 412287 - DNA, 120 bp, Artificial Sequence
  ENSG00000148655_5 (sequence is synthesized)
gacgttgccagctccccggagcgccactacacgcccttgccttctgcttccagggaactcaccagtcaccaaggtgtcctggggaagtgtcgctacgtttactatgggaaaaactcagag

SEQ ID NO: 412288 - DNA, 120 bp, Artificial Sequence
  ENSG00000148655_6 (sequence is synthesized)
ggcaacaggtttatccgagatgaccagctctgaagccaacttctgtataccttcacccatttcatgaaaataaaatcaaaagggaaatcaaaaataaagaaaacgctaaagaaaaaacaa

SEQ ID NO: 412289 - DNA, 120 bp, Artificial Sequence
  ENSG00000148655_7 (sequence is synthesized)
gctcccctgccgcgctccccgctgctgccgccgcgcccccgcgctccgtcccgcgcgcccgcagcgtcctggccgccatggccgggctcgtggtgcgtggaactcaagtgtcctacatag

SEQ ID NO: 412290 - DNA, 120 bp, Artificial Sequence
  ENSG00000148655_8 (sequence is synthesized)
gtggaactcaagtgtcctacataggccaggactgcagagaaattccagagcaccttggcagggactgtggacatttcgcaaagaggcttgatctgagctttaaccttctgaggtcactgg

SEQ ID NO: 412291 - DNA, 120 bp, Artificial Sequence
  ENSG00000148655_9 (sequence is synthesized)
gccttagactgagtggtcacatagagattgacatgattgcccttaagcaggtctcatccaccagggtgacagacagcggtggcaaagcaacagggctgacagcatgaacaccatgataga

SEQ ID NO: 412292 - DNA, 120 bp, Artificial Sequence
  ENSG00000148655_10 (sequence is synthesized)
ttgcctggtcctgccactgctcacaggggagcagaggtcacacctggggcctccctggacatgctcagtggctgcagtcaagtgagaaagactgtcctcagctcgcctattgaattgaaa

SEQ ID NO: 412293 - DNA, 120 bp, Artificial Sequence
  ENSG00000148655_11 (sequence is synthesized)
tccctctgataccatcgtgctgtgggcttatttttagtgaaatagtcacagtttaggggatggccattctccctcactccttttaaatcttaacgtcctgtattctgcatatacatagct

SEQ ID NO: 412294 - DNA, 120 bp, Artificial Sequence
  ENSG00000148655_12 (sequence is synthesized)
cccgtctcttcccctccaccttcctttagcatcgattttatgacaggtggtgcatttcagtttgcagtttttcggagaacaaggtataacttcccagccaggtcatacatttatggctgg

SEQ ID NO: 412295 - DNA, 120 bp, Artificial Sequence
  ENSG00000148655_13 (sequence is synthesized)
cttcatgttgctacaatccctttattggcgtaaatagctttccctaaatccctgactacaaaagcgtggacttttatcttgtttcattcaactctaaatccacttcttgccctgaatatg

SEQ ID NO: 412296 - DNA, 120 bp, Artificial Sequence
  ENSG00000148655_14 (sequence is synthesized)
atgcagtgtaaggcataaggcatctttctcagcatgagggtttggttgcaccagggactcttatttattaatttatttttaaccgtacacacttccagtgatgcctgtggccatacttgt

SEQ ID NO: 412297 - DNA, 120 bp, Artificial Sequence
  ENSG00000148655_15 (sequence is synthesized)
gcgtggggctggcttgctcctttgggtgctatttaaagggagtgaggtgatgaaagatagagtgaagggtcaggaggttaaaaaacaaaattaagactgttgaaaacacccaccagacca

SEQ ID NO: 412298 - DNA, 120 bp, Artificial Sequence
  ENSG00000148655_16 (sequence is synthesized)
atcaaatccacaggttgtgagacagtgctctgtcttcctgtatgcttggctgtgcactagcactaatgtcacaaggaacataagtgtgatcattgctagttgggtgactcaaagtttatc

SEQ ID NO: 412299 - DNA, 120 bp, Artificial Sequence
  ENSG00000148655_17 (sequence is synthesized)
taacttgctggtgcaccagtcaaatcactctagaagatgttcaaaaggttgattgattgttcttgacacgatagtgtttatttttctgcttcttccatttagaccaagtgttcattgtcc

SEQ ID NO: 412300 - DNA, 120 bp, Artificial Sequence
  ENSG00000148655_18 (sequence is synthesized)
tcccagtattaggtcagtttgatgacagcaaaacctgaaagagaatccctccaagttatagatactgagggactaggagctgctattgtaaaactatggggactcagaatccctaagctg

SEQ ID NO: 412301 - DNA, 120 bp, Artificial Sequence
  ENSG00000148655_19 (sequence is synthesized)
cccaaggagaacctactttctcagctctagcccgtttacatagcctctggcccactgagtcaacacaggccttgaatgacatgtattgaggctggcaggagtccctgtttgagattacac

SEQ ID NO: 412302 - DNA, 120 bp, Artificial Sequence
  ENSG00000148655_20 (sequence is synthesized)
aacctttgttaatcagttctttagacaagttaacattaaaatcctcaaaaccatgaaaaattggagaatgttgaatgtttgcatttatctctcaaatccattagtaactggatttgagta

SEQ ID NO: 412303 - DNA, 120 bp, Artificial Sequence
  ENSG00000148655_21 (sequence is synthesized)
ccttttctctgtttgatctacaaaacagcactggaaaaatgctttaaattatctgcatttggtcccaccctgggtcattgtttagaagcatcaacacatgttttctccctggcataatat

SEQ ID NO: 412304 - DNA, 120 bp, Artificial Sequence
  ENSG00000148655_22 (sequence is synthesized)
gggcagccagaattctgtgcaagggcagctagacgagtcagatgtcatatccaatctagccacacatatatccttgtctttataaaaggctttaaccctgcctcaaacaataaaaaagca

SEQ ID NO: 412305 - DNA, 120 bp, Artificial Sequence
  ENSG00000148655_23 (sequence is synthesized)
cttgtgaactgaccacagaatttttccatctttatttttcttacttgtttactttttttaatgtcagaaccatttgtatcatgcgcaggaatgtctccctcaatgtgagctttggaggca

SEQ ID NO: 412306 - DNA, 120 bp, Artificial Sequence
  ENSG00000148655_24 (sequence is synthesized)
aaacatatttttggagtgagttattgaccacattgtttccctctctttgggttgtttattttcttccagaatggtgtaataactttaattaagattagctttaattataaattacctaaa

SEQ ID NO: 412307 - DNA, 120 bp, Artificial Sequence
  ENSG00000148655_25 (sequence is synthesized)
ggccatcactaaggtatattcatcttattgatagaattatagtcagctttgtttctcttaagcagggatagtgataatgaagtgctgggttggttacagttccactgtgtgttaaccaaa

SEQ ID NO: 412308 - DNA, 120 bp, Artificial Sequence
  ENSG00000148655_26 (sequence is synthesized)
atttgctgtgctagagctagactttggtctgaattggcagaggtagaacccatgttgcatgtttatcctaaatctgtaggaatttcccaaaccttgtttttcaaagttgagaagtagaaa

SEQ ID NO: 412309 - DNA, 120 bp, Artificial Sequence
  ENSG00000148655_27 (sequence is synthesized)
gtaataaattcaatcagggcccagacatgttttgtaccccctttaccctttggtctttcttccttttatcctattccactgagcttgttctttggggattgtggtgcctgacatcactgt

SEQ ID NO: 412310 - DNA, 120 bp, Artificial Sequence
  ENSG00000148655_28 (sequence is synthesized)
ctttcctcccctaggacactgacttgagtggagagacctcggcaattcaaggctgtcctgcagctctctgttgcctcagcaatgtcaggacgactgtctctttcctaagtaacataattt

SEQ ID NO: 412311 - DNA, 120 bp, Artificial Sequence
  ENSG00000148655_29 (sequence is synthesized)
taaagaacaatttgttcctcagggaataatgtcttggattgtggggaatcctattaaaagtacaactattgcagtcatttgcttttacttttaccagcctcactcataaaccctccatct

SEQ ID NO: 412312 - DNA, 120 bp, Artificial Sequence
  ENSG00000148655_30 (sequence is synthesized)
gtttgttgctttaaatagaagcacattataagagattatcacttgatcaggctgcatgtctgagtgttgtgtgttttcacatactcatgtatactaaggaataaaagaaagcaaaccaca

SEQ ID NO: 412313 - DNA, 120 bp, Artificial Sequence
  ENSG00000148655_31 (sequence is synthesized)
ggaacaagcttgaaatagccaagagctagacacaaaagccagtgctgcagtagcctagagactgtggaagagaggaggcttggggcatttactaagtgcagacgtggaaatgttggcatg

SEQ ID NO: 412314 - DNA, 120 bp, Artificial Sequence
  ENSG00000148655_32 (sequence is synthesized)
tggatagaccctgtaccaaaaacccagcagaagattcagagtccctgagatgcttcctcctcatcttcttcgccaagcacctcttgtcactgatcttggaagttagaggtgggaaaaggc

SEQ ID NO: 412315 - DNA, 120 bp, Artificial Sequence
  ENSG00000148655_33 (sequence is synthesized)
agatgccactgtgggcactggcagaactgggccccctgtagatcagatagaaacaaatgggaagctctgggccattgccttcaaaaggctttcttattccagagaggtttttgacataat

SEQ ID NO: 412316 - DNA, 120 bp, Artificial Sequence
  ENSG00000148655_34 (sequence is synthesized)
cctcccctccccaccagcctctgctgtgaccagcttcttacttgaattacccttcagctccctcgctcagcttcatgctcagcatttgcccagactctgacctcttctccattgggatct

SEQ ID NO: 412317 - DNA, 120 bp, Artificial Sequence
  ENSG00000148655_35 (sequence is synthesized)
ttttcttggtctcttggttccagactcaccctcatccctaccttgccttttgttttcctcccaatttcttggcttctggctctagacaggatatggctgttcctgctttcaaacctgtct

SEQ ID NO: 412318 - DNA, 120 bp, Artificial Sequence
  ENSG00000148655_36 (sequence is synthesized)
attattcccaacttaatctgtctgtcagtgacaccttctctcttgctttactgaaaggcatggcaccttaatctgtgagaggggtgggaagcttcagccttctacctggttctttagttt

SEQ ID NO: 412319 - DNA, 120 bp, Artificial Sequence
  ENSG00000148655_37 (sequence is synthesized)
ctctaacttaatccttcagaagatggcaagtctttacttttggattctggcaatgtggcccacactttcgtgttgaattacagtcatggtatgtagttttttttttgtttgtttgagaca

SEQ ID NO: 412320 - DNA, 120 bp, Artificial Sequence
  ENSG00000148655_38 (sequence is synthesized)
aatgggtgtgaatctctgtgtgctcatatacatatgcttgattatatgatcatctcgtggaggacatgtgacacgggaagacaatagggcacatgatatgctctttgatctaaggtgtcc

SEQ ID NO: 412321 - DNA, 120 bp, Artificial Sequence
  ENSG00000148655_39 (sequence is synthesized)
gcttctagtgaggacgttgccagctccccggagcgccactacacgcccttgccttctgcttccagggaactcaccagtcaccaagatttaaatattccagtgttgagaatccacagtaaa

SEQ ID NO: 412322 - DNA, 120 bp, Artificial Sequence
  ENSG00000148655_40 (sequence is synthesized)
aaatatggagaaaaatatagaggtgtcctggggaagtgtcgctacgtttactatgggaaaaactcagagggcaacaggtttatccgagatgaccagctctgaagccaacttctgtatacc

SEQ ID NO: 412323 - DNA, 120 bp, Artificial Sequence
  ENSG00000148655_41 (sequence is synthesized)
aacaaagaggtgaatgagcagaatgggtcatgtacatcccactgatgtgtgctgatgtgacaaagagagaaggcaggtagaagagctatctgaacgttgctaacagagggcctggggagg

SEQ ID NO: 412324 - DNA, 120 bp, Artificial Sequence
  ENSG00000148655_42 (sequence is synthesized)
agggacgggcacgaccgcatctgctcctctgtcctgtgtgcgtgtttggccacctgatgccaactccatgatggcacatttgtcttattaagtgagttggcttcctggtctgaaccctcc

SEQ ID NO: 412325 - DNA, 120 bp, Artificial Sequence
  ENSG00000148655_43 (sequence is synthesized)
ataagccctggctgggaattttcctcactgtgaccttgtgagcagtccctggttaccctcaaggattgtgccaagcaggctctgggttaacatcttggagagtacagagtaggctgataa

SEQ ID NO: 412326 - DNA, 120 bp, Artificial Sequence
  ENSG00000148655_44 (sequence is synthesized)
tcagcctatgctcaacagcacacccaagagttgaagatttctgatggcatccctggggtgctcagcagtggcctttgtctgcacccatcttcattacatgttaataccaccagagacact

SEQ ID NO: 412327 - DNA, 120 bp, Artificial Sequence
  ENSG00000148655_45 (sequence is synthesized)
gcttctagtgaggacgttgccagctccccggagcgccactacacgcccttgccttctgcttccagggaactcaccagtcaccaagatgaagtttcattcttgtcgcccaggctggagtgc

SEQ ID NO: 412328 - DNA, 120 bp, Artificial Sequence
  ENSG00000148655_46 (sequence is synthesized)
taattttgtatttttagtaaagatggagtttcttcatgttggccaggtgtcctggggaagtgtcgctacgtttactatgggaaaaactcagagggcaacaggtttatccgagatgaccag

SEQ ID NO: 412329 - DNA, 120 bp, Artificial Sequence
  ENSG00000148655_47 (sequence is synthesized)
atacaccccaaagaactgaaaacaagaactcaaacagatacttgtacacctatgttcatagcagccttattcacatggacaaaagatgaagtttcattcttgtcgcccaggctggagtgc

SEQ ID NO: 412330 - DNA, 120 bp, Artificial Sequence
  ENSG00000148660_0 (sequence is synthesized)
ctccccggtaaagtctcgcggtgctgccgggctcagccccgtctcctcctcttgctccctcggccgggcggcggtgactgtgcaccgacgtcggcgcgggctgcaccgccgcgtccgccc

SEQ ID NO: 412331 - DNA, 120 bp, Artificial Sequence
  ENSG00000148660_1 (sequence is synthesized)
gcccgccagcatggccaccaccgccacctgcacccgtttcaccgacgactaccagctcttcgaggagcttggcaagggtgctttctctgtggtccgcaggtgtgtgaagaaaacctccac

SEQ ID NO: 412332 - DNA, 120 bp, Artificial Sequence
  ENSG00000148660_2 (sequence is synthesized)
gcaggagtacgcagcaaaaatcatcaataccaagaagttgtctgcccgggatcaccagaaactagaacgtgaggctcggatatgtcgacttctgaaacatccaaacatcgtgcgcctcca

SEQ ID NO: 412333 - DNA, 120 bp, Artificial Sequence
  ENSG00000148660_3 (sequence is synthesized)
tgacagtatttctgaagaagggtttcactacctcgtgtttgaccttgttaccggcggggagctgtttgaagacattgtggccagagagtactacagtgaagcagatgccagccactgtat

SEQ ID NO: 412334 - DNA, 120 bp, Artificial Sequence
  ENSG00000148660_4 (sequence is synthesized)
acatcagattctggagagtgttaaccacatccaccagcatgacatcgtccacagggacctgaagcctgagaacctgctgctggcgagtaaatgcaagggtgccgccgtcaagctggctga

SEQ ID NO: 412335 - DNA, 120 bp, Artificial Sequence
  ENSG00000148660_5 (sequence is synthesized)
ttttggcctagccatcgaagtacagggagagcagcaggcttggtttggttttgctggcaccccaggttacttgtcccctgaggtcttgaggaaagatccctatggaaaacctgtggatat

SEQ ID NO: 412336 - DNA, 120 bp, Artificial Sequence
  ENSG00000148660_6 (sequence is synthesized)
ctgggcctgcggggtcatcctgtatatcctcctggtgggctatcctcccttctgggatgaggatcagcacaagctgtatcagcagatcaaggctggagcctatgatttcccatcaccaga

SEQ ID NO: 412337 - DNA, 120 bp, Artificial Sequence
  ENSG00000148660_7 (sequence is synthesized)
atgggacacggtaactcctgaagccaagaacttgatcaaccagatgctgaccataaacccagcaaagcgcatcacggctgaccaggctctcaagcacccgtgggtctgtcaacgatccac

SEQ ID NO: 412338 - DNA, 120 bp, Artificial Sequence
  ENSG00000148660_8 (sequence is synthesized)
ggtggcatccatgatgcatcgtcaggagactgtggagtgtttgcgcaagttcaatgcccggagaaaactgaagggtgccatcctcacgaccatgcttgtctccaggaacttctcagctgc

SEQ ID NO: 412339 - DNA, 120 bp, Artificial Sequence
  ENSG00000148660_9 (sequence is synthesized)
caaaagcctattgaacaagaagtcggatggcggtgtcaagccacagagcaacaacaaaaacagtctcgtaagcccagcccaagagcccgcgcccttgcagacggccatggagccacaaac

SEQ ID NO: 412340 - DNA, 120 bp, Artificial Sequence
  ENSG00000148660_10 (sequence is synthesized)
cactgtggtacacaacgctacagatgggatcaagggctccacagagagctgcaacaccaccacagaagatgaggacctcaaagctgccccgctccgcactgggaatggcagctcggtgcc

SEQ ID NO: 412341 - DNA, 120 bp, Artificial Sequence
  ENSG00000148660_11 (sequence is synthesized)
tgaaggacggagctcccgggacagaacagccccctctgcaggcatgcagccccagccttctctctgctcctcagccatgcgaaaacaggagatcattaagattacagaacagctgattga

SEQ ID NO: 412342 - DNA, 120 bp, Artificial Sequence
  ENSG00000148660_12 (sequence is synthesized)
agccatcaacaatggggactttgaggcctacacgaagatttgtgatccaggcctcacttcctttgagcctgaggcccttggtaacctcgtggaggggatggatttccataagttttactt

SEQ ID NO: 412343 - DNA, 120 bp, Artificial Sequence
  ENSG00000148660_13 (sequence is synthesized)
tgagaatctcctgtccaagaacagcaagcctatccataccaccatcctaaacccacacgtccacgtgattggggaggacgcagcgtgcatcgcctacatccgcctcacccagtacatcga

SEQ ID NO: 412344 - DNA, 120 bp, Artificial Sequence
  ENSG00000148660_14 (sequence is synthesized)
cgggcagggtcggcctcgcaccagccagtcagaagagacccgggtctggcaccgtcgggatggcaagtggctcaatgtccactatcactgctcaggggcccctgccgcaccgctgcagtg

SEQ ID NO: 412345 - DNA, 120 bp, Artificial Sequence
  ENSG00000148660_15 (sequence is synthesized)
ttgaggtttaaaacaattcaattacaaaagcggcagcagccaatgcacgcccctgcatgcagccctcccgcccgcccttcgtgtctgtctctgctgtaccgaggtgttttttacatttaa

SEQ ID NO: 412346 - DNA, 120 bp, Artificial Sequence
  ENSG00000148660_16 (sequence is synthesized)
gaaaaaaaaaaaagaaaaaaagattgtttaaaaaaaaaaggaatccataccatgatgcgttttaaaaccaccgacagcccttgggttggcaagaaggcaggagtatgtatgaggtccatc

SEQ ID NO: 412347 - DNA, 120 bp, Artificial Sequence
  ENSG00000148660_17 (sequence is synthesized)
ctggcatgagcagtggctcacccaccggccttgaagaggtgagcttggcctctctggtccccatggacttagggggaccaggcaagaactctgacagagctttgggggccgtgatgtgat

SEQ ID NO: 412348 - DNA, 120 bp, Artificial Sequence
  ENSG00000148660_18 (sequence is synthesized)
tgcagctcctgaggtggcctgcttaccccaggtctaggaatgaacttctttggaacttgcataggcgcctagaatggggctgatgagaacatcgtgaccatcagacctacttgggagaga

SEQ ID NO: 412349 - DNA, 120 bp, Artificial Sequence
  ENSG00000148660_19 (sequence is synthesized)
acgcagagctcccagcctgctgtggaggcagctgagaagtggtggcctcaggactgagagcccggacgttgctgtactgtcttgtttagtgtagaagggaagagaattggtgctgcagaa

SEQ ID NO: 412350 - DNA, 120 bp, Artificial Sequence
  ENSG00000148660_20 (sequence is synthesized)
gtgtacccgccatgaagccgatgagaaacctcgtgttagtctgacatgcactcactcatccatttctataggatgcacaatgcatgtgggccctaatattgaggccttatccctgcagct

SEQ ID NO: 412351 - DNA, 120 bp, Artificial Sequence
  ENSG00000148660_21 (sequence is synthesized)
aggagggggaggggttgttgctgctttgcttcgtgttttcttctaacctggcaaggagagagccaggccctggtcagggctcccgtgccgcctttggcggttctgtttctgtgctgatct

SEQ ID NO: 412352 - DNA, 120 bp, Artificial Sequence
  ENSG00000148660_22 (sequence is synthesized)
ggaccatctttgtcttgccttttcacggtagtggtccccatgctgaccctcatctgggcctgggccctctgccaagtgcccctgtgggatgggaggagtgaggcagtgggagaagaggtg

SEQ ID NO: 412353 - DNA, 120 bp, Artificial Sequence
  ENSG00000148660_23 (sequence is synthesized)
gtggtcgtttctatgcattcaggctgcctttggggctgcctcccttcttattcttccttgctgcacgtccatctcttttcctgtctttgagattgacctgactgctctggcaagaagaag

SEQ ID NO: 412354 - DNA, 120 bp, Artificial Sequence
  ENSG00000148660_24 (sequence is synthesized)
aggtgtccttacagaggcctctttactgaccaactgaagtatagacttactgctggacaatctgcatgggcatcacccctccccgcatgtaacccaaaagaggtgtccagagccaaggct

SEQ ID NO: 412355 - DNA, 120 bp, Artificial Sequence
  ENSG00000148660_25 (sequence is synthesized)
tctaccttcattgtccctctctgtgctcaaggagttccattccaggaggaagagatctataccctaagcagatagcaaagaagataatggaggagcaattggtcatggccttggtttccc

SEQ ID NO: 412356 - DNA, 120 bp, Artificial Sequence
  ENSG00000148660_26 (sequence is synthesized)
tcaaaacaacgctgcagatttatctgcacaaacatctccacttttgggggaaaggtgggtagattccagttccctggactaccttcaggaggcacgagagctgggagaagaggcaaagct

SEQ ID NO: 412357 - DNA, 120 bp, Artificial Sequence
  ENSG00000148660_27 (sequence is synthesized)
acaggtttacttgggagccagctgagaagagagcagactcacaggtgctggtgcttggatttagccaggctcctccgagcacctcatgcatgtcccagcccctgggccctagccctttcc

SEQ ID NO: 412358 - DNA, 120 bp, Artificial Sequence
  ENSG00000148660_28 (sequence is synthesized)
tgccctgcagtctgcagtgccagcacgcaaatcccttcaccacagggtttcgttttgctggcttgaagacaaatggtcttagaattcattgagacccatagcttcatatggctgctccag

SEQ ID NO: 412359 - DNA, 120 bp, Artificial Sequence
  ENSG00000148660_29 (sequence is synthesized)
ccccacttcttagcattcttactcctcttctggggctaatgtcagcatctatagacaatagactattaaaaaatcaccttttaaacaagaaacggaaggcatttgatgcagaatttttgc

SEQ ID NO: 412360 - DNA, 120 bp, Artificial Sequence
  ENSG00000148660_30 (sequence is synthesized)
atgacaacatagaaataatttaaaaatagtgtttgttctgaatgttggtagacccttcatagctttgttacaatgaaaccttgaactgaaaatatttaataaaataacctttaaacagtc

SEQ ID NO: 412361 - DNA, 120 bp, Artificial Sequence
  ENSG00000148660_31 (sequence is synthesized)
ggtgccatcctcacgaccatgcttgtctccaggaacttctcagctgccaaaagcctattgaacaagaagtcggatggcggtgtcaagccacagagcaacaacaaaaacagtctcgagcca

SEQ ID NO: 412362 - DNA, 120 bp, Artificial Sequence
  ENSG00000148660_32 (sequence is synthesized)
ttggattgggtctctcctccacgttggttgtggtttaatgtcttaaaagtggctcttacctcctggacactcctctccaggattctcagggttgggtctctgtgtcattggtctcattac

SEQ ID NO: 412363 - DNA, 120 bp, Artificial Sequence
  ENSG00000148660_33 (sequence is synthesized)
tcttcaacttcagtagtagctctgtccttcctgggcagcgatattttagtgtttatgttggtctcaaagctgtgacttttgggtgttaccggcggggagctgtttgaagacattgtggcc

SEQ ID NO: 412364 - DNA, 120 bp, Artificial Sequence
  ENSG00000148660_34 (sequence is synthesized)
ataactaatggctgggcttcaggagaaagtggtcattgtctctgcagactgcagagagggagacgggagggaaggtgtgttcgctcttcctgccaagggccctagagacagagaagaggg

SEQ ID NO: 412365 - DNA, 120 bp, Artificial Sequence
  ENSG00000148660_35 (sequence is synthesized)
atgtctttgtcataagcgatcacaggggactcctgaggactggggagggctctctgtaacttgggaggttccccagtaggtaaattgatggatttttctcccccacagtgcgaaaacagg

SEQ ID NO: 412366 - DNA, 120 bp, Artificial Sequence
  ENSG00000148660_36 (sequence is synthesized)
agttgcccacttttcccttatttgaccttcgtgctgcactcctactctgtatgcttgtccccttgtgccccgatggttgtagacaggcacctttgaaggccctgctcctgagctccaagt

SEQ ID NO: 412367 - DNA, 120 bp, Artificial Sequence
  ENSG00000148660_37 (sequence is synthesized)
ttgaaggccctgctcctgagctccaagtgccattcattctgcagctgctttgtggcagtgccagtcaccacaatcaagctcacttatttcttgccgggcgcggtggcttacgcctgtaat

SEQ ID NO: 412368 - DNA, 120 bp, Artificial Sequence
  ENSG00000148660_38 (sequence is synthesized)
aaaattatttaagcctcacctctttccaagacggattggaaggaaaccctttgagattaggttgagatgatctcagcacataagaactaagctctgtgtctgcaggtttcacaatagagg

SEQ ID NO: 412369 - DNA, 120 bp, Artificial Sequence
  ENSG00000148660_39 (sequence is synthesized)
aaattaaaaccaggataagaatgtgcaaaccagggcactgttggtgatttgcgagatcggaagttgtggctagaatcttcctgactatggaggaaggcagacgtcttgtatagggggtgg

SEQ ID NO: 412370 - DNA, 120 bp, Artificial Sequence
  ENSG00000148660_40 (sequence is synthesized)
ggtgtacattctggacagttcatggaaaataaggggataagaagctgaatcatcaccccctcccatctttctctctgctctatgagaccctccccttccttatttttatctcttcccact

SEQ ID NO: 412371 - DNA, 120 bp, Artificial Sequence
  ENSG00000148660_41 (sequence is synthesized)
ttatgctgggccttccctatcctgccctgagttatagttagtcactaacttctccgctggctcccacccttatcacatctcagctacatatataaactctctgttatctaagtaattcta

SEQ ID NO: 412372 - DNA, 120 bp, Artificial Sequence
  ENSG00000148660_42 (sequence is synthesized)
ttagccagaagcaattccagagtttatattagtactaggaaggtgtcatgtagcccctgtctaacatttgaattgaactaaaatgtgaatctcaataaaagcaacacagttttcacagca

SEQ ID NO: 412373 - DNA, 120 bp, Artificial Sequence
  ENSG00000148660_43 (sequence is synthesized)
ttcaccgacgactaccagctcttcgaggagcttggcaagggatgataccctctttttaatctttccttccccgaccttcaactgttcctgctgagagaagggcagggtctctctgctccc

SEQ ID NO: 412374 - DNA, 120 bp, Artificial Sequence
  ENSG00000148660_44 (sequence is synthesized)
tcagccattacgtctgtgctggaggatgcctttgtctgctgcttttcctcccaccatctatccttgcagagtttctaagcacaaccctcttcgcccgtggggccccagtcaggtcatcca

SEQ ID NO: 412375 - DNA, 120 bp, Artificial Sequence
  ENSG00000148660_45 (sequence is synthesized)
gatgggtctggtggggttggagagggtgtgtgtgttgtgggtgcacacctgcctgctgcttttggaagccgatcgaactccttgcttcccttaacctgctgcttgctcacctggagctgt

SEQ ID NO: 412376 - DNA, 120 bp, Artificial Sequence
  ENSG00000148660_46 (sequence is synthesized)
ggcctagcggggctgacggctgtggggccccctcctggatgtgcctttggctgcgctgccctgtcccaactgtgctgcttggctgtgctggcccggctgggccgtggtggtgctgttcta

SEQ ID NO: 412377 - DNA, 120 bp, Artificial Sequence
  ENSG00000148660_47 (sequence is synthesized)
acgcttgcagttgtcttgcagccttttgctcctgtgaggaaagggttgtggcctggccccgcccagggctcgggttaggatgagcccaagctcaacccaagctctcccttaccctggtgg

SEQ ID NO: 412378 - DNA, 120 bp, Artificial Sequence
  ENSG00000148660_48 (sequence is synthesized)
cagcccctgctggtagtggcattccctataagagaagcccatgccggcaggacatcaccagctgtcccttggctttggatgggttggggaggaggcctctggagggcaccacctctgcct

SEQ ID NO: 412379 - DNA, 120 bp, Artificial Sequence
  ENSG00000148660_49 (sequence is synthesized)
gcctgtcagtctgagccctgtctggttttcctgaggaacacgtcctggcaatgagagctggtgtgaaatgtgcagctttcccaagcctcgagagtgcgaaaacaggagatcattaagatt

SEQ ID NO: 412380 - DNA, 120 bp, Artificial Sequence
  ENSG00000148660_50 (sequence is synthesized)
ttcctatccttgctagtctgctttaaaccagatgcctttgtgctcagaacagaaggttctgctggcctgagagggaagtagggaggtatttttcctggccctagctggatgggaatgact

SEQ ID NO: 412381 - DNA, 120 bp, Artificial Sequence
  ENSG00000148660_51 (sequence is synthesized)
caggggaagtgatccaaatcatagtttataccagagctgaatccggaacctgacttctacacggatgcttcatctccagggcttgactctgggttttttaggtcatttggttatctttct

SEQ ID NO: 412382 - DNA, 120 bp, Artificial Sequence
  ENSG00000148660_52 (sequence is synthesized)
ttttttcctttttagagcacaaatccttttaatcaaatgaaagccaaatttgcctgagtgattcaggcagggtatagggcttggaacctgaaaccactctccttttggtctttttccttc

SEQ ID NO: 412383 - DNA, 120 bp, Artificial Sequence
  ENSG00000148671_0 (sequence is synthesized)
actctgggcaggatccaacgtcgctccagctgctcttgacgactccacagataccccgaagccatggcaagcaagggcttgcaggacctgaagcaacaggtggaggggaccgcccaggaa

SEQ ID NO: 412384 - DNA, 120 bp, Artificial Sequence
  ENSG00000148671_1 (sequence is synthesized)
gccgtgtcagcggccggagcggcagctcagcaagtggtggaccaggccacagaggcggggcagaaagccatggaccagctggccaagaccacccaggaaaccatcgacaagactgctaac

SEQ ID NO: 412385 - DNA, 120 bp, Artificial Sequence
  ENSG00000148671_2 (sequence is synthesized)
gggaaaaaattcggcctcctgaaatgacagcagggagacttgggtcggcctcctgaaatgacagcagggagacttgggtgaccccccttccaggcgccatctagcacagcctggccctga

SEQ ID NO: 412386 - DNA, 120 bp, Artificial Sequence
  ENSG00000148671_3 (sequence is synthesized)
tctccgggcagccaccacctcctcggtctgccccctcattaaaattcacgttcccaccctgtgtccacttcatgattcctcgcaagctgggcccagtcctctcatcccaagagcagagcc

SEQ ID NO: 412387 - DNA, 120 bp, Artificial Sequence
  ENSG00000148671_4 (sequence is synthesized)
accgtagccggagtcctagcctcccaaattcggaaatccaatccaacggtctcaggaatgttttccatcccgccacgcgcctcccgaagctcccagaccggaggctcagcccccatctcg

SEQ ID NO: 412388 - DNA, 120 bp, Artificial Sequence
  ENSG00000148672_0 (sequence is synthesized)
ctccctagtcgcggggagtctgagaaagcgcgcctgtttcgcgaccatcacgcacctcccctccgcttgtggccatgtaccgctacctgggcgaagcgctgttgctgtcccgggccgggc

SEQ ID NO: 412389 - DNA, 120 bp, Artificial Sequence
  ENSG00000148672_1 (sequence is synthesized)
cgttgctgggctgggcccggggacagcccgccgccgccccgcagccggggctggcattggccgcccggcgccactacagcgaggcggtggccgaccgcgaggacgaccccaacttcttca

SEQ ID NO: 412390 - DNA, 120 bp, Artificial Sequence
  ENSG00000148672_2 (sequence is synthesized)
cggtggccgaccgcgaggacgaccccaacttcttcaagatggtggagggcttcttcgatcgcggcgccagcatcgtggaggacaagctggtggaggacctgaggacccgggagagcgagg

SEQ ID NO: 412391 - DNA, 120 bp, Artificial Sequence
  ENSG00000148672_3 (sequence is synthesized)
agcagaagcggaaccgggtgcgcggcatcctgcggatcatcaagccctgcaaccatgtgctgagtctctccttccccatccggcgcgacgacggctcctgggaggtcatcgaaggctacc

SEQ ID NO: 412392 - DNA, 120 bp, Artificial Sequence
  ENSG00000148672_4 (sequence is synthesized)
gggcccagcacagccagcaccgcacgccctgcaagggaggtatccgttacagcactgatgtgagtgtagatgaagtaaaagctttggcttctctgatgacatacaagtgtgcagtggttg

SEQ ID NO: 412393 - DNA, 120 bp, Artificial Sequence
  ENSG00000148672_5 (sequence is synthesized)
atgtgccgtttgggggtgctaaagctggtgttaagatcaatcccaagaactatactgataatgaattggaaaagatcacaaggaggttcaccatggagctagcaaaaaagggctttattg

SEQ ID NO: 412394 - DNA, 120 bp, Artificial Sequence
  ENSG00000148672_6 (sequence is synthesized)
gtcctggcattgatgtgcctgctccagacatgagcacaggtgagcgggagatgtcctggatcgctgatacctatgccagcaccatagggcactatgatattaatgcacacgcctgtgtta

SEQ ID NO: 412395 - DNA, 120 bp, Artificial Sequence
  ENSG00000148672_7 (sequence is synthesized)
ctggtaaacccatcagccaagggggaatccatggacgcatctctgctactggccgtggtgtcttccatgggattgaaaatttcatcaatgaagcttcttacatgagcattttaggaatga

SEQ ID NO: 412396 - DNA, 120 bp, Artificial Sequence
  ENSG00000148672_8 (sequence is synthesized)
caccagggtttggagataaaacatttgttgttcagggatttggtaatgtgggcctacactctatgagatatttacatcgttttggtgctaaatgtattgctgttggtgagtctgatggga

SEQ ID NO: 412397 - DNA, 120 bp, Artificial Sequence
  ENSG00000148672_9 (sequence is synthesized)
gtatatggaatccagatggtattgacccaaaggaactggaagacttcaaattgcaacatgggtccattctgggcttccccaaggcaaagccctatgaaggaagcatcttggaggccgact

SEQ ID NO: 412398 - DNA, 120 bp, Artificial Sequence
  ENSG00000148672_10 (sequence is synthesized)
gtgacatactgatcccagctgccagtgagaagcagttgaccaaatccaacgcacccagagtcaaagccaagatcattgctgaaggtgccaatgggccaacaactccagaagctgacaaga

SEQ ID NO: 412399 - DNA, 120 bp, Artificial Sequence
  ENSG00000148672_11 (sequence is synthesized)
tcttcctggagagaaacattatggttattccagatctctacttgaatgctggaggagtgacagtatcttactttgagtggctgaagaatctaaatcatgtcagctatggccgtttgacct

SEQ ID NO: 412400 - DNA, 120 bp, Artificial Sequence
  ENSG00000148672_12 (sequence is synthesized)
tcaaatatgaaagggattctaactaccacttgctcatgtctgttcaagagagtttagaaagaaaatttggaaagcatggtggaactattcccattgtacccacggcagagttccaagaca

SEQ ID NO: 412401 - DNA, 120 bp, Artificial Sequence
  ENSG00000148672_13 (sequence is synthesized)
gttctgccaggcaaattatgcgcacagccatgaagtataacctgggattggacctgagaacagctgcctatgttaatgccattgagaaagtcttcaaagtgtacaatgaagctggtgtga

SEQ ID NO: 412402 - DNA, 120 bp, Artificial Sequence
  ENSG00000148672_14 (sequence is synthesized)
ccttcacatagatggatcatggctgacttcctcactatcctcttcacatgtaacttctgcagacctatcacaagtttacatgtaaccacagaaatccctttctctcctgactcattaata

SEQ ID NO: 412403 - DNA, 120 bp, Artificial Sequence
  ENSG00000148672_15 (sequence is synthesized)
atggataccattctcaacaagtcaatccaagtcagcccgttaaggagaaagaaattaaggttagcggatcatgtacaagctgagtgtgaaagtagaaatcacctacaccagagagccatt

SEQ ID NO: 412404 - DNA, 120 bp, Artificial Sequence
  ENSG00000148672_16 (sequence is synthesized)
ttggtattttgcctttaaataaaaagcctcctttatctggctgtgcagccttgctctgtggcttttcccaacacaatcagtgctagtgctggggaggaacagtcaagagcagtcagttgc

SEQ ID NO: 412405 - DNA, 120 bp, Artificial Sequence
  ENSG00000148672_17 (sequence is synthesized)
ttgcttattttttctggatgagtctgggacacactgtaactttaacacatttaagaagtaggtgtgtggccttttcagaaggtggcatggtcctcaagtgagttcttagtattttatatc

SEQ ID NO: 412406 - DNA, 120 bp, Artificial Sequence
  ENSG00000148672_18 (sequence is synthesized)
agcaaaataattcaattttgcaggttgcaaacaaatataaaacctgtttctgtttatgaatattattcttttagaatagaataagtacatgctgctgtaataaaattgcctttaatcact

SEQ ID NO: 412407 - DNA, 120 bp, Artificial Sequence
  ENSG00000148672_19 (sequence is synthesized)
taacaagcctaaccttgactcaaacagtgaatgcctatagaaataataaatgaaaaaaactagtatttttatatcataaaacaatgtcatttatagcttatcattcatgtattgtccagc

SEQ ID NO: 412408 - DNA, 120 bp, Artificial Sequence
  ENSG00000148672_20 (sequence is synthesized)
agacattaaaagccctgtggataattaagttatcttcatacctgcaaaatggtggaggctattttcattaaaactgtcagaatttgcttactataattatgatacagtccaaagaatgca

SEQ ID NO: 412409 - DNA, 120 bp, Artificial Sequence
  ENSG00000148672_21 (sequence is synthesized)
gtcactttttatcatgttaactaattgttctcttttgaagatctatggttgactaattaaacaataattcaagtagagtgtcccagaaaaaaaccacttgggctccctgtttggagtctg

SEQ ID NO: 412410 - DNA, 120 bp, Artificial Sequence
  ENSG00000148672_22 (sequence is synthesized)
gctggctctgagcattgccaatggcccctactcacctgactttgtatcctctccttttagaggctttgcattctgcacccagcttcactaacagtgggctgaaaacatccttgggttgag

SEQ ID NO: 412411 - DNA, 120 bp, Artificial Sequence
  ENSG00000148672_23 (sequence is synthesized)
tgtttcatttgggagttatttggccagggccttttgaacagtagtgtccccatgaagtgctagataatatatgtgtaagagtcagctttttttttttttttaactctaacacccttcaga

SEQ ID NO: 412412 - DNA, 120 bp, Artificial Sequence
  ENSG00000148672_24 (sequence is synthesized)
aatttctaactactttgtaactgcatggcttaacctggtgataaaagcagttattaaaagtctacgttttccaaaacttacgtttcttttctgtgtttttacatgtggtagtttctcttt

SEQ ID NO: 412413 - DNA, 120 bp, Artificial Sequence
  ENSG00000148672_25 (sequence is synthesized)
tcataagttataatactgcaattggatttctgaaatgtttatagcgaccacctgtataacatttccttccactttattgtgagctgcccagattttattcttgaattgtttttttttttt

SEQ ID NO: 412414 - DNA, 120 bp, Artificial Sequence
  ENSG00000148672_26 (sequence is synthesized)
ttgttcggtgctttacacgttcagagaaacttcccgagtaacgaactatagaaatgatccctgaaagcatagtctttattctcgaattattttgtattttattaaataatatgaacagct

SEQ ID NO: 412415 - DNA, 120 bp, Artificial Sequence
  ENSG00000148672_27 (sequence is synthesized)
aaaataacctctatttaactttaactgaaactgtgcttctccccacagccccttgttcatatatgcacatctcttgccctcagtggaggggatttgacggtggtgttcgcatttctctat

SEQ ID NO: 412416 - DNA, 120 bp, Artificial Sequence
  ENSG00000148672_28 (sequence is synthesized)
cagggcagcccactgtgctaagacactagaacgtacatcaagaagcatccaattctgatttttccctcagagggcttccatttaaagaggaactaaggtgcataagcagataaggatatt

SEQ ID NO: 412417 - DNA, 120 bp, Artificial Sequence
  ENSG00000148672_29 (sequence is synthesized)
agtcaaagccaaggtgacaacattatagaaaccagaaccaacattatcaatgtgaatgacgttaggggggtcatagaagagtctgattgagttttctctttctttttagcagctttattg

SEQ ID NO: 412418 - DNA, 120 bp, Artificial Sequence
  ENSG00000148672_30 (sequence is synthesized)
gcacatactgcacataccatacagttcccccatttaaggtacataatttaatggcttttagctaccggcacagagttgtgcaaccattaccaaaacaaacgcatctgcctgacactcctg

SEQ ID NO: 412419 - DNA, 120 bp, Artificial Sequence
  ENSG00000148677_0 (sequence is synthesized)
acatattcagcagggttagcttgtcctcccctccctcttcagcttcccagacactgagtctggaatgaaaattcacctgcctctgagttggctcctaatgggggtgggagtgttacttcg

SEQ ID NO: 412420 - DNA, 120 bp, Artificial Sequence
  ENSG00000148677_1 (sequence is synthesized)
gttcccaggttggaagattatctcacccggccccagctatataagctgaccggtgtggaggggcccagcagggccaactccagggattccttccacgacagaaaaacatacaagactcct

SEQ ID NO: 412421 - DNA, 120 bp, Artificial Sequence
  ENSG00000148677_2 (sequence is synthesized)
tcagccaacatgatggtactgaaagtagaggaactggtcactggaaagaagaatggcaatggggaggcaggggaattccttcctgaggatttcagagatggagagtatgaagctgctgtt

SEQ ID NO: 412422 - DNA, 120 bp, Artificial Sequence
  ENSG00000148677_3 (sequence is synthesized)
actttagagaagcaggaggatctgaagacacttctagcccaccctgtgaccctgggggagcaacagtggaaaagcgagaaacaacgagaggcagagctcaaaaagaaaaaactagaacaa

SEQ ID NO: 412423 - DNA, 120 bp, Artificial Sequence
  ENSG00000148677_4 (sequence is synthesized)
agatcaaagcttgaaaatttagaagaccttgaaataatcattcaactgaagaaaaggaaaaaatacaggaaaactaaagttccagttgtaaaggaaccagaacctgaaatcattacggaa

SEQ ID NO: 412424 - DNA, 120 bp, Artificial Sequence
  ENSG00000148677_5 (sequence is synthesized)
cctgtggatgtgcctacgtttctgaaggctgctctggagaataaactgccagtagtagaaaaattcttgtcagacaagaacaatccagatgtttgtgatgagtataaacggacagctctt

SEQ ID NO: 412425 - DNA, 120 bp, Artificial Sequence
  ENSG00000148677_6 (sequence is synthesized)
catagagcatgcttggaaggacatttggcaattgtggagaagttaatggaagctggagcccagatcgaattccgtgatatgcttgaatccacagccatccactgggcaagccgtggagga

SEQ ID NO: 412426 - DNA, 120 bp, Artificial Sequence
  ENSG00000148677_7 (sequence is synthesized)
aacctggatgttttaaaattgttgctgaataaaggagcaaaaattagcgcccgagataagttgctcagcacagcgctgcatgtggcggtgaggactggccactatgagtgcgcggagcat

SEQ ID NO: 412427 - DNA, 120 bp, Artificial Sequence
  ENSG00000148677_8 (sequence is synthesized)
tgatgcggtgagactgaaccgctataagatgatccgactcctgattatgtatggcgcggatctcaacatcaagaactgtgctgggaagacgccgatggatctggtgctacactggcagaa

SEQ ID NO: 412428 - DNA, 120 bp, Artificial Sequence
  ENSG00000148677_9 (sequence is synthesized)
tggaaccaaagcaatattcgacagcctcagagagaactcctacaagacctctcgcatagctacattctgaggcaaacgacagactcttaatcagtaaatgttcactggcattttgaaggc

SEQ ID NO: 412429 - DNA, 120 bp, Artificial Sequence
  ENSG00000148677_10 (sequence is synthesized)
atggcccaagagaagagacactagccataaaatctagtttctatttatcaacgtgttgtgaagatgtacctaatgaagttttgagaaagcacagggttataggtgtttaaatttccttta

SEQ ID NO: 412430 - DNA, 120 bp, Artificial Sequence
  ENSG00000148677_11 (sequence is synthesized)
gtgaaactcttatttatttttatgtattcctgtttatttatttactgccacgctactgatattcagaccttcatgatcatccatctggtgagcagagcttcatttgtatataacactttc

SEQ ID NO: 412431 - DNA, 120 bp, Artificial Sequence
  ENSG00000148677_12 (sequence is synthesized)
agagccttcccacccataggtagttcttaaaccaggtgaaagagcaaagttcaagtgcctacttatgtgtcattcgctcatgtaagagtttttaagagagggctgattatcacagccctc

SEQ ID NO: 412432 - DNA, 120 bp, Artificial Sequence
  ENSG00000148677_13 (sequence is synthesized)
ttttctcctgaatttttaatgcagaagtttgaatgaagcaagggaaggcatgtagggacaggaaaggaaacaatggaaggaaagtgattctgtgaaaaggacagtgaagccagctatttt

SEQ ID NO: 412433 - DNA, 120 bp, Artificial Sequence
  ENSG00000148677_14 (sequence is synthesized)
ttttttttttttttttttttttttaccgagtacacagagtacccaagtgaagagaacgtcatgagtgtaagtgcaaatcagtggaaggagcggcaaactgggacatgcagaattgaattt

SEQ ID NO: 412434 - DNA, 120 bp, Artificial Sequence
  ENSG00000148677_15 (sequence is synthesized)
ggacatgcagaattgaatttgctcaaaaaagatgaaaggaaatgcaaactgtaaatgtataaatgtatattgtattgtatgtacattttatattcataataaaggcaatcaaactctaaa

SEQ ID NO: 412435 - DNA, 120 bp, Artificial Sequence
  ENSG00000148680_0 (sequence is synthesized)
ccatgggcagcggcacacggcggcgcgatgatggacgttaacagcagcggccgcccggacctctacgggcacctccgctctttccttctgccagaagtggggcgcgggctgcccgacttg

SEQ ID NO: 412436 - DNA, 120 bp, Artificial Sequence
  ENSG00000148680_1 (sequence is synthesized)
cttgagccccgacggtggcgccgacccggtcgcgggctcctgggcgccgcacctgctgagcgaggtgacagccagcccggcgcccacctgggacgcgcccccggacaatgcctccggctg

SEQ ID NO: 412437 - DNA, 120 bp, Artificial Sequence
  ENSG00000148680_2 (sequence is synthesized)
gaacagatcaactacggcagagtcgagaaagttgtgatcggctccatcctgacgctcatcacgctgctgacgatcgcgggcaactgcctggtggtgatctccgtgtgcttcgtcaagaag

SEQ ID NO: 412438 - DNA, 120 bp, Artificial Sequence
  ENSG00000148680_3 (sequence is synthesized)
ctccgccagccctccaactacctgatcgtgtccctggcgctggccgacctctcggtggctgtggcggtcatgcccttcgtcagcgtcaccgacctcatcgggggcaagtggatctttgga

SEQ ID NO: 412439 - DNA, 120 bp, Artificial Sequence
  ENSG00000148680_4 (sequence is synthesized)
cactttttctgtaatgtcttcatcgccatggacgtcatgtgctgcacggcctcgatcatgaccctgtgcgtgatcagcattgacaggtaccttgggatcacaaggcccctcacataccct

SEQ ID NO: 412440 - DNA, 120 bp, Artificial Sequence
  ENSG00000148680_5 (sequence is synthesized)
gtgaggcagaatgggaaatgcatggcgaagatgattctctccgtctggcttctctccgcctccatcaccttacctccactctttggatgggctcagaatgtaaatgatgataaggtgtgc

SEQ ID NO: 412441 - DNA, 120 bp, Artificial Sequence
  ENSG00000148680_6 (sequence is synthesized)
ttgatcagccaggactttggctatacgatttactctaccgcagtggcattttatatccccatgtccgtcatgcttttcatgtactaccagatttacaaggctgccaggaagagtgctgcc

SEQ ID NO: 412442 - DNA, 120 bp, Artificial Sequence
  ENSG00000148680_7 (sequence is synthesized)
aaacacaagtttcctggcttccctcgagtggagccagacagcgtcatcgccctgaatggcatagtgaagctccagaaggaggtggaagagtgtgcaaacctttcgagactcctcaagcat

SEQ ID NO: 412443 - DNA, 120 bp, Artificial Sequence
  ENSG00000148680_8 (sequence is synthesized)
gaaaggaaaaacatctccatctttaagcgagaacagaaagcagccaccaccctggggatcatcgtcggggcctttaccgtgtgctggctgccatttttcctcctctcgacagccagaccc

SEQ ID NO: 412444 - DNA, 120 bp, Artificial Sequence
  ENSG00000148680_9 (sequence is synthesized)
ttcatctgtggcacttcctgcagctgcatcccactgtgggtggagaggacatttctgtggctaggctatgcaaactctctcattaacccttttatatatgccttcttcaaccgggacctg

SEQ ID NO: 412445 - DNA, 120 bp, Artificial Sequence
  ENSG00000148680_10 (sequence is synthesized)
aggaccacctatcgcagcctgctccagtgccagtaccggaatatcaaccggaagctctcagctgcaggcatgcatgaagccctgaagcttgctgagaggccagagagacctgagtttgtg

SEQ ID NO: 412446 - DNA, 120 bp, Artificial Sequence
  ENSG00000148680_11 (sequence is synthesized)
ctacaaaatgctgactactgtagaaaaaaaggtcatgattcatgattgaaagcagaacaatggagatgaaataaacaaggcaaaatagaggtggaaacagaaggaagtcatttgctgagt

SEQ ID NO: 412447 - DNA, 120 bp, Artificial Sequence
  ENSG00000148680_12 (sequence is synthesized)
ttcttgggatgtctaaaacatgacaaacagggtgatctgttgtacacactatcttatgagggagatggtgacttctccttttttctgtggatcagtgctattgtgtgttctcagtttaag

SEQ ID NO: 412448 - DNA, 120 bp, Artificial Sequence
  ENSG00000148680_13 (sequence is synthesized)
atagcagatcatctcagcagtaagcacaccaacagaactgagttccagaaaggaagcagtttctggtgctttgcatatgtccaaatccatgcaagtgggagaaagttccagtgcacactt

SEQ ID NO: 412449 - DNA, 120 bp, Artificial Sequence
  ENSG00000148680_14 (sequence is synthesized)
cccatgcttctgagtctaggcgttgtggtgaatatgcaggaatcattcatgagacagaatgtattttgttgtatgacagaaggcttttccaagcaaactgcggtgagcgtagtgttgaat

SEQ ID NO: 412450 - DNA, 120 bp, Artificial Sequence
  ENSG00000148680_15 (sequence is synthesized)
atgttgcatgtccatgttagaaaacagaatccagtcatcagctaatacaaatgatttcccagagcagtgtttgtttcaagcttctgtcaaatagtttggcttttctgcagggtctctgtg

SEQ ID NO: 412451 - DNA, 120 bp, Artificial Sequence
  ENSG00000148680_16 (sequence is synthesized)
atttccccacctatgtacttttctgtgttaactcacttattatggtataactcaggaacaggtctcaggatggagagaagcatacaacatgagcaaagctttttctcgtgctctgaaggg

SEQ ID NO: 412452 - DNA, 120 bp, Artificial Sequence
  ENSG00000148680_17 (sequence is synthesized)
tcttgagaggggagtgggatgccttctgtgaggatttttatcgcagtgaagctcaagtggtacccaactgcgttgtaattaacatgattattggcatgtttttgactctcattttctaca

SEQ ID NO: 412453 - DNA, 120 bp, Artificial Sequence
  ENSG00000148680_18 (sequence is synthesized)
aggctgcagtgggcccacccatgggctggcccataactgtatgttatgtggaagaagtgtgggaatgatgggttttccatgaaatgtgatgcttctggagatggggcataaacatgttca

SEQ ID NO: 412454 - DNA, 120 bp, Artificial Sequence
  ENSG00000148680_19 (sequence is synthesized)
ttcttgttgagctgcattgtgttaaaccaaattgtgtgaagcgaggtcacctggaccactcttgggaaatgcttcagaacaccagtctgttccttctagagaatttgtttttgtgttcta

SEQ ID NO: 412455 - DNA, 120 bp, Artificial Sequence
  ENSG00000148680_20 (sequence is synthesized)
tgtatcttaaatcaaatgtgtgcctaagcaattctgtcctctgattcccacccctacccaccaaaaaatggtagacatgaaaggcaggtgaggaaacagaaaaggtctctttgcagatat

SEQ ID NO: 412456 - DNA, 120 bp, Artificial Sequence
  ENSG00000148680_21 (sequence is synthesized)
atattttttaaatggcactatgtagtaattaagagctaaggagacagaaagacagtagatgagaatagaagagtacctgtacctacaaggggaaaaatgaatgcaattctttatttgata

SEQ ID NO: 412457 - DNA, 120 bp, Artificial Sequence
  ENSG00000148680_22 (sequence is synthesized)
agagtgaactgaaagagaatattattttcctacaataaagcaagctgtcctctcacaggataaagtggaattctgacatggattatggacttcttctaactcccattgacattgcttctt

SEQ ID NO: 412458 - DNA, 120 bp, Artificial Sequence
  ENSG00000148680_23 (sequence is synthesized)
accagacatggggaaaagctacctttcctgaaaggggaggagggcactgtcctttcagacaaagcttgtacaaattcctgaaccgcaaatttgctgaagtgaccgtatatattatattca

SEQ ID NO: 412459 - DNA, 120 bp, Artificial Sequence
  ENSG00000148680_24 (sequence is synthesized)
ttcataatttaaatgattatttatggtcagatacatattgttaaacttgaaaatgttttattacattacatcaaataaagtttatttgtagctgaaataaagcaacgtaagtaacaattt

SEQ ID NO: 412460 - DNA, 120 bp, Artificial Sequence
  ENSG00000148680_25 (sequence is synthesized)
gcactccgcaacttctgccgctgccgcccgggcgctctcggcgcagccgagctgctgctgcgaactgtggagctgccagcggagcccagcccgagctccctcgactccgcgcgtcccagg

SEQ ID NO: 412461 - DNA, 120 bp, Artificial Sequence
  ENSG00000148680_26 (sequence is synthesized)
gtcccaggcgtccgtcgggggccgaagcgcctcccgcagggagtccccgtgaggccgcgctgccgcgttacccgcagcggccgggggtccggggagtgcggggctccgagacagagccag

SEQ ID NO: 412462 - DNA, 120 bp, Artificial Sequence
  ENSG00000148688_0 (sequence is synthesized)
ggagtattgaatagttgggaattggaacccctccagggggaaccaaacattgtcgttcagaagaagacaaagagagattgaaatgaagctgttgatttcaacacacaaattctggtggta

SEQ ID NO: 412463 - DNA, 120 bp, Artificial Sequence
  ENSG00000148688_1 (sequence is synthesized)
gatgaaagcaaagcaagtaagtttctccgaatccctagtcaactggaggtagagacggactgcgcaggttaactacagctcccagcatgcctgaggggcgggctcagcggctgcgcagac

SEQ ID NO: 412464 - DNA, 120 bp, Artificial Sequence
  ENSG00000148688_2 (sequence is synthesized)
tggcgcgcgcggacggtcatgggacttcagcatggcggtgtttgcagatttggacctgcgagcgggttctgacctgaaggctctgcgcggacttgtggagacagccgctcaccttggcta

SEQ ID NO: 412465 - DNA, 120 bp, Artificial Sequence
  ENSG00000148688_3 (sequence is synthesized)
ttcagttgttgctatcaatcatatcgttgactttaaggaaaagaaacaggaaattgaaaaaccagtagctgtttctgaactcttcacaactttgccaattgtacagggaaaatcaagacc

SEQ ID NO: 412466 - DNA, 120 bp, Artificial Sequence
  ENSG00000148688_4 (sequence is synthesized)
aattaaaattttaactagattaacaattattgtctcggatccatctcactgcaatgttttgagagcaacttcttcaagggcccggctctatgatgttgttgcagtttttccaaagacaga

SEQ ID NO: 412467 - DNA, 120 bp, Artificial Sequence
  ENSG00000148688_5 (sequence is synthesized)
aaagctttttcatattgcttgcacacatttagatgtggatttagtctgcataactgtaacagagaaactaccattttacttcaaaagacctcctattaatgtggcgattgaccgaggcct

SEQ ID NO: 412468 - DNA, 120 bp, Artificial Sequence
  ENSG00000148688_6 (sequence is synthesized)
ggcttttgaacttgtctatagccctgctatcaaagactccacaatgagaaggtatacaatttccagtgccctcaatttgatgcaaatctgcaaaggaaagaatgtaattatatctagtgc

SEQ ID NO: 412469 - DNA, 120 bp, Artificial Sequence
  ENSG00000148688_7 (sequence is synthesized)
tgcagaaaggcctttagaaataagagggccatatgacgtggcaaatctaggcttgctgtttgggctctctgaaagtgacgccaaggctgcggtgtccaccaactgccgagcagcgcttct

SEQ ID NO: 412470 - DNA, 120 bp, Artificial Sequence
  ENSG00000148688_8 (sequence is synthesized)
ccatggagaaactagaaaaactgcttttggaattatctctacagtgaagaaacctcggccatcagaaggagatgaagattgtcttccagcttccaagaaagccaagtgtgagggctgaaa

SEQ ID NO: 412471 - DNA, 120 bp, Artificial Sequence
  ENSG00000148688_9 (sequence is synthesized)
agaatgccccagtctctgtcagcactcccttcttcccttttatagttcatcagccacaacaaaaataaaacctttgtgtgatttactgttttcatttggagctagaaatcaatagtctat

SEQ ID NO: 412472 - DNA, 120 bp, Artificial Sequence
  ENSG00000148688_10 (sequence is synthesized)
gccagcttaatgaatttagatgtactttaagagagaaagactggttatttctcctttgtgtaagtgataaacaacagcaaatatacttgaataaaatgtttcaggtatttttgtttcatt

SEQ ID NO: 412473 - DNA, 120 bp, Artificial Sequence
  ENSG00000148688_11 (sequence is synthesized)
ttgtttttgagatagggtctttgttgctcaggctggagtacagtggcataatcacagctcactgcaacctcaatcctgggctcaagtgatcctcccgcttcagcctctcaagcagcggga

SEQ ID NO: 412474 - DNA, 87 bp, Artificial Sequence
  ENSG00000148688_12 (sequence is synthesized)
ttttttttttttcccttgtagagacatggtcaggatcaagccatcctcccgctttggcctcctaaagtgctgggattacatgagcca

SEQ ID NO: 412475 - DNA, 120 bp, Artificial Sequence
  ENSG00000148688_13 (sequence is synthesized)
cccgctttggcctcctaaagtgctgggattacatgagccaccacatgcagccagatgtttgaatattttaagagcttctttcgaaagtttcttgttcatactcaaatagtagttattttg

SEQ ID NO: 412476 - DNA, 120 bp, Artificial Sequence
  ENSG00000148688_14 (sequence is synthesized)
aagatattcaaacttatattgaagaagtgactttagttcctcttgttttaagcttctttcatgtattcaaatcagcatttttttctaagaaattgctatagaatttgtggaaggagagag

SEQ ID NO: 412477 - DNA, 120 bp, Artificial Sequence
  ENSG00000148688_15 (sequence is synthesized)
gatacacatgtaaaattacatctggtctcttccttcactgcttcatgcctacgtaaggtctttgaaataggattccttacttttagttagaaacccctaaaacgctaatattgattttcc

SEQ ID NO: 412478 - DNA, 120 bp, Artificial Sequence
  ENSG00000148688_16 (sequence is synthesized)
tgatagctgtattaaaaatagcaaagcatcggactgaaccaactttggaaataatttatttttataatgggatcatgttaagtagaagtagctttttatgcaaatacatgcatttatgca

SEQ ID NO: 412479 - DNA, 120 bp, Artificial Sequence
  ENSG00000148688_17 (sequence is synthesized)
atattaatgtaagggctctaaaacaatggagtagagccagaggtataactgaataagaaatttttttaagcaagagaaagacaactgttctgcgggttggagaaaatacaattttttttt

SEQ ID NO: 412480 - DNA, 120 bp, Artificial Sequence
  ENSG00000148688_18 (sequence is synthesized)
acaggcgttagccactgcgcccggcccgagaaaatacagttttaaaaagagaaagctttataacctcaccaatgaatacaaatgtttaaataaaatattgattaaaaaaacattaaaagt

SEQ ID NO: 412481 - DNA, 84 bp, Artificial Sequence
  ENSG00000148688_19 (sequence is synthesized)
caacctttgcctctaactagaattcaacaaagacaacttttgatctctcatcagagagatcatactcccaagaacaggctttga

SEQ ID NO: 412482 - DNA, 120 bp, Artificial Sequence
  ENSG00000148688_20 (sequence is synthesized)
tatataatcagtttttcttttatactgttacaaaatgcctttcaagcttctcttatattttcaaaagctatgaaacccatcaaaattataaggacttaaatttatgtaatttttttattt

SEQ ID NO: 412483 - DNA, 120 bp, Artificial Sequence
  ENSG00000148688_21 (sequence is synthesized)
gcagtttattattagtagtacactggaattgtcaaactgactccttttccttaaagcagaatgttctcatagcataggaacaaattctgccatttcagtgagctctgcaaattttaaggg

SEQ ID NO: 412484 - DNA, 120 bp, Artificial Sequence
  ENSG00000148688_22 (sequence is synthesized)
tgtaagggagaaaaagatgtgttggaagccatatcttttgataaaaatttgcaatttacatactgtgaaagaaaagtctagaataacaatggtcctcactgagttgaattaagatatgtg

SEQ ID NO: 412485 - DNA, 120 bp, Artificial Sequence
  ENSG00000148688_23 (sequence is synthesized)
accttttcatcttgttttttaaacttaattcacctttactaagatctgttaggaaaacatattttgttttttattacagattgcctttagtttgacatgaagtcttttcatttttttcac

SEQ ID NO: 412486 - DNA, 120 bp, Artificial Sequence
  ENSG00000148688_24 (sequence is synthesized)
tcaccttaattatttaccttatctttaaaagaagttggtatttgagccttaaatgttaaaatatgattactggctatttatattatgaaactcctttttttacatttatctaagattaat

SEQ ID NO: 412487 - DNA, 120 bp, Artificial Sequence
  ENSG00000148688_25 (sequence is synthesized)
tgtgtgtggatttctcctgaaaccacatatttgcctcttctgccctgttctgttttttctcattcccttatagaggactctcagtaagtcacttacacaagaatcctaatttgaaatgct

SEQ ID NO: 412488 - DNA, 120 bp, Artificial Sequence
  ENSG00000148688_26 (sequence is synthesized)
gcttccaggagacctgacttagaaaattggacaaataaagttgatttttttaaatgtccagtaacatgaagatgctgaactttcctagtcatttagggggaaatcaccacaaatatatct

SEQ ID NO: 412489 - DNA, 120 bp, Artificial Sequence
  ENSG00000148688_27 (sequence is synthesized)
ggctgatcaggttgaaagttaaaagaaaaaaagatttataaagtgggtattttcaagatggtgtggagggagatacaatttgatgcaagtcttatacttttgatgtcaatttattcttca

SEQ ID NO: 412490 - DNA, 120 bp, Artificial Sequence
  ENSG00000148688_28 (sequence is synthesized)
gaaataactggttaattataaagggtggatggataaggatattcactgcaacaatgtcttaaatgtgaaaatggaaacaacctaaatacccaataataacaggattaaataattcattgt

SEQ ID NO: 412491 - DNA, 120 bp, Artificial Sequence
  ENSG00000148688_29 (sequence is synthesized)
acattaaaagaatactgtctataaagatgtctagaataagttgttcagttgaagttgtaaagctaaatacacaatacccataatgtgcacagaaataatcagaatgtcatgaaaccagga

SEQ ID NO: 412492 - DNA, 120 bp, Artificial Sequence
  ENSG00000148688_30 (sequence is synthesized)
accacaggtcttaggacctggcctagcacctggccaagaactactggcatacctccttttattgtgcttcaatttattgtgctttgcaaatactgaattttttacaagttgaagatttgt

SEQ ID NO: 412493 - DNA, 120 bp, Artificial Sequence
  ENSG00000148688_31 (sequence is synthesized)
ggcacctctgtaaccagcaagtctattggtgccattttttcaacatcatgtgcctgtttcctgtctcgctcatgtcacattttggtaattttcacaatattaaaaactttttcattatta

SEQ ID NO: 412494 - DNA, 120 bp, Artificial Sequence
  ENSG00000148688_32 (sequence is synthesized)
cagcatggcggtgtttgcagatttggacctgcgagcgggttctgacctgaaggctctgcgcggacttgtggagacagccgctcaccgtgagttgccccggcttcgcgcctggccaacctc

SEQ ID NO: 412495 - DNA, 120 bp, Artificial Sequence
  ENSG00000148690_0 (sequence is synthesized)
ggaagtggtgcccagtcgggacccgtagggagaggcgggttgcgggcggcggcggcggcggcggcggcggtggtggttgtggcgaggctgtgcggcagggcgcacgggacctgtgctgca

SEQ ID NO: 412496 - DNA, 120 bp, Artificial Sequence
  ENSG00000148690_1 (sequence is synthesized)
gcggctctctcaggccgtgggtcgtcgctgcagctgccgggaaagaaggaaacgacgactccgggggcgaacttggcacacagggaggaagggaaaggatgcatggtcatggaggctatg

SEQ ID NO: 412497 - DNA, 120 bp, Artificial Sequence
  ENSG00000148690_2 (sequence is synthesized)
attctgattttagtgatgatgaacgctgtggagaatccagcaaaaggaaaaaaaggacagttgaagatgacttactgctccaaaaaccatttcagaaagaaaaacatggaaaggtggccc

SEQ ID NO: 412498 - DNA, 120 bp, Artificial Sequence
  ENSG00000148690_3 (sequence is synthesized)
ataaacaagttgcagcagaattgctggatagggaagaagcaagaaatagaaggtttcatctcatagctatggatgcttatcaaagacatacaaagttcgtaaatgactatattttatact

SEQ ID NO: 412499 - DNA, 120 bp, Artificial Sequence
  ENSG00000148690_4 (sequence is synthesized)
atggtggcaaaaaagaagacttcaagcgtttgggggaaaatgacaagacagacttggatgttatacgagaaaatcatagattcctatggaatgaggaggacgaaatggacatgacttggg

SEQ ID NO: 412500 - DNA, 120 bp, Artificial Sequence
  ENSG00000148690_5 (sequence is synthesized)
agaagagacttgctaagaaatactatgataaattatttaaggaatactgcatagcagatctcagtaaatataaagaaaataagtttggatttaggtggcgagtagaaaaagaagtaattt

SEQ ID NO: 412501 - DNA, 120 bp, Artificial Sequence
  ENSG00000148690_6 (sequence is synthesized)
caggaaaaggtcaatttttctgtggaaataaatattgtgataaaaaagaaggcttaaagagttgggaagttaattttggttatattgagcatggtgagaagagaaatgcacttgttaaat

SEQ ID NO: 412502 - DNA, 120 bp, Artificial Sequence
  ENSG00000148690_7 (sequence is synthesized)
taaggttatgccaagaatgttccattaaattaaatttccatcacaggagaaaagaaatcaagtcaaaaaaaagaaaagataaaaccaaaaaagactgtgaagagtcatcacataaaaaat

SEQ ID NO: 412503 - DNA, 120 bp, Artificial Sequence
  ENSG00000148690_8 (sequence is synthesized)
ccagattatcttctgcagaagaggcctccaagaaaaaagataaaggacattcatcttcaaagaaatctgaagattctctacttagaaactctgatgaggaagaaagtgcttcagaatctg

SEQ ID NO: 412504 - DNA, 120 bp, Artificial Sequence
  ENSG00000148690_9 (sequence is synthesized)
aactttggaagggtccactaccagagacagatgaaaaatcacaggaagaagaatttgatgagtattttcaggatttgtttctatgagacgagagagagaagcctccgctccttaatgtga

SEQ ID NO: 412505 - DNA, 120 bp, Artificial Sequence
  ENSG00000148690_10 (sequence is synthesized)
aacttcatgaagttttaaacttcatgcaatttgaaattccatataagtttttatctgcaagttacagcttgtgtggtttgtctttggaaataaaaatccaggttctctcagaatgtcaga

SEQ ID NO: 412506 - DNA, 120 bp, Artificial Sequence
  ENSG00000148690_11 (sequence is synthesized)
ggctttggaagttcattagttcaattaaagactttcctgtcctttaaatatcttttcaattgcttatctacaattctgttttatttgtagctcctagaggatagagctggacagattcca

SEQ ID NO: 412507 - DNA, 120 bp, Artificial Sequence
  ENSG00000148690_12 (sequence is synthesized)
atactggatttgtttgtttttcatttttttcttttgtggaaacggagtcctcctgtgttgcccaggctggtattcaaactcctggccttatgcattcctcccaccctggcctcccagagt

SEQ ID NO: 412508 - DNA, 120 bp, Artificial Sequence
  ENSG00000148690_13 (sequence is synthesized)
ggattacaggtgtgagccaccatgctctgccaattattttaaattactaggattaaagtatattatgtatgtctttaacttctttctttcccattgataaactggcacccttcttttaag

SEQ ID NO: 412509 - DNA, 120 bp, Artificial Sequence
  ENSG00000148690_14 (sequence is synthesized)
taagtacctgctctcccattaccacctatttccagctgctttttgaggttttttgcttgcctgtctcttgcttccttcttaacctctaccacttaagagagtttgttataatcaaatttg

SEQ ID NO: 412510 - DNA, 120 bp, Artificial Sequence
  ENSG00000148690_15 (sequence is synthesized)
acttcctagcctgtggataatttactattaagtaaattattaccacagggagccagtgaggtcccagtagtctaaaacagttcatgtgttcacaaaaattgcctccccggcagagattat

SEQ ID NO: 412511 - DNA, 120 bp, Artificial Sequence
  ENSG00000148690_16 (sequence is synthesized)
ccccggcagagattatgcagtaagataatttaactgaataatactatgtgcatgtatcttgcctcagatatactcatgcaaatatgaatatacctctgatatggtttggctctgtgtccc

SEQ ID NO: 412512 - DNA, 120 bp, Artificial Sequence
  ENSG00000148690_17 (sequence is synthesized)
tctcatcttgaatgtgtactcccataattcccacattttataggagggatccagtgagagataatttgaatcaagggggcggtttcccccatattgttcttgtggtagtgaataagtctc

SEQ ID NO: 412513 - DNA, 68 bp, Artificial Sequence
  ENSG00000148690_18 (sequence is synthesized)
acaagatctgatggttttatcaggggcttctgcttttgcatccttctcattttctttttcccagccat

SEQ ID NO: 412514 - DNA, 84 bp, Artificial Sequence
  ENSG00000148690_19 (sequence is synthesized)
aacttctatgcagaaatataaaatgtaacttcttaacataaggtcctagtcgcaagggtctatggaggtgcttcaggagatcca

SEQ ID NO: 412515 - DNA, 120 bp, Artificial Sequence
  ENSG00000148690_20 (sequence is synthesized)
cctagtcgcaagggtctatggaggtgcttcaggagatccaagcctttttagaatctgtgcaaacttctgtgtatgttttttggaggaaaagtccataaatttcaaattttcaaaaatcag

SEQ ID NO: 412516 - DNA, 120 bp, Artificial Sequence
  ENSG00000148690_21 (sequence is synthesized)
attttcaaaaggatttattgatttctgaaaactagcaaagatctgcttttataaagagcaaatagatggatagatataggagaagatgcttgacttgatgaataagagaaaggacatata

SEQ ID NO: 412517 - DNA, 120 bp, Artificial Sequence
  ENSG00000148690_22 (sequence is synthesized)
gaaaatgaactgaacataagcaagtattttattgaagatatactattttaaataacatttaaacacggaatgattggcaataaactgcaaaatgagtaatttggtatcattttaaaatgg

SEQ ID NO: 412518 - DNA, 120 bp, Artificial Sequence
  ENSG00000148690_23 (sequence is synthesized)
ttattatcagagattttccttttattaaacagttattcattaattccacaaatatttatcaggcttctattatatgtgaggcactgagctgggcatggctgtaaaggaaccatctaggaa

SEQ ID NO: 412519 - DNA, 120 bp, Artificial Sequence
  ENSG00000148690_24 (sequence is synthesized)
gtaattatgcaatcatttctgaacctgtttcagaaaagtaaatcagtgttgggtttatcagtgtttaacattgtttgatagtcccctcacttcttgaataaattgttttttttcacctca

SEQ ID NO: 412520 - DNA, 120 bp, Artificial Sequence
  ENSG00000148690_25 (sequence is synthesized)
agactaataatcattattggagaggagttgtctgctaatgtaactactttgtaattcatgctcattgtttaaaatacaaacaatttgaaaatgtttaaaatagaaagtaaaagtattcca

SEQ ID NO: 412521 - DNA, 120 bp, Artificial Sequence
  ENSG00000148690_26 (sequence is synthesized)
ggttcccctttcaactcagaaagtcagtgacttaaattctgatccctacttaccaataatcactgaatagatttgacagtgatgcattcttttgtgttgcctgttcttccaattgttatt

SEQ ID NO: 412522 - DNA, 120 bp, Artificial Sequence
  ENSG00000148690_27 (sequence is synthesized)
tccttagtaacactcctcccgcccctggcaggttgtaacagttatgatagcaatgatttgtagtgactgccaaccctcagggaaccaggatactatagattcatagggttataagggacc

SEQ ID NO: 412523 - DNA, 120 bp, Artificial Sequence
  ENSG00000148690_28 (sequence is synthesized)
ttaaaggtcatttagtccagtcttgtagacttgattctctagggatatctggccacttttttagtgggtattttttaagacagttagtttataatgttactctaaactgacttgattttt

SEQ ID NO: 412524 - DNA, 120 bp, Artificial Sequence
  ENSG00000148690_29 (sequence is synthesized)
tagtaaaattgactggtatcagaaaactggtgtaagaaagctggcatgtgggaagtactcttggaagggaacaagataacagctgtccacttctaaaggccttgtaggtttcgttctctg

SEQ ID NO: 412525 - DNA, 120 bp, Artificial Sequence
  ENSG00000148690_30 (sequence is synthesized)
aagagaagattttaattctttttttccctcacattatcaatttgggacactggccattccagtgatggctgtcattgagtcaggaatcttgttttcaagattaaaattttatcatttgta

SEQ ID NO: 412526 - DNA, 120 bp, Artificial Sequence
  ENSG00000148690_31 (sequence is synthesized)
tgtagatcattagaatacaaaatgccctcccccacttttgccatttttgctagaattggtgtcagaatagattcagttaggagcaaagttcagacacacatgttgattcagggatcagag

SEQ ID NO: 412527 - DNA, 120 bp, Artificial Sequence
  ENSG00000148690_32 (sequence is synthesized)
tccaacaggtaaaaggctagaactaccgtaacaaatcaatgctgttttatttttatgttgtgtttaactaaaggacattctgtattgacaggccacatttgtgccatttcttttttagac

SEQ ID NO: 412528 - DNA, 120 bp, Artificial Sequence
  ENSG00000148690_33 (sequence is synthesized)
taataatcattattggagaggagttgtctgctaatgtaactactttgaaactctgatgaggaagaaagtgcttcagaatctgaactttggaagggtccactaccagagacagatgaaaaa

SEQ ID NO: 412529 - DNA, 120 bp, Artificial Sequence
  ENSG00000148690_34 (sequence is synthesized)
ctttaaacctctgtgagtaccaaggaagtaggtactcatatttctactttacatatatgaggaagctgaggcaaaaaagagattaatttgcccagtactatacaactgttaagtggtaga

SEQ ID NO: 412530 - DNA, 120 bp, Artificial Sequence
  ENSG00000148690_35 (sequence is synthesized)
gctaaaatgcaaatgtaaataatctgactccaaaggctgtacttttttgtactagaatatactacctctttactataccataacctctttttttcttgtcagtcttacagaacaggatat

SEQ ID NO: 412531 - DNA, 120 bp, Artificial Sequence
  ENSG00000148690_36 (sequence is synthesized)
ttaagctatcttaaagtagattgttcttaacagataaattggtgattgttcaatgtattttcttcaaatcctataagaagagaaaaatctgtcatgatgggaattacatttattttttag

SEQ ID NO: 412532 - DNA, 120 bp, Artificial Sequence
  ENSG00000148690_37 (sequence is synthesized)
gttggtgaatgtcattgttggctccatgtttagatttctgtataatttaaatttacattggcataaatgtaatttttttattatcagtttggatttaggtggcgagtagaaaaagaagta

SEQ ID NO: 412533 - DNA, 120 bp, Artificial Sequence
  ENSG00000148690_38 (sequence is synthesized)
acattatttgcatttagtataattcttaacaagaaattttaaatattcaatgatcagaaattttgcactgagaaaaatagaaatgttaagatatttgttgtttaaaaatttagcagagag

SEQ ID NO: 412534 - DNA, 120 bp, Artificial Sequence
  ENSG00000148690_39 (sequence is synthesized)
agagggagatgttgatggaggtattcctctcttaggaatatagtatattccttataattattttgcttgtacgaactttgttttcaacatatttgaagtgtcttaaagcactgactcttt

SEQ ID NO: 412535 - DNA, 120 bp, Artificial Sequence
  ENSG00000148690_40 (sequence is synthesized)
ctctccacgtaaattctaatttatcaggaggtcctttcctaaattaggtaaaatgtagtgacagtttcgaaaatacattcaagtataagaccagtggaccaatgttatctcaggatgaaa

SEQ ID NO: 412536 - DNA, 120 bp, Artificial Sequence
  ENSG00000148690_41 (sequence is synthesized)
tcatagatacatacttcaacaaaggtgtacacaggctaaagtgggagagtgtattttagttttcatccatttccaacagtgagaggtgtgaatgcttatgcaatatagaaaaaattcccc

SEQ ID NO: 412537 - DNA, 120 bp, Artificial Sequence
  ENSG00000148690_42 (sequence is synthesized)
tttttcagttctaattttttatccttaaaaagtcttttggggcaaattcttgaatcactgatttatattattcttttatttcttctgcctgccttctccttcccactgtctttcaccccc

SEQ ID NO: 412538 - DNA, 120 bp, Artificial Sequence
  ENSG00000148690_43 (sequence is synthesized)
tgccctttgaatccttccctgcttcctagaaatagcccttaatgctcttttacctctcctcagctaagtcaaatttttactagtagaagcagggtgaatactgtgaagactatatccaat

SEQ ID NO: 412539 - DNA, 120 bp, Artificial Sequence
  ENSG00000148690_44 (sequence is synthesized)
ctgagaaacccctagctaatttgatcttgaaaaaacaaactatccacttcaagctgacctgctgtttggcagccggtacgctatttaccatagcaagcatgaaacatatacattgttatg

SEQ ID NO: 412540 - DNA, 120 bp, Artificial Sequence
  ENSG00000148690_45 (sequence is synthesized)
gtatgccaaccccagatatcctctcaggtggtcagtcatctgtattacatggtcttggcaatttcagacctcacattttgctctttatttccatttggacaatactcagttaccttctta

SEQ ID NO: 412541 - DNA, 120 bp, Artificial Sequence
  ENSG00000148690_46 (sequence is synthesized)
acccatttgacacctggattattaaaaccaaatccatggagaaaaactcaatttctgttgggacagtaacaagtgctttagatatgttacctcatttaatcttaataatgtgcatataat

SEQ ID NO: 412542 - DNA, 120 bp, Artificial Sequence
  ENSG00000148690_47 (sequence is synthesized)
atcctcgttttgtagatgagaaaaatcaagacctagagaatgtctttaaatgaatgaagaaactcaatttttaaaaatatatatatttaaagtatacaacttgatgatttgctgccctct

SEQ ID NO: 412543 - DNA, 120 bp, Artificial Sequence
  ENSG00000148690_48 (sequence is synthesized)
taacaaatttcaagtattgttatctttagtcaccttgcacatgagatcgcccaagaaccaaagaattgaagtaaagtgcccaaggtcaaatagttaatggcaaagctgggattaaacata

SEQ ID NO: 412544 - DNA, 120 bp, Artificial Sequence
  ENSG00000148690_49 (sequence is synthesized)
agtttataattccaaagtctatgccctttacctgtatcatcaatcaataactgttcatcagtgaaatcaactgtatgtctattctttatacctcagttttggcatatgcattgtacagat

SEQ ID NO: 412545 - DNA, 120 bp, Artificial Sequence
  ENSG00000148690_50 (sequence is synthesized)
ccacattaaatgatttgatctatgtttcacttctgtctataaaatgggtataaagagacctacttcgttggattattatcagaatcaaatgagaaaacatacatgtaaagtatgtgcctg

SEQ ID NO: 412546 - DNA, 120 bp, Artificial Sequence
  ENSG00000148690_51 (sequence is synthesized)
acgcaaagtaagtccttgataacctgtagctatcattgttatcagagaaaagaaaaatacagacatataaatcctgtgtttgttctctagaattgatgaaatcaaaagttaagtctataa

SEQ ID NO: 412547 - DNA, 120 bp, Artificial Sequence
  ENSG00000148690_52 (sequence is synthesized)
aaatctgacctgtccatttgttaccatgattattggagacatttgccatttcttcagtggtgcaagttattagttaccatataatatccacaaaaaccaagatgatagacctactttcat

SEQ ID NO: 412548 - DNA, 120 bp, Artificial Sequence
  ENSG00000148690_53 (sequence is synthesized)
tattcaaaacatgtaggaaaaattgtatataattttaggcaccacactctaaagggaacattgaaaacttgaagcaggtcaagaagaaaaaaactgaggtatggagaaaacttgaaatta

SEQ ID NO: 412549 - DNA, 120 bp, Artificial Sequence
  ENSG00000148690_54 (sequence is synthesized)
tattgtaggaagaatgttggaggaactgcagatgtttacctgggagaagagtgaaaggatgggagggaagaggtgaggaagtagacatggaaattactgtatggatatttgcaaggctgc

SEQ ID NO: 412550 - DNA, 120 bp, Artificial Sequence
  ENSG00000148690_55 (sequence is synthesized)
tactatgtaggagacttattttttatgactctgggttggcagaactgcccaaaaacagatttttgccttaatttaaggaaaaacttgtcccttagaactgtctgacaaaaggaatggaga

SEQ ID NO: 412551 - DNA, 120 bp, Artificial Sequence
  ENSG00000148690_56 (sequence is synthesized)
taatcattattggagaggagttgtctgctaatgtaactactttgtgagttatagtgttattgtctgataattttgcagtatttttaaatttttagttgactaatacaggtgatttatttg

SEQ ID NO: 412552 - DNA, 120 bp, Artificial Sequence
  ENSG00000148690_57 (sequence is synthesized)
aaacatatctattttgtcatctttaataaaatgtctttattgtttttactgattttgaaggtaattcatgctcattgtttaaaatacaaacaatttgaaaatgtttaaaatagaaagtaa

SEQ ID NO: 412553 - DNA, 120 bp, Artificial Sequence
  ENSG00000148690_58 (sequence is synthesized)
aagtattccaggcccacaggtaatataatcagttaaatttggttggcttttgcaaacttacaatacgtacataaaattacatgtatgtatataatgtgcatatgtttttaacatatctat

SEQ ID NO: 412554 - DNA, 120 bp, Artificial Sequence
  ENSG00000148690_59 (sequence is synthesized)
tatactatgcatactttttgtaactttttaaaaatttgatatagaatggacatttttctattgcagtacatacagatatgctaatgtttttaaacagctgtatagtatttatttaaccag

SEQ ID NO: 412555 - DNA, 120 bp, Artificial Sequence
  ENSG00000148690_60 (sequence is synthesized)
tccttaatccctaattggtggggaattaggttttttgttgttgttgttacacagtgtgcatctttgtacatatgtatcagaggtgcttatttatgtatgtaagtaatcaaattcctaaaa

SEQ ID NO: 412556 - DNA, 120 bp, Artificial Sequence
  ENSG00000148690_61 (sequence is synthesized)
gcagcattgctggtcaaagggtatgcgttttaaactgatctatattgccagatttttctccagaaaaaggtttacagaattttcactcccagcaatgtgtgagaatgccagtttcttccc

SEQ ID NO: 412557 - DNA, 120 bp, Artificial Sequence
  ENSG00000148690_62 (sequence is synthesized)
tgaaacaggcttcttctcattatgtaatcagcattggttttttaaaatgtctgacaattttttttaaaataatttaactagctggtcttacatactagctcagttcttaaggtactaatc

SEQ ID NO: 412558 - DNA, 120 bp, Artificial Sequence
  ENSG00000148690_63 (sequence is synthesized)
ctaatgtaaacatgttctctacaaatgtaaatcttaacttgcgtgtcttctgtgtaaccaagaaaaagaagaaactagatcagagacaactatattgcaagagataattgacttacaaga

SEQ ID NO: 412559 - DNA, 120 bp, Artificial Sequence
  ENSG00000148690_64 (sequence is synthesized)
gttaatattggaattgctactttaactcagtgtaacttagagaagtttcgatgagacttaaaatccttggcctttttgctgagattctttggtaacccttggcttatttatatatgtttt

SEQ ID NO: 412560 - DNA, 120 bp, Artificial Sequence
  ENSG00000148690_65 (sequence is synthesized)
aaaagaatttattgtacctgtgagagtgaattaaatttctagagagtcataaaagttgaagctgagttaaataaaaagttaattgtattggcgaataattcaaaatgtgctttaagtata

SEQ ID NO: 412561 - DNA, 120 bp, Artificial Sequence
  ENSG00000148700_0 (sequence is synthesized)
agagcgcgagccgccagcccgtaacggtcgccagtgtgaggggcgggagggaaagaagaggggtttaaattagattttttaaaacacagagcaagcgccagaggcgtcggcatcccaggt

SEQ ID NO: 412562 - DNA, 120 bp, Artificial Sequence
  ENSG00000148700_1 (sequence is synthesized)
gtcgccgcttcctgctgcacagggctcggcgtacaggtccctccctcctcaagccccctccccttctcccgccctaccctctggggctctgcggcgcttaagaggcggccgcagcggcgg

SEQ ID NO: 412563 - DNA, 120 bp, Artificial Sequence
  ENSG00000148700_2 (sequence is synthesized)
atccggcggctgctgcagcccgggcggctgccgagaaggagggaggggaaacacaaagccggctacgcgctgcgagataacaagagtaatccacagacttaaaacatgagctcagatgcc

SEQ ID NO: 412564 - DNA, 120 bp, Artificial Sequence
  ENSG00000148700_3 (sequence is synthesized)
agccaaggcgtgattaccactcctcctcctcccagcatgcctcacaaagagagatattttgaccgcatcaatgaaaatgacccagaatacattagggagaggaacatgtctcctgatcta

SEQ ID NO: 412565 - DNA, 120 bp, Artificial Sequence
  ENSG00000148700_4 (sequence is synthesized)
cgacaagacttcaacatgatggagcagaggaaacgagttactcagatcctgcaaagtcctgcctttcgggaagacttggaatgccttattcaagaacagatgaagaaaggccacaaccca

SEQ ID NO: 412566 - DNA, 120 bp, Artificial Sequence
  ENSG00000148700_5 (sequence is synthesized)
actggattactagcattacagcagattgcagattacatcatggccaattctttctcgggtttttcttcacctcctctcagtcttggcatggtcacacctatcaatgaccttcctggtgca

SEQ ID NO: 412567 - DNA, 120 bp, Artificial Sequence
  ENSG00000148700_6 (sequence is synthesized)
gatacatcctcatatgtgaagggagaaaaacttactcgctgtaaacttgccagcctgtacagacttgtagacttgtttggatgggcacacctggcaaatacctatatctcagtaagaata

SEQ ID NO: 412568 - DNA, 120 bp, Artificial Sequence
  ENSG00000148700_7 (sequence is synthesized)
agtaaggagcaagaccacattataataattcccagaggcctatctttttctgaagctacagcctccaatttggtgaaagtcaatataataggagaagtggttgaccagggaagtaccaat

SEQ ID NO: 412569 - DNA, 120 bp, Artificial Sequence
  ENSG00000148700_8 (sequence is synthesized)
ttgaaaattgaccatacaggattcagtccccatgctgcaatctattcaacacgtcctgatgttaagtgtgtgatacacatccatacccttgcaacagcagctgtatcctccatgaaatgt

SEQ ID NO: 412570 - DNA, 120 bp, Artificial Sequence
  ENSG00000148700_9 (sequence is synthesized)
gggatccttccaatttctcaagagtctcttcttctgggagatgttgcctattatgactaccaagggtcacttgaagaacaggaggagagaattcaactgcagaaggttctgggaccaagt

SEQ ID NO: 412571 - DNA, 120 bp, Artificial Sequence
  ENSG00000148700_10 (sequence is synthesized)
tgtaaggtgctggtactcaggaatcatggtgtggttgcacttggagaaacattagaggaggcttttcattatatttttaatgtgcaactagcctgtgagattcaggtgcaggccctagca

SEQ ID NO: 412572 - DNA, 120 bp, Artificial Sequence
  ENSG00000148700_11 (sequence is synthesized)
ggtgcaggtggagtagacaatctccatgtactggactttcagaagtataaagctttcacttacactgtagcagcgtctggtggaggaggtgtgaatatgggttcccatcaaaaatggaag

SEQ ID NO: 412573 - DNA, 120 bp, Artificial Sequence
  ENSG00000148700_12 (sequence is synthesized)
gttggcgaaattgagtttgaagggcttatgaggactctggacaacttggggtatagaacaggctatgcttacaggcatcctctcattcgagagaagcctaggcacaagagtgatgtggaa

SEQ ID NO: 412574 - DNA, 120 bp, Artificial Sequence
  ENSG00000148700_13 (sequence is synthesized)
atcccagcaactgtgactgctttttcctttgaagacgatacagtgccactctctcctctcaaatacatggcacagaggcaacagcgtgaaaaaacaagatggctgaactcaccaaatact

SEQ ID NO: 412575 - DNA, 120 bp, Artificial Sequence
  ENSG00000148700_14 (sequence is synthesized)
tacatgaaagtgaatgtgcctgaggagtctcggaacggagaaaccagtccccgaaccaaaatcacgtggatgaaagcagaagactcatctaaagttagtggtggaacacctatcaaaatt

SEQ ID NO: 412576 - DNA, 120 bp, Artificial Sequence
  ENSG00000148700_15 (sequence is synthesized)
gaagatccaaatcagtttgttcctttaaacacaaacccgaatgaggtactagaaaagagaaataagattcgggaacaaaatcgatatgacttgaaaacagcaggaccacaatctcagttg

SEQ ID NO: 412577 - DNA, 120 bp, Artificial Sequence
  ENSG00000148700_16 (sequence is synthesized)
cttgctggaattgttgtggataagccaccttctactatgcaatttgaagatgatgatcatggcccaccagctcctcctaacccatttagtcatctcacagaaggagaacttgaagagtat

SEQ ID NO: 412578 - DNA, 120 bp, Artificial Sequence
  ENSG00000148700_17 (sequence is synthesized)
aagaggacaatcgaacgtaaacaacaaggcctagaagatgctgagcaggaattactctcagatgacgcttcatctgtttcacaaattcagtctcaaactcagtcaccgcaaaatgtccct

SEQ ID NO: 412579 - DNA, 120 bp, Artificial Sequence
  ENSG00000148700_18 (sequence is synthesized)
gatgttgaagatgagcttgctaagcgagtgagtaggttaagcacaagtacaaccatagaaaacatcgagattactattaagtctccagagaaaatcgaagaagtcctgtcacctgaaggc

SEQ ID NO: 412580 - DNA, 120 bp, Artificial Sequence
  ENSG00000148700_19 (sequence is synthesized)
tccccttcaaaatcgccatccaagaaaaagaagaaattccgcactccttcttttctgaaaaagaacaaaaaaaaggagaaagttgaggcctaaataaagtctttttataattattattat

SEQ ID NO: 412581 - DNA, 120 bp, Artificial Sequence
  ENSG00000148700_20 (sequence is synthesized)
aacaatgtgacattgcacatctaaataccacatttaagttgatcattaatatgcaatggtagatcagattgggggatgtagcaaactggactttaagaactggaaagaggttttacaaaa

SEQ ID NO: 412582 - DNA, 120 bp, Artificial Sequence
  ENSG00000148700_21 (sequence is synthesized)
gaaaaactttcagattcatctctcattttatatgtccagaaatggctttgaattttaagcaattactagttttaattagctctgccctcatgaagtattattataattcaccataaacag

SEQ ID NO: 412583 - DNA, 120 bp, Artificial Sequence
  ENSG00000148700_22 (sequence is synthesized)
ctatctgtctgaattacttcaggccttctccataatatctgttagaaagaaattgccagtgagcaagtgagaatttttatttctcaatacctgcttcacttgataatcatattataattt

SEQ ID NO: 412584 - DNA, 120 bp, Artificial Sequence
  ENSG00000148700_23 (sequence is synthesized)
tttatcatgattattgactatatttttggagtcccattgtttcagtgggcattaacagaatgctttaaaaacttctaagacaagaatctatagcattagtatacactggcacataatttt

SEQ ID NO: 412585 - DNA, 120 bp, Artificial Sequence
  ENSG00000148700_24 (sequence is synthesized)
ttaaaaagttttaagaaaagattcatttggaattttattcacagtataaaatttcctcacctgaagtaactttgtttgccaaaaaagttgttttaataaactataatttttgaaaacttc

SEQ ID NO: 412586 - DNA, 120 bp, Artificial Sequence
  ENSG00000148700_25 (sequence is synthesized)
cttttttattagtttagaaagccccttatttttcaacaaaggggattttgtacacataacatgggttatttagtttaactctggcaaaaaaaaaaaaaaaaattttgtatgttgatgttt

SEQ ID NO: 412587 - DNA, 120 bp, Artificial Sequence
  ENSG00000148700_26 (sequence is synthesized)
gtataccgttcagtataaaagtgtcctaagcatattagccaatcttttcacagtagagcatacttaaggctgcttggtactgagtatacttaaatataactccagaatccagggacttgg

SEQ ID NO: 412588 - DNA, 120 bp, Artificial Sequence
  ENSG00000148700_27 (sequence is synthesized)
tgttaaaacaggattagagcatgtaaaggtacatctagattcatatttgaatcttaaactgtatttttctcttagtattgctaatgagtaaagaaaagtctcataaggtagccaaatgaa

SEQ ID NO: 412589 - DNA, 120 bp, Artificial Sequence
  ENSG00000148700_28 (sequence is synthesized)
aaagaatgaaagggaaagtgaaaaattaaggggacaaaagatgggatgtgaaaagaagaattctagtttgatggtgactcatattcacgataggatacaaagtgtgatttgttggaaaca

SEQ ID NO: 412590 - DNA, 120 bp, Artificial Sequence
  ENSG00000148700_29 (sequence is synthesized)
tgtcccaaatttctaaaattctgcttctctgccaaaagcaatgtctttcttggttgatatttgagttttaaaagggtcaaatctttctaattttttgtatctttagagggcagcactaga

SEQ ID NO: 412591 - DNA, 120 bp, Artificial Sequence
  ENSG00000148700_30 (sequence is synthesized)
agaaatcagcaggtctaatcccaccagtaagaaaactaccacttcttgatttttacagatttaaaaaaatcttttcagtgacctttctttttaatgtaaatacaaatttaaacctaggct

SEQ ID NO: 412592 - DNA, 120 bp, Artificial Sequence
  ENSG00000148700_31 (sequence is synthesized)
taatataggcgtttcccctttcacccaagtgatgtcacagttcgatgcaaaatcaatgatccagaatgatcgtgggtaaaaataactcaaagtgtttcttaagggtgagttggcatgcaa

SEQ ID NO: 412593 - DNA, 120 bp, Artificial Sequence
  ENSG00000148700_32 (sequence is synthesized)
aaaattacattgattacagtgtgttttggagctggctctgtttgtgtgcatatgataatgcagagttgagccagagcctggaaatgtcattctagatctcactaactactggaatcagtg

SEQ ID NO: 412594 - DNA, 120 bp, Artificial Sequence
  ENSG00000148700_33 (sequence is synthesized)
ttttaatctcttggtggaaactttcagttgcttaactctctattggaagatttttttaatgttctacatcatttatgttgtattacaatgtatgtagaaatagtaacctgtgaactatgc

SEQ ID NO: 412595 - DNA, 120 bp, Artificial Sequence
  ENSG00000148700_34 (sequence is synthesized)
ttttccataactttttaaaaatatatatatctaaatgaatgcaatgtgcataaatattttttaaacataacagtgaactattgcaccttttgctaatgcctctatttacttgctttggca

SEQ ID NO: 412596 - DNA, 120 bp, Artificial Sequence
  ENSG00000148700_35 (sequence is synthesized)
taaagaatgagccaatgaacctctgtgtcctgtggaaaaatgtataaatgttatctgatattgctcttagatgtaatgctaattaatgttaaatcacaaataaacagtattttaaatata

SEQ ID NO: 412597 - DNA, 120 bp, Artificial Sequence
  ENSG00000148700_36 (sequence is synthesized)
agtccacaaaactccctgattccatcctctctgcctcttatgaagcaatactagagaggaaaaacaaaacccattcctttaagaaagattccgcctcctctcataagcaagcgcctaatg

SEQ ID NO: 412598 - DNA, 120 bp, Artificial Sequence
  ENSG00000148700_37 (sequence is synthesized)
gtaattgtagagtttactaagtcaaacacttactactcagcattgagagaagctgctgctgctaatgctgctgctgctgctgccgccgccgccgctgctgctgctgctgttggtctgagg

SEQ ID NO: 412599 - DNA, 120 bp, Artificial Sequence
  ENSG00000148700_38 (sequence is synthesized)
ctgcagtaggtttctgtgcagcattgcagaatccacacctagagaacagaagacacagacacgtacgtctactacccttgttagaaggaagctttggatcttcggtggataacaagagta

SEQ ID NO: 412600 - DNA, 120 bp, Artificial Sequence
  ENSG00000148700_39 (sequence is synthesized)
gcggccgcagcggcggatccggcggctgctgcagcccgggcggctgccgagaaggagggaggggaaacacaaagccggctacgcgctgcgaggcctttcgggaagacttggaatgcctta

SEQ ID NO: 412601 - DNA, 120 bp, Artificial Sequence
  ENSG00000148700_40 (sequence is synthesized)
aacattattccccttttttaattgctttgttatttgctcgtttagttggattttgtgtacttatttgcaaatacatattagttagtggctttttgtcttttaagagaagttctgctctac

SEQ ID NO: 412602 - DNA, 120 bp, Artificial Sequence
  ENSG00000148700_41 (sequence is synthesized)
acattgagtgtggatatcttgctctttaaaacaaagttcattgttagggcagtattgcaacagaattgccacacaaaaaccagcttaagaaatgtacagcacttcaatttttttagttgt

SEQ ID NO: 412603 - DNA, 120 bp, Artificial Sequence
  ENSG00000148700_42 (sequence is synthesized)
aatttgcataatttcagctccagtgttacatgaaagttatgtggtgtttggaaggatgcctttttctttgttttttagcaaaggagtcttttaaatcatttgtatacaaaaggaattagg

SEQ ID NO: 412604 - DNA, 120 bp, Artificial Sequence
  ENSG00000148700_43 (sequence is synthesized)
tacctcatcacagtaagttttccatattttacttatatctcccaataattacatattttatatcattaaaaatggggcgctacttttgttcagcatttatattgatttaccttaatctga

SEQ ID NO: 412605 - DNA, 74 bp, Artificial Sequence
  ENSG00000148700_44 (sequence is synthesized)
tacttttgttcagcatttatattgatttaccttaatctgaattttggcaacccgcagttcttaagaatttgtgg

SEQ ID NO: 412606 - DNA, 120 bp, Artificial Sequence
  ENSG00000148700_45 (sequence is synthesized)
ggattacaggcatgcaccaccacgctgggctaattttgtatttttagtaaagacgaggattctccatgttggtcaagctggtctccaactccccacctcaggcctttcgggaagacttgg

SEQ ID NO: 412607 - DNA, 120 bp, Artificial Sequence
  ENSG00000148700_46 (sequence is synthesized)
ggctgctgcagcccgggcggctgccgagaaggagggaggggaaacacaaagccggctacgcgctgcgagctgtgaaagtgaagtttggcttgaaaacacattctgccagtgcaaatccaa

SEQ ID NO: 412608 - DNA, 120 bp, Artificial Sequence
  ENSG00000148700_47 (sequence is synthesized)
gagttgtctcccagagctccgtggaatttcctttctctgctttaacgtacttttaaaagataacaagagtaatccacagacttaaaacatgagctcagatgccagccaaggtgtgaatat

SEQ ID NO: 412609 - DNA, 120 bp, Artificial Sequence
  ENSG00000148700_48 (sequence is synthesized)
acttcaacatgatggagcagaggaaacgagttactcagatcctgcaaagtcctggccagtggtattctatttccaaatgagtacatttcttaatggagaaattctaagcctttcgggaag

SEQ ID NO: 412610 - DNA, 120 bp, Artificial Sequence
  ENSG00000148700_49 (sequence is synthesized)
ttgagccttatgttaaaaacagccgagtagtggtgaaattaaattaagtggtaaagaaaattattttaatgagagcagtctttcaatagcaggtctggttggttattgatggctcctgca

SEQ ID NO: 412611 - DNA, 120 bp, Artificial Sequence
  ENSG00000148700_50 (sequence is synthesized)
gcagttatctaacaatctactaatattttcttaacacaaagcttcattttagaaaatttttgattctttagtggatgaaagcagaagactcatctaaagttagtggtggaacacctatca

SEQ ID NO: 412612 - DNA, 120 bp, Artificial Sequence
  ENSG00000148700_51 (sequence is synthesized)
acattgagtgtggatatcttgctctttaaaacaaagttcattgttagggcagtattgcaacagaattgccacacaaaaaccagcttaagaaatgtacagcacttcaatttttttataaca

SEQ ID NO: 412613 - DNA, 120 bp, Artificial Sequence
  ENSG00000148700_52 (sequence is synthesized)
aatatgttaagaggtatggctctaatgtgttttccatcagggaggatcagagtcttggaaggtttctttttcagataggtggaaaagatacttcagctgtctgctggcacaagagtgtca

SEQ ID NO: 412614 - DNA, 120 bp, Artificial Sequence
  ENSG00000148700_53 (sequence is synthesized)
tcttgtctttgttgttagtagcctgagcaagtattatagatatttgccaaattgaaattgtgcctttttgaaagtaaaatactcattacagtctttatagttttgtgtctctgtatattt

SEQ ID NO: 412615 - DNA, 120 bp, Artificial Sequence
  ENSG00000148700_54 (sequence is synthesized)
actttagtttcagtaatcattgtgaatgagactgtgagaaacttggcttgttcagaagatactgtgcataagacatgagataacaagagtaatccacagacttaaaacatgagctcagat

SEQ ID NO: 412616 - DNA, 120 bp, Artificial Sequence
  ENSG00000148702_0 (sequence is synthesized)
cccccctaaaggcatagacaacaaaagaaattttattgagaggaaaacacaagtccttaaactgcaaagatgtttgccaggatgtctgatctccatgttctgctgttaatggctctggtg

SEQ ID NO: 412617 - DNA, 120 bp, Artificial Sequence
  ENSG00000148702_1 (sequence is synthesized)
ggaaagacagcctgtgggttctccctgatgtctttattggaaagcctggacccagactggacccctgaccagtatgattacagctacgaggattataatcaggaagagaacaccagtagc

SEQ ID NO: 412618 - DNA, 120 bp, Artificial Sequence
  ENSG00000148702_2 (sequence is synthesized)
acacttacccacgctgagaatcctgactggtactacactgaggaccaagctgatccatgccagcccaacccctgtgaacacggtggggactgcctcgtccatgggagcaccttcacatgc

SEQ ID NO: 412619 - DNA, 120 bp, Artificial Sequence
  ENSG00000148702_3 (sequence is synthesized)
agctgcctggctcctttctctgggaataagtgtcagaaagtgcaaaatacgtgcaaggacaacccatgtggccggggccaatgtctcattacccagagtcctccctactaccgctgtgtc

SEQ ID NO: 412620 - DNA, 120 bp, Artificial Sequence
  ENSG00000148702_4 (sequence is synthesized)
tgtaaacacccttacacaggtcccagctgctcccaagtggttcctgtatgcaggccaaacccctgccagaatggggctacctgctcccggcataagcggagatccaagttcacctgtgcc

SEQ ID NO: 412621 - DNA, 120 bp, Artificial Sequence
  ENSG00000148702_5 (sequence is synthesized)
tgtcccgaccagttcaaggggaaattctgtgaaataggttctgatgactgctatgttggcgatggctactcttaccgagggaaaatgaataggacagtcaaccagcatgcgtgcctttac

SEQ ID NO: 412622 - DNA, 120 bp, Artificial Sequence
  ENSG00000148702_6 (sequence is synthesized)
tggaactcccacctcctcttgcaggagaattacaacatgtttatggaggatgctgaaacccatgggattggggaacacaatttctgcagaaacccagatgcggacgaaaagccctggtgc

SEQ ID NO: 412623 - DNA, 120 bp, Artificial Sequence
  ENSG00000148702_7 (sequence is synthesized)
tttattaaagttaccaatgacaaggtgaaatgggaatactgtgatgtctcagcctgctcagcccaggacgttgcctacccagaggaaagccccactgagccatcaaccaagcttccgggg

SEQ ID NO: 412624 - DNA, 120 bp, Artificial Sequence
  ENSG00000148702_8 (sequence is synthesized)
tttgactcctgtggaaagactgagatagcagagaggaagatcaagagaatctatggaggctttaagagcacggcgggcaagcacccatggcaggcgtccctccagtcctcgctgcctctg

SEQ ID NO: 412625 - DNA, 120 bp, Artificial Sequence
  ENSG00000148702_9 (sequence is synthesized)
accatctccatgccccagggccacttctgtggtggggcgctgatccacccctgctgggtgctcactgctgcccactgcaccgacataaaaaccagacatctaaaggtggtgctaggggac

SEQ ID NO: 412626 - DNA, 120 bp, Artificial Sequence
  ENSG00000148702_10 (sequence is synthesized)
caggacctgaagaaagaagaatttcatgagcagagctttagggtggagaagatattcaagtacagccactacaatgaaagagatgagattccccacaatgatattgcattgctcaagtta

SEQ ID NO: 412627 - DNA, 120 bp, Artificial Sequence
  ENSG00000148702_11 (sequence is synthesized)
aagccagtggatggtcactgtgctctagaatccaaatacgtgaagactgtgtgcttgcctgatgggtcctttccctctgggagtgagtgccacatctctggctggggtgttacagaaaca

SEQ ID NO: 412628 - DNA, 120 bp, Artificial Sequence
  ENSG00000148702_12 (sequence is synthesized)
tgtgcaggaaatcttcagaaacctgggcaagacacctgccagggtgactctggaggccccctgacctgtgagaaggacggcacctactacgtctatgggatagtgagctggggcctggag

SEQ ID NO: 412629 - DNA, 120 bp, Artificial Sequence
  ENSG00000148702_13 (sequence is synthesized)
tgtgggaagaggccaggggtctacacccaagttaccaaattcctgaattggatcaaagccaccatcaaaagtgaaagtggcttctaaggtactgtcttctggacctcagagcccactctc

SEQ ID NO: 412630 - DNA, 120 bp, Artificial Sequence
  ENSG00000148702_14 (sequence is synthesized)
cttggcaccctgacaccgggaggcctcatggccaacaatggacacctccagagcctccaggggaccacacagtagactatccctactctaagcagagacaactgccacccagcctgggcc

SEQ ID NO: 412631 - DNA, 120 bp, Artificial Sequence
  ENSG00000148702_15 (sequence is synthesized)
ttcccagaccagcatttgcacaatatcaccaggcttcttctgcctcccttggtaacccaaggaatgatggaatcaacacaacatagtatgtttgctttccttacccaattgtaccttcta

SEQ ID NO: 412632 - DNA, 120 bp, Artificial Sequence
  ENSG00000148702_16 (sequence is synthesized)
gaaaatcagtgttcacagagactgcctccaccacaggcatcctgcaaatgcagactccagaatccccagcatcagcgggaaccaccatcacatctttattcctcagcccagacactcgag

SEQ ID NO: 412633 - DNA, 120 bp, Artificial Sequence
  ENSG00000148702_17 (sequence is synthesized)
gcactcaacagaatcagccatccacgtctaggtatcagagaggaccacaaatacaacattctccatctgctttcagagttattattttaataaaggaagatctgggatgggctggtgggc

SEQ ID NO: 412634 - DNA, 120 bp, Artificial Sequence
  ENSG00000148702_18 (sequence is synthesized)
cattccagcttgccgaaatcaaagccatctgaagcctgtctctggtgaacaaacttcctctctggcctctcaggaatcagggtggacatggctcacaacagcagggccttcttctttttg

SEQ ID NO: 412635 - DNA, 120 bp, Artificial Sequence
  ENSG00000148702_19 (sequence is synthesized)
acgtgcagaatctcagtggcatctgggttcacctccccactctgatgatctccagcctccactgcttctgccccccgctgctgaaatcaaacataccccaagttaaaatgaagctccccc

SEQ ID NO: 412636 - DNA, 120 bp, Artificial Sequence
  ENSG00000148702_20 (sequence is synthesized)
acccccactcccggccccggttcccacaggacacgctaagaagcacagggagcatttaacaggctcaccctccctttccttttcccctcttctaccctccccaagaaaaagggccttcaa

SEQ ID NO: 412637 - DNA, 120 bp, Artificial Sequence
  ENSG00000148702_21 (sequence is synthesized)
ggcaggaatgagaaagcaaagccaatctctcatttagacctggcttctttcttctgaacaaagtagggttcaaaatgcagactgtcatatccagcgagtccctgaccctttctgcgaatg

SEQ ID NO: 412638 - DNA, 120 bp, Artificial Sequence
  ENSG00000148702_22 (sequence is synthesized)
taacgagcaagcagtcagcacagcctgggctgccctggcccgggattgatgtagccccggtaggtttgcctctgcagaactaatggctgtgacttcagagaaagccctgcaggaagttta

SEQ ID NO: 412639 - DNA, 120 bp, Artificial Sequence
  ENSG00000148702_23 (sequence is synthesized)
acctgcgtgtcatctgcctggtcatctcagacccatgaaattaggcgccttgtttgagctgcgtttcacacttctttagagctagctgacctttggccaaaaataaactttgaaaagaaa

SEQ ID NO: 412640 - DNA, 120 bp, Artificial Sequence
  ENSG00000148702_24 (sequence is synthesized)
catagaaaccactaacgaaaattaactgtttactttttcactgtctgcccatctcctcctcaaccagttcacatctgcctccttcatccccacatcaccaatgcctggctcacagcagag

SEQ ID NO: 412641 - DNA, 120 bp, Artificial Sequence
  ENSG00000148702_25 (sequence is synthesized)
ttcagttctccctgatgtctttattggaaagcctggacccagcaggtgccacgacagccagcaggcctgtggaaatgcctcttcaaagctggcttggctctgcccagcaatgcaggctga

SEQ ID NO: 412642 - DNA, 120 bp, Artificial Sequence
  ENSG00000148702_26 (sequence is synthesized)
gcccatccatcagctgtcctactgcctgccagcgagagtgtctgctgggcttgccccgccagccagattggaagtgtcaaatgcaggccgacagggctggggtttggaggaggccctcag

SEQ ID NO: 412643 - DNA, 120 bp, Artificial Sequence
  ENSG00000148702_27 (sequence is synthesized)
ctggcaagctccttaaccagagcagctgcaaagctcccatcgcaggaactctgagcattttctgagagaccccaaacatggactgagttaatcctggtcaagggacctggagcatgtgct

SEQ ID NO: 412644 - DNA, 120 bp, Artificial Sequence
  ENSG00000148702_28 (sequence is synthesized)
taagaaggtttcccaatgcatgctacttcctgaaagctaaaacccaaggactttcatgaaacccaaacctataagagattccaggatcgtaaaaaggcaaataaaacttggagttaggta

SEQ ID NO: 412645 - DNA, 120 bp, Artificial Sequence
  ENSG00000148704_0 (sequence is synthesized)
actctcccgtcgccgctgacccgcgcgcggccgccgaagcctccccgcggggacattcattcttgccccttgcctgtcgccgggccgggcgtacgggccgcgttgtcgggggttttgtcc

SEQ ID NO: 412646 - DNA, 88 bp, Artificial Sequence
  ENSG00000148704_1 (sequence is synthesized)
gtttttgttgttgttcttgcctatgttcgggaaaccagacaaaatggacgttcgatgccactcggacgccgaggctgcccgggtctcg

SEQ ID NO: 412647 - DNA, 120 bp, Artificial Sequence
  ENSG00000148704_2 (sequence is synthesized)
cgttcgatgccactcggacgccgaggctgcccgggtctcgaagaacgcgcacaaggagagtcgggagagcaagggcgcggaggggaacctcccagccgccttcctcaaggagccgcaggg

SEQ ID NO: 412648 - DNA, 120 bp, Artificial Sequence
  ENSG00000148704_3 (sequence is synthesized)
cgccttctcagcgtcgggcgctgctgaggattgtaacaaaagtaaatccaattccgcagcggacccggattactgccgccggatcctggtccgagatgccaaggggtccatccgagagat

SEQ ID NO: 412649 - DNA, 120 bp, Artificial Sequence
  ENSG00000148704_4 (sequence is synthesized)
catcctgcccaagggcctggacttggaccggcctaagaggacgcgcacgtccttcaccgcggagcagctctatcggctggagatggagttccagcgctgccagtacgtggtgggccgcga

SEQ ID NO: 412650 - DNA, 120 bp, Artificial Sequence
  ENSG00000148704_5 (sequence is synthesized)
gaggaccgagctcgcccggcagcttaacctctccgagacccaggtgaaggtctggttccagaaccggcgcaccaagcagaagaaggaccagggcaaggactcggagctacgctcggtggt

SEQ ID NO: 412651 - DNA, 120 bp, Artificial Sequence
  ENSG00000148704_6 (sequence is synthesized)
gtcggagaccgcggccacgtgcagcgtgctacggctgctggagcagggccgcctgttgtcgccgcccggcctgcctgcgctgctgccgccttgcgccacgggcgctctcggctcagcgct

SEQ ID NO: 412652 - DNA, 120 bp, Artificial Sequence
  ENSG00000148704_7 (sequence is synthesized)
ccgccgggccggggggattgcacgcaggcgccccggccgcgggccacagcctcttcagcctgccggtgccctcgctgctcggctccgtcgccagccgcctgtcctccgccccgttaacaa

SEQ ID NO: 412653 - DNA, 120 bp, Artificial Sequence
  ENSG00000148704_8 (sequence is synthesized)
tggctggttcgctagctgggaatttgcaagaactctccgcccgatatctgagctcctcggccttcgagccttactcccggaccaacaataaagaaggggccgagaaaaaagcgctggact

SEQ ID NO: 412654 - DNA, 120 bp, Artificial Sequence
  ENSG00000148704_9 (sequence is synthesized)
gattttaagtgtttccctgtatttatatttatagtatctattgtggtgatatttatggactcacgcgcattaggtgcccagagctcctgcgctgggctcctggctcccaccaggcctctg

SEQ ID NO: 412655 - DNA, 120 bp, Artificial Sequence
  ENSG00000148704_10 (sequence is synthesized)
acagctctcctttcccactagactctgctaccaatttcatctcattcgggctattttttttttctactacctttcctctgagattcctccccaacccccaacttccttctgaatccagga

SEQ ID NO: 412656 - DNA, 120 bp, Artificial Sequence
  ENSG00000148704_11 (sequence is synthesized)
gcgatccaaagaattgggaaaaatgcccgagttagtcaacctgatgccctgaccccgtgcccagcccaggagggaaaagactggttctaactccaaagcacaggacgtttgctctagatc

SEQ ID NO: 412657 - DNA, 120 bp, Artificial Sequence
  ENSG00000148704_12 (sequence is synthesized)
cgcggctgctgcggctgctgccgctgccgactattcctaggaatatttgaaagaggaaaactgcgcgcagaccccaggggcttccaggtttctttagaccaaaaaaggaggacgttcctt

SEQ ID NO: 412658 - DNA, 120 bp, Artificial Sequence
  ENSG00000148704_13 (sequence is synthesized)
cctcttgccagggaaaccagggcttgtgggagcccctgggccccgctttgcggacctctcgggatagtcggtacacaacacagcttcctggcgggcaaatcctgcggtttttctcccctt

SEQ ID NO: 412659 - DNA, 120 bp, Artificial Sequence
  ENSG00000148704_14 (sequence is synthesized)
tagggcaactccaatcacaaccacccccgaccccaggaaacagtaacaaacgtcgtagtaggcaacgacactgataaatttgatctaatcagcaataaaagcaattgctacgtaaaacca

SEQ ID NO: 412660 - DNA, 120 bp, Artificial Sequence
  ENSG00000148704_15 (sequence is synthesized)
aacaaaagaagaaaaggaagaaagagccagcaaatgatgagtctcggcgtggggactccgggggcagagggtggcagcccctatagtgcggggccctgcgactggtaccgtgagcgcctg

SEQ ID NO: 412661 - DNA, 120 bp, Artificial Sequence
  ENSG00000148704_16 (sequence is synthesized)
ggatgaggtttgggcggatttcgggtttccggagaggcagagacgcctggctacgacgatttgttccacttccttgagtgtttcgctctcgatttctctatctgtccctctgaggtcggc

SEQ ID NO: 412662 - DNA, 120 bp, Artificial Sequence
  ENSG00000148704_17 (sequence is synthesized)
ccctcagaccctcctccttaatttcccactgcgtaattcttagtttatttaggaactcatctctgggcactataaagtctctgcctcctaatgctaggtttctagagtcttccagctgca

SEQ ID NO: 412663 - DNA, 120 bp, Artificial Sequence
  ENSG00000148704_18 (sequence is synthesized)
tcttcatgccggcagcattttggattttgtgcaatcatgggcccagaataggcaaggttttattttcttctgacttagaatataagtctcgccatcgtcaaagagaaactttgaaggagc

SEQ ID NO: 412664 - DNA, 120 bp, Artificial Sequence
  ENSG00000148704_19 (sequence is synthesized)
aggagactgaaatcgatattaattcctgcaaagagacctcctcaccctggtgcttatgcggtggtgacgggtgtagacgttgcaaacaaatcttgggaagcgaggagggccggggaggac

SEQ ID NO: 412665 - DNA, 120 bp, Artificial Sequence
  ENSG00000148704_20 (sequence is synthesized)
acttccggacacgctcttctaaagcgtgtgcagcacggggcgaagtccgcgctgcgggggcagcggccccggctccttcttgtagcgcctgcacacctgggtgttgcagggacccgcagc

SEQ ID NO: 412666 - DNA, 120 bp, Artificial Sequence
  ENSG00000148704_21 (sequence is synthesized)
tcccgtgcggcaccggccctagccaggccttactgcccctactcgtgtactgtgcctgaagctgaagttggaggcatccaaaataaggcggggcacagtgtgggcggcggagtccctgag

SEQ ID NO: 412667 - DNA, 120 bp, Artificial Sequence
  ENSG00000148704_22 (sequence is synthesized)
ccttgagctccgctttttgctgagatcacagcagccgcccacagacagttcacttttatttctcaaagttgctgcagatccctcagcttggcttctcttggctcttcccctccctgtccg

SEQ ID NO: 412668 - DNA, 120 bp, Artificial Sequence
  ENSG00000148704_23 (sequence is synthesized)
cctctccttactttctcttgcttgaaactgcttttccttttctactcttttcttccgcgctcctgtcccgtaaacgcctgcgcttcctttaaggagttctctctctgtggtgtgggctcc

SEQ ID NO: 412669 - DNA, 120 bp, Artificial Sequence
  ENSG00000148704_24 (sequence is synthesized)
cctctcgttccccctgtctccctcctccattacttcttccttccaggtctctctctctcttttggttttctggtttttttctcctgctcaaggggtcccaaaggccaaggcagtgggtgg

SEQ ID NO: 412670 - DNA, 120 bp, Artificial Sequence
  ENSG00000148704_25 (sequence is synthesized)
ctctcgctgcagcttcaaggctggtggctgggaccctccaggggtgagaaggaagggagaaggtggcataactttttggaacaaaagaaaacacaaaatcctagcttgggattcccaaca

SEQ ID NO: 412671 - DNA, 120 bp, Artificial Sequence
  ENSG00000148704_26 (sequence is synthesized)
aattcagcctcctctcccaggggcctcagcctgggaagtcaccaagcagatccctccttccagcttcctgctctttctcctttttgctttcttacccctgaaagagggaaggacaagtca

SEQ ID NO: 412672 - DNA, 120 bp, Artificial Sequence
  ENSG00000148704_27 (sequence is synthesized)
tgagctctttgcctgccactcagggagtgcaattgttcttaaagagcctcttctgcatagaaaaagaattgcaattttaatttaaaaacatttatagaaaattcatttaattttagtgac

SEQ ID NO: 412673 - DNA, 120 bp, Artificial Sequence
  ENSG00000148704_28 (sequence is synthesized)
tatcttcttttccctccttccccaagggcctccagtaagctgccttggtccctggaggcttctggcttccaactggagactcacaggccttggaggaggaggcaggtaccctctatgcca

SEQ ID NO: 412674 - DNA, 120 bp, Artificial Sequence
  ENSG00000148704_29 (sequence is synthesized)
atagctgggcctgcctggggaaaggtggaaggagaaacagctgcaggaggggggagctgaaaggaatctgatgctcaggcctgcacaaagcaaccgccaaattgtttcagagcagaaaag

SEQ ID NO: 412675 - DNA, 120 bp, Artificial Sequence
  ENSG00000148704_30 (sequence is synthesized)
aaaaagggagaaaacctcttagcaaagccctgtgagtttgggggtcaggttcaagaaagatgtgggaagtcacttggagagctaaacgggacacatgctcctatccacacttgcagttgg

SEQ ID NO: 412676 - DNA, 120 bp, Artificial Sequence
  ENSG00000148704_31 (sequence is synthesized)
tctaaccttcagccagaatgtattcataagtagcatttggcaaccctttatagtttacaaatagcattttacatacaccattctactattcctcatggtggctttgggaggtccagctcc

SEQ ID NO: 412677 - DNA, 120 bp, Artificial Sequence
  ENSG00000148704_32 (sequence is synthesized)
gttttaaagactcacacaggactgaagcaaataacttgctcaaagccacatagctgctcagaacccaagattgtaagctccccctagggccagaggcctctttctttcagtttttttctt

SEQ ID NO: 412678 - DNA, 120 bp, Artificial Sequence
  ENSG00000148704_33 (sequence is synthesized)
tcgtccccctttgacccctctttccttcttccctttctcccctccttcctcctttccttctttttgtgcccacagtgtctggatcatggtacctgaattctttagcctatttgcacccac

SEQ ID NO: 412679 - DNA, 120 bp, Artificial Sequence
  ENSG00000148704_34 (sequence is synthesized)
atctgctaatgtccatatctagccatctattacaccagctgctgaggatttacttggtgccctcatcaagaagtttgaatttctccctccttcctttttttttcctgccactgtcccaac

SEQ ID NO: 412680 - DNA, 120 bp, Artificial Sequence
  ENSG00000148704_35 (sequence is synthesized)
tctttccctctacgtctctctagaatgacatctttaaaccccttacactctttggtcttacacatccttaaaaatgattatttataaattgaattataatatccatgaggtaaacactca

SEQ ID NO: 412681 - DNA, 80 bp, Artificial Sequence
  ENSG00000148704_36 (sequence is synthesized)
tgaatggctccaaggatacccttttaacttcttcccttcagccacataagccatatgatgacacacagtgtctttctcct

SEQ ID NO: 412682 - DNA, 120 bp, Artificial Sequence
  ENSG00000148704_37 (sequence is synthesized)
gccacataagccatatgatgacacacagtgtctttctcctgtttgaaaagaaattgtgtcatattggtgtgctgttcttgcatagaaagccttttttaagaagtctttttaagatttctt

SEQ ID NO: 412683 - DNA, 120 bp, Artificial Sequence
  ENSG00000148704_38 (sequence is synthesized)
gaaggattttagaaatcatatatctcttctaaccccctgaaatcctgagtttaagtggcttgattaaatggctgatcaaaacttaaaaacacactaggtcaatgtttttcaagatacaac

SEQ ID NO: 412684 - DNA, 120 bp, Artificial Sequence
  ENSG00000148704_39 (sequence is synthesized)
tgaggaccagctgcttcagaatcatctggggactggctaaaattccaggttcctaagccctagtcccatctgatgaatcagaaactaggttggggcttaggaacgtgcattttaaacact

SEQ ID NO: 412685 - DNA, 120 bp, Artificial Sequence
  ENSG00000148704_40 (sequence is synthesized)
tttccaaagtgattcttatccagactaatatttgagaagtactgtattaaatggcaaactcccaaaacactgcagcctcctgcatctggcccagggcctggcatttggtaggaatacaat

SEQ ID NO: 412686 - DNA, 120 bp, Artificial Sequence
  ENSG00000148704_41 (sequence is synthesized)
gaatgtttgttaaacaaattaatccacagtttctgacacagtttagaatttcttggaccacattatgctattgtaatttaacaccatttctacgtcgggaaatctttacatttcagtctt

SEQ ID NO: 412687 - DNA, 120 bp, Artificial Sequence
  ENSG00000148704_42 (sequence is synthesized)
tttcattttcatggaggtttcattttaatggagcaggagagaaaagagagatctactttggtggtttctcaggtctcagggaaggtcttttataaactcaatggggaccaccttcctgga

SEQ ID NO: 412688 - DNA, 120 bp, Artificial Sequence
  ENSG00000148704_43 (sequence is synthesized)
gaggctgctcccttacagacctggtagtttggggaaaggaggaggagagcccttcaggtttgctgaaaagcattcagatgcacacccttcttggttggaactgaaagcttctgtttgaag

SEQ ID NO: 412689 - DNA, 120 bp, Artificial Sequence
  ENSG00000148704_44 (sequence is synthesized)
agacatgagttctggaaggagcaaggccaccaggtccagagaacctggcatgcaatggacatggaagctgaaaattacttgggtattctctgatttctagctaatatgaaaataattttc

SEQ ID NO: 412690 - DNA, 120 bp, Artificial Sequence
  ENSG00000148704_45 (sequence is synthesized)
tttctagaaacacatttgcctatcttcttaccctgaaacagaaaataaatattgtgctttatgtggtagtgttgtacccattcttaaaaataaatcacatcatatatatgtgtaaaatat

SEQ ID NO: 412691 - DNA, 120 bp, Artificial Sequence
  ENSG00000148719_0 (sequence is synthesized)
ggttccgcgttctggttccgccatggaatccaacaaggatgaagctgagcgctgtatcagcatcgccctcaaggccatccagagcaaccagcccgaccgggcgctccgcttcctggagaa

SEQ ID NO: 412692 - DNA, 120 bp, Artificial Sequence
  ENSG00000148719_1 (sequence is synthesized)
ggcacagcggctgtatccgacgccgcgagttcgcgccctgattgagtccctcaaccagaaaccacagactgccggtgaccaacccccacccacagacacaacccatgccacccacaggaa

SEQ ID NO: 412693 - DNA, 120 bp, Artificial Sequence
  ENSG00000148719_2 (sequence is synthesized)
agcaggtgggaccgatgccccctcggccaacggtgaagctggaggagagagcaccaaaggctacactgcagaacaggttgcagctgtgaaaagggtcaagcaatgtaaagattactatga

SEQ ID NO: 412694 - DNA, 120 bp, Artificial Sequence
  ENSG00000148719_3 (sequence is synthesized)
gatcctgggggtgagcagaggggcctcggatgaggacctgaagaaggcctaccgcagactggccctcaaattccacccagacaagaaccacgcacctggtgccactgaagccttcaaagc

SEQ ID NO: 412695 - DNA, 120 bp, Artificial Sequence
  ENSG00000148719_4 (sequence is synthesized)
cattggcacagcatatgcggtactcagcaacccggagaagaggaagcagtatgaccagttcggcgatgacaagagccaggcggcccggcacggccatgggcatggggatttccaccgtgg

SEQ ID NO: 412696 - DNA, 120 bp, Artificial Sequence
  ENSG00000148719_5 (sequence is synthesized)
ctttgaggccgacatctcccctgaagacctcttcaacatgttctttggcggcggcttcccttctagtaacgtccacgtctacagcaacggccgcatgcgctatacctaccagcaaaggca

SEQ ID NO: 412697 - DNA, 120 bp, Artificial Sequence
  ENSG00000148719_6 (sequence is synthesized)
ggaccgcagggacaaccagggtgatggcgggctaggggtgtttgtgcagctgatgcctatcctcatcctgattctcgtgtcagctctcagccagctcatggtctccagtccaccctacag

SEQ ID NO: 412698 - DNA, 120 bp, Artificial Sequence
  ENSG00000148719_7 (sequence is synthesized)
tctgagtccaagaccgtccgtgggccacatccacaggcgagtcactgaccacctgggtgtcgtctactatgtgggagacactttctccgaagagtacacaggctccagcctcaaaacagt

SEQ ID NO: 412699 - DNA, 120 bp, Artificial Sequence
  ENSG00000148719_8 (sequence is synthesized)
cgagcggaatgtggaagatgattatatcgccaacctccggaacaactgctggaaggagaagcagcagaaggaaggcttgctgtaccgggcacgctactttggcgacacagatatgtacca

SEQ ID NO: 412700 - DNA, 120 bp, Artificial Sequence
  ENSG00000148719_9 (sequence is synthesized)
cagagcacagaagatgggcacccccagctgcagccgactgtcagaggtgcaggcctccctgcatggatagtcctgggccagccacaccaccgaggtccaaactatgaaatccctggagaa

SEQ ID NO: 412701 - DNA, 120 bp, Artificial Sequence
  ENSG00000148719_10 (sequence is synthesized)
tttttggtgacatgcactgagccaaggtgatggactgtatatttgaggaaagacaaacaaagaaacaaaattaaaatggaattggaggccgaacgctgcacagctgccctctctctcacc

SEQ ID NO: 412702 - DNA, 120 bp, Artificial Sequence
  ENSG00000148719_11 (sequence is synthesized)
cagtaaatgcagaaagctcttaggacagacagaaaacctgccatggggctgcttccctccctcgcagggctggcggaggctccgcatcgcctctctcctaggatacagaaaccatggcaa

SEQ ID NO: 412703 - DNA, 120 bp, Artificial Sequence
  ENSG00000148719_12 (sequence is synthesized)
ccaccaccagccacctctcaggagaagccagaggccctggccaaagataggaggaagaaagagaactctccatagaatgtaatttatagatgcgtgtatatgtatatatatctatttata

SEQ ID NO: 412704 - DNA, 120 bp, Artificial Sequence
  ENSG00000148719_13 (sequence is synthesized)
tgtaaataggcatatatgaagatatatatatatatagtctactttttaaactctgcagggatttggttaagttgttgagctgatttcttccatgttttagaaaatgaggcctgtttgggg

SEQ ID NO: 412705 - DNA, 120 bp, Artificial Sequence
  ENSG00000148719_14 (sequence is synthesized)
aaggtaccctggtgatgtttttgctagacattagctgtagctgacagcataaggagagtcgcatcagagcttttcacagccccccgaaaccccagcctggttttgatggcagcagtaatc

SEQ ID NO: 412706 - DNA, 120 bp, Artificial Sequence
  ENSG00000148719_15 (sequence is synthesized)
atgatagtgtgaacccgcgaaggcctcaggattatggttaacctggagaggagcaggccatggaggcaggtgccaggtcagtattgagtcacagtagaggccccacaaggacctgcttgg

SEQ ID NO: 412707 - DNA, 120 bp, Artificial Sequence
  ENSG00000148719_16 (sequence is synthesized)
gtgagaccacctctcccctctcagcagcgctggtgggctctttgtcctggtgcccaggagccctccagccccctgcccacagaagggaaggcctgcagagggggccaggatctacctaac

SEQ ID NO: 412708 - DNA, 120 bp, Artificial Sequence
  ENSG00000148719_17 (sequence is synthesized)
catttccccacccctaagtccctcagtgggctttgccttataggtgccacagggcacagctccatcattgccactggtttttcctaagtcatgcaccaaggacttcagaaagttcttcct

SEQ ID NO: 412709 - DNA, 120 bp, Artificial Sequence
  ENSG00000148719_18 (sequence is synthesized)
ccgagtcagtcagtggtgccgggaccccagggcagcctcctcgactcctgaagaaaaggcagtgcccgtggctgcctctgtcttcactcgctgttgatgtgaccgccaggcctcctctcg

SEQ ID NO: 412710 - DNA, 120 bp, Artificial Sequence
  ENSG00000148719_19 (sequence is synthesized)
taccttggacaaaggatacacctgaaccagaatagttttcttaccctcacattgaaatgaggattttgcttaaaacagcacttgccgccagtgggaggagggaggttttatttattccca

SEQ ID NO: 412711 - DNA, 120 bp, Artificial Sequence
  ENSG00000148719_20 (sequence is synthesized)
cagtttctcctgggccttctggaatgaccatgttttcctgtggcggtgggtgtgtcattgcgcccgccgtcttccaaagccttacttccccaagctgccagccaggaggtgataaccacc

SEQ ID NO: 412712 - DNA, 120 bp, Artificial Sequence
  ENSG00000148719_21 (sequence is synthesized)
ctcccagagtttctctcggctctttttttaaaagtcccccaacaaataggattcttgctgggaaaggaagttcggtaaggaaatgtcaaatctggtttttaaacaaggtccaaccctgca

SEQ ID NO: 412713 - DNA, 120 bp, Artificial Sequence
  ENSG00000148719_22 (sequence is synthesized)
atgaagcagccacttcagcccagagagattataagaactgatgtggccagagtgcctacccactgtggccccggtgctctgcccccacgccccgaccatctggtcttggtagatgtccct

SEQ ID NO: 412714 - DNA, 120 bp, Artificial Sequence
  ENSG00000148719_23 (sequence is synthesized)
agacgggctgagccatgtgcaataagaacatagatcctaaaggatcctctggaagctgtatttcttgaattagaattctcaaattgtacatctgttaatatatgtttattatgtgactgg

SEQ ID NO: 412715 - DNA, 120 bp, Artificial Sequence
  ENSG00000148719_24 (sequence is synthesized)
ccacaccaccgaggtccaagtatgagccagggctgcctccaccctgcaactcctggcagctttggccctggtcatgagcagaggagggagggggagaaagggaggaagcctggtgattgt

SEQ ID NO: 412716 - DNA, 120 bp, Artificial Sequence
  ENSG00000148719_25 (sequence is synthesized)
gtcggtttccgccctctagcgatgctgtcctccccactcctccgctctgctccctggctccaggggtgtgggggaccccagaaccaggcagagtgggaacttgaaactgttgctgagggc

SEQ ID NO: 412717 - DNA, 120 bp, Artificial Sequence
  ENSG00000148719_26 (sequence is synthesized)
cacccggggcttcttggtccactccagccatcagtcagcacggccctttctccagcacagcagactattgtccgtgccctggtatttaggccatcacatatggtggggcccaagagagcc

SEQ ID NO: 412718 - DNA, 120 bp, Artificial Sequence
  ENSG00000148719_27 (sequence is synthesized)
ccatatgcacactgcctgcctgataccaggaagaaccatgtgggaataggtgggccaagagccctcccctttctccatccctccagctaggaggaaatggagcaagatgaacaggcagcc

SEQ ID NO: 412719 - DNA, 120 bp, Artificial Sequence
  ENSG00000148719_28 (sequence is synthesized)
acgaggtgggtgggagctggcagtcttggtggcggcaggggccgcgggccctgaccacccccctctggtgggatctgaggcactctctcgaatgccgtcacacctggcagcctggaagcc

SEQ ID NO: 412720 - DNA, 120 bp, Artificial Sequence
  ENSG00000148719_29 (sequence is synthesized)
acaggcatccggccttgcccaggcatctcgcctgcggtctgaggaagggaacagaaggtcatgagttcagggtcagacgcagccgctcagcacaggaggggtggaggggaaatgagagtt

SEQ ID NO: 412721 - DNA, 120 bp, Artificial Sequence
  ENSG00000148719_30 (sequence is synthesized)
gctggtagcaggctccctccttctgcagcccggcgaatgggggcgctgggctctgttcccagcgtttgccagaggtggccacttcagccaagcccagagaagtgtgggcagaagcagtga

SEQ ID NO: 412722 - DNA, 120 bp, Artificial Sequence
  ENSG00000148719_31 (sequence is synthesized)
aggttcttctctgtgtgggtgccctgcccaccccctcctttgcctgtgtcctcccggcctggatccatggctgactctgcctggaggccatttgtgcctgcctctgtgctgccgcaggag

SEQ ID NO: 412723 - DNA, 120 bp, Artificial Sequence
  ENSG00000148719_32 (sequence is synthesized)
ggcaggccgcaagtggggttggtgggggtcgagcgggcagcacggtgcagcggtgcagtggcaaggggggctacttgtgtggcataagctagaggagccggtgccgcctgaatgccgagc

SEQ ID NO: 412724 - DNA, 120 bp, Artificial Sequence
  ENSG00000148719_33 (sequence is synthesized)
aaaataaacataactcctttaagggagagaatgggcgctagacagggagacatttctgttcttcgggcgccagggaaaggcgcttccgtatcttcactccctctcacctctcgggctgag

SEQ ID NO: 412725 - DNA, 120 bp, Artificial Sequence
  ENSG00000148719_34 (sequence is synthesized)
ggtcagggaccactctcccaaaatgcaagccggcctttgcacccaccccagtccgccgcctcggactgtcctgaagccgggcccctcactcctcccgatgatgagattcggagcgggtgg

SEQ ID NO: 412726 - DNA, 120 bp, Artificial Sequence
  ENSG00000148719_35 (sequence is synthesized)
cctggtgggaggtgctgacctcagccaccgccagtcctccatcgcccgcaagagtccagcggcggtcagccatgtggacgccgaggctgctgagttgccctggacaggagcctcctgagc

SEQ ID NO: 412727 - DNA, 120 bp, Artificial Sequence
  ENSG00000148719_36 (sequence is synthesized)
cagggagggaagagtgaagctggctttacaactcatcacctcgcttcacccgggaaccctttcttttttctttaacctaagttttccaaggagtttttcttaatccacgctagaggggag

SEQ ID NO: 412728 - DNA, 120 bp, Artificial Sequence
  ENSG00000148719_37 (sequence is synthesized)
agagacaccgggtggtgcttgtgatcaccactcagtaaaccgtctgggaataacaggcactccgaagggcccagtctcatcctgacggctaccacgtgaccttcctgagcttgggtttcc

SEQ ID NO: 412729 - DNA, 120 bp, Artificial Sequence
  ENSG00000148719_38 (sequence is synthesized)
tcctcgggaagattagagggttggcgcagataatgtgattggcaataatacccatagggctttgcagtttaggaagctccttcacctgtgccttctcacttgagcctgccagtcagggat

SEQ ID NO: 412730 - DNA, 120 bp, Artificial Sequence
  ENSG00000148719_39 (sequence is synthesized)
gcagagcaaagatcattatctttattctatgggtgaggaaaatctctgaggtaagggatgcccaggatgacacagctagaaagtaaaatgttctgtgactctgtaaatgtttatgaagga

SEQ ID NO: 412731 - DNA, 120 bp, Artificial Sequence
  ENSG00000148719_40 (sequence is synthesized)
aaagaaatgaaattgaggaacagcagtcagcctcctaaccggccctgcccgcctgatgagattgagaaagcggaacgctggtggaagaggtagcctggactgctgaactttcctccctcc

SEQ ID NO: 412732 - DNA, 120 bp, Artificial Sequence
  ENSG00000148719_41 (sequence is synthesized)
cttttcctcagactctcctttcagggagtgtgcgggtccctgctctggtttgagagggaaccaactactcctctggtctgtgcggcacctcctgtcttggggcccatacccctagagtgc

SEQ ID NO: 412733 - DNA, 120 bp, Artificial Sequence
  ENSG00000148719_42 (sequence is synthesized)
gttggcgcatactcaactctaagacctccggaacatggaatctgggcgtgcaccattattgacacctacaccagccgtccctttcttagaagacatacggtagcacttccaccctcgctc

SEQ ID NO: 412734 - DNA, 120 bp, Artificial Sequence
  ENSG00000148730_0 (sequence is synthesized)
gcttccggtcgtcgtcgtcgccgctgctgccgctgctgttgctcctgaggctgctggctgaggccggaggatcgagcggcggcggcggcggcggctgagagggcggcggcgggagcggag

SEQ ID NO: 412735 - DNA, 120 bp, Artificial Sequence
  ENSG00000148730_1 (sequence is synthesized)
cgggacgagggaacgggaggaagcgagcgaggagcgcgcagagcgcgcttttccgtccgcctgaggagccgaagcagccccggccccgccgccgccgcctgcccgccggacaaagccgag

SEQ ID NO: 412736 - DNA, 120 bp, Artificial Sequence
  ENSG00000148730_2 (sequence is synthesized)
agcccgcgcccacagccatgtcctcgtcagccggcagcggccaccagcccagccagagccgcgccatccccacccgcaccgtggccatcagcgacgccgcgcagctacctcatgactatt

SEQ ID NO: 412737 - DNA, 120 bp, Artificial Sequence
  ENSG00000148730_3 (sequence is synthesized)
gcaccacgcccggggggacgctcttctccaccacaccgggaggaactcgaatcatttatgacagaaagtttctgttggatcgtcgcaattctcccatggctcagaccccaccctgccacc

SEQ ID NO: 412738 - DNA, 120 bp, Artificial Sequence
  ENSG00000148730_4 (sequence is synthesized)
tgcccaatatcccaggagtcactagccctggcaccttaattgaagactccaaagtagaagtaaacaatttgaacaacttgaacaatcacgacaggaaacatgcagttggggatgatgctc

SEQ ID NO: 412739 - DNA, 120 bp, Artificial Sequence
  ENSG00000148730_5 (sequence is synthesized)
agttcgagatggacatctgactctcctgcaaggattagaagaaaagcagcaacactgatacttgtgtgcacctgatttggccaataggatcaacagtgaaaagacagaagaggcaatacc

SEQ ID NO: 412740 - DNA, 120 bp, Artificial Sequence
  ENSG00000148730_6 (sequence is synthesized)
agcagtccccattacagtctccacctccccgtcttcctctgggtgccaaatgatgggaagatgagcttcatctgaccatttcttctccctgtctcctgttccccttcccagttaaacagg

SEQ ID NO: 412741 - DNA, 120 bp, Artificial Sequence
  ENSG00000148730_7 (sequence is synthesized)
ttagattgaaggcccttgctgtatttctgtagagctaagcagcccttagaggaaaacagttcaactctgactttcctagttgtttttttattgagagccaccctcataccctgtaatttt

SEQ ID NO: 412742 - DNA, 120 bp, Artificial Sequence
  ENSG00000148730_8 (sequence is synthesized)
gtcccaaatcaaatatcaacctaccaacaactgcctggctgggaagtctggggaagggatacagagcttggtgggcctaacaccattcatattccttaccctctgtctctcctccctgta

SEQ ID NO: 412743 - DNA, 120 bp, Artificial Sequence
  ENSG00000148730_9 (sequence is synthesized)
tcccacctatggttcagtgttgcaagagtctgggcttggggtctttaaaaccagcagggggaaatgataaaaagagagctgctttcccttttaccttgaggtattcgtccctcgggacag

SEQ ID NO: 412744 - DNA, 120 bp, Artificial Sequence
  ENSG00000148730_10 (sequence is synthesized)
agcacagcttgtgcaactctggtagcgttaccctgtgacactgttttgaggtccacttcctttctttcctctgggaggaatgtcttctgtctttggtattatagttcatcttcccattct

SEQ ID NO: 412745 - DNA, 120 bp, Artificial Sequence
  ENSG00000148730_11 (sequence is synthesized)
tttacttagtgcatttgtgcagatatttttaactctgtacatcagaagagagcccttggtaaccagttttgctcttcttctgccactcctccctgcttgcatctcgttgctggcagagtc

SEQ ID NO: 412746 - DNA, 120 bp, Artificial Sequence
  ENSG00000148730_12 (sequence is synthesized)
ctcttgtacttcaagaaagcaaagtgattttgtctgctcctagagcaggtccataccaagtaatagaggcactttagcttccacttggtgggtaaggcctgatcatagtattctgtcaga

SEQ ID NO: 412747 - DNA, 120 bp, Artificial Sequence
  ENSG00000148730_13 (sequence is synthesized)
taatgcctaagaatgaccgctgaagaacgttgacccatttgagtacccggtctcagtcgtcatttttaagtccagtgagcattgtggtagttgttcttagattgcagtttcttatgtttt

SEQ ID NO: 412748 - DNA, 120 bp, Artificial Sequence
  ENSG00000148730_14 (sequence is synthesized)
gagtttgaagttgattttcagaatgttcttagaaaagaactgcatttttttcctttgtggatctgctttgtttggctgctgggatagataagcatgggcttaaaaaatgtgttcctccca

SEQ ID NO: 412749 - DNA, 120 bp, Artificial Sequence
  ENSG00000148730_15 (sequence is synthesized)
gttttcttgcctttcctgttgtactctgaatttctctccctacctccctcactttcttcctctctccttcctttccttcctttttctctaccaggccatttttcaaatttacatcaaaga

SEQ ID NO: 412750 - DNA, 120 bp, Artificial Sequence
  ENSG00000148730_16 (sequence is synthesized)
tacctgaagtgttggtatctgagaatatctgtcactcctcttatctgagaagtgaccttttatttttaagatgactacagacctatttttagatatgttttcagtacaattttgaacagc

SEQ ID NO: 412751 - DNA, 120 bp, Artificial Sequence
  ENSG00000148730_17 (sequence is synthesized)
aactttttaattaaacatcttccagtgttaggaagttgagaaacgttcataggcaagtctgctgttctatgtcaccatcttttgtctcccctagtcccccaggagctctttcctttcccc

SEQ ID NO: 412752 - DNA, 120 bp, Artificial Sequence
  ENSG00000148730_18 (sequence is synthesized)
tctagttttgggtgtgcatgtttggagtttgtagtgggtggtttgtaaaactggaccattctgccttgctatgggttgttcaagaaagcctcattcttttctgtgaccctttcgcttttg

SEQ ID NO: 412753 - DNA, 120 bp, Artificial Sequence
  ENSG00000148730_19 (sequence is synthesized)
cattcaccctccttcccacctacctgtcctggggctgttgagcagcataataatcccgggagaatgattcccctcatagaaagacaaaagcatccatcccctcatagttaagtagccact

SEQ ID NO: 412754 - DNA, 120 bp, Artificial Sequence
  ENSG00000148730_20 (sequence is synthesized)
ggtgtcctgggaatttctggttggatttggtgccctgaacttttttattaagaaatcagatcccagggtgagagtaacaggccatttggccaagaaagaaacctgtttgtttttcttttg

SEQ ID NO: 412755 - DNA, 120 bp, Artificial Sequence
  ENSG00000148730_21 (sequence is synthesized)
aactatgaaaagaccctgtttgtgaatatattttagaaagagaggaaggatgtctgcagaactttgttctgttttctgccacaaaaatgtgaatagttcagagtgaaaaccttttgtgat

SEQ ID NO: 412756 - DNA, 120 bp, Artificial Sequence
  ENSG00000148730_22 (sequence is synthesized)
ggttgatgtctcaggaataagctggatctccaatgttttggggatgctttgagtctcaaaaaaaattgataatcagaaaagtaatttttgtttgtttgtttaatgtatccctgttctgtt

SEQ ID NO: 412757 - DNA, 120 bp, Artificial Sequence
  ENSG00000148730_23 (sequence is synthesized)
tttaattaaactccaagtctcattttacatattcttggaaaaacctaagttgctctgtaatttacataagaagcatgctcaggacctctttgtaccccggggagcctgattctttgggaa

SEQ ID NO: 412758 - DNA, 120 bp, Artificial Sequence
  ENSG00000148730_24 (sequence is synthesized)
tgaagcttttcattcttcatacactggccttggcatcctgtggaatttgacccaactagcagctagtcagtctgtcagtgagcagaagagtgaactcttcttgatctttattgctatgtg

SEQ ID NO: 412759 - DNA, 120 bp, Artificial Sequence
  ENSG00000148730_25 (sequence is synthesized)
tgaaaacttggcttcctcactgaacggtgaggaatggatttaaagcatgagctttagtagtatcaagatgccattttcctttttcttgctgtcttggggagcttctgcatgtgaccccct

SEQ ID NO: 412760 - DNA, 120 bp, Artificial Sequence
  ENSG00000148730_26 (sequence is synthesized)
aatcagaaggcatgtttttagtatttcttgggagtgtcagctgtataatgcagcagctgttcaatcccttacccttctctgcaaggacttccttacagcttggtgcagttctttcccaga

SEQ ID NO: 412761 - DNA, 120 bp, Artificial Sequence
  ENSG00000148730_27 (sequence is synthesized)
ggccaccactactagacagtctttcttttatcttatggagataaattggcatttaaaaaataatttcacaaggcatgagataaactttcaatagatgatacctttgtgtcatgcctcatg

SEQ ID NO: 412762 - DNA, 120 bp, Artificial Sequence
  ENSG00000148730_28 (sequence is synthesized)
gaattatttttagaacaagccagagtccattgagtggtttacctctgcatgtttggagggaacctcacagatgaaacccttaatgaataatgtgtccggggttttttagagagaaggagc

SEQ ID NO: 412763 - DNA, 120 bp, Artificial Sequence
  ENSG00000148730_29 (sequence is synthesized)
actcttaagttaccactttgagacagctcttaacatcttagtgaccatttgtagttttctttttatgaggaacccatgcttctatacttgggcggacaatcgagcttaatgagaagtgac

SEQ ID NO: 412764 - DNA, 120 bp, Artificial Sequence
  ENSG00000148730_30 (sequence is synthesized)
ttcccttcaaattccaacagcagacatgcattgtcatgattctgtcttctttttagtgtggtttattgagttcagcagttctcatattctgtttaaataggtacagcattttcaagggca

SEQ ID NO: 412765 - DNA, 120 bp, Artificial Sequence
  ENSG00000148730_31 (sequence is synthesized)
ttgtccttccacctgtattagttatctattgctgtgtaaaaaattaccctaaatttagtatgttaaaatagtaaacattatctgtcagtttctgtgggttaagaatttgggagtagttta

SEQ ID NO: 412766 - DNA, 120 bp, Artificial Sequence
  ENSG00000148730_32 (sequence is synthesized)
acatgatggttctggcccatggtatcatgaagttacagtcaagattgaacaggggctgcagtcagctggagctggagaaaccacttccaagttctctctttgtggccgttggcaggatgc

SEQ ID NO: 412767 - DNA, 120 bp, Artificial Sequence
  ENSG00000148730_33 (sequence is synthesized)
ctcagtttcttcccatgtgggtctctgcgtagggcagcatgagtgtcctcacaccatgacacctggcttctccctgagcagctgattccagagatcatggggcagggccaggagaaagct

SEQ ID NO: 412768 - DNA, 120 bp, Artificial Sequence
  ENSG00000148730_34 (sequence is synthesized)
gcagtgccttttaagacatagtcttggaaaggacacaccgtcacttcttatcctagttgttagaagcaagccactaagttcagcctgcactcaaggagagaggaattacacatacctcta

SEQ ID NO: 412769 - DNA, 120 bp, Artificial Sequence
  ENSG00000148730_35 (sequence is synthesized)
ccccaatggagcagtagcaaagaatttatggacatatcttaaaagcaccacaccccaactggggatgaaagtaggtcaacagggaggtaggtttaatctagataagctgaaagatagatt

SEQ ID NO: 412770 - DNA, 120 bp, Artificial Sequence
  ENSG00000148730_36 (sequence is synthesized)
gctatcaaaaacagttctccaagatgtgcatagccaaactgggatagaaggcaaactccccaaagctacctgctggttttgagaggggtggtaagacatggcaattcccaggagtagtag

SEQ ID NO: 412771 - DNA, 120 bp, Artificial Sequence
  ENSG00000148730_37 (sequence is synthesized)
aaaataatatgcctgactaccaacagctcaagtatgcttatttgcacatcctagacttggtgtctgtaagactcagttaccacttttattttcctgtagctaggagttagcaaaaggaac

SEQ ID NO: 412772 - DNA, 120 bp, Artificial Sequence
  ENSG00000148730_38 (sequence is synthesized)
tggggccttccagccgagccactaaacctgtcttatttggaatggggattgtccagcaaagggagcaaacatgaattagatgttaagctattgagctgaagaaaagaaagcagttcacat

SEQ ID NO: 412773 - DNA, 120 bp, Artificial Sequence
  ENSG00000148730_39 (sequence is synthesized)
ttaggtgaaatagatgatgttatcaggaagccaggttcccaccagagtcggtgcttggtacctggtctctccagtctcaacagactcaggtcaggtctctcacccaggaagcaaccactc

SEQ ID NO: 412774 - DNA, 120 bp, Artificial Sequence
  ENSG00000148730_40 (sequence is synthesized)
aataaaatagagaacatctgagaattacaaatgtctatgcttgattgctcctctaaatccagtgcataggttaaccctgcatgcccatttcttcctgggcttcttgatggcaatgtgttc

SEQ ID NO: 412775 - DNA, 120 bp, Artificial Sequence
  ENSG00000148730_41 (sequence is synthesized)
ttaaataactggtcttgtgttcatgctaaagacaaacttacatgaagtttttcagtttaagacattctagtgaatggctgctatgtgtttctggcactcattcctaaccaagtctttaga

SEQ ID NO: 412776 - DNA, 89 bp, Artificial Sequence
  ENSG00000148730_42 (sequence is synthesized)
ctatgtgtttctggcactcattcctaaccaagtctttagagatttcagatgaccttaaagatgcaatactgagacaagagttgcgccct

SEQ ID NO: 412777 - DNA, 120 bp, Artificial Sequence
  ENSG00000148730_43 (sequence is synthesized)
agatgcaaattcttgtttggatttatgctctgcctcttcccagcattttcttatctgtagccctgcttgcttgagagtatacttggataagaagtattgctgttgagggagctataagaa

SEQ ID NO: 412778 - DNA, 120 bp, Artificial Sequence
  ENSG00000148730_44 (sequence is synthesized)
aaggattcttcttccagaagtaaagaactcatctttagagtacctttaaatgaattttgtttttctttcttattttgaggtggattggtcttctctttttttgggtttccagctcactgg

SEQ ID NO: 412779 - DNA, 120 bp, Artificial Sequence
  ENSG00000148730_45 (sequence is synthesized)
gactctcagaccttacctttccagctcaaacaccattagttaaattccttcattctcattagaatgcagcctgctgagtatgtgggtttcactgccggagtccatcatttagccagtata

SEQ ID NO: 412780 - DNA, 120 bp, Artificial Sequence
  ENSG00000148730_46 (sequence is synthesized)
catagaggaactgcttcgaatcaaggcaactggtgaagggcttagcatgttggcagcaatatcccagagattgaatctgtttgcattttcctcatctaggataacagctgcttgaagcca

SEQ ID NO: 412781 - DNA, 120 bp, Artificial Sequence
  ENSG00000148730_47 (sequence is synthesized)
gggctcttagccctttgcattccccttgagcgaggaagccacactgcctttctgtgtctggttcagagctcttccttcttggcatgttttctggactacatgcacatgggcagctataga

SEQ ID NO: 412782 - DNA, 120 bp, Artificial Sequence
  ENSG00000148730_48 (sequence is synthesized)
ttaatctgcaaaacctagtcacttacctacccataatatctgggaaggtgtggtatttgttttaaagaaacattgtttctttgggagggcagtttctgtctggactttgaggtggactta

SEQ ID NO: 412783 - DNA, 120 bp, Artificial Sequence
  ENSG00000148730_49 (sequence is synthesized)
gttatccctacagttctttaactctcagcttttaataaaagatgaaatcagatattgatgcagttgggtcacaattctttagaatgcttctaccccagggccgcttcctgttcctagtca

SEQ ID NO: 412784 - DNA, 120 bp, Artificial Sequence
  ENSG00000148730_50 (sequence is synthesized)
tggttttccagtttagtagtggagtttcttgaggctaacttacagaaatttctaactgaaaactttaagagttattgatacttgttttttcagtcagtcacttacatcacctagcctact

SEQ ID NO: 412785 - DNA, 120 bp, Artificial Sequence
  ENSG00000148730_51 (sequence is synthesized)
ctctggaatttaaatttatttctctaggctggtcctggaagttgataaccttttggcaaagcttagatttaggagaaggcttgagtccctgttcagcgggtctgtggattctctttgctt

SEQ ID NO: 412786 - DNA, 120 bp, Artificial Sequence
  ENSG00000148730_52 (sequence is synthesized)
atggctctctgcctgcagccctggcagaccatactgtatgtcatggatacccagtggaaatattactgagatgaaacacatttccaagggtatttaaactctcactctgccacctttcta

SEQ ID NO: 412787 - DNA, 120 bp, Artificial Sequence
  ENSG00000148730_53 (sequence is synthesized)
agggtgggaggctggcagagatgctgcaatgcttgataatcatttggccacactgaaatttccaaagggagctcttgccggtgcttaaaaccaaaactcctggacacttagaaaattcca

SEQ ID NO: 412788 - DNA, 120 bp, Artificial Sequence
  ENSG00000148730_54 (sequence is synthesized)
tgaatctagcacaaaatatccattcttgcccaagtgtatcccctttctctccagcttaatcttttttttttttttttttttaaagcccaggccaagggtacttttaactggaaactgggg

SEQ ID NO: 412789 - DNA, 120 bp, Artificial Sequence
  ENSG00000148730_55 (sequence is synthesized)
aggagggaagaacactagcagggagctaagaggcaggttgctgggtaagccatcctgctcctacctggtgcctgtatctacattgctgagtgctgtgcgccagtgcctttccttcatctg

SEQ ID NO: 412790 - DNA, 120 bp, Artificial Sequence
  ENSG00000148730_56 (sequence is synthesized)
cagatggagcccatctctttccacctgggtgaggagaccctctgctactccaggggtaaaccttaaagaaggtgtcttgaagagcccagaggacactcacgtgctaaggtgtccatttta

SEQ ID NO: 412791 - DNA, 120 bp, Artificial Sequence
  ENSG00000148730_57 (sequence is synthesized)
tgcatctttaaaatattttatttaaaaaaaaaaatagccctgccctgtcttagtgccactaacggcccagttccatccattctgaatggaaaagcggagactgccagcactttccttggt

SEQ ID NO: 412792 - DNA, 120 bp, Artificial Sequence
  ENSG00000148730_58 (sequence is synthesized)
cttccctttgtctcccatgatgtgttgttccctcatccctcccatccatttcactgtgtgtggatggatagcagagggtaccacgcagtccttgaggcagtcctgtgtgattccatgatc

SEQ ID NO: 412793 - DNA, 120 bp, Artificial Sequence
  ENSG00000148730_59 (sequence is synthesized)
agttgtttttgtattttaactattcttccaaaccagcagatgtttggaaattaaggaaaaaattaaattctcatcaatggttgctgttatagttaaatcagtaaagatcttgagtatcaa

SEQ ID NO: 412794 - DNA, 120 bp, Artificial Sequence
  ENSG00000148734_0 (sequence is synthesized)
aggtgcgcgggtgccatgacgactgcgcctcacgagccccctccttcccctggtcgggaggcgaggggcggcgggcggctgagccctgcgggcagcagcgctgcgcgggagccagtcagc

SEQ ID NO: 412795 - DNA, 120 bp, Artificial Sequence
  ENSG00000148734_1 (sequence is synthesized)
ccgaggggagggaaaccggccagggcccggggcctgggagcgcacgccccctgctcacctctgcccggaccgaccggacctgcggagcgcggaggcaggggcgcagcccgcaaccaagtg

SEQ ID NO: 412796 - DNA, 120 bp, Artificial Sequence
  ENSG00000148734_2 (sequence is synthesized)
cccggagaccgtccctctgcccgctggcccgaaggggcccgctgcctcccgccatcggagaccgccggagcccgcaactgggggcatcatggagggggagccctcccagcctcccaacag

SEQ ID NO: 412797 - DNA, 120 bp, Artificial Sequence
  ENSG00000148734_3 (sequence is synthesized)
cagttggcccctaagtcagaatgggactaacactgaggccaccccggctacaaacctcaccttctcctcctactatcagcacacctcccctgtggcggccatgttcattgtggcctatgc

SEQ ID NO: 412798 - DNA, 120 bp, Artificial Sequence
  ENSG00000148734_4 (sequence is synthesized)
gctcatcttcctgctctgcatggtgggcaacaccctggtctgtttcatcgtgctcaagaaccggcacatgcatactgtcaccaacatgttcatcctcaacctggctgtcagtgacctgct

SEQ ID NO: 412799 - DNA, 120 bp, Artificial Sequence
  ENSG00000148734_5 (sequence is synthesized)
ggtgggcatcttctgcatgcccaccacccttgtggacaacctcatcactgggtggcccttcgacaatgccacatgcaagatgagcggcttggtgcagggcatgtctgtgtcggcttccgt

SEQ ID NO: 412800 - DNA, 120 bp, Artificial Sequence
  ENSG00000148734_6 (sequence is synthesized)
tttcacactggtggccattgctgtggaaaggttccgctgcatcgtgcaccctttccgcgagaagctgaccctgcggaaggcgctcgtcaccatcgccgtcatctgggccctggcgctgct

SEQ ID NO: 412801 - DNA, 120 bp, Artificial Sequence
  ENSG00000148734_7 (sequence is synthesized)
catcatgtgtccctcggccgtcacgctgaccgtcacccgtgaggagcaccacttcatggtggacgcccgcaaccgctcctacccgctctactcctgctgggaggcctggcccgagaaggg

SEQ ID NO: 412802 - DNA, 120 bp, Artificial Sequence
  ENSG00000148734_8 (sequence is synthesized)
catgcgcagggtctacaccactgtgctcttctcgcacatctacctggcgccgctggcgctcatcgtggtcatgtacgcccgcatcgcgcgcaagctctgccaggccccgggcccggcccc

SEQ ID NO: 412803 - DNA, 120 bp, Artificial Sequence
  ENSG00000148734_9 (sequence is synthesized)
cgggggcgaggaggctgcggacccgcgagcatcgcggcgcagagcgcgcgtggtgcacatgctggtcatggtggcgctgttcttcacgctgtcctggctgccgctctgggcgctgctgct

SEQ ID NO: 412804 - DNA, 120 bp, Artificial Sequence
  ENSG00000148734_10 (sequence is synthesized)
gctcatcgactacgggcagctcagcgcgccgcagctgcacctggtcaccgtctacgccttccccttcgcgcactggctggccttcttcaacagcagcgccaaccccatcatctacggcta

SEQ ID NO: 412805 - DNA, 120 bp, Artificial Sequence
  ENSG00000148734_11 (sequence is synthesized)
cttcaacgagaacttccgccgcggcttccaggccgccttccgcgcccgcctctgcccgcgcccgtcggggagccacaaggaggcctactccgagcggcccggcgggcttctgcacaggcg

SEQ ID NO: 412806 - DNA, 120 bp, Artificial Sequence
  ENSG00000148734_12 (sequence is synthesized)
ggtcttcgtggtggtgcggcccagcgactccgggctgccctctgagtcgggccctagcagtggggcccccaggcccggccgcctcccgctgcggaatgggcgggtggctcaccacggctt

SEQ ID NO: 412807 - DNA, 120 bp, Artificial Sequence
  ENSG00000148734_13 (sequence is synthesized)
gcccagggaagggcctggctgctcccacctgcccctcaccattccagcctgggatatctgagggggtccagggagggcgggacgctgcctcagggccccgattggacacgagatacatgc

SEQ ID NO: 412808 - DNA, 120 bp, Artificial Sequence
  ENSG00000148734_14 (sequence is synthesized)
aggcgatagcggcctggtgtggttaggtgaggatgcgtggtccctccctctccagagccaggcagtggtgggcagctgctggtgatgtcttctctgctgccttcaccctcagtagaggca

SEQ ID NO: 412809 - DNA, 120 bp, Artificial Sequence
  ENSG00000148734_15 (sequence is synthesized)
aatgcgggggacgggaaggaaccaacttgccctgtgtggtgggcttgacaaacatcatctcactgaattgtcacaacgctttggagataggttgtcttctcttccttctacagatgcaaa

SEQ ID NO: 412810 - DNA, 120 bp, Artificial Sequence
  ENSG00000148734_16 (sequence is synthesized)
aactgaggcctggagagatgtgactcacccaagtttctcaggtggaaatggcatgtgaagctatctgactccaatacctgtgtggtttttatcatctccagctggctccaagagggcccg

SEQ ID NO: 412811 - DNA, 120 bp, Artificial Sequence
  ENSG00000148734_17 (sequence is synthesized)
gtaaggtagaacactgtgaactgagtaagtcctaattaggcagctaggaagaagcgaaaagcaaagccggcctgtcccttgatgctttgtgtccatgtgagggagtccctcatgttccgt

SEQ ID NO: 412812 - DNA, 120 bp, Artificial Sequence
  ENSG00000148734_18 (sequence is synthesized)
tactgaagccactccccttgatccttttctagaagaacacggtgtgcccccgctgccggctctaatgtgttggtttgtcttgtttgttccaagaagttccaagaagccattgtcctcaga

SEQ ID NO: 412813 - DNA, 120 bp, Artificial Sequence
  ENSG00000148734_19 (sequence is synthesized)
ggacggcagcttcagaacgagccttggggaggctgcctcagttgcagggcactctaggtcttgccctctgggtctgagcttagagaacagaggagggactcccagaccaaggcaagaact

SEQ ID NO: 412814 - DNA, 120 bp, Artificial Sequence
  ENSG00000148734_20 (sequence is synthesized)
tacaatgccacagacattgtaatgctgcagggccacaggaggtgtccttttacgtactcatagacaacgaggaaggggaagcacggtatgcattttccacattgggaaacacatctgctc

SEQ ID NO: 412815 - DNA, 120 bp, Artificial Sequence
  ENSG00000148734_21 (sequence is synthesized)
actggggctgcaggtacaaagccttgcccaaggtctctctcctccctgcttcctgggagggagaagttggtcaactgaagctgcagccggagtgccatttggagactcctgaaggacaca

SEQ ID NO: 412816 - DNA, 120 bp, Artificial Sequence
  ENSG00000148734_22 (sequence is synthesized)
cactaaactcttccccagcacaaatgacttgtgtactctaaggaggtaccaggagagccctgtttactctggctttcccccaacacccctgcatcaacttgaagaaatgtggcttctttc

SEQ ID NO: 412817 - DNA, 120 bp, Artificial Sequence
  ENSG00000148734_23 (sequence is synthesized)
caggagacgggagcacatgggattgccttggagggtcctttcacaggccccttcatcttgcacttaaatggacatttccccccacctctgtagaaaacacggtgttgctagaaatttagt

SEQ ID NO: 412818 - DNA, 120 bp, Artificial Sequence
  ENSG00000148734_24 (sequence is synthesized)
aaacaaaaaagaaacgtttccaggggtcggggctctgaggctctgttcccttaaccgacacacagtgactgtttactgtttgctccactctaagttccaggtttaggggcagaagaaaat

SEQ ID NO: 412819 - DNA, 120 bp, Artificial Sequence
  ENSG00000148734_25 (sequence is synthesized)
tcctaagcagttgtacaatacattctccaagcatgtccccagacaccgtctcatttaatccatagtaatgaggttgaaggagattgaatgttattgtcatttcacaaagtgactgaagct

SEQ ID NO: 412820 - DNA, 120 bp, Artificial Sequence
  ENSG00000148734_26 (sequence is synthesized)
caaaggggccaagtttccagggccacagaggggcaggatttagattaaaatttgtcttctgattgttcttcccaccccacatgctgcctttcaaggaaggtggggatgacgggagagctg

SEQ ID NO: 412821 - DNA, 120 bp, Artificial Sequence
  ENSG00000148734_27 (sequence is synthesized)
gtaatttccccaaaggcttttttgcctaacagtgaaccagaatgcccactcctggtgcccaagctcttggtctgggaaagaaatctattgtgtttactctcgtaatgtccagcctgagtt

SEQ ID NO: 412822 - DNA, 120 bp, Artificial Sequence
  ENSG00000148734_28 (sequence is synthesized)
gttcttgccctggtgctgagcaggctgccaagagccatcatgaccttgtcctggttctgggggtgatggatgagggtctgagagagagtatgccctcctgcccctcagtggtattagctg

SEQ ID NO: 412823 - DNA, 120 bp, Artificial Sequence
  ENSG00000148734_29 (sequence is synthesized)
gtgccatgcatttctggtactgtatcagtgtcatgtgtcatatgggccagagagttcccagctggttctgggctatttgttgtgaagaagtctgactccaggctctaaaagtaagccaga

SEQ ID NO: 412824 - DNA, 120 bp, Artificial Sequence
  ENSG00000148734_30 (sequence is synthesized)
gaaagggccgtctcaaacccaaaatgcctatccctatggctgggtgggaattgtctgaagacaccacctggtgtctcctctggggtgtgtttctcctttagcatagcctccccaagtaca

SEQ ID NO: 412825 - DNA, 120 bp, Artificial Sequence
  ENSG00000148734_31 (sequence is synthesized)
agatcagcatttgaggctgggggcgggtagggataccaaagtactcactcaagccaacctttccatcacagcccctttgtcttcccccaaaagatgtcatgctttgaaaggttataactg

SEQ ID NO: 412826 - DNA, 120 bp, Artificial Sequence
  ENSG00000148734_32 (sequence is synthesized)
cccaaaaaactccttcagctctcgctgaaggttacaattaacatattttgctgttatttttgtttcttctaaaaaatcaatcagaggctatacctgcccattcagatctgagtgataaca

SEQ ID NO: 412827 - DNA, 120 bp, Artificial Sequence
  ENSG00000148734_33 (sequence is synthesized)
ggcatgacaatgctttaatgaagcagtgagacattgtgggtatgtggggagttcgtttctttgtggatgtggtaaaatataaataatatagaatttaccattttggccatttttaagtgt

SEQ ID NO: 412828 - DNA, 120 bp, Artificial Sequence
  ENSG00000148734_34 (sequence is synthesized)
acaggactggaattaaatatattcacattgttgtgtaaccattaccactatctattttcagaattttttattatcccaaactgcaactctgtatctataaacaatatcaccgcatcccct

SEQ ID NO: 412829 - DNA, 120 bp, Artificial Sequence
  ENSG00000148734_35 (sequence is synthesized)
ctcctcctagcccctggtaactactattctactttctgtctgtgaatttggccactctaggtacttctatacaagaggaatcatacaatactatcctttttgactggcttctttcactta

SEQ ID NO: 412830 - DNA, 120 bp, Artificial Sequence
  ENSG00000148734_36 (sequence is synthesized)
gcacaatgtcttcaaggttcatccatgttgtggcatgtgtcagaatttctttcattttaaaagctgaataatatcccattgtctagatagtcctcattttgttcattcatccatcagtgg

SEQ ID NO: 412831 - DNA, 120 bp, Artificial Sequence
  ENSG00000148734_37 (sequence is synthesized)
acacttaggttgtttctatcttttggctactgtgaataatgtatggagtttttagatgctagaagtagttcctgacaatagtgcctgtgtgaatcctgaggacagagaccccaggttggg

SEQ ID NO: 412832 - DNA, 120 bp, Artificial Sequence
  ENSG00000148734_38 (sequence is synthesized)
ctctcccaacttaccctttatggctgacaaaacagaggcttccaggacagctgtgatgtgtctcacttccctgtgcccaccccagctgctctgggcttctgctgggctttacttcctgac

SEQ ID NO: 412833 - DNA, 120 bp, Artificial Sequence
  ENSG00000148734_39 (sequence is synthesized)
tagagtggctagaaaattgtatgtttcctctacaagatgtttttatgaagctattttataattatagatttattatcctcactggattcctatgttctgacacctggaccctgacggggc

SEQ ID NO: 412834 - DNA, 120 bp, Artificial Sequence
  ENSG00000148734_40 (sequence is synthesized)
cttgtgcagcctaggcgcccacgggcaagtggtgtggaccattcctgacacgccatcctccacctccaggttggctgggtttcctaaggtgactgccctttcataagcggcaagttcgga

SEQ ID NO: 412835 - DNA, 120 bp, Artificial Sequence
  ENSG00000148734_41 (sequence is synthesized)
gatgaacggcatgcgtgatgggggaaaagggccagaggcctgttgacactgagcatccccacccagagggcctcctggagggactctgtgtcctgtcctgccatgtgcggcatgagtggt

SEQ ID NO: 412836 - DNA, 120 bp, Artificial Sequence
  ENSG00000148734_42 (sequence is synthesized)
caccctcattgtggctctccactgatgaatggcctcttgactttaccaagaccaggcagcacccaacagaccaatgtgagctggaggcggatgccgggcctgcaccccacaaaccacagt

SEQ ID NO: 412837 - DNA, 120 bp, Artificial Sequence
  ENSG00000148734_43 (sequence is synthesized)
ctgcccagccctgtgctgaggagtctctcttggggcctggaggactcatgagctgatctgcattggaatggagggcgaagttggcaaaggaagatgagagcccccctatcattagtctac

SEQ ID NO: 412838 - DNA, 120 bp, Artificial Sequence
  ENSG00000148734_44 (sequence is synthesized)
tgtgtattcatccaaaaagcaaggcgagagccaagcccagagctggatggacaaaggattgctattaagctctgtacctttttgcacccgtttcctcagctcacccctcagaagtgtcac

SEQ ID NO: 412839 - DNA, 120 bp, Artificial Sequence
  ENSG00000148734_45 (sequence is synthesized)
tgatgaaagatagatgagaaggaggcggtctaaatgggcttcattacaatgaacaatgttgaatgaacaatacattccttgttgaataacccaattatttatgatcatggcattttattg

SEQ ID NO: 412840 - DNA, 120 bp, Artificial Sequence
  ENSG00000148734_46 (sequence is synthesized)
ttgtttttctctctctctacaaaagctctacataatcattgtggaaattttacaagatttcaataagcaaagacaagaaaatgaaaagcacccaaaatcctaccgcaagagacaagtata

SEQ ID NO: 412841 - DNA, 120 bp, Artificial Sequence
  ENSG00000148734_47 (sequence is synthesized)
gcgtccttttctgtgcatatatctctcaatatatttaacattcttggaacagctttattgaggcagaacttgaatatgaaaaaattcacccgtcttaagtgtactgcttgacgagtttta

SEQ ID NO: 412842 - DNA, 120 bp, Artificial Sequence
  ENSG00000148734_48 (sequence is synthesized)
acagttgtatatagttatgtccctaccacactgaagatattttcatcatcctaaaatgtttccttgtgctaatttatagtcagtcctttcccacgctcctgattccagaaaacgatgatc

SEQ ID NO: 412843 - DNA, 120 bp, Artificial Sequence
  ENSG00000148734_49 (sequence is synthesized)
tgatttcagaatgtcatgtagatggaatcagacagtttgcagccgagtctggtttctttcacttaaaatgatgtttgcaagattcattcatgctgtagcatgtatcagtagtttttcctt

SEQ ID NO: 412844 - DNA, 120 bp, Artificial Sequence
  ENSG00000148734_50 (sequence is synthesized)
ttgattgctgagtactattccactgtatgaatagatcacattttgtttatccattcatcagttgatagacatttggttgtcaccagtttttggctattattaataatgttgccattaaca

SEQ ID NO: 412845 - DNA, 120 bp, Artificial Sequence
  ENSG00000148734_51 (sequence is synthesized)
ttcatgtacaagtccttatatgtatgtgtatgtatgttttccatttttcttgggtagatacctaggatcgagattggtaggttgcatggtctgtgtaaaatttaactgtataagaaactg

SEQ ID NO: 412846 - DNA, 120 bp, Artificial Sequence
  ENSG00000148734_52 (sequence is synthesized)
ccaaagtgctttccaaagtcgctctaccattttgtactcccatcagcagtgtatgaatgttccagttgttctacatcctggccaacacttagcagtattagccttttgaaaatttccagg

SEQ ID NO: 412847 - DNA, 61 bp, Artificial Sequence
  ENSG00000148734_53 (sequence is synthesized)
gccaacacttagcagtattagccttttgaaaatttcagatcacctgaggtcaggagttcaa

SEQ ID NO: 412848 - DNA, 85 bp, Artificial Sequence
  ENSG00000148734_54 (sequence is synthesized)
gaaaatttccctgatgactagtgatgctgggcatctttttgtgtgcttactgcattcttatatcttttattgtaaagtatcttca

SEQ ID NO: 412849 - DNA, 120 bp, Artificial Sequence
  ENSG00000148734_55 (sequence is synthesized)
atgactagtgatgctgggcatctttttgtgtgcttactgcattcttatatcttttattgtaaagtatcttcaaatctttcttttaaaaacatgattttggctgggtgcggtggctcacac

SEQ ID NO: 412850 - DNA, 89 bp, Artificial Sequence
  ENSG00000148734_56 (sequence is synthesized)
ttttattgtagagactttagcacaaaaacttgccctaactctaagggatttttttgtgaatataatttttttttttttgagacagagtc

SEQ ID NO: 412851 - DNA, 120 bp, Artificial Sequence
  ENSG00000148734_57 (sequence is synthesized)
ccatgctccaccaatgatttttaaatccattaagaatgggtctaaagcaaggtaagaggatatagtgtgatagaagtaggagggctatttgaacagatggttaggaatggcctctgtgaa

SEQ ID NO: 412852 - DNA, 120 bp, Artificial Sequence
  ENSG00000148734_58 (sequence is synthesized)
gaggtgatgtttgagtacagatatgaagtgagagagggagccatgtgactagctggggaagaaacaaacccagacagagagagcatcatgtacacaggttctaagggaggagtgggataa

SEQ ID NO: 412853 - DNA, 120 bp, Artificial Sequence
  ENSG00000148734_59 (sequence is synthesized)
ctgaaaaaggaattagtagatatcaaaatgctattgaatttcaataattaaatttctggttaactcaaaacatgtattcagtgtctattaaaagccaggcataggccaggcatgggggct

SEQ ID NO: 412854 - DNA, 120 bp, Artificial Sequence
  ENSG00000148734_60 (sequence is synthesized)
aaaaaaacaaaaaacaaaaaaaaaacgccaggcatagtactacgtactttgtgtctgttatttatttctcacagtggaccataagctccatgaggacaggaactatgtctatttcactta

SEQ ID NO: 412855 - DNA, 120 bp, Artificial Sequence
  ENSG00000148734_61 (sequence is synthesized)
gctccatgaggacaggaactatgtctatttcacttacctttgtggattcaggtaggatattgcctggtgcataggaggcactcaataaatgtctgttgaatgaatgaagtaattaactaa

SEQ ID NO: 412856 - DNA, 120 bp, Artificial Sequence
  ENSG00000148734_62 (sequence is synthesized)
gcaggtatttattattattcccatacaatagattggaaaagcaaggctcagagaagtaaagtaacttactggaggttatataaccaggaggtcctgaaggtgagactcaaaccttagtct

SEQ ID NO: 412857 - DNA, 120 bp, Artificial Sequence
  ENSG00000148734_63 (sequence is synthesized)
atctgaccacaaagtccaggtttttgccattccccaagctgctgtggtctctccttcctacatctgggaaactgaggttcagagtaaaagaaagagccttgatggaggtctcccataatc

SEQ ID NO: 412858 - DNA, 120 bp, Artificial Sequence
  ENSG00000148734_64 (sequence is synthesized)
ctaaaaataaaaccagccagccacaggctccaggctgctgttttggccatgagacacatttgcatcactttcaatggcttccaaagatttgggatagaaggaataccagcagtttaggta

SEQ ID NO: 412859 - DNA, 120 bp, Artificial Sequence
  ENSG00000148734_65 (sequence is synthesized)
aaaggtttaaatttagtttgactcaataccacatcaagccctcaaagcagccacgggctcccctgcactgtggtcactgaaggagcaaaagctgctgaactggctgtagcgtcctgcctt

SEQ ID NO: 412860 - DNA, 120 bp, Artificial Sequence
  ENSG00000148734_66 (sequence is synthesized)
gagttgtttgtgttctcctgctagctgcaatgcccaggtctttgaatcctgtcaccaataaatgatgctgttgtcatgtgcaagcaaccaaattaatgtgggtggaaaaacccaagctta

SEQ ID NO: 412861 - DNA, 120 bp, Artificial Sequence
  ENSG00000148734_67 (sequence is synthesized)
gtgatttgggcaaattagtttatctgtcacatagccagtggtggtgttaaatcactctctgtttgaggagtaatcactctccccccatcaccaccctgtcttcctttcggtgtggaagtt

SEQ ID NO: 412862 - DNA, 120 bp, Artificial Sequence
  ENSG00000148734_68 (sequence is synthesized)
agaacagccaagtcaatccgtttcagtgactgagcgatctacatttctgtgttttgactgccccccaggaggagtatgttgtgtagtgcattttgtttgtccatagtgctgtctcgtggt

SEQ ID NO: 412863 - DNA, 120 bp, Artificial Sequence
  ENSG00000148734_69 (sequence is synthesized)
cctccgaagccacctctaatgatcataattgcctcttttattcttctctagtccgtgtctttgcaaaatgattctgttacctatgctataaattatggaaaataaactcattatgaaaga

SEQ ID NO: 412864 - DNA, 120 bp, Artificial Sequence
  ENSG00000148735_0 (sequence is synthesized)
aagacattggttaagatatggctgagggaggcatagggattttttttcaatggtagtcaccacagacggttgagggtaaattggcgttgttctcaataagggttattgtgaccatggtcc

SEQ ID NO: 412865 - DNA, 120 bp, Artificial Sequence
  ENSG00000148735_1 (sequence is synthesized)
aaagtctggcaggaatttttttttattattaatgtgtttgctttcatttttggtgctaggcagctgggacaccaaggagagttctgtggcaagccacaagtatgaaggcccagaacttcc

SEQ ID NO: 412866 - DNA, 120 bp, Artificial Sequence
  ENSG00000148735_2 (sequence is synthesized)
cctgagggcatagcttccatttcagtttggggcaagaataaaatctgctcaaggatattagtttgggaacttcctggtggttcagatttcaagcagagtttgtgcttaatcctcacccag

SEQ ID NO: 412867 - DNA, 120 bp, Artificial Sequence
  ENSG00000148735_3 (sequence is synthesized)
gcaccaaggctcagagtcagcaggagtgagttcaggaatcctcgggacaaggcactttcctgagcactggaccagcgacctcttggcttccagggaggacacacagccatcatggaaccc

SEQ ID NO: 412868 - DNA, 120 bp, Artificial Sequence
  ENSG00000148735_4 (sequence is synthesized)
aaacctcagaagagtccaggcaaacaatttacattttcttatgaaaatgaagtctgcaaacaagattactttattaaatcaccaccttctcagctgttctcctctgtgacctcttggaaa

SEQ ID NO: 412869 - DNA, 120 bp, Artificial Sequence
  ENSG00000148735_5 (sequence is synthesized)
aagcggtttttcatcctgtcaaaggctggggaaaagagctttagtctttcctattataaagaccatcatcaccgaggttccattgaaattgatcaaaattccagtgtagaagttggcata

SEQ ID NO: 412870 - DNA, 120 bp, Artificial Sequence
  ENSG00000148735_6 (sequence is synthesized)
agtagccaggaaaagatgcaatctgtgcagaagatgtttaaatgccaccctgatgaggtcatgtccatcagaaccactaacagggaatacttcctcattggccacgacagggagaagatt

SEQ ID NO: 412871 - DNA, 120 bp, Artificial Sequence
  ENSG00000148735_7 (sequence is synthesized)
aaagactgggtctccttcatgtcatcatttcgccaggatataaaagcaacacagcagaacacagaggaggaactctcattgggtaataaaagaaccctcttctactccagccctctcctt

SEQ ID NO: 412872 - DNA, 120 bp, Artificial Sequence
  ENSG00000148735_8 (sequence is synthesized)
ggcccttccagcacatcagaggctgttggctccagctcaccaagaaatggtctccaagacaagcatttaatggaacaaagttctccaggatttaggcaaactcacctacaagatttatca

SEQ ID NO: 412873 - DNA, 120 bp, Artificial Sequence
  ENSG00000148735_9 (sequence is synthesized)
gaagccactcaagatgtgaaggaagagaatcattatcttactcctcgaagtgttcttttagagttggataatatcattgcttccagtgattctggtgaatccattgaaactgatggtcca

SEQ ID NO: 412874 - DNA, 120 bp, Artificial Sequence
  ENSG00000148735_10 (sequence is synthesized)
gaccaggtctctggaagaattgagtgtcattatgagccaatggaatcctattttttcaaagagacatcccatgagtctgtggatagcagcaaagaggaaccccagacccttccagagacc

SEQ ID NO: 412875 - DNA, 120 bp, Artificial Sequence
  ENSG00000148735_11 (sequence is synthesized)
caggatggggacctccacctgcaagaacaaggctcaggaattgattggtgtctttcccctgccgatgtggaagcacagaccacaaatgaccaaaaggggtcggcctcactaactgttgtg

SEQ ID NO: 412876 - DNA, 120 bp, Artificial Sequence
  ENSG00000148735_12 (sequence is synthesized)
caattgtctatattaatcaataatatccccgatgaaagccaagtggagaaactgaacgttttcctttctcctcctgatgtcatcaactatcttgctctcacagaagccacaggacggata

SEQ ID NO: 412877 - DNA, 120 bp, Artificial Sequence
  ENSG00000148735_13 (sequence is synthesized)
tgaaattaaagcttaccatcggcaggatcccaaattcagagacattccatgctgcatcctgtatgtgtccctcaaaatgccaaagtgctgcaccttctcagctggataagcctagactga

SEQ ID NO: 412878 - DNA, 120 bp, Artificial Sequence
  ENSG00000148735_14 (sequence is synthesized)
agagccagcagaaaggagccagggagtaacgcaccccagacccatggcagcagaaccaggatggagctgggactgtccagctctgccccctgctgctgccatgtgataggagacagtcgg

SEQ ID NO: 412879 - DNA, 120 bp, Artificial Sequence
  ENSG00000148735_15 (sequence is synthesized)
cacccccctctgaatttctgcatctgcatcttaacaatggggatgactatcccctctctggttattgtatcagagatgctaagagggtcatgtggcatgattggagaacctgggggaatt

SEQ ID NO: 412880 - DNA, 120 bp, Artificial Sequence
  ENSG00000148735_16 (sequence is synthesized)
ggaaggccttattatctcagctattgtcccaaacaccacagacacagattgggtcagtccttcatgtaatacatgctgtgttctgtgaggatgtggtccacacaattccttctttgttaa

SEQ ID NO: 412881 - DNA, 120 bp, Artificial Sequence
  ENSG00000148735_17 (sequence is synthesized)
attccttctttgttaagggacatacagttgcaaatactcactgcatgaaggcaagattcccaagggagatgtgatagctgatcaggcttcccagacacctccttcccaaacacctccttc

SEQ ID NO: 412882 - DNA, 60 bp, Artificial Sequence
  ENSG00000148735_18 (sequence is synthesized)
caacacctctttcccaaacacctccttcccagacacctccttcccaacacctccttccca

SEQ ID NO: 412883 - DNA, 79 bp, Artificial Sequence
  ENSG00000148735_19 (sequence is synthesized)
ttccccaacacctccttcccaaacacctctttcccaaacacctccttcccagaaacccctctttcccaaacacctcctt

SEQ ID NO: 412884 - DNA, 69 bp, Artificial Sequence
  ENSG00000148735_20 (sequence is synthesized)
cttcccaacacctccttcccaaacccctccttccccaacatccttcccaacacctccttcccaacacct

SEQ ID NO: 412885 - DNA, 120 bp, Artificial Sequence
  ENSG00000148735_21 (sequence is synthesized)
acctccttccccaacacctccttcccaaacacctctttcccaaacacctccttcccagacacctccttcccaacaccgccttcccaacacctccttcccaaacccctctttcccaaacac

SEQ ID NO: 412886 - DNA, 120 bp, Artificial Sequence
  ENSG00000148735_22 (sequence is synthesized)
caacacctccttcccaacacctccttcccccttccccaacaactccttccccaacacctccttcccaaacatccccttcccaaacacctgcctctcttcaaccccacaggccagagtgct

SEQ ID NO: 412887 - DNA, 120 bp, Artificial Sequence
  ENSG00000148735_23 (sequence is synthesized)
cacctgcctctcttcaaccccacaggccagagtgctgagacagagtggccttttggattcaataagtatcttgttctcttaaagactcagcaacgattttagaagtcgcagcagttttac

SEQ ID NO: 412888 - DNA, 120 bp, Artificial Sequence
  ENSG00000148735_24 (sequence is synthesized)
atcacatgcagccaagatcagcttgctctacaagcaataacagaactacttagcacttcaaggttgaaagttcttcactaatggatccattgactaattgatcctggaaggccaaaggaa

SEQ ID NO: 412889 - DNA, 120 bp, Artificial Sequence
  ENSG00000148735_25 (sequence is synthesized)
taaaattcttttatataaataggaaaacaaaggcagagagctaaagcactaatcaaatcggggggtgttagagcaaaaacaggcttcagaaagagtattttaccatgcttcacatggaaa

SEQ ID NO: 412890 - DNA, 120 bp, Artificial Sequence
  ENSG00000148735_26 (sequence is synthesized)
aaatcgagccccggagcgatgaaaggcatattttctttgtttctccaagtttcataaccgttcagttgcagaaccaagaatctaaaaccagctctgggaaacaaatgtccagatgccagc

SEQ ID NO: 412891 - DNA, 120 bp, Artificial Sequence
  ENSG00000148735_27 (sequence is synthesized)
ctcatagttgaacttggatttgaaaataccttcagcacttagaagagacattcaaatacatttcatttcctgttacccagattgttcggaaagtattaaaaatttttcatttacatgctg

SEQ ID NO: 412892 - DNA, 120 bp, Artificial Sequence
  ENSG00000148735_28 (sequence is synthesized)
atgcctttaagtgcactaatcttttcttgtacaatatttaatctgctcttactcccatccagtgttgttgctgtttttttgagacattgtagttttcatctttaaaatttcactttaggt

SEQ ID NO: 412893 - DNA, 120 bp, Artificial Sequence
  ENSG00000148735_29 (sequence is synthesized)
cttctttatatcttttatatctctccctaactttttgaaaatatagtgataataactgctttaattactttctctgccaattctaacatctgtgtcagttctaggcctgttttgattgat

SEQ ID NO: 412894 - DNA, 120 bp, Artificial Sequence
  ENSG00000148735_30 (sequence is synthesized)
tgactttcttctcattattgatcatgttttccttcctctttgtatgcctggtaaactttgattgactgccaaacatcgcaaattttaccttgttgtttcctgaatatctttgtattccta

SEQ ID NO: 412895 - DNA, 120 bp, Artificial Sequence
  ENSG00000148735_31 (sequence is synthesized)
tgaatcttgagctttgttctgggatacagttaaattttttgggaacaactttcttctaagtctttcatgattttttaggtgggtttggagcagtgctcagtgtagaactagtaattagtg

SEQ ID NO: 412896 - DNA, 120 bp, Artificial Sequence
  ENSG00000148735_32 (sequence is synthesized)
ggaggaggtctccctgtttcttacccggtccatccagaaggaggactctttcaggattctttcatatcaagtagcatttggagaaggcactgagctaagagacagagcacctgggttcag

SEQ ID NO: 412897 - DNA, 120 bp, Artificial Sequence
  ENSG00000148735_33 (sequence is synthesized)
gacctcagatcggcatgatgtagcaaaaagagcttgcatggaatcagactggtgcagggattccaaaacagctccttcaaccaatttgtgcctcagttttcttttctgtaaaattatgac

SEQ ID NO: 412898 - DNA, 120 bp, Artificial Sequence
  ENSG00000148735_34 (sequence is synthesized)
taatgatggtgctggttgttggataattaaatgaggtaatatgtgtaacgtgcttacaaaggtgactggcacatattaggtgctcaataaagctactagttacttttacttctactacaa

SEQ ID NO: 412899 - DNA, 120 bp, Artificial Sequence
  ENSG00000148735_35 (sequence is synthesized)
agtccaggtacccgaggggtataatcgcagaagcagaaatctttttattgaaaatgccccacggtttccttcaagctaaccaggatacagaacttggtggtttttgtaaattccagtgta

SEQ ID NO: 412900 - DNA, 120 bp, Artificial Sequence
  ENSG00000148735_36 (sequence is synthesized)
ttttgtttcctcatctggtacaaaggaaccctttctacccttcccaggaagacattggttaagatatggctgagggaggcatagggattttttttcaatggtagtcaccacagacggttg

SEQ ID NO: 412901 - DNA, 120 bp, Artificial Sequence
  ENSG00000148735_37 (sequence is synthesized)
cgagctgtggtccccggtgttggagatggagcctggtgggaggcagctggatcgtgaggtcgtgggggtggagttctcacgaaggagttagcatcatccccttggcgctgttctcgtgat

SEQ ID NO: 412902 - DNA, 120 bp, Artificial Sequence
  ENSG00000148735_38 (sequence is synthesized)
atctggttgtttaaaagtgtgcagcacctctccgctcactctcttcctcctgctcctgccgtgtaagatgcctgctctgtctgccacaagtgaaagcttcctgaggtctccccggaagca

SEQ ID NO: 412903 - DNA, 120 bp, Artificial Sequence
  ENSG00000148735_39 (sequence is synthesized)
ggtctccccggaagcagatgctgccacgcttcctgtacagcctgcagaactgtggaccaatcaaacctcttttcttataaattacctggtcttggggatttctttatttaatgtgagaac

SEQ ID NO: 412904 - DNA, 120 bp, Artificial Sequence
  ENSG00000148735_40 (sequence is synthesized)
gcatgcccttttggatctgctgtttctacttttataaatttatcatgcagaaatacacaaatacacaaagatacatgtaaaaaaagtagtttactgcagtactgtttgtaataataaaaa

SEQ ID NO: 412905 - DNA, 120 bp, Artificial Sequence
  ENSG00000148735_41 (sequence is synthesized)
aaaaatcaggctggacgtggtggttcatgcctataattccaaccctttgggaggccgggacaggtggatcacctgaggtctggagctcgagaacaacctgaccaacatggagaaaccctg

SEQ ID NO: 412906 - DNA, 90 bp, Artificial Sequence
  ENSG00000148735_42 (sequence is synthesized)
attgtggcacatgcctgcaatcccagctacttgagaggctggggcaggagaatcactagaaccgggaggcggaagttgcagtgagccaag

SEQ ID NO: 412907 - DNA, 120 bp, Artificial Sequence
  ENSG00000148735_43 (sequence is synthesized)
attgcactccagcctgggcaacaagaggaaaacccagtctcaaaaaaaaaaaaaaaatcatgtgggtattgcttaattctgatttcatatcattgaacactgtagatattaaaatgttca

SEQ ID NO: 412908 - DNA, 120 bp, Artificial Sequence
  ENSG00000148735_44 (sequence is synthesized)
ttcagcaggcacagttctgtaaaattgttcgtgatacattaagaatgaaagaatcaagttgtataataaggataacatcatcccacttttgtacaaataaatgtttggtgtttgtgtgta

SEQ ID NO: 412909 - DNA, 120 bp, Artificial Sequence
  ENSG00000148737_0 (sequence is synthesized)
ttttttttttttaccccccttttttatttattatttttttgcacattgatcggatccttgggaacgagagaaaaaagaaacccaaactcacgcgtgcagaagatctccccccccttcccc

SEQ ID NO: 412910 - DNA, 120 bp, Artificial Sequence
  ENSG00000148737_1 (sequence is synthesized)
tcccctcctccctcttttcccctccccaggagaaaaagacccccaagcagaaaaaagttcaccttggactcgtctttttcttgcaatattttttgggggggcaaaactttttgggggtga

SEQ ID NO: 412911 - DNA, 120 bp, Artificial Sequence
  ENSG00000148737_2 (sequence is synthesized)
ttttttttggcttttcttcctccttcatttttcttccaaaattgctgctggtgggtgaaaaaaaaatgccgcagctgaacggcggtggaggggatgacctaggcgccaacgacgaactga

SEQ ID NO: 412912 - DNA, 120 bp, Artificial Sequence
  ENSG00000148737_3 (sequence is synthesized)
tttccttcaaagacgagggcgaacaggaggagaagagctccgaaaactcctcggcagagagggatttagctgatgtcaaatcgtctctagtcaatgaatcagaaacgaatcaaaacagct

SEQ ID NO: 412913 - DNA, 120 bp, Artificial Sequence
  ENSG00000148737_4 (sequence is synthesized)
cctccgattccgaggcggaaagacggcctccgcctcgctccgaaagtttccgagacaaatcccgggaaagtttggaagaagcggccaagaggcaagatggagggctctttaaggggccac

SEQ ID NO: 412914 - DNA, 120 bp, Artificial Sequence
  ENSG00000148737_5 (sequence is synthesized)
cgtatcccggctaccccttcatcatgatccccgacctgacgagcccctacctccccaacggatcgctctcgcccaccgcccgaacctatctccagatgaaatggccactgcttgatgtcc

SEQ ID NO: 412915 - DNA, 120 bp, Artificial Sequence
  ENSG00000148737_6 (sequence is synthesized)
aggcagggagcctccagagtagacaagccctcaaggatgcccggtccccatcaccggcacacattgtctctaacaaagtgccagtggtgcagcaccctcaccatgtccaccccctcacgc

SEQ ID NO: 412916 - DNA, 120 bp, Artificial Sequence
  ENSG00000148737_7 (sequence is synthesized)
ctcttatcacgtacagcaatgaacacttcacgccgggaaacccacctccacacttaccagccgacgtagaccccaaaacaggaatcccacggcctccgcaccctccagatatatccccgt

SEQ ID NO: 412917 - DNA, 120 bp, Artificial Sequence
  ENSG00000148737_8 (sequence is synthesized)
attacccactatcgcctggcaccgtaggacaaatcccccatccgctaggatggttagtaccacagcaaggtcaaccagtgtacccaatcacgacaggaggattcagacacccctacccca

SEQ ID NO: 412918 - DNA, 120 bp, Artificial Sequence
  ENSG00000148737_9 (sequence is synthesized)
cagctctgaccgtcaatgcttccatgtccaggttccctccccatatggtcccaccacatcatacgctacacacgacgggcattccgcatccggccatagtcacaccaacagtcaaacagg

SEQ ID NO: 412919 - DNA, 120 bp, Artificial Sequence
  ENSG00000148737_10 (sequence is synthesized)
aatcgtcccagagtgatgtcggctcactccatagttcaaagcatcaggactccaaaaaggaagaagaaaagaagaagccccacataaagaaacctcttaatgcattcatgttgtatatga

SEQ ID NO: 412920 - DNA, 120 bp, Artificial Sequence
  ENSG00000148737_11 (sequence is synthesized)
aggaaatgagagcaaaggtcgtagctgagtgcacgttgaaagaaagcgcggccatcaaccagatccttgggcggaggtggcatgcactgtccagagaagagcaagcgaaatactacgagc

SEQ ID NO: 412921 - DNA, 120 bp, Artificial Sequence
  ENSG00000148737_12 (sequence is synthesized)
tggcccggaaggagcgacagcttcatatgcaactgtaccccggctggtccgcgcgggataactatggaaagaagaagaagaggaaaagggacaagcagccgggagagaccaatgaacaca

SEQ ID NO: 412922 - DNA, 120 bp, Artificial Sequence
  ENSG00000148737_13 (sequence is synthesized)
gcgaatgtttcctaaatccttgcctttcacttcctccgattacagacctgagcgctcctaagaaatgccgagcgcgctttggccttgatcaacagaataactggtgcggcccttgcagga

SEQ ID NO: 412923 - DNA, 120 bp, Artificial Sequence
  ENSG00000148737_14 (sequence is synthesized)
gaaaaaaaaagtgcgttcgctacatacaaggtgaaggcagctgcctcagcccaccctcttcagatggaagcttactagattcgcctcccccctccccgaacctgctaggctcccctcccc

SEQ ID NO: 412924 - DNA, 120 bp, Artificial Sequence
  ENSG00000148737_15 (sequence is synthesized)
gcctccgccacccgccctcctgctcgctgaggccacccacaaggcctccgccctctgtcccaacggggccctggacctgcccccagccgctttgcagcctgccgccccctcctcatcaat

SEQ ID NO: 412925 - DNA, 120 bp, Artificial Sequence
  ENSG00000148737_16 (sequence is synthesized)
tgcacagccgtcgacttcttccttacattcccacagctccctggccgggacccagccccagccgctgtcgctcgtcaccaagtctttagaatagctttagcgtcgtgaaccccgctgctt

SEQ ID NO: 412926 - DNA, 120 bp, Artificial Sequence
  ENSG00000148737_17 (sequence is synthesized)
tgtttatggttttgtttcacttttcttaatttgccccccacccccaccttgaaaggttttgttttgtactctcttaattttgtgccatgtggctacattagttgatgtttatcgagttca

SEQ ID NO: 412927 - DNA, 120 bp, Artificial Sequence
  ENSG00000148737_18 (sequence is synthesized)
ttggtcaatatttgacccattcttatttcaatttctccttttaaatatgtagatgagagaagaacctcatgattctaccaaaatttttatcaacagctgtttaaagtctttgtagcgttt

SEQ ID NO: 412928 - DNA, 120 bp, Artificial Sequence
  ENSG00000148737_19 (sequence is synthesized)
aaaaaatatatatatatacataactgttatgtagttcggatagcttagttttaaaagactgattaaaaaacaaaaagaaaaaaaaagcaattttgaagcagccctccagaaggagttggt

SEQ ID NO: 412929 - DNA, 120 bp, Artificial Sequence
  ENSG00000148737_20 (sequence is synthesized)
tctgtattatttgtattaaatacgagcttgcgaaccaatcattttacatctggtttttaaaccgtaagggcaccatgaatgcagtgccgttactttttttttttttttctgtgtgaaaca

SEQ ID NO: 412930 - DNA, 120 bp, Artificial Sequence
  ENSG00000148737_21 (sequence is synthesized)
actcttattgtgatgttacttgttattgtttaaatgtacagaaacaaagggtaaaaatgtgttaatataccttgttccatggtgttgttcttttggggggaggggacgctactcaacact

SEQ ID NO: 412931 - DNA, 120 bp, Artificial Sequence
  ENSG00000148737_22 (sequence is synthesized)
taatagaatcacaacgctgttgggccagtagtatttattgctttagagattgcttgtcgtacctgtatgtcgtccctttttaaatatgttttcctttttcttgaaactgtataaagtttt

SEQ ID NO: 412932 - DNA, 120 bp, Artificial Sequence
  ENSG00000148737_23 (sequence is synthesized)
tttcccccttagcataagcatcttatatataacaactcatttgtacaaggtttttaagtttatatataaaatgtgtatatatatttttgtttcccctttttgacttttttttttctgtat

SEQ ID NO: 412933 - DNA, 120 bp, Artificial Sequence
  ENSG00000148737_24 (sequence is synthesized)
gaaacccagatgtcaccaaatggacattaatagttgcattaaggatcagtagcattaacaaaagttgctttaaaagccattatgtaaaacaagacttgaaaatgagtgagggaattttag

SEQ ID NO: 412934 - DNA, 120 bp, Artificial Sequence
  ENSG00000148737_25 (sequence is synthesized)
cgacactgtctgagcagcagtgggaaccatcttcgtttcccctttgaactcccagtgggatgccctaccctgcgcccttaggacccggactgaccgtgtacaaaactttacgtgccaaaa

SEQ ID NO: 412935 - DNA, 120 bp, Artificial Sequence
  ENSG00000148737_26 (sequence is synthesized)
ttctcagtgaatttagctttctccctctttttgatgctgtaatttttgttcatcatgttttgctgtgatgttacataggtagatttgtatgtagttttaatgtcacctataacaaaatgt

SEQ ID NO: 412936 - DNA, 120 bp, Artificial Sequence
  ENSG00000148737_27 (sequence is synthesized)
gtttggtagcagattgtccagaaagcattttaaatgaagaggtataaacccttaagggccaaaattctgtatattagattactcttaaacgaaaaaccagctgccgcttttatgtacaca

SEQ ID NO: 412937 - DNA, 120 bp, Artificial Sequence
  ENSG00000148737_28 (sequence is synthesized)
tattacatacgagtaggcagcagactttaaaaataaaaaaaacctaggcatgttgatgttgcaaaatgctgtataaagctgaaacctgttcattcagtgccattgtagttgacatgaagc

SEQ ID NO: 412938 - DNA, 120 bp, Artificial Sequence
  ENSG00000148737_29 (sequence is synthesized)
gattgtaaaactgtctccgatttttctctggtttattaaaatgctaactataacattttttgtgaatactttgaatgtttcctaacagttgtgatgttactgttccgttttatgctctta

SEQ ID NO: 412939 - DNA, 120 bp, Artificial Sequence
  ENSG00000148737_30 (sequence is synthesized)
ttccaagttcatttttaatggtttggaagccatttttgtaatgaataaatgttcatgctgtacagtatctgtagcatgccgttctggattaataaaagcaacttagtatgtgcagataaa

SEQ ID NO: 412940 - DNA, 120 bp, Artificial Sequence
  ENSG00000148737_31 (sequence is synthesized)
gtcagcactcaagtcttcagggacatgaaaaggagccactccttacaaaaagttggggagccctggtgtattgagtctaacaaagtgccagtggtgcagcaccctcaccatgtccacccc

SEQ ID NO: 412941 - DNA, 120 bp, Artificial Sequence
  ENSG00000148737_32 (sequence is synthesized)
aataatctccgctcccagactactccgttcctccggatttcgatccccctttttctatctgtcaatcagcgccgcctttgaactgaaaagctctcagtctaacttcaactcactcaaatc

SEQ ID NO: 412942 - DNA, 80 bp, Artificial Sequence
  ENSG00000148737_33 (sequence is synthesized)
cttgtctggcggcgctgctggtgtgtgctgctcccctgtgccgcgggtgcgcggcggcggcgcgggctgcagggcgggtg

SEQ ID NO: 412943 - DNA, 120 bp, Artificial Sequence
  ENSG00000148737_34 (sequence is synthesized)
cagcatctgggcgcaggcagcatgcccgcgagccggcagcgggaaggacagcgccgcaaccctctctagatgtctaacaaagtgccagtggtgcagcaccctcaccatgtccaccccctc

SEQ ID NO: 412944 - DNA, 120 bp, Artificial Sequence
  ENSG00000148737_35 (sequence is synthesized)
gagagcttcccttcaccacccgccaatcccttctctgctcccaagaagcgtgtgtccctccagctggggtacaatgcaagggcatttggcttgaagcggggttggaggttggacaaatac

SEQ ID NO: 412945 - DNA, 120 bp, Artificial Sequence
  ENSG00000148737_36 (sequence is synthesized)
tcttgcagtaattccctgtgtttcatctcttcatctagggaaagaagaagaagaggaaaagggacaagcagccgggagagaccaatggagaaaaaaaaagtgcgttcgctacatacaagg

SEQ ID NO: 412946 - DNA, 120 bp, Artificial Sequence
  ENSG00000148737_37 (sequence is synthesized)
gggagagaccaatgcctgccgccccctcctcatcaattgcacagccgtcgacttcttccttacattcccacagctccctggccgggacccagccccagccgctgtcgctcgtcaccaagt

SEQ ID NO: 412947 - DNA, 120 bp, Artificial Sequence
  ENSG00000148737_38 (sequence is synthesized)
tttacagtgctgaaaaagaagcgtggcattgaacggcatgcaccagctaaagggctgcaagcagtgagtcatgcagtctcagactgcagcgtccctaggcctgcagaattaacaaaatat

SEQ ID NO: 412948 - DNA, 120 bp, Artificial Sequence
  ENSG00000148737_39 (sequence is synthesized)
atgtgtgtatatatgtagcattggttccaaaaggaatcagaacagcccagaagtgtccaaattaagcacccatgttccacctgcaggtctccatccagcctgcattctcagggaaagtgt

SEQ ID NO: 412949 - DNA, 120 bp, Artificial Sequence
  ENSG00000148737_40 (sequence is synthesized)
tactatgcttagaagacgcgcagcggtggtttaatatgtgttaggaccatttgctttaaaggaacacatccacaagtttcgtctaacaaagtgccagtggtgcagcaccctcaccatgtc

SEQ ID NO: 412950 - DNA, 120 bp, Artificial Sequence
  ENSG00000148737_41 (sequence is synthesized)
gtagatgcccattaaaggatgcccatgtttgggatactaacaaggcaggatagaacggaacaatgcagttctgcctttgttctaacaaagtgccagtggtgcagcaccctcaccatgtcc

SEQ ID NO: 412951 - DNA, 120 bp, Artificial Sequence
  ENSG00000148737_42 (sequence is synthesized)
ccctcccctctcccatcgcagccctctccctaagaaatttgttttgagggatttgacaatcttgcagataaagtgcctgcctcctgcactcggttgatcattttccctcatggctgaccg

SEQ ID NO: 412952 - DNA, 120 bp, Artificial Sequence
  ENSG00000148737_43 (sequence is synthesized)
agtcagaaataattgtgttcttaatcttgtccctgatggatgactcggagttcagcaacgggccggctccaatgacaaatacaatattaatattcattaactgctttgacaatgctaatt

SEQ ID NO: 412953 - DNA, 120 bp, Artificial Sequence
  ENSG00000148737_44 (sequence is synthesized)
ttgatgcagtagtaaagggccttccaaagttaccggccaaagcatcagagctgcgcaaggtggcaagataatttgtgctggtttgctgagctgaaggcttttaaagtctatagcaaaaag

SEQ ID NO: 412954 - DNA, 120 bp, Artificial Sequence
  ENSG00000148737_45 (sequence is synthesized)
ctaggtaccacaaacaaaaaagagaaagggaaaaaagttctgaagcattggaaggcagggctgcggaaataatacgatcacagtccgctaaaaaatttgacacctctgatgcagtttctt

SEQ ID NO: 412955 - DNA, 120 bp, Artificial Sequence
  ENSG00000148737_46 (sequence is synthesized)
attttgagcctactcggccaggaatctggagccatttcgatctttttagatgctttttttcagttctttaagtgaaaggtttaaagggaggggaagctgggaggaaaaagaaaagtgaga

SEQ ID NO: 412956 - DNA, 120 bp, Artificial Sequence
  ENSG00000148737_47 (sequence is synthesized)
gctgcgtccacggctgtccagtccgcatgcatgctctcagcctttgccatgttcgctgtcactttgcggtaactttcaggttgatgtaccttgactgtctaacaaagtgccagtggtgca

SEQ ID NO: 412957 - DNA, 120 bp, Artificial Sequence
  ENSG00000148737_48 (sequence is synthesized)
gtccctgctgcccaaggtaacgggtgagggaggggactttgctgaggtgccctgagctggctggggaacatggaccttcccccttccttcacggattctgtagtggcaaagattagaaag

SEQ ID NO: 412958 - DNA, 120 bp, Artificial Sequence
  ENSG00000148737_49 (sequence is synthesized)
tagaaggagtttttaaaattttttttaaaaaattaaatctgcaaccagctgaactctagattattagtggacttttttgttttttatttttaagatttttttagggatgtgtgtacaggg

SEQ ID NO: 412959 - DNA, 120 bp, Artificial Sequence
  ENSG00000148737_50 (sequence is synthesized)
cgaaggtacagagaaagtttttttagaggtggagagagggaaaaccaaggctgttatgtaccctagggacacaattttagtgggaatggaagatttgagtggtaagggaggcgcagtggc

SEQ ID NO: 412960 - DNA, 120 bp, Artificial Sequence
  ENSG00000148737_51 (sequence is synthesized)
gcactccctcactgacctccaggttgagaattttgtgacgctgccggagggaggcagaggcaggcaggaagaaaaccctggaaactcgctgatcaggggcgagcctggaccgggtgggct

SEQ ID NO: 412961 - DNA, 120 bp, Artificial Sequence
  ENSG00000148773_0 (sequence is synthesized)
agaaggaagtggagggctgacgctgcgggcgggcgggcgggcgggaggactcgactcggtgggagccgctagagccgggcgcccggggacgtagcctgtagggccaccgggtccccgtca

SEQ ID NO: 412962 - DNA, 120 bp, Artificial Sequence
  ENSG00000148773_1 (sequence is synthesized)
acgtagcctgtagggccaccgggtccccgtcagaggcggcggcgggagcagcggggactgcaggccggggtgcagcgaacgcgaccccgcgggctgcggcccggtgtgtgcggagcgtgg

SEQ ID NO: 412963 - DNA, 120 bp, Artificial Sequence
  ENSG00000148773_2 (sequence is synthesized)
gcgccggctcctcctgcggcggactttgggtgcgacttgacgagcggtggttcgacaagtggccttgcgggccggatcgtcccagtggaagagttgtaaatttgcttctggccttcccct

SEQ ID NO: 412964 - DNA, 120 bp, Artificial Sequence
  ENSG00000148773_3 (sequence is synthesized)
acggattatacctggccttcccctacggattatactcaacttactgtttagaaaatgtggcccacgagacgcctggttactatcaaaaggagcggggtcgacggtccccactttcccctg

SEQ ID NO: 412965 - DNA, 120 bp, Artificial Sequence
  ENSG00000148773_4 (sequence is synthesized)
agcctcagcacctgcttgtttggaaggggtattgaatgtgacatccgtatccagcttcctgttgtgtcaaaacaacattgcaaaattgaaatccatgagcaggaggcaatattacataat

SEQ ID NO: 412966 - DNA, 120 bp, Artificial Sequence
  ENSG00000148773_5 (sequence is synthesized)
ttcagttccacaaatccaacacaagtaaatgggtctgttattgatgagcctgtacggctaaaacatggagatgtaataactattattgatcgttccttcaggtatgaaaatgaaagtctt

SEQ ID NO: 412967 - DNA, 120 bp, Artificial Sequence
  ENSG00000148773_6 (sequence is synthesized)
cagaatggaaggaagtcaactgaatttccaagaaaaatacgtgaacaggagccagcacgtcgtgtctcaagatctagcttctcttctgaccctgatgagaaagctcaagattccaaggcc

SEQ ID NO: 412968 - DNA, 120 bp, Artificial Sequence
  ENSG00000148773_7 (sequence is synthesized)
tattcaaaaatcactgaaggaaaagtttcaggaaatcctcaggtacatatcaagaatgtcaaagaagacagtaccgcagatgactcaaaagacagtgttgctcagggaacaactaatgtt

SEQ ID NO: 412969 - DNA, 120 bp, Artificial Sequence
  ENSG00000148773_8 (sequence is synthesized)
cattcctcagaacatgctggacgtaatggcagaaatgcagctgatcccatttctggggattttaaagaaatttccagcgttaaattagtgagccgttatggagaattgaagtctgttccc

SEQ ID NO: 412970 - DNA, 120 bp, Artificial Sequence
  ENSG00000148773_9 (sequence is synthesized)
actacacaatgtcttgacaatagcaaaaaaaatgaatctcccttttggaagctttatgagtcagtgaagaaagagttggatgtaaaatcacaaaaagaaaatgtcctacagtattgtaga

SEQ ID NO: 412971 - DNA, 120 bp, Artificial Sequence
  ENSG00000148773_10 (sequence is synthesized)
aaatctggattacaaactgattacgcaacagagaaagaaagtgctgatggtttacagggggagacccaactgttggtctcgcgtaagtcaagaccaaaatctggtgggagcggccacgct

SEQ ID NO: 412972 - DNA, 120 bp, Artificial Sequence
  ENSG00000148773_11 (sequence is synthesized)
gtggcagagcctgcttcacctgaacaagagcttgaccagaacaaggggaagggaagagacgtggagtctgttcagactcccagcaaggctgtgggcgccagctttcctctctatgagccg

SEQ ID NO: 412973 - DNA, 120 bp, Artificial Sequence
  ENSG00000148773_12 (sequence is synthesized)
gctaaaatgaagacccctgtacaatattcacagcaacaaaattctccacaaaaacataagaacaaagacctgtatactactggtagaagagaatctgtgaatctgggtaaaagtgaaggc

SEQ ID NO: 412974 - DNA, 120 bp, Artificial Sequence
  ENSG00000148773_13 (sequence is synthesized)
ttcaaggctggtgataaaactcttactcccaggaagctttcaactagaaatcgaacaccagctaaagttgaagatgcagctgactctgccactaagccagaaaatctctcttccaaaacc

SEQ ID NO: 412975 - DNA, 120 bp, Artificial Sequence
  ENSG00000148773_14 (sequence is synthesized)
agaggaagtattcctacagatgtggaagttctgcctacggaaactgaaattcacaatgagccatttttaactctgtggctcactcaagttgagaggaagatccaaaaggattccctcagc

SEQ ID NO: 412976 - DNA, 120 bp, Artificial Sequence
  ENSG00000148773_15 (sequence is synthesized)
aagcctgagaaattgggcactacagctggacagatgtgctctgggttacctggtcttagttcagttgatatcaacaactttggtgattccattaatgagagtgagggaatacctttgaaa

SEQ ID NO: 412977 - DNA, 120 bp, Artificial Sequence
  ENSG00000148773_16 (sequence is synthesized)
agaaggcgtgtgtcctttggtgggcacctaagacctgaactatttgatgaaaacttgcctcctaatacgcctctcaaaaggggagaagccccaaccaaaagaaagtctctggtaatgcac

SEQ ID NO: 412978 - DNA, 120 bp, Artificial Sequence
  ENSG00000148773_17 (sequence is synthesized)
actccacctgtcctgaagaaaatcatcaaggaacagcctcaaccatcaggaaaacaagagtcaggttcagaaatccatgtggaagtgaaggcacaaagcttggttataagccctccagct

SEQ ID NO: 412979 - DNA, 120 bp, Artificial Sequence
  ENSG00000148773_18 (sequence is synthesized)
cctagtcctaggaaaactccagttgccagtgatcaacgccgtaggtcctgcaaaacagcccctgcttccagcagcaaatctcagacagaggttcctaagagaggagggagaaagagtggc

SEQ ID NO: 412980 - DNA, 120 bp, Artificial Sequence
  ENSG00000148773_19 (sequence is synthesized)
aacctgccttcaaagagagtgtctatcagccgaagtcaacatgatattttacagatgatatgttccaaaagaagaagtggtgcttcggaagcaaatctgattgttgcaaaatcatgggca

SEQ ID NO: 412981 - DNA, 120 bp, Artificial Sequence
  ENSG00000148773_20 (sequence is synthesized)
gatgtagtaaaacttggtgcaaaacaaacacaaactaaagtcataaaacatggtcctcaaaggtcaatgaacaaaaggcaaagaagacctgctactccaaagaagcctgtgggcgaagtt

SEQ ID NO: 412982 - DNA, 120 bp, Artificial Sequence
  ENSG00000148773_21 (sequence is synthesized)
cacagtcaatttagtacaggccacgcaaactctccttgtaccataataatagggaaagctcatactgaaaaagtacatgtgcctgctcgaccctacagagtgctcaacaacttcatttcc

SEQ ID NO: 412983 - DNA, 120 bp, Artificial Sequence
  ENSG00000148773_22 (sequence is synthesized)
aaccaaaaaatggactttaaggaagatctttcaggaatagctgaaatgttcaagaccccagtgaaggagcaaccgcagttgacaagcacatgtcacatcgctatttcaaattcagagaat

SEQ ID NO: 412984 - DNA, 120 bp, Artificial Sequence
  ENSG00000148773_23 (sequence is synthesized)
ttgcttggaaaacagtttcaaggaactgattcaggagaagaacctctgctccccacctcagagagttttggaggaaatgtgttcttcagtgcacagaatgcagcaaaacagccatctgat

SEQ ID NO: 412985 - DNA, 120 bp, Artificial Sequence
  ENSG00000148773_24 (sequence is synthesized)
aaatgctctgcaagccctcccttaagacggcagtgtattagagaaaatggaaacgtagcaaaaacgcccaggaacacctacaaaatgacttctctggagacaaaaacttcagatactgag

SEQ ID NO: 412986 - DNA, 120 bp, Artificial Sequence
  ENSG00000148773_25 (sequence is synthesized)
acagagccttcaaaaacagtatccactgcaaacaggtcaggaaggtctacagagttcaggaatatacagaagctacctgtggaaagtaagagtgaagaaacaaatacagaaattgttgag

SEQ ID NO: 412987 - DNA, 120 bp, Artificial Sequence
  ENSG00000148773_26 (sequence is synthesized)
tgcatcctaaaaagaggtcagaaggcaacactactacaacaaaggagagaaggagagatgaaggaaatagaaagaccttttgagacatataaggaaaatattgaattaaaagaaaacgat

SEQ ID NO: 412988 - DNA, 120 bp, Artificial Sequence
  ENSG00000148773_27 (sequence is synthesized)
gaaaagatgaaagcaatgaagagatcaagaacttgggggcagaaatgtgcaccaatgtctgacctgacagacctcaagagcttgcctgatacagaactcatgaaagacacggcacgtggc

SEQ ID NO: 412989 - DNA, 120 bp, Artificial Sequence
  ENSG00000148773_28 (sequence is synthesized)
cagaatctcctccaaacccaagatcatgccaaggcaccaaagagtgagaaaggcaaaatcactaaaatgccctgccagtcattacaaccagaaccaataaacaccccaacacacacaaaa

SEQ ID NO: 412990 - DNA, 120 bp, Artificial Sequence
  ENSG00000148773_29 (sequence is synthesized)
caacagttgaaggcatccctggggaaagtaggtgtgaaagaagagctcctagcagtcggcaagttcacacggacgtcaggggagaccacgcacacgcacagagagccagcaggagatggc

SEQ ID NO: 412991 - DNA, 120 bp, Artificial Sequence
  ENSG00000148773_30 (sequence is synthesized)
aagagcatcagaacgtttaaggagtctccaaagcagatcctggacccagcagcccgtgtaactggaatgaagaagtggccaagaacgcctaaggaagaggcccagtcactagaagacctg

SEQ ID NO: 412992 - DNA, 120 bp, Artificial Sequence
  ENSG00000148773_31 (sequence is synthesized)
gctggcttcaaagagctcttccagacaccaggtccctctgaggaatcaatgactgatgagaaaactaccaaaatagcctgcaaatctccaccaccagaatcagtggacactccaacaagc

SEQ ID NO: 412993 - DNA, 120 bp, Artificial Sequence
  ENSG00000148773_32 (sequence is synthesized)
acaaagcaatggcctaagagaagtctcaggaaagcagatgtagaggaagaattcttagcactcaggaaactaacaccatcagcagggaaagccatgcttacgcccaaaccagcaggaggt

SEQ ID NO: 412994 - DNA, 120 bp, Artificial Sequence
  ENSG00000148773_33 (sequence is synthesized)
gatgagaaagacattaaagcatttatgggaactccagtgcagaaactggacctggcaggaactttacctggcagcaaaagacagctacagactcctaaggaaaaggcccaggctctagaa

SEQ ID NO: 412995 - DNA, 120 bp, Artificial Sequence
  ENSG00000148773_34 (sequence is synthesized)
gacctggctggctttaaagagctcttccagactcctggtcacaccgaggaattagtggctgctggtaaaaccactaaaataccctgcgactctccacagtcagacccagtggacacccca

SEQ ID NO: 412996 - DNA, 120 bp, Artificial Sequence
  ENSG00000148773_35 (sequence is synthesized)
acaagcacaaagcaacgacccaagagaagtatcaggaaagcagatgtagagggagaactcttagcgtgcaggaatctaatgccatcagcaggcaaagccatgcacacgcctaaaccatca

SEQ ID NO: 412997 - DNA, 120 bp, Artificial Sequence
  ENSG00000148773_36 (sequence is synthesized)
gtaggtgaagagaaagacatcatcatatttgtgggaactccagtgcagaaactggacctgacagagaacttaaccggcagcaagagacggccacaaactcctaaggaagaggcccaggct

SEQ ID NO: 412998 - DNA, 120 bp, Artificial Sequence
  ENSG00000148773_37 (sequence is synthesized)
ctggaagacctgactggctttaaagagctcttccagacccctggtcatactgaagaagcagtggctgctggcaaaactactaaaatgccctgcgaatcttctccaccagaatcagcagac

SEQ ID NO: 412999 - DNA, 120 bp, Artificial Sequence
  ENSG00000148773_38 (sequence is synthesized)
accccaacaagcacaagaaggcagcccaagacacctttggagaaaagggacgtacagaaggagctctcagccctgaagaagctcacacagacatcaggggaaaccacacacacagataaa

SEQ ID NO: 413000 - DNA, 120 bp, Artificial Sequence
  ENSG00000148773_39 (sequence is synthesized)
gtaccaggaggtgaggataaaagcatcaacgcgtttagggaaactgcaaaacagaaactggacccagcagcaagtgtaactggtagcaagaggcacccaaaaactaaggaaaaggcccaa

SEQ ID NO: 413001 - DNA, 120 bp, Artificial Sequence
  ENSG00000148773_40 (sequence is synthesized)
cccctagaagacctggctggcttgaaagagctcttccagacaccagtatgcactgacaagcccacgactcacgagaaaactaccaaaatagcctgcagatcacaaccagacccagtggac

SEQ ID NO: 413002 - DNA, 120 bp, Artificial Sequence
  ENSG00000148773_41 (sequence is synthesized)
acaccaacaagctccaagccacagtccaagagaagtctcaggaaagtggacgtagaagaagaattcttcgcactcaggaaacgaacaccatcagcaggcaaagccatgcacacacccaaa

SEQ ID NO: 413003 - DNA, 120 bp, Artificial Sequence
  ENSG00000148773_42 (sequence is synthesized)
ccagcagtaagtggtgagaaaaacatctacgcatttatgggaactccagtgcagaaactggacctgacagagaacttaactggcagcaagagacggctacaaactcctaaggaaaaggcc

SEQ ID NO: 413004 - DNA, 120 bp, Artificial Sequence
  ENSG00000148773_43 (sequence is synthesized)
caggctctagaagacctggctggctttaaagagctcttccagacacgaggtcacactgaggaatcaatgactaacgataaaactgccaaagtagcctgcaaatcttcacaaccagaccca

SEQ ID NO: 413005 - DNA, 120 bp, Artificial Sequence
  ENSG00000148773_44 (sequence is synthesized)
gacaaaaacccagcaagctccaagcgacggctcaagacatccctggggaaagtgggcgtgaaagaagagctcctagcagttggcaagctcacacagacatcaggagagactacacacaca

SEQ ID NO: 413006 - DNA, 120 bp, Artificial Sequence
  ENSG00000148773_45 (sequence is synthesized)
cacacagagccaacaggagatggtaagagcatgaaagcatttatggagtctccaaagcagatcttagactcagcagcaagtctaactggcagcaagaggcagctgagaactcctaaggga

SEQ ID NO: 413007 - DNA, 120 bp, Artificial Sequence
  ENSG00000148773_46 (sequence is synthesized)
aagtctgaagtccctgaagacctggccggcttcatcgagctcttccagacaccaagtcacactaaggaatcaatgactaacgaaaaaactaccaaagtatcctacagagcttcacagcca

SEQ ID NO: 413008 - DNA, 120 bp, Artificial Sequence
  ENSG00000148773_47 (sequence is synthesized)
gacctagtggacaccccaacaagctccaagccacagcccaagagaagtctcaggaaagcagacactgaagaagaatttttagcatttaggaaacaaacgccatcagcaggcaaagccatg

SEQ ID NO: 413009 - DNA, 120 bp, Artificial Sequence
  ENSG00000148773_48 (sequence is synthesized)
cacacacccaaaccagcagtaggtgaagagaaagacatcaacacgtttttgggaactccagtgcagaaactggaccagccaggaaatttacctggcagcaatagacggctacaaactcgt

SEQ ID NO: 413010 - DNA, 120 bp, Artificial Sequence
  ENSG00000148773_49 (sequence is synthesized)
aaggaaaaggcccaggctctagaagaactgactggcttcagagagcttttccagacaccatgcactgataaccccacgactgatgagaaaactaccaaaaaaatactctgcaaatctccg

SEQ ID NO: 413011 - DNA, 120 bp, Artificial Sequence
  ENSG00000148773_50 (sequence is synthesized)
caatcagacccagcggacaccccaacaaacacaaagcaacggcccaagagaagcctcaagaaagcagacgtagaggaagaatttttagcattcaggaaactaacaccatcagcaggcaaa

SEQ ID NO: 413012 - DNA, 120 bp, Artificial Sequence
  ENSG00000148773_51 (sequence is synthesized)
gccatgcacacgcctaaagcagcagtaggtgaagagaaagacatcaacacatttgtggggactccagtggagaaactggacctgctaggaaatttacctggcagcaagagacggccacaa

SEQ ID NO: 413013 - DNA, 120 bp, Artificial Sequence
  ENSG00000148773_52 (sequence is synthesized)
caaatctccacaaccagacccagtcaaaaccccaacaagctccaagcaacgactcaagatatccttggggaaagtaggtgtgaaagaagaggtcctaccagtcggcaagctcacacagac

SEQ ID NO: 413014 - DNA, 120 bp, Artificial Sequence
  ENSG00000148773_53 (sequence is synthesized)
gtcagggaagaccacacagacacacagagagacagcaggagatggaaagagcatcaaagcgtttaaggaatctgcaaagcagatgctggacccagcaaactatggaactgggatggagag

SEQ ID NO: 413015 - DNA, 120 bp, Artificial Sequence
  ENSG00000148773_54 (sequence is synthesized)
gtggccaagaacacctaaggaagaggcccaatcactagaagacctggccggcttcaaagagctcttccagacaccagaccacactgaggaatcaacaactgatgacaaaactaccaaaat

SEQ ID NO: 413016 - DNA, 120 bp, Artificial Sequence
  ENSG00000148773_55 (sequence is synthesized)
agcctgcaaatctccaccaccagaatcaatggacactccaacaagcacaaggaggcggcccaaaacacctttggggaaaagggatatagtggaagagctctcagccctgaagcagctcac

SEQ ID NO: 413017 - DNA, 120 bp, Artificial Sequence
  ENSG00000148773_56 (sequence is synthesized)
acagaccacacacacagacaaagtaccaggagatgaggataaaggcatcaacgtgttcagggaaactgcaaaacagaaactggacccagcagcaagtgtaactggtagcaagaggcagcc

SEQ ID NO: 413018 - DNA, 120 bp, Artificial Sequence
  ENSG00000148773_57 (sequence is synthesized)
aagaactcctaagggaaaagcccaacccctagaagacttggctggcttgaaagagctcttccagacaccaatatgcactgacaagcccacgactcatgagaaaactaccaaaatagcctg

SEQ ID NO: 413019 - DNA, 120 bp, Artificial Sequence
  ENSG00000148773_58 (sequence is synthesized)
cagatctccacaaccagacccagtgggtaccccaacaatcttcaagccacagtccaagagaagtctcaggaaagcagacgtagaggaagaatccttagcactcaggaaacgaacaccatc

SEQ ID NO: 413020 - DNA, 120 bp, Artificial Sequence
  ENSG00000148773_59 (sequence is synthesized)
agtagggaaagctatggacacacccaaaccagcaggaggtgatgagaaagacatgaaagcatttatgggaactccagtgcagaaattggacctgccaggaaatttacctggcagcaaaag

SEQ ID NO: 413021 - DNA, 120 bp, Artificial Sequence
  ENSG00000148773_60 (sequence is synthesized)
atggccacaaactcctaaggaaaaggcccaggctctagaagacctggctggcttcaaagagctcttccagacaccaggcactgacaagcccacgactgatgagaaaactaccaaaatagc

SEQ ID NO: 413022 - DNA, 120 bp, Artificial Sequence
  ENSG00000148773_61 (sequence is synthesized)
ctgcaaatctccacaaccagacccagtggacaccccagcaagcacaaagcaacggcccaagagaaacctcaggaaagcagacgtagaggaagaatttttagcactcaggaaacgaacacc

SEQ ID NO: 413023 - DNA, 120 bp, Artificial Sequence
  ENSG00000148773_62 (sequence is synthesized)
atcagcaggcaaagccatggacacaccaaaaccagcagtaagtgatgagaaaaatatcaacacatttgtggaaactccagtgcagaaactggacctgctaggaaatttacctggcagcaa

SEQ ID NO: 413024 - DNA, 120 bp, Artificial Sequence
  ENSG00000148773_63 (sequence is synthesized)
gagacagccacagactcctaaggaaaaggctgaggctctagaggacctggttggcttcaaagaactcttccagacaccaggtcacactgaggaatcaatgactgatgacaaaatcacaga

SEQ ID NO: 413025 - DNA, 120 bp, Artificial Sequence
  ENSG00000148773_64 (sequence is synthesized)
agtatcctgtaaatctccacagccagagtcattcaaaacctcaagaagctccaagcaaaggctcaagatacccctggtgaaagtggacatgaaagaagagcccctagcagtcagcaagct

SEQ ID NO: 413026 - DNA, 120 bp, Artificial Sequence
  ENSG00000148773_65 (sequence is synthesized)
cacacggacatcaggggagactacgcaaacacacacagagccaacaggagatagtaagagcatcaaagcgtttaaggagtctccaaagcagatcctggacccagcagcaagtgtaactgg

SEQ ID NO: 413027 - DNA, 120 bp, Artificial Sequence
  ENSG00000148773_66 (sequence is synthesized)
tagcaggaggcagctgagaactcgtaaggaaaaggcccgtgctctagaagacctggttgacttcaaagagctcttctcagcaccaggtcacactgaagagtcaatgactattgacaaaaa

SEQ ID NO: 413028 - DNA, 120 bp, Artificial Sequence
  ENSG00000148773_67 (sequence is synthesized)
cacaaaaattccctgcaaatctcccccaccagaactaacagacactgccacgagcacaaagagatgccccaagacacgtcccaggaaagaagtaaaagaggagctctcagcagttgagag

SEQ ID NO: 413029 - DNA, 120 bp, Artificial Sequence
  ENSG00000148773_68 (sequence is synthesized)
gctcacgcaaacatcagggcaaagcacacacacacacaaagaaccagcaagcggtgatgagggcatcaaagtattgaagcaacgtgcaaagaagaaaccaaacccagtagaagaggaacc

SEQ ID NO: 413030 - DNA, 120 bp, Artificial Sequence
  ENSG00000148773_69 (sequence is synthesized)
cagcaggagaaggccaagagcacctaaggaaaaggcccaacccctggaagacctggccggcttcacagagctctctgaaacatcaggtcacactcaggaatcactgactgctggcaaagc

SEQ ID NO: 413031 - DNA, 120 bp, Artificial Sequence
  ENSG00000148773_70 (sequence is synthesized)
cactaaaataccctgcgaatctcccccactagaagtggtagacaccacagcaagcacaaagaggcatctcaggacacgtgtgcagaaggtacaagtaaaagaagagccttcagcagtcaa

SEQ ID NO: 413032 - DNA, 120 bp, Artificial Sequence
  ENSG00000148773_71 (sequence is synthesized)
gttcacacaaacatcaggggaaaccacggatgcagacaaagaaccagcaggtgaagataaaggcatcaaagcattgaaggaatctgcaaaacagacaccggctccagcagcaagtgtaac

SEQ ID NO: 413033 - DNA, 120 bp, Artificial Sequence
  ENSG00000148773_72 (sequence is synthesized)
tggcagcaggagacggccaagagcacccagggaaagtgcccaagccatagaagacctagctggcttcaaagacccagcagcaggtcacactgaagaatcaatgactgatgacaaaaccac

SEQ ID NO: 413034 - DNA, 120 bp, Artificial Sequence
  ENSG00000148773_73 (sequence is synthesized)
taaaataccctgcaaatcatcaccagaactagaagacaccgcaacaagctcaaagagacggcccaggacacgtgcccagaaagtagaagtgaaggaggagctgttagcagttggcaagct

SEQ ID NO: 413035 - DNA, 120 bp, Artificial Sequence
  ENSG00000148773_74 (sequence is synthesized)
cacacaaacctcaggggagaccacgcacaccgacaaagagccggtaggtgagggcaaaggcacgaaagcatttaagcaacctgcaaagcggaagctggacgcagaagatgtaattggcag

SEQ ID NO: 413036 - DNA, 120 bp, Artificial Sequence
  ENSG00000148773_75 (sequence is synthesized)
caggagacagccaagagcacctaaggaaaaggcccaacccctggaagatctggccagcttccaagagctctctcaaacaccaggccacactgaggaactggcaaatggtgctgctgatag

SEQ ID NO: 413037 - DNA, 120 bp, Artificial Sequence
  ENSG00000148773_76 (sequence is synthesized)
ctttacaagcgctccaaagcaaacacctgacagtggaaaacctctaaaaatatccagaagagttcttcgggcccctaaagtagaacccgtgggagacgtggtaagcaccagagaccctgt

SEQ ID NO: 413038 - DNA, 120 bp, Artificial Sequence
  ENSG00000148773_77 (sequence is synthesized)
aaaatcacaaagcaaaagcaacacttccctgcccccactgcccttcaagaggggaggtggcaaagatggaagcgtcacgggaaccaagaggctgcgctgcatgccagcaccagaggaaat

SEQ ID NO: 413039 - DNA, 120 bp, Artificial Sequence
  ENSG00000148773_78 (sequence is synthesized)
tgtggaggagctgccagccagcaagaagcagagggttgctcccagggcaagaggcaaatcatccgaacccgtggtcatcatgaagagaagtttgaggacttctgcaaaaagaattgaacc

SEQ ID NO: 413040 - DNA, 120 bp, Artificial Sequence
  ENSG00000148773_79 (sequence is synthesized)
tgcggaagagctgaacagcaacgacatgaaaaccaacaaagaggaacacaaattacaagactcggtccctgaaaataagggaatatccctgcgctccagacgccaaaataagactgaggc

SEQ ID NO: 413041 - DNA, 120 bp, Artificial Sequence
  ENSG00000148773_80 (sequence is synthesized)
agaacagcaaataactgaggtctttgtattagcagaaagaatagaaataaacagaaatgaaaagaagcccatgaagacctccccagagatggacattcagaatccagatgatggagcccg

SEQ ID NO: 413042 - DNA, 120 bp, Artificial Sequence
  ENSG00000148773_81 (sequence is synthesized)
gaaacccatacctagagacaaagtcactgagaacaaaaggtgcttgaggtctgctagacagaatgagagctcccagcctaaggtggcagaggagagcggagggcagaagagtgcgaaggt

SEQ ID NO: 413043 - DNA, 120 bp, Artificial Sequence
  ENSG00000148773_82 (sequence is synthesized)
tctcatgcagaatcagaaagggaaaggagaagcaggaaattcagactccatgtgcctgagatcaagaaagacaaaaagccagcctgcagcaagcactttggagagcaaatctgtgcagag

SEQ ID NO: 413044 - DNA, 120 bp, Artificial Sequence
  ENSG00000148773_83 (sequence is synthesized)
agtaacgcggagtgtcaagaggtgtgcagaaaatccaaagaaggctgaggacaatgtgtgtgtcaagaaaataagaaccagaagtcatagggacagtgaagatatttgacagaaaaatcg

SEQ ID NO: 413045 - DNA, 120 bp, Artificial Sequence
  ENSG00000148773_84 (sequence is synthesized)
aactgggaaaaatataataaagttagttttgtgataagttctagtgcagtttttgtcataaattacaagtgaattctgtaagtaaggctgtcagtctgcttaagggaagaaaactttgga

SEQ ID NO: 413046 - DNA, 120 bp, Artificial Sequence
  ENSG00000148773_85 (sequence is synthesized)
tttgctgggtctgaatcggcttcataaactccactgggagcactgctgggctcctggactgagaatagttgaacaccgggggctttgtgaaggagtctgggccaaggtttgccctcagct

SEQ ID NO: 413047 - DNA, 120 bp, Artificial Sequence
  ENSG00000148773_86 (sequence is synthesized)
ttgcagaatgaagccttgaggtctgtcaccacccacagccaccctacagcagccttaactgtgacacttgccacactgtgtcgtcgtttgtttgcctatgtcctccagggcacggtggca

SEQ ID NO: 413048 - DNA, 120 bp, Artificial Sequence
  ENSG00000148773_87 (sequence is synthesized)
ggaacaactatcctcgtctgtcccaacactgagcaggcactcggtaaacacgaatgaatggatgagcgcacggatgaatggagcttacaagatctgtctttccaatggccgggggcattt

SEQ ID NO: 413049 - DNA, 120 bp, Artificial Sequence
  ENSG00000148773_88 (sequence is synthesized)
ggtccccaaattaaggctattggacatctgcacaggacagtcctatttttgatgtcctttcctttctgaaaataaagttttgtgctttggagaatgactcgtgagcacatctttagggac

SEQ ID NO: 413050 - DNA, 120 bp, Artificial Sequence
  ENSG00000148773_89 (sequence is synthesized)
caagagtgactttctgtaaggagtgactcgtggcttgccttggtctcttgggaatacttttctaactagggttgctctcacctgagacattctccacccgcggaatctcagggtcccagg

SEQ ID NO: 413051 - DNA, 120 bp, Artificial Sequence
  ENSG00000148773_90 (sequence is synthesized)
ctgtgggccatcacgacctcaaactggctcctaatctccagctttcctgtcattgaaagcttcggaagtttactggctctgctcccgcctgttttctttctgactctatctggcagcccg

SEQ ID NO: 413052 - DNA, 120 bp, Artificial Sequence
  ENSG00000148773_91 (sequence is synthesized)
atgccacccagtacaggaagtgacaccagtactctgtaaagcatcatcatccttggagagactgagcactcagcaccttcagccacgatttcaggatcgcttccttgtgagccgctgcct

SEQ ID NO: 413053 - DNA, 120 bp, Artificial Sequence
  ENSG00000148773_92 (sequence is synthesized)
ccgaaatctcctttgaagcccagacatctttctccagcttcagacttgtagatataactcgttcatcttcatttactttccactttgccccctgtcctctctgtgttccccaaatcagag

SEQ ID NO: 413054 - DNA, 120 bp, Artificial Sequence
  ENSG00000148773_93 (sequence is synthesized)
aatagcccgccatcccccaggtcacctgtctggattcctccccattcacccaccttgccaggtgcaggtgaggatggtgcaccagacagggtagctgtcccccaaaatgtgccctgtgcg

SEQ ID NO: 413055 - DNA, 120 bp, Artificial Sequence
  ENSG00000148773_94 (sequence is synthesized)
ggcagtgccctgtctccacgtttgtttccccagtgtctggcggggagccaggtgacatcataaatacttgctgaatgaatgcagaaatcagcggtactgacttgtactatattggctgcc

SEQ ID NO: 413056 - DNA, 120 bp, Artificial Sequence
  ENSG00000148773_95 (sequence is synthesized)
atgatagggttctcacagcgtcatccatgatcgtaagggagaatgacattctgcttgagggagggaatagaaaggggcagggaggggacatctgagggcttcacagggctgcaaagggta

SEQ ID NO: 413057 - DNA, 120 bp, Artificial Sequence
  ENSG00000148773_96 (sequence is synthesized)
cagggattgcaccagggcagaacaggggagggtgttcaaggaagagtggctcttagcagaggcactttggaaggtgtgaggcataaatgcttccttctacgtaggccaacctcaaaactt

SEQ ID NO: 413058 - DNA, 120 bp, Artificial Sequence
  ENSG00000148773_97 (sequence is synthesized)
tcagtaggaatgttgctatgatcaagttgttctaacactttagacttagtagtaattatgaacctcacatagaaaaatttcatccagccatatgcctgtggagtggaatattctgtttag

SEQ ID NO: 413059 - DNA, 120 bp, Artificial Sequence
  ENSG00000148773_98 (sequence is synthesized)
tagaaaaatcctttagagttcagctctaaccagaaatcttgctgaagtatgtcagcaccttttctcaccctggtaagtacagtatttcaagagcacgctaagggtggttttcattttaca

SEQ ID NO: 413060 - DNA, 120 bp, Artificial Sequence
  ENSG00000148773_99 (sequence is synthesized)
gggctgttgatgatgggttaaaaatgttcatttaagggctacccccgtgtttaatagatgaacaccacttctacacaaccctccttggtactgggggagggagagatctgacaaatactg

SEQ ID NO: 413061 - DNA, 120 bp, Artificial Sequence
  ENSG00000148773_100 (sequence is synthesized)
cccattcccctaggctgactggatttgagaacaaatacccacccatttccaccatggtatggtaacttctctgagcttcagtttccaagtgaatttccatgtaataggacattcccatta

SEQ ID NO: 413062 - DNA, 120 bp, Artificial Sequence
  ENSG00000148773_101 (sequence is synthesized)
aatacaagctgtttttactttttcgcctcccagggcctgtgggatctggtcccccagcctctcttgggctttcttacactaactctgtacctaccatctcctgcctcccttaggcaggca

SEQ ID NO: 413063 - DNA, 120 bp, Artificial Sequence
  ENSG00000148773_102 (sequence is synthesized)
cctccaaccaccacacactccctgctgttttccctgcctggaactttccctcctgccccaccaagatcatttcatccagtcctgagctcagcttaagggaggcttcttgcctgtgggttc

SEQ ID NO: 413064 - DNA, 120 bp, Artificial Sequence
  ENSG00000148773_103 (sequence is synthesized)
cctcacccccatgcctgtcctccaggctggggcaggttcttagtttgcctggaattgttctgtacctctttgtagcacgtagtgttgtggaaactaagccactaattgagtttctggctc

SEQ ID NO: 413065 - DNA, 120 bp, Artificial Sequence
  ENSG00000148773_104 (sequence is synthesized)
ccctcctggggttgtaagttttgttcattcatgagggccgactgcatttcctggttactctatcccagtgaccagccacaggagatgtccaataaagtatgtgatgaaatggtcttaaaa

SEQ ID NO: 413066 - DNA, 120 bp, Artificial Sequence
  ENSG00000148773_105 (sequence is synthesized)
aacgtagtcttagatcttataaatcttttgactctactgttttttactgtgttaatgtttgttttgctaactttgtttatctgctgtgaaagagattataaaataaacgactcaatcacc

SEQ ID NO: 413067 - DNA, 120 bp, Artificial Sequence
  ENSG00000148795_0 (sequence is synthesized)
acagctcttctactccactgctgtctatcttgcctgccggcacccagccaccatgtgggagctcgtggctctcttgctgcttaccctagcttatttgttttggcccaagagaaggtgccc

SEQ ID NO: 413068 - DNA, 120 bp, Artificial Sequence
  ENSG00000148795_1 (sequence is synthesized)
tggtgccaagtaccccaagagcctcctgtccctgcccctggtgggcagcctgccattcctccccagacacggccatatgcataacaacttcttcaagctgcagaaaaaatatggccccat

SEQ ID NO: 413069 - DNA, 120 bp, Artificial Sequence
  ENSG00000148795_2 (sequence is synthesized)
ctattcggttcgtatgggcaccaagactacagtgattgtcggccaccaccagctggccaaggaggtgcttattaagaagggcaaggacttctctgggcggcctcaaatggcaactctaga

SEQ ID NO: 413070 - DNA, 120 bp, Artificial Sequence
  ENSG00000148795_3 (sequence is synthesized)
catcgcgtccaacaaccgtaagggtatcgccttcgctgactctggcgcacactggcagctgcatcgaaggctggcgatggccacctttgccctgttcaaggatggcgatcagaagctgga

SEQ ID NO: 413071 - DNA, 120 bp, Artificial Sequence
  ENSG00000148795_4 (sequence is synthesized)
gaagatcatttgtcaggaaatcagtacattgtgtgatatgctggccacccacaacggacagtccatagacatctcctttcctgtcttcgtggcggtaaccaatgtcatctccttgatctg

SEQ ID NO: 413072 - DNA, 120 bp, Artificial Sequence
  ENSG00000148795_5 (sequence is synthesized)
cttcaatacctcctacaagaatggggaccctgagttgaatgtcatacagaattacaatgaaggcatcatagacaacctgagcaaagacagcctggtggacctagtcccctggttgaagat

SEQ ID NO: 413073 - DNA, 120 bp, Artificial Sequence
  ENSG00000148795_6 (sequence is synthesized)
tttccccaacaaaaccctggaaaaattaaagagccatgttaaaatacgaaatgatctgctgaataaaatacttgaaaattacaaggagaaattccggagtgactctatcaccaacatgct

SEQ ID NO: 413074 - DNA, 120 bp, Artificial Sequence
  ENSG00000148795_7 (sequence is synthesized)
ctttcagataaccacattctcaccaccataggggacatctttggggctggcgtggagaccaccacctctgtggttaaatggaccctggccttcctgctgcacaatcctcaggtgaagaag

SEQ ID NO: 413075 - DNA, 120 bp, Artificial Sequence
  ENSG00000148795_8 (sequence is synthesized)
aagctctacgaggagattgaccagaatgtgggtttcagccgcacaccaactatcagtgaccgtaaccgtctcctcctgctggaggccaccatccgagaggtgcttcgcctcaggcccgtg

SEQ ID NO: 413076 - DNA, 120 bp, Artificial Sequence
  ENSG00000148795_9 (sequence is synthesized)
gcccctatgctcatcccccacaaggccaacgttgactccagcatcggtgagtttgctgtggacaagggcacagaagttatcatcaatctgtgggcgctgcatcacaatgagaaggagtgg

SEQ ID NO: 413077 - DNA, 120 bp, Artificial Sequence
  ENSG00000148795_10 (sequence is synthesized)
caccagccggatcagttcatgcctgagcgtttcttgaatccagcggggacccagctcatctcaccgtcagtaagctatttgcccttcggagcaggacctcgctcctgtataggtgagatc

SEQ ID NO: 413078 - DNA, 120 bp, Artificial Sequence
  ENSG00000148795_11 (sequence is synthesized)
ctggcccgccaggagctcttcctcatcatggcctggctgctgcagaggttcgacctggaggtgccagatgatgggcagctgccctccctggaaggcatccccaaggtggtctttctgatc

SEQ ID NO: 413079 - DNA, 120 bp, Artificial Sequence
  ENSG00000148795_12 (sequence is synthesized)
gactctttcaaagtgaagatcaaggtgcgccaggcctggagggaagcccaggctgagggtagcacctaaaggctgtaactcacagcccctgtccaccctatgtggccccacaacacagat

SEQ ID NO: 413080 - DNA, 120 bp, Artificial Sequence
  ENSG00000148795_13 (sequence is synthesized)
ttagagatacaaccccccacccttctccgccattcttccctactcccaacccactctgccttctttttcagcttgtggcaatgccagtgatgtgcataaacagtttttttttttccataa

SEQ ID NO: 413081 - DNA, 120 bp, Artificial Sequence
  ENSG00000148795_14 (sequence is synthesized)
taggaggccttagggtctgtcctaccaagtccttgcagtcatggtggagtgcagtggggctgtgcccacatgggagtcagcatgccaggtacctgccttctcctccaggaaggaaagcag

SEQ ID NO: 413082 - DNA, 120 bp, Artificial Sequence
  ENSG00000148795_15 (sequence is synthesized)
ctgacattgtccccaatcttccttcctttttacttccctgctccagccgcaatgacccatctttttcctgattacctccgccacctctacctcctctgccacttaaaacctttgccattt

SEQ ID NO: 413083 - DNA, 120 bp, Artificial Sequence
  ENSG00000148795_16 (sequence is synthesized)
ccaattaccatgtgccagtactaagcattctatacgcattcatcgctgaattccccttggaagtaggttttattatccccattgtgcaggtgagaagcaggcttagcggggttaaggagc

SEQ ID NO: 413084 - DNA, 120 bp, Artificial Sequence
  ENSG00000148795_17 (sequence is synthesized)
ttgtctgagccttcaggctcatgtctctctcactcctaagggctggacacatagcagagtcagcgcttgatgtttgattgaatggggaaggagaggtggagaccacgccctcctcccttg

SEQ ID NO: 413085 - DNA, 120 bp, Artificial Sequence
  ENSG00000148795_18 (sequence is synthesized)
tttagaattgtcttcgtcgtcatgataaacccgttctgtgtccccatcttgccttccattctggctgaaggtcaggggtggagtaggaacttccagagacagaaagctaagatccgcctc

SEQ ID NO: 413086 - DNA, 120 bp, Artificial Sequence
  ENSG00000148795_19 (sequence is synthesized)
caggagagactctggcagctggagaagcaaaatggaagaagggtggatttaacatttctttttatttcccagattttccccaacaaaaccctggaaaaattaaagagccatgttaaaata

SEQ ID NO: 413087 - DNA, 120 bp, Artificial Sequence
  ENSG00000148795_20 (sequence is synthesized)
cgaaatgatctgctgaataaaatacttgaaaattacaaggtaggtgatagagcagaagagaatatgagttaggctaaaagtaatcacaagagcagggtggagtccattctacacactgta

SEQ ID NO: 413088 - DNA, 120 bp, Artificial Sequence
  ENSG00000148795_21 (sequence is synthesized)
agagcagggtggagtccattctacacactgtagaagcttcaaaaccaagcagagaacctggcacatagtaggtgtacaataaaaactgacttaagggctgggcgcggtggctcacgcctg

SEQ ID NO: 413089 - DNA, 120 bp, Artificial Sequence
  ENSG00000148798_0 (sequence is synthesized)
gccctgcctgccgcacctctcctttcttctgtagctcgcgttgaagccgcacgtccggccccgatcccggcaccatgagcttcggctcggagcactacctgtgctcctcctcctcctacc

SEQ ID NO: 413090 - DNA, 120 bp, Artificial Sequence
  ENSG00000148798_1 (sequence is synthesized)
gcaaggtgttcggggatggctctcgcctgtccgcccgcctctctggggccggcggcgcgggcggcttccgctcgcagtcgctgtcccgcagcaatgtggcctcctcggccgcctgctcct

SEQ ID NO: 413091 - DNA, 120 bp, Artificial Sequence
  ENSG00000148798_2 (sequence is synthesized)
cggcctcgtcgctcggcctcggcctggcctatcgccggccgccggcgtccgacgggctggacctgagccaggcggcggcgcgcaccaacgagtacaagatcatccgcaccaacgagaagg

SEQ ID NO: 413092 - DNA, 120 bp, Artificial Sequence
  ENSG00000148798_3 (sequence is synthesized)
agcagctgcagggcctcaacgaccgcttcgccgtgttcatcgagaaggtgcatcagctggagacgcagaaccgcgcgttggaggccgagctggccgcgctgcgacagcgccacgctgagc

SEQ ID NO: 413093 - DNA, 120 bp, Artificial Sequence
  ENSG00000148798_4 (sequence is synthesized)
cgtcgcgcgtcggcgagctcttccagcgcgagctgcgcgacctgcgcgcgcagctggaggaggccagctcggctcgctcgcaggccctgctggagcgcgacgggctggcggaggaggtgc

SEQ ID NO: 413094 - DNA, 120 bp, Artificial Sequence
  ENSG00000148798_5 (sequence is synthesized)
agcggctgcgggcgcgctgcgaggaggagagccgcggacgcgaaggcgccgagcgcgccctgaaggcgcagcagcgcgacgtggacggcgccacgctggcccgcctggacctggagaaga

SEQ ID NO: 413095 - DNA, 120 bp, Artificial Sequence
  ENSG00000148798_6 (sequence is synthesized)
aggtggagtcgctgctggacgagctggccttcgtacgccaggtgcacgacgaggaggtagccgagctgctggccacgctgcaggcgtcgtcgcaggccgcggccgaggtggacgtgactg

SEQ ID NO: 413096 - DNA, 120 bp, Artificial Sequence
  ENSG00000148798_7 (sequence is synthesized)
tggctaaaccagacctgacctcggctctgagggagatccgcgcccagtatgagtccctggccgctaagaacctgcagtccgcggaagaatggtacaagtccaagtttgccaacctgaacg

SEQ ID NO: 413097 - DNA, 120 bp, Artificial Sequence
  ENSG00000148798_8 (sequence is synthesized)
agcaggcggcgcgcagcaccgaggccatccgggccagccgcgaggagatccacgagtatcggcgccagctgcaggcgcgcaccatcgagatcgagggcctgcgcggggccaacgagtcct

SEQ ID NO: 413098 - DNA, 120 bp, Artificial Sequence
  ENSG00000148798_9 (sequence is synthesized)
tggagaggcagatcctggagctggaggagcggcacagtgccgaggtagctggctaccaggatagcattgggcagctggagaatgatctgaggaacaccaagagtgagatggcacgccacc

SEQ ID NO: 413099 - DNA, 120 bp, Artificial Sequence
  ENSG00000148798_10 (sequence is synthesized)
ttcgggaataccaggacttgctcaatgtcaaaatggctcttgacattgagatagcagcttacaggaaactgctggaaggcgaggagacacgttttagcaccagtgggttaagcatttcgg

SEQ ID NO: 413100 - DNA, 120 bp, Artificial Sequence
  ENSG00000148798_11 (sequence is synthesized)
ggctgaatccacttcccaatccaagttacctgctcccacctagaatcctcagtgctacaacctccaaagtctcatccactgggctatcacttaagaaagaggaggaggaggaggaggcat

SEQ ID NO: 413101 - DNA, 120 bp, Artificial Sequence
  ENSG00000148798_12 (sequence is synthesized)
ctaaggtagcctctaagaaaacctcccagataggggaaagttttgaagaaatattagaggagacagtaatatctactaagaaaaccgagaaatcaaatatagaagaaaccaccatttcaa

SEQ ID NO: 413102 - DNA, 120 bp, Artificial Sequence
  ENSG00000148798_13 (sequence is synthesized)
taattccattgctttgaaaaagttaatgcttaagagggaatgatatgcatttgacttgttaaacagcctattcctgaactataacacctgccaccactataaaatgtcttcaaggcttca

SEQ ID NO: 413103 - DNA, 120 bp, Artificial Sequence
  ENSG00000148798_14 (sequence is synthesized)
gtctcatatttagtattgaatacttacattctctaataagaaaaccaccccttagattgaagtaaactgcagtcctggagcaatcacagatgagttatctaagaatacagctttctgacc

SEQ ID NO: 413104 - DNA, 120 bp, Artificial Sequence
  ENSG00000148798_15 (sequence is synthesized)
ttcagctcacgcttcacagtgatcgatgattcaggtgcagaggaagtacaaactaaggtgctaaatctgcgatcatcgtcatttgctgtgaactgaaattaaaactattcatgctaccca

SEQ ID NO: 413105 - DNA, 120 bp, Artificial Sequence
  ENSG00000148798_16 (sequence is synthesized)
gccattacccagctaaataatcttactctagatacctaaaacataagatcactgccagagataaactaatggtccacacccaattccactctgatagaattatttcacaaataataggtg

SEQ ID NO: 413106 - DNA, 120 bp, Artificial Sequence
  ENSG00000148798_17 (sequence is synthesized)
tttgtttaatggacacttttcacctccttcaattccatatatccttttcttctatgtaggaaaaaaatagtctagtgtagtattcttcccttttaaacacattttggttcttctcaaaag

SEQ ID NO: 413107 - DNA, 120 bp, Artificial Sequence
  ENSG00000148798_18 (sequence is synthesized)
aacttacccccattcgcgctctgctcagtgggtaaaattagatgcatgttgaccatgtctatgattcgtgtaattacttatccctgcccatttcatattctttcaattctgtaggttaaa

SEQ ID NO: 413108 - DNA, 120 bp, Artificial Sequence
  ENSG00000148798_19 (sequence is synthesized)
aaaatggcagtgatgaattttaagggtttcccccaacatataaaataatgcaaagaatccctagactttaggctttcagcttacacaaatctatttaattaggaaaaaaactattaagga

SEQ ID NO: 413109 - DNA, 120 bp, Artificial Sequence
  ENSG00000148798_20 (sequence is synthesized)
tgtagcttttcacctttactttagaagcacagtaaatatcccaaactgtgatgaagccgaccttagatttagtagtgtaagctagaagaagtgagtgtttctatgagtggaaaaagccaa

SEQ ID NO: 413110 - DNA, 120 bp, Artificial Sequence
  ENSG00000148798_21 (sequence is synthesized)
ggtgtcatttatgtgtcagttcatttgtggtgatatagaattagctttttcatccccttacccttagaatccacgtattccccttcccactagcctaggtcataaagaggcgttgctttc

SEQ ID NO: 413111 - DNA, 120 bp, Artificial Sequence
  ENSG00000148798_22 (sequence is synthesized)
actctcctatgccttttacgagtgctaagtgtaggatattttgtcaccagaacacaatgctaccgccccaaagtaaaagaaaccacttctggtcaatcaacactaccagcgtatatataa

SEQ ID NO: 413112 - DNA, 120 bp, Artificial Sequence
  ENSG00000148798_23 (sequence is synthesized)
gaaagacatctttctcttttctaaaagacttccctaacacttaccccatggctgcacagttggtggggtcctgccggagaggaagagacactcagaccagagaaggggtgtgcatgcgcc

SEQ ID NO: 413113 - DNA, 120 bp, Artificial Sequence
  ENSG00000148798_24 (sequence is synthesized)
tactcgcttgctagaagtagattctggacagtcagctcttcatctgcccaactgtgtagcatctgcattgcccagtctttcatgtgtgccaaggctgatgcaggatttgttctctgtcca

SEQ ID NO: 413114 - DNA, 120 bp, Artificial Sequence
  ENSG00000148798_25 (sequence is synthesized)
gcagtcacttcggccagagctgaagagttgccccgtctctgttccatgtctcctttaagagctctggtgataaggacatgatgcttttactgaactttcttatcctagcacatgcttcaa

SEQ ID NO: 413115 - DNA, 120 bp, Artificial Sequence
  ENSG00000148798_26 (sequence is synthesized)
tagttcaaggaacttgaaaaatacttttccttacctttaccccatccctgtctttactcctcacacttactgtaagacattagtaacataataaattaaaagtcacacgaatctcaccaa

SEQ ID NO: 413116 - DNA, 120 bp, Artificial Sequence
  ENSG00000148803_0 (sequence is synthesized)
gtctgccgggccatggtggcgctgaagggtgtccccgcactgctgtcccccgagctgctctacgcgctggcgcggatggggcacggggacgagatcgttcttgcggacttgaacttcccg

SEQ ID NO: 413117 - DNA, 120 bp, Artificial Sequence
  ENSG00000148803_1 (sequence is synthesized)
gcctcctccatctgccagtgtgggcccatggagatccgtgcagacggcctgggcatcccgcagctcctggaggccgtgctgaagctgctgcccctggacacctatgtggagagtccggct

SEQ ID NO: 413118 - DNA, 120 bp, Artificial Sequence
  ENSG00000148803_2 (sequence is synthesized)
ctgtgtgagagccctggcaaagatagagaggtttgagttttatgaacgggctaagaaggcttttgctgttgtggcaacgggggagacggccctctacggaaacctcatcctcaggaaggg

SEQ ID NO: 413119 - DNA, 120 bp, Artificial Sequence
  ENSG00000148803_3 (sequence is synthesized)
ggtgcttgccctcaaccccctgctgtaggcctggtgaagaccacctgggccggaagaggaactgggggcaccctgagctccagtaccaccactcacaacaggcctcccagtggcagctcc

SEQ ID NO: 413120 - DNA, 120 bp, Artificial Sequence
  ENSG00000148803_4 (sequence is synthesized)
cagacctgggccctggccagggctctaggggccggcagtcttggggtgggccctgccaattgggacgagtatccctgatttgtgaaaatgatggaaaaacgttcagtctcaagagtccaa

SEQ ID NO: 413121 - DNA, 120 bp, Artificial Sequence
  ENSG00000148803_5 (sequence is synthesized)
cttttgctgttgtggcaacggggtgagttccagctggctcagacctgccccatccccactggggcctcaggagctgcccccatccccaccggggggcctcaggagctgcccctaccctct

SEQ ID NO: 413122 - DNA, 120 bp, Artificial Sequence
  ENSG00000148803_6 (sequence is synthesized)
tctcagcttctgcctggctgaggctagacgtcccacagagtggagagaccagggaggaatttcgggggggcagggcccccatttgcctgagcatcaagtgggtgaaggtggacagggtct

SEQ ID NO: 413123 - DNA, 120 bp, Artificial Sequence
  ENSG00000148803_7 (sequence is synthesized)
gttgtggcaacgggatgctgaagcagggtctcggcaccctggccctgcagcccagctcagtgctgggcttggctcctctgcagggagacggccctctacggaaacctcatcctcaggaag

SEQ ID NO: 413124 - DNA, 120 bp, Artificial Sequence
  ENSG00000148803_8 (sequence is synthesized)
gcgctgaagggtgtccccgcactgctgtcccccgagctgctctacgcgctggcgcggatggggcacggggacgagatcggcagggaccttgccctccccacctccccgcgtggcttccag

SEQ ID NO: 413125 - DNA, 120 bp, Artificial Sequence
  ENSG00000148803_9 (sequence is synthesized)
ccctgcggatctgactgcggccggtcggcggtgggggcgcccaactggctgacctgagacctcttgtgacccacgatctgccgccatgactgggtgggaggacgggcggcgccgaccccg

SEQ ID NO: 413126 - DNA, 120 bp, Artificial Sequence
  ENSG00000148814_0 (sequence is synthesized)
agctcgctgagccctcgaggcgggcggcggcaggaaggtggtgcctcggcccgtcgtgccctgtcgcctagctccagccgcgatgctgaccgcaaaggctgcccttctgaggcctggaat

SEQ ID NO: 413127 - DNA, 120 bp, Artificial Sequence
  ENSG00000148814_1 (sequence is synthesized)
gtgaggcccagagcgtcggacccaactcagcctcgcccggatggggaaatcgaggcagggagcgggggtgggcgtgcgtggggatcccttgaaggcagcctcggaaaccccacggagcct

SEQ ID NO: 413128 - DNA, 120 bp, Artificial Sequence
  ENSG00000148814_2 (sequence is synthesized)
gcgctgcctgggccctgtgtgactccagaccaaggaggatgagctgctgtccctggaagagaacggatggagggaagcagctcctacgaagttccctctgtggctgctgctgatctggag

SEQ ID NO: 413129 - DNA, 120 bp, Artificial Sequence
  ENSG00000148814_3 (sequence is synthesized)
gagggtgctggtcagactaggagcttgcctgccaccccctccaaagatgttcacaagggtgttggaggcatcatcttttcctcctcaccgattttagacttgagtgaaagtggtctgtgc

SEQ ID NO: 413130 - DNA, 120 bp, Artificial Sequence
  ENSG00000148814_4 (sequence is synthesized)
cgtttggaggaggtctttagaatccccagccttcaacaattgcatctgcaaaggaatgccctgtgtgtgattcctcaagatttctttcagttgcttccgaacctgacttggctggacctc

SEQ ID NO: 413131 - DNA, 120 bp, Artificial Sequence
  ENSG00000148814_5 (sequence is synthesized)
cggtacaatagaattaaagcgcttccttctgggattggagctcaccagcatttgaaaactttgcttttagaaagaaatcctatcaaaatgttacctgtggagctggggagcgtaaccacg

SEQ ID NO: 413132 - DNA, 120 bp, Artificial Sequence
  ENSG00000148814_6 (sequence is synthesized)
ctgaaagcactgaacctaagacactgccctctggaattccctcctcagctcgttgtgcagaagggattggtggctatccagcgcttcctgcggatgtgggcagtagaacactctctcccc

SEQ ID NO: 413133 - DNA, 120 bp, Artificial Sequence
  ENSG00000148814_7 (sequence is synthesized)
agaaatccaacttctcaagaggctccaccggttagagagatgaccctccgtgacctcccgagcccaggactggagttgtctggagaccacgcgtctaaccaaggagctgtgaacgctcag

SEQ ID NO: 413134 - DNA, 120 bp, Artificial Sequence
  ENSG00000148814_8 (sequence is synthesized)
tcaggaagtctgcggactcctcagagaactggcccagcgaggaggagatcaggcgcttttggaagctgaggcaggagattgttgagcacgtgaaggcagacgttctgggagatcagctct

SEQ ID NO: 413135 - DNA, 120 bp, Artificial Sequence
  ENSG00000148814_9 (sequence is synthesized)
tgacgagggaattacctccaaatctcaaggcggccttgaacattgagaaagaactaccaaagccaagacacgttttcagaaggaagacagcctcctccaggagcatcttacccgacctct

SEQ ID NO: 413136 - DNA, 120 bp, Artificial Sequence
  ENSG00000148814_10 (sequence is synthesized)
tgtcaccgtaccaaatggcgatccgagcaaaaagactggaagagagccgagcggcggcgctccgagagctccaggagaagcaggctctgatggagcagcagagacgagagaaaagggcac

SEQ ID NO: 413137 - DNA, 120 bp, Artificial Sequence
  ENSG00000148814_11 (sequence is synthesized)
tgcaggagtggagagagcgagcccagaggatgaggaagaggaaggaagagctcagcaaactcctgcctccgcggaggagcatggtggcatcaaagattccctctgccacagatctgatag

SEQ ID NO: 413138 - DNA, 120 bp, Artificial Sequence
  ENSG00000148814_12 (sequence is synthesized)
ataacaggaaagtaccactgaatccgcctggaaaaatgaaaccaagcaaagagaaatcgccacaagcaagtaaagaaatgagtgccctgcaggagagaaatttagaagagaagataaaac

SEQ ID NO: 413139 - DNA, 120 bp, Artificial Sequence
  ENSG00000148814_13 (sequence is synthesized)
agcacgtcctccaaatgcgtgagcaaagaagattccatggccaggccccactggaggagatgaggaaggctgccgaggatctggaaattgccacagagctacaggatgaagtattgaagc

SEQ ID NO: 413140 - DNA, 120 bp, Artificial Sequence
  ENSG00000148814_14 (sequence is synthesized)
taaaattgggattaaccttgaacaaagatcgtcgacgggcggccctcactggaaacctttcgcttggcctgccggcagcacagcctcaaaatacattttttaacacaaaatatggagaat

SEQ ID NO: 413141 - DNA, 120 bp, Artificial Sequence
  ENSG00000148814_15 (sequence is synthesized)
caggaaatgttcgcagataccagtgacaccaggtggctggactgatggagacgtcttcagacaggagccgctcagtcttctttcccgggcgtcgcctcctgtgtggtgccggaagagcgc

SEQ ID NO: 413142 - DNA, 120 bp, Artificial Sequence
  ENSG00000148814_16 (sequence is synthesized)
caggttcagtgttaccctgagggctgatttcgcgcagcctgttgttttccttagacaggtccacgtccctctcctgaggctgtggaagatttcagccgtattaaaagaaaggacactgtg

SEQ ID NO: 413143 - DNA, 120 bp, Artificial Sequence
  ENSG00000148814_17 (sequence is synthesized)
gcacgtggtctcgccttcccttcttcctgcaggttcccgccaagccatgtgacagagtgctcacactcaggcacttgcctctctcctgtcctggagcccttgttacaaaagtactcacag

SEQ ID NO: 413144 - DNA, 120 bp, Artificial Sequence
  ENSG00000148814_18 (sequence is synthesized)
ctttccttcacttagttatttgagtgtgggagaggagaccaggtcacccgattcccgccaagccggaagtccctgcagcaccacctttggctaggagggaggggtgacagccaaaaaggg

SEQ ID NO: 413145 - DNA, 120 bp, Artificial Sequence
  ENSG00000148814_19 (sequence is synthesized)
cttcgggggagtggttaccctgctccctgcccagtgacaagccctcctttcccctgggggccctcctttcccctgctccctgcccagctacggggccctcctttcagccttgaccccttc

SEQ ID NO: 413146 - DNA, 120 bp, Artificial Sequence
  ENSG00000148814_20 (sequence is synthesized)
ctggttgctaccactcaggctgccactcagtggactccaccccagggacacggcagggtctgcagacctccccatgctagatcagccgtatttcatgctctgtctgcccaggctgtgtag

SEQ ID NO: 413147 - DNA, 120 bp, Artificial Sequence
  ENSG00000148814_21 (sequence is synthesized)
attctgtgtgacttagtctcttgtgctgagtgtttgcttggatcttgaaaacatctttggtttgatttctttaacagaggtgagactattcagactttgtttatttttgtgttaattttg

SEQ ID NO: 413148 - DNA, 120 bp, Artificial Sequence
  ENSG00000148814_22 (sequence is synthesized)
gtaaatatggtttcagtgagtttcctcatttcatccaagttgtgcaatgtatcagcataaagttcctcttattttcagtatctttaggatccgtaataatgtcccctcttttattcttga

SEQ ID NO: 413149 - DNA, 120 bp, Artificial Sequence
  ENSG00000148814_23 (sequence is synthesized)
cctggtgttcttcatcattcttgctatggatttatcaattttgttcctcttttccaaaagccccaggttttggcttcactggatttgctgtttgtcttctgtctcatgggtctctgcgcc

SEQ ID NO: 413150 - DNA, 120 bp, Artificial Sequence
  ENSG00000148814_24 (sequence is synthesized)
ctgcacttcgtactttccgagagtttaactggtgcttagagagaaatgcatcacttccaaacccatgtattagagaagaagggcgtgaaatttatcacctaagctttccattcaggaagc

SEQ ID NO: 413151 - DNA, 120 bp, Artificial Sequence
  ENSG00000148814_25 (sequence is synthesized)
tagaaaaggtgtcagtgacctgttgcggcccagcggctggagcagcagacgtttgccatttctcacgcctgagggcaggcgttggagcagctcagccggcgttgctggtcagggtctccc

SEQ ID NO: 413152 - DNA, 120 bp, Artificial Sequence
  ENSG00000148814_26 (sequence is synthesized)
gtgaggctggagtcagccgtgggttgagctgctctcctctgaaggtttaactgggcttggggctcagcttccaaggtgctcacctggttgttgatcagagagcgtgtccgttgtgatccc

SEQ ID NO: 413153 - DNA, 120 bp, Artificial Sequence
  ENSG00000148814_27 (sequence is synthesized)
agtcctttgaaactgtgaagcctcgccccgcggcctgccgcaggatatgttttggtaaatgtagactgtgcacttgagaagaatgtattttgagttgttgggtacattgttttgtgtgtg

SEQ ID NO: 413154 - DNA, 120 bp, Artificial Sequence
  ENSG00000148814_28 (sequence is synthesized)
tcaggtgacattgactaatcctgttgctcagagctcctgtacccttactgactgacttaagcctggtttctcagttactgagagaggcctgtgaacagttctagctatgatcatgaacat

SEQ ID NO: 413155 - DNA, 120 bp, Artificial Sequence
  ENSG00000148814_29 (sequence is synthesized)
gtgttttcttcttagttatgtgagtttttgctatacgtgttttggggctattttgtcagatgcctacaaatttaggattgttttatcttcctgtcgaactgaccttgtcattattatgaa

SEQ ID NO: 413156 - DNA, 120 bp, Artificial Sequence
  ENSG00000148814_30 (sequence is synthesized)
ctatttctcttcgcctctccttttcacttcttgccttctgtggattttgtctgatactaatccaggcacactgctgctgttttggtcagcgttttcataatgcatcttcttccctccttc

SEQ ID NO: 413157 - DNA, 120 bp, Artificial Sequence
  ENSG00000148814_31 (sequence is synthesized)
tactgtactggatttaaagcgcaccttatagagacatcatatactcgggactccttttctttctctagctgccagttctgtgtttcagttacagtgtttggccctcacatttaaggtgcg

SEQ ID NO: 413158 - DNA, 120 bp, Artificial Sequence
  ENSG00000148814_32 (sequence is synthesized)
tgtgcgtacggcggattccgtgcccatctcatgtttttattccctttattcttcttttgctgctttctgatagtgatcaatttttttatttatatctcttgtattagagttttagtaata

SEQ ID NO: 413159 - DNA, 120 bp, Artificial Sequence
  ENSG00000148814_33 (sequence is synthesized)
tcttttaatattattctcttgggtgttgccttagagatttcatacatgcccttgagttcattagcatttcctgaatgagccaatgaccctgagaaggtccctcccatctgccagttccct

SEQ ID NO: 413160 - DNA, 120 bp, Artificial Sequence
  ENSG00000148814_34 (sequence is synthesized)
agacacaggtaccgtgtgccccaacggtgtcttgactcgctgttcctagacatcagtgtttgcttcactttacccatcccgatgctcttccttcctgcagcttcatgctccaatgagggc

SEQ ID NO: 413161 - DNA, 120 bp, Artificial Sequence
  ENSG00000148814_35 (sequence is synthesized)
tgattttcatttagctaaataacttttttttaagtatttctttgtatcatggttatgctttgactggccgtaagttctctcagcttttgtttgtctgaaaataaatttagttcgccttta

SEQ ID NO: 413162 - DNA, 120 bp, Artificial Sequence
  ENSG00000148814_36 (sequence is synthesized)
ttctgcacaggacagaattctaggtggatgatttttgccattcccagaactttaaagatgggctccactgtcttctggctcccatgtgttttgttaaaaattcagtgttcaggccgggtg

SEQ ID NO: 413163 - DNA, 120 bp, Artificial Sequence
  ENSG00000148814_37 (sequence is synthesized)
cgtctcaaaaaaaaaaaaaaaagattcaatgttcattgttatttgttgctcctttgaaggtaatgggtcttttttctttgtcttaaaattgtttctccttatctttggttttcagcagtc

SEQ ID NO: 413164 - DNA, 120 bp, Artificial Sequence
  ENSG00000148814_38 (sequence is synthesized)
atctttggttttcagcagtctgtgctgtgcctggatgtaattttctttttacgtatttttcttggaatatacagaactcaaatctgggagttagcatctttcatcagttttggaaaattc

SEQ ID NO: 413165 - DNA, 120 bp, Artificial Sequence
  ENSG00000148814_39 (sequence is synthesized)
ttagccattttttttttttttactattttttcccctgttctccctcttctccctgagacttcagttttgtgtgtgtgtgcacatgtgtgtatgcattcgtgcgtacgagtgtgtgcatgt

SEQ ID NO: 413166 - DNA, 120 bp, Artificial Sequence
  ENSG00000148814_40 (sequence is synthesized)
gtgcgcccgtgtgtatgtgcatatgtgagtgtgtgtggctgtaacctgcacgtctcttctgtcatgtgttctatttttcattcctctctgtacatcaggctagatgcctcctgtctacgt

SEQ ID NO: 413167 - DNA, 120 bp, Artificial Sequence
  ENSG00000148814_41 (sequence is synthesized)
ggttttagatttacgaatcctgtcttctgttgtgtcccacagaaaaacccatgaggttttttaacattaaaaacagcagctttatgatagagaaaaaaacacaaacatagacgattgtac

SEQ ID NO: 413168 - DNA, 120 bp, Artificial Sequence
  ENSG00000148814_42 (sequence is synthesized)
cattgcactcagaagaaacatcccaggccctgagcagcgtgtctttcctcggccgagtcaggcttcctggtgagcctcagggagtgcatggtctcagatgccatccttctcttctccagc

SEQ ID NO: 413169 - DNA, 120 bp, Artificial Sequence
  ENSG00000148814_43 (sequence is synthesized)
atttccactcacctccgtgttcttggggagtgcgtggtgtcagatcccatcctgctcctctccagagtttccggtcacctccgtgttctcagggagtgcgtggtcttggatgccatcctg

SEQ ID NO: 413170 - DNA, 120 bp, Artificial Sequence
  ENSG00000148814_44 (sequence is synthesized)
ctcatctccagcatttcctctcacctccgtgttctcggggagtgcgtggtgtcagatcccatcctgctcatctccagcatttcctctcacctctgtgttctcggggagtgcgtggtgtca

SEQ ID NO: 413171 - DNA, 120 bp, Artificial Sequence
  ENSG00000148814_45 (sequence is synthesized)
gatcccatcctgctcctctccagcatttcctctcacctccgtgttctcggggagtgcgtggtgtcagatcccatcctgctcctctccagagtttcctctcacctccgtgttctcggggag

SEQ ID NO: 413172 - DNA, 120 bp, Artificial Sequence
  ENSG00000148814_46 (sequence is synthesized)
tgcgtggtctcagatcccatcctgctcctctccagagtttcctctcacctccgtgttctcagggagtgcgtggtcttggatgccatcctgctcatctccagcatttcctctcacctccgt

SEQ ID NO: 413173 - DNA, 120 bp, Artificial Sequence
  ENSG00000148814_47 (sequence is synthesized)
gttctcggggagtgcgtggtgtcagatcccatcctgctcctctccagcatttcctctcacctccgagctctcggggagtgcgtggtctcagatcccatcctgctcctctccagagtttcc

SEQ ID NO: 413174 - DNA, 120 bp, Artificial Sequence
  ENSG00000148814_48 (sequence is synthesized)
tctcacctccgtgttctcgttctcatctctgccggaattccacatctgctcgtgcatgccatccaccttttccactagatccttttacatcatcattataatgatttttttttaataagt

SEQ ID NO: 413175 - DNA, 120 bp, Artificial Sequence
  ENSG00000148814_49 (sequence is synthesized)
gttttctttcagttttaaatttcagatgttgtgtttttcaggtctaaggtgtctggtaattttttgtggatgccgattctctgttgaaattctccatcttttcatttcctttatatctct

SEQ ID NO: 413176 - DNA, 120 bp, Artificial Sequence
  ENSG00000148814_50 (sequence is synthesized)
tttcttcttttttctataatatattacatttttctaataagtttttagtgagtgtccagcattgtataagttgacccttgaacaagagtttgaattataagggtccacttataagtggat

SEQ ID NO: 413177 - DNA, 120 bp, Artificial Sequence
  ENSG00000148814_51 (sequence is synthesized)
ttttaaaaaaatatatattgcaaaaatttttggaaatttgcaacaatttgaaaaactttgcagatgagccacatagcctagaaatatctgaaaaaagaaaaagttatgtcatgaatgcat

SEQ ID NO: 413178 - DNA, 120 bp, Artificial Sequence
  ENSG00000148814_52 (sequence is synthesized)
aaaagaaaaagttatgtcatgaatgcataaaatatacagaccatacatggaccattcacagtagagagaaatgtcgccgtaaagatgcagcattggccgagtgcagtggctcacgcctgt

SEQ ID NO: 413179 - DNA, 120 bp, Artificial Sequence
  ENSG00000148814_53 (sequence is synthesized)
atgcagcattaaattataactgcatgaaattaactgcagtccacagtgtgctgctggaataattacaaagccacctcctgttgctattgcagtgagcgcaagcatgtcaaggatccgctt

SEQ ID NO: 413180 - DNA, 120 bp, Artificial Sequence
  ENSG00000148814_54 (sequence is synthesized)
aaaacatcgtgtggtgctaatctctgcacgagcggttcatgtcttcagtacattgtgtatcacggtaaaaagtgatctgttttaactggacatggtggcacacgcctgcagtcccagcta

SEQ ID NO: 413181 - DNA, 80 bp, Artificial Sequence
  ENSG00000148814_55 (sequence is synthesized)
agcctgggcaacagagtgagaccccaacttgaaaaaaaggggacatcgggatgttcttgtgtatttttcatgttgagcgc

SEQ ID NO: 413182 - DNA, 120 bp, Artificial Sequence
  ENSG00000148814_56 (sequence is synthesized)
ggacatcgggatgttcttgtgtatttttcatgttgagcgcaatactgtaaaccttgaagaacactttgggacccatagagtgccaccagtcatgccaaagagctcctgagaagcagagaa

SEQ ID NO: 413183 - DNA, 120 bp, Artificial Sequence
  ENSG00000148814_57 (sequence is synthesized)
aagtcatgacatttcaagaaaaagttgaatttcttgatatgttccgtagattgaggtttacagctgcggttgcctaccaattcaagataaatgaatccagcgtaaggaccatagtaaaaa

SEQ ID NO: 413184 - DNA, 120 bp, Artificial Sequence
  ENSG00000148814_58 (sequence is synthesized)
aataaggaaatttgtgagcaggcacaaaagccttaacactttctgtgaaatacctttttatcttgtattgggaatgcagcttttatgtgggtataggattgctgtgtgtgatggttcata

SEQ ID NO: 413185 - DNA, 83 bp, Artificial Sequence
  ENSG00000148814_59 (sequence is synthesized)
ttttatgtgggtataggattgctgtgtgtgatggttcatattaaatgtcaacttgattagattgaagaatgtaaagtattgtt

SEQ ID NO: 413186 - DNA, 120 bp, Artificial Sequence
  ENSG00000148814_60 (sequence is synthesized)
aggcaccatccagtcggctgccagcatggctggaaaaagcaggcagaagaaggtggctgaagctgactggctgagtcttctggccttcatctctctcccatgctggatgcttcctgccct

SEQ ID NO: 413187 - DNA, 77 bp, Artificial Sequence
  ENSG00000148814_61 (sequence is synthesized)
tagcttttggactcttggacctacactggtgttttgccaggggctctcgggccttcggccacagactgaaggctgca

SEQ ID NO: 413188 - DNA, 120 bp, Artificial Sequence
  ENSG00000148814_62 (sequence is synthesized)
gggactcagactgagctactactggcttccttgcccctcagtttgcagacagcctattgtgggacttcaccctgtgatcctgtgcctcagttctccttaataaactccatttcatatgta

SEQ ID NO: 413189 - DNA, 120 bp, Artificial Sequence
  ENSG00000148814_63 (sequence is synthesized)
cggcgtctccatggcgaccgcgttggctgggtggcctccattgtcgggctgctgctctcagcggcggggctcgccagcgcttcagtgggcggggacgcggcaggtgactccagaccaagg

SEQ ID NO: 413190 - DNA, 120 bp, Artificial Sequence
  ENSG00000148814_64 (sequence is synthesized)
taggaaacaggctctgcagagactacatgagagaaaaactcgaatcatgggcgtggtagggcgtgcgcctacacatatgggagaaggaagacagcctcctccaggagcatcttacccgac

SEQ ID NO: 413191 - DNA, 120 bp, Artificial Sequence
  ENSG00000148814_65 (sequence is synthesized)
gccctgacacggtcatcagggaggttcattcttgtgttgctgtgactgccgccagtgccaccaccttgcgaggtgtgttggccgatggactcggtgtcctcagtgtcttctctgtcctcc

SEQ ID NO: 413192 - DNA, 120 bp, Artificial Sequence
  ENSG00000148814_66 (sequence is synthesized)
agctccactgaccacctggcttcacccctccctgggccccaggagtccggctggcatggaccacagccacagcacccccgtgcccctcacttggtggttggctttggccagcgggggccc

SEQ ID NO: 413193 - DNA, 120 bp, Artificial Sequence
  ENSG00000148814_67 (sequence is synthesized)
ccagcaggaggtcgaggaggaagggagagcgagggcctcgtctttactttcccggcttctttgtgagctgcctggagctggccgagtccagcctctccctccttctgggttccgacaatc

SEQ ID NO: 413194 - DNA, 120 bp, Artificial Sequence
  ENSG00000148814_68 (sequence is synthesized)
tctccttccctggtctgtcctgtgggcggctgcagcccggccctgactggcacagggctcttgcaccgcccctgtggctcacctgctccctccccaacatgaataaaccctcctgaagcc

SEQ ID NO: 413195 - DNA, 120 bp, Artificial Sequence
  ENSG00000148814_69 (sequence is synthesized)
aacttacccatccaaacccaaagaatggactcagagaacagtggaagaaagactttttaatgacggtcttgcaagattgggtgtctgatgggcaggcacacccagcagggttacaacaag

SEQ ID NO: 413196 - DNA, 120 bp, Artificial Sequence
  ENSG00000148814_70 (sequence is synthesized)
gaaatacaggagccatgggtcctctgctgagttgacacagtgtacactgatctcaggccgacccagtcatctctgtgacttttccttggttctataaatctgggcacattatagatcctg

SEQ ID NO: 413197 - DNA, 120 bp, Artificial Sequence
  ENSG00000148814_71 (sequence is synthesized)
tccaaatgcgtgagcaaagaagattccatggccaggccccactggaggagatgaggaaggctgccgaggatctggaaattccataaggattctggcctgtcctctcaagctacccaaggc

SEQ ID NO: 413198 - DNA, 120 bp, Artificial Sequence
  ENSG00000148814_72 (sequence is synthesized)
tgtggagccacttcatggagaccccacccaacctgactcggaccccacttctgagactcttttcctcctcagcccaaggagtttgtatctgcctttagataaactcttattctttctaaa

SEQ ID NO: 413199 - DNA, 120 bp, Artificial Sequence
  ENSG00000148814_73 (sequence is synthesized)
gcagaactgctcacggaagtggctcctatatatttggaatgttaaccatcctctcagccaccgccagtgctgtttattcactcagcatacgctgatgcccacctcctggtacttggagta

SEQ ID NO: 413200 - DNA, 120 bp, Artificial Sequence
  ENSG00000148814_74 (sequence is synthesized)
tcctgggctgtgggagagacgcaggaatgaaggaaagtgctttgctgcccgaactgctgcctggccagcccatccagctgtagaaggacacagctgctgtccctggcagtgaacctggat

SEQ ID NO: 413201 - DNA, 120 bp, Artificial Sequence
  ENSG00000148814_75 (sequence is synthesized)
cccagaccagacatggctctggctatttgctcagtaagcaggcgatttcgggggctgccgagggccaggtgctgcggcaggcactggagaaacggccgagacactgagtgtggggccccg

SEQ ID NO: 413202 - DNA, 120 bp, Artificial Sequence
  ENSG00000148814_76 (sequence is synthesized)
gaattcagaccatgtcaaaggctttgggatagaaacagtggtgtgctgggtcagcagcagagtgccggctcttcaggaagtcagttccggctccaaaggccgccggaaggagtcctggtt

SEQ ID NO: 413203 - DNA, 120 bp, Artificial Sequence
  ENSG00000148814_77 (sequence is synthesized)
ccttcctgcagccataaggattctggcctgtcctctcaagctacccaaggcccctggctggtggcctcttccaggtcagtgtaccatgcccgaacacaggtcaggctggtgcgagctgca

SEQ ID NO: 413204 - DNA, 120 bp, Artificial Sequence
  ENSG00000148814_78 (sequence is synthesized)
tcggggctgcccccagagcacgcagcactgtcacgggggaggaagcaaccctggccttcctgtccccacaccccatctgcaggctccattcccaccatttccgctgtttccctctctcct

SEQ ID NO: 413205 - DNA, 120 bp, Artificial Sequence
  ENSG00000148814_79 (sequence is synthesized)
atagagcctgggccacctgcccttccaaaagcagcaggttaaaggccagtgcccagcacgcaccccaggtgacccctgtcccagagcacaggccatgcctgccctctctgctctactgag

SEQ ID NO: 413206 - DNA, 120 bp, Artificial Sequence
  ENSG00000148814_80 (sequence is synthesized)
acagtcactgctgttcccgtgcagatggggaagacgagggacagtcactgctgttcccgtgcagacggggaagatgagggtggaaggtcatgcagcgtgggggggcgggccagcctcctg

SEQ ID NO: 413207 - DNA, 120 bp, Artificial Sequence
  ENSG00000148814_81 (sequence is synthesized)
ggacgtggccaccgggcatgctgcttggctgtggcctcccaagatgtgctgctggtgtgaggctttgcacagggcaggccgtggaatgggatgggcctttctcctctgggcgaagtgttt

SEQ ID NO: 413208 - DNA, 120 bp, Artificial Sequence
  ENSG00000148814_82 (sequence is synthesized)
ggtttcagagggaagaccaggcagggcttccagttgtgtttcttaaactgctttgatgcaagggtcatggtgaggagttgtcatgttctggaacctggctggctctcagtcctgggctca

SEQ ID NO: 413209 - DNA, 120 bp, Artificial Sequence
  ENSG00000148814_83 (sequence is synthesized)
gagcccctatctccagcctggttttccccaggtgttttcactgggaggaaacaccaggcacacctgtcagctccctctcatgggcagggagagggagtccccagcaccgtgcgaccccac

SEQ ID NO: 413210 - DNA, 120 bp, Artificial Sequence
  ENSG00000148814_84 (sequence is synthesized)
catgttactggctatcccctctgctgtcctgcgggcttccctcaagggggacccagtatctgaccctgcctgaatgtgtctgtggaggccaggcgccttctgatggccttgcctgccccg

SEQ ID NO: 413211 - DNA, 120 bp, Artificial Sequence
  ENSG00000148814_85 (sequence is synthesized)
ccccctgctcccacatcacccagcgatgggattccgacctgctgcagcaccaccccatgcacctgaactccaggcacgtcacatcgtccagcccgggcgagctgctggccaggccccctg

SEQ ID NO: 413212 - DNA, 120 bp, Artificial Sequence
  ENSG00000148814_86 (sequence is synthesized)
cttccgcgggcatctctgtccaggtcagacaagggtgcggcattggtctcaagcaggtcgggtgcagctgccgaggctgcacgtccttcaggtgcatttcccaagccgactgtcaagcgt

SEQ ID NO: 413213 - DNA, 120 bp, Artificial Sequence
  ENSG00000148814_87 (sequence is synthesized)
cccgggaaagtagctggctggcagtgggcgcgttgggacagtgtcctgctgccatccacacatcttcattacgtgtcctgaaatcaacagtcaagactggactctggggtgactgcagct

SEQ ID NO: 413214 - DNA, 120 bp, Artificial Sequence
  ENSG00000148814_88 (sequence is synthesized)
tctagtcgtgctaattgttcagatgagcggatgatccacaggccctccttttacatttcacatgttgtatgaattaccgtcacagggttttgttaaacattcagctaaaaacactctgta

SEQ ID NO: 413215 - DNA, 120 bp, Artificial Sequence
  ENSG00000148824_0 (sequence is synthesized)
agaggcgggtcgcagcggcgcagaggaggtcagctgcgggagcgtttccggggacggtgccgccatgagattgaccccgcgcgcgctgtgcagcgccgcccaggccgcctggcgggagaa

SEQ ID NO: 413216 - DNA, 120 bp, Artificial Sequence
  ENSG00000148824_1 (sequence is synthesized)
cttccccctgtgcggtcgcgacgtggcgcgctggttcccgggccacatggccaaggggctgaagaagatgcagagcagcctgaagctggtggactgtatcatcgaggtccacgatgcccg

SEQ ID NO: 413217 - DNA, 120 bp, Artificial Sequence
  ENSG00000148824_2 (sequence is synthesized)
gatcccactttcaggccgcaaccctctgtttcaggaaacccttgggcttaagcctcacttgctggtcctcaacaagatggacttggcggatcttacagagcagcagaaaattatgcaaca

SEQ ID NO: 413218 - DNA, 120 bp, Artificial Sequence
  ENSG00000148824_3 (sequence is synthesized)
cttagaaggagaaggcctaaaaaatgtcatttttaccaactgtgtaaaggatgaaaatgtcaagcagatcatcccgatggtcactgaactgattgggagaagccaccgctaccaccgaaa

SEQ ID NO: 413219 - DNA, 120 bp, Artificial Sequence
  ENSG00000148824_4 (sequence is synthesized)
agagaacctggagtactgtatcatggtcattggggtccccaacgtgggcaagtcctccctcatcaactccctccggaggcagcacctcaggaaagggaaagccaccagggtgggtggcga

SEQ ID NO: 413220 - DNA, 120 bp, Artificial Sequence
  ENSG00000148824_5 (sequence is synthesized)
gcctgggatcaccagagctgtgatgtccaaaattcaggtctctgagcggcccctgatgttcctgttggacactcctggcgtgctggctcctcggattgaaagtgtggagacaggcctgaa

SEQ ID NO: 413221 - DNA, 120 bp, Artificial Sequence
  ENSG00000148824_6 (sequence is synthesized)
gctggccctgtgtggaacggtgctggaccacctggtcggggaggagaccatggctgactacctgctgtacaccctcaacaaacaccagcgctttgggtacgtgcagcactacggcctggg

SEQ ID NO: 413222 - DNA, 120 bp, Artificial Sequence
  ENSG00000148824_7 (sequence is synthesized)
cagtgcctgtgacaacgtagagcgcgtgctgaagagtgtggctgtgaagctggggaagacgcagaaggtgaaggtgctcacgggcacgggtaacgtgaacattattcagcctaactatcc

SEQ ID NO: 413223 - DNA, 120 bp, Artificial Sequence
  ENSG00000148824_8 (sequence is synthesized)
tgcggcagcccgtgacttcctgcagactttccgccgtgggctgctgggttccgtgatgctggacctcgacgtcctgcggggccaccccccggctgagactttgccctgaacttgtccggg

SEQ ID NO: 413224 - DNA, 120 bp, Artificial Sequence
  ENSG00000148824_9 (sequence is synthesized)
tagggagggccggaggcatgtggcctcccagacctcctgacctgggtggttgaggctcaagacagctcacccggtccagaagctccatgctggtcactagggtgctgtgctctctggcgc

SEQ ID NO: 413225 - DNA, 120 bp, Artificial Sequence
  ENSG00000148824_10 (sequence is synthesized)
cccacagcctggccagctccagggaccccagttgcagggcccaagcaggtgggagtggacaccaggcttcccagtggacgtccctgagcagctccgcatgcttggttctcccggagcttc

SEQ ID NO: 413226 - DNA, 120 bp, Artificial Sequence
  ENSG00000148824_11 (sequence is synthesized)
ctgctcaggcctcttgagaaatggatgctgtctcagaaggagttaaagctataacctgtaacctttaaaatctccagttaaagggcctgtttcttactggcctgtgaggtgcaccgtagt

SEQ ID NO: 413227 - DNA, 120 bp, Artificial Sequence
  ENSG00000148824_12 (sequence is synthesized)
gccttgggcctgtgtgttaaagctgctctcaccagtgaaacctaagaaatgagcaggttggcagctagggtttgtgttggaggctttcggtccagtgtcttgcagtcctacaacaagtga

SEQ ID NO: 413228 - DNA, 120 bp, Artificial Sequence
  ENSG00000148824_13 (sequence is synthesized)
gaggcttgctgccatcagagaggtttatttcacacttacaggcacacacagacacagaccagagactcccagcagcagagcccaagcactggcttcgcccctcagtgccctggggcatgt

SEQ ID NO: 413229 - DNA, 120 bp, Artificial Sequence
  ENSG00000148824_14 (sequence is synthesized)
cggcatgggcagtagagacccctggcctctgagcaccttctagctcacgggtagtgggattctgcattagtggggctgagagatgtgggggcccctccagccccattatagtgcacctga

SEQ ID NO: 413230 - DNA, 120 bp, Artificial Sequence
  ENSG00000148824_15 (sequence is synthesized)
aggggtccacagcctgtgtcctagaagagggaagaggaaggaaggtgggtggggctggtagtatggactaaggtgctgcaggacctggggccagggacatcctgtgcagaagctccggct

SEQ ID NO: 413231 - DNA, 120 bp, Artificial Sequence
  ENSG00000148824_16 (sequence is synthesized)
gcctctttgcggtggtggcctgaccgtcccacagcagcctccaccagggccctggtgctcagtggcccctctttgctggctggctgcctctgctgccccataccccacacactcatcagc

SEQ ID NO: 413232 - DNA, 120 bp, Artificial Sequence
  ENSG00000148824_17 (sequence is synthesized)
ctgaagttagcccctgagtgccacctgcatcgtgccataaccctgaccgcctggggcaggaagtattcaggttggctgtgtcagatgctaatgtgctgaatcaacagtcattgcagatca

SEQ ID NO: 413233 - DNA, 120 bp, Artificial Sequence
  ENSG00000148824_18 (sequence is synthesized)
cgaagtgtccatcataactggaacattccatcagcttgcagtgctgtggtgtgtgagggtctggtgcagctcagcccattttccaggtgggcatctgcaaagttgagggggctccggtgg

SEQ ID NO: 413234 - DNA, 120 bp, Artificial Sequence
  ENSG00000148824_19 (sequence is synthesized)
gtctctctgctgtgaggagactcagaccaccccctgcctcctgggggaaatgtcagaagggcttctctgcctatgaggatctggggcagggcttggccttggcctgctggtcttggaggc

SEQ ID NO: 413235 - DNA, 120 bp, Artificial Sequence
  ENSG00000148824_20 (sequence is synthesized)
gttgagcttggtctggaaggggtggaggagcgtctgggctcactgggccaggggcattgctggcagtgtggacgggaggctgcagggcgctgcctcctgtggcttagtgccctggagcta

SEQ ID NO: 413236 - DNA, 120 bp, Artificial Sequence
  ENSG00000148824_21 (sequence is synthesized)
gagagcagtgcttggttgagtcctgccaacagcttccagatcctcacccaggccagaacccaggccagctggggaaggcagaggctggcagggcccgtggtgggtgctggtcttgacttt

SEQ ID NO: 413237 - DNA, 120 bp, Artificial Sequence
  ENSG00000148824_22 (sequence is synthesized)
ggtgtccactgagtcccgaggctcaggcccaggagggatgcagtccggctgagggcgaggctgtccccaggacatggagagggtgagatcccaaggccacggcggggggcagggagaacc

SEQ ID NO: 413238 - DNA, 120 bp, Artificial Sequence
  ENSG00000148824_23 (sequence is synthesized)
cctcctaccctggatgagtgggtgactggagagctagagaacgtggcagacccaagacctctcagtgctgagcccatggaggatgccccaggctggcgggactgggaagcagagggctgg

SEQ ID NO: 413239 - DNA, 120 bp, Artificial Sequence
  ENSG00000148824_24 (sequence is synthesized)
tcttaacacaggtgtgtccagtgctggaggcaagtccttgtcgtgactgtccagcgccactccatgtctctcctgtccttggatgttggggggctcagcctcttgcatgggtgtcctgct

SEQ ID NO: 413240 - DNA, 120 bp, Artificial Sequence
  ENSG00000148824_25 (sequence is synthesized)
gggcgctgggccccgccactggccccctgcttgctttggggtctgagttagctcctggctccactgagcaggccgtcagctgccagcccaccacgcggatacccaggccctgttccgagg

SEQ ID NO: 413241 - DNA, 120 bp, Artificial Sequence
  ENSG00000148824_26 (sequence is synthesized)
cctggaacagctgcttccgaagaaggggctgccttcagggaaatgcgtgcaccgtgcagcctgtgctgtgcccagggaggcctcttcagcgggattggcagttgctgtgccctgagaaca

SEQ ID NO: 413242 - DNA, 120 bp, Artificial Sequence
  ENSG00000148824_27 (sequence is synthesized)
ggcagaactgtgtgatccctgaatgtgaacctgaagttcaaaggacttggaaagctctggaatgtgttggtttttcccccccaaaatgggtcctaaggagggtaaagtgacttgtttcaa

SEQ ID NO: 413243 - DNA, 120 bp, Artificial Sequence
  ENSG00000148824_28 (sequence is synthesized)
gtggtgcggccccttggagcgccggaagcccgcagtgccggaggcccgcagcgccggaacctcagaggcgggtcgcagcggcgcagaggagggctgaagaagatgcagagcagcctgaag

SEQ ID NO: 413244 - DNA, 120 bp, Artificial Sequence
  ENSG00000148824_29 (sequence is synthesized)
caccatctttcttggaggggacgtgcccgaggagcactgccagtcttctgctgaccccgcagccccagagcacatcttgtctcgttcagtccagttcacaggagggctgaacagtgggac

SEQ ID NO: 413245 - DNA, 120 bp, Artificial Sequence
  ENSG00000148824_30 (sequence is synthesized)
ggagtcctcaggggccaggcccagcactctgtcaagagctctgcaggcgtctggcacctgccgacctctgtgtggcttccggctgctgaccacgcttccctcccctccactcagtgtccc

SEQ ID NO: 413246 - DNA, 120 bp, Artificial Sequence
  ENSG00000148824_31 (sequence is synthesized)
cgctgagcacccccggggcaggcactgcccctgcccttattccacagtcgtcatagtctttgcgccaaacctttggggaaggcacgctgttttccccatttccagatgaggaggccactg

SEQ ID NO: 413247 - DNA, 120 bp, Artificial Sequence
  ENSG00000148824_32 (sequence is synthesized)
tccagggccatgcagtggtcaggacagacctgagtgtggcgccccccgccccaccctccactcccttccttgtgttctccttgggagcagaagacaagctgttgggacctgacgctttta

SEQ ID NO: 413248 - DNA, 120 bp, Artificial Sequence
  ENSG00000148824_33 (sequence is synthesized)
tttattctccaaattaagtgggaattagatcctctggggaaccctggagcttggtgagagtgacgctgccatggggttgggtccctgaggccttcctcggagcattgggtgccaggggct

SEQ ID NO: 413249 - DNA, 120 bp, Artificial Sequence
  ENSG00000148824_34 (sequence is synthesized)
tccctgcttggctggtcagatgtgtttgttacatacgtctccctacttgttctgcagcttctgtgtttagtatacatttgagcctccttttctccttttcctacagggaaagccaccagg

SEQ ID NO: 413250 - DNA, 120 bp, Artificial Sequence
  ENSG00000148824_35 (sequence is synthesized)
agaacttccccctgtgcggtcgcgacgtggcgcgctggttcccgggccacatggccaagggtgaggcacggcggggaggggcaaggtcatgcctacggccgcggcgcctctgcttccctc

SEQ ID NO: 413251 - DNA, 120 bp, Artificial Sequence
  ENSG00000148824_36 (sequence is synthesized)
ccaccccggtttcggccgtcgcctgcttctcccggtcgttctgggctggccccgcccctcctcccttgtctcccctccttccccgctctcacccgctcccggagccgccgggaccccttc

SEQ ID NO: 413252 - DNA, 120 bp, Artificial Sequence
  ENSG00000148824_37 (sequence is synthesized)
ccctgcgcagctgcgggagaggcccgttcccgcgagtgcccccgcggcgcagcctcggacccagggcctgcttgacctcctacctctggcccgccgcccctgtcctctgttcccagcaag

SEQ ID NO: 413253 - DNA, 120 bp, Artificial Sequence
  ENSG00000148824_38 (sequence is synthesized)
ttccttctgcccttttaatcccccgaagcctccgtttccacatgttcttgacaagatagacttttctgagtcttttggggactaaatgaaacagtgggtatgaaggcacctgttcagttt

SEQ ID NO: 413254 - DNA, 120 bp, Artificial Sequence
  ENSG00000148824_39 (sequence is synthesized)
acctttagggctggctttggcacagggcccctagacgggagttgttactgcctttgacctggttgctgccagaccttcctcgaagcttagtgtgagagctgtaatagtgcacagctgaca

SEQ ID NO: 413255 - DNA, 120 bp, Artificial Sequence
  ENSG00000148824_40 (sequence is synthesized)
ggcactggtcaccattccaccctgccccatgagtggccttccctttccccatttgacggaccagggcagagaggttggtcgcaggtgccaggcaggagtgggggccgggaccacagccga

SEQ ID NO: 413256 - DNA, 120 bp, Artificial Sequence
  ENSG00000148824_41 (sequence is synthesized)
gtgccgtcctcttggttagtgtctttgtcagtggctggcctcttcctcacggcacggtgtctttgggctaggactggaagggatgtgtttgaacttggcaggaacatagatgtggctgtt

SEQ ID NO: 413257 - DNA, 120 bp, Artificial Sequence
  ENSG00000148826_0 (sequence is synthesized)
ggcggggcccggatgggagcccgggccggcggcggcggcgcccatggacactaaccgcccgggcgcgttcgtgctgagcagtgccccgctggccgcgctgcacaacatggccgagatgaa

SEQ ID NO: 413258 - DNA, 120 bp, Artificial Sequence
  ENSG00000148826_1 (sequence is synthesized)
cccgctggccgcgctgcacaacatggccgagatgaagacgtcgctgttcccctacgcgctgcagggtccggccggcttcaaggcgcccgcgctggggggcctgggcgcgcagctcccgct

SEQ ID NO: 413259 - DNA, 80 bp, Artificial Sequence
  ENSG00000148826_2 (sequence is synthesized)
gtgggcgcggcgggcgggggcctcctgggggggctgccccggctcaacgggctcgcgtcgtccgccggcgtttacttcgg

SEQ ID NO: 413260 - DNA, 80 bp, Artificial Sequence
  ENSG00000148826_3 (sequence is synthesized)
gccgagctgccggggcgcccgcccatcttctggcccggcgtggtgcagggcgcgccctggagggacccgcgtctggctgg

SEQ ID NO: 413261 - DNA, 120 bp, Artificial Sequence
  ENSG00000148826_4 (sequence is synthesized)
cccggccccggccggcggcgtcctggacaaggacgggaagaagaagcactcgcgcccgaccttctcgggccagcagatcttcgcgctggagaaaaccttcgagcagaccaagtacctggc

SEQ ID NO: 413262 - DNA, 120 bp, Artificial Sequence
  ENSG00000148826_5 (sequence is synthesized)
gggcccggagcgcgcgcgtctcgcctactcgctgggcatgaccgagagccaggtgaaggtctggttccagaaccgccggaccaagtggcgcaagcggcacgcggtggagatggcgtcggc

SEQ ID NO: 413263 - DNA, 120 bp, Artificial Sequence
  ENSG00000148826_6 (sequence is synthesized)
caagaagaagcaggactcggacgccgagaagctgaaggtgggcggctcggacgcggaggacgacgacgaatacaaccggcccctggaccccaactcggacgacgagaagatcacgcggct

SEQ ID NO: 413264 - DNA, 120 bp, Artificial Sequence
  ENSG00000148826_7 (sequence is synthesized)
gctcaagaagcacaaaccctcgaacttggcgctggtcagcccgtgcggcggcggcgcgggggacgccttgtgaggacccgcggggtgggggcgaatctatttttgcagaatccgggggcg

SEQ ID NO: 413265 - DNA, 120 bp, Artificial Sequence
  ENSG00000148826_8 (sequence is synthesized)
gccccgggtgggcgcgagtcgctttgtatcatcaataaattatttaacgggtccccgtcggagccgtcgctccggagcctgcgccgcgtgtttcttccgtctcgaacccggagcgaggcg

SEQ ID NO: 413266 - DNA, 80 bp, Artificial Sequence
  ENSG00000148826_9 (sequence is synthesized)
ggtcctccgggttcccggtgcggaggctgcgggccccgggcaggcgcgaggaggcggcgaaggcgcagggaaggggcccg

SEQ ID NO: 413267 - DNA, 120 bp, Artificial Sequence
  ENSG00000148826_10 (sequence is synthesized)
gaaggaaccgcagcgacagccgccaggagcccgggacggagccggggacggagcagcaggtacggcccggcccgcctcgcctcggggcggattcggacgcgcttgggggttcccgaaagg

SEQ ID NO: 413268 - DNA, 120 bp, Artificial Sequence
  ENSG00000148826_11 (sequence is synthesized)
gcgggtgagccgcgtacccgcctcgagtccccgcgggaggtttttcttcttccgttttcccgctttggggccacgtactcgttgccaccgggcacccgttcccgcttggccgagggcttc

SEQ ID NO: 413269 - DNA, 120 bp, Artificial Sequence
  ENSG00000148826_12 (sequence is synthesized)
gctctgattatttccaaagtccctctgcgcatcagcggatcccataggcccgccctgggctcagccggtggaaccgggtctgatccgctgcacggaggcccttcggtcaccatcccgcca

SEQ ID NO: 413270 - DNA, 120 bp, Artificial Sequence
  ENSG00000148826_13 (sequence is synthesized)
gatcttcccgcggtggaaagcagtttcttccgaactaggaccgcaaagagaaatccgaaataattccgcccgcggagcggcggggcctcccgtgggtcacgcggggtcagggagccggag

SEQ ID NO: 413271 - DNA, 120 bp, Artificial Sequence
  ENSG00000148826_14 (sequence is synthesized)
gccccctgggcaaggcccgcagcgcccagccgggggctcgggggacccgtctcctgccctgaaatgccgccagctccgcggggctgtgactgcggctgacaaaacccctccagcctcccg

SEQ ID NO: 413272 - DNA, 120 bp, Artificial Sequence
  ENSG00000148826_15 (sequence is synthesized)
cagcctctgtggccggggctgcccatcgctgcatcttaatgggcgtggctgttgagttttaatttttaaaaattaaatgtaaataatgatatcactgcggtggtacgatttctcttggca

SEQ ID NO: 413273 - DNA, 120 bp, Artificial Sequence
  ENSG00000148826_16 (sequence is synthesized)
tttgcggaagcgttaaagggaaatagaaagggcttaaactcggcgcgttttgttttaggctcttagcagccttctttacaaggaagcaactcgaagggcagaagcaacgcttttctgtgg

SEQ ID NO: 413274 - DNA, 120 bp, Artificial Sequence
  ENSG00000148826_17 (sequence is synthesized)
ggagcccctctcagctcagagcagaggggcttcttaaagttttgaggaaggcaaagcgttgatataatcccgttttaaaatgttgagggataaatcctttattacagtagaaagtccaaa

SEQ ID NO: 413275 - DNA, 120 bp, Artificial Sequence
  ENSG00000148826_18 (sequence is synthesized)
aggctgtgtttctcctctcaatgaacggcttagtgttttgtgacagcgtgtgatacagtgaaattccaggatttctaatgagcttgatctcaaataacaggctatacaggaggccgctcc

SEQ ID NO: 413276 - DNA, 120 bp, Artificial Sequence
  ENSG00000148826_19 (sequence is synthesized)
cctgagttagcatttcaaaggtggcaggagaagggaaaggaagaaaaagcaacacgggactattttcaccacggtcaattttattgcttaggaaccagaccggtcacttccaaaggcccc

SEQ ID NO: 413277 - DNA, 120 bp, Artificial Sequence
  ENSG00000148826_20 (sequence is synthesized)
tcagaacgaccaacagctgaaacccgcggggcggactccgtgttgaaccgcggacagcggcaaccacagcagcgacacggacctgtgcttccaccaagaacagattccgcagcggacagc

SEQ ID NO: 413278 - DNA, 120 bp, Artificial Sequence
  ENSG00000148826_21 (sequence is synthesized)
agtcacttgcagtggtagtatttatcccacacaaacacccagctaatgccttcacccggtccaggaactctgtagtgttctaaagtaaaatcaataaaacatacatttgtgtttcatcaa

SEQ ID NO: 413279 - DNA, 120 bp, Artificial Sequence
  ENSG00000148832_0 (sequence is synthesized)
gagagctccagacctcccggctactcagaagccctcggactgcccggaccgcgcgatggagtcgaccggcagcgtcggggaggccccgggcggaccccgggtgctggtggtgggcggcgg

SEQ ID NO: 413280 - DNA, 120 bp, Artificial Sequence
  ENSG00000148832_1 (sequence is synthesized)
gaggctctgcggccactccgccttcccgcacctgcgggtcctggaggccacggcccgcgccgggggccgcatccgctcggagcgctgcttcggtggcgtggtggaggtgggcgcgcactg

SEQ ID NO: 413281 - DNA, 120 bp, Artificial Sequence
  ENSG00000148832_2 (sequence is synthesized)
cgtggtggaggtgggcgcgcactggatccatgggccctcccggggtaaccccgtcttccagctggctgctgagtacgggctgctgggggagaaggagctgtcccaggagaaccagctggt

SEQ ID NO: 413282 - DNA, 120 bp, Artificial Sequence
  ENSG00000148832_3 (sequence is synthesized)
ggagaccgggggtcacgtgggcctgccctccgtgagctacgccagctccggggccagcgtgagcctccagctggtggcggagatggcgactctgttctacggcctgatagaccagacccg

SEQ ID NO: 413283 - DNA, 120 bp, Artificial Sequence
  ENSG00000148832_4 (sequence is synthesized)
ggagttcctgcacgctgcagagaccccggtgcccagcgtcggggagtacctcaagaaggagattggccagcacgtggccggctggacagaggatgaggagaccaggaagctgaagctggc

SEQ ID NO: 413284 - DNA, 120 bp, Artificial Sequence
  ENSG00000148832_5 (sequence is synthesized)
cgtcctgaactccttcttcaacctggaatgctgtgtgagcggcacccacagcatggacctggtggccctggcaccctttggggagtataccgtgctgccggggctggactgcaccttttc

SEQ ID NO: 413285 - DNA, 120 bp, Artificial Sequence
  ENSG00000148832_6 (sequence is synthesized)
taagggctatcaaggactcacaaactgcatgatggccgccctgccggaggacactgtagtttttgagaagcctgtgaagaccatccactggaacgggtccttccaggaggcagcctttcc

SEQ ID NO: 413286 - DNA, 120 bp, Artificial Sequence
  ENSG00000148832_7 (sequence is synthesized)
tgaggatggagaccggttcccggcgcaccatgtcatcgtcaccgtgcccttaggttttcttagggaacatttggacaccttctttgaccctcccctgccggctgagaaggcagaagcaat

SEQ ID NO: 413287 - DNA, 120 bp, Artificial Sequence
  ENSG00000148832_8 (sequence is synthesized)
caggaagataggctttgggaccaacaacaaaatcttcctggagtttgaggagcccttctgggagccagactgccagctgatccagctggtgtgggaggacacgtcgcccctggaggatgc

SEQ ID NO: 413288 - DNA, 120 bp, Artificial Sequence
  ENSG00000148832_9 (sequence is synthesized)
tgcccctgagctacaggacgcctggttccggaagctcattggctttgtggtcctgcctgcctttgcgtctgtccacgttctctgtgggttcattgccggacttgagtctgagttcatgga

SEQ ID NO: 413289 - DNA, 120 bp, Artificial Sequence
  ENSG00000148832_10 (sequence is synthesized)
gactctgtcggatgaagaagtacttctgtgtctcacccaagtgctccggagagtgacaggaaacccacggctccccgcgcccaagagcgtcctgcggtctcgctggcacagcgccccgta

SEQ ID NO: 413290 - DNA, 120 bp, Artificial Sequence
  ENSG00000148832_11 (sequence is synthesized)
cactagggggtcctacagctacgtggccgtgggcagtactgggggcgacctggacctgctggctcagcccctccctgcagacggcgccggcgcccagctccagatcctgtttgcggggga

SEQ ID NO: 413291 - DNA, 120 bp, Artificial Sequence
  ENSG00000148832_12 (sequence is synthesized)
agccacacatcgcacgttttactccacgacgcacggggctctgctgtcgggatggagggaggccgaccgcctcctcagtctgtgggccccgcaggtgcagcagcccaggcccaggctcta

SEQ ID NO: 413292 - DNA, 120 bp, Artificial Sequence
  ENSG00000148832_13 (sequence is synthesized)
gctgggcccagcctactctgttccacccgtgtcgggggtaggctgggaccctcatttcttctgacagatttcagtctggcttgaaatttggggatgttaatgagggtcctctggtttttg

SEQ ID NO: 413293 - DNA, 120 bp, Artificial Sequence
  ENSG00000148832_14 (sequence is synthesized)
gtaaccagggccaccttctcagttcttgtgtctgttattggagtctggccagggttgacttgagctgagacaccagatgctcacggagatgctggacacataaagcaagttacagccaca

SEQ ID NO: 413294 - DNA, 120 bp, Artificial Sequence
  ENSG00000148832_15 (sequence is synthesized)
ggatgcgtgtgagccgttttcctggctgttgatggatacatgtgagctgttttcctgcccgttggtggatgtgtgtgagctgttttcctggctattgctccagatcctgtttgcggggga

SEQ ID NO: 413295 - DNA, 120 bp, Artificial Sequence
  ENSG00000148832_16 (sequence is synthesized)
aggatggagaccggttcccggcgcaccatgtcatcgtcaccgtgcccttagaacttgtcagtgtttccaaatcagcacacatagatctacagcggtcttttttgtttccctccagtggct

SEQ ID NO: 413296 - DNA, 120 bp, Artificial Sequence
  ENSG00000148832_17 (sequence is synthesized)
acccaaccggctgcgcccgaactcgccggccccaacctgccctgcgcgcagccgacctgcccggccgcctcaccgggctccccgagggaatccccgctcgcttaatccgccagagttcac

SEQ ID NO: 413297 - DNA, 120 bp, Artificial Sequence
  ENSG00000148834_0 (sequence is synthesized)
gcaaaccccagaggagctcggcctgcgctgcgccacgatgtccggggagtcagccaggagcttggggaagggaagcgcgcccccggggccggtcccggagggctcgatccgcatctacag

SEQ ID NO: 413298 - DNA, 120 bp, Artificial Sequence
  ENSG00000148834_1 (sequence is synthesized)
catgaggttctgcccgtttgctgagaggacgcgtctagtcctgaaggccaagggaatcaggcatgaagtcatcaatatcaacctgaaaaataagcctgagtggttctttaagaaaaatcc

SEQ ID NO: 413299 - DNA, 120 bp, Artificial Sequence
  ENSG00000148834_2 (sequence is synthesized)
ctttggtctggtgccagttctggaaaacagtcagggtcagctgatctacgagtctgccatcacctgtgagtacctggatgaagcatacccagggaagaagctgttgccggatgaccccta

SEQ ID NO: 413300 - DNA, 120 bp, Artificial Sequence
  ENSG00000148834_3 (sequence is synthesized)
tgctggcctaaaagaagaatttcgtaaagaatttaccaagctagaggaggttctgactaataagaagacgaccttctttggtggcaattctatctctatgattgattacctcatctggcc

SEQ ID NO: 413301 - DNA, 120 bp, Artificial Sequence
  ENSG00000148834_4 (sequence is synthesized)
ctggtttgaacggctggaagcaatgaagttaaatgagtgtgtagaccacactccaaaactgaaactgtggatggcagccatgaaggaagatcccacagtctcagccctgcttactagtga

SEQ ID NO: 413302 - DNA, 120 bp, Artificial Sequence
  ENSG00000148834_5 (sequence is synthesized)
gaaagactggcaaggtttcctagagctctacttacagaacagccctgaggcctgtgactatgggctctgaagggggcaggagtcagcaataaagctatgtctgatattttccttcactaa

SEQ ID NO: 413303 - DNA, 120 bp, Artificial Sequence
  ENSG00000148834_6 (sequence is synthesized)
cccttggccagcgagatgctttgacacagccccttaagatgttttaagggctatcccataaagccgggaaggcacaacgggtggagctggcggccgccgggggcaggcacttttgagcta

SEQ ID NO: 413304 - DNA, 120 bp, Artificial Sequence
  ENSG00000148834_7 (sequence is synthesized)
aaggatgactcctagacctgtctttgtcccatacttgggaagataagctgttagtttacattgccaagatgaaattcaactgatctgttttagagtaaagatcttgcgggccaacaagga

SEQ ID NO: 413305 - DNA, 120 bp, Artificial Sequence
  ENSG00000148834_8 (sequence is synthesized)
atttccttggggaggtgtgtggcctttgatctttgtagctatttagcaacaaaatgggaggcagtgttgcctgactcagtttccaagcttgactcttccctttggcatagtgagtttgga

SEQ ID NO: 413306 - DNA, 120 bp, Artificial Sequence
  ENSG00000148834_9 (sequence is synthesized)
gaatcaaacttgacttgtaaagccaataaaagccacttggagaattggcctcagatcttgtctgcaactgtccctgtaaaggtgaggaaactgaaacacactgagctgaacaggagcctt

SEQ ID NO: 413307 - DNA, 120 bp, Artificial Sequence
  ENSG00000148834_10 (sequence is synthesized)
tggagagaacgctctggaccggtgagtgagccatgaggtcgggccacaggctctgaagtcgtgaagccttgggacggagcgggtggtgcttcgaggaagcgcgcccccggggccggtccc

SEQ ID NO: 413308 - DNA, 120 bp, Artificial Sequence
  ENSG00000148834_11 (sequence is synthesized)
gtgatctcggcgacccccggcggcatgttcgaggctgctccgggagcccagccgcccgggagcgccccaccggcggggaacgggtcggagctgcagtgggacgcgggggcggtgggatac

SEQ ID NO: 413309 - DNA, 120 bp, Artificial Sequence
  ENSG00000148835_0 (sequence is synthesized)
ggctcagccgcaagatggcggcgctggcggaggagcagacggaggtggcggtcaagctagagcctgagggaccgccaacgctgctacctccgcaggcgggggacggcgcaggcgagggta

SEQ ID NO: 413310 - DNA, 120 bp, Artificial Sequence
  ENSG00000148835_1 (sequence is synthesized)
gcggcggcactaccaacaacggccccaacggcggcggcgggaacgttgcggcgtcgtcgtccactggcggggatggcgggacccccaagcccacggtggctgtctccgccgctgccccgg

SEQ ID NO: 413311 - DNA, 120 bp, Artificial Sequence
  ENSG00000148835_2 (sequence is synthesized)
cgggggcggccccggtgcccgccgctgctccggacgccggcgctccgcatgaccgacagactctactggccgtgctgcagttcctacggcagagcaaactccgcgaggccgaagaggcgc

SEQ ID NO: 413312 - DNA, 120 bp, Artificial Sequence
  ENSG00000148835_3 (sequence is synthesized)
tgcgccgtgaggccgggctgctggaggaggcagtggcgggctccggagccccgggagaggtggacagcgccggcgctgaggtgaccagcgcgcttctcagccgggtgaccgcctcggccc

SEQ ID NO: 413313 - DNA, 120 bp, Artificial Sequence
  ENSG00000148835_4 (sequence is synthesized)
ctggccctgcggcccccgaccctccgggcactggcgcttcgggggccacggtcgtctcaggttcagcctcaggtcctgcggctccgggtaaagttggaagtgttgctgtggaagaccagc

SEQ ID NO: 413314 - DNA, 120 bp, Artificial Sequence
  ENSG00000148835_5 (sequence is synthesized)
cagatgtcagtgccgtgttgtcagcctacaaccaacaaggagatcccacaatgtatgaagaatactatagtggactgaaacacttcattgaatgttccctggactgccatcgggcagagt

SEQ ID NO: 413315 - DNA, 120 bp, Artificial Sequence
  ENSG00000148835_6 (sequence is synthesized)
tgtcccaacttttttatcctctgtttgtgcacatgtacttggagctagtctacaatcaacatgagaatgaagcaaagtcattctttgagaagttccatggagatcaggaatgttattacc

SEQ ID NO: 413316 - DNA, 120 bp, Artificial Sequence
  ENSG00000148835_7 (sequence is synthesized)
aggatgacctacgagtattatctagtcttaccaaaaaggaacacatgaaagggaatgagaccatgttggattttcgaacaagtaaatttgttctgcgtatttcccgtgactcgtaccaac

SEQ ID NO: 413317 - DNA, 120 bp, Artificial Sequence
  ENSG00000148835_8 (sequence is synthesized)
tcttgaagaggcatcttcaggagaaacagaacaatcagatatggaacatagttcaggagcacctctacattgacatctttgatgggatgccgcgtagtaagcaacagatagatgcgatgg

SEQ ID NO: 413318 - DNA, 120 bp, Artificial Sequence
  ENSG00000148835_9 (sequence is synthesized)
tgggaagtttggcaggagaggctaaacgagaggcaaacaaatcaaaggtattttttggtttattaaaagaaccagaaattgaggtacctttggatgacgaggatgaagagggagaaaatg

SEQ ID NO: 413319 - DNA, 120 bp, Artificial Sequence
  ENSG00000148835_10 (sequence is synthesized)
aagaaggaaaacctaaaaagaagaagcctaaaaaagatagtattggatccaaaagcaaaaaacaagatcccaatgctccacctcagaacagaatccctcttcctgagttgaaagattcag

SEQ ID NO: 413320 - DNA, 120 bp, Artificial Sequence
  ENSG00000148835_11 (sequence is synthesized)
ataagttggataagataatgaatatgaaagaaaccaccaaacgagtgcgccttgggccggactgcttaccctccatttgtttctatacatttctcaatgcttaccagggtctcactgcag

SEQ ID NO: 413321 - DNA, 120 bp, Artificial Sequence
  ENSG00000148835_12 (sequence is synthesized)
tggatgtcactgatgattctagtctgattgctggaggttttgcagattcaactgtcagagtgtggtcggtaacacccaaaaagcttcgtagtgtcaaacaagcatcagatcttagtctta

SEQ ID NO: 413322 - DNA, 120 bp, Artificial Sequence
  ENSG00000148835_13 (sequence is synthesized)
tgtcttagaaagaatcatggatgagaaaacagcaagtgagttgaagattttgtatggtcacagtgggcctgtctacggagccagcttcagtccggataggaactatctgctttcctcttc

SEQ ID NO: 413323 - DNA, 120 bp, Artificial Sequence
  ENSG00000148835_14 (sequence is synthesized)
agaggacggaactgttagattgtggagccttcaaacatttacttgtttggtgggatataaaggacacaactatccagtatgggacacacaattttctccatatggatattattttgtgtc

SEQ ID NO: 413324 - DNA, 120 bp, Artificial Sequence
  ENSG00000148835_15 (sequence is synthesized)
agggggccatgaccgagtagctcggctctgggctacagaccactatcagcctttaagaatatttgccggccatcttgctgatgtgaattgtaccagattccatccaaattctaattatgt

SEQ ID NO: 413325 - DNA, 120 bp, Artificial Sequence
  ENSG00000148835_16 (sequence is synthesized)
tgctacgggctctgcagacagaactgtgcggctctgggacgtcctgaatggtaactgtgtaaggatcttcactggacacaagggaccaattcattccttgacattttctcccaatgggag

SEQ ID NO: 413326 - DNA, 120 bp, Artificial Sequence
  ENSG00000148835_17 (sequence is synthesized)
attcctggctacaggagcaacagatggcagagtgcttctttgggatattggacatggtttgatggttggagaattaaaaggccacactgatacagtctgttcacttaggtttagtagaga

SEQ ID NO: 413327 - DNA, 120 bp, Artificial Sequence
  ENSG00000148835_18 (sequence is synthesized)
tggtgaaattttggcatcaggttcaatggataatacagttcgattatgggatgctatcaaagcctttgaagatttagagaccgatgactttactacagccactgggcatataaatttacc

SEQ ID NO: 413328 - DNA, 120 bp, Artificial Sequence
  ENSG00000148835_19 (sequence is synthesized)
tgagaattcacaggagttattgttgggaacatatatgaccaaatcaacaccagttgtacaccttcattttactcgaagaaacctggttctagctgcaggagcttatagtccacaataaac

SEQ ID NO: 413329 - DNA, 120 bp, Artificial Sequence
  ENSG00000148835_20 (sequence is synthesized)
catcggtattaaagaccttttggaagctactgtttttaaaaagggagactaaaagcaaatacctcagtgattaatatttaagctacagagaatgtttttgtctatatggatctggaagta

SEQ ID NO: 413330 - DNA, 120 bp, Artificial Sequence
  ENSG00000148835_21 (sequence is synthesized)
tgctgcttggaaaaatctgaacaggacagttccacgtttctatagcaaccacatttgactaatttccgttagttgaataagaggtattatgatcatggaggggacatttatggtgctttg

SEQ ID NO: 413331 - DNA, 120 bp, Artificial Sequence
  ENSG00000148835_22 (sequence is synthesized)
gattgtgtggaaactatgcattttctgttcaaatgctattttaatttattacatttagaaaaaaagttgatttcaataattcatcctgcttcaagattcaaattcagaaatatactatca

SEQ ID NO: 413332 - DNA, 120 bp, Artificial Sequence
  ENSG00000148835_23 (sequence is synthesized)
tcttgaattttagctgaagaatcctatgagcatgtatgtttctgctgtaaaaacgtagttactgtatggcactcaaaaactatgttaaatgatccactaactttttttttcttggcccat

SEQ ID NO: 413333 - DNA, 120 bp, Artificial Sequence
  ENSG00000148835_24 (sequence is synthesized)
gattaatggaatgtatgtaactaggtagggttcctttcttagatctagaggaagtacagccacccactgacatctgaatttatatacctgttgagttttgagtgcacccaaacactcgat

SEQ ID NO: 413334 - DNA, 120 bp, Artificial Sequence
  ENSG00000148835_25 (sequence is synthesized)
aaaccaggtgaagaaatttagcttccatgttctacttcagctaaaacagctacatacaacctagtacacttgaagtcagacagacatttcagttgcttacctccagtactgagccttgct

SEQ ID NO: 413335 - DNA, 120 bp, Artificial Sequence
  ENSG00000148835_26 (sequence is synthesized)
ttgggaaactaaaagatttagaccaagtcactgccagtttttgcctttgttgcattttgtacagtttttatatttttgatatcttgtaaataaagacaaccagcttttccaggttcataa

SEQ ID NO: 413336 - DNA, 120 bp, Artificial Sequence
  ENSG00000148840_0 (sequence is synthesized)
ggtgttcaggggccaagatggcggcgcgccggggacggagagacggagtcgcgccgcccccgagtgggggccccggtccggaccctggcgggggagcccgcggcagtggttggggaagtc

SEQ ID NO: 413337 - DNA, 120 bp, Artificial Sequence
  ENSG00000148840_1 (sequence is synthesized)
gttggggaagtcgaagccaagcgccgtatgggactttgggcgctgtgagcggcggcgagcaggtgctgctgcatgaggaggcgggtgattctggctttgtcagtctctctcggctgggcc

SEQ ID NO: 413338 - DNA, 120 bp, Artificial Sequence
  ENSG00000148840_2 (sequence is synthesized)
catctctgagggacaaggacctggaaatggaggagctaatgctgcaggatgagacactgctggggaccatgcagagctacatggatgcctcccttatctccctcattgaggattttggga

SEQ ID NO: 413339 - DNA, 120 bp, Artificial Sequence
  ENSG00000148840_3 (sequence is synthesized)
gccttggagagagcaggttatctctggaggaccagaatgaagtgtcgctgctcacggctctgacggagatcttggacaatgcagattctgagaacctttctccatttgacagcattcctg

SEQ ID NO: 413340 - DNA, 120 bp, Artificial Sequence
  ENSG00000148840_4 (sequence is synthesized)
attcggagctgcttgtgtcaccccgggagggctcctctctgcacaagctgcttactctctctcggacacccccagaacgtgacctcatcaccccagttgacccactggggcccagtacag

SEQ ID NO: 413341 - DNA, 120 bp, Artificial Sequence
  ENSG00000148840_5 (sequence is synthesized)
gcagcagtagagggagtggggttgaaatgtctcttccagatccctcttgggacttctccccaccctctttcttagagacctcttcccccaagcttcctagctggagacccccaagatcaa

SEQ ID NO: 413342 - DNA, 120 bp, Artificial Sequence
  ENSG00000148840_6 (sequence is synthesized)
gaccacgctggggccaatccccacctccccagcagcgcagtgatggagaagaagaggaggaggtggccagcttcagtggccagattcttgccggggagcttgacaactgtgtgagcagta

SEQ ID NO: 413343 - DNA, 120 bp, Artificial Sequence
  ENSG00000148840_7 (sequence is synthesized)
tcccggacttccccatgcatttggcctgccctgaggaggaagataaagcaacagcagcagagatggcagtgccagcagctggtgatgagagcatctcctccctgagtgagctggtgcggg

SEQ ID NO: 413344 - DNA, 120 bp, Artificial Sequence
  ENSG00000148840_8 (sequence is synthesized)
ccatgcacccatactgcctgcccaacctcacccacctggcatcacttgaggatgagcttcaggagcagccagatgatttgacactgcctgagggctgcgtagtgctggagattgtggggc

SEQ ID NO: 413345 - DNA, 120 bp, Artificial Sequence
  ENSG00000148840_9 (sequence is synthesized)
aggcagccacagctggcgatgacctggagatcccagttgtggtgcgacaggtctctcctggaccccggcctgtgctcctggatgactcgctagagactagttctgccttgcagctgctta

SEQ ID NO: 413346 - DNA, 120 bp, Artificial Sequence
  ENSG00000148840_10 (sequence is synthesized)
tgcctacactggagtcagagacagaggctgctgtgcccaaggtaaccctctgctctgagaaagaggggttgtcattgaactcagaggagaagctggactcagcctgcttattgaagccca

SEQ ID NO: 413347 - DNA, 120 bp, Artificial Sequence
  ENSG00000148840_11 (sequence is synthesized)
gggaggtcgtggagccggtggtgcccaaggagcctcagaacccacctgccaatgcagcaccaggttcccagagagctcgaaagggcaggaagaagaagagcaaggagcagccagcagcct

SEQ ID NO: 413348 - DNA, 120 bp, Artificial Sequence
  ENSG00000148840_12 (sequence is synthesized)
gtgtggaaggctatgccaggaggctgaggtcatcttctcgcgggcagtctactgtaggtacagaagtgacctctcaggtagacaacttgcagaaacagcctcaggaagaacttcaaaaag

SEQ ID NO: 413349 - DNA, 120 bp, Artificial Sequence
  ENSG00000148840_13 (sequence is synthesized)
agtctgggcctctccagggtaaggggaagccccgggcttgggctcgggcctgggcagctgccttggagaattctagccctaagaacttggagagaagtgctggacaaagtagtcctgcta

SEQ ID NO: 413350 - DNA, 120 bp, Artificial Sequence
  ENSG00000148840_14 (sequence is synthesized)
aagaaggccctctagacctctacccaaagctggctgacactatccaaaccaatcctataccaacccatctctcattggtcgactctgcccaagccagccccatgccagttgactctgttg

SEQ ID NO: 413351 - DNA, 120 bp, Artificial Sequence
  ENSG00000148840_15 (sequence is synthesized)
aagctgatcccactgcagttggccctgttctagctggccctgtacctgttgaccctgggttggttgaccttgcttcaaccagctcagaactggttgagcctctcccggctgagccagtgc

SEQ ID NO: 413352 - DNA, 120 bp, Artificial Sequence
  ENSG00000148840_16 (sequence is synthesized)
tgatcaacccagtcctggctgactcagcagcagttgaccctgcagtggttcccatctcagataacttgccaccagttgatgctgtcccgtctggcccagcaccagttgatctagcactgg

SEQ ID NO: 413353 - DNA, 120 bp, Artificial Sequence
  ENSG00000148840_17 (sequence is synthesized)
ttgaccctgttcctaatgacctgactccagttgacccagtgctagttaagtccagaccaactgatcccagacgtggtgcagtgtcatcagccctggggggttcagcaccccagctcctcg

SEQ ID NO: 413354 - DNA, 120 bp, Artificial Sequence
  ENSG00000148840_18 (sequence is synthesized)
tggagtcagagtccttggacccaccaaagaccatcatccctgaagtcaaagaggttgtggattctctgaaaattgaaagtggtaccagtgctacaacccatgaagccagacctcggcctc

SEQ ID NO: 413355 - DNA, 120 bp, Artificial Sequence
  ENSG00000148840_19 (sequence is synthesized)
tcagcttatctgagtaccggcgacgaaggcagcaacgccaagcagaaacagaagagagaagtccacagcccccaactgggaagtggcctagccttccagagactcccacagggctggcag

SEQ ID NO: 413356 - DNA, 120 bp, Artificial Sequence
  ENSG00000148840_20 (sequence is synthesized)
acatcccttgtcttgtcatcccaccagccccagccaagaagacagctctgcagagaagccctgaaacaccccttgagatttgccttgtgcctgtaggtcccagccctgcttctcctagtc

SEQ ID NO: 413357 - DNA, 120 bp, Artificial Sequence
  ENSG00000148840_21 (sequence is synthesized)
ctgagccacctgtaagcaaacctgtggcctcatctcccactgagcaggtgccatcccaggagatgccactgttggcgagaccttcccctcctgtgcagtctgtgtcccctgctgtgccca

SEQ ID NO: 413358 - DNA, 120 bp, Artificial Sequence
  ENSG00000148840_22 (sequence is synthesized)
gcatgccccccagtctgcccccacctcccttgcagcctcctagtcttccattgtctatggggccagtactacctgatccgtttactcactatgcccccttgccatcctggccttgttatc

SEQ ID NO: 413359 - DNA, 120 bp, Artificial Sequence
  ENSG00000148840_23 (sequence is synthesized)
ctcatgtgtccccttctggctatccttgcctgccccccccaccaacggtgcccctagtgtctggtactcctggtgcctatgccgtgcctcccacttgcagtgtgccttgggcaccccctc

SEQ ID NO: 413360 - DNA, 120 bp, Artificial Sequence
  ENSG00000148840_24 (sequence is synthesized)
ctgccccagtctcaccttacagttccacatgtacctatgggcccttgggatggggcccagggcctcaacatgctccattctggtctactgttcccccacctcctttgcctccagcctcca

SEQ ID NO: 413361 - DNA, 120 bp, Artificial Sequence
  ENSG00000148840_25 (sequence is synthesized)
ttgggagagctgttccccaacctaaaatggagtctaggggcactccagctggccctcctgaaaatgtacttcccttgtcgatggctcctcccctcagtcttgggctacctggccatggag

SEQ ID NO: 413362 - DNA, 120 bp, Artificial Sequence
  ENSG00000148840_26 (sequence is synthesized)
ctcctcagacagagcctaccaaggtggaggtcaagccagtgcctgcatctccccatccgaaacacaaggtgtctgccctggtgcaaagtccccagatgaaggctctagcatgtgtgtctg

SEQ ID NO: 413363 - DNA, 120 bp, Artificial Sequence
  ENSG00000148840_27 (sequence is synthesized)
ctgaaggtgtgactgttgaggagcctgcatcagagaggctaaagcctgagacccaagagaccaggcccagggagaagccccccttgcctgctaccaaggctgttcccacaccaaggcaga

SEQ ID NO: 413364 - DNA, 120 bp, Artificial Sequence
  ENSG00000148840_28 (sequence is synthesized)
gcactgtccccaagctgcctgctgtccacccagcccgtctaaggaagctgtccttcctgcctaccccacgtactcagggttctgaagatgtggtacaggctttcatcagtgagattggaa

SEQ ID NO: 413365 - DNA, 120 bp, Artificial Sequence
  ENSG00000148840_29 (sequence is synthesized)
ttgaggcatcggacctgtccagtctgctggagcagtttgagaaatcagaagccaaaaaggagtgtcctcctccggctcctgctgacagcttggctgtaggaaactcaggcggcgttgaca

SEQ ID NO: 413366 - DNA, 120 bp, Artificial Sequence
  ENSG00000148840_30 (sequence is synthesized)
ttccccaggagaagaggcccctagaccggttacaagccccagaactggccaacgtggcagggctcacccctccagctacccctccccaccagttatggaagcccctggctgctgtctcac

SEQ ID NO: 413367 - DNA, 120 bp, Artificial Sequence
  ENSG00000148840_31 (sequence is synthesized)
tgctggccaaagccaaatctcctaagtccaccgcccaggagggaaccctgaagcctgaaggagttacggaggccaaacatccagctgcagttcgcctccaagaaggggtccatggcccta

SEQ ID NO: 413368 - DNA, 120 bp, Artificial Sequence
  ENSG00000148840_32 (sequence is synthesized)
gtcgagtccatgtgggctctggggaccatgactattgtgtccggagcaggacccccccaaaaaagatgcctgccctagtcattccagaggtgggctcccgatggaatgtcaagcgccatc

SEQ ID NO: 413369 - DNA, 120 bp, Artificial Sequence
  ENSG00000148840_33 (sequence is synthesized)
aggacatcaccatcaaacctgtcttgtccttgggcccagctgcccctccgcccccatgcatagctgcctcccgggagccgcttgatcacaggactagcagtgagcaggcagatccctcag

SEQ ID NO: 413370 - DNA, 120 bp, Artificial Sequence
  ENSG00000148840_34 (sequence is synthesized)
caccctgccttgccccatccagcttgctgtcccctgaggcctcaccctgccggaatgacatgaacactaggactccccctgaaccctcagccaagcagcggtcaatgcgctgttaccgaa

SEQ ID NO: 413371 - DNA, 120 bp, Artificial Sequence
  ENSG00000148840_35 (sequence is synthesized)
aagcctgcaggtcagccagcccctcaagccagggctggcagggccgccgaggccgcaacagccgttctgtcagctctgggtccaaccggactagcgaagcatcttcctcatcctcatcat

SEQ ID NO: 413372 - DNA, 120 bp, Artificial Sequence
  ENSG00000148840_36 (sequence is synthesized)
cgtcttcctcatcccgatctcggtccaggtccctctcccccccacacaagaggtggcgaaggtccagctgtagttcctctggacgttctcgaagatgctcttcctcttcttcgtcatcat

SEQ ID NO: 413373 - DNA, 120 bp, Artificial Sequence
  ENSG00000148840_37 (sequence is synthesized)
cttcctcttcgtcttcctcatcctcatcatccagttctcgaagccgctcacgatccccatccccccgccggagaagtgacaggaggcggcggtacagctcttatcgttcacatgaccatt

SEQ ID NO: 413374 - DNA, 120 bp, Artificial Sequence
  ENSG00000148840_38 (sequence is synthesized)
accaaaggcaaagagtgctacaaaaggagcgtgcaatagaagaaagaagggtggtcttcattggaaagatacctggccgcatgactcgatcagagctgaaacagaggttctccgtttttg

SEQ ID NO: 413375 - DNA, 120 bp, Artificial Sequence
  ENSG00000148840_39 (sequence is synthesized)
gagagattgaggagtgcaccatccacttccgtgtccaaggggacaactacggcttcgtcacttatcgctatgctgaggaggcatttgcagccattgagagtggccacaagctgcggcagg

SEQ ID NO: 413376 - DNA, 120 bp, Artificial Sequence
  ENSG00000148840_40 (sequence is synthesized)
cagatgagcagccctttgatctctgctttgggggccgaaggcagttctgcaagaggagctattctgatcttgactccaaccgggaagactttgacccagcacctgtaaagagcaaatttg

SEQ ID NO: 413377 - DNA, 120 bp, Artificial Sequence
  ENSG00000148840_41 (sequence is synthesized)
attctcttgactttgacacattgttgaaacaggcccagaagaacctcaggaggtaaccttgggcccttccctgctatcctttttctcctttggaggtgcccaacctcctccacccccttc

SEQ ID NO: 413378 - DNA, 120 bp, Artificial Sequence
  ENSG00000148840_42 (sequence is synthesized)
ccctactctaggggagagagctgctagtgagatgactgttttataaagaaatggaaaaaagtgaaataaaaaatatgttgaatcagattttttaaaaggggtatttgtttttttataaca

SEQ ID NO: 413379 - DNA, 120 bp, Artificial Sequence
  ENSG00000148840_43 (sequence is synthesized)
ggtattgaaacaagttaacttgcattcctatgtaagataggaggggctgaggggatccccagtgtttggaacataagtcactatgcagactaataaacatcaactagagagaactcccaa

SEQ ID NO: 413380 - DNA, 120 bp, Artificial Sequence
  ENSG00000148840_44 (sequence is synthesized)
ggagaagtgagatgatttgggggcttcctgggacctgtgtactaagttgataggggctcgttttcaatcctgtgttgtgtgcctccacaggaattgaggcatcggacctgtccagtctgc

SEQ ID NO: 413381 - DNA, 120 bp, Artificial Sequence
  ENSG00000148840_45 (sequence is synthesized)
tggagcagtttgagaaatcagaagccaaaaaggagtgtcctcctccggctcctgctgacagcttggctgtaggaaactcagggtaagtatggagacatgagcgagttaccctacagctgt

SEQ ID NO: 413382 - DNA, 120 bp, Artificial Sequence
  ENSG00000148840_46 (sequence is synthesized)
tagtcagcagccggctgacactccaggactgtcaactggatgcctctgttgcagggacgctgtagtcagctctagagtctttccctgtttccccaccccttactctgcctatcactaccg

SEQ ID NO: 413383 - DNA, 120 bp, Artificial Sequence
  ENSG00000148840_47 (sequence is synthesized)
ttgggtggtgaggtgagaacggggcatgttcactgccctccagctgattccagtcgggctccaaatgtcctagaggtgccttttatctcctggcaagtcatacctttggggatttctttc

SEQ ID NO: 413384 - DNA, 120 bp, Artificial Sequence
  ENSG00000148840_48 (sequence is synthesized)
tttcatttaataacacttcaagtttgctcagtgctggtaatggtgtaacttaaagtggaggaagatgttaatggctaggagtcatttttcatgttcatgatcctccatcctgttctgcca

SEQ ID NO: 413385 - DNA, 120 bp, Artificial Sequence
  ENSG00000148840_49 (sequence is synthesized)
agcatgttcccctccacattgatttcaggttggtgtgagctgggcaggtgagactcgatgtgaaggaggtggggggtattcaaggtcatggccagcctgcctcttggaattgggcagggc

SEQ ID NO: 413386 - DNA, 120 bp, Artificial Sequence
  ENSG00000148840_50 (sequence is synthesized)
gaggcggcggtgagcatgtgttcagggagcgccatgcacctgggatgcaggtgcctaagagttgagtcttgaattgtcttatgtttggggggctgatgacaccctcttttgtcaggtaca

SEQ ID NO: 413387 - DNA, 120 bp, Artificial Sequence
  ENSG00000148841_0 (sequence is synthesized)
gtgcgctcttcaggacagcagaggtcggttggaggtctgcattctctgccgacttgggccccaacttccccatcaggtcactgctccctcctctgaggtctggacaaaggacaaggctgt

SEQ ID NO: 413388 - DNA, 120 bp, Artificial Sequence
  ENSG00000148841_1 (sequence is synthesized)
agggacctagactgtcctagacggggaggacatctatcctcagtggtctttccagcagtttgtttggagctgctcatcctgatcttttggctgactctggcagagggaaagtcagatttg

SEQ ID NO: 413389 - DNA, 120 bp, Artificial Sequence
  ENSG00000148841_2 (sequence is synthesized)
aggcctgagctctaacaggcatccagagaggaaggaagggcccaccccgtgacatcagtgaaacggaagcaccctgcaggtgacatcactgttgctcagggcaacgcctccaccctaagg

SEQ ID NO: 413390 - DNA, 120 bp, Artificial Sequence
  ENSG00000148841_3 (sequence is synthesized)
cggacggggaggtgaaaaatcggcctcaagtgtgagacgcatgttgaagggaagggacatagaaggtgtaacgttcacaggaaagctccaaccatggccatggggctcttccgcgtgtgt

SEQ ID NO: 413391 - DNA, 120 bp, Artificial Sequence
  ENSG00000148841_4 (sequence is synthesized)
ctggtggtggtgacggccatcatcaaccacccgctgctgttcccgcgggagaacgccacagtccccgagaacgaggaggagatcatccgcaagatgcaggcgcaccaggagaagctgcag

SEQ ID NO: 413392 - DNA, 120 bp, Artificial Sequence
  ENSG00000148841_5 (sequence is synthesized)
ctggagcagttgcgcctggaggaggaggtggctcggctggcggccgaaaaggaggcactggagcaggtggcggaggagggcaggcagcagaacgagacacgcgtggcctgggacctctgg

SEQ ID NO: 413393 - DNA, 120 bp, Artificial Sequence
  ENSG00000148841_6 (sequence is synthesized)
agcaccctctgcatgatcctcttcctgatgatcgaggtgtggcggcaggaccaccaggaggggccctcacctgagtgcctgggcggtgaggaggatgagctgcctgggctggggggcgcc

SEQ ID NO: 413394 - DNA, 120 bp, Artificial Sequence
  ENSG00000148841_7 (sequence is synthesized)
cccttgcagggcctcaccctgcccaacaaggccacgcttggccacttttatgagcgctgcatccggggggccacggccgatgcagcccgtacccgggagttcctggaaggcttcgtggat

SEQ ID NO: 413395 - DNA, 120 bp, Artificial Sequence
  ENSG00000148841_8 (sequence is synthesized)
gacttgctggaagccctgaggagcctctgcaaccgggacaccgacatggaggtggaggacttcattggcgtggacagcatgtacgagaactggcaggtggacaggccactgctgtgccac

SEQ ID NO: 413396 - DNA, 120 bp, Artificial Sequence
  ENSG00000148841_9 (sequence is synthesized)
cttttcgtgcccttcacaccccccgagccctaccgcttccacccagagctctggtgctccggccgctcagtgcccctggatcgccagggctacggccagatcaaggtggtccgcgccgat

SEQ ID NO: 413397 - DNA, 120 bp, Artificial Sequence
  ENSG00000148841_10 (sequence is synthesized)
ggggacacattgagctgcatctgcggcaagaccaagctcggggaagacatgctgtgtctcctgcacggcaggaacagcatggcgcctccctgcggcgacatggagaacctgctgtgtgcc

SEQ ID NO: 413398 - DNA, 120 bp, Artificial Sequence
  ENSG00000148841_11 (sequence is synthesized)
acagattccctgtacctggacacgatgcaggtcatgaagtggttccagacggccctcaccagagcctggaagggcatcgcccacaagtacgagttcgacctggcctttggccagctggac

SEQ ID NO: 413399 - DNA, 120 bp, Artificial Sequence
  ENSG00000148841_12 (sequence is synthesized)
agcccggggtccctgaagatcaagttccgttcagggaagttcatgcccttcaacctgattcctgtgatccagtgtgatgactcggacctgtactttgtctcccaccttcccagggagccc

SEQ ID NO: 413400 - DNA, 120 bp, Artificial Sequence
  ENSG00000148841_13 (sequence is synthesized)
tctgagggcaccccagcctccagcacagactggctcctgtcctttgctgtctatgagcgacacttcctcaggacgacactaaaggcactgcccgagggcgcctgccacctcagctgcctg

SEQ ID NO: 413401 - DNA, 120 bp, Artificial Sequence
  ENSG00000148841_14 (sequence is synthesized)
cagatagcatccttcctgctctccaagcagagccgcctgaccggtcccagcgggctcagcagctaccacctgaagacggccctactgcacctcctactcctccggcaggccgccgactgg

SEQ ID NO: 413402 - DNA, 120 bp, Artificial Sequence
  ENSG00000148841_15 (sequence is synthesized)
aaggcggggcagctggacgctcgtctgcacgagttgctgtgcttcctggagaagagcttgctccagaagaagctccaccacttcttcatcggcaaccgcaaggtgcctgaggccatggga

SEQ ID NO: 413403 - DNA, 120 bp, Artificial Sequence
  ENSG00000148841_16 (sequence is synthesized)
ctccctgaggccgtgctcagggccgagcccctcaacctcttccggcccttcgtcctgcagcgaagcctttaccgtaagacactggactccttctatgagatgctcaagaatgccccagcg

SEQ ID NO: 413404 - DNA, 120 bp, Artificial Sequence
  ENSG00000148841_17 (sequence is synthesized)
ctcattagcgagtattccctacatgtcccctcagaccagcctaccccaaaaagctgacgtcttttacagaatgtgggatcctcgagctaagatgagggcatccctcacgttcacacccct

SEQ ID NO: 413405 - DNA, 120 bp, Artificial Sequence
  ENSG00000148841_18 (sequence is synthesized)
ggtggcatctgccagccctgttctggggacaaggcgggctttcgtgggagccgtgctcagcctgccaggaagccaagccctacagtgcagaggaaacagaatttcaacgggaagctggtt

SEQ ID NO: 413406 - DNA, 120 bp, Artificial Sequence
  ENSG00000148841_19 (sequence is synthesized)
tgcttcataccattgggatctgctggtaaagctgttatttgggtttagggactgatcccttgcagtttacttctggatcaccatgaatggccaagatggtggcagaacacgctgtggacc

SEQ ID NO: 413407 - DNA, 120 bp, Artificial Sequence
  ENSG00000148841_20 (sequence is synthesized)
ctgagttagagacaatgcaaatgttggattgggtgtaattctttttgaatcccagatccagtctgtacttgaatatgagcagaggatctacaagaatgctgacagggaaccgtgttaaga

SEQ ID NO: 413408 - DNA, 120 bp, Artificial Sequence
  ENSG00000148841_21 (sequence is synthesized)
cccagcacccctattcccaggagcttctggcctgaccatctgcagccaaagcactaacagggacagatatgggaatgtccacctttgatccgcatcctgcacaatagtggtcccaccatg

SEQ ID NO: 413409 - DNA, 120 bp, Artificial Sequence
  ENSG00000148841_22 (sequence is synthesized)
gctgccacttttttatactatttggagaaaagaccttgtataaattcgaggcccaaatgactaacgtctctgtcacacggaaatgggtacttggtggcatagagaaacacaattagccac

SEQ ID NO: 413410 - DNA, 120 bp, Artificial Sequence
  ENSG00000148841_23 (sequence is synthesized)
tttttcagctacacttctcactcagctgcaccctacacttctcactcaggtgcacccccttctgctgtcctttccccaacgtactgggtcccgagcgtggtgggtatttgccacactggg

SEQ ID NO: 413411 - DNA, 120 bp, Artificial Sequence
  ENSG00000148841_24 (sequence is synthesized)
tgccagctcagcagccccccacctctctttattctctccaaagctggtctttctgactatcattgtggtagggggaggacagatgctaaaggtggaagctgacctggagaaagagacaca

SEQ ID NO: 413412 - DNA, 120 bp, Artificial Sequence
  ENSG00000148841_25 (sequence is synthesized)
cggggtgactgtggcaaaggacagctggaaaagaaactctatcacttcttcattggcaaccacaaggcacctgaggccatggcactcccagaggctgtgcgcagagccaagcctctcaac

SEQ ID NO: 413413 - DNA, 120 bp, Artificial Sequence
  ENSG00000148841_26 (sequence is synthesized)
ctcttctggccctgcgtcctgcagcgaagtctctgctgtaagacagtagactccttcgatgaggtgctcaaaaatgctacccggggtggtggtgtctggcttgcagtctggcccagttca

SEQ ID NO: 413414 - DNA, 120 bp, Artificial Sequence
  ENSG00000148841_27 (sequence is synthesized)
gagaaagttgcagagatcaggggccaaggatgtcatagccccaggttgtcctcagggtcccaatcctagggcagggtgtgcatggaagcaagaactatggaaacctagctccagtctgca

SEQ ID NO: 413415 - DNA, 120 bp, Artificial Sequence
  ENSG00000148841_28 (sequence is synthesized)
gatgacccagacccaaagagcctggcagaagctctgtggttggagctgggctccgtctccaggtctggttcagggggatcaggaaggctcttttccacctgtggcttcactggccctttg

SEQ ID NO: 413416 - DNA, 120 bp, Artificial Sequence
  ENSG00000148841_29 (sequence is synthesized)
agatttcctatctcaccgttacttcagttacccttgcagggggccagggagtcaagaatataccgtgttcctccagggtttaagccggccatgccttcccgagagcataaccaacttgac

SEQ ID NO: 413417 - DNA, 120 bp, Artificial Sequence
  ENSG00000148841_30 (sequence is synthesized)
aggggtgcccagttaccccacaaactgaaggaaggagatccttcccccatccccaggagtgctctcaaccagcctcagaaagcttgagaagatggaccctttgcccaccagggttaattc

SEQ ID NO: 413418 - DNA, 120 bp, Artificial Sequence
  ENSG00000148841_31 (sequence is synthesized)
ctggtggggcagctcggctgtgatcagggcaaccaaacctataggaagccttccagtgtgagctggaattagactgaacatgtgcttgggcctgcctctccctagacgcagttgcggggc

SEQ ID NO: 413419 - DNA, 120 bp, Artificial Sequence
  ENSG00000148841_32 (sequence is synthesized)
actccagggaatgaaccagctcaagtgtgtccctaacagcagcctggagctacccccaatccctcacagcctgaccctcctcattccatcagatgcatttgtagaatcggggcaaatttc

SEQ ID NO: 413420 - DNA, 120 bp, Artificial Sequence
  ENSG00000148841_33 (sequence is synthesized)
cttatttatttatggcccatgcctttccccctcttcatcctgatcccgttttgctttgaagagaccccagtaaccaaaaaacagcctccagaagccaaaaccatgcctggatctcccata

SEQ ID NO: 413421 - DNA, 120 bp, Artificial Sequence
  ENSG00000148841_34 (sequence is synthesized)
gcttctcctttgcttccaggagaaagttcactgaaaaaaaaatatcttctggcttcttgtgtgtacagagacaacagaactcggtggggaaacgggaatcttttctgcaccaaagctgct

SEQ ID NO: 413422 - DNA, 120 bp, Artificial Sequence
  ENSG00000148841_35 (sequence is synthesized)
tctaaagcagaaagcagtggggctcttggtgtttcatgctgccttatttatattaaaggaagaattaaatcttgcaaggagtagaaatggtcactgtttgtttttaacttcaggaaatct

SEQ ID NO: 413423 - DNA, 120 bp, Artificial Sequence
  ENSG00000148841_36 (sequence is synthesized)
gtgaggctcccagggcagagttggggacaggggggtggatttcctattgacaaagcagaagctttcactccctttttattcttacactttcaggagactttaaaaaataacaaaacagaa

SEQ ID NO: 413424 - DNA, 120 bp, Artificial Sequence
  ENSG00000148841_37 (sequence is synthesized)
catttctaccctgtctttgaggcaacttgtgtgctgcccgcagggctccagaaagggcctttgaaagctggctgtagggtggattccagcctaagaccttatttcacagagctaatgtca

SEQ ID NO: 413425 - DNA, 120 bp, Artificial Sequence
  ENSG00000148841_38 (sequence is synthesized)
gcgagaaatataggagctggaactaacaggaagcttttgggttttaaagaaagagattgtattttaaatagaggattttgagtcctctaggggactttggcctttccactaaggacaacc

SEQ ID NO: 413426 - DNA, 120 bp, Artificial Sequence
  ENSG00000148841_39 (sequence is synthesized)
ctgccctctttccccagagtctctttcccaaggatgcttgactttccccagcaactgctcacttgctttgcaaaataacaagggtgaaatgaatagagttggcccctaggccaagaggct

SEQ ID NO: 413427 - DNA, 120 bp, Artificial Sequence
  ENSG00000148841_40 (sequence is synthesized)
ggttatgttggggaagggccttatatcctcaaaagctctagcccctctgcatgcctggctgaagcacagcccccgttgagaacctgggggtggagctctggttcatcatcaagggtgtca

SEQ ID NO: 413428 - DNA, 120 bp, Artificial Sequence
  ENSG00000148841_41 (sequence is synthesized)
tccgaatcacccagacaacctggtccattgccccgaccccgccttgaacctacatggtgctcagaatccagtctggagtggtcaggctaggctcgatttttaaagatttcccccaagtga

SEQ ID NO: 413429 - DNA, 120 bp, Artificial Sequence
  ENSG00000148841_42 (sequence is synthesized)
ctgatggtacccctagctgaggaagccctctcactttctttcttaatggaaagttaaagaaaacccaagtggactactttccctacagatctattggaagatagatagacctgggaaaag

SEQ ID NO: 413430 - DNA, 120 bp, Artificial Sequence
  ENSG00000148841_43 (sequence is synthesized)
ccaatgagcctgcttggaatctgtggtctaagtggcatcagctacaccacaagcttctcatgagggcacccacattcacgctagtgccgtaagcctcagagagagggtgggaaggcataa

SEQ ID NO: 413431 - DNA, 120 bp, Artificial Sequence
  ENSG00000148841_44 (sequence is synthesized)
gatggtgagcccttctcccaagcaggtcatgaatagtccacaagcatttgtcaggagcctaacgtgcatgagacattgtggaagatgggaaaatgaataggaccaagcctgttccctagg

SEQ ID NO: 413432 - DNA, 120 bp, Artificial Sequence
  ENSG00000148841_45 (sequence is synthesized)
agaggcagcagaaggtggccttccaagtactgagctattccaagtgtgaccctgcactacacatacgggtgtcacctgggggcagcttcctgggccgtgtcacagactccagtgggatcc

SEQ ID NO: 413433 - DNA, 120 bp, Artificial Sequence
  ENSG00000148841_46 (sequence is synthesized)
tgagaagttaggtagaagaatctgcacttcaccaagttccccacctgattctggatgtccaagaaccactggtacctgggctgattagggaaggcctcatggtggggcgctgccagatag

SEQ ID NO: 413434 - DNA, 120 bp, Artificial Sequence
  ENSG00000148841_47 (sequence is synthesized)
agactctgaaaaatgaccaggactgtggccaggaaagacattccagccagaagcatggagtgagggtgggaagcacctactgtatggcaggcaccgttccgcacacacatttgttaatgc

SEQ ID NO: 413435 - DNA, 120 bp, Artificial Sequence
  ENSG00000148841_48 (sequence is synthesized)
acacagttccatgtcagtcctatgatgtaggtgctattcttatcctccctgctttccagataaggaaacaggcactgaaggggcaactgacttacctactgtcacagtggtaagtagcac

SEQ ID NO: 413436 - DNA, 120 bp, Artificial Sequence
  ENSG00000148841_49 (sequence is synthesized)
agcccagattccaacccaggcagtcctggtgtacatgttggcatatactgagaagtcgtagcaaatgaggttgaaaagataagagtggggctgaaccatgcaaagccttgaatgctaata

SEQ ID NO: 413437 - DNA, 120 bp, Artificial Sequence
  ENSG00000148841_50 (sequence is synthesized)
caaggtaaatttggacctcacaacaagcagaggtgggccattggcgggttttgagtgagacagtaacttgattcacccccaaactaaggagtccttatctatgtgatcagtgccatccat

SEQ ID NO: 413438 - DNA, 120 bp, Artificial Sequence
  ENSG00000148841_51 (sequence is synthesized)
gtcctgtgctgtagggtacatggccggcttcccgagcagggttggtggcagctggcagtggttggtgaatgtccaggaagtcttaactcaagccaccccaaggctgtgattcagaacatt

SEQ ID NO: 413439 - DNA, 120 bp, Artificial Sequence
  ENSG00000148841_52 (sequence is synthesized)
ttcgtggtccgtctcatctccacctcacgggacagagctggaaggctgtttggtttggccagcgaccgaaagcagagggagccaagagtcacagagtgaagggcaatgtgtgccttcaac

SEQ ID NO: 413440 - DNA, 120 bp, Artificial Sequence
  ENSG00000148841_53 (sequence is synthesized)
agggccctccctctccgccccactctgccttgccccacccctgtccctgggaagggcatcttttagagttaacttttctcattgccatccaaaaatagcttgcttgtttaactagtttgt

SEQ ID NO: 413441 - DNA, 120 bp, Artificial Sequence
  ENSG00000148841_54 (sequence is synthesized)
tgtttaaaaaataaacataaaagcaataatacagtcataattttaaaattcaagtactaacaggaaaattaagtaacagactaacggtcccacttctgacttcttagtccactccccaga

SEQ ID NO: 413442 - DNA, 120 bp, Artificial Sequence
  ENSG00000148841_55 (sequence is synthesized)
gataaccaatatgaagtttttggtgtatccttccaaaatttttctgtgtatgtgtcacatgtatgtatatatatatgcatccttttagtccttttttacataaatggcatcataccgact

SEQ ID NO: 413443 - DNA, 120 bp, Artificial Sequence
  ENSG00000148841_56 (sequence is synthesized)
aggaaatgagtaactctgaagttcagtagagccggccgctgcaggccagaaggtgggagccagcgggggcatcgccgcccgcgcccctctaagtgccgggccgcaagctccaccgcagcc

SEQ ID NO: 413444 - DNA, 120 bp, Artificial Sequence
  ENSG00000148841_57 (sequence is synthesized)
gcctgcaagcagcggcgcctcggccctcgacctgcgcgcaaagcctgtgctggagccgtcctcccgcggcggggaccgggaccggggacccaagccaatcgaaagctccaaccatggcca

SEQ ID NO: 413445 - DNA, 120 bp, Artificial Sequence
  ENSG00000148841_58 (sequence is synthesized)
agctcccagaagagggtgtacgaatcagaatgctggtttattaatttgcaaggagacttcgcaaacatcacacagactgaatgtcgtctcttccctgcgtcctagacaagccatatggga

SEQ ID NO: 413446 - DNA, 120 bp, Artificial Sequence
  ENSG00000148842_0 (sequence is synthesized)
ccctccctctttccctcccgcgagcctcggggttcctcagctggctgaggtggagtcagtgtcagtcagggaggcgaactgctgagcactggccgcggacgctccgttgcagtctcgccc

SEQ ID NO: 413447 - DNA, 120 bp, Artificial Sequence
  ENSG00000148842_1 (sequence is synthesized)
aggggccggtacctgcgctcgcgccgccgggttgaaaggatgaagccgcagctggagcagccaccctatgattggctgtggcgcttgtgaacccaaagtaaagatggcgggcgggcaggc

SEQ ID NO: 413448 - DNA, 120 bp, Artificial Sequence
  ENSG00000148842_2 (sequence is synthesized)
agccgccgcactgcccacttggaagatggcggcgcgccgcagcctcagcgctcgcggccgggggatcctgcaggcggctgcggggcggctgctgccgctgctcctgctgagctgctgctg

SEQ ID NO: 413449 - DNA, 120 bp, Artificial Sequence
  ENSG00000148842_3 (sequence is synthesized)
cggtgcgggcggctgcgcagcggtgggcgagaatgaggagacggtgatcatcgggctgcgactggaggacacgaacgacgtgtcgttcatggaagggggggcgctgcgggtgagcgaacg

SEQ ID NO: 413450 - DNA, 120 bp, Artificial Sequence
  ENSG00000148842_4 (sequence is synthesized)
gacccgggtcaagctgcgggtgtacgggcagaacatcaataacgagacgtggtcccgcatcgccttcaccgagcacgagcggcggcgccacagcccgggggagcgcgggctggggggccc

SEQ ID NO: 413451 - DNA, 120 bp, Artificial Sequence
  ENSG00000148842_5 (sequence is synthesized)
cgcgccgccagagccggacagcggcccccagcgatgcggcatccgcacctcagacatcatcatcttgccccacatcattctcaaccgccgcacctcgggcatcatcgagatcgagatcaa

SEQ ID NO: 413452 - DNA, 120 bp, Artificial Sequence
  ENSG00000148842_6 (sequence is synthesized)
accgctacgcaagatggagaagagcaagtcctattacctgtgcacgtcgctctccacgcccgccctgggcgccggcggctcggggtccacgggtggcgccgtcgggggcaagggtggctc

SEQ ID NO: 413453 - DNA, 120 bp, Artificial Sequence
  ENSG00000148842_7 (sequence is synthesized)
gggggtggccgggctcccgccgcccccgtgggccgagaccacctggatttaccacgacggcgaggacaccaagatgatcgtaggcgaagagaagaagttcctgctgcccttctggctgca

SEQ ID NO: 413454 - DNA, 120 bp, Artificial Sequence
  ENSG00000148842_8 (sequence is synthesized)
ggtgatcttcatttcgctgctgctgtgcctgtcgggcatgttcagcggcctcaacctggggctcatggccctggacccgatggagctgcgcatcgtgcagaactgcggcacggagaagga

SEQ ID NO: 413455 - DNA, 120 bp, Artificial Sequence
  ENSG00000148842_9 (sequence is synthesized)
gaagaattacgccaagcgcatcgagccggtgcgcaggcagggcaactacctgctgtgctcactgctgctgggcaacgtgctggtcaacaccacgctcaccatcctgctcgacgacatcgc

SEQ ID NO: 413456 - DNA, 120 bp, Artificial Sequence
  ENSG00000148842_10 (sequence is synthesized)
cggctcgggcctcgtggccgtggtagtctccaccatcggtatcgtcatcttcggagagatcgtgccccaggccatctgctcccggcatggcctggctgtgggggccaacaccatcttcct

SEQ ID NO: 413457 - DNA, 120 bp, Artificial Sequence
  ENSG00000148842_11 (sequence is synthesized)
caccaagtttttcatgatgatgaccttccccgcttcctacccggtcagcaagctgctggactgcgtcctgggccaggagataggcaccgtctataaccgggaaaaactgctggagatgct

SEQ ID NO: 413458 - DNA, 120 bp, Artificial Sequence
  ENSG00000148842_12 (sequence is synthesized)
ccgggtcaccgatccctacaacgacctcgttaaggaggagctgaacatcatccaaggggcgctggagctccgcaccaagacggtggaggacgtgatgaccccactccgggactgcttcat

SEQ ID NO: 413459 - DNA, 120 bp, Artificial Sequence
  ENSG00000148842_13 (sequence is synthesized)
gatcaccggcgaagccatcctggacttcaacaccatgtctgagatcatggagagcggctacacccgcattccagtgtttgaaggggagcgctccaatatcgtggacctgctgtttgtcaa

SEQ ID NO: 413460 - DNA, 120 bp, Artificial Sequence
  ENSG00000148842_14 (sequence is synthesized)
agacttggccttcgtggatcccgatgactgtacccccctgaaaaccatcaccaaattttataaccaccccttgcactttgttttcaatgacaccaagttggacgctatgctggaagaatt

SEQ ID NO: 413461 - DNA, 120 bp, Artificial Sequence
  ENSG00000148842_15 (sequence is synthesized)
taagaaaggtaaatctcacctggctatcgtgcagcgggtaaacaatgagggagaaggggatccattttatgaagttctgggaatcgtcaccttagaagatgtgattgaagaaatcatcaa

SEQ ID NO: 413462 - DNA, 120 bp, Artificial Sequence
  ENSG00000148842_16 (sequence is synthesized)
atctgagattcttgatgaaacagatttatacactgacaacagaacgaaaaagaaagtggctcaccgggaacgaaagcaagatttttctgcctttaagcagacagacagtgagatgaaggt

SEQ ID NO: 413463 - DNA, 120 bp, Artificial Sequence
  ENSG00000148842_17 (sequence is synthesized)
taaaatatcaccacagctcctcctggccatgcaccgtttcctagcaacagaagtagaagcatttagcccatcccagatgtcagagaagatccttctaaggctgctaaagcaccccaatgt

SEQ ID NO: 413464 - DNA, 120 bp, Artificial Sequence
  ENSG00000148842_18 (sequence is synthesized)
catccaggaactgaaatatgatgagaagaacaagaaagcccccgaatactacctctaccagcgcaacaagccagtagactacttcgttctcattctgcaggggaaagtggaagttgaagc

SEQ ID NO: 413465 - DNA, 120 bp, Artificial Sequence
  ENSG00000148842_19 (sequence is synthesized)
tgggaaagaaggtatgaagtttgaagcgagcgccttctcatactatggcgtgatggccctgacagcctctccagttcctttgtccctgtctcgtacctttgttgtcagcagaacagagtt

SEQ ID NO: 413466 - DNA, 120 bp, Artificial Sequence
  ENSG00000148842_20 (sequence is synthesized)
gttagcagcaggttctccaggtgaaaataagtcccctcctcgcccatgtggcttgaatcactcagactctctcagtcgaagcgaccggattgacgccgtcacaccaacactggggagcag

SEQ ID NO: 413467 - DNA, 120 bp, Artificial Sequence
  ENSG00000148842_21 (sequence is synthesized)
caataaccagctcaattcttcgctcctccaagtctacatccccgattactcggtgcgagccctttcggatctgcagtttgttaagatctcaagacagcaataccaaaatgccttgatggc

SEQ ID NO: 413468 - DNA, 120 bp, Artificial Sequence
  ENSG00000148842_22 (sequence is synthesized)
atcccggatggacaaaaccccccagtcttcagacagtgaaaacactaaaatcgaattgactcttacggagctgcatgacgggttgccagacgagacagccaacctgctcaacgaacagaa

SEQ ID NO: 413469 - DNA, 120 bp, Artificial Sequence
  ENSG00000148842_23 (sequence is synthesized)
ctgtgtgacgcacagtaaggccaaccacagcctgcacaacgaaggcgccatctaggccgcgctggctgcacccgcccaggcccgcacccgcccagtcccgagggcccggccctgtctgcc

SEQ ID NO: 413470 - DNA, 120 bp, Artificial Sequence
  ENSG00000148842_24 (sequence is synthesized)
catgacttcactggtgtgagcttgtccgccatgctgtaccctgcaacatcctgagaccaaagaccttgtgcccttcccaggagccgcggaggaggacagtgagggaggaatggaaacgag

SEQ ID NO: 413471 - DNA, 120 bp, Artificial Sequence
  ENSG00000148842_25 (sequence is synthesized)
agatgtgaagttggcagccggggcatggcgttcaagattttggagatgaactgattccgcccaaatagaatcatgtttattttttcagctctcccttttatcattattcacactcctctg

SEQ ID NO: 413472 - DNA, 120 bp, Artificial Sequence
  ENSG00000148842_26 (sequence is synthesized)
ccctcgatttgcatgaagttgaaaattgttgcgatttattttttcaagagatcatgtttttaaagtgtcttttgcagagttttaagttgttctgtctgaactctgctgtgatcccatgat

SEQ ID NO: 413473 - DNA, 120 bp, Artificial Sequence
  ENSG00000148842_27 (sequence is synthesized)
gtgaccctgatgggctggacttgcccctccggtagccttccttggccctcccagcgaggggcacccttcctctgtgccccagtgggcatcaccgtcgatctcgctggctgaatgaagaag

SEQ ID NO: 413474 - DNA, 120 bp, Artificial Sequence
  ENSG00000148842_28 (sequence is synthesized)
accgtgttactgcagaacctgccaagtctgtcatcactgtggggtgtagcctgcctcagagggacctgcaatcacctctctgagctcagtggtattttgagaatttaatgtttaactgta

SEQ ID NO: 413475 - DNA, 120 bp, Artificial Sequence
  ENSG00000148842_29 (sequence is synthesized)
cccctttccctcaggaagatttaacatttgcttgggaatgtgattttgctcccaccctaaggaatttttatcaccaaaatgaatgttaatgaatttaaaacccatggtttatcattggca

SEQ ID NO: 413476 - DNA, 120 bp, Artificial Sequence
  ENSG00000148842_30 (sequence is synthesized)
agaggcaagttgacttcatcctgtcattccagcctggggtctgccagccagccctcctccccgacccagcgcctaagctcacagagtgtcgtcgcccacctccctggtccttgctcttgt

SEQ ID NO: 413477 - DNA, 120 bp, Artificial Sequence
  ENSG00000148842_31 (sequence is synthesized)
taacccaagatgctgctacacagatgccaaatggaaatcttccacagggctttttcagtaaacacgtgatgtggagtgcaagctcctccccttcccactagaacatactttaacagaaaa

SEQ ID NO: 413478 - DNA, 120 bp, Artificial Sequence
  ENSG00000148842_32 (sequence is synthesized)
cgagtcggaccttctagctgcactctgtactgtgtgccgagaaggcatttctagacccgtgtttttaaaggagggaactttggggattgccagcccctgctcctcctcccagggagccaa

SEQ ID NO: 413479 - DNA, 120 bp, Artificial Sequence
  ENSG00000148842_33 (sequence is synthesized)
ctgtccctcctcccctgtccctgggcccatggggcccggcagtggctgtgtcccctgcctgagggctctgtgcctcctgcctcagatgcggcctgtgccagagaggctgcctgtacagcc

SEQ ID NO: 413480 - DNA, 120 bp, Artificial Sequence
  ENSG00000148842_34 (sequence is synthesized)
agggtcagtttggccccaaacagggattcagaaaccaaatgtgtgttgtggccattttatgtgtgtctccgtcttattttaataccaaattcatcatgtagtgaaattatgtcaggaggt

SEQ ID NO: 413481 - DNA, 120 bp, Artificial Sequence
  ENSG00000148842_35 (sequence is synthesized)
atatgagtgactgaattcttaactatagcttatctgtgttttgttagcccgagggatatgtgcaggttgttggcgctattcatgcactgaaatgaaatcatactgaccagtgtacacaca

SEQ ID NO: 413482 - DNA, 120 bp, Artificial Sequence
  ENSG00000148842_36 (sequence is synthesized)
agattatcagtgcccgccgcatccatcactaggaaaggagagagcgttttctgtttaggctcactgcgcaaagggaggccttggctaagtggcagttttcttctccctactccaggtagg

SEQ ID NO: 413483 - DNA, 120 bp, Artificial Sequence
  ENSG00000148842_37 (sequence is synthesized)
aagtctgttcagccacggctgggctgtgtgcggggcagggagcgtggctgaggagcagacagcagcgggccgggctggctgcctggtgagcagtttggtgcctcgggtgttgtgcatgcc

SEQ ID NO: 413484 - DNA, 120 bp, Artificial Sequence
  ENSG00000148842_38 (sequence is synthesized)
cggctcagtatttcctctgggatgccagtcctggagtgtcttcctcagaaggtgccgtgtcccttagtggggggaagtactgatctcacttggtgtagagggtcacagggaccccccgag

SEQ ID NO: 413485 - DNA, 120 bp, Artificial Sequence
  ENSG00000148842_39 (sequence is synthesized)
ggtgctgagtggcctgctactggcacgcaacctgcccccgtgggatgaagccccaccgcgtagcttgaccttagaggggaccccactctaagcatccttttttttaaacagagccatcta

SEQ ID NO: 413486 - DNA, 120 bp, Artificial Sequence
  ENSG00000148842_40 (sequence is synthesized)
gatacaaaagtcagtttcttaagatgcctctcactgagcacaacaccagtgtgatgagtgtataaagatgaggggtccttgcaacaaagcaaagcgtagcccatgctggaagagggcatc

SEQ ID NO: 413487 - DNA, 120 bp, Artificial Sequence
  ENSG00000148842_41 (sequence is synthesized)
tatccccctcttcgggtctgcgcagtgctggccttccctgagctgtggggagccaagcctgcctagcccagcttctctggcctcaggaactctgccctgtcaacctatctgggctcacgt

SEQ ID NO: 413488 - DNA, 120 bp, Artificial Sequence
  ENSG00000148842_42 (sequence is synthesized)
ctgcttctccacacacagtctctcggggatgccttgctactgggagagcctctggaatcagagctagtgtgttggtgcccttttcagagctctgctgttcctttataaatcctaaagaac

SEQ ID NO: 413489 - DNA, 120 bp, Artificial Sequence
  ENSG00000148842_43 (sequence is synthesized)
tgagtctggggagaggagaggggatgccagctgctgcctctgacttcagggagaagcagacttcttaatactgtcttacgtgctcggtgtgatggcttcttgcaaattattctcttataa

SEQ ID NO: 413490 - DNA, 120 bp, Artificial Sequence
  ENSG00000148842_44 (sequence is synthesized)
aagagctcggcaggagtggcatcagtgaggctcccaaaggatgaaattttagccgccaagttcgtattcattttctgttattctttaccttctgttagtcacactattttataacattag

SEQ ID NO: 413491 - DNA, 120 bp, Artificial Sequence
  ENSG00000148842_45 (sequence is synthesized)
ggaatctaaaataattcctgtcaggtccctgaaggaatgaaggctaacatctcctttggggagagcttaggacccttcaaacaacactcatgtctgagcggccagattcctcctccaggc

SEQ ID NO: 413492 - DNA, 120 bp, Artificial Sequence
  ENSG00000148842_46 (sequence is synthesized)
cccattttccctcaggaaaccaacctctcagatggttggaggagaaacactgggctgttgcttctttggggcagcaggagaatgactttggcttggaaggcctctgccattcatctctac

SEQ ID NO: 413493 - DNA, 120 bp, Artificial Sequence
  ENSG00000148842_47 (sequence is synthesized)
aaagccagtggggtccggcagagaaagaccgtggaatagctgcggtctcgatgtggctgctctttggcacctccgctggactgccctcccgcggcggtgaccttttcaagtgtggaaggg

SEQ ID NO: 413494 - DNA, 120 bp, Artificial Sequence
  ENSG00000148842_48 (sequence is synthesized)
agtgggtcgagtggaccagatgcagacccctgagttctggatactgatgggaggcctcaccctcctttacggggcctctctgggtgggacagagcctcacctgctcctgagcagccactg

SEQ ID NO: 413495 - DNA, 120 bp, Artificial Sequence
  ENSG00000148842_49 (sequence is synthesized)
gtgccccacggttcctctgaaactaaatccctagcatccagatagtcctgggacactctgcctgctctgtaaatgaggagggcttttctcctgctgtttggaggttccgtcccttcactg

SEQ ID NO: 413496 - DNA, 120 bp, Artificial Sequence
  ENSG00000148842_50 (sequence is synthesized)
cttgtcccatatgcgtcaggcaaattcaaaatcatacatttaaactcttaggaaaacaaaatcttaagacttacacagatatcggggtgctaatcaactggcttaaatcttgattcttac

SEQ ID NO: 413497 - DNA, 120 bp, Artificial Sequence
  ENSG00000148842_51 (sequence is synthesized)
ataatttgaacttgaaaggttacattgaactctgttctttcctccctcctcacctcactccctgcagggagttcaatgccatgttgaagtggttggcatccccaagtgggagggagtggg

SEQ ID NO: 413498 - DNA, 120 bp, Artificial Sequence
  ENSG00000148842_52 (sequence is synthesized)
gcatcttaccatcttctaatgtgacttcaaggaacagtgcaaatgttgaatgcagagcttcacactaatacggaacagtaactgtgagtatatttacctgtgctgtcgtcagcactgtac

SEQ ID NO: 413499 - DNA, 120 bp, Artificial Sequence
  ENSG00000148842_53 (sequence is synthesized)
actaaaggaccagcttttccaagcctaggaaaataatggtagatacaaatagaaatacattttccctaggaaatagagcaataggaatttgagctaagcaggtaccatgaacttctgccc

SEQ ID NO: 413500 - DNA, 120 bp, Artificial Sequence
  ENSG00000148842_54 (sequence is synthesized)
tcaaattctctctttgggttgaggagcagacctgtataggccctggctgatcaagtctgtgtcctgcctagtaaaaacacacaaccacctctgtcatctgaaggccagccggggatctgt

SEQ ID NO: 413501 - DNA, 120 bp, Artificial Sequence
  ENSG00000148842_55 (sequence is synthesized)
agccatcctcgccttgcctaggcccaggaaggtgaggtctcctgggcaaccagagttgcccctgtggttccccaggggtgatcctaggcagatgactcacccgggctggcacaggaaggt

SEQ ID NO: 413502 - DNA, 120 bp, Artificial Sequence
  ENSG00000148842_56 (sequence is synthesized)
gctcaccttgttctctggggctccaagcaagagcaggccagggagggctggctttgcacgctatgtagcatgacccaagctccctggtggcatgggaaaaactcccctctgcttttgagc

SEQ ID NO: 413503 - DNA, 120 bp, Artificial Sequence
  ENSG00000148842_57 (sequence is synthesized)
ccagatatgggcttttctttgcaaagggttgaggagaaatacaagactgagctggtaggttagggtccagaaggcctctgaggtgccattgcttacttccttactgaggaaactggctct

SEQ ID NO: 413504 - DNA, 120 bp, Artificial Sequence
  ENSG00000148842_58 (sequence is synthesized)
tgtcctgggccatgtagttccattctgggctctaggctagtggtgcttctgtccatcaagggtatctgggtgagttgtaggttaacccagaatttagtagggatataggggtttgaatag

SEQ ID NO: 413505 - DNA, 120 bp, Artificial Sequence
  ENSG00000148842_59 (sequence is synthesized)
gaaagtgatctggggattcagaaatttttctgatgtatcaatgagcaacttctcagtggatttttatacctcagggtcatttgcaaatctttatcttttcctatttcttaggtgttcaag

SEQ ID NO: 413506 - DNA, 120 bp, Artificial Sequence
  ENSG00000148842_60 (sequence is synthesized)
ttggttaataggagagagacgttcagagacttctaagttgaggttcatttgcctccgtttgaggggtgagtggtgcaccaatagcttgctgctgttacttagcaaggctgtgacaagtag

SEQ ID NO: 413507 - DNA, 120 bp, Artificial Sequence
  ENSG00000148842_61 (sequence is synthesized)
gccttcctcctctagcacttgcaagctttctgtctgcgatcacggtttacttgcccatttcccttttgctaccttctttcctatctggagattcatattctagagtccctggtcaaccct

SEQ ID NO: 413508 - DNA, 120 bp, Artificial Sequence
  ENSG00000148842_62 (sequence is synthesized)
acggatgcgaagaagagatggcagttcacagcaactgcatagagtagggagcagctttcctcccaccatcctaggctggggaccttctttgcttctcacaccactgtggttggctcagct

SEQ ID NO: 413509 - DNA, 120 bp, Artificial Sequence
  ENSG00000148842_63 (sequence is synthesized)
caagtaagcacgttctctctgtatgctagagctactgacatcatctctactagaattgttttaaatatcttttgatgggaaataccaggttgaacttcaagcatcatggaaacaaaggtt

SEQ ID NO: 413510 - DNA, 120 bp, Artificial Sequence
  ENSG00000148842_64 (sequence is synthesized)
ctagctgcaagagagtaaagttctaggtgtttgtatgccaaggtttatatgtacacagatccaacacatactgtaagaaagacttgagtacacaaggttttcaggttttaatgcccattg

SEQ ID NO: 413511 - DNA, 120 bp, Artificial Sequence
  ENSG00000148842_65 (sequence is synthesized)
ggaccgtgaacaaatgagaagaatgggagcattgtcttgcctcgcttggaaggacgccttccggcatctgatccacatggattcacttttaggatgcagttctttgggggccagatttgg

SEQ ID NO: 413512 - DNA, 120 bp, Artificial Sequence
  ENSG00000148842_66 (sequence is synthesized)
agagaactatccaatgggcctggtggggcttgggtgcctgccttttttgttggaggctcagacttctagagcagagcaaagttgggaagaatgaggtcttaggattctcattccccagag

SEQ ID NO: 413513 - DNA, 120 bp, Artificial Sequence
  ENSG00000148842_67 (sequence is synthesized)
agccccagcctcgcttctgatcattactccccaagtctgaatctactgtgaaggtgaagttatcaattttttcttgtttgagtcctttaaacccacaaatgtatatgctttattttatat

SEQ ID NO: 413514 - DNA, 120 bp, Artificial Sequence
  ENSG00000148842_68 (sequence is synthesized)
tatttattatgtacatatgcctgttagtacttcgtctgtgactaggacaaggtctgtcttgaagcttcctcatccatggatcctagggttctgctgtcctttaaggcgggtgagagggta

SEQ ID NO: 413515 - DNA, 120 bp, Artificial Sequence
  ENSG00000148842_69 (sequence is synthesized)
gtgttgttttttataaacaggttgctgcttttatgttggccctagcatccccagcccctttagttgggcccacctgtattccttatgaccagtgttttggatgaggatggaggcaggtct

SEQ ID NO: 413516 - DNA, 120 bp, Artificial Sequence
  ENSG00000148842_70 (sequence is synthesized)
cctaccttgtgggcagggcctctcaagtacctccatgaaatatttccaaggtggtttcttggtgacaggctctcttcccctatgtagggtacagtacagctgtgagtccacggcctccct

SEQ ID NO: 413517 - DNA, 120 bp, Artificial Sequence
  ENSG00000148842_71 (sequence is synthesized)
cctcccaaggcaggtcacttgcctggccccacagtgataatggtttcttccacttaccttagattgcataatccatctttctggataatggaagctgcctgcctatctgggctcttaata

SEQ ID NO: 413518 - DNA, 120 bp, Artificial Sequence
  ENSG00000148842_72 (sequence is synthesized)
tgccttttcttggttttgaggcccagtgccaacattgccttggccctcaagtaagaccctgctttgtgtctgactttgatcctcctcagcctttattcactgtatcatagtgtacaggtc

SEQ ID NO: 413519 - DNA, 120 bp, Artificial Sequence
  ENSG00000148842_73 (sequence is synthesized)
atgcatttgagcagtgaagttttctgaacacagtattcagagctgtgtacataaacctaaataagcacaaatgacatgtataggattgagctgattgtcttaatgaatgcattttataat

SEQ ID NO: 413520 - DNA, 120 bp, Artificial Sequence
  ENSG00000148842_74 (sequence is synthesized)
tcaaatgatgtagatgtacagtctctcctatttattttgtaccaatttatttgtaaattttgtgattgttttacaaggtttttgtttatttctattctatttagataaatgatgttctgt

SEQ ID NO: 413521 - DNA, 120 bp, Artificial Sequence
  ENSG00000148842_75 (sequence is synthesized)
tcaccctgctagcagatgtgtgttccctcttccctttcatctgtgcaacaccaaccatgccattgtattcagcttggctgaaccaactgccctacccacttgcctggctttgctggtggg

SEQ ID NO: 413522 - DNA, 120 bp, Artificial Sequence
  ENSG00000148842_76 (sequence is synthesized)
aaagctgggactggatctcagcatgacaacatagaagagcatcttctttggacagtgtaaagtcttaagagaagtgggtactagttctgtgcctccaagtcacagcctggtacagccaat

SEQ ID NO: 413523 - DNA, 120 bp, Artificial Sequence
  ENSG00000148842_77 (sequence is synthesized)
cctagggggaaggtgtccttctttgcaaggattataatctgttctccatcagttactctctacataagaacattcggagtatccagtcaaattgccccagacattggctgctcagtcact

SEQ ID NO: 413524 - DNA, 120 bp, Artificial Sequence
  ENSG00000148842_78 (sequence is synthesized)
aataacaacacacagtgccgctgggctaagccggcatttcctaggtaagaccaaaggtctcattcaggcctctcaattggctcttgaaaacaaggatggctttataggtcctcctctgct

SEQ ID NO: 413525 - DNA, 120 bp, Artificial Sequence
  ENSG00000148842_79 (sequence is synthesized)
atgctaagcctgggaggaaggtcggagcaggcatggatagtcactttcaagtggaaaacatccggcctgagtgtggcgaggcgtgtgcaggtgggtcttcaggattcagtggatatcctg

SEQ ID NO: 413526 - DNA, 120 bp, Artificial Sequence
  ENSG00000148842_80 (sequence is synthesized)
cattccccagtaatcggtgtgtatgatacacgttcttttccatcactactttgtcttctgttccttcttaccctcatcactcacatgagaccagtccctgaagaacttacggtggagctt

SEQ ID NO: 413527 - DNA, 120 bp, Artificial Sequence
  ENSG00000148842_81 (sequence is synthesized)
cagggaccctctgtgatccattcctaaaccacatctttttggaatcccttttctctccacttttagtctctattttacattccaaagaggatcgtgctctgaaaatttagcctcttgact

SEQ ID NO: 413528 - DNA, 120 bp, Artificial Sequence
  ENSG00000148842_82 (sequence is synthesized)
ggtccatttatagtctccactgaatttatttaaccgtggcatttgcagtcttttacttacacttgttctgtggatggagacatttcagggaagaactgctgacagaattggctttcagac

SEQ ID NO: 413529 - DNA, 120 bp, Artificial Sequence
  ENSG00000148842_83 (sequence is synthesized)
actgcctgacctaactaccgctcccatctccccaggtatcgcccaactacctgaaagtagaatgaggtgtatcttagcccagtgaaatgctgtcttcgaaccctgcttgctttcattaga

SEQ ID NO: 413530 - DNA, 120 bp, Artificial Sequence
  ENSG00000148842_84 (sequence is synthesized)
agcagggcagaaagtggcagcagagctagggaaagaaatcatggtagcacattcactcccagcctcctgccttggtttgtttttcctgttttactcacttggtctagatgagcccttagc

SEQ ID NO: 413531 - DNA, 120 bp, Artificial Sequence
  ENSG00000148842_85 (sequence is synthesized)
tcaaatcaggaaatgctccaaggaaaatggaggcaatttttcctgctgtcaagatgagatttgcctaaaactcccccctgcatcctcagagtgcgcacacatccgctcatttctaagctt

SEQ ID NO: 413532 - DNA, 120 bp, Artificial Sequence
  ENSG00000148842_86 (sequence is synthesized)
tatcgtgatgcacccggggtttctatttcacaaaaattgtgctccctagagccgtttttcaactcggcacttctgaggaaacaaatattgatcagagggtcttgtagagaaagtggttaa

SEQ ID NO: 413533 - DNA, 120 bp, Artificial Sequence
  ENSG00000148842_87 (sequence is synthesized)
aaactgacctttttatagcctggagttgatttctggaaacttattttatactttttgaaggtaatttaaaagagatgattctttattaaagccaaaaagttgaattctattaggtggata

SEQ ID NO: 413534 - DNA, 120 bp, Artificial Sequence
  ENSG00000148842_88 (sequence is synthesized)
ataaactcttttgctttctttgtatggtggttttgtcattttccctccaagggcctcatatctgtgctcttattttcaagcagtcccaggacaaagggatggttctagggcccttttctc

SEQ ID NO: 413535 - DNA, 120 bp, Artificial Sequence
  ENSG00000148842_89 (sequence is synthesized)
tgactttctgctggcatgccatctcccctagtggattactgaggactgaggatgcacgtttctaagggagaattagttgcccgacttctgaagtgcttttcctgtcagggtattagtgac

SEQ ID NO: 413536 - DNA, 120 bp, Artificial Sequence
  ENSG00000148842_90 (sequence is synthesized)
tgtgcagtgttcaaacaggaggccaacacatgataggaaattttagatggggccagttttcctactgcagttctactaagtcattgacttgaggtcagtgggtccaaaaagtgacttgtt

SEQ ID NO: 413537 - DNA, 120 bp, Artificial Sequence
  ENSG00000148842_91 (sequence is synthesized)
taaagatacccacacactcaagtcaaagataactctggtgagaacactctctcaaagactggacactgagtaaacatttttcagtgtggggaaggtttgcttggcaaatcttctttccaa

SEQ ID NO: 413538 - DNA, 120 bp, Artificial Sequence
  ENSG00000148842_92 (sequence is synthesized)
gtatctcaagaacttgtgagacgtggaaggactattgctgcctttcgtgggaaaaatgtgtgctcagctgcttgggctccagtttgtgtgggaaggtttatctcaggccttgtctactcc

SEQ ID NO: 413539 - DNA, 120 bp, Artificial Sequence
  ENSG00000148842_93 (sequence is synthesized)
cctcgccagacatggctttgggaagagctccatgggagaccagaacatctggggacatagttgtacctagttattttgtgtgaagaaacaaagggacgagattcaaaattcatcattgtg

SEQ ID NO: 413540 - DNA, 120 bp, Artificial Sequence
  ENSG00000148842_94 (sequence is synthesized)
ttttaaatttaaattggaaaacatagattcctcatccttaaacagagtcagcaagtttgagatgaaatgtttgtgttcaatggggagtacttttttgtgttaaagctctacagagaaact

SEQ ID NO: 413541 - DNA, 120 bp, Artificial Sequence
  ENSG00000148842_95 (sequence is synthesized)
tctgtatatattttatttttgagatcacatacctttgttggaatgaatcagactgttgtggccttgggatgaagacattgtgtgtgaggacagggaaaaatggttgagaaatccaggtta

SEQ ID NO: 413542 - DNA, 120 bp, Artificial Sequence
  ENSG00000148842_96 (sequence is synthesized)
aagaatagaaaagctttttactcattctataaatgaacatgctgcctgtttaaaggacttgctttctgctgtttctagatacctagcagcgcgagaactgtgtgacgtgctgcgttcttg

SEQ ID NO: 413543 - DNA, 120 bp, Artificial Sequence
  ENSG00000148842_97 (sequence is synthesized)
ttacgggaggtgcgtgacggggcagcgggggtttctggaagtcacctgtttctgctttctggttgcctgtgcctgtggtcatccctgctccttagcagtagtgcatgtttttcttctatc

SEQ ID NO: 413544 - DNA, 120 bp, Artificial Sequence
  ENSG00000148842_98 (sequence is synthesized)
tgcagggttgctctggtagctccatggtagagatttcactctcagggcctcccaaaagttgtgtatcatttgaaattgttctatttgaggaaaaacttttaagaaaagctggattccctg

SEQ ID NO: 413545 - DNA, 120 bp, Artificial Sequence
  ENSG00000148842_99 (sequence is synthesized)
atcaccactaaagatcatcatgagaaacataagtatttgagccctaaactactaagcccagtgaggaattggagcgttaactgtatggcaatagctagatcatagttaccatttttccca

SEQ ID NO: 413546 - DNA, 120 bp, Artificial Sequence
  ENSG00000148842_100 (sequence is synthesized)
ccatcaaagacagattaaatagtttccataacatggaatgtgggtaaggttcctaccctaatacagacttaaatatgtagttgtctcaggctattcgtggtgaataagcagagtatttat

SEQ ID NO: 413547 - DNA, 120 bp, Artificial Sequence
  ENSG00000148842_101 (sequence is synthesized)
tttaaaatgaccaggcagccttggaaaaattgctgggctttaaagttgttgacaaagtatttcttaaataaatacatctgatttagaaatacctaaacatggacaaaatacttctaaatc

SEQ ID NO: 413548 - DNA, 120 bp, Artificial Sequence
  ENSG00000148842_102 (sequence is synthesized)
tgacatgcaactgcatgtggctttttaaagtggtttcttaacaatgctaatgtgacttaaggatttgtagttctattaaaaacgacttctaaaagtatcttagggtagcttgaagggttt

SEQ ID NO: 413549 - DNA, 120 bp, Artificial Sequence
  ENSG00000148842_103 (sequence is synthesized)
gcgttattattttaggtctcagcagaggtatgcttatggcaagagaaaaatcttaggtctaaatagaaccctaaactttcttggctgtgaccaacttttctgaagtacaccatcagagtt

SEQ ID NO: 413550 - DNA, 120 bp, Artificial Sequence
  ENSG00000148842_104 (sequence is synthesized)
ttcactgactatctatctttgcagagatgaatgaatgtactgggcaattcctctgcccaaggaaacccagcagggcctgggtctgctgtaccactgaccaactgctggggaggctagggg

SEQ ID NO: 413551 - DNA, 120 bp, Artificial Sequence
  ENSG00000148842_105 (sequence is synthesized)
acctgtcagtacatgctgtaaggttgggagttcagtctagcaaccaagaaggggttgcctggtgttctacaatgcctatagtgttttcaaaatgcctgggaaaaaattctcaaaagaagt

SEQ ID NO: 413552 - DNA, 85 bp, Artificial Sequence
  ENSG00000148842_106 (sequence is synthesized)
aaaaagtataccttttaagttcagcttccttaactactggcaacagagagaaaactcataatttgttttaaaaagcccagttaca

SEQ ID NO: 413553 - DNA, 120 bp, Artificial Sequence
  ENSG00000148842_107 (sequence is synthesized)
gagagaaaactcataatttgttttaaaaagcccagttacagctgccctgcctacccatggaccattgacttcccagcacactcttaagaataatatacagagaggcaccattttgctctg

SEQ ID NO: 413554 - DNA, 120 bp, Artificial Sequence
  ENSG00000148842_108 (sequence is synthesized)
ggtcttatggaatcctagagctcttgaatacgttttggtggtcctacggagagctgtaactagcagtggagttgttgcttattccagctgtgtgcttttcactttccgatctttggaccc

SEQ ID NO: 413555 - DNA, 120 bp, Artificial Sequence
  ENSG00000148842_109 (sequence is synthesized)
agagaatcatttgccatggaatcatctggctagtaagacactcttatatggatgcaatacaaaaagtggtaaattaaagcaaagcaatcatgtggtccttactctaaaagagacaatatg

SEQ ID NO: 413556 - DNA, 120 bp, Artificial Sequence
  ENSG00000148842_110 (sequence is synthesized)
taaatgtactattataataaggtagctctgcagatgtaataagctactcataaattatttgggtttaagaaaacttaagactatgttaaactggacaacatctccatcttgagtgagagt

SEQ ID NO: 413557 - DNA, 120 bp, Artificial Sequence
  ENSG00000148842_111 (sequence is synthesized)
aattagtaactaggatgaccacacattctcctaacacgggcaacagtctagtctaattgttattgcatttctgacctgattcttttaaaggggcatatattcccaatatataccatttag

SEQ ID NO: 413558 - DNA, 120 bp, Artificial Sequence
  ENSG00000148842_112 (sequence is synthesized)
aatgtatgtatgtttcttggatgacttaatctgaagccatataagtccaaagtagtgagacagacagtatatccttgactaagttatcaggctgtgttctctgcttataaaataattttt

SEQ ID NO: 413559 - DNA, 120 bp, Artificial Sequence
  ENSG00000148842_113 (sequence is synthesized)
taaaaagcctcacttcacagtcctgttccaaaaatctttctgtgaaaaaattgaggcctatgtaacaccatgaatataatcatgttagaacataatcagttcttgaatatttatttcctt

SEQ ID NO: 413560 - DNA, 120 bp, Artificial Sequence
  ENSG00000148842_114 (sequence is synthesized)
taagagaatatcaaactgatgtcaccaaatctaaacccacttgaagaccaatagctattacagttgtactacagaataggtcaaagtcaccgttagaaatattacactttattgaattct

SEQ ID NO: 413561 - DNA, 120 bp, Artificial Sequence
  ENSG00000148842_115 (sequence is synthesized)
ggagcagctaatctaccctcccctattgaccaatgacaagaatggaagaaaatatacaatggttaaagaaagagtctataaccactgtttgtttaaaatgttgaaacaactttcactgta

SEQ ID NO: 413562 - DNA, 120 bp, Artificial Sequence
  ENSG00000148842_116 (sequence is synthesized)
ctggtgaaacagttttaataccctaacatacacagtaatgattcattcttgtttaaaacaagaggtgatttcgacttgggattgggatttttattttttgagatggagttttgttcttgt

SEQ ID NO: 413563 - DNA, 120 bp, Artificial Sequence
  ENSG00000148842_117 (sequence is synthesized)
aggcgtgagccgccgtgcctggccttgacttgagattctgaagtgaatttattcacactgattgtgccctctactttagtaaggttctggcttacagagccctcttcccatcctctgatg

SEQ ID NO: 413564 - DNA, 120 bp, Artificial Sequence
  ENSG00000148842_118 (sequence is synthesized)
ttcaattttaatatacagcaatcaactcttagaggacaaagaaatctggaattgggtagcatgagccacagctatatagcccacactaatgcatgttctgtagtataagaaggcagttct

SEQ ID NO: 413565 - DNA, 120 bp, Artificial Sequence
  ENSG00000148842_119 (sequence is synthesized)
tccctttcttttctgggggcttgttcctttgtccacttgcagctaaattctttctatagatttatcacagataagaaggaggttgtttttggataacaaataagcatttgtgctattaaa

SEQ ID NO: 413566 - DNA, 120 bp, Artificial Sequence
  ENSG00000148842_120 (sequence is synthesized)
caaacaaaaggtaataaggatactgtcttttccctcaaaatagaatcctgccctaaagcaacgcaagtagagcatacttctgtgcaaagccagtgatagagaagcagccttgccagagtc

SEQ ID NO: 413567 - DNA, 120 bp, Artificial Sequence
  ENSG00000148842_121 (sequence is synthesized)
actgaggatgaattaaaggcttataaaagaaaacttgaccttaacagagactacatttgatcatggaaataatacatttctccactgatatacaataccatgtaatgcactggaaaagtt

SEQ ID NO: 413568 - DNA, 120 bp, Artificial Sequence
  ENSG00000148842_122 (sequence is synthesized)
ggaccttggagtaatagcacaatttgtaacattacagatcacctcttcccactctttgttccactctgagactctttccttttcctcgtgtatccagatacactgacatacggatgattt

SEQ ID NO: 413569 - DNA, 120 bp, Artificial Sequence
  ENSG00000148842_123 (sequence is synthesized)
taaaagtgtcacaagccacagtggagccatatacatgcagttcagcctgattttacccttattttcttctaatacagactccattacaattttggaccatctgcagagagtacagataca

SEQ ID NO: 413570 - DNA, 120 bp, Artificial Sequence
  ENSG00000148842_124 (sequence is synthesized)
caaaaccaaaacaagtatctatgataataaaatcttcagaaacttttcagacgtacctttcatggagccccctccctcccccgagtagaaccctaacagggacctcgtttgttcctgtga

SEQ ID NO: 413571 - DNA, 120 bp, Artificial Sequence
  ENSG00000148842_125 (sequence is synthesized)
gtcctgccaggacttgtttaatgggtgcttggggttttggttttcctccttattcttcctcctcctcctcctcttcatcatcatcttcgtcatggcagtgtgtaatttcctggggggcca

SEQ ID NO: 413572 - DNA, 120 bp, Artificial Sequence
  ENSG00000148842_126 (sequence is synthesized)
gtgggaagaggttgggaggtttaatctcactaattgaccgtgtcagctggtgccgcttgtagtcagtgtctttgaaatccactgatgtgcggttccgggtggcaagaggagactccatct

SEQ ID NO: 413573 - DNA, 120 bp, Artificial Sequence
  ENSG00000148842_127 (sequence is synthesized)
cattgatatctacgtgtgtgtgctccaccgttgattcatgaggcatctagacagaaaaaagctagaggctcagaaagcaggcagagcaaagtagctactccccaaatcctaacccctctc

SEQ ID NO: 413574 - DNA, 120 bp, Artificial Sequence
  ENSG00000148842_128 (sequence is synthesized)
ctctgttaggtggccatgcaattacatctataatggaccacaggacaagtcaatatagacttatcttcatagaactacttatagttgcctgtcttcctctctccctgcccctcaaaatgg

SEQ ID NO: 413575 - DNA, 120 bp, Artificial Sequence
  ENSG00000148842_129 (sequence is synthesized)
tgcccatattgtctactgcagctggaaattggaaaagatggagaggggagtttactttctattttacagcaaaaacaagatagtcctgaaacagatcagaataaaggaatgtaaaaacca

SEQ ID NO: 413576 - DNA, 120 bp, Artificial Sequence
  ENSG00000148842_130 (sequence is synthesized)
ccaaatccagttttcatatttaaagcgaatgagccccctcctctcagtgggaaagatgagctgaagctttactccctcgatagtgttgggaaaagaaatcagacaaaaatctaaggaagg

SEQ ID NO: 413577 - DNA, 120 bp, Artificial Sequence
  ENSG00000148842_131 (sequence is synthesized)
accaaatattgtacagagtgtgccagtaggcttttgcaactggactgaaaatacctgccttttctctccacaggggaaagtggaagttgaagctgggaaagaaggtatgaagtttgaagc

SEQ ID NO: 413578 - DNA, 120 bp, Artificial Sequence
  ENSG00000148842_132 (sequence is synthesized)
ctgaaaagaagagacaataagaagcattctttctttcaacatcacagacattggcaactctaggatgtctatacagagggataaaaaggggtggcagttggctgggcgtggtggctcatg

SEQ ID NO: 413579 - DNA, 120 bp, Artificial Sequence
  ENSG00000148843_0 (sequence is synthesized)
acacttccggaagaattgcactggactgtgggtatcctggtctccgcgtgtgtgagtaccgcggcgcgaggttagtggtagctgggtgcagacgccgtggcgctggagacccaaacatgg

SEQ ID NO: 413580 - DNA, 120 bp, Artificial Sequence
  ENSG00000148843_1 (sequence is synthesized)
caaacctggaagaaagcttcccccgaggaggtacaagaaagatccacaaaccagagaaagctttccagcagtcagttgaacaagacaacttatttgatatttctactgaagagggatcca

SEQ ID NO: 413581 - DNA, 120 bp, Artificial Sequence
  ENSG00000148843_2 (sequence is synthesized)
ccaaaagaaaaaagagccagaaggggccagcaaaaacaaaaaagttgaaaatcgaaaagagagaaagcagcaagtccgcaagagagaagtttgaaatccttagtgttgagtccctgtgtg

SEQ ID NO: 413582 - DNA, 120 bp, Artificial Sequence
  ENSG00000148843_3 (sequence is synthesized)
agggaatgcgtattttgggttgcgtgaaagaggtgaatgaactggaactggtgattagtctccccaatggcctccagggctttgtgcaagtcactgaaatctgtgatgcctacaccaaaa

SEQ ID NO: 413583 - DNA, 120 bp, Artificial Sequence
  ENSG00000148843_4 (sequence is synthesized)
agctgaatgagcaggtgacacaagaacaacctctgaaggacctacttcacttgcctgaacttttctcacctggaatgctggtaagatgtgtggtgagcagtctgggcatcacagacaggg

SEQ ID NO: 413584 - DNA, 120 bp, Artificial Sequence
  ENSG00000148843_5 (sequence is synthesized)
gcaagaagagtgtcaagctgtctctgaaccccaaaaatgtcaacagagtgctgagtgctgaggccctgaagcctggcatgctacttacaggtaccgtatccagcctggaagaccatggct

SEQ ID NO: 413585 - DNA, 120 bp, Artificial Sequence
  ENSG00000148843_6 (sequence is synthesized)
acctagtggacattggtgttgatgggaccagagcttttctgccactgctgaaagcccaggagtacatcagacagaagaacaaaggtgctaaactaaaggtgggtcagtacctgaactgca

SEQ ID NO: 413586 - DNA, 120 bp, Artificial Sequence
  ENSG00000148843_7 (sequence is synthesized)
ttgttgaaaaggtgaaaggcaacggaggagttgttagtctgtctgttggtcactcagaggtttctacggccattgctactgaacagcagagctggaaccttaataacttgctaccaggac

SEQ ID NO: 413587 - DNA, 120 bp, Artificial Sequence
  ENSG00000148843_8 (sequence is synthesized)
tggtggtcaaagctcaggtacagaaggtgactccatttggccttacgctaaacttcctcacattcttcacgggcgtggttgactttatgcacctggatcccaagaaagctggaacatatt

SEQ ID NO: 413588 - DNA, 120 bp, Artificial Sequence
  ENSG00000148843_9 (sequence is synthesized)
tctcaaatcaggcagtgagggcctgcatcctttgcgtccatcctcgaaccagagttgtgcacctgagcctgcgccccatcttcctacagcctggacgcccactcacccgactctcttgcc

SEQ ID NO: 413589 - DNA, 120 bp, Artificial Sequence
  ENSG00000148843_10 (sequence is synthesized)
agaaccttggagcagtgctggatgatgttcctgtccagggttttttcaaaaaggctggggccacctttaggctgaaggatggggttctggcctatgcccggctcagccatctctctgatt

SEQ ID NO: 413590 - DNA, 120 bp, Artificial Sequence
  ENSG00000148843_11 (sequence is synthesized)
ctaagaacgtcttcaatcctgaggccttcaagccagggaacactcacaagtgtagaattattgactacagccaaatggatgaactggccttgctctctctacgaacgtctattattgaag

SEQ ID NO: 413591 - DNA, 120 bp, Artificial Sequence
  ENSG00000148843_12 (sequence is synthesized)
ctcagtaccttagatatcatgacatcgaacctggggcagtggtaaagggcacagtgctaaccataaagtcatatgggatgctggtgaaggtgggcgagcagatgaggggcctggtacctc

SEQ ID NO: 413592 - DNA, 120 bp, Artificial Sequence
  ENSG00000148843_13 (sequence is synthesized)
ccatgcacctggctgacatcctgatgaagaatccggagaagaagtaccacatcggggatgaggtcaagtgccgggttttgctttgtgaccctgaagccaagaagctgatgatgaccctga

SEQ ID NO: 413593 - DNA, 120 bp, Artificial Sequence
  ENSG00000148843_14 (sequence is synthesized)
aaaaaaccctgattgagtccaaactacctgtcattacctgctatgccgatgccaagcctggtctgcagacacatggcttcatcatcagggtcaaggactatggctgcattgtgaagttct

SEQ ID NO: 413594 - DNA, 120 bp, Artificial Sequence
  ENSG00000148843_15 (sequence is synthesized)
acaacaatgtgcagggactggtgcccaagcatgagctcagtactgagtatatccctgacccggagagagttttttacactggccaggtggtgaaggttgtcgtattgaactgtgagccat

SEQ ID NO: 413595 - DNA, 120 bp, Artificial Sequence
  ENSG00000148843_16 (sequence is synthesized)
ccaaagagaggatgctcttatccttcaagctgtcgagtgatccagagccaaagaaagagcctgcaggacacagtcagaagaaaggaaaagccattaacattgggcagttggtagatgtga

SEQ ID NO: 413596 - DNA, 120 bp, Artificial Sequence
  ENSG00000148843_17 (sequence is synthesized)
aggttttagagaagaccaaagatgggctggaggtggctgtcctgccccacaacatccgtgctttcctccccacatctcatctgtcggaccacgttgccaacggcccattgttacatcatt

SEQ ID NO: 413597 - DNA, 120 bp, Artificial Sequence
  ENSG00000148843_18 (sequence is synthesized)
ggctccaggcaggtgacatccttcaccgagtcctgtgtctgagccagagcgaggggcgtgttcttctttgcaggaagccagccttggtctccacagtagaaggtggccaggatcccaaga

SEQ ID NO: 413598 - DNA, 120 bp, Artificial Sequence
  ENSG00000148843_19 (sequence is synthesized)
acttctcagaaatccatcctggaatgctgctcattggttttgtgaagagcatcaaggactatggcgtgttcatccagttcccctcaggtcttagcggactggccccaaaagctatcatga

SEQ ID NO: 413599 - DNA, 120 bp, Artificial Sequence
  ENSG00000148843_20 (sequence is synthesized)
gtgacaaatttgtgacctccacaagtgaccactttgttgagggccagacagtagcggcaaaggtgaccaatgtggatgaggagaagcagcggatgctgctgtcactgcggctgtcggact

SEQ ID NO: 413600 - DNA, 120 bp, Artificial Sequence
  ENSG00000148843_21 (sequence is synthesized)
gtggtctgggggacttggctatcaccagcctcctcctcctgaatcagtgcctggaggagctgcagggcgtgcgcagccttatgagcaaccgagactctgtgttgatccagacgctggccg

SEQ ID NO: 413601 - DNA, 120 bp, Artificial Sequence
  ENSG00000148843_22 (sequence is synthesized)
agatgaccccaggaatgttccttgacctagtggtgcaggaggtgttggaagatggctctgtggtattcagtgggggtccagtgcccgacctggtcctgaaagccagcagataccatcgcg

SEQ ID NO: 413602 - DNA, 120 bp, Artificial Sequence
  ENSG00000148843_23 (sequence is synthesized)
cagggcaggaggtggaatctgggcagaaaaagaaggttgttatcttaaatgttgatcttttgaagttggaagtgcacgtttcccttcaccaggacttggtgaatagaaaagctagaaagc

SEQ ID NO: 413603 - DNA, 120 bp, Artificial Sequence
  ENSG00000148843_24 (sequence is synthesized)
tgaggaaaggcagcgaacaccaggcgattgtgcagcacttggagaagtcctttgccattgcctccttggtagagacgggccacctggcagctttctccctgacctctcacctcaacgaca

SEQ ID NO: 413604 - DNA, 120 bp, Artificial Sequence
  ENSG00000148843_25 (sequence is synthesized)
ccttccgctttgactcagagaaattgcaggtgggacagggtgtctccctaaccctcaagaccacagaaccaggagtgactggccttcttttggctgtggaggggccggctgccaagagga

SEQ ID NO: 413605 - DNA, 120 bp, Artificial Sequence
  ENSG00000148843_26 (sequence is synthesized)
ggactgtcaagtccattaagcctacccatgtggttgtgactctggaagatggcattattggctgtatccatgcctcccacattctagatgatgttccagagggcacctctcctactacca

SEQ ID NO: 413606 - DNA, 120 bp, Artificial Sequence
  ENSG00000148843_27 (sequence is synthesized)
agctgaaggttgggaagacggtcactgcccgagtgattggcgggcgagacatgaagacattcaagtatctcccaataagtcaccccagattcgttcgaaccatcccggagctgagtgttc

SEQ ID NO: 413607 - DNA, 120 bp, Artificial Sequence
  ENSG00000148843_28 (sequence is synthesized)
ggccaagtgagctggaggatggccacactgctcttaacactcactctgttagccccatggagaagattaaacagtaccaggccggccagactgttacttgcttcttaaagaaatacaatg

SEQ ID NO: 413608 - DNA, 120 bp, Artificial Sequence
  ENSG00000148843_29 (sequence is synthesized)
tggtgaagaaatggcttgaggtggagattgccccagacatccgggggagaattcccttattgctcacttctctgagcttcaaggttctgaagcatccagataagaagttccgggttggcc

SEQ ID NO: 413609 - DNA, 120 bp, Artificial Sequence
  ENSG00000148843_30 (sequence is synthesized)
aggccctgagggccaccgttgttggcccagattcctccaagaccctcttatgtctgtccctcacaggtcctcacaagcttgaggaaggggaagtggccatgggccgagtggtgaaggtga

SEQ ID NO: 413610 - DNA, 120 bp, Artificial Sequence
  ENSG00000148843_31 (sequence is synthesized)
ctcccaacgaggggctgaccgtctccttcccctttgggaagataggaacagtcagtatatttcacatgagtgactcctactccgagacgcccctggaagacttcgtcccccagaaggttg

SEQ ID NO: 413611 - DNA, 120 bp, Artificial Sequence
  ENSG00000148843_32 (sequence is synthesized)
tcagatgttacatcctgtccactgcagacaacgtattgactttgtcgctgcgatcatccagaacaaacccggagacgaaaagcaaagtagaagatccagagattaactccatccaggaca

SEQ ID NO: 413612 - DNA, 120 bp, Artificial Sequence
  ENSG00000148843_33 (sequence is synthesized)
ttaaggaagggcagcttctgaggggctatgtagggtccatccagccacacggtgtgttctttcgccttggcccctccgttgtgggtttggctcggtactcccatgtctcccagcacagcc

SEQ ID NO: 413613 - DNA, 120 bp, Artificial Sequence
  ENSG00000148843_34 (sequence is synthesized)
cgtccaagaaagccctttataacaaacacctccctgaagggaagctgctcacagccagggtcctacgccttaaccaccagaagaacctggtagagctgtctttcctccccggagacactg

SEQ ID NO: 413614 - DNA, 120 bp, Artificial Sequence
  ENSG00000148843_35 (sequence is synthesized)
ggaagccagacgtgctttctgcttccttggaagggcaacttacaaagcaagaggagaggaaaacagaggctgaggagagagaccaaaaaggggaaaagaaaaatcagaaaaggaacgaga

SEQ ID NO: 413615 - DNA, 120 bp, Artificial Sequence
  ENSG00000148843_36 (sequence is synthesized)
agaagaaccagaaggggcaggaggaggtggagatgcccagcaaggagaagcaacagccccagaagccacaggcgcagaagcggggcgggcgggagtgccgggagtctgggagtgagcagg

SEQ ID NO: 413616 - DNA, 120 bp, Artificial Sequence
  ENSG00000148843_37 (sequence is synthesized)
aaagagtgagcaagaagccaaagaaagccggcctgtcagaggaggacgacagccttgtggacgtgtactatcgggagggaaaagaggaggcagaagagacgaatgtgctgcccaaggaga

SEQ ID NO: 413617 - DNA, 120 bp, Artificial Sequence
  ENSG00000148843_38 (sequence is synthesized)
agcaaaccaagccagcagaagcgccccggctgcagctgtcttcaggcttcgcttggaatgtgggactagactctctgaccccggccttgccacctctagcagagagctcagacagcgagg

SEQ ID NO: 413618 - DNA, 120 bp, Artificial Sequence
  ENSG00000148843_39 (sequence is synthesized)
aggatgagaagccacaccaagccacgataaagaaaagcaagaaagaaagggagttggagaagcagaaggcagagaaggaactgtcccgcattgaggaggcgctgatggatcctgggcggc

SEQ ID NO: 413619 - DNA, 120 bp, Artificial Sequence
  ENSG00000148843_40 (sequence is synthesized)
agccagagtccgcggatgattttgaccgactggtgctgagctcccccaacagctccattctgtggctgcagtacatggctttccacctgcaggccacggagatcgagaaggcccgtgccg

SEQ ID NO: 413620 - DNA, 120 bp, Artificial Sequence
  ENSG00000148843_41 (sequence is synthesized)
tggctgagagggcccttaagaccatctccttcagagaggagcaggagaagctgaacgtgtgggtggctctgctgaacctggagaacatgtacggctctcaggagtccctgaccaaggtct

SEQ ID NO: 413621 - DNA, 120 bp, Artificial Sequence
  ENSG00000148843_42 (sequence is synthesized)
ttgagcgagccgtgcagtacaacgagcctctcaaagtctttctccacctggctgacatctacgccaagtcagagaaattccaggaagctggtgaactctacaaccggatgctgaagcgtt

SEQ ID NO: 413622 - DNA, 120 bp, Artificial Sequence
  ENSG00000148843_43 (sequence is synthesized)
tccggcaggagaaagctgtgtggatcaaatacggcgccttccttctgcggaggagccaggctgcagccagtcaccgcgtgctgcagcgagccctggagtgcctgcctagcaaggagcatg

SEQ ID NO: 413623 - DNA, 120 bp, Artificial Sequence
  ENSG00000148843_44 (sequence is synthesized)
tggatgtcattgccaagtttgcccagcttgagtttcagctgggggatgcagagcgggccaaagccatttttgagaacacgctgagcacctacccaaagcgcacagatgtctggtcggtct

SEQ ID NO: 413624 - DNA, 120 bp, Artificial Sequence
  ENSG00000148843_45 (sequence is synthesized)
atatcgacatgaccatcaagcacggcagccagaaggacgtccgggacatctttgagcgggtcattcatctgagcttggcccccaagagaatgaagttcttcttcaagcgctacctggact

SEQ ID NO: 413625 - DNA, 120 bp, Artificial Sequence
  ENSG00000148843_46 (sequence is synthesized)
acgagaagcagcatggcactgagaaggatgtgcaggcagtcaaggccaaggccctggagtatgtggaggccaagagctcagtgctagaggactagtggcaggctggctctgtgggacact

SEQ ID NO: 413626 - DNA, 120 bp, Artificial Sequence
  ENSG00000148843_47 (sequence is synthesized)
gtcaacaatgggccagcccggccccgcctcgagtgcctgggcactcggaaaactgttacctcaggactctatttaaatgctgctttttctgcagcacgcttggggaaatcctgtcaggat

SEQ ID NO: 413627 - DNA, 120 bp, Artificial Sequence
  ENSG00000148843_48 (sequence is synthesized)
gaaaaggaagttgagattttttaaatccctcttcgcttgctttattttcagtaccaacttgttatctttttccttatctgaggctacctggggattgtgggcagcaggcccctggactcc

SEQ ID NO: 413628 - DNA, 120 bp, Artificial Sequence
  ENSG00000148843_49 (sequence is synthesized)
cagaaatgctgagggtccctcttccaggggagttccctggggagcaagagtagaggggctattcccgagggtcctgtggtcagggtcctgctttgtccctggcaggctgtcagtccagct

SEQ ID NO: 413629 - DNA, 120 bp, Artificial Sequence
  ENSG00000148843_50 (sequence is synthesized)
ggagggggtcagtaggctccagggagtgggccctcccctccgatcttggagtctctgggtgttccttcagcctcagcctcactggtaccttctgccctttaggggaggctatgagtctgg

SEQ ID NO: 413630 - DNA, 120 bp, Artificial Sequence
  ENSG00000148843_51 (sequence is synthesized)
gacaggaggacaaattcagagcccagagggggaaatggagaaacctgggctgctgaggaaagccacgggtgttggcgtgaactgatgatgtctcatcccacgcccactatggccacatta

SEQ ID NO: 413631 - DNA, 120 bp, Artificial Sequence
  ENSG00000148843_52 (sequence is synthesized)
cctaacctctccatatctgggctattcaaggtcttggaggccagcacagacccagctagttgttgaagccagttcttttttgtcttggtcatgagggaattaaacgttttctctggcaga

SEQ ID NO: 413632 - DNA, 120 bp, Artificial Sequence
  ENSG00000148843_53 (sequence is synthesized)
aggccaccttttactttcagctcaattgtgacacataggagtggttctttttctggaaggaaggtctcttgggttctttgggcacttaatggacattgaagacttgaacctaatcattac

SEQ ID NO: 413633 - DNA, 120 bp, Artificial Sequence
  ENSG00000148843_54 (sequence is synthesized)
gtgcccagagagtggtgtgtctgcagtgcccatctgtgtatttggccccaaacccaccccttttgggtctttgtccctcttgtcacaacctgagtcttgggacccaagagcagggagtca

SEQ ID NO: 413634 - DNA, 120 bp, Artificial Sequence
  ENSG00000148843_55 (sequence is synthesized)
accaaaggaaagcctgtcttcctggtatttgttggctactcccatgaattatggtcaggtaggattattagcaaggggcttaggtctgtctgcttgtgacaagagttttcatggatactg

SEQ ID NO: 413635 - DNA, 120 bp, Artificial Sequence
  ENSG00000148843_56 (sequence is synthesized)
aacatttttgcaaaaagtgattttaccttgtcagtggttccagtgctccactgtcctccgtggtgatagcacactgccagaggaaaagaacagtgagagttctttcatggtactaatccg

SEQ ID NO: 413636 - DNA, 120 bp, Artificial Sequence
  ENSG00000148843_57 (sequence is synthesized)
aagaccctcttatgtctgtccctcacaggtgtggggatgaaacagtgcctggtcggggaaggggagcggcaggaaggggtgggatgggttttcagctattgcttgagttggaggacccct

SEQ ID NO: 413637 - DNA, 120 bp, Artificial Sequence
  ENSG00000148843_58 (sequence is synthesized)
aagcctggtgtgggaccttcttggaacagtttttctcttgggctttgctctggcccagttactccactgctctctgagttacctttacctatacaggttacccttacctacacaggtgtt

SEQ ID NO: 413638 - DNA, 120 bp, Artificial Sequence
  ENSG00000148843_59 (sequence is synthesized)
tttctcaagtccctgggaaagagttgtccaccacttggccctgaggtccttggctacatggcagggtgatctcagtctagatggttctggatcactcagcccagataccccaagtctggg

SEQ ID NO: 413639 - DNA, 79 bp, Artificial Sequence
  ENSG00000148843_60 (sequence is synthesized)
ggctgattggttcaagcaattctcctgtatcagcctcccgagtacctgggactatagatttctactgaagagggatcca

SEQ ID NO: 413640 - DNA, 120 bp, Artificial Sequence
  ENSG00000148848_0 (sequence is synthesized)
cactaacgctcttcctagtccccgggccaactcggacagtttgctcatttattgcaacggtcaaggctggcttgtgccagaacggcgcgcgcgcgcgcacgcacgcacacacacgggggg

SEQ ID NO: 413641 - DNA, 120 bp, Artificial Sequence
  ENSG00000148848_1 (sequence is synthesized)
aaacttttttaaaaatgaaaggctagaagagctcagcggcggcgcgggcgctgcgcgagggctccggagctgactcgccgaggcaggaaatccctccggtcgcgacgcccggccccggct

SEQ ID NO: 413642 - DNA, 120 bp, Artificial Sequence
  ENSG00000148848_2 (sequence is synthesized)
aggcaggaaatccctccggtcgcgacgcccggccccggctcggcgcccgcgtgggatggtgcagcgctcgccgccgggcccgagagctgctgcactgaaggccggcgacgatggcagcgc

SEQ ID NO: 413643 - DNA, 120 bp, Artificial Sequence
  ENSG00000148848_3 (sequence is synthesized)
cctggccggtgctctgctcgcgccctgcgaggcccgaggggtgagcttatggaaccaaggaagagctgatgaagttgtcagtgcctctgttgggagtggggacctctggatcccagtgaa

SEQ ID NO: 413644 - DNA, 120 bp, Artificial Sequence
  ENSG00000148848_4 (sequence is synthesized)
gagcttcgactccaagaatcatccagaagtgctgaatattcgactacaacgggaaagcaaagaactgatcataaatctggaaagaaatgaaggtctcattgccagcagtttcacggaaac

SEQ ID NO: 413645 - DNA, 120 bp, Artificial Sequence
  ENSG00000148848_5 (sequence is synthesized)
ccactatctgcaagacggtactgatgtctccctcgctcgaaattacacggtaattctgggtcactgttactaccatggacatgtacggggatattctgattcagcagtcagtctcagcac

SEQ ID NO: 413646 - DNA, 120 bp, Artificial Sequence
  ENSG00000148848_6 (sequence is synthesized)
gtgttctggtctcaggggacttattgtgtttgaaaatgaaagctatgtcttagaaccaatgaaaagtgcaaccaacagatacaaactcttcccagcgaagaagctgaaaagcgtccgggg

SEQ ID NO: 413647 - DNA, 120 bp, Artificial Sequence
  ENSG00000148848_7 (sequence is synthesized)
atcatgtggatcacatcacaacacaccaaacctcgctgcaaagaatgtgtttccaccaccctctcagacatgggcaagaaggcataaaagagagaccctcaaggcaactaagtatgtgga

SEQ ID NO: 413648 - DNA, 120 bp, Artificial Sequence
  ENSG00000148848_8 (sequence is synthesized)
gctggtgatcgtggcagacaaccgagagtttcagaggcaaggaaaagatctggaaaaagttaagcagcgattaatagagattgctaatcacgttgacaagttttacagaccactgaacat

SEQ ID NO: 413649 - DNA, 120 bp, Artificial Sequence
  ENSG00000148848_9 (sequence is synthesized)
tcggatcgtgttggtaggcgtggaagtgtggaatgacatggacaaatgctctgtaagtcaggacccattcaccagcctccatgaatttctggactggaggaagatgaagcttctacctcg

SEQ ID NO: 413650 - DNA, 120 bp, Artificial Sequence
  ENSG00000148848_10 (sequence is synthesized)
caaatcccatgacaatgcgcagcttgtcagtggggtttatttccaagggaccaccatcggcatggccccaatcatgagcatgtgcacggcagaccagtctgggggaattgtcatggacca

SEQ ID NO: 413651 - DNA, 120 bp, Artificial Sequence
  ENSG00000148848_11 (sequence is synthesized)
ttcagacaatccccttggtgcagccgtgaccctggcacatgagctgggccacaatttcgggatgaatcatgacacactggacaggggctgtagctgtcaaatggcggttgagaaaggagg

SEQ ID NO: 413652 - DNA, 120 bp, Artificial Sequence
  ENSG00000148848_12 (sequence is synthesized)
ctgcatcatgaacgcttccaccgggtacccatttcccatggtgttcagcagttgcagcaggaaggacttggagaccagcctggagaaaggaatgggggtgtgcctgtttaacctgccgga

SEQ ID NO: 413653 - DNA, 120 bp, Artificial Sequence
  ENSG00000148848_13 (sequence is synthesized)
agtcagggagtctttcgggggccagaagtgtgggaacagatttgtggaagaaggagaggagtgtgactgtggggagccagaggaatgtatgaatcgctgctgcaatgccaccacctgtac

SEQ ID NO: 413654 - DNA, 120 bp, Artificial Sequence
  ENSG00000148848_14 (sequence is synthesized)
cctgaagccggacgctgtgtgcgcacatgggctgtgctgtgaagactgccagctgaagcctgcaggaacagcgtgcagggactccagcaactcctgtgacctcccagagttctgcacagg

SEQ ID NO: 413655 - DNA, 120 bp, Artificial Sequence
  ENSG00000148848_15 (sequence is synthesized)
ggccagccctcactgcccagccaacgtgtacctgcacgatgggcactcatgtcaggatgtggacggctactgctacaatggcatctgccagactcacgagcagcagtgtgtcacgctctg

SEQ ID NO: 413656 - DNA, 120 bp, Artificial Sequence
  ENSG00000148848_16 (sequence is synthesized)
gggaccaggtgctaaacctgcccctgggatctgctttgagagagtcaattctgcaggtgatccttatggcaactgtggcaaagtctcgaagagttcctttgccaaatgcgagatgagaga

SEQ ID NO: 413657 - DNA, 120 bp, Artificial Sequence
  ENSG00000148848_17 (sequence is synthesized)
tgctaaatgtggaaaaatccagtgtcaaggaggtgccagccggccagtcattggtaccaatgccgtttccatagaaacaaacatccccctgcagcaaggaggccggattctgtgccgggg

SEQ ID NO: 413658 - DNA, 120 bp, Artificial Sequence
  ENSG00000148848_18 (sequence is synthesized)
gacccacgtgtacttgggcgatgacatgccggacccagggcttgtgcttgcaggcacaaagtgtgcagatggaaaaatctgcctgaatcgtcaatgtcaaaatattagtgtctttggggt

SEQ ID NO: 413659 - DNA, 120 bp, Artificial Sequence
  ENSG00000148848_19 (sequence is synthesized)
tcacgagtgtgcaatgcagtgccacggcagaggggtgtgcaacaacaggaagaactgccactgcgaggcccactgggcacctcccttctgtgacaagtttggctttggaggaagcacaga

SEQ ID NO: 413660 - DNA, 120 bp, Artificial Sequence
  ENSG00000148848_20 (sequence is synthesized)
cagcggccccatccggcaagcagataaccaaggtttaaccataggaattctggtgaccatcctgtgtcttcttgctgccggatttgtggtttatctcaaaaggaagaccttgatacgact

SEQ ID NO: 413661 - DNA, 120 bp, Artificial Sequence
  ENSG00000148848_21 (sequence is synthesized)
gctgtttacaaataagaagaccaccattgaaaaactaaggtgtgtgcgcccttcccggccaccccgtggcttccaaccctgtcaggctcacctcggccaccttggaaaaggcctgatgag

SEQ ID NO: 413662 - DNA, 120 bp, Artificial Sequence
  ENSG00000148848_22 (sequence is synthesized)
gaagccgccagattcctacccaccgaaggacaatcccaggagattgctgcagtgtcagaatgttgacatcagcagacccctcaacggcctgaatgtccctcagccccagtcaactcagcg

SEQ ID NO: 413663 - DNA, 120 bp, Artificial Sequence
  ENSG00000148848_23 (sequence is synthesized)
agtgcttcctcccctccaccgggctccacgtgcacctagcgtccctgccagacccctgccagccaagcctgcacttaggcaggcccaggggacctgtaagccaaacccccctcagaagcc

SEQ ID NO: 413664 - DNA, 120 bp, Artificial Sequence
  ENSG00000148848_24 (sequence is synthesized)
tctgcctgcagatcctctggccagaacaactcggctcactcatgccttggccaggaccccaggacaatgggagactgggctccgcctggcacccctcagacctgctccacaatatccaca

SEQ ID NO: 413665 - DNA, 120 bp, Artificial Sequence
  ENSG00000148848_25 (sequence is synthesized)
ccaagtgcccagatccacccacaccgcctatattaagtgagaagccgacaccttttttcaacagtgaagacagaagtttgcactatctttcagctccagttggagttttttgtaccaact

SEQ ID NO: 413666 - DNA, 120 bp, Artificial Sequence
  ENSG00000148848_26 (sequence is synthesized)
tttaggattttttttaatgtttaaaacatcattactataagaactttgagctactgccgtcagtgctgtgctgtgctatggtgctctgtctacttgctcaggtacttgtaaattattaat

SEQ ID NO: 413667 - DNA, 120 bp, Artificial Sequence
  ENSG00000148848_27 (sequence is synthesized)
ttatgcagaatgttgattacagtgcagtgcgctgtagtaggcatttttaccatcactgagttttccatggcaggaaggcttgttgtgcttttagtattttagtgaacttgaaatatcctg

SEQ ID NO: 413668 - DNA, 120 bp, Artificial Sequence
  ENSG00000148848_28 (sequence is synthesized)
cttgatgggattctggacaggatgtgtttgctttctgatcaaggccttattggaaagcagtcccccaactacccccagctgtgcttatggtaccagatgcagctcaagagatcccaagta

SEQ ID NO: 413669 - DNA, 120 bp, Artificial Sequence
  ENSG00000148848_29 (sequence is synthesized)
gaatctcagttgattttctggattccccatctcaggccagagccaaggggcttcaggtccaggctgtgtttggctttcagggaggccctgtgccccttgacaactggcaggcaggctccc

SEQ ID NO: 413670 - DNA, 120 bp, Artificial Sequence
  ENSG00000148848_30 (sequence is synthesized)
agggacacctgggagaaatctggcttctggccaggaagctttggtgagaacctgggttgcagacaggaatcttaaggtgtagccacaccaggatagagactggaacactagacaagccag

SEQ ID NO: 413671 - DNA, 120 bp, Artificial Sequence
  ENSG00000148848_31 (sequence is synthesized)
aacttgaccctgagctgaccagccgtgagcatgtttggaaggggtctgtagtgtcactcaaggcggtgcttgatagaaatgccaagcacttctttttctcgctgtcctttctagagcact

SEQ ID NO: 413672 - DNA, 120 bp, Artificial Sequence
  ENSG00000148848_32 (sequence is synthesized)
gccaccagtaggttatttagcttgggaaaggtggtgtttctgtaagaaacctactgcccaggcactgcaaaccgccacctccctatactgcttggagctgagcaaatcaccacaaactgt

SEQ ID NO: 413673 - DNA, 120 bp, Artificial Sequence
  ENSG00000148848_33 (sequence is synthesized)
tcagacagatgaggctttccatgggaccacaactattttcagatgtgaaccattaaccagatctagtcaatcaagtctgtttactgcaaggttcaacttattaacaattaggcagactct

SEQ ID NO: 413674 - DNA, 120 bp, Artificial Sequence
  ENSG00000148848_34 (sequence is synthesized)
ttatgcttgcaaaaactacaaccaatggaatgtgatgttcatgggtatagttcatgtctgctatcattattcgtagatattggacaaagaaccttctctatggggcatcctctttttcca

SEQ ID NO: 413675 - DNA, 120 bp, Artificial Sequence
  ENSG00000148848_35 (sequence is synthesized)
acttggctgcaggaatctttaaaagatgcttttaacagagtctgaacctatttcttaaacacttgcaacctacctgttgagcatcacagaatgtgataaggaaatcaacttgcttatcaa

SEQ ID NO: 413676 - DNA, 120 bp, Artificial Sequence
  ENSG00000148848_36 (sequence is synthesized)
cttcctaaatattatgagatgctggcttgggcagcatccccttgaactcttcactcttcaaatgcctgactagggagccatgtttcacaaggtctttaaagtgactaatggcatgagaaa

SEQ ID NO: 413677 - DNA, 120 bp, Artificial Sequence
  ENSG00000148848_37 (sequence is synthesized)
tacaaaaatactcagataaggtaaaatgccatgatgcctctgtcttctggactggttttcacattagaagacaattgacaacagttacataattcactctgagtgttttatgagaaagcc

SEQ ID NO: 413678 - DNA, 120 bp, Artificial Sequence
  ENSG00000148848_38 (sequence is synthesized)
ttcttttgggggtcaacagttttcctatgctttgaaacagaaaaatatgtaccaagaatcttggtttgccttccagaaaacaaaactgcatttcactttcccggtgttccccactgtatc

SEQ ID NO: 413679 - DNA, 120 bp, Artificial Sequence
  ENSG00000148848_39 (sequence is synthesized)
taggcaacatagtattcatgactatggataaactaaacacgtgacacaaacacacacaaaagggaacccagctctaatacattccaactcgtatagcatgcatctgtttattctatagtt

SEQ ID NO: 413680 - DNA, 120 bp, Artificial Sequence
  ENSG00000148848_40 (sequence is synthesized)
attaagttctttaaaatgtaaagccatgctggaaaataatactgctgagatacatacagaattactgtaactgattacacttggtaattgtactaaagccaaacatatatatactattaa

SEQ ID NO: 413681 - DNA, 120 bp, Artificial Sequence
  ENSG00000148848_41 (sequence is synthesized)
aaaggtttacagaattttatggtgcattacgtgggcattgtctttttagatgcccaaatccttagatctggcatgttagcccttcctccaattataagaggatatgaactgagtttttct

SEQ ID NO: 413682 - DNA, 120 bp, Artificial Sequence
  ENSG00000148848_42 (sequence is synthesized)
tttgttgtttgttcttagctgtaattcctatgcttctatttcagagagccaggagagtttgatattaaaggaggttaaaactgtgatcttatgccatgtcatcaatggccacttaggggc

SEQ ID NO: 413683 - DNA, 120 bp, Artificial Sequence
  ENSG00000148848_43 (sequence is synthesized)
catggctgatgacacattcttatctctacagtactaatgtgttattatagagccatgcattttatttctgaataagaacatatttaaactaatattcccttacaatatggacagtattaa

SEQ ID NO: 413684 - DNA, 120 bp, Artificial Sequence
  ENSG00000148848_44 (sequence is synthesized)
tccttccaagatgcagtatttatcaagtgaagcatatttagcagcaaattccattttaacataacttaggaaccaataaccagggtgttttgtggttgggggaggcacggggtggagtat

SEQ ID NO: 413685 - DNA, 120 bp, Artificial Sequence
  ENSG00000148848_45 (sequence is synthesized)
tcttttttatatcctcaaaacaaaaaaaatcaatacttatatttcaatggcaatctagtatttttttaaaagactgtataggcatgaataatagaggtggtttgagttttgtagggccat

SEQ ID NO: 413686 - DNA, 120 bp, Artificial Sequence
  ENSG00000148848_46 (sequence is synthesized)
cacctggaaagtcaatgtgactagacacaaagtagcccagaggctacttttcttcctacagcttattatagttgtaggttctatgacctcacttcatgggttccaggcaattccgctgaa

SEQ ID NO: 413687 - DNA, 120 bp, Artificial Sequence
  ENSG00000148848_47 (sequence is synthesized)
aggtttgtctcctgaaattttttaagtttgttttcctgacacatgtaatcagatgtgtagcaaccgagggaaacgaagcctaacattctccattgtggaaatacacacaggaggttacat

SEQ ID NO: 413688 - DNA, 120 bp, Artificial Sequence
  ENSG00000148848_48 (sequence is synthesized)
ttcacagcgtggatttttccagcttacacatgtgggatgacatcacagaaaccacaaaagcagcaaattaaactgtaggagagtcaatactcctgacgagtctcggggggggggcatttt

SEQ ID NO: 413689 - DNA, 120 bp, Artificial Sequence
  ENSG00000148848_49 (sequence is synthesized)
ggggggggggcatttttatgccttcttaactttatgagaattctcaggctgaactataggccattgttcccaggcaaatcaatacatcaatgcatcctcaaaaaaaaaaaaaaaaaaaaa

SEQ ID NO: 413690 - DNA, 120 bp, Artificial Sequence
  ENSG00000148848_50 (sequence is synthesized)
tgtcaaaatgttcttaaggagcctatggtctccacggtgctaaaaagagcctggtgctgggccgactggcagggctgagcatcctcctgccccctcgccactgatgtttactaagcactc

SEQ ID NO: 413691 - DNA, 120 bp, Artificial Sequence
  ENSG00000148848_51 (sequence is synthesized)
tgagccaatgagacccccagcagcagaaagggcacaaggtggcgccagggcagcagggccagatctttctcatgcacctcgacctcttgcagactttcttcgtgagatgtactactcatt

SEQ ID NO: 413692 - DNA, 120 bp, Artificial Sequence
  ENSG00000148848_52 (sequence is synthesized)
tcaaaactgctttgcagggctcccctatgtattcggggggcccacggcacactcaggctggagatccttcctcactgcgctcaagatggcctcagccagacaccagttacccagctgaaa

SEQ ID NO: 413693 - DNA, 120 bp, Artificial Sequence
  ENSG00000148848_53 (sequence is synthesized)
gtcacaatccctcccagaagtctcccaacactagtgctgaccagaggtggggctctcaggctaggagtttcacacacaatgacaggctgctgggggacattgcaggaccccttttcctct

SEQ ID NO: 413694 - DNA, 120 bp, Artificial Sequence
  ENSG00000148848_54 (sequence is synthesized)
cctctccatgctagaagccagccctaggcagctgcagttactccctgtgactcagcagcaggctgattcaacacagctgcccacacaaagccagtggctaatacatctgtttacctttcc

SEQ ID NO: 413695 - DNA, 120 bp, Artificial Sequence
  ENSG00000148848_55 (sequence is synthesized)
ctatcacccagacacaagcccctttcccaggtcaaaccacaggccgatgcatctccagtttgacagtcaaatcactacttccattgctactttagatcagccaaagtggtgactgctgca

SEQ ID NO: 413696 - DNA, 120 bp, Artificial Sequence
  ENSG00000148848_56 (sequence is synthesized)
gtgtgtggctatccctacaaggcccacccaagggatgcccaaagcccaaccttctccagggctgcagcccagagcaaccccaccagcctaagtccagcagaggacctcccacccaatgtc

SEQ ID NO: 413697 - DNA, 120 bp, Artificial Sequence
  ENSG00000148848_57 (sequence is synthesized)
ttgttctaattagaaggggaagttagccacagaaaatcaacttatctataattacaaaattctcttgactcaccttaaagttcctattgacatctactgcttttaaacctatttgaaaac

SEQ ID NO: 413698 - DNA, 120 bp, Artificial Sequence
  ENSG00000148848_58 (sequence is synthesized)
tctgatactaaaacaaatgacactctaagaaagtttgggagccccatgctgagaaccatttctgtgcagtgaggatgtttccagaagctacttacctacatgtgaatgtgccattttctt

SEQ ID NO: 413699 - DNA, 120 bp, Artificial Sequence
  ENSG00000148848_59 (sequence is synthesized)
tccttttgtagagaaaatcccctttactttttggaacagtaatggcagcttctagtacagccattacagtttcatatgagaaaaattaagaataactataaaattgttaaaatatccaat

SEQ ID NO: 413700 - DNA, 120 bp, Artificial Sequence
  ENSG00000148848_60 (sequence is synthesized)
aatggataatgatggccagaagatttaacatacaaagtaattctcaatgtaaagctattcagctcttccaggttgaatgccctgtaacccaccctgaccttccacatcatcttcaaaaag

SEQ ID NO: 413701 - DNA, 120 bp, Artificial Sequence
  ENSG00000148848_61 (sequence is synthesized)
cagtttctctgttccccatgattctcctataaggtaactctttagtcctccatttagcacattttaaatcctccaaagaataagtatcatgtgattattttagctttacaaaaaaaaagt

SEQ ID NO: 413702 - DNA, 120 bp, Artificial Sequence
  ENSG00000148848_62 (sequence is synthesized)
tgaatggcgttttattttcatggcctataagcaggtaccttagtagggcagatataggaaaaacaaattagagcaaaacaaatcctctacaaatccaaggcaggaaaagtggtggcagag

SEQ ID NO: 413703 - DNA, 120 bp, Artificial Sequence
  ENSG00000148848_63 (sequence is synthesized)
tgactcattctcctgtccctcccatcaggtcaaatcaggaggctgcagtgaatgcctgttctttgaatgtgtagcagttgttcctgtaactctttaaaacttggctataggctgtttagc

SEQ ID NO: 413704 - DNA, 120 bp, Artificial Sequence
  ENSG00000148848_64 (sequence is synthesized)
acagtacagattaaagatacagttacgtaaacagcaaagtaattttatagtgcttcatccatttatcatgctttggtttgctaattttttcacatacctttttctatcacagtctgttgc

SEQ ID NO: 413705 - DNA, 120 bp, Artificial Sequence
  ENSG00000148848_65 (sequence is synthesized)
ttttgtacacatttctcatattggggttcgacaggtaaacacaaactgctatttcagtagaaaaagttattgttatgaatattaaacccaataaattgtataaaggtaaatatcaatgtg

SEQ ID NO: 413706 - DNA, 120 bp, Artificial Sequence
  ENSG00000148848_66 (sequence is synthesized)
gagcccgtgggatcgcaggagcatgcgtctactgcctcactgacactcatctgagccctcccatgacatggagaccgtgaccagtgctgctgcagaggaggtcacgcgtccccaaggcct

SEQ ID NO: 413707 - DNA, 120 bp, Artificial Sequence
  ENSG00000148848_67 (sequence is synthesized)
cctgtgactggcagcattgactctgtggctttgccatcgtttccatgacaacagacacaacacagttctcggggctcaggaggggaagtccagcctaccaggcacgtctgcagaaacagt

SEQ ID NO: 413708 - DNA, 120 bp, Artificial Sequence
  ENSG00000148848_68 (sequence is synthesized)
gcaaggaagggcagcgacttcctggttgagcttctgctaaaacatggacatgcttcagtgctgctcctgagagagtagcaggttaccactctggcaggccccagccctgcagcaaggagg

SEQ ID NO: 413709 - DNA, 120 bp, Artificial Sequence
  ENSG00000148848_69 (sequence is synthesized)
aagaggactcaaaagtctggcctttcactgagcctccacagcagtgggggagaagcaagggttgggcccagtgtcccctttccccagtgacacctcagccttggcagccctgatgactgg

SEQ ID NO: 413710 - DNA, 120 bp, Artificial Sequence
  ENSG00000148848_70 (sequence is synthesized)
tctctggctgcaacttaatgctctgatatggcttttagcatttattatatgaaaatagcagggttttagtttttaatttatcagagaccctgccacccattccatctccatccaagcaaa

SEQ ID NO: 413711 - DNA, 120 bp, Artificial Sequence
  ENSG00000148848_71 (sequence is synthesized)
ctgaatggcaatgaaacaaactggagaagaaggtaggagaaagggcggtgaactctggctctttgctgtggacatgcgtgaccagcagtactcaggtttgagggtttgcagaaagccagg

SEQ ID NO: 413712 - DNA, 120 bp, Artificial Sequence
  ENSG00000148848_72 (sequence is synthesized)
gaacccacagagtcaccaacccttcatttaacaagtaagaatgttaaaaagtgaaaacaatgtaagagcctaactccatcccccgtggccattactgcataaaatagagtgcatttgaaa

SEQ ID NO: 413713 - DNA, 120 bp, Artificial Sequence
  ENSG00000148848_73 (sequence is synthesized)
gctaaattcacagatggacttaatgagggcttaggaagagcatctccaagggctgctctgaaagagggagtttagggtggaggagaaatcgtgttgagactggcgcatccggtatattcc

SEQ ID NO: 413714 - DNA, 120 bp, Artificial Sequence
  ENSG00000148848_74 (sequence is synthesized)
tgtgttcatcacacaaacaactggcaaacagaatgttcatcatatccccatcttcaagtctctgaggttttccataccaggaggaatgagcttggtctgacagtttctgcaagaacgctg

SEQ ID NO: 413715 - DNA, 120 bp, Artificial Sequence
  ENSG00000148848_75 (sequence is synthesized)
aattcagtctcagctccaaaggtgattcagagatgaatcagtaactgctttaatgatattaacatctcagaatcaaaaagaaccaagtattgtagatggcttaaaggagaaaagtatatc

SEQ ID NO: 413716 - DNA, 120 bp, Artificial Sequence
  ENSG00000148848_76 (sequence is synthesized)
ccttcatataccttgtttattctttatcaaaacattccagaatcctaactctgaaaacattaaccaattgctgtcactgacaaatgggacctgaggcctgtaaatacaaggatagagtcc

SEQ ID NO: 413717 - DNA, 120 bp, Artificial Sequence
  ENSG00000148848_77 (sequence is synthesized)
cagggactcgtagacccagttggttcataaaaagcagaagctttgctttcctaacagacggaaacaggcaggtgtgcagttcaggagctgggccctcttggtctttcttgctttttgcag

SEQ ID NO: 413718 - DNA, 120 bp, Artificial Sequence
  ENSG00000148848_78 (sequence is synthesized)
tctcagcacgtgttctggtctcaggtaagtggccatgaccatggcggctctagtcttcagccatctactgcaggcaacctctgtcttttcctgctcgtgctaaagcactgagagtgagtg

SEQ ID NO: 413719 - DNA, 120 bp, Artificial Sequence
  ENSG00000148848_79 (sequence is synthesized)
atgggggctcccagctcagctacacctccacctaggcaagagaacacggaggccctctctccactgcttacaagagcatggccacccaggatcttagcctcatgttcatgccccctctta

SEQ ID NO: 413720 - DNA, 120 bp, Artificial Sequence
  ENSG00000148908_0 (sequence is synthesized)
ctcctcctcctcctcgccttcctccggctcagccgccgcgccgccgggctgctccttcttcctcctcgggcgcccgcggcgatgttcaaccgcgccgtgagccggctgagcaggaagcgg

SEQ ID NO: 413721 - DNA, 120 bp, Artificial Sequence
  ENSG00000148908_1 (sequence is synthesized)
ccgccgtcagacatccacgacagcgatggcagttccagcagcagccaccagagcctcaagagcacagccaaatgggcggcatccctggagaatctgctggaagacccagaaggcgtgaaa

SEQ ID NO: 413722 - DNA, 120 bp, Artificial Sequence
  ENSG00000148908_2 (sequence is synthesized)
agatttagggaatttttaaaaaaggaattcagtgaagaaaatgttttgttttggctagcatgtgaagattttaagaaaatgcaagataagacgcagatgcaggaaaaggcaaaggagatc

SEQ ID NO: 413723 - DNA, 120 bp, Artificial Sequence
  ENSG00000148908_3 (sequence is synthesized)
accgcaccctctgatgttccagaaactccaggaccagatctttaatctcatgaagtacgacagctacagccgcttcttaaagtctgacttgtttttaaaacacaagcgaaccgaggaaga

SEQ ID NO: 413724 - DNA, 120 bp, Artificial Sequence
  ENSG00000148908_4 (sequence is synthesized)
ggaagaagatttgcctgatgctcaaactgcagctaaaagagcttccagaatttataacacatgagcccccaaaaagccgggactggcagctttaagaagcaaaggaatttcctctcagga

SEQ ID NO: 413725 - DNA, 120 bp, Artificial Sequence
  ENSG00000148908_5 (sequence is synthesized)
ccgtgccgggtttatcattgctttgttatttgtaaggactgaaatgtacaaaacccttcaatgggatgtgtgttttattaactgcttcaccagtaaattttgcatgatggctaagctaac

SEQ ID NO: 413726 - DNA, 120 bp, Artificial Sequence
  ENSG00000148908_6 (sequence is synthesized)
ataaaaaaagaataataataacttggaagttttagtttacaaaacagagattccttcaacactggacacgtcgagcattttgtagcttaattaaacctcatgtaaggccacaaggtgaaa

SEQ ID NO: 413727 - DNA, 120 bp, Artificial Sequence
  ENSG00000148908_7 (sequence is synthesized)
gaagaaaatgttttgttttggctagcatgtgaagattttaagaaaatgcaagataagacgcaggcctggaagaatttactgaaacacccgatgttagactccctggaaaccatctcatac

SEQ ID NO: 413728 - DNA, 120 bp, Artificial Sequence
  ENSG00000148908_8 (sequence is synthesized)
cttggagccaaacagtcctaaggctcccggaagctctcagataagccatgccacctctcctgacctctgtgtcctcatggggaaagtggggctaacaggaaaatgccctttgctgcatgt

SEQ ID NO: 413729 - DNA, 120 bp, Artificial Sequence
  ENSG00000148925_0 (sequence is synthesized)
tctcgcggtaagaggctgaggagccggcctgcaacctgccggggcggctccgctacgcgcagccgcctcagtggcttcctccacagccacctccggagggatctggctgaggaggaagtg

SEQ ID NO: 413730 - DNA, 120 bp, Artificial Sequence
  ENSG00000148925_1 (sequence is synthesized)
gaggtgtcactggccccggcctttgccccaatcttgtgtgggcactgaagggggactacaggttcgagagttatgggtgctacatgtgtgctttcagagcagtagtgtgaggaagcttgg

SEQ ID NO: 413731 - DNA, 120 bp, Artificial Sequence
  ENSG00000148925_2 (sequence is synthesized)
agtgggatggcaggacggcctcatccctatgatggtaactccagtgatccagagaattgggatcggaaattgcatagtagacctcgtaaactttataaacattcaagtacttcctcgcgt

SEQ ID NO: 413732 - DNA, 120 bp, Artificial Sequence
  ENSG00000148925_3 (sequence is synthesized)
attgctaaaggaggagttgaccacaccaaaatgagtctacatggtgctagtgggggacatgagagatcaagagatagacgaaggtcaagtgacagatcacgagattcatctcatgaaaga

SEQ ID NO: 413733 - DNA, 120 bp, Artificial Sequence
  ENSG00000148925_4 (sequence is synthesized)
acggagtctcagctcactccttgtattagaaatgtgacttctccaacacgacagcaccatgttgaacgagaaaaagatcacagttcctctcgtccaagcagtccgcgtcctcaaaaagca

SEQ ID NO: 413734 - DNA, 120 bp, Artificial Sequence
  ENSG00000148925_5 (sequence is synthesized)
tccccaaatggttccattagcagtgctgggaacagcagcagaaacagtagtcagtcaagttcagatggtagctgtaagacagctggggagatggtgtttgtatatgaaaatgcaaaagaa

SEQ ID NO: 413735 - DNA, 120 bp, Artificial Sequence
  ENSG00000148925_6 (sequence is synthesized)
ggagctcggaatataagaacgtcagaacgagtgacactaatagtggataacactagatttgttgtagacccatccatttttactgcacagccaaatacaatgttgggcaggatgtttgga

SEQ ID NO: 413736 - DNA, 120 bp, Artificial Sequence
  ENSG00000148925_7 (sequence is synthesized)
tctggccgagaacataactttacacgacccaatgagaaaggagagtatgaggtggcagagggaattggttccactgtgtttcgagcgattctggattactataaaacaggaataatccgt

SEQ ID NO: 413737 - DNA, 120 bp, Artificial Sequence
  ENSG00000148925_8 (sequence is synthesized)
tgtcctgatggcatatctattcctgaactgagagaagcatgtgactatctttgtatctcttttgaatatagcactattaaatgtagagatctcagtgccctaatgcatgagttatcaaat

SEQ ID NO: 413738 - DNA, 120 bp, Artificial Sequence
  ENSG00000148925_9 (sequence is synthesized)
gatggtgctcgtagacaatttgaattttatctggaagaaatgatcctccctctcatggtagctagtgcccagagtggggaacgggaatgtcatatagtggtgcttacagatgatgatgtg

SEQ ID NO: 413739 - DNA, 120 bp, Artificial Sequence
  ENSG00000148925_10 (sequence is synthesized)
tgtggccaagtcagttttgaaggagaggggtcttaagaagattagattgggaatagaaggttatcctacctacaaagaaaaagtaaagaaaaggcctggaggccgcccagaagtgatcta

SEQ ID NO: 413740 - DNA, 120 bp, Artificial Sequence
  ENSG00000148925_11 (sequence is synthesized)
caactatgtccaaagaccctttattcgaatgtcctgggagaaggaagaaggaaagagtcggcatgtagactttcagtgtgtaaagagtaaatctatcaccaatcttgcagcagctgcagc

SEQ ID NO: 413741 - DNA, 120 bp, Artificial Sequence
  ENSG00000148925_12 (sequence is synthesized)
agacattccccaggaccagctggtagtcatgcatccaactccacaagtggatgagctggatattctccctatccatcccccttctggcaacagtgacctcgatcctgatgcacagaatcc

SEQ ID NO: 413742 - DNA, 120 bp, Artificial Sequence
  ENSG00000148925_13 (sequence is synthesized)
aatgctgtgatgctgatcttccttgaaaccatagcatgctactcttcacagtgacgttgtactctcctcattctgcactgcaaggccactcttcttcattgtgagatgcacataacaatg

SEQ ID NO: 413743 - DNA, 120 bp, Artificial Sequence
  ENSG00000148925_14 (sequence is synthesized)
tttaggatattgcagtgtaggcttttttaaagaccaaaggtagctgaatggtttttttttaaatgagtacaactctagcattttgaagttccagttgtaaatgtatttgtttaccagtag

SEQ ID NO: 413744 - DNA, 120 bp, Artificial Sequence
  ENSG00000148925_15 (sequence is synthesized)
gtttgtgaaattggttctttgtatgggggatggtcctttttcacacagctaggtcttttcagaagtggtggaaattggcagctggggtactttcagtttggactgatattcatcacacct

SEQ ID NO: 413745 - DNA, 120 bp, Artificial Sequence
  ENSG00000148925_16 (sequence is synthesized)
cagataaaatgcagagtaatatatagttgcactttataaatggtggttaaatggaaatgttcaagccattttatagttgtgatgcacaatataatttaagtgcttctgtcaaagtattcc

SEQ ID NO: 413746 - DNA, 120 bp, Artificial Sequence
  ENSG00000148925_17 (sequence is synthesized)
tccagtacaatttgtatagtttgctgcccttgatgagcaaaaagtatttatcttgggcttatctgaatgatcaggatgagatttaatgcccatatcttaccagttcagttatctccagag

SEQ ID NO: 413747 - DNA, 120 bp, Artificial Sequence
  ENSG00000148925_18 (sequence is synthesized)
ccatttcaccctttagagtgagtcacatgcagggagtgtgaatgtcagaggtggtttattatccagtctgccttacccttaatctgttcacagatatttatttactaatgcttttttttt

SEQ ID NO: 413748 - DNA, 120 bp, Artificial Sequence
  ENSG00000148925_19 (sequence is synthesized)
cttaagagttatgggataggaaaatgaagtgtttgctcttcatttactaaatgattgtaaacttgagtttttcatcaaaataaaattccattgttttaatgtttctgaccaaatttataa

SEQ ID NO: 413749 - DNA, 120 bp, Artificial Sequence
  ENSG00000148925_20 (sequence is synthesized)
acacgatgctgttttgttagaaacgtcagtgctgcacaacccacggctgagtcagtgtctgtgagaaaataaactgaattaatatgtagagggggttgtatctctgaatatttaaagcct

SEQ ID NO: 413750 - DNA, 120 bp, Artificial Sequence
  ENSG00000148925_21 (sequence is synthesized)
aaatattgcaacagcattattacacagtagagggaggaagctaaaggaagtctatggacaggtgaggtagggggagactggggaattttctgattgttcagaggaatcttgaagatgatg

SEQ ID NO: 413751 - DNA, 120 bp, Artificial Sequence
  ENSG00000148925_22 (sequence is synthesized)
gaaatatcagatgtgctaaagtttcctagtaatgcccaaggatgctgacctggctttcagtgcttcattgtttgaaagagcagagtccctttatactctgatttcaaaatttttttcttg

SEQ ID NO: 413752 - DNA, 120 bp, Artificial Sequence
  ENSG00000148925_23 (sequence is synthesized)
aactgaattaatatgtagagggggttgtatctctgaatatttaaagcctaaatattgcaacagcattattacacagtagagggaggaagctaaaggaagtctatggacagtacttcctcg

SEQ ID NO: 413753 - DNA, 120 bp, Artificial Sequence
  ENSG00000148925_24 (sequence is synthesized)
accacagatgggagaagaatattcacaaagtacgtactctggcatgttttctctcccctgaatcatcacgaattatttcttgtttatgtaaagaagagctcttctcatagaccagcctgg

SEQ ID NO: 413754 - DNA, 120 bp, Artificial Sequence
  ENSG00000148925_25 (sequence is synthesized)
gggtcaatccagcccatcacctatttttataaattaagttttatgtattgcctatggctgctttcatgctacagtggcagagttgagtagttgtaacagaaactgcatggctcgcaatgc

SEQ ID NO: 413755 - DNA, 120 bp, Artificial Sequence
  ENSG00000148925_26 (sequence is synthesized)
ccaaagtatttattatatgtccctgtacagaagaatatgccccgcccatgccatatacacatggttagttatttgttgactctctggaacttgatagattttttttctttgtatttaaaa

SEQ ID NO: 413756 - DNA, 120 bp, Artificial Sequence
  ENSG00000148925_27 (sequence is synthesized)
gtgggcactgaagggggactacaggttcgagagcttatctgagcaggctggactactaatactatgagggagaaggaaatggaatgcctacagttctaactgggttatgggtgctacatg

SEQ ID NO: 413757 - DNA, 120 bp, Artificial Sequence
  ENSG00000148925_28 (sequence is synthesized)
gatctggctgaggaggaagtggaggtgtcactggccccggcctttgccccaatcttgtgtgggcactgaagggggactacagggcagaggaaccccgtgccccgcccctttcctgtcatc

SEQ ID NO: 413758 - DNA, 120 bp, Artificial Sequence
  ENSG00000148925_29 (sequence is synthesized)
tcagacgaacgcagcgacatcctgaggaaggcgcatcacaataggggataaggtggtgggcagcctccctctgggtgaagaggagtgagaccccactaacgtgctgcgtggttttatgtt

SEQ ID NO: 413759 - DNA, 120 bp, Artificial Sequence
  ENSG00000148926_0 (sequence is synthesized)
actcagtggtttcttggtgacactggatagaacagctcaagccttgccacttcgggcttctcactgcagctgggcttggacttcggagttttgccattgccagtgggacgtctgagactt

SEQ ID NO: 413760 - DNA, 120 bp, Artificial Sequence
  ENSG00000148926_1 (sequence is synthesized)
tctccttcaagtacttggcagatcactctcttagcagggtctgcgcttcgcagccgggatgaagctggtttccgtcgccctgatgtacctgggttcgctcgccttcctaggcgctgacac

SEQ ID NO: 413761 - DNA, 120 bp, Artificial Sequence
  ENSG00000148926_2 (sequence is synthesized)
cgctcggttggatgtcgcgtcggagtttcgaaagaagtggaataagtgggctctgagtcgtgggaagagggaactgcggatgtccagcagctaccccaccgggctcgctgacgtgaaggc

SEQ ID NO: 413762 - DNA, 120 bp, Artificial Sequence
  ENSG00000148926_3 (sequence is synthesized)
cgggcctgcccagacccttattcggccccaggacatgaagggtgcctctcgaagccccgaagacagcagtccggatgccgcccgcatccgagtcaagcgctaccgccagagcatgaacaa

SEQ ID NO: 413763 - DNA, 120 bp, Artificial Sequence
  ENSG00000148926_4 (sequence is synthesized)
cttccagggcctccggagctttggctgccgcttcgggacgtgcacggtgcagaagctggcacaccagatctaccagttcacagataaggacaaggacaacgtcgcccccaggagcaagat

SEQ ID NO: 413764 - DNA, 120 bp, Artificial Sequence
  ENSG00000148926_5 (sequence is synthesized)
cagcccccagggctacggccgccggcgccggcgctccctgcccgaggccggcccgggtcggactctggtgtcttctaagccacaagcacacggggctccagcccccccgagtggaagtgc

SEQ ID NO: 413765 - DNA, 120 bp, Artificial Sequence
  ENSG00000148926_6 (sequence is synthesized)
agcatcccgctggtgcctcccgggacgaaggacttcccgagcggtgtggggaccgggctctgacagccctgcggagaccctgagtccgggaggcaccgtccggcggcgagctctggcttt

SEQ ID NO: 413766 - DNA, 120 bp, Artificial Sequence
  ENSG00000148926_7 (sequence is synthesized)
gcaagggcccctccttctgggggcttcgcttccttagccttgctcaggtgcaagtgccccagggggcggggtgcagaagaatccgagtgtttgccaggcttaaggagaggagaaactgag

SEQ ID NO: 413767 - DNA, 120 bp, Artificial Sequence
  ENSG00000148926_8 (sequence is synthesized)
aaatgaatgctgagacccccggagcaggggtctgagccacagccgtgctcgcccacaaactgatttctcacggcgtgtcaccccaccagggcgcaagcctcactattacttgaactttcc

SEQ ID NO: 413768 - DNA, 120 bp, Artificial Sequence
  ENSG00000148926_9 (sequence is synthesized)
aaaacctaaagaggaaaagtgcaatgcgtgttgtacatacagaggtaactatcaatatttaagtttgttgctgtcaagattttttttgtaacttcaaatatagagatatttttgtacgtt

SEQ ID NO: 413769 - DNA, 120 bp, Artificial Sequence
  ENSG00000148926_10 (sequence is synthesized)
atatattgtattaagggcattttaaaagcaattatattgtcctcccctattttaagacgtgaatgtctcagcgaggtgtaaagttgttcgccgcgtggaatgtgagtgtgtttgtgtgca

SEQ ID NO: 413770 - DNA, 120 bp, Artificial Sequence
  ENSG00000148926_11 (sequence is synthesized)
tgaaagagaaagactgattacctcctgtgtggaagaaggaaacaccgagtctctgtataatctatttacataaaatgggtgatatgcgaacagcaaaccaataaactgtctcaatgctga

SEQ ID NO: 413771 - DNA, 120 bp, Artificial Sequence
  ENSG00000148926_12 (sequence is synthesized)
tacttggcagatcactctcttagcaggtaggtgccgcagaccctgcgggttaagaggtggggtggggggcagtgcttgccaaggccctaaactgggagcgctgggtgaggggaacaaccc

SEQ ID NO: 413772 - DNA, 120 bp, Artificial Sequence
  ENSG00000148926_13 (sequence is synthesized)
actttggagggttctctgagagatagatacaccccatatcctgggcccagctcgtgcacacagctggaggtccagagacccagtcccctctgctccgtcagccaagttccaagaagttga

SEQ ID NO: 413773 - DNA, 120 bp, Artificial Sequence
  ENSG00000148926_14 (sequence is synthesized)
gcagagaccctctgggagcctggcggggtgcagcggcctcccctgcggggcctgtcacccggccggcgcgtgcaaacgcctctggcgcctctctgcgcggagggagataagcgtctgagc

SEQ ID NO: 413774 - DNA, 120 bp, Artificial Sequence
  ENSG00000148926_15 (sequence is synthesized)
cagggaaagcgcgggctaaacccgcctcgccggggcccctgcccgccctccgtgccccgcccgggcggtgcagctggcccgggtgctcacgctcgactctctttcttcttttccagggtc

SEQ ID NO: 413775 - DNA, 120 bp, Artificial Sequence
  ENSG00000148926_16 (sequence is synthesized)
cgctcggttggatgtcgcgtcggagtttcgaaagaagtgagtccgggcagcgccttcccccttgctggtacctggcaggcaaggggaactgaccgttggtcccgaaggtctagaagtgaa

SEQ ID NO: 413776 - DNA, 120 bp, Artificial Sequence
  ENSG00000148926_17 (sequence is synthesized)
gtgtgcgggaggagttctctgtctccactcccctggcccgggggatcgtcggggctggaccgcagctcagatggcgcgagcagtttccagctccctctggctctagaatggctcccgttc

SEQ ID NO: 413777 - DNA, 120 bp, Artificial Sequence
  ENSG00000148935_0 (sequence is synthesized)
gagattcacagaggcaaggcagagaacaagacctgtgcttctttactccaaactcttagcagtgtggacactgattaactgcagctggggtctgatttgcccagcctgtctttgatattg

SEQ ID NO: 413778 - DNA, 120 bp, Artificial Sequence
  ENSG00000148935_1 (sequence is synthesized)
atcaatgaactccttctcaaggaatgctttcctctaactgcggtgaaggtggtggctctggtggttctctccaacatgggtgtctgggttttgactgcctaagagaaggtattacaagtg

SEQ ID NO: 413779 - DNA, 120 bp, Artificial Sequence
  ENSG00000148935_2 (sequence is synthesized)
gataaataatgtgcactgctctgagcccaaaggtacgcagtggacctggcctctctgatatgcatcagtatagccaatggctagccagcagacatgaagctaatttgctaccaatgaaag

SEQ ID NO: 413780 - DNA, 120 bp, Artificial Sequence
  ENSG00000148935_3 (sequence is synthesized)
aagatctggccttgtggttaaccaatctattagggaaggagattacagcagaaacttttatggagaagttggacaatggtgccttgctctgtcaacttgcagaaactatgcaggagaaat

SEQ ID NO: 413781 - DNA, 120 bp, Artificial Sequence
  ENSG00000148935_4 (sequence is synthesized)
tcaaggagagcatggatgctaacaagcccacaaagaatctaccgttgaagaagatcccatgcaaaaccagtgcaccctcgggctccttttttgccagagacaatacagcaaatttcttat

SEQ ID NO: 413782 - DNA, 120 bp, Artificial Sequence
  ENSG00000148935_5 (sequence is synthesized)
cctggtgccgagatttaggggtggatgaaacgtgtctatttgaatcggaaggtttggtcctccacaagcaacccagagaagtgtgtctctgtctgctagagcttggccggattgcagcca

SEQ ID NO: 413783 - DNA, 120 bp, Artificial Sequence
  ENSG00000148935_6 (sequence is synthesized)
ggtatggtgtggagcctcctggtttgataaagctggaaaaagagattgaacaagaagaaacactttctgccccttctccttcaccttctccttcatcaaagtcttctggaaaaaagagta

SEQ ID NO: 413784 - DNA, 120 bp, Artificial Sequence
  ENSG00000148935_7 (sequence is synthesized)
caggaaacttactggatgatgcagtgaaacgaatttctgaagatcctccttgcaaatgcccaaacaagttctgtgtggagcggctctcccaaggaagataccgagtgggagaaaagatcc

SEQ ID NO: 413785 - DNA, 120 bp, Artificial Sequence
  ENSG00000148935_8 (sequence is synthesized)
tcttcattaggatgctgcacaacaaacatgtcatggtccgtgtgggaggaggctgggaaacttttgcagggtatttgttgaaacacgacccctgccgaatgctgcagatctcccgtgtgg

SEQ ID NO: 413786 - DNA, 120 bp, Artificial Sequence
  ENSG00000148935_9 (sequence is synthesized)
atcccctatccaaagcaaatctccaactctaaaggacatgaatccagataactacttggtggtctctgccagttataaggctaagaaggaaattaagtgaaacaaattggtcatgacaag

SEQ ID NO: 413787 - DNA, 120 bp, Artificial Sequence
  ENSG00000148935_10 (sequence is synthesized)
gggaccctcataatggcctgtatccacttctccagtatagtcagtttagttcatatgttctgaaaactgttttggagaaagatagacagaaaaatgtcatcatattgaaaaatgttcaaa

SEQ ID NO: 413788 - DNA, 120 bp, Artificial Sequence
  ENSG00000148935_11 (sequence is synthesized)
gagtagcactatttatttttaatgcttctgtagaatatgacctattaaaagaaaatctaaactcaaatttaaattatccaaattttaggcaaattattatttctcaatatgcgaacacag

SEQ ID NO: 413789 - DNA, 120 bp, Artificial Sequence
  ENSG00000148935_12 (sequence is synthesized)
tatttagaacacaatattagaaacacaattctaactaaagataaataaggagaaaacatttaggatttgcagataagtcaacagaaagtgcctgctttacactcatgagtaaaagcactc

SEQ ID NO: 413790 - DNA, 120 bp, Artificial Sequence
  ENSG00000148935_13 (sequence is synthesized)
cagacatttttataattgcaagatttttatgcttttttttttttttttttacaaaatgatgattagtgtgataatgtgctgcaaaaaatatccaacagcactacacataagtacagagta

SEQ ID NO: 413791 - DNA, 120 bp, Artificial Sequence
  ENSG00000148935_14 (sequence is synthesized)
ttcacaatagtaatatgttactggaaaggccacttccgaaaagtttacattcacttggaaggctgccttaaagtatatctcttatctatgaccaaatatctggggtacttttagaagttt

SEQ ID NO: 413792 - DNA, 120 bp, Artificial Sequence
  ENSG00000148935_15 (sequence is synthesized)
tcagtacacccccttagagaatagcttatgagttatttcacacattcctgagcacatggctgtgtttagaatgatctagtgtaattcatacatgagctgacatacgttgatactttgacg

SEQ ID NO: 413793 - DNA, 120 bp, Artificial Sequence
  ENSG00000148935_16 (sequence is synthesized)
agtaaattgtacagtcaaatgttcattgatttcatgttatttcaaagcattttcttattaaaaatatatctttagttaatcctattttgctatgctttctagtaaagtaaattcactgta

SEQ ID NO: 413794 - DNA, 120 bp, Artificial Sequence
  ENSG00000148935_17 (sequence is synthesized)
gctaatgatgttacagacttacgtatacccttgtatacctgggacagggctgttttataccaataaacagcaaaatattgtccttactcattcaagaattaaaaggataaattttaaaaa

SEQ ID NO: 413795 - DNA, 120 bp, Artificial Sequence
  ENSG00000148935_18 (sequence is synthesized)
ttttacttccgctcggtctatgaggactgatgaaatgtaggaaatctgtttctggcagggagaaaaaatcgttttcccaaacagcactaaaaggagccatcagagaagtatgaagagggg

SEQ ID NO: 413796 - DNA, 120 bp, Artificial Sequence
  ENSG00000148935_19 (sequence is synthesized)
tagtgcggctgtagctgctgccgctgccgccaggctggtggggtgcggggagcggctgctgcaggacctgtgcctggagggggccggccccgagaagctgcaggagcccagcccggagcc

SEQ ID NO: 413797 - DNA, 120 bp, Artificial Sequence
  ENSG00000148935_20 (sequence is synthesized)
cctggtgccgagatttaggggtggatgaaacgtgtctatttgaatcggaaggtttgggatttggaggccagtgactatgcttcatctatttctctgagaaagaatctactcaacaagaaa

SEQ ID NO: 413798 - DNA, 120 bp, Artificial Sequence
  ENSG00000148935_21 (sequence is synthesized)
acttttgatatataactcttgaggtgggtggcagaagaagccagtgtctaagatattgtgctgagattctttaggaataatacttaacagaggatgaagtttgttgaactgtctgtagat

SEQ ID NO: 413799 - DNA, 120 bp, Artificial Sequence
  ENSG00000148935_22 (sequence is synthesized)
ggaattgcaaattgaacaaaattactttatggccttatgtatttaaaaatctttggacaagagtataggccctagcaaaatggaaaatgaccatatgcaaagcatggaaaacctttgtaa

SEQ ID NO: 413800 - DNA, 120 bp, Artificial Sequence
  ENSG00000148935_23 (sequence is synthesized)
aaagcactcatgtttgagatagcttactttttatgccctaataagcaaatggcaaaagtaaaaattattttagaattccccttaaattataagagggtaaaataaaatctatcattttca

SEQ ID NO: 413801 - DNA, 120 bp, Artificial Sequence
  ENSG00000148935_24 (sequence is synthesized)
gaactttacatggtgaaacgaatttctgaagatcctccttgcaaatgcccaaacaagttctgtgtggagcggctctcccaaggaagataccgagtgggagaaaagatcctcttcattagg

SEQ ID NO: 413802 - DNA, 120 bp, Artificial Sequence
  ENSG00000148935_25 (sequence is synthesized)
ccgtgcgaatggggccatgccgaccaaagcgccgatggatgtggcgcaggtagcgcgcccactgcaaggcccggcgcacggtggcggggtcccaggtgctgacgtaggtagtgcttgaga

SEQ ID NO: 413803 - DNA, 120 bp, Artificial Sequence
  ENSG00000148935_26 (sequence is synthesized)
gttggacaggctctttctctaagagtgggtattcactgcagggggtgactttctgattctctggaaacaaccatgtgttccttatccctattgcggaacaccccggacaaccgcagcacg

SEQ ID NO: 413804 - DNA, 120 bp, Artificial Sequence
  ENSG00000148935_27 (sequence is synthesized)
cggttctccagcaggcgcagagagagcaggacgtcacagtgaccgagggcctggaagttcgctaatcccggaactggaccccgcccaaagccgccctcttgcctccactggttgtgcagc

SEQ ID NO: 413805 - DNA, 120 bp, Artificial Sequence
  ENSG00000148935_28 (sequence is synthesized)
catgtcaatctcccagcgtctttatccgtgttccttgactctgggcaacttaaaagccctaatacttttactttcgccacacaaagaggttcttcttagtggagggagagcagatgtagg

SEQ ID NO: 413806 - DNA, 120 bp, Artificial Sequence
  ENSG00000148935_29 (sequence is synthesized)
gcatcctaccgagaatttccggaaccacgtgcgagatgatgccagtcatgaacgtctccgcgcttcctttcgctttggaaatatccttaagtagaaattttctgagctttgcctaaaact

SEQ ID NO: 413807 - DNA, 120 bp, Artificial Sequence
  ENSG00000148935_30 (sequence is synthesized)
agaatctgtgttgaggtttttcaaaattaagtaacgccagagacatactgtgacgtgaggaaacgctcttaaatgaaattttaagatctatttgagaaacatgtactaaaaatgtactga

SEQ ID NO: 413808 - DNA, 120 bp, Artificial Sequence
  ENSG00000148935_31 (sequence is synthesized)
cctcctattaatgccaggcgctatgctgaattctgggccttcacattgtccttccattattagaactgaagcccagattatttgaaacaaaaaataaacttcaataatttattaaaattt

SEQ ID NO: 413809 - DNA, 120 bp, Artificial Sequence
  ENSG00000148942_0 (sequence is synthesized)
attccacccccagtggttattaatttcagaacacatctgaattccttctctgtggcatatgctttaggagaggagcagacagctcttagctagggtcagatttcaaattctcatctcttg

SEQ ID NO: 413810 - DNA, 120 bp, Artificial Sequence
  ENSG00000148942_1 (sequence is synthesized)
gtgccaataccaccaccagattcttctttgaagtcaacttttgagatcttcactaagtacacgttggtgtctgaagattcacacgagtgcctctggtaatcattttcttcagggaatcac

SEQ ID NO: 413811 - DNA, 120 bp, Artificial Sequence
  ENSG00000148942_2 (sequence is synthesized)
agtctctcctctcagcaaagcatccactgtactgaactttgcttttggaaacatcttcttcctgagacctcgttgaaagaaactctctggtgtcatactttccaatatggaggtgaagaa

SEQ ID NO: 413812 - DNA, 120 bp, Artificial Sequence
  ENSG00000148942_3 (sequence is synthesized)
ctttgcagtttgggattatgttgtatttgcagccctctttttcatttcctctggaattggggtgttctttgccattaaggagagaaaaaaggcaacttcccgagagttcctggttggggg

SEQ ID NO: 413813 - DNA, 120 bp, Artificial Sequence
  ENSG00000148942_4 (sequence is synthesized)
aaggcaaatgagctttggccctgtcggcttgtctctgacagccagcttcatgtcagctgtcacggtcctggggaccccttctgaagtctaccgctttggggcatccttcctagtcttctt

SEQ ID NO: 413814 - DNA, 120 bp, Artificial Sequence
  ENSG00000148942_5 (sequence is synthesized)
cattgcttacctatttgtcatcctcttaacatcagagctctttctccctgtgttctacagatctggtatcaccagcacttatgagtacttacaactacgattcaacaaaccagttcgcta

SEQ ID NO: 413815 - DNA, 120 bp, Artificial Sequence
  ENSG00000148942_6 (sequence is synthesized)
tgctgccacggtcatctacattgtacagacgattctctacacaggagtggtggtgtatgctcctgccctggcactcaatcaagtgactgggtttgatctctggggctctgtgtttgcaac

SEQ ID NO: 413816 - DNA, 120 bp, Artificial Sequence
  ENSG00000148942_7 (sequence is synthesized)
aggaattgtttgcacattctactgtaccctgggaggattaaaagcagtggtgtggacagatgcatttcagatggttgtcatgattgtgggcttcttaacggttctcattcaaggatcaac

SEQ ID NO: 413817 - DNA, 120 bp, Artificial Sequence
  ENSG00000148942_8 (sequence is synthesized)
tcatgctgggggattccacaatgtattagagcaatcaacaaatggatctcgactacatatatttgactttgatgtagatcctctcaggcgacacactttttggactatcacagtgggagg

SEQ ID NO: 413818 - DNA, 120 bp, Artificial Sequence
  ENSG00000148942_9 (sequence is synthesized)
aacttttacttggctcggaatctatggggtcaatcaatcaactattcagcgatgcatctcttgcaaaacagaaaagcatgctaagcttgccttgtattttaacttgctgggtctctggat

SEQ ID NO: 413819 - DNA, 120 bp, Artificial Sequence
  ENSG00000148942_10 (sequence is synthesized)
cattctggtgtgtgctgtcttctctggcttaatcatgtactctcactttaaagactgtgacccttggacttctggcatcatctcagcaccagaccagctgatgccgtactttgtcatgga

SEQ ID NO: 413820 - DNA, 120 bp, Artificial Sequence
  ENSG00000148942_11 (sequence is synthesized)
gatatttgccacaatgccaggactgccaggactttttgtggcttgtgccttcagtggaactctgagcaccgtggcttccagcatcaatgccttggcaacagtgacctttgaggattttgt

SEQ ID NO: 413821 - DNA, 120 bp, Artificial Sequence
  ENSG00000148942_12 (sequence is synthesized)
caagagctgttttcctcatctctccgacaagctgagcacctggatcagtaaaggcttatgtctcttatttggcgtgatgtgtacctctatggctgtggctgcatctgtcatgggaggtgt

SEQ ID NO: 413822 - DNA, 120 bp, Artificial Sequence
  ENSG00000148942_13 (sequence is synthesized)
tgtgcaggcttccctcagcattcacggcatgtgtggaggaccaatgctgggcttattctccctgggaatcgtgttcccttttgtgaattggaagggtgcactaggaggtcttcttactgg

SEQ ID NO: 413823 - DNA, 120 bp, Artificial Sequence
  ENSG00000148942_14 (sequence is synthesized)
aatcaccttgtcattttgggtggccattggggccttcatttaccctgcaccagcctctaagacatggcctttgcctctgtcaacagaccaatgtatcaaatcaaatgtgacagcaacagg

SEQ ID NO: 413824 - DNA, 120 bp, Artificial Sequence
  ENSG00000148942_15 (sequence is synthesized)
gcctccagtactatccagcagacctggaatagctgatacctggtactcgatctcctacctttactacagtgcagtgggctgcttaggatgcattgttgctggagtaatcatcagcctcat

SEQ ID NO: 413825 - DNA, 120 bp, Artificial Sequence
  ENSG00000148942_16 (sequence is synthesized)
aacaggtcgccaaagaggtgaggatattcaaccactgttaattagaccagtttgtaatttattttgcttttggtctaagaagtacaaaacactatgctggtgtggagttcagcatgacag

SEQ ID NO: 413826 - DNA, 120 bp, Artificial Sequence
  ENSG00000148942_17 (sequence is synthesized)
tgggacagagcaggaaaaccttgagaatggcagtgcccggaaacagggggctgaatctgtcttacagaacggactcagaagagaaagcctggtacatgttccaggctatgatcctaagga

SEQ ID NO: 413827 - DNA, 120 bp, Artificial Sequence
  ENSG00000148942_18 (sequence is synthesized)
caaaagctacaacaatatggcatttgagactacccatttctaaggcaatacctgtatgaatgcacacacacacgtgcaatacacacacacacacacaaactccacatacttcttgcctac

SEQ ID NO: 413828 - DNA, 120 bp, Artificial Sequence
  ENSG00000148942_19 (sequence is synthesized)
ttgttagtagatatgtatagttgccattgctagaagacagggatgtctggtgcctatttctacttatttataactacatgcaaaatgactgtctctcgggatattctttgaaagactcca

SEQ ID NO: 413829 - DNA, 120 bp, Artificial Sequence
  ENSG00000148942_20 (sequence is synthesized)
actttcacagagaaaaaccaacctgctccaaatgcccttgactacttccttcttgaataaattagggctggatttcattaccattcaagaaagcgaagtctttttgcttggtgtcatatt

SEQ ID NO: 413830 - DNA, 120 bp, Artificial Sequence
  ENSG00000148942_21 (sequence is synthesized)
aaacttcaggtttttcgttttagtagttttttaaccatcaaaatatcttggagtttagaggcagaacgggaaacagaaatatgcatatttaacactttcctgccacgagggataaaatag

SEQ ID NO: 413831 - DNA, 120 bp, Artificial Sequence
  ENSG00000148942_22 (sequence is synthesized)
aggaatgacatccacccctgacctcatacctgacatacatgtagatatattttatgccacccatctcccatcctgtagctacaattggcatacaactactattaacctcccttcaccacc

SEQ ID NO: 413832 - DNA, 120 bp, Artificial Sequence
  ENSG00000148942_23 (sequence is synthesized)
actgtcaggtcctcttccagtcattccagtcattagctgtcctgaccaaacattaaaaaaaaaattcagctaaatacagaagaagatggtatgtctggctagtgggagtgattataacta

SEQ ID NO: 413833 - DNA, 120 bp, Artificial Sequence
  ENSG00000148942_24 (sequence is synthesized)
aaaactttgctccttttgtgctgtccatgcagtatgtcttcttcctttctatcactttacaatgaaaaattgcctcagagctcaataagaagtctagagcctttttccagggctaaggaa

SEQ ID NO: 413834 - DNA, 120 bp, Artificial Sequence
  ENSG00000148942_25 (sequence is synthesized)
agagaaaaggaatgtcctatagaaggttgttaggatagaatttggtaaaagaacgttgcaaatattgtaacagaccataggagatttcatcagcaataggattcttctttggagaaaata

SEQ ID NO: 413835 - DNA, 120 bp, Artificial Sequence
  ENSG00000148942_26 (sequence is synthesized)
aagctcaactcactccacctgggttaggtaacagaagtggagaacttcatagttcgtgtctagaaaataatgtttaaagttctggagaatgagggtattgcagattaaaaggcgagttga

SEQ ID NO: 413836 - DNA, 120 bp, Artificial Sequence
  ENSG00000148942_27 (sequence is synthesized)
caaatgaaggagcagtgaaagatttttggaagaagtgaagaagtgaaattctgaaaaggtaaaagaaagaaccagtatgtcacaggggccaagtcagaggacagataataagaaacaaag

SEQ ID NO: 413837 - DNA, 120 bp, Artificial Sequence
  ENSG00000148942_28 (sequence is synthesized)
ttgtatctgagagtcatatattaggacaggtgtcagatatttattttggtggccagataaaagcaaaaggcctagaaacagtgtgttagcaaagtaagaagaaatggtccaaataggcaa

SEQ ID NO: 413838 - DNA, 120 bp, Artificial Sequence
  ENSG00000148942_29 (sequence is synthesized)
ggataaggaaatccaaaggttgtctttaaatatttctcaaaagagaaagccttgaaagaagcatacaatagagaaaaaataaattaccagtatttattattagaaaagatagaaagacag

SEQ ID NO: 413839 - DNA, 120 bp, Artificial Sequence
  ENSG00000148942_30 (sequence is synthesized)
acaaatcagtggaggaattaaaacagagaaactggagtttataaaacagagcccaatccttgccttctctccctccactcaaatagaaaaggagaatggagaaagagaaagaaggtatta

SEQ ID NO: 413840 - DNA, 120 bp, Artificial Sequence
  ENSG00000148942_31 (sequence is synthesized)
ggctacagtttataagagagatgagaaaaaaatacatttgggaatagagggaaagggtcaaaaggggtcacatttggagaaatatctgaaaatgagaaggagcagaatttttggaaacat

SEQ ID NO: 413841 - DNA, 120 bp, Artificial Sequence
  ENSG00000148942_32 (sequence is synthesized)
tttttaaagtctggcaacgctaattaagctgttgatctaaggatttgcaaattgagaggtgcaattattttccaaatgatttgtgacactcttattaattagaatatatattttgtgaat

SEQ ID NO: 413842 - DNA, 120 bp, Artificial Sequence
  ENSG00000148942_33 (sequence is synthesized)
agaatatatattttgtgaatattgaaatctgagccaaaactagttagctttattaatatcttagggaaagaagagagaaagaaagagggagggagagagagaaagaaagaaagaaagaaa

SEQ ID NO: 413843 - DNA, 120 bp, Artificial Sequence
  ENSG00000148942_34 (sequence is synthesized)
gaaagaaagaaaaagacaggaagaggaagagagagacagaaagaataaaaaaacagcaattctgaggatgagaataaattaatggtaggtattacatatgcatatacatatatatatctg

SEQ ID NO: 413844 - DNA, 120 bp, Artificial Sequence
  ENSG00000148942_35 (sequence is synthesized)
tacacatatatatgtaaatatgatttggaatacatcaggattgtgaacttccacttgggatagcataaaagcaaaatataccatacaatttttcattttactcacaaattttactcacaa

SEQ ID NO: 413845 - DNA, 120 bp, Artificial Sequence
  ENSG00000148942_36 (sequence is synthesized)
attctcctaaagacatttcactaggtcagtacatttccgagaaagttttaaaaacgtttcttcttttatagtccctaattatcttacctggagtgttatcaaaatgtcatacaactggaa

SEQ ID NO: 413846 - DNA, 120 bp, Artificial Sequence
  ENSG00000148942_37 (sequence is synthesized)
aatgcaattattattataaaaatatctctgccttctcttgtgtaatgaaatttatggcattaggagatgacatttcaagagattttagaggtcaatgtagagactccccccattcttctt

SEQ ID NO: 413847 - DNA, 120 bp, Artificial Sequence
  ENSG00000148942_38 (sequence is synthesized)
aattgaacaaacatgcataaatctagggtttcaggtagagagcagatgggaatctacaggaaactgtcttccatagtgtatgaaaaccgtgtttgttgtgtggtgaagcaaaaggaaact

SEQ ID NO: 413848 - DNA, 120 bp, Artificial Sequence
  ENSG00000148942_39 (sequence is synthesized)
atgaagcgcacagtcaatagattcagctagtgagtcccagcactcctttcaggccctcactaggattagcagcccagagtcatgccaaggccactggtgcagtacaaagacagttcagtg

SEQ ID NO: 413849 - DNA, 120 bp, Artificial Sequence
  ENSG00000148942_40 (sequence is synthesized)
acaagttccatccataccatggaagagggttaaacttgtggctgtttttgccacagcatgaccagagacattctcaataaatggcactaggaatgatgagttttagaggggcctaaaatg

SEQ ID NO: 413850 - DNA, 120 bp, Artificial Sequence
  ENSG00000148942_41 (sequence is synthesized)
ttccaaacttgatactcaccactgtacctttaaagcacaaccacagatattggtaaaaatggaacagaattacctcaatacctctttaactcattctgtatgaattcattttgatgacag

SEQ ID NO: 413851 - DNA, 120 bp, Artificial Sequence
  ENSG00000148942_42 (sequence is synthesized)
acattttttgtcaccatttggaataagaactacaacagcttatgattgaggtgaggaactgcagtcaaatggcttaggttcaaacacgagttctgacacaaatctaggtaattttgggca

SEQ ID NO: 413852 - DNA, 120 bp, Artificial Sequence
  ENSG00000148942_43 (sequence is synthesized)
atattttaaaatcttagtttattcaccaattaataggagtaaaaattacccctacttaatagaattattatgaagatttatataagtaaatcatataaagtgcttagcacagtgtgactg

SEQ ID NO: 413853 - DNA, 120 bp, Artificial Sequence
  ENSG00000148942_44 (sequence is synthesized)
gcccacatggaacatttaatacttggtctgcagtatatgaagaaaatggtgtacatgttaacttaaatggtttcattatttctcttcaggatttttaagatgtgggatcagaatatatgt

SEQ ID NO: 413854 - DNA, 120 bp, Artificial Sequence
  ENSG00000148942_45 (sequence is synthesized)
tactattttgagaattagaaataataagaaaaacagaatgtatacattaaaagtcatgcctaaatttccaaagagtagtttttttaatgccagagtttaaataaaatattattttccaga

SEQ ID NO: 413855 - DNA, 120 bp, Artificial Sequence
  ENSG00000148942_46 (sequence is synthesized)
gagtaacttttctaaaggtcctaaattctgaaaagagagaaaactactgttataaacaagtttattactaaaagatgcaattcattactatgatttattattattttgtacatgtaaacc

SEQ ID NO: 413856 - DNA, 120 bp, Artificial Sequence
  ENSG00000148942_47 (sequence is synthesized)
ttgataaataaacagcatctcaacccaagtttattactcattgcacagttcaaagcaactatgactctcaaaatagcaacagaaggtggggagggtcttttccctttgtttatatagtat

SEQ ID NO: 413857 - DNA, 120 bp, Artificial Sequence
  ENSG00000148942_48 (sequence is synthesized)
ttgctaaaaatgaactttactattttgtggctttatagggttacaccatttcattctaaagagaaacaaaaagtaaaccattggccatgtggctttcaaacagtatttcaaagagaatat

SEQ ID NO: 413858 - DNA, 120 bp, Artificial Sequence
  ENSG00000148942_49 (sequence is synthesized)
tactgaaatatttttgtgctgttacagtcttaatcaaacattattacaaagatcagatacggaaaaaatagaggagtctccccttaattgttccctttgaaataaattgttttaaattat

SEQ ID NO: 413859 - DNA, 120 bp, Artificial Sequence
  ENSG00000148942_50 (sequence is synthesized)
tacagaagttatagctgtatgtacatgcacatttgtatatttacaagtctcatgtacttaatctcaatattgcaaattagctaggtttactatagagttaactgcttttatctagcattt

SEQ ID NO: 413860 - DNA, 120 bp, Artificial Sequence
  ENSG00000148942_51 (sequence is synthesized)
ataatcttgtagtataacctattttcaaataactaaaatttaattgatgtcatcaatggtacacatgaaaatgatacaaatttataaactaataaaatgtaactcgtcattgatagtaaa

SEQ ID NO: 413861 - DNA, 120 bp, Artificial Sequence
  ENSG00000148942_52 (sequence is synthesized)
aaggcttatgtaggtacagctggtggactttctattccatatcatgaaatgtacatgtggtagatgtcaaaatcctgcatgtgctattcaggacacacttataaacacaaatgcactgtg

SEQ ID NO: 413862 - DNA, 120 bp, Artificial Sequence
  ENSG00000148942_53 (sequence is synthesized)
agatatgtgaagaatcccacacatagattcttacacttccaaagatccagcagggtatcaggaaagaatgactagctagtttaccttaactgcctttattttcagatactcttctatact

SEQ ID NO: 413863 - DNA, 120 bp, Artificial Sequence
  ENSG00000148942_54 (sequence is synthesized)
ttaccttaactgcctttattttcagatactcttctatacttaccctacactctagacgaggcttatccaacccacggcctgtgggccgcatacggcccaggatggctttgaatgcagccc

SEQ ID NO: 413864 - DNA, 120 bp, Artificial Sequence
  ENSG00000148942_55 (sequence is synthesized)
ttttgtaattttttaaatcttagcagctatcattagtgtttgtgtattttatgtgtactccaaggcaactccttctttcaacgtggcccagggaggccaaaagattggacacccctgcaa

SEQ ID NO: 413865 - DNA, 120 bp, Artificial Sequence
  ENSG00000148942_56 (sequence is synthesized)
actaatcacatcaatctctcttgattacactgtgtgatggtcatattagtctctctacatgggaagatgttgtgcttactatggccagtcactttgacaaagaaaagccaaattcttttc

SEQ ID NO: 413866 - DNA, 120 bp, Artificial Sequence
  ENSG00000148942_57 (sequence is synthesized)
taaagaattgttccttattaccaaactcccagtaaccccctcaaagaataattgccccttgcttaatcatgcaattgcatattatgtttatactcacttcagcacttatcagagataatt

SEQ ID NO: 413867 - DNA, 120 bp, Artificial Sequence
  ENSG00000148942_58 (sequence is synthesized)
tcagagataattgcagtttcacaaggtttactttttaaagtataaacaaattatgtatttacttactaatagaaaatataggtaatttggggaaatttatgtacattgttaaataaaatt

SEQ ID NO: 413868 - DNA, 120 bp, Artificial Sequence
  ENSG00000148942_59 (sequence is synthesized)
ggtaaatatattaaagaccaagatttgcagtaacatttatcatatcaaatctccaaatctagtggaggaatttaaacagaggacacagacagctcttgggagagtcttcatatttttatt

SEQ ID NO: 413869 - DNA, 120 bp, Artificial Sequence
  ENSG00000148942_60 (sequence is synthesized)
ggaatttaaacagaggacacagacagctcttgggagagtcttcatatttttattgatgagaatcctgaagcacagatcacagagtgagatgccagcaaatctcaaactggaattcaagga

SEQ ID NO: 413870 - DNA, 120 bp, Artificial Sequence
  ENSG00000148942_61 (sequence is synthesized)
ctgtgaagaagtatttaacactacctcctaatatgggataagggcaaatctccagcaataggcatctaattatagcagaattcgttattccaaaattaagcagaagtatgtcggcttatc

SEQ ID NO: 413871 - DNA, 120 bp, Artificial Sequence
  ENSG00000148942_62 (sequence is synthesized)
tgtcacagtttcctgaggaaggtgctgttgtttaacattcttttcattaccaacctttaggagaatttaatctctgcactcattcaagaaaatcatgcctaataagaaaaaaatctaatg

SEQ ID NO: 413872 - DNA, 120 bp, Artificial Sequence
  ENSG00000148943_0 (sequence is synthesized)
gtaggttaagggagaagatggcggcgctaggggaacccgtgcggctggagagagatatttgtagagcaattgaattattggaaaaactacaaaggagtggagaagtaccaccacagaaac

SEQ ID NO: 413873 - DNA, 120 bp, Artificial Sequence
  ENSG00000148943_1 (sequence is synthesized)
ttcaggctttgcaaagagtccttcaaagtgaattctgcaatgctgtgagagaggtatatgaacatgtctatgagactgtggacatcagtagcagtcctgaagtgagagcgaacgctactg

SEQ ID NO: 413874 - DNA, 120 bp, Artificial Sequence
  ENSG00000148943_2 (sequence is synthesized)
caaaggctactgttgctgcatttgctgccagtgaaggacattctcatcctcgagttgttgagctaccaaaaacagaagagggccttggattcaatattatgggaggcaaagaacaaaact

SEQ ID NO: 413875 - DNA, 120 bp, Artificial Sequence
  ENSG00000148943_3 (sequence is synthesized)
ctccaatctatatatcccgaataattccaggtggaattgctgatagacatgggggcctcaaacgtggagatcaactcctctctgttaatggagtgagtgttgaaggagaacatcatgaaa

SEQ ID NO: 413876 - DNA, 120 bp, Artificial Sequence
  ENSG00000148943_4 (sequence is synthesized)
aagctgtagaactgctgaaagccgcacaaggaaaggttaaattagtggtacgatacacacccaaagtcttagaagaaatggagtcgcgctttgaaaaaatgagatcagcaaaacgcaggc

SEQ ID NO: 413877 - DNA, 120 bp, Artificial Sequence
  ENSG00000148943_5 (sequence is synthesized)
aacagacctaatacatttcaaaacttgatatttcattttgcgttttagctagagaagttttccttgtgacttactaatggctgcaatgccaatgattgtaagaaaacaaacaaatttatc

SEQ ID NO: 413878 - DNA, 120 bp, Artificial Sequence
  ENSG00000148943_6 (sequence is synthesized)
atgaaattctccttgtcattttataaatgcctattttaacatcatttatggttccagagatgcatacacttttttctgacaagaaaaagtaaaaggtgatgagggcaattctgtcctact

SEQ ID NO: 413879 - DNA, 120 bp, Artificial Sequence
  ENSG00000148943_7 (sequence is synthesized)
gtttttacaggcctttttcaaatgcagattttgtcataaagttgttatagattttttaaaatgcttttttaatattaaaatgtacttttacattcttaatctttttttagaaaggaaaag

SEQ ID NO: 413880 - DNA, 120 bp, Artificial Sequence
  ENSG00000148943_8 (sequence is synthesized)
ttttcttcatttagctgctgatttaaaagtaaagttctccaattctttttttttgcttactctattttttttaacctgtgaaatttctttacagttttccaagaaattaagcataacagt

SEQ ID NO: 413881 - DNA, 120 bp, Artificial Sequence
  ENSG00000148943_9 (sequence is synthesized)
ctcatctacggcagttcattacactgtcaatgttaacatcattgctgcattttgtactttgaacacacacataatatatataaccagtggtaaatcatgactcagtacagtgcaagtttt

SEQ ID NO: 413882 - DNA, 120 bp, Artificial Sequence
  ENSG00000148943_10 (sequence is synthesized)
cttttacttaaacataatatataatggatattcatttatactgatttatgaaagtaagtttttaaacactgaaacaatcattgctaaaatacatattcttaatatttgagcattgaggca

SEQ ID NO: 413883 - DNA, 120 bp, Artificial Sequence
  ENSG00000148943_11 (sequence is synthesized)
ggcaagaggatgtaattgatagcattacttattacatccctatttatgttcaaccgtacatcaaattataaatgcaaaacaggttcagatttcatcttttgtgatttcttttaaatacta

SEQ ID NO: 413884 - DNA, 120 bp, Artificial Sequence
  ENSG00000148943_12 (sequence is synthesized)
ttcatttttatttaaatgcacagtatttcccctatattttagtccttccattcctagagacaaaccagttatttggtggtgggaagtagctgaagcaaagaaggaaaagtaataccttta

SEQ ID NO: 413885 - DNA, 120 bp, Artificial Sequence
  ENSG00000148943_13 (sequence is synthesized)
acctcactagcttcaagagtagacattcttactagctcaatttaaataattgattttaaataggaagaaaagaggatatatttaagatacatagaaattatgatgtgaagtattcatgag

SEQ ID NO: 413886 - DNA, 120 bp, Artificial Sequence
  ENSG00000148943_14 (sequence is synthesized)
aatctgtagattccatcaaaataagtaggaactcatactaaaattgttggatttaaagaggcaacttttgtttatgattcaaatatgggaatttgagaaatatttcatttgtccactgga

SEQ ID NO: 413887 - DNA, 120 bp, Artificial Sequence
  ENSG00000148943_15 (sequence is synthesized)
tgtcactattttactaaaaggcagctattagtgtgggactgtgactgaggtcttaaagactgaaagagttggggttcattttctgttacaacttacaggaacatttgtactttaagaaaa

SEQ ID NO: 413888 - DNA, 120 bp, Artificial Sequence
  ENSG00000148943_16 (sequence is synthesized)
atttaagtgacaaatgttagaagatgatggattgaaaaatataagtaatttggcatattgaccctatataaaaaagtgggcattttgtaacattccttcaggaagaatagaattgtatgc

SEQ ID NO: 413889 - DNA, 120 bp, Artificial Sequence
  ENSG00000148943_17 (sequence is synthesized)
ttttttctgcatgtttgtgatcactgtgagtctcagatgattattccagttttcaatgatttttcaaaataaaagtcaatcagcattgttatttatcattaaggtattgaacactggatt

SEQ ID NO: 413890 - DNA, 120 bp, Artificial Sequence
  ENSG00000148943_18 (sequence is synthesized)
gcatggttgaatgtgtctttaatccactacaaaatgtgcttgttattgataggatcatgttgttaaattgtaaattttcaaaattaattgatgttttaaaaatgttgagaccaaagtagt

SEQ ID NO: 413891 - DNA, 120 bp, Artificial Sequence
  ENSG00000148943_19 (sequence is synthesized)
atagaagtatggacttaatttaattgtaaaattattagaggtatttgttgtagagctttatatattaaagagaggtattggtgcatataaaaacagtaatattattgttatgcttgtatt

SEQ ID NO: 413892 - DNA, 120 bp, Artificial Sequence
  ENSG00000148943_20 (sequence is synthesized)
agtatagctacagctgcagtagcttttaagtatgtatcaacatttcattataaattatagcttcctggttctgtgtctcagctgtttcagaactttcagccaagttaaatcttttttggt

SEQ ID NO: 413893 - DNA, 120 bp, Artificial Sequence
  ENSG00000148943_21 (sequence is synthesized)
gttgaaacttttagtaagttgagtaagctatttttttccctacggtaatccacaatctgttctttgtgtgggttgacacctatttataattcttaaaataagggtagctcaaaggagcca

SEQ ID NO: 413894 - DNA, 120 bp, Artificial Sequence
  ENSG00000148943_22 (sequence is synthesized)
agtacagtagtttagcttgctactgttgagcatgaatagcagtaggttgttttcattaatgcagttttcataatgtatcccagaattttaaatcttgaccatagaaaaatacagtcattc

SEQ ID NO: 413895 - DNA, 120 bp, Artificial Sequence
  ENSG00000148943_23 (sequence is synthesized)
attggcaaagatgtacagtggtggtttagtgcagtgaggaaatgatgggaatttttatcttagaaatggatgattcgtgaataaaactaggtacatagtaagtgtatgatagatgtttga

SEQ ID NO: 413896 - DNA, 120 bp, Artificial Sequence
  ENSG00000148943_24 (sequence is synthesized)
tttgtaaattacaaatataaattatcacccccatttccatttattttcttgatatatcaaaatgtgttgacttagtgattctcaatcttagctacatattagcctggcagagctttaaaa

SEQ ID NO: 413897 - DNA, 120 bp, Artificial Sequence
  ENSG00000148943_25 (sequence is synthesized)
aattgatacctgggtcctattccataacaactaaatcaaaatcacccttttttttttttttgtaaagctttccaggtggttctaaaggacacctagggtcaataacccattataaaatga

SEQ ID NO: 413898 - DNA, 120 bp, Artificial Sequence
  ENSG00000148943_26 (sequence is synthesized)
acccattataaaatgatctgattacactggacactcttaggaagtatcaaaatagaacagttcaatttgcagctacttaatgattaattacatttcttaggttttttttttgtttttttt

SEQ ID NO: 413899 - DNA, 88 bp, Artificial Sequence
  ENSG00000148943_27 (sequence is synthesized)
ttttttggtttgtttgttttttgttttaaaagagacaggatcttgctttgtctcccaggctggaacaaactccttggcttccacctca

SEQ ID NO: 413900 - DNA, 88 bp, Artificial Sequence
  ENSG00000148943_28 (sequence is synthesized)
agtaatttcttttaggaataaaaggtacttggcattccttatttgggaagtaattacagtcttatctttttttttcttttttcttttt

SEQ ID NO: 413901 - DNA, 120 bp, Artificial Sequence
  ENSG00000148943_29 (sequence is synthesized)
ataaaatctaccagtaatttaaatgtgagctttttatgtctgtcatcattctgccccctttgcctttaaaacttacaaaaatacgtgtttgttatttgagaaagcatgtttaaaaattgc

SEQ ID NO: 413902 - DNA, 120 bp, Artificial Sequence
  ENSG00000148943_30 (sequence is synthesized)
agatgagaaatattgtcgttaataattatgtactgtcttaatgtgggcacttcatttgttagtataatactagataatagcagcctagttctttaggatttgacgattcaaatttttttt

SEQ ID NO: 413903 - DNA, 76 bp, Artificial Sequence
  ENSG00000148943_31 (sequence is synthesized)
acagagtcttgctctgttgcccaggctggcgtgcagtggtgtgatctcggctcacttcagcctccgccacctcaag

SEQ ID NO: 413904 - DNA, 120 bp, Artificial Sequence
  ENSG00000148943_32 (sequence is synthesized)
cctcggcctcccaaagtgctggaattactggcgtgagccaccatgcccagcctcaaatatgtttttaaaaaatatcattgtcctcctcctcttaagatttttttaagttattttgctcaa

SEQ ID NO: 413905 - DNA, 120 bp, Artificial Sequence
  ENSG00000148943_33 (sequence is synthesized)
ttttaagttattttgctcaagtacttaagtagtctggctcaagtactttgtttacaattaaaatggatattatagcatttaatagaagaaatggttatggcttatccaaaaagaatgtca

SEQ ID NO: 413906 - DNA, 120 bp, Artificial Sequence
  ENSG00000148943_34 (sequence is synthesized)
gcatgacctggtgtagacttaaaaaactacatgtttgtgaatattttataatgtggaatgatcattgaaatatcaaggattctagtaattgtatttcctgaataaatgtatgtttatgaa

SEQ ID NO: 413907 - DNA, 120 bp, Artificial Sequence
  ENSG00000148943_35 (sequence is synthesized)
ttttctaacttacattttgttgtgtcctctgccaacaatctggttttataattgttgtctaaagtttgctagtagtgtttcttcaaaggttattccaggtatggttaagtagtgagaaaa

SEQ ID NO: 413908 - DNA, 120 bp, Artificial Sequence
  ENSG00000148943_36 (sequence is synthesized)
atcacttattaattttcaagaactttgagactaatttgtattgactcggttttttaaaataactggcaaatgctatgcttctacttttaaaatttgtggtaatacccagaatggatgtaa

SEQ ID NO: 413909 - DNA, 120 bp, Artificial Sequence
  ENSG00000148943_37 (sequence is synthesized)
aataacatttttcaatagattacttcatttatcaatttaattctgattttaaggcttatttaaaataaatttgtatgagttatgtcctcgttctttggatttgaaaaaagttgatataac

SEQ ID NO: 413910 - DNA, 120 bp, Artificial Sequence
  ENSG00000148943_38 (sequence is synthesized)
tacacaatagataacgtttatgaaaggtatgtataaaaaaacataattcctggtggctgctgaaatgaaactttgaatttctatattttgctttgtctttcataaaatttaaagaaaaca

SEQ ID NO: 413911 - DNA, 120 bp, Artificial Sequence
  ENSG00000148948_0 (sequence is synthesized)
aagaaagaggggcagaggagggaaggcgactgcagtccgaaaggagcttttggaagctaggaccctaagcgtcaggacgtggcattggtcgagagaaagcctgggctggcaagagctgcc

SEQ ID NO: 413912 - DNA, 120 bp, Artificial Sequence
  ENSG00000148948_1 (sequence is synthesized)
gccggtgctgggagagcatttatttgggagaaaaagaggggagagagcagagggagggggaggaagagagttcaaaccgaagtggatggaaggggactggggtttctgccgcgcagggag

SEQ ID NO: 413913 - DNA, 120 bp, Artificial Sequence
  ENSG00000148948_2 (sequence is synthesized)
ccgtgagccagggcgatggcgctaagggcggcgcggagcagctgcgctcccgagaacgcgtctcctcgcagaggactagcagacatcgggaaggtctgcgccaacgggaaccaacttgtg

SEQ ID NO: 413914 - DNA, 120 bp, Artificial Sequence
  ENSG00000148948_3 (sequence is synthesized)
gctccaaaatgtacccaacgcagctggaaatgagatcaaagctgcagttgcatttgagaaggatgagaagagccagcgattagggaattttttttttacccgttttcttcctttttcttt

SEQ ID NO: 413915 - DNA, 120 bp, Artificial Sequence
  ENSG00000148948_4 (sequence is synthesized)
cttctttttctttttttctttcttttttcgtgtgtgttttttttaatttgcctaccaccctgtctgtcccctcacttcgccctccccatttgaaataaaagccccagtctcaacttccat

SEQ ID NO: 413916 - DNA, 120 bp, Artificial Sequence
  ENSG00000148948_5 (sequence is synthesized)
ccatcacctcggcgctcccggagccactaccggctgatggaggagaaggggacccgggggctggcaggggccaccggcgagggaccgcatcctgcgtctcccccgtgatcccggccccga

SEQ ID NO: 413917 - DNA, 120 bp, Artificial Sequence
  ENSG00000148948_6 (sequence is synthesized)
ccgcggagttctgcaacacctggaggatctggaccgggtgctgggggtgggggcggggacagaggaaggaaaggcaccccgagccttaaaaagaaaaaaaaaaagtagcggggggaggaa

SEQ ID NO: 413918 - DNA, 90 bp, Artificial Sequence
  ENSG00000148948_7 (sequence is synthesized)
gagccttaaaaagaaaaaaaaaaagtagcggggggaggaatgggtttcttcttgacagctgacggagccttgaaattttcctccactagc

SEQ ID NO: 413919 - DNA, 120 bp, Artificial Sequence
  ENSG00000148948_8 (sequence is synthesized)
gagggaaggagacaggatataaccggagtttggaggggagaggggaaggtggctggccgggtggctgaaatcaaaaattcaattgcgcactgggttgtgatgagaaatctaatcagatct

SEQ ID NO: 413920 - DNA, 120 bp, Artificial Sequence
  ENSG00000148948_9 (sequence is synthesized)
ttggcgaaggggccggccggaaggatggagagtgggggggaagttgctccccaaattcttcgaaggggaggctggggagaggaattgaccatgtaaaaggagacttttttttttggtggt

SEQ ID NO: 413921 - DNA, 120 bp, Artificial Sequence
  ENSG00000148948_10 (sequence is synthesized)
ggtggctgttgggtgccttgcaaaaatgaaggatgcaggacgcagctttctcctggaaccgaacgcaatggataaactgattgtgcaagagagaaggaagaacgaagctttttcttgtga

SEQ ID NO: 413922 - DNA, 120 bp, Artificial Sequence
  ENSG00000148948_11 (sequence is synthesized)
gccctggatcttaacacaaatgtgtatatgtgcacacagggagcattcaagaatgaaataaaccagagttagacccgcgggggttggtgtgttctgacataaataaataatcttaaagca

SEQ ID NO: 413923 - DNA, 120 bp, Artificial Sequence
  ENSG00000148948_12 (sequence is synthesized)
gctgttcccctccccccccccaaaaaaaaggatgattggaaatgaagaaccgaggattcacaaagaaaaaagtatgttcatttttctctataaaggagaaagtgagccaaggagatattt

SEQ ID NO: 413924 - DNA, 120 bp, Artificial Sequence
  ENSG00000148948_13 (sequence is synthesized)
ttggaatgaaaagtttggggcttttttagtaaagtaaagaactggtgtggtggtgttttcttttctttttgaatttcccacaagaggagaggaaattaataatacatctgcaaagaaatt

SEQ ID NO: 413925 - DNA, 120 bp, Artificial Sequence
  ENSG00000148948_14 (sequence is synthesized)
tcagagaagaaaagttgaccgcggcagattgaggcattgattgggggagagaaaccagcagagcacagttggatttgtgcctatgttgactaaaattgacggataattgcagttggattt

SEQ ID NO: 413926 - DNA, 120 bp, Artificial Sequence
  ENSG00000148948_15 (sequence is synthesized)
ttcttcatcaacctcctttttttttaatttttattccttttggtatcaagatcatgcgttttctcttgttcttaaccacctggatttccatctggatgttgctgtgatcagtctgaaata

SEQ ID NO: 413927 - DNA, 120 bp, Artificial Sequence
  ENSG00000148948_16 (sequence is synthesized)
gtttaacagggccctatttgaccccctgcttgtggtgctgctggctcttcaacttcttgtggtggctggtctggtgcgggctcagacctgcccttctgtgtgctcctgcagcaaccagtt

SEQ ID NO: 413928 - DNA, 120 bp, Artificial Sequence
  ENSG00000148948_17 (sequence is synthesized)
cagcaaggtgatttgtgttcggaaaaacctgcgtgaggttccggatggcatctccaccaacacacggctgctgaacctccatgagaaccaaatccagatcatcaaagtgaacagcttcaa

SEQ ID NO: 413929 - DNA, 120 bp, Artificial Sequence
  ENSG00000148948_18 (sequence is synthesized)
gcacttgagacacttggaaatcctacagttgagtaggaaccatatcagaaccattgaaattggggctttcaatggtctggcgaacctcaacactctggaactctttgacaatcgtcttac

SEQ ID NO: 413930 - DNA, 120 bp, Artificial Sequence
  ENSG00000148948_19 (sequence is synthesized)
taccatcccgaatggagcttttgtatacttgtctaaactgaaggagctctggttgcgaaacaaccccattgaaagcatcccttcttatgcttttaacagaattccttctttgcgccgact

SEQ ID NO: 413931 - DNA, 120 bp, Artificial Sequence
  ENSG00000148948_20 (sequence is synthesized)
agacttaggggaattgaaaagactttcatacatctcagaaggtgcctttgaaggtctgtccaacttgaggtatttgaaccttgccatgtgcaaccttcgggaaatccctaacctcacacc

SEQ ID NO: 413932 - DNA, 120 bp, Artificial Sequence
  ENSG00000148948_21 (sequence is synthesized)
gctcataaaactagatgagctggatctttctgggaatcatttatctgccatcaggcctggctctttccagggtttgatgcaccttcaaaaactgtggatgatacagtcccagattcaagt

SEQ ID NO: 413933 - DNA, 120 bp, Artificial Sequence
  ENSG00000148948_22 (sequence is synthesized)
gattgaacggaatgcctttgacaaccttcagtcactagtggagatcaacctggcacacaataatctaacattactgcctcatgacctcttcactcccttgcatcatctagagcggataca

SEQ ID NO: 413934 - DNA, 120 bp, Artificial Sequence
  ENSG00000148948_23 (sequence is synthesized)
tttacatcacaacccttggaactgtaactgtgacatactgtggctcagctggtggataaaagacatggccccctcgaacacagcttgttgtgcccggtgtaacactcctcccaatctaaa

SEQ ID NO: 413935 - DNA, 120 bp, Artificial Sequence
  ENSG00000148948_24 (sequence is synthesized)
ggggaggtacattggagagctcgaccagaattacttcacatgctatgctccggtgattgtggagccccctgcagacctcaatgtcactgaaggcatggcagctgagctgaaatgtcgggc

SEQ ID NO: 413936 - DNA, 120 bp, Artificial Sequence
  ENSG00000148948_25 (sequence is synthesized)
ctccacatccctgacatctgtatcttggattactccaaatggaacagtcatgacacatggggcgtacaaagtgcggatagctgtgctcagtgatggtacgttaaatttcacaaatgtaac

SEQ ID NO: 413937 - DNA, 120 bp, Artificial Sequence
  ENSG00000148948_26 (sequence is synthesized)
tgtgcaagatacaggcatgtacacatgtatggtgagtaattccgttgggaatactactgcttcagccaccctgaatgttactgcagcaaccactactcctttctcttacttttcaaccgt

SEQ ID NO: 413938 - DNA, 120 bp, Artificial Sequence
  ENSG00000148948_27 (sequence is synthesized)
cacagtagagactatggaaccgtctcaggatgaggcacggaccacagataacaatgtgggtcccactccagtggtcgactgggagaccaccaatgtgaccacctctctcacaccacagag

SEQ ID NO: 413939 - DNA, 120 bp, Artificial Sequence
  ENSG00000148948_28 (sequence is synthesized)
cacaaggtcgacagagaaaaccttcaccatcccagtgactgatataaacagtgggatcccaggaattgatgaggtcatgaagactaccaaaatcatcattgggtgttttgtggccatcac

SEQ ID NO: 413940 - DNA, 120 bp, Artificial Sequence
  ENSG00000148948_29 (sequence is synthesized)
actcatggctgcagtgatgctggtcattttctacaagatgaggaagcagcaccatcggcaaaaccatcacgccccaacaaggactgttgaaattattaatgtggatgatgagattacggg

SEQ ID NO: 413941 - DNA, 120 bp, Artificial Sequence
  ENSG00000148948_30 (sequence is synthesized)
agacacacccatggaaagccacctgcccatgcctgctatcgagcatgagcacctaaatcactataactcatacaaatctcccttcaaccacacaacaacagttaacacaataaattcaat

SEQ ID NO: 413942 - DNA, 120 bp, Artificial Sequence
  ENSG00000148948_31 (sequence is synthesized)
acacagttcagtgcatgaaccgttattgatccgaatgaactctaaagacaatgtacaagagactcaaatctaaaacatttacagagttacaaaaaacaaacaatcaaaaaaaaagacagt

SEQ ID NO: 413943 - DNA, 120 bp, Artificial Sequence
  ENSG00000148948_32 (sequence is synthesized)
ttattaaaaatgacacaaatgactgggctaaatctactgtttcaaaaaagtgtctttacaaaaaaacaaaaaagaaaagaaatttatttattaaaaattctattgtgatctaaagcagac

SEQ ID NO: 413944 - DNA, 120 bp, Artificial Sequence
  ENSG00000148948_33 (sequence is synthesized)
tacagcatagagacccccagtggagagctagactgtttgaattccagaaggaccaacaccagataaattatgaatgttgaacaagatgaccttacatccacagcagataatgataggtcc

SEQ ID NO: 413945 - DNA, 120 bp, Artificial Sequence
  ENSG00000148948_34 (sequence is synthesized)
gcttttgcctttgatgagtttttggcttactttttggcggagtctcttggacacgtttttgctggtgctggaagatcagatacatggaacctttgaaaactgattatttttctccgatat

SEQ ID NO: 413946 - DNA, 120 bp, Artificial Sequence
  ENSG00000148948_35 (sequence is synthesized)
aaaaaataaaaagaagaaaagaaaatagagtagtgcacggcaagctagaggattgtaaattttccttggtgaactttgaggatccataaagaagaaatggttctctttactgcgaggctg

SEQ ID NO: 413947 - DNA, 120 bp, Artificial Sequence
  ENSG00000148948_36 (sequence is synthesized)
cgaggctgcaaggtcacccaatgagagaggggccaaataagctggaacatcatctaatacactgaatgtaggagttactggaaaagcaagaataacttatgcggattaacaatatggaaa

SEQ ID NO: 413948 - DNA, 120 bp, Artificial Sequence
  ENSG00000148948_37 (sequence is synthesized)
catcctgagactactttggaatcgccataaattaagtgggttccagttttgcaaacagagaaacgggtccatgaacaatttgctacaggtataaagaagtatctgcagaaatccagagca

SEQ ID NO: 413949 - DNA, 120 bp, Artificial Sequence
  ENSG00000148948_38 (sequence is synthesized)
cttattaaacttctttgagttttctcaggaagatcaatacctgttggagaaattttactaagagcaagaaactgagagtgagaaagaagggactggccagagttactcagctagacagtg

SEQ ID NO: 413950 - DNA, 120 bp, Artificial Sequence
  ENSG00000148948_39 (sequence is synthesized)
ggtatttcgtacagtaggagatttcaacaacgtgacaatattctctaggcacttgggctcactgtctgtagcccccaccccccgcctttcgccacctccttgcttccctactcccccttc

SEQ ID NO: 413951 - DNA, 120 bp, Artificial Sequence
  ENSG00000148948_40 (sequence is synthesized)
acttctcaggcaaagagcatgccaacagcctttctcttctgctttgcttgtctgtggtggatactagcaacctatgtggttctaaagtatcaagctgagattatagtatcaatgagttgg

SEQ ID NO: 413952 - DNA, 120 bp, Artificial Sequence
  ENSG00000148948_41 (sequence is synthesized)
aacatcaatagtgccaagtgccatttaaaaatcttttcatcttcttgtgtgttgcttttggagaggaaatgttttcagatgtggtttctagccttgcagaaaaatggcattttcaggctg

SEQ ID NO: 413953 - DNA, 120 bp, Artificial Sequence
  ENSG00000148950_0 (sequence is synthesized)
gaaaagtgcgccctacgaaaggacggtcgacttcggcggggcccaggtgagaaaggcccacctgtgtcctggttgagggtctccagggttctttggggcccgaggaatttcagacctgaa

SEQ ID NO: 413954 - DNA, 120 bp, Artificial Sequence
  ENSG00000148950_1 (sequence is synthesized)
caatcaggtggacaacttcttgtgactttgggtattctgaaattactgccaatggtggcagagtctacatagaactatgcttcgtggtgttctggggaaaacctttcgacttgttggcta

SEQ ID NO: 413955 - DNA, 120 bp, Artificial Sequence
  ENSG00000148950_2 (sequence is synthesized)
tactattcaatatggctgtatagctcattgtgcttttgaatacgttggtggtgttgtcatgtgttctggaccatcaatggagcctacaattcaaaattcagatattgtctttgcagaaaa

SEQ ID NO: 413956 - DNA, 120 bp, Artificial Sequence
  ENSG00000148950_3 (sequence is synthesized)
tatttgtaaaagagtaattggtttggaaggagacaaaatcctcaccactagtccatcagatttctttaaaagccatagttatgtgccaatgggtcatgtttggttagaaggtgacaatct

SEQ ID NO: 413957 - DNA, 120 bp, Artificial Sequence
  ENSG00000148950_4 (sequence is synthesized)
acagaattctacagattccaggtgctatggacctattccatatggactaataagaggacgaatcttctttaagatttggcctctgagtgattttggatttttacgtgccagccctaatgg

SEQ ID NO: 413958 - DNA, 120 bp, Artificial Sequence
  ENSG00000148950_5 (sequence is synthesized)
ccacagattttctgatgattagtaagcatttattcttttgacttgattattgtctccttttcatgtgaatttattactcccgttgaaaccgtgtacttaccaataaactatttgctattc

SEQ ID NO: 413959 - DNA, 120 bp, Artificial Sequence
  ENSG00000148950_6 (sequence is synthesized)
gaaaagtgcgccctacgaaaggacggtcgacttcggcggggcccaggtgagaaaggcccacctgtgtcctggttgagggtctccagggttctttggggcccgaggccaatggtggcagag

SEQ ID NO: 413960 - DNA, 120 bp, Artificial Sequence
  ENSG00000148950_7 (sequence is synthesized)
acgaaaggacggtcgacttcggcggggcccaggtgagaaaggcccacctgtgtcctggttgagggtctccagggttctttggggcccgaggtgaagcgacttccagtcatttggaaagga

SEQ ID NO: 413961 - DNA, 120 bp, Artificial Sequence
  ENSG00000148950_8 (sequence is synthesized)
tgggatgaaaaggaaccttggtgataattttgatgtctgcaagatttagtaccagtgtaatgggattatcggtaacaccttcactgcagaaaaagccacctggcgctataactggcagca

SEQ ID NO: 413962 - DNA, 120 bp, Artificial Sequence
  ENSG00000148950_9 (sequence is synthesized)
actgagaactaatcctttcccatctcttggatgtcattcatgaagctcaaagctatttctgccctgctaactgtgattaattttataaacaacaacaacaaaaaatcaggtcatcaaggc

SEQ ID NO: 413963 - DNA, 120 bp, Artificial Sequence
  ENSG00000148950_10 (sequence is synthesized)
ataatatgtaaccttatgttaagctatatgacttaaaattatgcaagacatatacaaactaagctatatgattcaaaatttattaagctattgaaatagaaaagttgatcaatgatgtct

SEQ ID NO: 413964 - DNA, 120 bp, Artificial Sequence
  ENSG00000148950_11 (sequence is synthesized)
tgatgtcttggtttttttaattgaatggcaaattatttactattggtaacaattcatatttcagatcaaatattaatttaaatacttttatattcttttggctatagagccactatgaaa

SEQ ID NO: 413965 - DNA, 120 bp, Artificial Sequence
  ENSG00000148950_12 (sequence is synthesized)
ttaatcaaaatgtctagctgtaaggaattgaaataatatgtttcgtcatatgttttacctgtttttgactgcttcagttgctactgatgaaatgtttttggtgaataaaacataatttga

SEQ ID NO: 413966 - DNA, 120 bp, Artificial Sequence
  ENSG00000148950_13 (sequence is synthesized)
aaccaatcggaaggcgtattgctgaaaagtgcgccctacgaaaggacggtcgacttcggcggggcccaggtgagaaaggcccacctgtgtcctggttgagggtctccagggttctttggg

SEQ ID NO: 413967 - DNA, 76 bp, Artificial Sequence
  ENSG00000148950_14 (sequence is synthesized)
cctgaggtcaagagtttgagaccagcctgcccagcatggtgaaaccctgtctctgcatctcagctacttgggaggc

SEQ ID NO: 413968 - DNA, 120 bp, Artificial Sequence
  ENSG00000148950_15 (sequence is synthesized)
ctgagcattggctactgtaaagatatgagattaatttgtgactctcaaaagaaacaaattgtcataagctcagacatcttgagtatgttgcctttctgtatattctacaggaattcctca

SEQ ID NO: 413969 - DNA, 120 bp, Artificial Sequence
  ENSG00000148950_16 (sequence is synthesized)
gtttgctgcttgaagccactgctttatcagaaaaaataatttagttggaagtaggagcatgtagcaaataagaaataaataaaatgagttggcattctcctattggtttgcacagcaggc

SEQ ID NO: 413970 - DNA, 120 bp, Artificial Sequence
  ENSG00000148950_17 (sequence is synthesized)
aaaatgcaaagtaaacctctatttaattcccttagggaatgtagggccagggctcagaaatacactataattttgttataaagccaattaaaagaagaagaaaagcactcataatgttta

SEQ ID NO: 413971 - DNA, 120 bp, Artificial Sequence
  ENSG00000148950_18 (sequence is synthesized)
ttagtataatattgtgtgataatccaggactatgcttttaatccatgggataactatgaaataggcattttgaaatatggtaaattcctatcaacaaacatgttgtaaaatctgcatcta

SEQ ID NO: 413972 - DNA, 120 bp, Artificial Sequence
  ENSG00000148950_19 (sequence is synthesized)
tgggtattctgaaattactcatcttgactctactgtgcctggatgtagctgtgtgttttgtgtgtatcctgttcatggccaatggtggcagagtctacatagaactatgcttcgtggtgt

SEQ ID NO: 413973 - DNA, 120 bp, Artificial Sequence
  ENSG00000148950_20 (sequence is synthesized)
ggataatcaatcatggcatactgctaatgccttgattgcagctgatatggaggaaatatgtttactcttttgctaaagtgaagttcactgcggaggtgacgtgactttttcattctatag

SEQ ID NO: 413974 - DNA, 120 bp, Artificial Sequence
  ENSG00000148950_21 (sequence is synthesized)
ctaacacaattctgaagataaatttcactcattgtttacaagtctgaagtgtttttgttcagatgtcaacactaaagaataatctttgaggctcctagacttaaagtgttttctgatgtg

SEQ ID NO: 413975 - DNA, 120 bp, Artificial Sequence
  ENSG00000148950_22 (sequence is synthesized)
gatgtatatatgaagatcagcatctctgttgaaagagtagcaggttgtcctgaaatttgtatgtgttgctcacctggaaatattttaaccactcaaaagttataaagttagtgctattgg

SEQ ID NO: 413976 - DNA, 120 bp, Artificial Sequence
  ENSG00000148950_23 (sequence is synthesized)
tatgaatctagagaggcaggatacagttgagtaaaatgaaaatattatatgtatttttatctgcaagttatctgggacttctgtactttaaagttgcttaaaagtcatttgcaaaaatta

SEQ ID NO: 413977 - DNA, 120 bp, Artificial Sequence
  ENSG00000148950_24 (sequence is synthesized)
aagaacaaaattgtaacacaggtattcagtgaaagcatctgaaccagactccaaactctgttggtagtaaggagaatatattccaagtgtgatgtggcttcctaatctaaaacaatcttt

SEQ ID NO: 413978 - DNA, 120 bp, Artificial Sequence
  ENSG00000148950_25 (sequence is synthesized)
tgtggcttcctaatctaaaacaatcttttttatttatttatttttgtctttcggagacagattctcagtctgtcaacccaggttggactgcagtgcacaatcttggctcactgcaacctc

SEQ ID NO: 413979 - DNA, 120 bp, Artificial Sequence
  ENSG00000148950_26 (sequence is synthesized)
tacaggtgtgagccaccgcgcccaggtgctataacagtctttactagatctactggaaaaactgctgttgagtgccaatgggtcatgtttggttagaaggtgacaatctacagaattcta

SEQ ID NO: 413980 - DNA, 120 bp, Artificial Sequence
  ENSG00000148950_27 (sequence is synthesized)
aggtgagaaaggcccacctgtgtcctggttgagggtctccagggttctttggggcccgaggtaggtaatatcacgtaacgttcttctccttttgagtgccttcattcacattgagttaaa

SEQ ID NO: 413981 - DNA, 120 bp, Artificial Sequence
  ENSG00000148950_28 (sequence is synthesized)
ctgtatagctcattgtgcttttgaatacgttggtggtgttgtcatgaggtgacattgtgattgcaaaaagcccaagtgatccaaaatcaaatatttgtaaaagagtaattggtttggaag

SEQ ID NO: 413982 - DNA, 120 bp, Artificial Sequence
  ENSG00000148950_29 (sequence is synthesized)
ctttgatatttagtaaaagttattgtgcaagaaataaaagcaaaaatgcaatattaggatttgtatctattctataaaagagagccttaggacatttctccctacctctgaatgacatgc

SEQ ID NO: 413983 - DNA, 120 bp, Artificial Sequence
  ENSG00000148950_30 (sequence is synthesized)
ttgtaaaagagtaattggtttggaaggagacaaaatcctcaccactagtccatcagatttctttaaaagccatagttatcatttcagataagagatactcaacctgcaacttatagaggt

SEQ ID NO: 413984 - DNA, 120 bp, Artificial Sequence
  ENSG00000148950_31 (sequence is synthesized)
acttcggcggggcccaggtgagaaaggcccacctgtgtcctggttgagggtctccagggttctttggggcccgaggattcctgaaattgtggatcacccacctatgctttaagacatgct

SEQ ID NO: 413985 - DNA, 120 bp, Artificial Sequence
  ENSG00000148950_32 (sequence is synthesized)
aggacggtcgacttcggcggggcccaggtgagaaaggcccacctgtgtcctggttgagggtctccagggttctttggggcccgagcatcttgactctactgtgcctggatgtagctgtgt

SEQ ID NO: 413986 - DNA, 120 bp, Artificial Sequence
  ENSG00000148965_0 (sequence is synthesized)
agcagaggtaccaactatagctccacggccagaagataccagcagctctgcctttactgaaatttcatctggagaaaggtccacagcacaatgaggcttttcacaggcattgttttctgc

SEQ ID NO: 413987 - DNA, 120 bp, Artificial Sequence
  ENSG00000148965_1 (sequence is synthesized)
tccttggtcatgggagtcaccagtgaaagctggcgttcgtttttcaaggaggctctccaaggggttggggacatgggcagagcctattgggacataatgatatccaatcaccaaaattca

SEQ ID NO: 413988 - DNA, 120 bp, Artificial Sequence
  ENSG00000148965_2 (sequence is synthesized)
gatgctgcccaaagaggacctgggggtgtctgggctgctaaactcatcagccgttccagggtctatcttcagggattaatagactgctatttatttggaaacagcagcactgtattggag

SEQ ID NO: 413989 - DNA, 120 bp, Artificial Sequence
  ENSG00000148965_3 (sequence is synthesized)
gactcgaagtccaacgagaaagctgaggaatggggccggagtggcaaagaccccgaccgcttcagacctgacggcctgcctaagaaatactgagcttcctgctcctctgctctcagggaa

SEQ ID NO: 413990 - DNA, 120 bp, Artificial Sequence
  ENSG00000148965_4 (sequence is synthesized)
actgggctgtgagccacacacttctccccccagacagggacacagggtcactgagctttgtgtccccaggaactggtatagggcacctagaggtgttcaataaatgtttgtcaaattgaa

SEQ ID NO: 413991 - DNA, 120 bp, Artificial Sequence
  ENSG00000148985_0 (sequence is synthesized)
gttcgcgctctgaccagcccgcagagccagcccccgaccccgggccacctgggcccccgggttccgccggcactctcgccaccaccgcgtgggtctgacaagatgtaccaggtcccacta

SEQ ID NO: 413992 - DNA, 120 bp, Artificial Sequence
  ENSG00000148985_1 (sequence is synthesized)
ccactggatcgggatgggaccctggtacggctccgcttcaccatggtggccctggtcacggtctgctgtccacttgtcgccttcctcttctgcatcctctggtccctgctcttccacttc

SEQ ID NO: 413993 - DNA, 120 bp, Artificial Sequence
  ENSG00000148985_2 (sequence is synthesized)
aaggagacaacggccacacactgtggggccacgccctgcaggatgttctctgcggcctcccagcctttggaccccgatgggaccttgttccggcttcgcttcacagccatggtctggtgg

SEQ ID NO: 413994 - DNA, 120 bp, Artificial Sequence
  ENSG00000148985_3 (sequence is synthesized)
gccatcacttttcctgtgttcggcttcttcttctgcatcatctggtccctggtgttccactttgagtacacggtggccactgactgtggggtgcccaattacctgccctcggtgagctca

SEQ ID NO: 413995 - DNA, 120 bp, Artificial Sequence
  ENSG00000148985_4 (sequence is synthesized)
gccatcggcggggaggtgccccagcgctacgtgtggcgtttctgcatcggcctgcactcggcgcctcgcttcttggtggccttcgcctactggaaccactacctcagctgcacctccccg

SEQ ID NO: 413996 - DNA, 120 bp, Artificial Sequence
  ENSG00000148985_5 (sequence is synthesized)
tgttcctgctatcgcccgctctgccgcctcaacttcggcctcaatgtcgtggagaacctcgcgttgctagtgctcacttatgtctcctcctccgaggacttcaccatccacgaaaatgct

SEQ ID NO: 413997 - DNA, 120 bp, Artificial Sequence
  ENSG00000148985_6 (sequence is synthesized)
ttcattgtgttcattgcctcatccctcgggcacatgctcctcacctgcattctctggcggttgaccaagaagcacacagtaagtcaggaggatcgcaagtcctacagctggaaacagcgg

SEQ ID NO: 413998 - DNA, 120 bp, Artificial Sequence
  ENSG00000148985_7 (sequence is synthesized)
ctcttcatcatcaacttcatctccttcttctcggcgctggctgtctactttcggcacaacatgtattgtgaggctggagtgtacaccatctttgccatcctggagtacactgttgtctta

SEQ ID NO: 413999 - DNA, 120 bp, Artificial Sequence
  ENSG00000148985_8 (sequence is synthesized)
acaaggagctgctcataacctctcagcctgaggaaaagcgattctgaacccttcagtcctgcttgggaggacgcagcccactgcccagaaacaagaaacacgataccattctggccttcc

SEQ ID NO: 414000 - DNA, 120 bp, Artificial Sequence
  ENSG00000148985_9 (sequence is synthesized)
ccaccccacatcctctcttggccttactgaagatgggggaagggtaagaaggaagggtgtaggccaaggctcaccccagtgctgctggcttctcctctccacccctcatatgggcgtggg

SEQ ID NO: 414001 - DNA, 120 bp, Artificial Sequence
  ENSG00000148985_10 (sequence is synthesized)
gtcctcaaacatcacctttacctgagaggccccaagaagctgagctggcagagagctccaccatttggtgctaaaaaaaaaaacgtcctgaggttcatgaccaccatccagtttctggcc

SEQ ID NO: 414002 - DNA, 120 bp, Artificial Sequence
  ENSG00000148985_11 (sequence is synthesized)
tttacacagtcacctttcactgaggtcaggagcccctgagcagtggctgctccctgacaaccacagccatttctctgcacgggggtcattcataggactaatgtatttcatgatctactg

SEQ ID NO: 414003 - DNA, 120 bp, Artificial Sequence
  ENSG00000148985_12 (sequence is synthesized)
tgcacatccaggcctgtggccacagtcccctgctaaagttgctcaggtgttctagtcctgacttcacctttttgatttggtgtgtgccctagggtatgtacccttccccatctgagcctc

SEQ ID NO: 414004 - DNA, 120 bp, Artificial Sequence
  ENSG00000148985_13 (sequence is synthesized)
ggtgtgtccatgtgtctggcgggggatgggtggactgtatgatttccaaggactctaccagtcagtggttctgatgtcatcgggtggaggtggtgttctatacctaaaggatgacctgct

SEQ ID NO: 414005 - DNA, 120 bp, Artificial Sequence
  ENSG00000148985_14 (sequence is synthesized)
ccagaaacagcaccagcacagcatgtattttcttctcttctgaaagttctggcttgtagacccctcccctcctttgcaaaggtatgggatagaggggtcagatgcagatctctactgtaa

SEQ ID NO: 414006 - DNA, 120 bp, Artificial Sequence
  ENSG00000148985_15 (sequence is synthesized)
aatgggctccctggtatctcctgtcttccctactgctccaaaccctaaattttggttgtacattttatttgaaaggaaaataaattttttttttgggccaacagttgcctaggcttgcta

SEQ ID NO: 414007 - DNA, 120 bp, Artificial Sequence
  ENSG00000148985_16 (sequence is synthesized)
ggaggtacggtctatccctagcgggggctccaaggcagcccagaagaaaatcaaggacatctgtcctcaggattcgggtaatggtgaggtgggaactgagttctaatgggaaccctggca

SEQ ID NO: 414008 - DNA, 120 bp, Artificial Sequence
  ENSG00000148985_17 (sequence is synthesized)
gaggggtgctggggttggggctggggcttgggaacaaactgagggtggttggtcagaatctaggactatagcactgtgtttgggtagtgtgggagactggagaatagaagagatggaggc

SEQ ID NO: 414009 - DNA, 120 bp, Artificial Sequence
  ENSG00000148985_18 (sequence is synthesized)
tgcaaatggggatagaatgaggagtcgcatctaggcggcagtgagttaggaacagtgtcagaggactggtctgtcataattccagcgccccacccatgtacatgggtttcttttccccca

SEQ ID NO: 414010 - DNA, 120 bp, Artificial Sequence
  ENSG00000148985_19 (sequence is synthesized)
agagactccgcccccttccttggagcgccgcgactcgggctgagggagctcgggccaatcagagggacggccccagaatggcatggtagatggaacgcagctgagaggtctgacaagatg

SEQ ID NO: 414011 - DNA, 120 bp, Artificial Sequence
  ENSG00000148985_20 (sequence is synthesized)
caggcaggttccagtctgcgggggagatggagaaggtgccaccatgctgctgcacaaatcccaggatagctggggaatgagaatccagcactttgggcctaggacctggaaggagaggtc

SEQ ID NO: 414012 - DNA, 120 bp, Artificial Sequence
  ENSG00000148985_21 (sequence is synthesized)
taccactgctcctcggcccatcactcccccagaggcagggacgtgaacacatagtcgtcattcttgctgcccctgcctgtgctcccttccatgaccgctagtgggagccaagggagataa

SEQ ID NO: 414013 - DNA, 120 bp, Artificial Sequence
  ENSG00000148985_22 (sequence is synthesized)
ccccgccgttcgcgctctgaccagcccgcagagccagcccccgaccccgggccacctgggcccccgggttccgccggcactctcgccaccaccgcgtgggtgcccaattacctgccctcg

SEQ ID NO: 414014 - DNA, 120 bp, Artificial Sequence
  ENSG00000148985_23 (sequence is synthesized)
cccccttccttggagcgccgcgactcgggctgagggagctcgggccaatcagagggacggccccagaatggcatggtagatggaacgcagctgagaggtgcccaattacctgccctcggt

SEQ ID NO: 414015 - DNA, 120 bp, Artificial Sequence
  ENSG00000148985_24 (sequence is synthesized)
ggatgagggaggagtggggaagtgttccctgaggggacgggcctgcccctaccacattcggaccttcctacttcgtggtgtgggcactccctgcaatgtggctcccaatcctctttccct

SEQ ID NO: 414016 - DNA, 120 bp, Artificial Sequence
  ENSG00000148985_25 (sequence is synthesized)
ctctcctgaacaaaggcgggaacagctctaggccagagtttctgggatgtgcctcaccgggtctcactgcctgcaaaggtagatggaacgcagctgagaggactgaagcttcaataggag

SEQ ID NO: 414017 - DNA, 120 bp, Artificial Sequence
  ENSG00000148985_26 (sequence is synthesized)
attcgaccctttccttgccccggtccgccggcgctgctgggaaggcttcctagtctctctgcccgcacttcccgcccagaccacgtgcggagcctgagggccctcttggaaggtagatgg

SEQ ID NO: 414018 - DNA, 120 bp, Artificial Sequence
  ENSG00000148985_27 (sequence is synthesized)
aatgtttcagaagggcgaggctggatagttcggttagaatggaggtgcgaggcaggagagacgggcggatgagaaagaaatccggcccctgttgaattaattttgtgttctttcaacagg

SEQ ID NO: 414019 - DNA, 120 bp, Artificial Sequence
  ENSG00000148985_28 (sequence is synthesized)
ggtatggggacatctgaaggaggacttcttggaaggggaggggctggagcagaggcaagagtgattttgtcagatggagagaaggttctccacatgggcggggctggcagaggcagatgc

SEQ ID NO: 414020 - DNA, 120 bp, Artificial Sequence
  ENSG00000149016_0 (sequence is synthesized)
agaggtgcttgtgtttttgtcggtacaggagagtcgctatggcggcggtggattcggatgtcgaatcgctgccgcgtggggggttccgctgctgcctctgccacgttactacagccaacc

SEQ ID NO: 414021 - DNA, 120 bp, Artificial Sequence
  ENSG00000149016_1 (sequence is synthesized)
gacccagccttgatgcccacttgggaggcagaaagcaccggcacctggtagaactacgagctgcgagaaaggcccagggacttcgaagtgtgtttgtcagtggctttcccagggatgtgg

SEQ ID NO: 414022 - DNA, 120 bp, Artificial Sequence
  ENSG00000149016_2 (sequence is synthesized)
attctgctcagctctctgagtacttcctagcatttggacctgtggccagtgttgtcatggacaaggacaagggagtgtttgccattgtggagatgggggacgtgggtgctcgagaggctg

SEQ ID NO: 414023 - DNA, 120 bp, Artificial Sequence
  ENSG00000149016_3 (sequence is synthesized)
tcttgtcacagtcccagcacagcctgggaggacatcgcctgcgtgtccgcccacgggagcagaaggagttccagagcccggcctccaaatcccccaaaggagcggcccccgacagtcacc

SEQ ID NO: 414024 - DNA, 120 bp, Artificial Sequence
  ENSG00000149016_4 (sequence is synthesized)
agctggccaaagcgctagctgaggctgcagacgtgggggcacaaatgataaagcttgtggggctgagggagttgtccgaggccgagcggcagcttcgcagcctagtggtggccctgatgc

SEQ ID NO: 414025 - DNA, 120 bp, Artificial Sequence
  ENSG00000149016_5 (sequence is synthesized)
aggaggtcttcacagagttcttccctggctgtgtggtccacccttttggctcttccataaatagcttcgatgtccatggctgtgatcttgacctcttcttggatctgggtgacttggaag

SEQ ID NO: 414026 - DNA, 120 bp, Artificial Sequence
  ENSG00000149016_6 (sequence is synthesized)
agccccagccagtcccaaaggctccagaatctccatcgctggactcggccctggcttccccactggaccctcaagccctggcctgcaccccagcttcccctccagattcacaacctcctg

SEQ ID NO: 414027 - DNA, 120 bp, Artificial Sequence
  ENSG00000149016_7 (sequence is synthesized)
cttctccccaggattctgaagccctggactttgaaaccccttcctcctccctggcgccccaaactccggactctgccttggcctccgagacccttgcttctccccagtctctgcctccag

SEQ ID NO: 414028 - DNA, 120 bp, Artificial Sequence
  ENSG00000149016_8 (sequence is synthesized)
cttcaccactgctagaggacagggaagagggggacctggggaaggcctcggaactagcagagaccccaaaggaggagaaagcagagggggcagcaatgctggagctggtgggatccattc

SEQ ID NO: 414029 - DNA, 120 bp, Artificial Sequence
  ENSG00000149016_9 (sequence is synthesized)
tccggggctgtgtccctggggtgtatcgagtccaaactgtgccctctgcccggcgccctgtggtcaagttctgtcatcggccttcaggtctccacggtgatgtctccctcagtaaccggc

SEQ ID NO: 414030 - DNA, 120 bp, Artificial Sequence
  ENSG00000149016_10 (sequence is synthesized)
tggccctgcataactcccgtttcctgagtctctgctctgagctggatggtcgagtccggcccctcgtgtacaccctccgctgctgggctcagggtcgggggctgtcagggagtggccccc

SEQ ID NO: 414031 - DNA, 120 bp, Artificial Sequence
  ENSG00000149016_11 (sequence is synthesized)
ttgcccactgtgtcccagctcacccagaaagcaggagagggggaacaggtggaagtcgatggctgggactgcagtttccccagggatgcctcaagactggagcccagcataaatgtggag

SEQ ID NO: 414032 - DNA, 120 bp, Artificial Sequence
  ENSG00000149016_12 (sequence is synthesized)
cccctcagttccctgctagcccagttcttctcctgtgtatcttgttgggatcttcgtggctccctgctgtccctgcgggagggtcaggcactgcctgtggcagggggcctgccttctaat

SEQ ID NO: 414033 - DNA, 120 bp, Artificial Sequence
  ENSG00000149016_13 (sequence is synthesized)
ctctgggagggtctgcgccttggccccctgaatctccaggacccttttgacctgagtcacaatgtcgcagccaatgtgaccagccgggtggctgggcgcctacagaactgctgccgagca

SEQ ID NO: 414034 - DNA, 120 bp, Artificial Sequence
  ENSG00000149016_14 (sequence is synthesized)
gcagccaattactgccgaagcctccagtaccagcgccgttcctcccggggtcgggactgggggctgctccctcttctgcagcccagctcccccagctccctgctctctgctacgccgatc

SEQ ID NO: 414035 - DNA, 120 bp, Artificial Sequence
  ENSG00000149016_15 (sequence is synthesized)
cctttaccccttgcacccttcacccagctcactgctgccctggtgcaggtattcagggaagcactggggtgccatatagaacaggcaaccaagagaacgcggtcagaaggaggtggaact

SEQ ID NO: 414036 - DNA, 120 bp, Artificial Sequence
  ENSG00000149016_16 (sequence is synthesized)
ggggagtcctctcagggagggacaagcaaaagactcaaagtagatggacagaaaaactgctgtgaggaggggaaagaggagcagcagggatgtgcaggggacggtggggaagacagggta

SEQ ID NO: 414037 - DNA, 120 bp, Artificial Sequence
  ENSG00000149016_17 (sequence is synthesized)
gaagagatggttatagaggttggagagatggtgcaggactgggccatgcagagccctgggcagccaggggacctgcccctgaccactggaaagcatggagcccctggagaagaggggcag

SEQ ID NO: 414038 - DNA, 120 bp, Artificial Sequence
  ENSG00000149016_18 (sequence is synthesized)
cccagccacgcagccctggcagagcgggggcccaagggacatgaggcagcccaagaatggtctcagggtgaggcagggaagggggcatccctgccctcctcagcgagctggcgctgtgcc

SEQ ID NO: 414039 - DNA, 120 bp, Artificial Sequence
  ENSG00000149016_19 (sequence is synthesized)
ttgtggcaccgagtgtggcaagggcggcggcgagcccgtagacgcttgcagcagcaaaccaaggagggagctggaggtggcgctggcacaagagcagggtggctggcgactgaggctcag

SEQ ID NO: 414040 - DNA, 120 bp, Artificial Sequence
  ENSG00000149016_20 (sequence is synthesized)
gtcacccaggagctgaaaggactgagtggtggcgaagagaggccagaaactgagcccctgctgagctttgtggcgtctgtctccccggctgaccgaatgctcactgtgaccccgctccag

SEQ ID NO: 414041 - DNA, 120 bp, Artificial Sequence
  ENSG00000149016_21 (sequence is synthesized)
gatccccaaggcctgttccctgatctccatcatttcttacaggttttcctccctcaagcaattcgacatctcaagtgaagacatggcccctgaagggcaataaagctgctagtttattaa

SEQ ID NO: 414042 - DNA, 120 bp, Artificial Sequence
  ENSG00000149016_22 (sequence is synthesized)
ggccagtgttgtcatggacaaggacaagggtctcgctgtctctcaggctggtgtgtagtggtgcaatcacaatcacagctcactgcagcctcaacatcctgggcccaagtgatgctctta

SEQ ID NO: 414043 - DNA, 120 bp, Artificial Sequence
  ENSG00000149016_23 (sequence is synthesized)
atctattttcttcagaccagggaccctcctgtgttgcccactgtgtcccagctcacccagaaagcaggtactcggcctagcctccaccctctccatcttgttagtttcctctctcttctt

SEQ ID NO: 414044 - DNA, 120 bp, Artificial Sequence
  ENSG00000149016_24 (sequence is synthesized)
catcacacttagatacaccaagcagctctgtgaatgagatctctctacccccaccctcaatctccttgcttccagactgactctcaccttatttactttcacaggagagggggaacaggt

SEQ ID NO: 414045 - DNA, 120 bp, Artificial Sequence
  ENSG00000149016_25 (sequence is synthesized)
caacagtaggtaacatatatcacactaactgtgtgccaggcatggttctcacagaaagcctgtgagatacctaatattattactgccattttacagatgaagaaaccatgtttgggagca

SEQ ID NO: 414046 - DNA, 120 bp, Artificial Sequence
  ENSG00000149016_26 (sequence is synthesized)
attaagtgacttgcccaaggttacactggctagcaaggagcagcagcatctgggcaaggacatcatgtgggggcagggagagaggtttgacctcttgtttatagggatcagagaagccta

SEQ ID NO: 414047 - DNA, 120 bp, Artificial Sequence
  ENSG00000149016_27 (sequence is synthesized)
gcttcctgggactctgctgagccccttggaagggaaaaagtcctgctaaggaaatggctctggtgcaggacctgtatcagttctggcctctaagtgacccccctttccccactcttcctc

SEQ ID NO: 414048 - DNA, 120 bp, Artificial Sequence
  ENSG00000149021_0 (sequence is synthesized)
atactagcccaccagactcagagacggaaccagagacgggccagagcatccccctcctccaccatgaaactcgctgtcaccctcaccctggtcacactggctctctgctgcagctccgct

SEQ ID NO: 414049 - DNA, 120 bp, Artificial Sequence
  ENSG00000149021_1 (sequence is synthesized)
acttttcagccctgatcaagacatgagggaggcaggggctcagctgaagaagctggtggacaccctcccccaaaagcccagagaaagcatcattaagctcatggaaaaaatagcccaaag

SEQ ID NO: 414050 - DNA, 120 bp, Artificial Sequence
  ENSG00000149021_2 (sequence is synthesized)
ctcactgtgtaattagcatttagaagctgaagatccccaactgctccagcctctgccgctgccatgctttgagtccacgcccaccagccttgctctcttcaataaaccacaagcatctca

SEQ ID NO: 414051 - DNA, 120 bp, Artificial Sequence
  ENSG00000149021_3 (sequence is synthesized)
ggcagggcaggcagaggggaaacgagtgaaggccggaggtgctctgagggtgtcccttaccctggagtctgccttggagatcatttcaccatcagctcagaagatcttctttctctgttt

SEQ ID NO: 414052 - DNA, 120 bp, Artificial Sequence
  ENSG00000149043_0 (sequence is synthesized)
gcccctgccaggaatgcacctttagcccaggcctgctcagtgagctccgccgacagccagccctgctcctcccgccatgaccctgcagacccctctgggcttccaagttcctgggggctg

SEQ ID NO: 414053 - DNA, 120 bp, Artificial Sequence
  ENSG00000149043_1 (sequence is synthesized)
cagtgaacatgctccacctgcatggctggcaaaccatgcagggtagaaagatggggcacccaccagtctctcccagtgccccggccccagctggcaccacagctatacctgggcttattc

SEQ ID NO: 414054 - DNA, 120 bp, Artificial Sequence
  ENSG00000149043_2 (sequence is synthesized)
cagaccttgtcgccgggaccccctggccccgctgggctctcattgccggcgcccttgccgcgggcgtcctcctcgtctcctgcctcctctgtgctgcctgctgctgctgccgccgccaca

SEQ ID NO: 414055 - DNA, 120 bp, Artificial Sequence
  ENSG00000149043_3 (sequence is synthesized)
ggaagaagcccagggacaaggagtccgtgggtctgggcagtgcccgcggcaccaccaccacccacctggtgcaacctgatgtggatggcctggagtccagcccgggggatgctcagcaat

SEQ ID NO: 414056 - DNA, 120 bp, Artificial Sequence
  ENSG00000149043_4 (sequence is synthesized)
gggggtgcctgcagctctccctggagttcgactttggaagccaggagatcagggtgggcctgaggcaggcagccgacctgaggcctgggggcaccgtggacccctatgcccgggtcagcg

SEQ ID NO: 414057 - DNA, 120 bp, Artificial Sequence
  ENSG00000149043_5 (sequence is synthesized)
ccaggggccaccctgcaggtgcagcttttcaacttcaagcgcttctcggggcatgagcccctgggtgagctccgtctgccactgggcaccgtggatctgcagcatgttctggagcactgg

SEQ ID NO: 414058 - DNA, 120 bp, Artificial Sequence
  ENSG00000149043_6 (sequence is synthesized)
tacctgctgggcccgccggctgccactcagcccgagcaggtcggggagctgtgcttctctctccggtacgtgcccagctcaggccggctgaccgtggtggtgctggaggctcgaggcctg

SEQ ID NO: 414059 - DNA, 120 bp, Artificial Sequence
  ENSG00000149043_7 (sequence is synthesized)
cgtccaggacttgcagagccctacgtgaaggtccagctcatgctgaaccagaggaagtggaagaagagaaagacagccaccaaaaagggcacggcggccccctacttcaatgaggccttc

SEQ ID NO: 414060 - DNA, 120 bp, Artificial Sequence
  ENSG00000149043_8 (sequence is synthesized)
accttcctggtgcccttcagccaggtccagaatgtggacctggtgctggctgtctgggaccgcagcctgccgctccgaactgagcccgtaggcaaggtgcacctgggtgcccgggcctcg

SEQ ID NO: 414061 - DNA, 120 bp, Artificial Sequence
  ENSG00000149043_9 (sequence is synthesized)
cctgcagcactgggcagacatgctggcccacgcccggcggcccattgcccagcggcaccccctgcggccagccagggaggtggaccgcatgctggccctgcagccccgccttcgcctgcg

SEQ ID NO: 414062 - DNA, 120 bp, Artificial Sequence
  ENSG00000149043_10 (sequence is synthesized)
cgcctgcgcctgcccttgccccactcctgaatgcaccacatgcctctgtctccccgctgagcccaggcacttgcccaggccgccctgcaggaccactgcaataaacgccttctcctgcca

SEQ ID NO: 414063 - DNA, 120 bp, Artificial Sequence
  ENSG00000149043_11 (sequence is synthesized)
cagggactaggctgcccaggccctgcctgcttggctggggctgggggctgctgggaggtggctgggaggctgggcctgggcagctaagctggagctttggccagggtccagagcctccct

SEQ ID NO: 414064 - DNA, 120 bp, Artificial Sequence
  ENSG00000149043_12 (sequence is synthesized)
cccttcagcttcctgctgcacagaaccctcgcccctggccaccccgtgctgcctccttgccctggcagacccagcactggctgctgctagtcagatggggtagcgggcaggggccggagg

SEQ ID NO: 414065 - DNA, 120 bp, Artificial Sequence
  ENSG00000149043_13 (sequence is synthesized)
gtgcccgtcagggtgatggttgaagtcctcactactcagatggtcggaggagggggtaggacacccagtcagctgccggacactcaggggactgggggcacctttgcagatgtgtgcaat

SEQ ID NO: 414066 - DNA, 120 bp, Artificial Sequence
  ENSG00000149043_14 (sequence is synthesized)
atcacccacactctcagaggattccagacacacaccactcagaaatgtgggctaggagcacccgctgcacctgcgctgagagagctgcagaaagggttaccagcccctcgggtggaagga

SEQ ID NO: 414067 - DNA, 120 bp, Artificial Sequence
  ENSG00000149043_15 (sequence is synthesized)
ggaaagggtgacgggggaagggcagaccccatgccctgggtggtggggagctgacagggcaggggcccttggctgagcccaccccgctggctcccagatcagggtgggcctgaggcaggc

SEQ ID NO: 414068 - DNA, 120 bp, Artificial Sequence
  ENSG00000149043_16 (sequence is synthesized)
cccccacagaggcagggcgttgaggaccttcctggcagggaaagtgggtgaacagaggtgcaacctgatgtggatggcctggagtccagcccgggggatgctcagcaatgggggtgcctg

SEQ ID NO: 414069 - DNA, 120 bp, Artificial Sequence
  ENSG00000149043_17 (sequence is synthesized)
gtcggctgggtgggcctggacggctggatgggcctgggctgggtgggcctgggcagctgggtgggcctgggcagctgggtgggcctgagctagggcagcagggcctggctcacgccgctg

SEQ ID NO: 414070 - DNA, 120 bp, Artificial Sequence
  ENSG00000149043_18 (sequence is synthesized)
gtggccaggcaggcaggtggacgagtccaggcagcggctgagtcagtgtgtgtggaatgttctggccgctcccagctgcaccctgcccctacctgccaccacctcaccttcatcctcagg

SEQ ID NO: 414071 - DNA, 120 bp, Artificial Sequence
  ENSG00000149043_19 (sequence is synthesized)
aggagcggctccttgctcactcagtccagagagggcttgaaatccaggctccagagcccagggcagcgaggcgagttcagccccagggatggtttaacccccacagaggcagggcgttga

SEQ ID NO: 414072 - DNA, 83 bp, Artificial Sequence
  ENSG00000149043_20 (sequence is synthesized)
gtcatggcagggtccctttctgtctgtctccttgctctgccccagactggggggctgcagaggtgagggtatctggcctcaac

SEQ ID NO: 414073 - DNA, 120 bp, Artificial Sequence
  ENSG00000149043_21 (sequence is synthesized)
agactggggggctgcagaggtgagggtatctggcctcaacagctgcttattcccgatgggatggcctgggctgggcccctgaggccaggctgacttggacatggcaagaggggtcccagg

SEQ ID NO: 414074 - DNA, 120 bp, Artificial Sequence
  ENSG00000149043_22 (sequence is synthesized)
ctcttgtgggcaaagcaggggaggcgccaatgtggaggaacagagtctcctggctggctgctgctctctggagcgggtggagtcagggaagagctgagctggggagtcaccctgggcctg

SEQ ID NO: 414075 - DNA, 120 bp, Artificial Sequence
  ENSG00000149043_23 (sequence is synthesized)
gggtcaccgtaggccccatgtagcaccctggttcccctgcctgtaggtgacaggagccagcccagccaggtgtgctccctccccaggccctaggcaggcgggtacaggggccagcagctg

SEQ ID NO: 414076 - DNA, 120 bp, Artificial Sequence
  ENSG00000149043_24 (sequence is synthesized)
agaggcaaggaagtgatgggaccgcagagatgagacccccagggatgagatgggacccccaggcagggcccagggtccagggcccaggagagagaagcagggagggagagagcttcctgg

SEQ ID NO: 414077 - DNA, 120 bp, Artificial Sequence
  ENSG00000149043_25 (sequence is synthesized)
ccccatgggcccgagggagccacagcgggttcttgaggaaggcagggggtaccccagatgccacgttttgggtgggtttggccggtctcacagagcgaagccgacgatttgtgcctgttg

SEQ ID NO: 414078 - DNA, 120 bp, Artificial Sequence
  ENSG00000149043_26 (sequence is synthesized)
ggtggcctggcctggaggcggggggtcttgacccatgtcatgcaagggctgcccgggagcccagggctctgatgaggcatgatgtcagcaccacctgccccttgtcccaactcactccag

SEQ ID NO: 414079 - DNA, 120 bp, Artificial Sequence
  ENSG00000149043_27 (sequence is synthesized)
caccaggccacagcccaaggcagagctggcagggaccctgccctatgggccatcggaaagacaggcctgatgggcagcattttcgggggtctgagccccaactcggccagaatcaccctc

SEQ ID NO: 414080 - DNA, 120 bp, Artificial Sequence
  ENSG00000149043_28 (sequence is synthesized)
agactaactggcagagcagagggagaggagcttaggctataggctctgctcgggggtccaactgaagcaagaggcactgaggttagaccagagtgaggacttccagccactcacccgggg

SEQ ID NO: 414081 - DNA, 120 bp, Artificial Sequence
  ENSG00000149043_29 (sequence is synthesized)
gccagctgataagaggatcactcattaggaaaccaagaactcaagggattgggtcagcccagcaggagacaaaggcacagaggggaatggcccgaaggtgcctggggctggaagcagagg

SEQ ID NO: 414082 - DNA, 120 bp, Artificial Sequence
  ENSG00000149043_30 (sequence is synthesized)
cagtggcggagccaagccggcccacctggctctctgtgagccccctgccccacactgcccagggcagcccccgcccggcccctaccctcctcacacttggttccccccagcccacagcac

SEQ ID NO: 414083 - DNA, 120 bp, Artificial Sequence
  ENSG00000149043_31 (sequence is synthesized)
ctgaggatgccctcttccaagccaggcagccctgcacctcaggacccctccccgtcgtgcagaacctgctcaaaccaggttcagccaggccacctcctgctgcccctcaccaaggccagc

SEQ ID NO: 414084 - DNA, 120 bp, Artificial Sequence
  ENSG00000149043_32 (sequence is synthesized)
ctgacgggcccatcgccccctcctgcaaagctaggtagggctcagggtgcccccagccccaagggacccttggaaataggctggagcccagatgctcagcctctgcgtcttggggagacc

SEQ ID NO: 414085 - DNA, 120 bp, Artificial Sequence
  ENSG00000149043_33 (sequence is synthesized)
ttcctcccaaagggagttgcccagctatcacgggccagcagttccggccacaaggtggggttcctgcagccctggcccccgcaccccctcctaccccaggagagagttccccgtcaccag

SEQ ID NO: 414086 - DNA, 120 bp, Artificial Sequence
  ENSG00000149043_34 (sequence is synthesized)
aggcagtgctgtccgagagctggacccgccttcgggtgtctgagaggaaggcctggtggctggccggccacaggaagtggtgggcgtcagcagggtagaaagatggggcacccaccagtc

SEQ ID NO: 414087 - DNA, 120 bp, Artificial Sequence
  ENSG00000149050_0 (sequence is synthesized)
gacttccgtttcggtccagccgggctgcggccattgtttgtgtggactgagtgttttggccatcccggtccactctcacaggctccgttaagtgacatgaactctcaggaggactgagcc

SEQ ID NO: 414088 - DNA, 120 bp, Artificial Sequence
  ENSG00000149050_1 (sequence is synthesized)
agaagcggacagggcaagacgagctgtgcttgaaggaagaggggcagaaaatcgagggtcagggactgagaagctactccggtttagaaaccccagagacacccgtgtagatgggtacat

SEQ ID NO: 414089 - DNA, 120 bp, Artificial Sequence
  ENSG00000149050_2 (sequence is synthesized)
cacggcttctctcccacgttaagacttaataaagaaagcctgatctttgaccagatggcagtaacatttgaagatgtgactattatttttacatgggaggagtggaaattcctggattct

SEQ ID NO: 414090 - DNA, 120 bp, Artificial Sequence
  ENSG00000149050_3 (sequence is synthesized)
tctcaaaaaagactctacagggaggtcatgtgggagaactacacaaatgtcatgtcagtagaaaactggaatgagagctacaaatcccaagaagaaaaattcagatacttagaatatgaa

SEQ ID NO: 414091 - DNA, 120 bp, Artificial Sequence
  ENSG00000149050_4 (sequence is synthesized)
aatttttcctactggcaaggctggtggaatgctggcgcccagatgtatgagaatcagaactatggggaaactgttcaagggacagattccaaagacctcacacagcaagatcgttcccag

SEQ ID NO: 414092 - DNA, 120 bp, Artificial Sequence
  ENSG00000149050_5 (sequence is synthesized)
tgtcaggaatggttaatactctccacacaagtaccagggtatgggaactatgaactgacttttgaaagcaaaagtctcaggaacttaaaatataaaaattttatgccttggcagtcctta

SEQ ID NO: 414093 - DNA, 120 bp, Artificial Sequence
  ENSG00000149050_6 (sequence is synthesized)
gaaacaaaaaccactcaagactatggtagagaaatctacatgagtggttcacatggttttcaagggggcagataccgtcttggcatatccaggaaaaacctctccatggaaaaagaacag

SEQ ID NO: 414094 - DNA, 120 bp, Artificial Sequence
  ENSG00000149050_7 (sequence is synthesized)
aagctcatagttcagcattcttatatcccagtggaggaagcccttccacagtatgttggggtgatatgtcaagaagacctactgagagattcaatggaagaaaagtactgtggatgtaat

SEQ ID NO: 414095 - DNA, 120 bp, Artificial Sequence
  ENSG00000149050_8 (sequence is synthesized)
aaatgtaaaggaatttattattggaactcacggtgtgttttccacaagagaaatcaacctggagaaaacctctgtcaatgctccatctgtaaagcatgcttctctcagagatcagacttg

SEQ ID NO: 414096 - DNA, 120 bp, Artificial Sequence
  ENSG00000149050_9 (sequence is synthesized)
tatagacatccaagaaaccacataggtaagaagctgtacggatgtgatgaagttgacggtaactttcatcagagctccggagttcactttcatcagagagttcacataggggaggtacct

SEQ ID NO: 414097 - DNA, 120 bp, Artificial Sequence
  ENSG00000149050_10 (sequence is synthesized)
tatagctgtaatgcatgtggtaagagcttcagccagatctctagtcttcacaatcatcaaagagtccacacagaagagaaattctataaaattgagtgtgataaagacctcagtagaaat

SEQ ID NO: 414098 - DNA, 120 bp, Artificial Sequence
  ENSG00000149050_11 (sequence is synthesized)
tcattacttcacattcaccagagacttcacataggagagaagccttttaaatgtaatcagtgtggtaagagttttaatcggagttcagtacttcatgttcatcagagagtccacacagga

SEQ ID NO: 414099 - DNA, 120 bp, Artificial Sequence
  ENSG00000149050_12 (sequence is synthesized)
gaaaaaccatataagtgtgatgagtgtggtaagggtttcagccagagctcaaatcttcgaattcatcagttagtacacacaggagagaagtcttataaatgtgaagactgtggtaaaggc

SEQ ID NO: 414100 - DNA, 120 bp, Artificial Sequence
  ENSG00000149050_13 (sequence is synthesized)
tttacccagcgctcaaatcttcaaattcatcagagagtgcatacaggagagaaaccttataaatgtgatgactgtggaaaggactttagtcacagctcagatcttcgcattcatcagaga

SEQ ID NO: 414101 - DNA, 120 bp, Artificial Sequence
  ENSG00000149050_14 (sequence is synthesized)
gagagtccatacaggggagaaaccctatacttgtcctgaatgtgggaagggcttcagtaagagttcaaagcttcacactcatcaaagagtacatactggagagaaaccctacaaatgtga

SEQ ID NO: 414102 - DNA, 120 bp, Artificial Sequence
  ENSG00000149050_15 (sequence is synthesized)
tgtggcaagggattcagtcagcgttcacatcttctcattcatcagagagtccatacaggagaaaagccctataaatgtcatgattgtggaaagggttttagtcacagttctaatcttcac

SEQ ID NO: 414103 - DNA, 120 bp, Artificial Sequence
  ENSG00000149050_16 (sequence is synthesized)
attcatcagagggtccatacaggagagaagccttatcaatgtgctaagtgtggtaaaggtttcagtcatagctcagctcttcgaattcatcaaagagtccatgcaggagagaaaccttac

SEQ ID NO: 414104 - DNA, 120 bp, Artificial Sequence
  ENSG00000149050_17 (sequence is synthesized)
aaatgccgtgaatattataagggatttgatcataattcacatcttcacaataatcatagaagaggaaacttataaatattgttcatttagttaacagctttaatcaaagtttacctaacc

SEQ ID NO: 414105 - DNA, 120 bp, Artificial Sequence
  ENSG00000149050_18 (sequence is synthesized)
tttaaaccctataaatcctgctgttaaggaaatcttataaataacacaagtaatcccaagcaacatttatagtttcccctatctcccactaagaattatttgcttcaaaaggagatcttt

SEQ ID NO: 414106 - DNA, 120 bp, Artificial Sequence
  ENSG00000149050_19 (sequence is synthesized)
agtgtatttttctttacctactataaatataatacagtcataaatatattaaacatttaaggagaaaactcttcattctatttcattctagtctttttttctgtgcattttaatgtgcat

SEQ ID NO: 414107 - DNA, 120 bp, Artificial Sequence
  ENSG00000149050_20 (sequence is synthesized)
attgaaactggttggccaactgttaaacgacatctcttaactcccctaaaaactccctaggaagtaacagaaaagatggaaacacatagaacttaaaactcagttttggccggtagaatt

SEQ ID NO: 414108 - DNA, 120 bp, Artificial Sequence
  ENSG00000149050_21 (sequence is synthesized)
caattgtttatggacaaaagccacctaataaaagataggaaagcattgtatgacattgtgtctgagacagtgtatctgagttgttatctctgtcaaccagaaaacccagggaccatcctt

SEQ ID NO: 414109 - DNA, 120 bp, Artificial Sequence
  ENSG00000149050_22 (sequence is synthesized)
ctgttgcaggggtgcttcactttgaggtgactacagtgcactcatcccttccctttccggttttccacgcttaataataggttcagataccaaacaacaagaagtacagaattttctcta

SEQ ID NO: 414110 - DNA, 120 bp, Artificial Sequence
  ENSG00000149050_23 (sequence is synthesized)
aggtgtgaagggtatggacaaaagtgctagaaatggaagatactccattggttcggaattagagatccaagcagtagaattttatttaatctcagtagaacagagtggtaatagagaaat

SEQ ID NO: 414111 - DNA, 120 bp, Artificial Sequence
  ENSG00000149050_24 (sequence is synthesized)
atctgcaaggacagcattgaactcagaactctgtgcaacgatgaaccctgaagctaattatgtaaaaagagagtttggccattatctcagaatagagttagtcggaatacacagtcttaa

SEQ ID NO: 414112 - DNA, 120 bp, Artificial Sequence
  ENSG00000149050_25 (sequence is synthesized)
ttattgatacacaaatatgctgaagtaataccaagagaaaaaaaagtggacatgtttaggaaaattagagggaattgcaatactgaagaaaagaatatcatcctaaagacctggaaactt

SEQ ID NO: 414113 - DNA, 120 bp, Artificial Sequence
  ENSG00000149050_26 (sequence is synthesized)
attgccctgaaaattagctgctgcaggcttcagaggaaatttccagaaatgttggtgtccttagtggcataacagagaatctgaactcagtaaagatagagtagaaatatacaagtagag

SEQ ID NO: 414114 - DNA, 120 bp, Artificial Sequence
  ENSG00000149050_27 (sequence is synthesized)
aagagtatctaaagtgaaaagagaaatagatacaacaaagaaggacttcagggagctctgaaatactgtatcaaaataaatgcaataaaaagtaacactgaagaatataaaataattgat

SEQ ID NO: 414115 - DNA, 120 bp, Artificial Sequence
  ENSG00000149050_28 (sequence is synthesized)
agttaatagataaacttgatctgatcttaaatgtatctgaaaaggataatgagatggaaactaagaaagaacagatatgaatatcagaggatggaggtccagtgtgagaattaaaggtgt

SEQ ID NO: 414116 - DNA, 120 bp, Artificial Sequence
  ENSG00000149050_29 (sequence is synthesized)
ctctaaggaaggtgaaagaacatttggcatagaatcaatgatcaaagacattaagaaactttctctgagttaaaagtatatggtcactaagttttaggcaaaaccagtattaaagcaacc

SEQ ID NO: 414117 - DNA, 120 bp, Artificial Sequence
  ENSG00000149050_30 (sequence is synthesized)
ttagaaacaggttagaaagaagcaattaaaagcatgcagaaagaaaaattctggttatctgcaaaaccagaaagggagggtggatacagagctctgcaacagtaactcagaaggcaatgg

SEQ ID NO: 414118 - DNA, 120 bp, Artificial Sequence
  ENSG00000149050_31 (sequence is synthesized)
agcagcacgttcagaattttgagatttgaaaagtttattatcaccagttttataacaaaagtgtctttcatatgtgcaggaaacaaatatttttgataagcaagaaaacagtgtagcgta

SEQ ID NO: 414119 - DNA, 120 bp, Artificial Sequence
  ENSG00000149050_32 (sequence is synthesized)
tatgtgccttaaagagagtttgtgaatgtggaaatcatggtataaaaggactagtgataagcactgaaatcaattagatatgcagttgtctggatagtttccaaaacttcaaaaaattaa

SEQ ID NO: 414120 - DNA, 120 bp, Artificial Sequence
  ENSG00000149050_33 (sequence is synthesized)
atgtgcaataaaaatatacaaatgctgagtgtaaagtgtacaaatgctgagtctgggtaggagagtaaggttgtcaggacacccagttaagtttgaatttcatataagcaaagaataatt

SEQ ID NO: 414121 - DNA, 120 bp, Artificial Sequence
  ENSG00000149050_34 (sequence is synthesized)
gttttagtataagggtgtcccaaatattgcatgggacttacactaaaatttcatacatttgaaattcaaatttaactggtcatttctgtttttagttgctacatccggcaactggagaga

SEQ ID NO: 414122 - DNA, 120 bp, Artificial Sequence
  ENSG00000149050_35 (sequence is synthesized)
gaccataagtgccacatttctgatcttaaatagcagggactcataataacattttctttttgaatgacaatttaagaaaggccttttttttttttttttacaaacctaaaattacaactt

SEQ ID NO: 414123 - DNA, 120 bp, Artificial Sequence
  ENSG00000149050_36 (sequence is synthesized)
aataaaactaaaaaaagtgcatatacctttcaaaatgggagaagataaaagcaaaaattattcagtctctgtagcaatgactaccaaaaaaatccccaagaagttggcctaaaatattaa

SEQ ID NO: 414124 - DNA, 120 bp, Artificial Sequence
  ENSG00000149050_37 (sequence is synthesized)
aataaacggatcaagatgattaaagccaaatgtatcaaaacacgttcaatgcttcattttaaaatgttgaaaacactgggttaaaaatttctaattatgtgctataacagatgaaaatgt

SEQ ID NO: 414125 - DNA, 120 bp, Artificial Sequence
  ENSG00000149050_38 (sequence is synthesized)
gatattgcttaaatgtgagaccaggtgaaggtttattagacaaacataaaggagtacctacaatatgtttttaaaggtgaaaagtgcactaatttaaactcattaagttgggcaaaaata

SEQ ID NO: 414126 - DNA, 120 bp, Artificial Sequence
  ENSG00000149050_39 (sequence is synthesized)
caaaatcattagttttctaaattcttggaatattcaggaaatgtaattgtcaaaaaatctggtttttaatttacaaaaatgcagaatgaaaataataaaaaacggggaaatataaaagag

SEQ ID NO: 414127 - DNA, 120 bp, Artificial Sequence
  ENSG00000149050_40 (sequence is synthesized)
ctggggtggcaaaggctcatgcccccattttacagatgtcatcatttgtcccaacatcattgattgaataagccgtctttcccccacaaatttgatgtaacctttgtcatgtgtaaaatg

SEQ ID NO: 414128 - DNA, 120 bp, Artificial Sequence
  ENSG00000149050_41 (sequence is synthesized)
cactgttgtacttgtgtccatttctggatttgtacccgtttccattgatcttctctacttgtatgtcaagccatgttatgaattgcagagtccttattaaagttttaatatgccattgaa

SEQ ID NO: 414129 - DNA, 120 bp, Artificial Sequence
  ENSG00000149054_0 (sequence is synthesized)
agaaagggacggggctggcaaaggcctggtctacctcaccgatccgggtcgcgggggctcctagggggttccttccacagctggtgcgcgtgcgcaagagtgcgtcgaggttgttccgcg

SEQ ID NO: 414130 - DNA, 120 bp, Artificial Sequence
  ENSG00000149054_1 (sequence is synthesized)
gcaatttatgaaactcggagccggcagtgagttgagggttcggcgaggtcagggattcctagttgcagcgtgattaccaacgccagctcccttcactgtccaagacagcgattccgcggc

SEQ ID NO: 414131 - DNA, 120 bp, Artificial Sequence
  ENSG00000149054_2 (sequence is synthesized)
tcctctgagaactggcgctttgttcatcatttgccacttaagctacttgcagtcacgtcacaccttggatctctatcatcaaaactattccacctcggaaatcttacctaaatgcagcat

SEQ ID NO: 414132 - DNA, 120 bp, Artificial Sequence
  ENSG00000149054_3 (sequence is synthesized)
gccatcctgaacgtctctccctgtcctagctctgtaactgtttacattgctcaggtacctgaatattggctttgtgtctaaagtttctggaactttcctccttaccgtgaaataacttgg

SEQ ID NO: 414133 - DNA, 120 bp, Artificial Sequence
  ENSG00000149054_4 (sequence is synthesized)
cttaaatcacactgcatatagtacacaggtgcttagctcaagcctgagaattactgcaatctagtaaggcggatttgaactactgtgggagttctatttaggaagatgcagcctctgagc

SEQ ID NO: 414134 - DNA, 120 bp, Artificial Sequence
  ENSG00000149054_5 (sequence is synthesized)
aagttgatggctatctcaaaacctcgaaacctgtctctacgtgaacaaagagaggttctgagagcagatatgtcttggcagcaggaaaccaaccccgtcgtggagacacatgactctgag

SEQ ID NO: 414135 - DNA, 120 bp, Artificial Sequence
  ENSG00000149054_6 (sequence is synthesized)
gcatctcgtcaaaagttcagacatttccagtatttgaaagtgtctgggccccatgaagccctgagccaactctgggagctctgtcttcaatggctgagaccagagattcatacaaagaag

SEQ ID NO: 414136 - DNA, 120 bp, Artificial Sequence
  ENSG00000149054_7 (sequence is synthesized)
cagattatagaactgttggtgctggaacaattcctggcaatcctgcctgaagaagtcaggacttgggtgaatttacaacatccaaacaacagtaaagatatggtgaccctcatagaagat

SEQ ID NO: 414137 - DNA, 120 bp, Artificial Sequence
  ENSG00000149054_8 (sequence is synthesized)
gtgattgaaatgcttgaagatgaagatatgccctgcaaggactctgccctgcagatggggagcatcaaggagaaaatgaaagctggctcacgaacaggcaaaccacaggaaccagtgaca

SEQ ID NO: 414138 - DNA, 120 bp, Artificial Sequence
  ENSG00000149054_9 (sequence is synthesized)
ttcaaagatgtggttgtggaattcagcaaggaagagtgggggcaactggactctgctgtaaagaacctgtacaggaatgtgatgctggaaaactttaggaacctgaattcattgcgtaaa

SEQ ID NO: 414139 - DNA, 120 bp, Artificial Sequence
  ENSG00000149054_10 (sequence is synthesized)
gcacatctactttccaaaccatttgagagccttaagttggagagtaagaaaaaaagatggataatggagaaagaaataccaaggaagactatttttgacatgaagagtatttctggagaa

SEQ ID NO: 414140 - DNA, 120 bp, Artificial Sequence
  ENSG00000149054_11 (sequence is synthesized)
gaatcatcccatggagtgattatgacaaggcttaccgaaagtggacacccttcttcagatgcctggaaaggtgagaattggttatataggaaccagaaaaaatgggacataaatttgcca

SEQ ID NO: 414141 - DNA, 120 bp, Artificial Sequence
  ENSG00000149054_12 (sequence is synthesized)
caagaggctttcattcctgagacaatttacactgaggaggaagattttgaatgtagtgaaaataagaaaagctttgatattaattcagttagctcaatttgtgctatacaagtgggaatt

SEQ ID NO: 414142 - DNA, 120 bp, Artificial Sequence
  ENSG00000149054_13 (sequence is synthesized)
ccttcaagaaaggggtctccaaaatgtgataagtttaaaacttacttcaaatttaatttagactcagtaggtaagcaacattcagaatatgaatatgggaatgacttgagtttgagtaca

SEQ ID NO: 414143 - DNA, 120 bp, Artificial Sequence
  ENSG00000149054_14 (sequence is synthesized)
gatattcgacaccaaaaaagtcatactacaatgaattcctatgaatgttatcaatgtgggaaagccttctgccgaagttcatcccttattcgacatcagatcattcacacaggagagaaa

SEQ ID NO: 414144 - DNA, 120 bp, Artificial Sequence
  ENSG00000149054_15 (sequence is synthesized)
agcatcaaaaacttcatgctgaagcaaaggcctgcacaagcaataaatgtggaaaggccttcagtaaaagtgaagacagtaataatccaacactccattttggaaacaatttctatcaat

SEQ ID NO: 414145 - DNA, 120 bp, Artificial Sequence
  ENSG00000149054_16 (sequence is synthesized)
gtgttaactgtggaaaatccttcaaccggagctcctctcttattcgacaccaaatgattcacacgggagagaaaccattcaaatgtaaggaatgtagtaaagccttcaacaggagttcaa

SEQ ID NO: 414146 - DNA, 120 bp, Artificial Sequence
  ENSG00000149054_17 (sequence is synthesized)
accttgttaaacatcaaaaactgcatactcgagataagtcctgaaaaaagaaaaaatgaaagattaccttcagtcagaatgcagaactcatttaacatcatgaatttatgctggataaaa

SEQ ID NO: 414147 - DNA, 120 bp, Artificial Sequence
  ENSG00000149054_18 (sequence is synthesized)
tctcatgaatataatgtaagaaaacatttgtcagatttttctttaaatgatatcacagaattaatgttggatagaaatatcattggatagaaatctgtttgaaggaattttcctggtttt

SEQ ID NO: 414148 - DNA, 120 bp, Artificial Sequence
  ENSG00000149054_19 (sequence is synthesized)
cagatgaagccataaggctttggagttaaaccacagtatcaccatacaagtatttgtttatcattattttgatatccattaccctcacctctccctagttcataaataggtctatagcat

SEQ ID NO: 414149 - DNA, 120 bp, Artificial Sequence
  ENSG00000149054_20 (sequence is synthesized)
actaatatccacctgatttattgacgaagtagacattaggcaaagccaaacaatactcttggagttgatatttaataaaactcagcccttttaagaaggtcacaagaaatcattagctca

SEQ ID NO: 414150 - DNA, 120 bp, Artificial Sequence
  ENSG00000149054_21 (sequence is synthesized)
tgcgaatataagagaatacttctaaggacagaaatctctgaatcaatggctaagacaacagtaacagccatttactccactcctgacaataccctttgttgtcttgctgttgaatggaga

SEQ ID NO: 414151 - DNA, 120 bp, Artificial Sequence
  ENSG00000149054_22 (sequence is synthesized)
ctagagttgggaaagggttatcaactgcaatgggagaagtatgtattgctgttaatctatatgtattcttaaaatctgcatttgtttatagcaggtccttgaaaaatgtttttgttttgt

SEQ ID NO: 414152 - DNA, 120 bp, Artificial Sequence
  ENSG00000149054_23 (sequence is synthesized)
tataatgttataattgttatgatgttgatgagaaaaatatcgattcccagccagggacactgtgtggagttcgcacactctccctatgtctccgggtgctccagtttcaaaccccaaaga

SEQ ID NO: 414153 - DNA, 120 bp, Artificial Sequence
  ENSG00000149054_24 (sequence is synthesized)
tgtatacattaggttaattgacatatctaaattatctcagtctgagtttgtgaggaagtgtgccctgcagtggaatggctcctaatcagggtttgttcccaccattgccctgagctgcta

SEQ ID NO: 414154 - DNA, 120 bp, Artificial Sequence
  ENSG00000149054_25 (sequence is synthesized)
ggatgcgctctgtccacccatggccctgtactggaataacagggtaaataattatcttatctgtttttattaatccgtcttaaatgtgtatatagctcagatttattttaatgtctgata

SEQ ID NO: 414155 - DNA, 120 bp, Artificial Sequence
  ENSG00000149054_26 (sequence is synthesized)
ttggaagcgtttggggtctttagaagtttgatgatgttgtgaccagacatttgccttaggaacttaactcttgtttgtatccattagtctatggtaaaattggttttgttatacatcatt

SEQ ID NO: 414156 - DNA, 120 bp, Artificial Sequence
  ENSG00000149054_27 (sequence is synthesized)
tcacttaaagttgcagttcctaagaacctattgatgatgttcagtgcagacttactgtacctttgggaatttaggctggagagacgtccatagccttaggtatatcatttataccagaca

SEQ ID NO: 414157 - DNA, 120 bp, Artificial Sequence
  ENSG00000149054_28 (sequence is synthesized)
ttatgaagttattaaagtctcctatactctgtacaccagaactgtgtcttctgtaaactacctcaggatcccatctggttcttgagccaagaagtatgacttaatctgccccaaaaaatt

SEQ ID NO: 414158 - DNA, 120 bp, Artificial Sequence
  ENSG00000149054_29 (sequence is synthesized)
cacactggagacattcccaattaatgatgatggtagctttttgtgaaggttcataccttattcaaaggcagaaaaggtatactggagtgaactcctatgattaaataatgtcaaaatcta

SEQ ID NO: 414159 - DNA, 120 bp, Artificial Sequence
  ENSG00000149054_30 (sequence is synthesized)
gaaagggagaacacactgaaggaagcagaatgaggggcactaagcactgcaggagaagatggggatggcagactcagcctgaccaaagaaatcaatcacatcttggtaaagtaagccact

SEQ ID NO: 414160 - DNA, 120 bp, Artificial Sequence
  ENSG00000149054_31 (sequence is synthesized)
ctcatttgtgtctggattagagtaggatgaacatcagaaaagggctctgtgatcagcctcctttactaggctttaatgtaactgattttccctttattatctcctaaactcctaatttag

SEQ ID NO: 414161 - DNA, 120 bp, Artificial Sequence
  ENSG00000149054_32 (sequence is synthesized)
aacagcatataataaagcctttttgtgcagctttctatccaggcaccaagaggggaaaccagctcttatatgcagaagtgacatacaatgccttcctccaaaatgctagcaacaaccatc

SEQ ID NO: 414162 - DNA, 120 bp, Artificial Sequence
  ENSG00000149054_33 (sequence is synthesized)
tctgtaccctcaaaagtgaacttgttgagggcaagacttaggtgtcctatcacactgaatcccagagaaagcaaacaagatagaattaaattggcctgtgtttgttcttcagcctcccca

SEQ ID NO: 414163 - DNA, 120 bp, Artificial Sequence
  ENSG00000149054_34 (sequence is synthesized)
tcagagctgaactagagatgactcaaacacaaaatcattaggcttcctggggtttgtggtaaaatggaatatgagatatgctaaagatgttttcactacaaaacactcaaaataaccaaa

SEQ ID NO: 414164 - DNA, 120 bp, Artificial Sequence
  ENSG00000149054_35 (sequence is synthesized)
tacaaaacactcaaaataaccaaataaatataataccttgataattttgaactttacctgagctatgtgatcctataatcctcttaagaatctagggtgtggtggctcatgcctgtaatc

SEQ ID NO: 414165 - DNA, 120 bp, Artificial Sequence
  ENSG00000149054_36 (sequence is synthesized)
gccaccacgcccagctgtcccttaacatttgaaatgtgtatatcacctcatttagctattctgtttctagaaacttatttttacaaagaaaattcacaaatgcacacgaaaatgtatgca

SEQ ID NO: 414166 - DNA, 120 bp, Artificial Sequence
  ENSG00000149054_37 (sequence is synthesized)
tgaagatacttgtcacagcgttggttgtaataatatggaattaggtcaaatatttatcagtaaaagactaagtcatattgtgcatatactgaaatatgtgataaacctaaatttactgac

SEQ ID NO: 414167 - DNA, 120 bp, Artificial Sequence
  ENSG00000149054_38 (sequence is synthesized)
tcacatttgtagggtttctctccagtatgtactctttgatgagtgtgaagctttgaactcttactgaagcccttcccacattcaggacaagtatagggtttctcccctgtatggactctc

SEQ ID NO: 414168 - DNA, 120 bp, Artificial Sequence
  ENSG00000149054_39 (sequence is synthesized)
ccctgtatggactctctgatgaatgcgaagatctgagctgtgactaaagtcctttccacagtcatcacatttataaggtttctctcctgtatgcactctctgatgaatttgaagatttga

SEQ ID NO: 414169 - DNA, 120 bp, Artificial Sequence
  ENSG00000149054_40 (sequence is synthesized)
gcgctgggtaaagcctttaccacagtcttcacatttataagacttctctcctgtgtgtactaactgatgaattcgaagatttgagctctggctgaaacccttaccacactcatcacactt

SEQ ID NO: 414170 - DNA, 120 bp, Artificial Sequence
  ENSG00000149054_41 (sequence is synthesized)
atatggtttttctcctgtgtggactctctgatgaacatgaagtactgaactccgattaaaactcttaccacactgattacatttaaaaggcttctctcctatgtgaagtctctggtgaat

SEQ ID NO: 414171 - DNA, 120 bp, Artificial Sequence
  ENSG00000149054_42 (sequence is synthesized)
gtgaagtaatgaatttctactgaggtctttatcacactcaattttatagaatttctcttctgtgtggactctttgatgattgtgaagactagagatctggctgaagctcttaccacatgc

SEQ ID NO: 414172 - DNA, 120 bp, Artificial Sequence
  ENSG00000149054_43 (sequence is synthesized)
attacagctataaggtacctcccctatgtgaactctctgatgaaagtgaactccggagctctgatgaaagttaccgtcaacttcatcacatccgtacagcttcttacctatgtggtttct

SEQ ID NO: 414173 - DNA, 120 bp, Artificial Sequence
  ENSG00000149054_44 (sequence is synthesized)
tggatgtctatacaagtctgatctctgagagaagcatgctttacagatggagcattgacagaggttttctccaggttgatttctcttgtggaaaacacaccgtgagttccaataataaat

SEQ ID NO: 414174 - DNA, 120 bp, Artificial Sequence
  ENSG00000149084_0 (sequence is synthesized)
gtcatcctcaccgtcacggccggcgcctcctcctggattcattcactcgctcttttcattcacgaaggtagtgaggcctagtggaaagccatggagagcgctctccccgccgccggcttc

SEQ ID NO: 414175 - DNA, 120 bp, Artificial Sequence
  ENSG00000149084_1 (sequence is synthesized)
ctgtactgggtcggcgcgggcaccgtggcctacctagccctgcgtatttcgtactcgctcttcacggccctccgggtctggggagtggggaatgaggcgggggtcggcccggggctcgga

SEQ ID NO: 414176 - DNA, 120 bp, Artificial Sequence
  ENSG00000149084_2 (sequence is synthesized)
gaatgggcagttgtcacaggtagtactgatggaattggaaaatcatatgcagaagagttagcaaagcatggaatgaaggttgtccttatcagcagatcaaaggataaacttgaccaggtt

SEQ ID NO: 414177 - DNA, 120 bp, Artificial Sequence
  ENSG00000149084_3 (sequence is synthesized)
tccagtgaaataaaagaaaaattcaaagtggagacaagaaccattgctgttgactttgcatcagaagatatttatgataaaattaaaacaggcttggctggtcttgaaatcggcatctta

SEQ ID NO: 414178 - DNA, 120 bp, Artificial Sequence
  ENSG00000149084_4 (sequence is synthesized)
gtgaacaacgtgggaatgtcgtatgagtatcctgaatactttttggatgttcctgacttggacaatgtgatcaagaaaatgataaatattaatattctttctgtttgtaagatgacacaa

SEQ ID NO: 414179 - DNA, 120 bp, Artificial Sequence
  ENSG00000149084_5 (sequence is synthesized)
ttggtactgcctggcatggtggaaagatccaaaggggctattctgaacatttcatctggcagtggcatgctccctgtcccactcttgaccatctattctgcaaccaagacttttgtagat

SEQ ID NO: 414180 - DNA, 120 bp, Artificial Sequence
  ENSG00000149084_6 (sequence is synthesized)
ttcttctctcagtgcctccatgaggagtataggagcaagggcgtctttgtgcagagtgtcctgccatacttcgtagctacaaaactggctaaaatccggaagccaactttggataagccc

SEQ ID NO: 414181 - DNA, 120 bp, Artificial Sequence
  ENSG00000149084_7 (sequence is synthesized)
tctccggagacgtttgtgaagtctgcaattaaaacagtcggcctgcaatcccgaaccaatggatacctgatccatgctcttatgggctcgataatctcaaacctgccttcttggatttat

SEQ ID NO: 414182 - DNA, 120 bp, Artificial Sequence
  ENSG00000149084_8 (sequence is synthesized)
ttgaaaatagtcatgaatatgaacaagtctacacgggctcactatctgaagaaaaccaagaagaactaagcattgataactgcattgtaacttggccagatgctccagcatatgcacgtt

SEQ ID NO: 414183 - DNA, 120 bp, Artificial Sequence
  ENSG00000149084_9 (sequence is synthesized)
gacatatattctggatactatccgaggtaattttgaagtttaatataaatgctcatatcaaatgaatatagaactaatattgtcgggaacacctaatagaaaggaatactattatagcaa

SEQ ID NO: 414184 - DNA, 120 bp, Artificial Sequence
  ENSG00000149084_10 (sequence is synthesized)
atcacagaatgatagactcaagcataaaacttggcagttttatctgcttcaaaatgccattgatcattattcctgtattttctctgaaactgattataaaaaccaatgtccagctactct

SEQ ID NO: 414185 - DNA, 120 bp, Artificial Sequence
  ENSG00000149084_11 (sequence is synthesized)
tttgtttttgacacttgaagaaatggagatcgatttgatttgtttataagcagacacactgcaatttacaaagatctctttacggttttataaaattatcttccagtttgtacatttata

SEQ ID NO: 414186 - DNA, 120 bp, Artificial Sequence
  ENSG00000149084_12 (sequence is synthesized)
tggaattgttctttatcaagggtagctaatgacatgaaaataattgtgaaatatggaattatttctgacacatgaagcccactaaactatgctttcttataatgcatatttcttctcagt

SEQ ID NO: 414187 - DNA, 120 bp, Artificial Sequence
  ENSG00000149084_13 (sequence is synthesized)
ttaaatgtatgtaaatatcgaagctatatggtatgatttataaagataaatgggccaaagtgtacattgagactggcagccatctatggtaccactgaaaccctgacccagaaaagtggc

SEQ ID NO: 414188 - DNA, 120 bp, Artificial Sequence
  ENSG00000149084_14 (sequence is synthesized)
ttgcttggacacccagctgcctttgtttctgcattaaaccaatattgatcacacatatgacacaggctagtcctataaaagtaatgacttcatagaaatggcattataatttttaagttg

SEQ ID NO: 414189 - DNA, 120 bp, Artificial Sequence
  ENSG00000149084_15 (sequence is synthesized)
atactctacaggtagctattgatataattagttttaataaaacatgctgcaaccatggtatacaacaaaaatacatttctttggtgattgaaattaaggccgtatttacaatgacttaat

SEQ ID NO: 414190 - DNA, 120 bp, Artificial Sequence
  ENSG00000149084_16 (sequence is synthesized)
ataagactgacttttatcctgcttcataacttgtatggagaactcaccaagaaagaattcaatactgtgaaatatgcagcaagaagattggtctttacctaggctgtgtttcctaagctc

SEQ ID NO: 414191 - DNA, 120 bp, Artificial Sequence
  ENSG00000149084_17 (sequence is synthesized)
tgagttttcagcaccagtagatttgtattaaaagaaaaaaaaatggggccttagcttctggcttttaattttgccagctaaggacataaaacaaaaataaacaaacaaaaacaaatagcc

SEQ ID NO: 414192 - DNA, 120 bp, Artificial Sequence
  ENSG00000149084_18 (sequence is synthesized)
atctgctatcagcatcattatgtaaaagaaaatatattttagcccctaaaattaggaagaatgtaatctcagaataaaggttgtcatttaagttgaataaatatatagctttatgaaaaa

SEQ ID NO: 414193 - DNA, 120 bp, Artificial Sequence
  ENSG00000149084_19 (sequence is synthesized)
tatcaaaaacgaagaaactcaatatattgaagagatatctgcactctatgtttattgcagcactattcacagtagccaaaatatggaatcagcctaacagtctatcagcagatgaatgga

SEQ ID NO: 414194 - DNA, 120 bp, Artificial Sequence
  ENSG00000149084_20 (sequence is synthesized)
atgttaaaataaaggtgtatgcagggaatataaaagatctgtaagtaaaaattctcagcactgtggctagagaagacctcagagggtagagatcaactcgaggagactggagatctgatc

SEQ ID NO: 414195 - DNA, 120 bp, Artificial Sequence
  ENSG00000149084_21 (sequence is synthesized)
tggttatgccctgggttactaagactgggaaatgagctaatcgtgaagaagagctatttttagttgattgaattatgtctcatttactgaccaagcatagcacatactgatgaaaggcag

SEQ ID NO: 414196 - DNA, 120 bp, Artificial Sequence
  ENSG00000149084_22 (sequence is synthesized)
tatttctaggaaaacaaaattcccttctcatcagaatgctgtctactttaattaatatgaagtattattcaagatagaaacaacaaaatttctatgcttagcatgcattgaaaccttatt

SEQ ID NO: 414197 - DNA, 120 bp, Artificial Sequence
  ENSG00000149084_23 (sequence is synthesized)
attacaaaacagcatctgtttcttagagaattgatgatatccaggagtcagaaattcacgttacagcctcggtatttaactgtgaggtgattttgactaaaccattggacttctgaactt

SEQ ID NO: 414198 - DNA, 120 bp, Artificial Sequence
  ENSG00000149084_24 (sequence is synthesized)
ttcttggttaataatatatcaaaacagagtttaaaaatagcccctctcattatatgtatttagtcaacaattatggagtccttaaaaaatgcagatgtcaccttttcatgttggttacta

SEQ ID NO: 414199 - DNA, 120 bp, Artificial Sequence
  ENSG00000149084_25 (sequence is synthesized)
gagatcacatcttaactctctttaaggatgagttttacttacagctaactagaccaacaagagaaatgaatgtgaagttacacttactctttgccaacctaccactttatcgtattcttt

SEQ ID NO: 414200 - DNA, 120 bp, Artificial Sequence
  ENSG00000149084_26 (sequence is synthesized)
taaagactttttttggctggaaaagtttatgtgagctcttgaggttagaaagcttaagtcatcttggtaggcaggatatttcttctgataacatatattcttttctgagaatgcattttg

SEQ ID NO: 414201 - DNA, 120 bp, Artificial Sequence
  ENSG00000149084_27 (sequence is synthesized)
ggaaatgtagattttcactgtaaatccttcattgtttgaagaactctgtgccagtattacatttcaggcaagactaattttagccaggttcattaaagtattccctgtgttctctccagt

SEQ ID NO: 414202 - DNA, 120 bp, Artificial Sequence
  ENSG00000149084_28 (sequence is synthesized)
aatttcagctggttcctttttatgccctcttgacacagtcacattctacagtgtacagaaaataacctgctgtctgtagaagtggtgaatggtttcatgattcccttctttttagtgtgg

SEQ ID NO: 414203 - DNA, 120 bp, Artificial Sequence
  ENSG00000149084_29 (sequence is synthesized)
tggcaaagactcttaactaacttctactcaatcaaccagatggataaaccaatgctgttcatttgtttggtaaaacatactaactgatgtccccagtttgctgaccatttgtggccagga

SEQ ID NO: 414204 - DNA, 120 bp, Artificial Sequence
  ENSG00000149084_30 (sequence is synthesized)
tcacaaatcaaattgtttacttattaagagtcaatttgtgtttgtttccaaacttatgttgggtatattttttattaaatattctgtaaaatgatgaactattagtgtaaaagctagagt

SEQ ID NO: 414205 - DNA, 120 bp, Artificial Sequence
  ENSG00000149084_31 (sequence is synthesized)
tagttctataaaaactaagttgaatgctctaaaaaaagtgagtaaaattacttctttgaaaaattggccgtcaaattagtgttgaacaaagacaaatgtaaaatattggaagaacttaca

SEQ ID NO: 414206 - DNA, 120 bp, Artificial Sequence
  ENSG00000149084_32 (sequence is synthesized)
aaaaagaaatctgctctcctgattgtttcatatgtgttgaagtttgtgctgtactttactagaactgaaattgtaatcataaatgatagaatatgggtgtgatgcatgcaagaaagactg

SEQ ID NO: 414207 - DNA, 120 bp, Artificial Sequence
  ENSG00000149084_33 (sequence is synthesized)
gaattcaagtccgcagatccaatctcaaagacaaggtcttggccctacacagaggattggtgaatgaattacatttatacatggtttaagtgaaaataaaatgattaccatgtgtattta

SEQ ID NO: 414208 - DNA, 120 bp, Artificial Sequence
  ENSG00000149084_34 (sequence is synthesized)
atatggccccgcgggcggggtttaggcccaaagtggtgtcggagcagcgcctattagtgtcatcctcaccgtcacggccggcgcctcctcctggattcattcactcgctcttttcattca

SEQ ID NO: 414209 - DNA, 120 bp, Artificial Sequence
  ENSG00000149084_35 (sequence is synthesized)
actgccttgattttaaaccatcgtggaaataaatatactttctagaaaagaatttacatttcttagctggaaaaacataacccaacttggaattcctgagtatgcatctcttgtccccac

SEQ ID NO: 414210 - DNA, 120 bp, Artificial Sequence
  ENSG00000149084_36 (sequence is synthesized)
cccttgatctgggggttctctagactagctctatggtttagctgcatgaagagttaacttgtggcaccaccaagtggttcagtcaggcagtgcaacttaattctcctacaagatcaaagt

SEQ ID NO: 414211 - DNA, 120 bp, Artificial Sequence
  ENSG00000149084_37 (sequence is synthesized)
agtccaatttataccatgttacatacgaagggagggaagaagatggcaaaaaggatggacgaaaggaacaaaaaattataacgcagttgagaggtataatgattagaccatctctacctc

SEQ ID NO: 414212 - DNA, 120 bp, Artificial Sequence
  ENSG00000149084_38 (sequence is synthesized)
tagaagctcaaaatcttacaatacctttaccaggcttgtgatctatatttgggtttttttttttaatcttcactattttgtgacctttaaacctaatgcatagaaatgagaaatggtttg

SEQ ID NO: 414213 - DNA, 120 bp, Artificial Sequence
  ENSG00000149084_39 (sequence is synthesized)
cttatgttccttcattatgtgagatcagagtatttacatatactctttctttccttactgctcaactttactctgggaaataaccttttctttactgacccattgtgagagcctcactga

SEQ ID NO: 414214 - DNA, 120 bp, Artificial Sequence
  ENSG00000149084_40 (sequence is synthesized)
actctgcatttcctactcagtctgagtcggagatctcaccctagtgtgtgctctcatagactatatccttgtggcaaaatggtccttaaaagatgtgacaaaaaatttttttttctaagt

SEQ ID NO: 414215 - DNA, 120 bp, Artificial Sequence
  ENSG00000149084_41 (sequence is synthesized)
gagggataaatatatagtgataatcccaataaacaaattctcagaaatcaaaagttacctaatcaaagttggctcaaatattgaagtacttcatacttagtatgagtctgtggctgcagc

SEQ ID NO: 414216 - DNA, 120 bp, Artificial Sequence
  ENSG00000149084_42 (sequence is synthesized)
aacaaggaaagaggaagatagagagtgacagcactccatctggggttcttggttctaatgaagaggctgaggtttcatctaacctgtcaaggagagtgggttgcattccttgacttagac

SEQ ID NO: 414217 - DNA, 85 bp, Artificial Sequence
  ENSG00000149084_43 (sequence is synthesized)
aacctgtcaaggagagtgggttgcattccttgacttagacttcggagtgggaaaaatgcaaagcacacacgtacataaaaaccca

SEQ ID NO: 414218 - DNA, 68 bp, Artificial Sequence
  ENSG00000149084_44 (sequence is synthesized)
gcagagatcgcgccactgcactccagcttggggactctctgggaccactccttctaggtctcagcagg

SEQ ID NO: 414219 - DNA, 120 bp, Artificial Sequence
  ENSG00000149084_45 (sequence is synthesized)
agagacatgggaccactccttctaggtctcagcaggacggaaatccatagaatggaacagatctcaatttgattgaaattttaagattttgaccaccatgtgttagaaccattccttttc

SEQ ID NO: 414220 - DNA, 120 bp, Artificial Sequence
  ENSG00000149084_46 (sequence is synthesized)
tccttttctttaatggaagtgtcattgggccaagcgtggtagctcacacctgtcatcccgacacttggggaggctgaagtgggaggatcacatgagcccagaagtttgagaccagcctgg

SEQ ID NO: 414221 - DNA, 88 bp, Artificial Sequence
  ENSG00000149084_47 (sequence is synthesized)
aaaaaattttgttccaactactcagaaggctgagacaggaggatcccttgagcccaagagctcaaggctgcagtgagctatgatcgtg

SEQ ID NO: 414222 - DNA, 88 bp, Artificial Sequence
  ENSG00000149084_48 (sequence is synthesized)
caacaagcaaaaccctgccttatcattgcagtgatacttcacacatgtgagataaacaatacattcactctttgttgaactaccatgc

SEQ ID NO: 414223 - DNA, 120 bp, Artificial Sequence
  ENSG00000149084_49 (sequence is synthesized)
gagataaacaatacattcactctttgttgaactaccatgcccaggttatttcaaactacagaaggacctcttgtatcatgactcaggacttgttacaatagggtttccttatactctgtg

SEQ ID NO: 414224 - DNA, 120 bp, Artificial Sequence
  ENSG00000149084_50 (sequence is synthesized)
ttgaatcacatccaaaatgcagcaagcttaagcaataaagaacctaacattattgaagttcctctaaaggtcatgtccagatttgtcaccctacacccatccagtcaggtgtcttttagt

SEQ ID NO: 414225 - DNA, 120 bp, Artificial Sequence
  ENSG00000149084_51 (sequence is synthesized)
aactcagaagtagaatggtgagaaactagggaagaaaagtagtaacgcaagtctgagaaataagatgtctattttagaaggatcaaagctgatagaacaagcttaattagccataaatta

SEQ ID NO: 414226 - DNA, 120 bp, Artificial Sequence
  ENSG00000149084_52 (sequence is synthesized)
tggagaaagttggcattatcccattagaagaataaagtatcaaagatctcctacttggtggttctgtctcaatgttgagtttactaagtgtgaaaagtatcctatcctgaatctgtgctc

SEQ ID NO: 414227 - DNA, 120 bp, Artificial Sequence
  ENSG00000149084_53 (sequence is synthesized)
tctggattatttaatgctttcctttttaaaggttcaaaaaggtagatttctgcttatttttaatactttctctggtctcaaactctgttttattgagagattgatttgttacaatttgtt

SEQ ID NO: 414228 - DNA, 120 bp, Artificial Sequence
  ENSG00000149084_54 (sequence is synthesized)
ttatggtatcatgtgttctatcaagttggctttagatagccacttctcttttcttctctctctgtaaagatacagatgtttctaccactaagagcagtcaagcaccactgtacattctga

SEQ ID NO: 414229 - DNA, 120 bp, Artificial Sequence
  ENSG00000149089_0 (sequence is synthesized)
gattgcatttgcggcctcgctgccgtatcccaggctaagcgccgcgcgcaaagccgtgcggagattggaggccgcgcgggtccctggtctgggccatgtctggctgtgatgctcgggagg

SEQ ID NO: 414230 - DNA, 120 bp, Artificial Sequence
  ENSG00000149089_1 (sequence is synthesized)
gagactgttgttcccggagatgcggcgcgcaggacaaggagcatccaagatacctgatcccagaactttgcaaacagttttaccatttaggctgggtcactgggactggaggaggaatta

SEQ ID NO: 414231 - DNA, 120 bp, Artificial Sequence
  ENSG00000149089_2 (sequence is synthesized)
gcttgaagcatggcgatgaaatctacattgctccttcaggagtgcaaaaggaacgaattcagcctgaagacatgtttgtttgtgatataaatgaaaaggacataagtggaccttcgccat

SEQ ID NO: 414232 - DNA, 120 bp, Artificial Sequence
  ENSG00000149089_3 (sequence is synthesized)
cgaagaagctaaaaaaaagccagtgtactcctcttttcatgaatgcttacacaatgagaggagcaggtgcagtgattcatacccactctaaagctgctgtgatggccacacttctctttc

SEQ ID NO: 414233 - DNA, 120 bp, Artificial Sequence
  ENSG00000149089_4 (sequence is synthesized)
caggacgggagtttaaaattacacatcaagagatgataaaaggaataaagaaatgtacttccggagggtattatagatatgatgatatgttagtggtacccattattgagaatacacctg

SEQ ID NO: 414234 - DNA, 120 bp, Artificial Sequence
  ENSG00000149089_5 (sequence is synthesized)
cccagactcctgtgcagtactggtcagacgtcatggagtatatgtgtggggggaaacatgggagaaggccaaaaccatgtgtgagtgttatgactatttatttgatattgccgtatcaat

SEQ ID NO: 414235 - DNA, 120 bp, Artificial Sequence
  ENSG00000149089_6 (sequence is synthesized)
gaagaaagtaggacttgatccttcacagctcccagttggagaaaatggaattgtctaagccaaaagaaagtctaattatatacagagataaagctaaacgtaattattatttaaatgaaa

SEQ ID NO: 414236 - DNA, 120 bp, Artificial Sequence
  ENSG00000149089_7 (sequence is synthesized)
gctatttttttaaatgaattgaaatttttcatgatgctactaatttgccactaaatactgcaaatggtcaccctgaatctcttctgacattggatgttatttgcttatattcttataatt

SEQ ID NO: 414237 - DNA, 120 bp, Artificial Sequence
  ENSG00000149089_8 (sequence is synthesized)
ttaaatgagggcacagtgaaatgaaaattttatactctatgtttctgtttatttttaaatccttaacagcaaaatatttgcctttaatttcttttttatatatactctcagagaattcct

SEQ ID NO: 414238 - DNA, 120 bp, Artificial Sequence
  ENSG00000149089_9 (sequence is synthesized)
cttaatttttaaagatgctggtgataataaaattcattagaaaatttcctcattgtggaatgagcattctcttgttttaatgttggtgtcagaaaataaatatgaaacattaagtccaaa

SEQ ID NO: 414239 - DNA, 120 bp, Artificial Sequence
  ENSG00000149089_10 (sequence is synthesized)
atgccaccagcactacaaaggcattgatgtagtttggctttctttctatgcagccaaaatccataattaaatcaagcaactggctgtattgcttgatttataaagaacatgcatgattgg

SEQ ID NO: 414240 - DNA, 120 bp, Artificial Sequence
  ENSG00000149089_11 (sequence is synthesized)
gtggggacacagagccaaaccatatcatccagcgtccaggaagattcaggtcactcagacttgaaggatggggtcagtaaaactctgtggaaacaaaaaggtgtagcagaaagaccacta

SEQ ID NO: 414241 - DNA, 120 bp, Artificial Sequence
  ENSG00000149089_12 (sequence is synthesized)
gaccactagatgggtgtcaggaaactttgactctaaccccagcaaggccactcgcattttctctgtgattttgtatctcaagtattttaaccatctcttgaaatgttcttgggcctcagc

SEQ ID NO: 414242 - DNA, 120 bp, Artificial Sequence
  ENSG00000149089_13 (sequence is synthesized)
ctaggcactatgcctatagaaactaatggataaagcaaccctgcttctttaaaggcctggaggcaagtgcaatcacgtttaatgctgaatatggcaaacttattttccctgttgaagcca

SEQ ID NO: 414243 - DNA, 120 bp, Artificial Sequence
  ENSG00000149089_14 (sequence is synthesized)
agtatctgtgtggaggattagttggatgcatgcttccaaaagaaaccagctgttcttgtaagtaaaggcctgctgaaagaagaaaccaacctatttagcttggagaatatgggggcacag

SEQ ID NO: 414244 - DNA, 120 bp, Artificial Sequence
  ENSG00000149089_15 (sequence is synthesized)
attgccttttcccatcacctgccaggaacaccatgcacttatttcatctcaatgcaagatacaagatctaggatccaaaacactattttctatcacaaagccagttctcacacctttttc

SEQ ID NO: 414245 - DNA, 120 bp, Artificial Sequence
  ENSG00000149089_16 (sequence is synthesized)
agatcaaatgttccagcctcttcagaaaagcttagaaaatagtctttctttcactccccaccagtcttcattgtgacatatgttgcatatcataacccttggtactggatgaaagctccc

SEQ ID NO: 414246 - DNA, 120 bp, Artificial Sequence
  ENSG00000149089_17 (sequence is synthesized)
aatctgaatcaagaacaggtaaaggtaaacaaaaaattgaggctaaaagaatcacttaacctgaaccacatggtaggaaaagcatgctagaatggaatatccaaccggctatggacattg

SEQ ID NO: 414247 - DNA, 120 bp, Artificial Sequence
  ENSG00000149089_18 (sequence is synthesized)
tttttggcagacaaatgaatggccccattataaaggcatcagggttggtgtattgtccaactctagggggcaacattgaattgtatcctatcgttatggtgctccctggagttctgtaaa

SEQ ID NO: 414248 - DNA, 120 bp, Artificial Sequence
  ENSG00000149089_19 (sequence is synthesized)
cacataggtctgagagtgattatcacatgcctatcttatccagggaaataaggagcaaaatggcccagaagaagagaaagaacattctaccaagtcacacgtaacctaccaacagtccac

SEQ ID NO: 414249 - DNA, 120 bp, Artificial Sequence
  ENSG00000149089_20 (sequence is synthesized)
aactgcaattgatttcatgcccaactcttgctacacctaagatttgcataacttagtactggggaggttttgggggaaaccagaattccacctctgaagccaagccaaatcttcagtgac

SEQ ID NO: 414250 - DNA, 120 bp, Artificial Sequence
  ENSG00000149089_21 (sequence is synthesized)
tggagactgggaaagctgcctttttcaaatttagtttgtctttcccaatagcacttaaaggacaaacgtgttctgttctgcatctttggaactcactattcatggttaagtcattgcctt

SEQ ID NO: 414251 - DNA, 120 bp, Artificial Sequence
  ENSG00000149089_22 (sequence is synthesized)
tgagactttataagggctattggcagtttagctttacagtaaatgtagtgtaatttacacaataaaatgcagtcacttgtttaattacttacctcacctattgggactttttctcatctc

SEQ ID NO: 414252 - DNA, 120 bp, Artificial Sequence
  ENSG00000149089_23 (sequence is synthesized)
gccataacaatggggttgacattggtatgaaacacttttgaaccccccagaatgaagacttcttaactgcacctgaagagtgactcgccaaaaacaatgaaaggtgtttcacaatctgag

SEQ ID NO: 414253 - DNA, 120 bp, Artificial Sequence
  ENSG00000149089_24 (sequence is synthesized)
tgggtgaacttcatctaactgatatgtaaataaaggagtggcgggttaacagctcaatacgcagaagcggcctctcaagaaagcttggctactagaaatgaagggcaacttcactcaaat

SEQ ID NO: 414254 - DNA, 120 bp, Artificial Sequence
  ENSG00000149089_25 (sequence is synthesized)
cctgtgacactgtggaatttaggcacagcaagatgcttgggcctggaccaatggaaggacaaaaggttcctttctctctctgcagttcatccatgtccaaagagagagaacaccaggagg

SEQ ID NO: 414255 - DNA, 120 bp, Artificial Sequence
  ENSG00000149089_26 (sequence is synthesized)
tgggacttctgagttgattctaaatcttcctgtgtaattcaaggcgtgtgtgtgtatctgtgtgtgtgttttctgtttaaaaccaccagagaaatatagatagtccctgagaagaaaaga

SEQ ID NO: 414256 - DNA, 120 bp, Artificial Sequence
  ENSG00000149089_27 (sequence is synthesized)
ttaatatggcaccttggccttgcccttctggctcacatgagggggatagcccagtagaccagcttggcccaagggagcagaaccgccccagatccaaccacacaaagaaaacagagacct

SEQ ID NO: 414257 - DNA, 120 bp, Artificial Sequence
  ENSG00000149089_28 (sequence is synthesized)
tgaaagaggaaaaataatatttgtggctattaatgaaatcacaatcacaataataattctaatgtcagtagctagcacttgcccacacttaaacatggaaactcagattctggcaaattc

SEQ ID NO: 414258 - DNA, 120 bp, Artificial Sequence
  ENSG00000149089_29 (sequence is synthesized)
tgcccactttccaaggctttctgggagtcccaggtgatgttttataggcatttgcacacagccctgttgttttgcactccagcctctgtgttgaagtctgatacctgagagtccctctat

SEQ ID NO: 414259 - DNA, 120 bp, Artificial Sequence
  ENSG00000149089_30 (sequence is synthesized)
gtccttcataataattctggtatcagccagagctgtgtctcttggtagtctcagagccagtaactcaaaaggagccaaactgacatttatcttcctacctgggcatcaaagcattccaga

SEQ ID NO: 414260 - DNA, 120 bp, Artificial Sequence
  ENSG00000149089_31 (sequence is synthesized)
tctcatggggtctgctgtgaaaacagctgcttctgcatctctttctctctgggagggtttagacaggagtcaaggagccagactcatccatttgggaattgatatctgcgacagatgatt

SEQ ID NO: 414261 - DNA, 120 bp, Artificial Sequence
  ENSG00000149089_32 (sequence is synthesized)
cttttcttttcacctcatccctttccttaccatttactctccctccacccattctgtttcactatatcaggtaaaccccaataatctacactttaatgagcccccttcctggggggagca

SEQ ID NO: 414262 - DNA, 120 bp, Artificial Sequence
  ENSG00000149089_33 (sequence is synthesized)
cagataccacctctgagaagcaaagatgtattcattaaaggctgtatggcctcgtggctgaagctgtgaagtcagacctggatctcaatacaggctctactccttcatactatctccttg

SEQ ID NO: 414263 - DNA, 120 bp, Artificial Sequence
  ENSG00000149089_34 (sequence is synthesized)
agcaagtgacataatctctttgtagcctggtctccttgattaccaaatgaagacagtaacagacttagctcataggattgtggttagaattctacaagatcattcattgattacttcctt

SEQ ID NO: 414264 - DNA, 120 bp, Artificial Sequence
  ENSG00000149089_35 (sequence is synthesized)
gtataaataccttattgaggatctgtaatgttccaagtactattctaggtgttagggatacaacatagaacaaaacatacaaaatatctgtcttcatggagcttaagtttcagttaggga

SEQ ID NO: 414265 - DNA, 120 bp, Artificial Sequence
  ENSG00000149089_36 (sequence is synthesized)
gatagacaataagcaggaatacaatagaataaaatgttgggcggtgatacagtctataaagcataaatctgattagggatggagagggatggcagggaaagtatttgagaaaagatagta

SEQ ID NO: 414266 - DNA, 120 bp, Artificial Sequence
  ENSG00000149089_37 (sequence is synthesized)
cagggaaagtatttgagaaaagatagtaagatagttaggaaagccctctttgacaaggtggcatatgagcaaagatctgaatgaaaaataattcagcactttgggaggccgaggcgggtg

SEQ ID NO: 414267 - DNA, 120 bp, Artificial Sequence
  ENSG00000149089_38 (sequence is synthesized)
ttcaggcatagaatgtttaataaatgggacaatattactttccaggttctcatcttcaagatgctcatagcctatgtacctggaaatgtggcagttgcttgactttattttaaaaaatac

SEQ ID NO: 414268 - DNA, 83 bp, Artificial Sequence
  ENSG00000149089_39 (sequence is synthesized)
tggaaatgtggcagttgcttgactttattttaaaaaatacatccctaggtcaggtaccgtggctcatgcttgtaattccaaca

SEQ ID NO: 414269 - DNA, 120 bp, Artificial Sequence
  ENSG00000149090_0 (sequence is synthesized)
agggcaaagccagctcccgtctcagcctcccgtaggaagatctcccggcctcacctgagcgccccgcagccctgggtacctctgctcccgcccagggtcctatggcccctcctcccagca

SEQ ID NO: 414270 - DNA, 120 bp, Artificial Sequence
  ENSG00000149090_1 (sequence is synthesized)
cccaacactgggaccccacctgtacccaggctggcctccctcccccgcagcttcctttgcagccgccgtccgcgggtctccaggcgtggccacacctcccggggccccgcaagggttaag

SEQ ID NO: 414271 - DNA, 120 bp, Artificial Sequence
  ENSG00000149090_2 (sequence is synthesized)
gcagcagagaggagaggtttgggctgacgtcgctctggctgaaggtggttcccctcagatgaggatgggagagcctggcgagctgaaacccgagctcccgctcagctggggctcggggag

SEQ ID NO: 414272 - DNA, 120 bp, Artificial Sequence
  ENSG00000149090_3 (sequence is synthesized)
gtccctgtaaaacccgcctgcccccggcctccctgggtccctcctctccctccccagtagacgctcgggcaccagccgcggcaaggatggagctgggttgctggacgcagttggggctca

SEQ ID NO: 414273 - DNA, 120 bp, Artificial Sequence
  ENSG00000149090_4 (sequence is synthesized)
cttttcttcagctccttctcatctcgtccttgccaagagagtacacagtcattaatgaagcctgccctggagcagagtggaatatcatgtgtcgggagtgctgtgaatatgatcagattg

SEQ ID NO: 414274 - DNA, 120 bp, Artificial Sequence
  ENSG00000149090_5 (sequence is synthesized)
agtgcgtctgccccggaaagagggaagtcgtgggttataccatcccttgctgcaggaatgaggagaatgagtgtgactcctgcctgatccacccaggttgtaccatctttgaaaactgca

SEQ ID NO: 414275 - DNA, 120 bp, Artificial Sequence
  ENSG00000149090_6 (sequence is synthesized)
agagctgccgaaatggctcatgggggggtaccttggatgacttctatgtgaaggggttctactgtgcagagtgccgagcaggctggtacggaggagactgcatgcgatgtggccaggttc

SEQ ID NO: 414276 - DNA, 120 bp, Artificial Sequence
  ENSG00000149090_7 (sequence is synthesized)
tgcgagccccaaagggtcagattttgttggaaagctatcccctaaatgctcactgtgaatggaccattcatgctaaacctgggtttgtcatccaactaagatttgtcatgttgagcctgg

SEQ ID NO: 414277 - DNA, 120 bp, Artificial Sequence
  ENSG00000149090_8 (sequence is synthesized)
agtttgactacatgtgccagtatgactatgttgaggttcgtgatggagacaaccgcgatggccagatcatcaagcgtgtctgtggcaacgagcggccagctcctatccagagcataggat

SEQ ID NO: 414278 - DNA, 120 bp, Artificial Sequence
  ENSG00000149090_9 (sequence is synthesized)
cctcactccacgtcctcttccactccgatggctccaagaattttgacggtttccatgccatttatgaggagatcacagcatgctcctcatccccttgtttccatgacggcacgtgcgtcc

SEQ ID NO: 414279 - DNA, 120 bp, Artificial Sequence
  ENSG00000149090_10 (sequence is synthesized)
ttgacaaggctggatcttacaagtgtgcctgcttggcaggctatactgggcagcgctgtgaaaatctccttgaagaaagaaactgctcagaccctgggggcccagtcaatgggtaccaga

SEQ ID NO: 414280 - DNA, 120 bp, Artificial Sequence
  ENSG00000149090_11 (sequence is synthesized)
aaataacagggggccctgggcttatcaacggacgccatgctaaaattggcaccgtggtgtctttcttttgtaacaactcctatgttcttagtggcaatgagaaaagaacttgccagcaga

SEQ ID NO: 414281 - DNA, 120 bp, Artificial Sequence
  ENSG00000149090_12 (sequence is synthesized)
atggagagtggtcagggaaacagcccatctgcataaaagcctgccgagaaccaaagatttcagacctggtgagaaggagagttcttccgatgcaggttcagtcaagggagacaccattac

SEQ ID NO: 414282 - DNA, 120 bp, Artificial Sequence
  ENSG00000149090_13 (sequence is synthesized)
cagcaagcagaaactgcagagtgcccctaccaagaagccagcccttccctttggagatctgcccatgggataccaacatctgcatacccagctccagtatgagtgcatctcacccttcta

SEQ ID NO: 414283 - DNA, 120 bp, Artificial Sequence
  ENSG00000149090_14 (sequence is synthesized)
ccgccgcctgggcagcagcaggaggacatgtctgaggactgggaagtggagtgggcgggcaccatcctgcatccctatctgcgggaaaattgagaacatcactgctccaaagacccaagg

SEQ ID NO: 414284 - DNA, 120 bp, Artificial Sequence
  ENSG00000149090_15 (sequence is synthesized)
gttgcgctggccgtggcaggcagccatctacaggaggaccagcggggtgcatgacggcagcctacacaagggagcgtggttcctagtctgcagcggtgccctggtgaatgagcgcactgt

SEQ ID NO: 414285 - DNA, 120 bp, Artificial Sequence
  ENSG00000149090_16 (sequence is synthesized)
ggtggtggctgcccactgtgttactgacctggggaaggtcaccatgatcaagacagcagacctgaaagttgttttggggaaattctaccgggatgatgaccgggatgagaagaccatcca

SEQ ID NO: 414286 - DNA, 120 bp, Artificial Sequence
  ENSG00000149090_17 (sequence is synthesized)
gagcctacagatttctgctatcattctgcatcccaactatgaccccatcctgcttgatgctgacatcgccatcctgaagctcctagacaaggcccgtatcagcacccgagtccagcccat

SEQ ID NO: 414287 - DNA, 120 bp, Artificial Sequence
  ENSG00000149090_18 (sequence is synthesized)
ctgcctcgctgccagtcgggatctcagcacttccttccaggagtcccacatcactgtggctggctggaatgtcctggcagacgtgaggagccctggcttcaagaacgacacactgcgctc

SEQ ID NO: 414288 - DNA, 120 bp, Artificial Sequence
  ENSG00000149090_19 (sequence is synthesized)
tggggtggtcagtgtggtggactcgctgctgtgtgaggagcagcatgaggaccatggcatcccagtgagtgtcactgataacatgttctgtgccagctgggaacccactgccccttctga

SEQ ID NO: 414289 - DNA, 120 bp, Artificial Sequence
  ENSG00000149090_20 (sequence is synthesized)
tatctgcactgcagagacaggaggcatcgcggctgtgtccttcccgggacgagcatctcctgagccacgctggcatctgatgggactggtcagctggagctatgataaaacatgcagcca

SEQ ID NO: 414290 - DNA, 120 bp, Artificial Sequence
  ENSG00000149090_21 (sequence is synthesized)
caggctctccactgccttcaccaaggtgctgccttttaaagactggattgaaagaaatatgaaatgaaccatgctcatgcactccttgagaagtgtttctgtatatccgtctgtacgtgt

SEQ ID NO: 414291 - DNA, 120 bp, Artificial Sequence
  ENSG00000149090_22 (sequence is synthesized)
gtcattgcgtgaagcagtgtgggcctgaagtgtgatttggcctgtgaacttggctgtgccagggcttctgacttcagggacaaaactcagtgaagggtgagtagacctccattgctggta

SEQ ID NO: 414292 - DNA, 120 bp, Artificial Sequence
  ENSG00000149090_23 (sequence is synthesized)
ggctgatgccgcgtccactactaggacagccaattggaagatgccagggcttgcaagaagtaagtttcttcaaagaagaccatatacaaaacctctccactccactgacctggtggtctt

SEQ ID NO: 414293 - DNA, 120 bp, Artificial Sequence
  ENSG00000149090_24 (sequence is synthesized)
ccccaactttcagttatacgaatgccatcagcttgaccagggaagatctgggcttcatgaggccccttttgaggctctcaagttctagagagctgcctgtgggacagcccagggcagcag

SEQ ID NO: 414294 - DNA, 120 bp, Artificial Sequence
  ENSG00000149090_25 (sequence is synthesized)
agctgggatgtggtgcatgcctttgtgtacatggccacagtacagtctggtccttttccttccccatctcttgtacacattttaataaaataagggttggcttctgaactacaaaacaaa

SEQ ID NO: 414295 - DNA, 120 bp, Artificial Sequence
  ENSG00000149090_26 (sequence is synthesized)
ctgagagccagaccagcatgatggttaatgctctctgactctggaaacagcctacttggatttgaatcctgtctctgctacttactacttagtacacagtcattaatgaagcctgccctg

SEQ ID NO: 414296 - DNA, 120 bp, Artificial Sequence
  ENSG00000149090_27 (sequence is synthesized)
atctacatgggacatggcatgaatgctaaagaggccacagtgactttctctcaccctgctctttctctgggcccatgtttcctgacccagggagacaccattacaccagctatactcagc

SEQ ID NO: 414297 - DNA, 120 bp, Artificial Sequence
  ENSG00000149090_28 (sequence is synthesized)
ttcattagggctggagacttccatgaaggggccagttacagcaggctccagtggaagggccctttgtcttttccacaatcctgcccttctccatctctggccttggctgacttgaacttg

SEQ ID NO: 414298 - DNA, 120 bp, Artificial Sequence
  ENSG00000149090_29 (sequence is synthesized)
gtgttttgcacagctgatggaaaccaaacttaattaccagaagtctgggatgcctcttataggtttgcagaccagttctacctctggcctgtttcctctggctttcccagtgtgtggttg

SEQ ID NO: 414299 - DNA, 120 bp, Artificial Sequence
  ENSG00000149090_30 (sequence is synthesized)
ctgcttagctgctgatctgcagaagtgatagctgggagatagagggaactgtaagaattcacaaagacagtctcctctgctgtttctccctgtggattcacatgcaaccagcctccctgg

SEQ ID NO: 414300 - DNA, 120 bp, Artificial Sequence
  ENSG00000149090_31 (sequence is synthesized)
ctggaggctgggaagtccaagatcaaggcgtcagaagattcattgtctgtccttgaagaaagaaactgctcagaccctgggggcccagtcaatgggtaccagaaaataacagggggccct

SEQ ID NO: 414301 - DNA, 120 bp, Artificial Sequence
  ENSG00000149090_32 (sequence is synthesized)
atactgggcagcgctgtgaaaatcgattaaaagatacgaatgtacagacaccgtggttggcacccagaagtgtgatcaacaccttggaatgagttctggaggctgggaagtccaagatca

SEQ ID NO: 414302 - DNA, 120 bp, Artificial Sequence
  ENSG00000149091_0 (sequence is synthesized)
agctggccccagccagcggaaggcgcctatgagccctgagcctgtggtcctcagcttgggcggccagcggcctctagcaggcccccccctcgaccccacccccgtcaggaagtgccgaaa

SEQ ID NO: 414303 - DNA, 120 bp, Artificial Sequence
  ENSG00000149091_1 (sequence is synthesized)
gaggaagagagtcgccgggcaggatgagcgcaccgggggctggccacagtgccgggggaagctgcaatgaatcctcagctctgggcccagtggaggcgctggggacggaagaaggggagc

SEQ ID NO: 414304 - DNA, 120 bp, Artificial Sequence
  ENSG00000149091_2 (sequence is synthesized)
ggccggggtcactgaggcagatgtggcgctaccgctcctgggacgtgccacagatcccatcagaggcaccccagacacagaaagccatcaccaagtcgggcctccagcacctggcccccc

SEQ ID NO: 414305 - DNA, 120 bp, Artificial Sequence
  ENSG00000149091_3 (sequence is synthesized)
ctccgcccacccctggggccccgtgcagcgagtcagagcggcagatccggagtacagtggactggagctcagcgacatatggggagcacatctggttcgagaccaacgtgtccggggact

SEQ ID NO: 414306 - DNA, 120 bp, Artificial Sequence
  ENSG00000149091_4 (sequence is synthesized)
tctgctacgttggggagcagtactgtgtagccaggatgctgcagaagtcagtgtctcgaagaaagtgcgcagcctgcaagattgtggtgcacacgccctgcatcgagcagctggagaaga

SEQ ID NO: 414307 - DNA, 120 bp, Artificial Sequence
  ENSG00000149091_5 (sequence is synthesized)
taaatttccgctgtaagccgtccttccgtgaatcaggctccaggaatgtccgcgagccaacctttgtacggcaccactgggtacacagacgacgccaggacggcaagtgtcggcactgtg

SEQ ID NO: 414308 - DNA, 120 bp, Artificial Sequence
  ENSG00000149091_6 (sequence is synthesized)
ggaagggattccagcagaagttcaccttccacagcaaggagattgtggccatcagctgctcgtggtgcaagcaggcataccacagcaaggtgtcctgcttcatgctgcagcagatcgagg

SEQ ID NO: 414309 - DNA, 120 bp, Artificial Sequence
  ENSG00000149091_7 (sequence is synthesized)
agccgtgctcgctgggggtccacgcagccgtggtcatcccgcccacctggatcctccgcgcccggaggccccagaatactctgaaagcaagcaagaagaagaagagggcatccttcaaga

SEQ ID NO: 414310 - DNA, 120 bp, Artificial Sequence
  ENSG00000149091_8 (sequence is synthesized)
ggaagtccagcaagaaagggcctgaggagggccgctggagacccttcatcatcaggcccaccccctccccgctcatgaagcccctgctggtgtttgtgaaccccaagagtgggggcaacc

SEQ ID NO: 414311 - DNA, 120 bp, Artificial Sequence
  ENSG00000149091_9 (sequence is synthesized)
agggtgcaaagatcatccagtctttcctctggtatctcaatccccgacaagtcttcgacctgagccagggagggcccaaggaggcgctggagatgtaccgcaaagtgcacaacctgcgga

SEQ ID NO: 414312 - DNA, 120 bp, Artificial Sequence
  ENSG00000149091_10 (sequence is synthesized)
tcctggcgtgcgggggcgacggcacggtgggctggatcctctccaccctggaccagctacgcctgaagccgccaccccctgttgccatcctgcccctgggtactggcaacgacttggccc

SEQ ID NO: 414313 - DNA, 120 bp, Artificial Sequence
  ENSG00000149091_11 (sequence is synthesized)
gaaccctcaactggggtgggggctacacagatgagcctgtgtccaagatcctctcccacgtggaggaggggaacgtggtacagctggaccgctgggacctccacgctgagcccaaccccg

SEQ ID NO: 414314 - DNA, 120 bp, Artificial Sequence
  ENSG00000149091_12 (sequence is synthesized)
agaggccaacccagagaaattcaacagccgctttcggaataagatgttctacgccgggacagctttctctgacttcctgatgggcagctccaaggacctggccaagcacatccgagtggt

SEQ ID NO: 414315 - DNA, 120 bp, Artificial Sequence
  ENSG00000149091_13 (sequence is synthesized)
gtgtgatggaatggacttgactcccaagatccaggacctgaaaccccagtgtgttgttttcctgaacatccccaggtactgtgcgggcaccatgccctggggccaccctggggagcacca

SEQ ID NO: 414316 - DNA, 120 bp, Artificial Sequence
  ENSG00000149091_14 (sequence is synthesized)
cgactttgagccccagcggcatgacgacggctacctcgaggtcattggcttcaccatgacgtcgttggccgcgctgcaggtgggcggacacggcgagcggctgacgcagtgtcgcgaggt

SEQ ID NO: 414317 - DNA, 120 bp, Artificial Sequence
  ENSG00000149091_15 (sequence is synthesized)
ggtgctcaccacatccaaggccatcccggtgcaggtggatggcgagccctgcaagcttgcagcctcacgcatccgcatcgccctgcgcaaccaggccaccatggtgcagaaggccaagcg

SEQ ID NO: 414318 - DNA, 120 bp, Artificial Sequence
  ENSG00000149091_16 (sequence is synthesized)
gcggagcgccgcccccctgcacagcgaccagcagccggtgccagagcagttgcgcatccaggtgagtcgcgtcagcatgcacgactatgaggccctgcactacgacaaggagcagctcaa

SEQ ID NO: 414319 - DNA, 120 bp, Artificial Sequence
  ENSG00000149091_17 (sequence is synthesized)
ggaggcctctgtgccgctgggcactgtggtggtcccaggagacagtgacctagagctctgccgtgcccacattgagagactccagcaggagcccgatggtgctggagccaagtccccgac

SEQ ID NO: 414320 - DNA, 120 bp, Artificial Sequence
  ENSG00000149091_18 (sequence is synthesized)
atgccagaaactgtcccccaagtggtgcttcctggacgccaccactgccagccgcttctacaggatcgaccgagcccaggagcacctcaactatgtgactgagatcgcacaggatgagat

SEQ ID NO: 414321 - DNA, 120 bp, Artificial Sequence
  ENSG00000149091_19 (sequence is synthesized)
ttatatcctggaccctgagctgctgggggcatcggcccggcctgacctcccaacccccacttcccctctccccacctcaccctgctcacccacgccccggtcactgcaaggggatgctgc

SEQ ID NO: 414322 - DNA, 120 bp, Artificial Sequence
  ENSG00000149091_20 (sequence is synthesized)
accccctcaaggtgaagagctgattgaggctgccaagaggaacgacttctgtaagctccaggagctgcaccgagctgggggcgacctcatgcaccgagacgagcagagtcgcacgctcct

SEQ ID NO: 414323 - DNA, 120 bp, Artificial Sequence
  ENSG00000149091_21 (sequence is synthesized)
gcaccacgcagtcagcactggcagcaaggatgtggtccgctacctgctggaccacgcccccccagagatccttgatgcggtggaggaaaacggggagacctgtttgcaccaagcagcggc

SEQ ID NO: 414324 - DNA, 120 bp, Artificial Sequence
  ENSG00000149091_22 (sequence is synthesized)
cctgggccagcgcaccatctgccactacatcgtggaggccggggcctcgctcatgaagacagaccagcagggcgacactccccggcagcgggctgagaaggctcaggacaccgagctggc

SEQ ID NO: 414325 - DNA, 120 bp, Artificial Sequence
  ENSG00000149091_23 (sequence is synthesized)
cgcctacctggagaaccggcagcactaccagatgatccagcgggaggaccaggagacggctgtgtagcgggccgcccacgggcagcaggagggacaatgcggccaggggacgagcgcctt

SEQ ID NO: 414326 - DNA, 120 bp, Artificial Sequence
  ENSG00000149091_24 (sequence is synthesized)
ccttgcccacctcactgccacattccagtgggacggccacggggggacctaggccccagggaaagagccccatgccgccccctaaggagccgcccagacctagggctggactcaggagct

SEQ ID NO: 414327 - DNA, 120 bp, Artificial Sequence
  ENSG00000149091_25 (sequence is synthesized)
cgtctcccgcgggccctccgccggccggggctagggccggatggagccgcgggacggtagccccgaggcccggagcagcgactccgagtcggcttccgcctcgtccagcggctccgagcg

SEQ ID NO: 414328 - DNA, 120 bp, Artificial Sequence
  ENSG00000149091_26 (sequence is synthesized)
tcggcttccgcctcgtccagcggctccgagcgcgacgccggtcccgagccggacaaggcgccgcggcgactcaacaagcggcgcttcccggggctgcggctcttcgggcacaggaaagcc

SEQ ID NO: 414329 - DNA, 120 bp, Artificial Sequence
  ENSG00000149091_27 (sequence is synthesized)
ggatatgcctttgccggggttctggggcagggcgctccctggccgcagcagatgccctcccaggagtggaggggctggagagggggaggccttcgggaagaggcttcctgggccccctgg

SEQ ID NO: 414330 - DNA, 120 bp, Artificial Sequence
  ENSG00000149091_28 (sequence is synthesized)
tcttcggccgggtccccagcccccgctcctgccccaccccacctcctccgggcttcctcccggaaactcagcgcctgctgcacttgcctgccctgccttgcttggcacccgctccggcga

SEQ ID NO: 414331 - DNA, 120 bp, Artificial Sequence
  ENSG00000149091_29 (sequence is synthesized)
ccctccccgctcccctgtcatttcatcgcggactgtgcggcctgggggtggggggcgggactctcacggtgacatgtttacagctgggtgtgactcagtaaagtggatttttttttcttt

SEQ ID NO: 414332 - DNA, 120 bp, Artificial Sequence
  ENSG00000149091_30 (sequence is synthesized)
acaagctcatgggaaacaagaactgaggcatcggaatgaacctgagcatggtggcggggggctccgtggcacatgcatcccaccaagagaggtcatgcaatgcccgtgcatccttctggg

SEQ ID NO: 414333 - DNA, 120 bp, Artificial Sequence
  ENSG00000149091_31 (sequence is synthesized)
tcagagagacctgggctccaattccagccctgccccttcctagttgggtaagaggctttcacttctgaccctgtttcctcacacggaaaatgcgagcgatgataccttatcaagaatgtg

SEQ ID NO: 414334 - DNA, 120 bp, Artificial Sequence
  ENSG00000149091_32 (sequence is synthesized)
gtgtctcgaagaaagtgcgcagcctgcaagattgtggtgcacacgccctgcatcgagcagctggagaaggactctcgtgacgatttgggggtatccccaccttgtgaggatgactctggg

SEQ ID NO: 414335 - DNA, 120 bp, Artificial Sequence
  ENSG00000149091_33 (sequence is synthesized)
acagccaccactgccagccgcttctacaggatcgaccgagcccaggtgagcgattgcaggcctgctccagccacagctgcttccgggccccagggtcgcctctcctgggacgccttccct

SEQ ID NO: 414336 - DNA, 120 bp, Artificial Sequence
  ENSG00000149091_34 (sequence is synthesized)
gttagctcccccgatgggctcacctctgtcctcatgcctctgagagcttttactattgcctgtgtgcatggacagcgtgcggccctgccctccacactggagagtatagggcggtgccag

SEQ ID NO: 414337 - DNA, 120 bp, Artificial Sequence
  ENSG00000149091_35 (sequence is synthesized)
ccagaaaggcagtggggtacctaccaaaggcttgctgggtgggtaggagggcctggaagcccagagccatccagggagacacagaagcaaaggcattctggtcaggcgccagctcacctg

SEQ ID NO: 414338 - DNA, 120 bp, Artificial Sequence
  ENSG00000149091_36 (sequence is synthesized)
gtaaagtctgggcagtcggaggaggtgtcaggaatgggaaggagtgggagagggacaggcagggccccttgcctggccacctcctttcagtgtttgtgctcatggcagaggcttctccag

SEQ ID NO: 414339 - DNA, 120 bp, Artificial Sequence
  ENSG00000149091_37 (sequence is synthesized)
cccctggctttcagccccacctgtaagccgatgacttctgaatccctgcttctagcccctccaccagttaactaaatggtgtcaacctgaacctggccaaagcccacctgacggccttca

SEQ ID NO: 414340 - DNA, 120 bp, Artificial Sequence
  ENSG00000149091_38 (sequence is synthesized)
gccctgtggttctgtggggaagcggcctcacgtccaccctggttccctccctgacttctccctcctctggacctcatccttcagccagtcctggcagcccccggacccaccacctgagca

SEQ ID NO: 414341 - DNA, 120 bp, Artificial Sequence
  ENSG00000149091_39 (sequence is synthesized)
ctcctccccacccctactgccaccagcccttcccggctgccacgccctggcccccagctcttatatccctgtggccattcgtgccctcgaacccccatctccataccacggtcaactaaa

SEQ ID NO: 414342 - DNA, 120 bp, Artificial Sequence
  ENSG00000149091_40 (sequence is synthesized)
aatgcagagcataccaggccactccccaacctagaagcttctttctcagcagccctttggacgtggattctccccaggccccccgtcattgcactgggctcccagccccctccctgagtt

SEQ ID NO: 414343 - DNA, 120 bp, Artificial Sequence
  ENSG00000149091_41 (sequence is synthesized)
cacctccatggtcctgccccactctcttctcttggttctttgaggcatcaggtgtttgccaccactggacttctgtcatcgctgcctccaactcttcccccatctttccggagctccccc

SEQ ID NO: 414344 - DNA, 120 bp, Artificial Sequence
  ENSG00000149091_42 (sequence is synthesized)
acccccatccccttcgaatctcagcttggctgtttcctccttggagagatcactcccaggaccccctctgcaggggtgccacatcacctgttctgaattcttaagagcacccctgctctc

SEQ ID NO: 414345 - DNA, 120 bp, Artificial Sequence
  ENSG00000149091_43 (sequence is synthesized)
agaactccttatttatttgacttgtttgtatccctgaactagaatgtaagctccatgagggcaaggccttcctctgtctcgtttccctgctgtatccccagtgcctggaatagtgcttgg

SEQ ID NO: 414346 - DNA, 120 bp, Artificial Sequence
  ENSG00000149091_44 (sequence is synthesized)
tgtgtagcaggcactcaataaactgtggaaaggatgaagatgcccccagttggggttggggagggcgaccagctggcctgtgccgtagccggtcacagcacatcatgctctgttgcaggt

SEQ ID NO: 414347 - DNA, 120 bp, Artificial Sequence
  ENSG00000149091_45 (sequence is synthesized)
cactgcaaggggatgctgcaccccctcaaggtgaggcctctccctctggggcccctcctttctgcctggttgggggcaggaggctcagtggggtggggatagggcccagacacagcctta

SEQ ID NO: 414348 - DNA, 120 bp, Artificial Sequence
  ENSG00000149091_46 (sequence is synthesized)
ggcaccaacccaagcccaggcctccgactgcagagtaacaggcaggtattccgtgcaggtgaagagctgattgaggctgccaagaggaacgacttctgtaaggtactagctccaggctcc

SEQ ID NO: 414349 - DNA, 120 bp, Artificial Sequence
  ENSG00000149091_47 (sequence is synthesized)
agttccttcccccagcagctccctcgggccctggggagcgaggcctctgggttgggccaagagctgacctgctcaggtgctgtcatctgtcatcgtctggccctctgtgggatctccagt

SEQ ID NO: 414350 - DNA, 120 bp, Artificial Sequence
  ENSG00000149091_48 (sequence is synthesized)
gatcgtcccattccacttcactgtatctctgtctaggccacaatagatggctcctagtaggggcttcctagctcagtccacctgtccctggtgcttagaaaggagcaggtcagaggaagc

SEQ ID NO: 414351 - DNA, 120 bp, Artificial Sequence
  ENSG00000149091_49 (sequence is synthesized)
actgctccagggcttggtcaccagtgctgccagagagcccacaggctgtggggtgagaggcccctcctccggtgtgctccagagagacccacagaggcaactcaggagtaagatgtgtga

SEQ ID NO: 414352 - DNA, 120 bp, Artificial Sequence
  ENSG00000149091_50 (sequence is synthesized)
gcgcactcgtttcaggcctgtgctggtgtacccggctgtgggccagcgtgtgagctcagggaaggaggggtggccccaggaggtccagccctgccatgcctcctgccctcagctccagga

SEQ ID NO: 414353 - DNA, 120 bp, Artificial Sequence
  ENSG00000149091_51 (sequence is synthesized)
agagatccttgatgcggtggaggaaaagtaagtatctgggcagtgcagaaccgtggtcaccccggaaaccacccttttccccacccctcccattttgtcaggtcagagcccataaacttc

SEQ ID NO: 414354 - DNA, 120 bp, Artificial Sequence
  ENSG00000149091_52 (sequence is synthesized)
ctggtcacatctgtcatcccctgggccacccctattgccccagagccctgaacttcctgccctttctgatggcccttgggagacagatgggtggatcaggggacgggatggggtacacag

SEQ ID NO: 414355 - DNA, 120 bp, Artificial Sequence
  ENSG00000149091_53 (sequence is synthesized)
attttcataacggctgtctcaggctgcagggaggagggtgacaagggggagggggcagaggagcagccacggctgctagctctccaaactaggacttgctcagcagaggccgccagcccg

SEQ ID NO: 414356 - DNA, 120 bp, Artificial Sequence
  ENSG00000149091_54 (sequence is synthesized)
gagctggatccagagcccggccttggggaccccagctcccacctgcgccctgccttccagatcagccaaccgcctgccatggagactttctttaggagacatttccgggggaaggtgcca

SEQ ID NO: 414357 - DNA, 120 bp, Artificial Sequence
  ENSG00000149091_55 (sequence is synthesized)
cggcgccgctccagcgcccagctccagggctgcctcctgagttgcggggtgagggcccagggttccagccgccggcgctccagcactgtgcccccttcctgcaacccccgcttcatcgtg

SEQ ID NO: 414358 - DNA, 120 bp, Artificial Sequence
  ENSG00000149091_56 (sequence is synthesized)
gataaggaaagccatcaccaagtcgggcctccagcacctggccccccctccgcccacccctggggccccgtgcagcgagtcagagcggcagatccggagtacagtggactggagcgagtc

SEQ ID NO: 414359 - DNA, 120 bp, Artificial Sequence
  ENSG00000149091_57 (sequence is synthesized)
aaactaggacttgctcagcagaggccgccagcccggagctggatccagagcccggccttggggaccccagctcccacctgcgccctgccttccagatcaggtcaaaaggggcccccagcc

SEQ ID NO: 414360 - DNA, 120 bp, Artificial Sequence
  ENSG00000149091_58 (sequence is synthesized)
cctccttgctttctgcttcctccctctgtatctggctgggtgggtgcggggagggttggatccgggcggacccgggccccaccatccctaggcaaggagcctgccctgccaggttcctga

SEQ ID NO: 414361 - DNA, 120 bp, Artificial Sequence
  ENSG00000149091_59 (sequence is synthesized)
ttcggaataagatgttctacgccgggacagctttctctgacttcctgatgggcagctccaaggacctggccaagcacatccgagtggtggtgagcggggccaggctgccgtgggtgggtg

SEQ ID NO: 414362 - DNA, 120 bp, Artificial Sequence
  ENSG00000149091_60 (sequence is synthesized)
tgacccagcactcgggggtgaagagtcaaggaccctggagccaaatgcctgcgttcgaatcctggctcctcactgattagctgctgtatccccactgcctggaacaaacctggcgcctag

SEQ ID NO: 414363 - DNA, 120 bp, Artificial Sequence
  ENSG00000149091_61 (sequence is synthesized)
tgggttcgttgaatatcactcaatggaatgaattgacgaatggtggcccttgtaccatttcaccatgtccaaactagtgcttagaagaggccattgatttgctgaagcttcataactcag

SEQ ID NO: 414364 - DNA, 120 bp, Artificial Sequence
  ENSG00000149091_62 (sequence is synthesized)
ctgtggctacaccctgcctctgtggagacctttccccaagggccattgtccactgtgcatttgcagctgggggcatgtctgggcactgtgcttctagaggtggaggcagcactgggcaga

SEQ ID NO: 414365 - DNA, 120 bp, Artificial Sequence
  ENSG00000149091_63 (sequence is synthesized)
cgggtcaaggccaggggcagaagggttcgcatggaggggcagcgcttcccagcctgcagaaacccaggccatcatacgggagagactgtaagactaggagtggttcaggcaggctcacac

SEQ ID NO: 414366 - DNA, 120 bp, Artificial Sequence
  ENSG00000149091_64 (sequence is synthesized)
aggctgctttccccagcctctgaattgtaaagtgaggcttccttatacctctaataaggctgaagtagggacagttatgagaagggaaatagaaatgcagccccaagcactgtacactca

SEQ ID NO: 414367 - DNA, 120 bp, Artificial Sequence
  ENSG00000149091_65 (sequence is synthesized)
tcatttaaggtggaaatcgacctagggttccacaaattagctaaaggtctccaggggccaggcagtgcaagtctgcgtgtgaggaccaggctggctgcgtgtgcccgggtcgggagtgcc

SEQ ID NO: 414368 - DNA, 62 bp, Artificial Sequence
  ENSG00000149091_66 (sequence is synthesized)
gaggaccaggctggctgcgtgtgcccgggtcgggagtgccagagggcgaggaagaaaggatg

SEQ ID NO: 414369 - DNA, 120 bp, Artificial Sequence
  ENSG00000149091_67 (sequence is synthesized)
gcgagactctgtctcaaaaaacaaaaacaaaaaaaaaacaacgagcaaaccatggtcccatgttagtgggggagacggacccaaagctcccaacctccccctcatcctgggtcctgggtg

SEQ ID NO: 414370 - DNA, 120 bp, Artificial Sequence
  ENSG00000149091_68 (sequence is synthesized)
ctcatcctgggtcctgggtggaagaaggaaagatccctctggctagtgaggaggaggcagagaggcaggagggcttctcacaggaggtgtctcgtgtttcaaggactctcgtgacgattt

SEQ ID NO: 414371 - DNA, 120 bp, Artificial Sequence
  ENSG00000149091_69 (sequence is synthesized)
tccgctgtaagccgtccttccgtgaatcaggctccaggaatgtccgcgaggtaagtgcccagggtggtcagggatggggccaccctaagattcctgcatgggcctctgcgcagtgcctct

SEQ ID NO: 414372 - DNA, 120 bp, Artificial Sequence
  ENSG00000149091_70 (sequence is synthesized)
ggagtgccaccagggggctcggctccctctaggctgctgctcactgaggtctgtctgaggtctgccatgcggaggcctaactagcgctgcctgcggagtgggtgggacagcttgtgcctc

SEQ ID NO: 414373 - DNA, 120 bp, Artificial Sequence
  ENSG00000149091_71 (sequence is synthesized)
ctggtgcttcccagccttctctgtccctctgagtctgagcctcccccaggccatgaagagagtctttagcccctcctccactcatgcgcaggactgcagagcgcttcctgcagccccgtg

SEQ ID NO: 414374 - DNA, 120 bp, Artificial Sequence
  ENSG00000149091_72 (sequence is synthesized)
tgttgagccgtgtgggcagtcctcaggactgtgcccctgcccacccctcacccagtgaaatttttccccttctcccccagccaacctttgtacggcaccactgggtacacagacgacgcc

SEQ ID NO: 414375 - DNA, 120 bp, Artificial Sequence
  ENSG00000149091_73 (sequence is synthesized)
agtgctcgtaggggcacgccgccccctgctggtggagccagtagccgcagcccttccgggaacgtgggattgagcccgctccctggcacccctgctgtgggccgccccaggatggtgagg

SEQ ID NO: 414376 - DNA, 120 bp, Artificial Sequence
  ENSG00000149091_74 (sequence is synthesized)
ggtgcaggggctttgtccggatgccaggactggggcttcccagtgcacacaaagggcagctgtgctggggcaggcagcctccgagatagacttacctggtgcctcaggggccctctcttc

SEQ ID NO: 414377 - DNA, 120 bp, Artificial Sequence
  ENSG00000149091_75 (sequence is synthesized)
gacatgggggggaacttgcctcactcctggggtacagcacacatcccctgaccccactgccatcttcccatgagcccaggctggagatgtaccgcaaagtgcacaacctgcggatcctgg

SEQ ID NO: 414378 - DNA, 120 bp, Artificial Sequence
  ENSG00000149091_76 (sequence is synthesized)
cgtgcgggggcgacggcacggtgagctccccgcatgggccagccgagcaccagggctgggcctgaagccggggtccctgtgggcctgatttgcctctgttcttcctcccccaggtgggct

SEQ ID NO: 414379 - DNA, 120 bp, Artificial Sequence
  ENSG00000149091_77 (sequence is synthesized)
ggatcctctccaccctggaccagctacgcctgaagccgccaccccctgttgccatcctgcccctgggtactggcaacgacttggcccgaaccctcaactggggtggggtaagcacccata

SEQ ID NO: 414380 - DNA, 120 bp, Artificial Sequence
  ENSG00000149091_78 (sequence is synthesized)
aggagggtgtccaggaggatgtggtagccgaggcatcgagcgccatccagccaggcaccaagacaccagggccacccccacctcggggcgcccagccgctgttgcccctaccccgctacc

SEQ ID NO: 414381 - DNA, 120 bp, Artificial Sequence
  ENSG00000149091_79 (sequence is synthesized)
tgcgccgagcctcctcccacctgctccccgcggatgccgtatatgaccacgctctctggggcctgcacggctactatcggcgcctcagccagcggcggccctcaggccagcaccctggcc

SEQ ID NO: 414382 - DNA, 120 bp, Artificial Sequence
  ENSG00000149091_80 (sequence is synthesized)
ctgggggccgaagagcctcaggcaccaccgccggcaccatgctgcccacccgtgtgcgcccactgtcccgcaggcgccaggtagccctacggcgcaaggcggccggaccccaggcctgga

SEQ ID NO: 414383 - DNA, 120 bp, Artificial Sequence
  ENSG00000149091_81 (sequence is synthesized)
ggagagtgtctctaaggtgacactcgggtgcgcggcagcagcggcggttgcaggagctcgctctccgcccgggctccggctccgctccagccgtccggggggcgccgcggcgcgcagagc

SEQ ID NO: 414384 - DNA, 120 bp, Artificial Sequence
  ENSG00000149091_82 (sequence is synthesized)
gcagcaccccgactccagccaggagcccccgcccccccggagcgcaggaggaccccggcccgcctctcccaggcgcagcgcccagcatctcgctgctcctgtcgtctaagcgtcggcgtc

SEQ ID NO: 414385 - DNA, 120 bp, Artificial Sequence
  ENSG00000149091_83 (sequence is synthesized)
gctagggacctgcggaacccggcgctcccctccctccccgcctcgcgtccccggcccgggcggactggagactcgaacttgagcgggtgcccgaaaggccgcaggagccgcgggcggaag

SEQ ID NO: 414386 - DNA, 80 bp, Artificial Sequence
  ENSG00000149091_84 (sequence is synthesized)
ggcagcgctgggactgggctggcggcggccgggcagccgaggaggaggtggtgcggcggcgatgccggcgcggggaggag

SEQ ID NO: 414387 - DNA, 120 bp, Artificial Sequence
  ENSG00000149091_85 (sequence is synthesized)
aggtcgcgcagccctggcccgagggttcccggggcacggccgctgggcccccggtggaggagcgtttccgccagctgcacctacgaaagcaggtgtcttacaggaaagccatcaccaagt

SEQ ID NO: 414388 - DNA, 120 bp, Artificial Sequence
  ENSG00000149100_0 (sequence is synthesized)
cttttccggtcggcgtggtcttgcgagtggagtgtccgctgtgcccgggcctgcaccatgagcgtcccggccttcatcgacatcagtgaagaagatcaggctgctgagcttcgtgcttat

SEQ ID NO: 414389 - DNA, 120 bp, Artificial Sequence
  ENSG00000149100_1 (sequence is synthesized)
ctgaaatctaaaggagctgagatttcagaagagaactcggaaggtggacttcatgttgatttagctcaaattattgaagcctgtgatgtgtgtctgaaggaggatgataaagatgttgaa

SEQ ID NO: 414390 - DNA, 120 bp, Artificial Sequence
  ENSG00000149100_2 (sequence is synthesized)
agtgtgatgaacagtgtggtatccctactcttgatcctggaaccagacaagcaagaagctttgattgaaagcctatgtgaaaagctggtcaaatttcgcgaaggtgaacgcccgtctctg

SEQ ID NO: 414391 - DNA, 120 bp, Artificial Sequence
  ENSG00000149100_3 (sequence is synthesized)
agactgcagttgttaagcaaccttttccacgggatggataagaatactcctgtaagatacacagtgtattgcagccttattaaagtggcagcatcttgtggggccatccagtacatccca

SEQ ID NO: 414392 - DNA, 120 bp, Artificial Sequence
  ENSG00000149100_4 (sequence is synthesized)
actgagctggatcaagttagaaaatggatttctgactggaatctcaccactgaaaaaaagcacacccttttaagactactttatgaggcacttgtggattgtaagaagagtgatgctgct

SEQ ID NO: 414393 - DNA, 120 bp, Artificial Sequence
  ENSG00000149100_5 (sequence is synthesized)
tcaaaagtcatggtggaattgctcggaagttacacagaggacaatgcttcccaggctcgagttgatgcccacaggtgtattgtacgagcattgaaagatccaaatgcatttctttttgac

SEQ ID NO: 414394 - DNA, 120 bp, Artificial Sequence
  ENSG00000149100_6 (sequence is synthesized)
caccttcttactttaaaaccagtcaagtttttggaaggcgagcttattcatgatcttttaaccatttttgtgagtgctaaattggcatcatatgtcaagttttatcagaataataaagac

SEQ ID NO: 414395 - DNA, 120 bp, Artificial Sequence
  ENSG00000149100_7 (sequence is synthesized)
ttcattgattcacttggcctgttacatgaacagaatatggcaaaaatgagactacttacttttatgggaatggcagtagaaaataaggaaatttcttttgacacaatgcagcaagaactt

SEQ ID NO: 414396 - DNA, 120 bp, Artificial Sequence
  ENSG00000149100_8 (sequence is synthesized)
cagattggagctgatgatgttgaagcatttgttattgacgccgtaagaactaaaatggtctactgcaaaattgatcagacccagagaaaagtagttgtcagtcatagcacacatcggaca

SEQ ID NO: 414397 - DNA, 120 bp, Artificial Sequence
  ENSG00000149100_9 (sequence is synthesized)
tttggaaaacagcagtggcaacaactgtatgacacacttaatgcctggaaacaaaatctgaacaaagtgaaaaacagccttttgagtctttctgatacctgagtttttatgcttataatt

SEQ ID NO: 414398 - DNA, 120 bp, Artificial Sequence
  ENSG00000149100_10 (sequence is synthesized)
tttgttctttgaaaaaaaagccctaaatcatagtaaaacattataaactaaaaaaatttgcctagtctggacagttattgtctcaaatttatactaaaatcacaaactccagaggatatg

SEQ ID NO: 414399 - DNA, 120 bp, Artificial Sequence
  ENSG00000149100_11 (sequence is synthesized)
aagtaataaattacaaggggtcacaatgtctgtcatacaatacataaattctgttctttaaaaaaggatattgaagaagcaatgagcactttaaagaaaggataatatacagagagaaga

SEQ ID NO: 414400 - DNA, 120 bp, Artificial Sequence
  ENSG00000149100_12 (sequence is synthesized)
cagaagtagagtaatacaatttcttcacattagaaaaacttggaaaagcaaagacaaactgtagagctttaaatacaacagtcattttattctagtaaaaactataccagaatttcagtt

SEQ ID NO: 414401 - DNA, 120 bp, Artificial Sequence
  ENSG00000149100_13 (sequence is synthesized)
acataatttcactactgaaagcacttatctacattattttaatctgttgtttttttccaacgtctcttctgcttttcttttctttggctggttgtcattttctaaacttagtaaattttc

SEQ ID NO: 414402 - DNA, 120 bp, Artificial Sequence
  ENSG00000149100_14 (sequence is synthesized)
acttttatttagttgattcgtaatgaggctctgccagtcatcatcaccagaagtatttttagtcgtcttgattgcctgcaaatggctttgtagtggagttgatatcagaggctttgtttt

SEQ ID NO: 414403 - DNA, 120 bp, Artificial Sequence
  ENSG00000149100_15 (sequence is synthesized)
cacctgggaaagataaactaattttaccttcgaaattattatacaaaagattttaaagagtctgtaaagcctctgcagttatgagtatgtggtaaaaccaccatctcttggctgatttcc

SEQ ID NO: 414404 - DNA, 120 bp, Artificial Sequence
  ENSG00000149100_16 (sequence is synthesized)
actaccttagtagttctggcaccagaaaagtatacaatgtgaatgtgtaggcttatgtagtagatcttcaaaatctctaatatataactgaagtaaagtgtacaaaaactgccttttact

SEQ ID NO: 414405 - DNA, 120 bp, Artificial Sequence
  ENSG00000149100_17 (sequence is synthesized)
acttcatgtttcctcccatgcttcagaacaccattgttgaagaaacaggaagggcagtgagatatttggaagttggcatgttttcaagacactgtattgggtaattttaaaaatagtgtg

SEQ ID NO: 414406 - DNA, 120 bp, Artificial Sequence
  ENSG00000149100_18 (sequence is synthesized)
ttaaataactttttcattttaaggttcttttctgatgttaaaatacttactggaaatttagaaaatagagtaaagtagaaagaaactaaaaatcattagtaatcccttatccagagaggc

SEQ ID NO: 414407 - DNA, 120 bp, Artificial Sequence
  ENSG00000149100_19 (sequence is synthesized)
ttgttgacattttggtattatttgctgctagcgtttttttctatttttagcctatttgatcattctatagaattttatgtattttcctctgtgagcagtttcttaggtcattaaaaacaa

SEQ ID NO: 414408 - DNA, 120 bp, Artificial Sequence
  ENSG00000149100_20 (sequence is synthesized)
ttgtctatggctgcaaaatactcccttttatggatgtttgatatatctcctactactgaatgtttgtttccagtttatccctaccaaaaattaattcgagttaatttcatgcaaaacaat

SEQ ID NO: 414409 - DNA, 120 bp, Artificial Sequence
  ENSG00000149100_21 (sequence is synthesized)
tcgagttaatttcatgcaaaacaatctttgatgtttttgagagattcccagataaaattttctcttcaaaaggaatactgggccaggcactgtgactcatacctgtaatcccagcacttt

SEQ ID NO: 414410 - DNA, 120 bp, Artificial Sequence
  ENSG00000149100_22 (sequence is synthesized)
ggcaaaaccccatctctaccaaaaattagctgggcatggtggcatgcaactgtagtcccagctcctcggagggctgaggtgcaaggatcatttgagcccaggaggtgaaggttgcaatga

SEQ ID NO: 414411 - DNA, 83 bp, Artificial Sequence
  ENSG00000149100_23 (sequence is synthesized)
ctctcaaaaataaataatagataaaacaaaaggaatactgaattgttttcaaaataacaattatggtgggctttcttttaaga

SEQ ID NO: 414412 - DNA, 120 bp, Artificial Sequence
  ENSG00000149100_24 (sequence is synthesized)
tcaaaaataaataatagataaaacaaaaggaatactgaattgttttcaaaataacaattatggtgggctttcttttaagatagggtctcaccctgtcacctaggctggagtgcagtggca

SEQ ID NO: 414413 - DNA, 81 bp, Artificial Sequence
  ENSG00000149100_25 (sequence is synthesized)
tgccatgttgcccaggctggtctctcttaactcttgggctcaagtgatctgaccatctcggtctcccaaagttctaggatt

SEQ ID NO: 414414 - DNA, 120 bp, Artificial Sequence
  ENSG00000149100_26 (sequence is synthesized)
aagtgatctgaccatctcggtctcccaaagttctaggattacaggagtgagccatactgtgttgtgttttagttgaaagggatatacacgtgtattttagaaatatgaaacaggataaga

SEQ ID NO: 414415 - DNA, 120 bp, Artificial Sequence
  ENSG00000149100_27 (sequence is synthesized)
attacattaaaatcacccaagatcccaaccaccattaaagagtttgtgtaaatcttctggtctcttttctgtatacactttttaaatactggggtcatatttttattggtttatatgcta

SEQ ID NO: 414416 - DNA, 120 bp, Artificial Sequence
  ENSG00000149100_28 (sequence is synthesized)
tgttaaacatttttagcatttcctcctgttcttaagtctgttaagaggatagctccatcatattctgtgttctgcaaattatttctggacatttaaattgtaagaaaatggtcactgtta

SEQ ID NO: 414417 - DNA, 120 bp, Artificial Sequence
  ENSG00000149100_29 (sequence is synthesized)
actaggctgcagtgattatcatttgttcataaatctttgtgaagatctttgggtactgccttacattaaaatctttttcaatttgaccagtaaaagtggcatgttagtaacattgtcatt

SEQ ID NO: 414418 - DNA, 67 bp, Artificial Sequence
  ENSG00000149100_30 (sequence is synthesized)
atttgaccagtaaaagtggcatgttagtaacattgtcattttcagtgttagattatgtagtactaag

SEQ ID NO: 414419 - DNA, 76 bp, Artificial Sequence
  ENSG00000149100_31 (sequence is synthesized)
acctagtaatacttttttttttttttttttttaatgaacttaaatgtttagaatggtaagttcacggctccctaag

SEQ ID NO: 414420 - DNA, 120 bp, Artificial Sequence
  ENSG00000149100_32 (sequence is synthesized)
aacttaaatgtttagaatggtaagttcacggctccctaaggagtgttccttttggattgctctgtttggctccctccctgaaatcctatagtcagccactggtcccctcagagagtttta

SEQ ID NO: 414421 - DNA, 120 bp, Artificial Sequence
  ENSG00000149100_33 (sequence is synthesized)
cctctgatctttggggtgattctttgttcatatttatctgattggctttgttcttccaaaagtgtctgcacaggactgctaagagaacctaggcaagtcatttaatttttctgggcttca

SEQ ID NO: 414422 - DNA, 120 bp, Artificial Sequence
  ENSG00000149100_34 (sequence is synthesized)
gtttactcattagcttcttttagttcccagatgctattactggaaagaataactagtaatggataaaaacctacataaatatttcctattttgccatcaaagtgctgggttcattttggt

SEQ ID NO: 414423 - DNA, 120 bp, Artificial Sequence
  ENSG00000149100_35 (sequence is synthesized)
gtatttggcatccaagtacaaattaacagtttcccaaaatcctgattctttgacttttttatcttgatgatggaaaggaaggacacgtttacttgctttagtttctttccccttaactac

SEQ ID NO: 414424 - DNA, 120 bp, Artificial Sequence
  ENSG00000149100_36 (sequence is synthesized)
ccacttgctgagaggggtaggagcagggattggctttagagaaacaagatacagtgtagattagctaatgtttgcgcttaacaaaacttgtcctgtttaacttacctgagggttctgcag

SEQ ID NO: 414425 - DNA, 120 bp, Artificial Sequence
  ENSG00000149100_37 (sequence is synthesized)
cctaccgcagtaattttagttctagctgttttcagatatattgccttgtatcttcgttctttcgtctcctatcctttttagaaatttatcacctgtttctctttcagcctgacttacaaa

SEQ ID NO: 414426 - DNA, 120 bp, Artificial Sequence
  ENSG00000149100_38 (sequence is synthesized)
atctaatttttggcctaaaaatttcccctagcttggtactagtccttttatttctgcctgtgattatattttaaaattaaacttaaatgaatctaattcattggatatataaaaaaaaaa

SEQ ID NO: 414427 - DNA, 120 bp, Artificial Sequence
  ENSG00000149100_39 (sequence is synthesized)
gtaagtggcttgctttgcttactctggttttccatcctcattcctggatataatcaagattgcagtaggctaacaatctaatgctgaaaacaagaatgaaaaacataccatcttttcaag

SEQ ID NO: 414428 - DNA, 120 bp, Artificial Sequence
  ENSG00000149100_40 (sequence is synthesized)
ttactttggacccatagagagaaagtggattggtacttaataccttccctgaatttaacagaattgatgtggactgtacataaaatatgttgaaaaataaaactatttttttggctataa

SEQ ID NO: 414429 - DNA, 120 bp, Artificial Sequence
  ENSG00000149100_41 (sequence is synthesized)
aggaattctggaacttgactctcagctgtggctcatattagctgtgaccttgggcaagtggcttgacctttctgtgccctagtttcctcctttgtaatatgaagttgttaacggtacctg

SEQ ID NO: 414430 - DNA, 120 bp, Artificial Sequence
  ENSG00000149100_42 (sequence is synthesized)
agaaggcttaggatcaatatgtcatagcacacatcggacatttggaaaacagcagtggcaacaactgtatgacacacttaatgcctggaaacaaaatctgaacaaagtgaaaaacagcct

SEQ ID NO: 414431 - DNA, 120 bp, Artificial Sequence
  ENSG00000149100_43 (sequence is synthesized)
tctgatgagggtttgacagcgatgtagaggtaagctacaatattaaattaagtaactgaaatcatgtttgcaactaccagtgatccagagccatttgatagtgtgtatttcctggtgatt

SEQ ID NO: 414432 - DNA, 120 bp, Artificial Sequence
  ENSG00000149100_44 (sequence is synthesized)
ctaatgtagatactaaaattcaaggtttgatattggaagaactgtggattgaatatgaagtagctgcatggcgtttacctggcggggggggtattgctggtatggggatgatgatcccaa

SEQ ID NO: 414433 - DNA, 120 bp, Artificial Sequence
  ENSG00000149100_45 (sequence is synthesized)
aatcttgggccaattgaccctaattttaaggttataggtggaaagttgatggcttgccaaaaattaacccattgctaatgagtataagggcttttaacagtcttagatctaactggtaac

SEQ ID NO: 414434 - DNA, 120 bp, Artificial Sequence
  ENSG00000149100_46 (sequence is synthesized)
aagaatagaatcagttttctaaatctatgtaataaggattatgaaacttctttttttggtcattgctttgtgtggacctctacatgataggagttggtaaaaagggaagttggtggtaaa

SEQ ID NO: 414435 - DNA, 120 bp, Artificial Sequence
  ENSG00000149100_47 (sequence is synthesized)
gatccttgactttgaggtcaggctgcctccattcacattcttactccacctcttaatgagcacttctgaactgcttcatagttgataaagggggcagagtaatactgtttgtctcctagg

SEQ ID NO: 414436 - DNA, 120 bp, Artificial Sequence
  ENSG00000149100_48 (sequence is synthesized)
ttgttgtgaggaataaatgagatgtaaggcaagtgaagcacttagtgtcttggcatgtggttctgctgctgcttactatttgattaccttggtgctttctctccagctatgtttttatct

SEQ ID NO: 414437 - DNA, 120 bp, Artificial Sequence
  ENSG00000149100_49 (sequence is synthesized)
acaattaatatatttcattttgttaaaacagatgaacctgataaatgtgttggcctgtcttaacccaatcctgtagcttttttaatgttgtttatatgttttggactgttagatattttg

SEQ ID NO: 414438 - DNA, 120 bp, Artificial Sequence
  ENSG00000149100_50 (sequence is synthesized)
ccgaattaagtatattttatgatctgcaaaaactcaatgaaaagccaggatttcaaaaccctgagcttacatttttgttctctaattaaggtgtattgtacgagcattgaaagatccaaa

SEQ ID NO: 414439 - DNA, 120 bp, Artificial Sequence
  ENSG00000149100_51 (sequence is synthesized)
gtcggcgtggtcttgcgagtggagtgtccgctgtgcccgggcctgcaccatgagcgtcccggccttcatcgacatcagtgaagaagatcagtttttcagaaagaggacagaatttgagat

SEQ ID NO: 414440 - DNA, 120 bp, Artificial Sequence
  ENSG00000149100_52 (sequence is synthesized)
tttatctggaaactgagccttacacaacaaagatttgtttatagcagatgtgtatttagtagattagtggatatatttgttgtagggtgaaaatttagtagaaatataaactgctatatt

SEQ ID NO: 414441 - DNA, 120 bp, Artificial Sequence
  ENSG00000149100_53 (sequence is synthesized)
ctatcccttgaaatcacgtagaacaaagacgtttaggcaatacaccactgtggttaagagcacagattttagtattagatgtggatttaagaccaggcccttcctttgtgaaacaggaat

SEQ ID NO: 414442 - DNA, 120 bp, Artificial Sequence
  ENSG00000149100_54 (sequence is synthesized)
gtaggggttcatttgtggttgtaagaattaaatgaattaatacaggtaaagcacagtgcctggcacatagtaagtgatctttcaagtgttaaccattaccagtttttttatgattagcct

SEQ ID NO: 414443 - DNA, 120 bp, Artificial Sequence
  ENSG00000149100_55 (sequence is synthesized)
agaaacaagaacttcttccccaacaattagattataaagcaacttaactgctcaggaattttttctgagctttttaaatttgaaagttgggattatgcaattaagattaataaaaggtac

SEQ ID NO: 414444 - DNA, 120 bp, Artificial Sequence
  ENSG00000149100_56 (sequence is synthesized)
agaactattgaccttttttcccctaatgctctaagttttctatgaagaagtaataacttagtaggaaattagtttattcccctatatgagatggtaggggaagaacacctagcattcttt

SEQ ID NO: 414445 - DNA, 120 bp, Artificial Sequence
  ENSG00000149100_57 (sequence is synthesized)
ctggggcgcgcgttcctggcctcgattcgcaccagctcgccggccggcggtcccagcgcggggcccgacgcttcaccgccagctccctggtcggcgtcgggactcatttctgacgacata

SEQ ID NO: 414446 - DNA, 120 bp, Artificial Sequence
  ENSG00000149100_58 (sequence is synthesized)
gtacttttagactgatgaggaatgatgtctgcttccgtccgtcaaatgcagccacattcggagtgggaggtggtgaatctgtagttagcataagcaggtttttcagaaagaggacagaat

SEQ ID NO: 414447 - DNA, 120 bp, Artificial Sequence
  ENSG00000149115_0 (sequence is synthesized)
ggcggtagcagcggcggcggcggcggggactggcatcggggccccgagccgagcggagccggaccccgggcgagcgcgtctgcagccaccccagctcatacctctctgcctccccgctct

SEQ ID NO: 414448 - DNA, 120 bp, Artificial Sequence
  ENSG00000149115_1 (sequence is synthesized)
gccaccccagctcatacctctctgcctccccgctctcaaggagggtctgccgcatgtgatgaaagtgtctactctcagggaaagctcagccatggcttccccactgccccgggagatgga

SEQ ID NO: 414449 - DNA, 120 bp, Artificial Sequence
  ENSG00000149115_2 (sequence is synthesized)
ggaggagctggtgcctactggctctgagccaggtgacactcgggccaaaccccctgtcaagcccaaaccccgggccctgcctgccaagccagccctgcctgccaaacccagcctgctggt

SEQ ID NO: 414450 - DNA, 120 bp, Artificial Sequence
  ENSG00000149115_3 (sequence is synthesized)
gcctgttgggcctcggcctccccggggtcccctggctgagttgccttctgccaggaagatgaacatgctggcaggaccccagccctatggtggcagcaagcgcccccttccctttgcacc

SEQ ID NO: 414451 - DNA, 120 bp, Artificial Sequence
  ENSG00000149115_4 (sequence is synthesized)
aaggcctgcggttgaggcctccactggaggagaagccacccaagagactgggaaagaggaggctgggaaagaggagccaccccctttgacacccccagctcgatgtgcagccccaggggg

SEQ ID NO: 414452 - DNA, 120 bp, Artificial Sequence
  ENSG00000149115_5 (sequence is synthesized)
tgtacggaaggcccctgcccctttccgcccagcctcagagcgcttcgcggccaccacggtggaagagatcctggccaagatggagcagcctcggaaggaggtccttgccagccccgaccg

SEQ ID NO: 414453 - DNA, 120 bp, Artificial Sequence
  ENSG00000149115_6 (sequence is synthesized)
cctgtggggttcccgcctcacctttaaccacgatggcagctcgcgatatggccccaggacctatggcacgaccactgctcccagggatgaggatggcagcaccctcttcaggggatggtc

SEQ ID NO: 414454 - DNA, 120 bp, Artificial Sequence
  ENSG00000149115_7 (sequence is synthesized)
ccaggaggggccagtaaagtctccagcagagtgccgggaagagcacagcaagacccctgaggagaggagccttccttccgacctggccttcaacggggacctggctaaggcagccagctc

SEQ ID NO: 414455 - DNA, 120 bp, Artificial Sequence
  ENSG00000149115_8 (sequence is synthesized)
ggagctacctgctgatatttccaagccctggattccctcaagtccagccccctcctcagagaatggaggccctgccagcccaggcctccccgcagaagcctcaggctcaggccctggctc

SEQ ID NO: 414456 - DNA, 120 bp, Artificial Sequence
  ENSG00000149115_9 (sequence is synthesized)
tccccatcttcacccgcctgataagagttctccctgccactcacagcttctggaagcccagactcctgaagcttcccaggcttctccctgccccgctgtgactccatcagctccaagtgc

SEQ ID NO: 414457 - DNA, 120 bp, Artificial Sequence
  ENSG00000149115_10 (sequence is synthesized)
agccctgcctgacgagggctcccgccacacccccagcccggggctccctgccgagggggctccagaggcccccagacccagcagcccaccccctgaggtcttggagccccatagcctgga

SEQ ID NO: 414458 - DNA, 120 bp, Artificial Sequence
  ENSG00000149115_11 (sequence is synthesized)
tcagccccctgccacctcaccccggcccctgatcgaggtgggtgagttgctggatctcactcggacgtttccatctggcggggaggaggaggccaagggtgacgcacacctccgccccac

SEQ ID NO: 414459 - DNA, 120 bp, Artificial Sequence
  ENSG00000149115_12 (sequence is synthesized)
cagcctggttcagcgccgattctctgaaggtgtgctccagtcacccagtcaggaccaggagaagctggggggctcgctggctgccctgccccaaggccaggggagccagttggccctgga

SEQ ID NO: 414460 - DNA, 120 bp, Artificial Sequence
  ENSG00000149115_13 (sequence is synthesized)
tcgtccctttggggcagagtccaactggagcttatcacagtccttcgaatggaccttccccacgaggccctcgggtctgggcgtgtggcggctggactccccgcctccctcccccatcac

SEQ ID NO: 414461 - DNA, 120 bp, Artificial Sequence
  ENSG00000149115_14 (sequence is synthesized)
tgaagccagtgaggccgccgaggctgctgaggctggcaacttggccgtttccagcagggaagaaggagtgtctcagcaggggcaaggggctgggtcagctccaagtgggtcaggaagttc

SEQ ID NO: 414462 - DNA, 120 bp, Artificial Sequence
  ENSG00000149115_15 (sequence is synthesized)
ctgggtgcagggggatgatccaagcatgtccctcacccagaagggcgatggggagagtcaacctcaattcccagctgttccccttgagcccctgcctacaactgagggcacacctggatt

SEQ ID NO: 414463 - DNA, 120 bp, Artificial Sequence
  ENSG00000149115_16 (sequence is synthesized)
acctttgcagcaggcagaggagagatacgagtcgcaggagcccttggctggacaggagtcccctctccccctggctaccagggaggcagccttgcccatcctggagccagtcctggggca

SEQ ID NO: 414464 - DNA, 120 bp, Artificial Sequence
  ENSG00000149115_17 (sequence is synthesized)
ggagcagccagcagcccctgaccagccctgtgttctctttgctgatgcccctgagcctggacaggcactgcctgttgaggaggaggccgtgaccctagcccgggctgagaccacccaagc

SEQ ID NO: 414465 - DNA, 120 bp, Artificial Sequence
  ENSG00000149115_18 (sequence is synthesized)
caggacagaggctcaagacttgtgtagggcatcccccgagcctccaggccctgaaagcagctcccgctggctggacgacctcctggcttcaccaccacccagtggtggcggtgcaaggcg

SEQ ID NO: 414466 - DNA, 120 bp, Artificial Sequence
  ENSG00000149115_19 (sequence is synthesized)
gggagctggagctgagctgaaggacacacagtccccaagtacctgctctgagggactccttggctggtcccagaaagatctgcagagtgaatttgggatcacaggagacccacagcccag

SEQ ID NO: 414467 - DNA, 120 bp, Artificial Sequence
  ENSG00000149115_20 (sequence is synthesized)
cagtttcagtccttccagctggtgtcaaggtgcttctcaggactatggccttgggggtgcaagccctagaggagacccaggtctcggagagagggactggaccagcaagtatgggcaagg

SEQ ID NO: 414468 - DNA, 120 bp, Artificial Sequence
  ENSG00000149115_21 (sequence is synthesized)
agcaggggaagggagcaccagggagtgggccagcaggtgtggcatcggccaggaggagatggaggccagcagcagccaagaccagagtaaagtgtctgccccaggggtgctcacagccca

SEQ ID NO: 414469 - DNA, 120 bp, Artificial Sequence
  ENSG00000149115_22 (sequence is synthesized)
ggaccgggtagttggaaagccagcccagcttggcactcagcggagccaggaggcagatgttcaggactgggagttcagaaagagggattcccagggcacttactccagccgggatgcaga

SEQ ID NO: 414470 - DNA, 120 bp, Artificial Sequence
  ENSG00000149115_23 (sequence is synthesized)
actccaggaccaggaattcggaaagagagattcactgggtacctacagtagtcgagatgtaagccttggggactgggaatttgggaagagagattctctgggtgcttatgccagccaaga

SEQ ID NO: 414471 - DNA, 120 bp, Artificial Sequence
  ENSG00000149115_24 (sequence is synthesized)
ggatgccgatgagcaggactgggagtttcagaagagagatgtgtcactcggcacctatggcagccgggctgcggagccacaggaacaggagtttgggaagagcgcttggataagggacta

SEQ ID NO: 414472 - DNA, 120 bp, Artificial Sequence
  ENSG00000149115_25 (sequence is synthesized)
cagcagtggtggcagctccaggacccttgacgcccaggacagaagctttggaacgagacccctgagctctgggttcagccccgaggaagcccagcaacaggatgaggaatttgagaagaa

SEQ ID NO: 414473 - DNA, 120 bp, Artificial Sequence
  ENSG00000149115_26 (sequence is synthesized)
gattccaagtgtggaagacagccttggagagggcagcagggatgctggccggccaggagagagaggatccgggggcttgttcagtcctagcactgcccacgtgccggatggggcactcgg

SEQ ID NO: 414474 - DNA, 120 bp, Artificial Sequence
  ENSG00000149115_27 (sequence is synthesized)
gcagagagaccagagcagctggcaaaacagtgatgctagccaggaggtgggagggcatcaggagagacagcaggcaggggctcagggccctggcagtgctgacctggaagatggggagat

SEQ ID NO: 414475 - DNA, 120 bp, Artificial Sequence
  ENSG00000149115_28 (sequence is synthesized)
gggaaagcgaggctgggtcggtgagtttagcctcagtgttggcccccagcgagaggcagcatttagcccagggcagcaggactggagccgggacttctgcatcgaggccagtgagaggag

SEQ ID NO: 414476 - DNA, 120 bp, Artificial Sequence
  ENSG00000149115_29 (sequence is synthesized)
ctatcagtttggcatcattggcaacgacagagtgagtggtgctggctttagcccttctagcaagatggaaggtggtcactttgtgcctcctgggaagaccacagctggctcggtggactg

SEQ ID NO: 414477 - DNA, 120 bp, Artificial Sequence
  ENSG00000149115_30 (sequence is synthesized)
gactgaccagctgggtctcaggaacttggaagtgtccagctgtgtgggttctgggggctcgagcgaggccagggagagtgccgtgggacagatgggctggtcaggtggcctgagcttgag

SEQ ID NO: 414478 - DNA, 120 bp, Artificial Sequence
  ENSG00000149115_31 (sequence is synthesized)
agacatgaacctgaccggctgtttggaaagtggagggtctgaagagccggggggaatcggagttggggagaaggactggacttctgatgttaatgtgaagagcaaagatttggctgaggt

SEQ ID NO: 414479 - DNA, 120 bp, Artificial Sequence
  ENSG00000149115_32 (sequence is synthesized)
cggggagggaggaggccacagccaggccagagagagtggcgtggggcagactgactggtcaggtgtggaggccggagagttccttaaatcaagggagcgtggagttggacaggcagactg

SEQ ID NO: 414480 - DNA, 120 bp, Artificial Sequence
  ENSG00000149115_33 (sequence is synthesized)
gacacctgaccttgggctgagaaacatggccccaggggcagtctgcagtcctggagagtccaaagagcttggggtgggccagatggactggggtaacaatctgggcctgagggatttgga

SEQ ID NO: 414481 - DNA, 120 bp, Artificial Sequence
  ENSG00000149115_34 (sequence is synthesized)
ggtgacctgtgacccagactctggaggttctcaggggctacggggatgtggagtggggcagatggactggacccaggacttggcgccccagaatgtggagctctttggggctccaagtga

SEQ ID NO: 414482 - DNA, 120 bp, Artificial Sequence
  ENSG00000149115_35 (sequence is synthesized)
agccagggagcatggggtgggcggggtgagccagtgcccagagcccggcctgaggcacaatggcagcttgtctcctggcctggaggccagagaccccttggaggccagggagctgggggt

SEQ ID NO: 414483 - DNA, 120 bp, Artificial Sequence
  ENSG00000149115_36 (sequence is synthesized)
tggtgagacaagtgggccagagacccagggtgaagattactcctcgtcttccttggagccacaccctgcagaccctggaatggagacaggagaagccctcagcttcggagcaagccctgg

SEQ ID NO: 414484 - DNA, 120 bp, Artificial Sequence
  ENSG00000149115_37 (sequence is synthesized)
caggtgcccggcccgccccccaccctccggctcccagggcctgctggaggagatgctggcagccagcagctccaaggcggtggctcggagggagtcagcggcctcgggccttgggggcct

SEQ ID NO: 414485 - DNA, 120 bp, Artificial Sequence
  ENSG00000149115_38 (sequence is synthesized)
gttggaggaggaaggagccggggcaggtgctgcccaagaggaggtgctggagcctggcagggactctccaccctcctggaggccgcagcctgatggtgaggccagccagacagaagacgt

SEQ ID NO: 414486 - DNA, 120 bp, Artificial Sequence
  ENSG00000149115_39 (sequence is synthesized)
ggatggcacctggggctcttcagcagccaggtggagcgatcaggggccagcacagacttctcggcgaccctcccaaggccctcctgccagatcccccagtcaggacttctccttcattga

SEQ ID NO: 414487 - DNA, 120 bp, Artificial Sequence
  ENSG00000149115_40 (sequence is synthesized)
ggacaccgagatcctcgacagtgccatgtatcggagccgtgccaacttggggcgcaagcgtgggcaccgggccccggtcattcggcctgggggtaccttgggcctgtcggaggcagcaga

SEQ ID NO: 414488 - DNA, 120 bp, Artificial Sequence
  ENSG00000149115_41 (sequence is synthesized)
ctcggatgcacacctgttccaggactctacagagccacgggcatctcgggtgccatcttcagatgaagaggtagtggaggaacctcagagccgccggacacggatgtcgttgggcaccaa

SEQ ID NO: 414489 - DNA, 120 bp, Artificial Sequence
  ENSG00000149115_42 (sequence is synthesized)
ggggctgaaagtcaacctctttcctggcctgagcccctcagccctgaaggccaagctgcgcccccggaatcgctcagctgaggagggagagctggctgagagcaagtcgagccagaagga

SEQ ID NO: 414490 - DNA, 120 bp, Artificial Sequence
  ENSG00000149115_43 (sequence is synthesized)
gtccgcggtccagcgttcgaaatcctgcaaggtcccaggactgggaaagcccctcacgttacctcccaagccagagaaatcctcagggtcagaaggatcgtcgcccaactggcttcaagc

SEQ ID NO: 414491 - DNA, 120 bp, Artificial Sequence
  ENSG00000149115_44 (sequence is synthesized)
cctgaaactgaagaagaagaaggtctgagaagtcactgaggttcttcccacctggcagtctcaggcagtgcccattcctgtggggtccctgggtgaggagacggctggagccccaccatg

SEQ ID NO: 414492 - DNA, 120 bp, Artificial Sequence
  ENSG00000149115_45 (sequence is synthesized)
ccccaggctgcagcctctgtcccctccacctctgaggagcgtctggggaggcacatttatgcactttgtatcaccctccgaactccccccacaccttcccttccctggatttcatcacta

SEQ ID NO: 414493 - DNA, 120 bp, Artificial Sequence
  ENSG00000149115_46 (sequence is synthesized)
gtggttgaaggttttgtcccttcctctcctccttccctctccctctctgcttcctcctccagcctcccttgggttttcttttgataccaatttatagcattttttataaaagcctttgat

SEQ ID NO: 414494 - DNA, 120 bp, Artificial Sequence
  ENSG00000149115_47 (sequence is synthesized)
ttttataatgggtgggactgtatccctgcctcaccccaggtctccgtctgccccgccaggtaccccacagagaccaatgacattttgccacttgaaacaataaataaagttttttgggaa

SEQ ID NO: 414495 - DNA, 120 bp, Artificial Sequence
  ENSG00000149115_48 (sequence is synthesized)
cagtgagtgactccctgaagcgctaggactttggggttaggagataagagttggggaggatctttgaagagttgaggatatggctgttgggaacctcccttgacctcctcctaccccccc

SEQ ID NO: 414496 - DNA, 120 bp, Artificial Sequence
  ENSG00000149115_49 (sequence is synthesized)
ccccccactccaagttctctcttcctgtcccacactctgcctctgttagaaataggagacttctctctgctaaacctactggcaacgcccaactctttttttccttctcttctctctctt

SEQ ID NO: 414497 - DNA, 120 bp, Artificial Sequence
  ENSG00000149115_50 (sequence is synthesized)
ggcagggcagcttcggaagcagaattgaaccaaggggacagtaccaccagggacggtgtggtgcggggagctttccagaagagggagcagctcgttcaaagccagcagcatgtgagggcc

SEQ ID NO: 414498 - DNA, 120 bp, Artificial Sequence
  ENSG00000149115_51 (sequence is synthesized)
gggtgtcttctgatggtccctggttgctctgtgagcctggggaatgaagaggcataacgtgggggctgaagacaacatgagtccggagaggcaggtgggccagtacctggctcaccccaa

SEQ ID NO: 414499 - DNA, 120 bp, Artificial Sequence
  ENSG00000149115_52 (sequence is synthesized)
ggagtgtgactgcccgagcacgtggccctgggagggaacacattgctagcatgcaacagcagcaggaataatggctgctgcttctgcggtgcgtgctgaccaggactgtgctaagtgctt

SEQ ID NO: 414500 - DNA, 120 bp, Artificial Sequence
  ENSG00000149115_53 (sequence is synthesized)
tagatttttctttcatccttgcagcgactccgtgcagttagaggagcctgagctgtttccaggggagggggctcacccgaggtctcagggatttgaacctgccagactggctcagctctt

SEQ ID NO: 414501 - DNA, 120 bp, Artificial Sequence
  ENSG00000149115_54 (sequence is synthesized)
cacctgtgtgctgtgttgctcaaggccctgaccgtgtccttggagtctggaaaaagcatgggaaggagggcaagggagagtttgggggctgggggaaggagcttgtgaagtaggcttcag

SEQ ID NO: 414502 - DNA, 120 bp, Artificial Sequence
  ENSG00000149115_55 (sequence is synthesized)
cgccagagccgtcggacaggtcccagcgcgggtagcagcccagctctatccctgcgcccggctggccgcacccagcagccccaaggcgggttgggggcggggggccatggcccagcctgg

SEQ ID NO: 414503 - DNA, 120 bp, Artificial Sequence
  ENSG00000149115_56 (sequence is synthesized)
ggatggggaggccagcatgtctatcctggagcggctgctggccaacgctgcgctgagggatgaggctggccggctccgaagccctgagcccagggctctcccgcccacaaggggactcct

SEQ ID NO: 414504 - DNA, 120 bp, Artificial Sequence
  ENSG00000149124_0 (sequence is synthesized)
actctgcgagactctgctgaactggctgcatcagggagaaatttcatctcccagaagggtgttgctcatcgtttcttcccggaaacatctgcagagactagcttttcaggctaaggtatc

SEQ ID NO: 414505 - DNA, 120 bp, Artificial Sequence
  ENSG00000149124_1 (sequence is synthesized)
ctccatgatgttaccattgcaaggtgcccagatgctgcagatgctggagaaatccttgaggaagagcctcccagcatccttaaaggtttatggaactgtctttcacataaaccatggaaa

SEQ ID NO: 414506 - DNA, 120 bp, Artificial Sequence
  ENSG00000149124_2 (sequence is synthesized)
tccattcaatctgaaggctgtggtggacaagtggcctgattttaatacagtggttgtctgccctcaggagcaggatatgacagatgaccttgatcactataccaatacttaccaaatcta

SEQ ID NO: 414507 - DNA, 120 bp, Artificial Sequence
  ENSG00000149124_3 (sequence is synthesized)
ctccaaagatccccaaaactgtcaggaattccttggatcaccagaactcatcaactggaaacagcatttacagattcaaagttcacagcctagcctgaatgaggctatacaaaatcttgc

SEQ ID NO: 414508 - DNA, 120 bp, Artificial Sequence
  ENSG00000149124_4 (sequence is synthesized)
agccattaagtccttcaaagtcaaacaaacacaacgcattctctatatggcagctgaaacagccaaggaactgactcctttcctgctgaaatcaaagattttatctcccaatggtggcaa

SEQ ID NO: 414509 - DNA, 120 bp, Artificial Sequence
  ENSG00000149124_5 (sequence is synthesized)
acccaaggccatcaaccaagagatgtttaaactctcatccatggatgttacccatgctcacttggtgaataaattctggcattttggtggtaatgagaggagccagagattcattgagcg

SEQ ID NO: 414510 - DNA, 120 bp, Artificial Sequence
  ENSG00000149124_6 (sequence is synthesized)
ctgcattcagacctttcccacctgctgtctcctggggcctgaggggacccctgtgtgctgggatctaatggaccagactggagagatgagaatggcaggcaccttgccggaataccggct

SEQ ID NO: 414511 - DNA, 120 bp, Artificial Sequence
  ENSG00000149124_7 (sequence is synthesized)
ccatggccttgtgacgtatgtcatctattcccacgcccagaaattgggcaaacttgggtttcctgtctattctcatgtagactacagcaatgaagctatgcaaaaaatgagttacacact

SEQ ID NO: 414512 - DNA, 120 bp, Artificial Sequence
  ENSG00000149124_8 (sequence is synthesized)
tgaggagtggatggtggatgaaaagaaataataaattgtaatcagcagtaaaggagtgggcactgtttggactctggggaagcagtgtgatgttcaacagcatcgccatggtccctgcat

SEQ ID NO: 414513 - DNA, 120 bp, Artificial Sequence
  ENSG00000149124_9 (sequence is synthesized)
tcacaggtttctcagtgggaagcaggcccaggtcctcttacatttgacataagcaatttacctccccacatttccaggacctctatgacacttcatcagatacatattgctccaaattac

SEQ ID NO: 414514 - DNA, 120 bp, Artificial Sequence
  ENSG00000149124_10 (sequence is synthesized)
ttctcctggaatccctggttcctcagttgcaagacccttgccagtttttctgggagctaggaagaggtgaattaaattttctgagcactatgacttctttctttctaaagcctttccctt

SEQ ID NO: 414515 - DNA, 120 bp, Artificial Sequence
  ENSG00000149124_11 (sequence is synthesized)
atgatcaacaagtggactctcctcagcaggtctttagagattatcctctcctgttattgctactttataggtacattaaatatactggacacaaatatatatgggatattaggctaaata

SEQ ID NO: 414516 - DNA, 120 bp, Artificial Sequence
  ENSG00000149124_12 (sequence is synthesized)
cagtatacatgatatagcagggaatgttactagaagaaatatcaactgatgatatcctatcctctccaagctcctattccaggaaaaaagatccaatgttttttctaaagatgagcttcc

SEQ ID NO: 414517 - DNA, 120 bp, Artificial Sequence
  ENSG00000149124_13 (sequence is synthesized)
aaaacccacaactcctaaataatacagaaagttttgtgtttgactgtatacaatttttattgtgtttgttcaagctaagtggttcatcatggtgacagcatgaaaggaatgagtgtatga

SEQ ID NO: 414518 - DNA, 120 bp, Artificial Sequence
  ENSG00000149124_14 (sequence is synthesized)
aaaggtgaaggtgggagcaccttgacccagggatgtgatggtttattgaggagagataggagttgaagggagaggagacagcatgaacacctgcttgtccaattagcctcagcacattac

SEQ ID NO: 414519 - DNA, 120 bp, Artificial Sequence
  ENSG00000149124_15 (sequence is synthesized)
taatctcagtttgttcctgctgtaacaaaatacctgagactgggtaattcataaataacagtctgaacttatttgtttatttaaaataataataaaataattaaaaatttatttatcaca

SEQ ID NO: 414520 - DNA, 120 bp, Artificial Sequence
  ENSG00000149124_16 (sequence is synthesized)
accaaatctactccaaagatccccaaaactgtcaggaattccttggatcaccagaactcatcaactggaaacagcatttacagattcaaagcttaattgggagccaatgctataaacaac

SEQ ID NO: 414521 - DNA, 120 bp, Artificial Sequence
  ENSG00000149124_17 (sequence is synthesized)
gagccactgcaggtttttgtctcagagtttgccatgatcccagctgtccttcaggagatgggaatacttgttggaaggttgcagaaattacctagagaacatataacgatggaagtcaca

SEQ ID NO: 414522 - DNA, 120 bp, Artificial Sequence
  ENSG00000149124_18 (sequence is synthesized)
tcttttctaaggtcacatgaggacttggcatctgactctgaagactgtcttgcctgcatcgtccttacactgcctctgaacaattgggggatgtgagtactgggcaccaaatgatgcctc

SEQ ID NO: 414523 - DNA, 120 bp, Artificial Sequence
  ENSG00000149124_19 (sequence is synthesized)
ctaatctcccagctcagcaaatgctgcccagggctgaaaacaaaacatcctcagagagttttccttgccctcctcctgttggtatcttgtccttgtcagcaaatgattcaccaccattca

SEQ ID NO: 414524 - DNA, 120 bp, Artificial Sequence
  ENSG00000149124_20 (sequence is synthesized)
cactcacacctctcaagtaacctcccaacttctctccctgcattcactctggctttcctacaatcaatgttgtacaaagaaatcagaattacatttttaaaaaatgtaactcagaacatg

SEQ ID NO: 414525 - DNA, 120 bp, Artificial Sequence
  ENSG00000149124_21 (sequence is synthesized)
tttctctcctgcttaaaagactccaccatctcccttctcatctagaataaaccaggcctctggctaccacttggacctttattgcccttcctgctttcttcctccaacagctctgacctt

SEQ ID NO: 414526 - DNA, 120 bp, Artificial Sequence
  ENSG00000149124_22 (sequence is synthesized)
cactctgttcctctttcatcacaagctcatctatattccaggacttcacatttgttatttcttctgtctactctgtctctcaagacaatagaggtcacagcaaatacaaacctttatact

SEQ ID NO: 414527 - DNA, 120 bp, Artificial Sequence
  ENSG00000149124_23 (sequence is synthesized)
aatggattttgttttcttcttggaccctccatagcaaccaagagatgtttaaactctcatccatggatgttacccatgctcacttggtgaataaattctggcattttggtggtaatgaga

SEQ ID NO: 414528 - DNA, 120 bp, Artificial Sequence
  ENSG00000149124_24 (sequence is synthesized)
agggactgatatttatgatgcacctattttgagccaggcactatttcatgttttctctcatttagtatgccttacctctctacaagatgtttactgtcatgtccatgttgctgttaagaa

SEQ ID NO: 414529 - DNA, 120 bp, Artificial Sequence
  ENSG00000149131_0 (sequence is synthesized)
aagaagaccaagcggtcagtcccattccgtcccatcctgatttacaggaactcacaccagcgatcaatcttccttaatttgtaactgggcagtgtcccgggccagccaatagctaagact

SEQ ID NO: 414530 - DNA, 120 bp, Artificial Sequence
  ENSG00000149131_1 (sequence is synthesized)
gccccccccgcaccccaccctccctgaccctgggggactctctactcagtctgcactggagctgcctggtgaccagaagtttggagtccgctgacgtcgccgcccagatggcctccaggc

SEQ ID NO: 414531 - DNA, 120 bp, Artificial Sequence
  ENSG00000149131_2 (sequence is synthesized)
tgaccctgctgaccctcctgctgctgctgctggctggggatagagcctcctcaaatccaaatgctaccagctccagctcccaggatccagagagtttgcaagacagaggcgaagggaagg

SEQ ID NO: 414532 - DNA, 120 bp, Artificial Sequence
  ENSG00000149131_3 (sequence is synthesized)
tcgcaacaacagttatctccaagatgctattcgttgaacccatcctggaggtttccagcttgccgacaaccaactcaacaaccaattcagccaccaaaataacagctaataccactgatg

SEQ ID NO: 414533 - DNA, 120 bp, Artificial Sequence
  ENSG00000149131_4 (sequence is synthesized)
aacccaccacacaacccaccacagagcccaccacccaacccaccatccaacccacccaaccaactacccagctcccaacagattctcctacccagcccactactgggtccttctgcccag

SEQ ID NO: 414534 - DNA, 120 bp, Artificial Sequence
  ENSG00000149131_5 (sequence is synthesized)
gacctgttactctctgctctgacttggagagtcattcaacagaggccgtgttgggggatgctttggtagatttctccctgaagctctaccacgccttctcagcaatgaagaaggtggaga

SEQ ID NO: 414535 - DNA, 120 bp, Artificial Sequence
  ENSG00000149131_6 (sequence is synthesized)
ccaacatggccttttccccattcagcatcgccagcctccttacccaggtcctgctcggggctggggagaacaccaaaacaaacctggagagcatcctctcttaccccaaggacttcacct

SEQ ID NO: 414536 - DNA, 120 bp, Artificial Sequence
  ENSG00000149131_7 (sequence is synthesized)
gtgtccaccaggccctgaagggcttcacgaccaaaggtgtcacctcagtctctcagatcttccacagcccagacctggccataagggacacctttgtgaatgcctctcggaccctgtaca

SEQ ID NO: 414537 - DNA, 120 bp, Artificial Sequence
  ENSG00000149131_8 (sequence is synthesized)
caagatcagccggctgctagacagtctgccctccgatacccgccttgtcctcctcaatgctatctacctgagtgccaagtggaagacaacatttgatcccaagaaaaccagaatggaacc

SEQ ID NO: 414538 - DNA, 120 bp, Artificial Sequence
  ENSG00000149131_9 (sequence is synthesized)
ctttcacttcaaaaactcagttataaaagtgcccatgatgaatagcaagaagtaccctgtggcccatttcattgaccaaactttgaaagccaaggtggggcagctgcagctctcccacaa

SEQ ID NO: 414539 - DNA, 120 bp, Artificial Sequence
  ENSG00000149131_10 (sequence is synthesized)
tctgagtttggtgatcctggtaccccagaacctgaaacatcgtcttgaagacatggaacaggctctcagcccttctgttttcaaggccatcatggagaaactggagatgtccaagttcca

SEQ ID NO: 414540 - DNA, 120 bp, Artificial Sequence
  ENSG00000149131_11 (sequence is synthesized)
gcccactctcctaacactaccccgcatcaaagtgacgaccagccaggatatgctctcaatcatggagaaattggaattcttcgatttttcttatgaccttaacctgtgtgggctgacaga

SEQ ID NO: 414541 - DNA, 120 bp, Artificial Sequence
  ENSG00000149131_12 (sequence is synthesized)
ggacccagatcttcaggtttctgcgatgcagcaccagacagtgctggaactgacagagactggggtggaggcggctgcagcctccgccatctctgtggcccgcaccctgctggtctttga

SEQ ID NO: 414542 - DNA, 120 bp, Artificial Sequence
  ENSG00000149131_13 (sequence is synthesized)
agtgcagcagcccttcctcttcgtgctctgggaccagcagcacaagttccctgtcttcatggggcgagtatatgaccccagggcctgagacctgcaggatcaggttagggcgagcgctac

SEQ ID NO: 414543 - DNA, 120 bp, Artificial Sequence
  ENSG00000149131_14 (sequence is synthesized)
ctctccagcctcagctctcagttgcagccctgctgctgcctgcctggacttggcccctgccacctcctgcctcaggtgtccgctatccaccaaaagggctccctgagggtctgggcaagg

SEQ ID NO: 414544 - DNA, 120 bp, Artificial Sequence
  ENSG00000149131_15 (sequence is synthesized)
gacctgcttctattagcccttctccatggccctgccatgctctccaaaccactttttgcagctttctctagttcaagttcaccagactctataaataaaacctgacagaccatgactttc

SEQ ID NO: 414545 - DNA, 120 bp, Artificial Sequence
  ENSG00000149131_16 (sequence is synthesized)
ctgcactggagctgcctggtgaccagaagtttggagtccgctgacgtcgccgcccagatggcctccaggctgaccctgctgaccctcctgctgctgctgctggctgggtttcttgaacca

SEQ ID NO: 414546 - DNA, 120 bp, Artificial Sequence
  ENSG00000149131_17 (sequence is synthesized)
cccgccttcctgcccgccttgatctcgggggtctctataggcttgcttccacctgggacttctgcctcctcctaccccagcccctcccgcctcaggcctgttgtgctcagccccccagga

SEQ ID NO: 414547 - DNA, 120 bp, Artificial Sequence
  ENSG00000149131_18 (sequence is synthesized)
cctcccctcccccacgcctctggcctcattgtttggttaaagcaggaccccctccccctcccaccacctcccctccgactgaacagatggacagagacccgggcccacggggagaggaag

SEQ ID NO: 414548 - DNA, 120 bp, Artificial Sequence
  ENSG00000149131_19 (sequence is synthesized)
ggccagccggtgccgggaaagggaagcggtttggggaaaacaaaacagagggaggagccagggagaaggtggccccaggagggaggaggagggaattcgctaagagggactggggcctga

SEQ ID NO: 414549 - DNA, 120 bp, Artificial Sequence
  ENSG00000149131_20 (sequence is synthesized)
ctgagacggaatgggggcgggccccgggcggggtgggggcccctgggctcccagggtgggagctggctccgaggctggctggctccgcaggtccgctgacgtcgccgcccagatggcctc

SEQ ID NO: 414550 - DNA, 120 bp, Artificial Sequence
  ENSG00000149131_21 (sequence is synthesized)
atgctgtttttattgttactcatgaagacgcgggggaagctttggttgtgtaaagctgagaactgcacccaagcttccccgttcaccccacctaccaggggatttgggctaaattcctgg

SEQ ID NO: 414551 - DNA, 120 bp, Artificial Sequence
  ENSG00000149131_22 (sequence is synthesized)
gaccaaactttgaaagccaagccttggccaaggcagacattgtatattttaggctggaaacaggattctcaagtttcttcatgcatctctactatattgaatggcaaaatgtggggcagc

SEQ ID NO: 414552 - DNA, 120 bp, Artificial Sequence
  ENSG00000149131_23 (sequence is synthesized)
cccagtggactgaaggcttttgcagagcaaaagccaggaagttttgtcacaaacttccaccaaggccaggaagcagagtctattccgtgccaaaattaagggaagaaaagagggaaaatc

SEQ ID NO: 414553 - DNA, 120 bp, Artificial Sequence
  ENSG00000149131_24 (sequence is synthesized)
ttggttctgggtttaccttctttgggccttatttgccacatctgtaagaggagtgggctggaccgcgctccaccatgccgtattcactaagtgagcagatagaaccatagaaagcatgct

SEQ ID NO: 414554 - DNA, 120 bp, Artificial Sequence
  ENSG00000149131_25 (sequence is synthesized)
cactctcaaatcgtgctcatggaaagaacgacgtgttcaggactcatgcctccctttctcaacatacccccagacctggccataagggacacctttgtgaatgcctctcggaccctgtac

SEQ ID NO: 414555 - DNA, 120 bp, Artificial Sequence
  ENSG00000149131_26 (sequence is synthesized)
ctggctggctccgcaggtccgctgacgtcgccgcccagatggcctccaggctgaccctgctgaccctcctgctgctgctgctggctggggggctggggagaacaccaaaacaaacctgga

SEQ ID NO: 414556 - DNA, 120 bp, Artificial Sequence
  ENSG00000149131_27 (sequence is synthesized)
aaaagtccttctaatagcaaagtggaaaggtaggctgtgaacaatcttgaatgccatactaagatttgtacttattctcataggcagtgaagagccatcaatagtttttacagaggctga

SEQ ID NO: 414557 - DNA, 120 bp, Artificial Sequence
  ENSG00000149131_28 (sequence is synthesized)
cctgataactctggcggttcaatgtgcatgctatatactatatgcacaacacattaggaaggaagggaacagcgctcagagaaatcaaatcacttgcccatattacatagctcgtcagtg

SEQ ID NO: 414558 - DNA, 120 bp, Artificial Sequence
  ENSG00000149131_29 (sequence is synthesized)
gtggagtcagggtataatcagaaactcatgctccttcctctacctctccccagcacagagttggatcagcactgttcacccagctggtatccccatttcatggtaaagcctggaagctta

SEQ ID NO: 414559 - DNA, 120 bp, Artificial Sequence
  ENSG00000149133_0 (sequence is synthesized)
atgaccagaaaaaattatacctcactgactgagttcgtcctattgggattagcagacacgctggagctacagattatcctctttttgttttttcttgtgatttatacacttacagtactg

SEQ ID NO: 414560 - DNA, 120 bp, Artificial Sequence
  ENSG00000149133_1 (sequence is synthesized)
ggaaatctcgggatgatcctcttaatcaggatcgattcccagcttcacacacccatgtatttcttcctggctaacctgtcctttgtggacgtttgtaactcaactaccatcaccccaaag

SEQ ID NO: 414561 - DNA, 120 bp, Artificial Sequence
  ENSG00000149133_2 (sequence is synthesized)
atgctggcagatttattatcagagaagaaaaccatctcttttgctggctgcttcctacagatgtacttctttatctccctggcgacaaccgaatgcatcctctttgggttaatggcctat

SEQ ID NO: 414562 - DNA, 120 bp, Artificial Sequence
  ENSG00000149133_3 (sequence is synthesized)
ttcatggtcaacacaagccatgtcagcagcttgtcattctgtgactccaatgtcatccatcacttcttctgtgacagtcccccacttttcaagctctcttgttctgacacaatcctgaaa

SEQ ID NO: 414563 - DNA, 120 bp, Artificial Sequence
  ENSG00000149133_4 (sequence is synthesized)
gaaagcataagttctattttggctggtgtgaatattgtggggactctgcttgtcatcctctcctcctactcctacgttctcttctccattttttctatgcattcgggggaggggaggcac

SEQ ID NO: 414564 - DNA, 120 bp, Artificial Sequence
  ENSG00000149133_5 (sequence is synthesized)
agagctttctccacgtgtgcctctcacctgacagccataattctgttctatgccacctgcatctatacttacctgagacctagttccagctactccctgaatcaggacaaagtggcttct

SEQ ID NO: 414565 - DNA, 120 bp, Artificial Sequence
  ENSG00000149133_6 (sequence is synthesized)
gtgttctacacagtggtgattcccatgttgaatcctctgatctacagcctcaggagtaaggaagtaaagaaggctttagcgaatgtaattagcaggaaaaggacctcttcctttctgtga

SEQ ID NO: 414566 - DNA, 80 bp, Artificial Sequence
  ENSG00000149136_0 (sequence is synthesized)
ctctctgtggcctgtgtacggcttccggtggcgggacgcggggccgcgcacgcgggaaaagcttccccggtgtcccccca

SEQ ID NO: 414567 - DNA, 120 bp, Artificial Sequence
  ENSG00000149136_1 (sequence is synthesized)
cacctctcgcgccggggccctcgcgaggccgcagcctgaggagattcccaacctgctgagcatccgcacacccactcaggagttggggcccagctcccagtttacttggtttcccttgtg

SEQ ID NO: 414568 - DNA, 120 bp, Artificial Sequence
  ENSG00000149136_2 (sequence is synthesized)
cagcctggggctctgcccaggccaccacaggcaggggtcgacatggcagagacactggagttcaacgacgtctatcaggaggtgaaaggttccatgaatgatggtcgactgaggttgagc

SEQ ID NO: 414569 - DNA, 120 bp, Artificial Sequence
  ENSG00000149136_3 (sequence is synthesized)
cgtcagggcatcatcttcaagaatagcaagacaggcaaagtggacaacatccaggctggggagttaacagaaggtatctggcgccgtgttgctctgggccatggacttaaactgcttaca

SEQ ID NO: 414570 - DNA, 120 bp, Artificial Sequence
  ENSG00000149136_4 (sequence is synthesized)
aagaatggccatgtctacaagtatgatggcttccgagaatcggagtttgagaaactctctgatttcttcaaaactcactatcgccttgagctaatggagaaggacctttgtgtgaagggc

SEQ ID NO: 414571 - DNA, 120 bp, Artificial Sequence
  ENSG00000149136_5 (sequence is synthesized)
tggaactgggggacagtgaaatttggtgggcagctgctttcctttgacattggtgaccagccagtctttgagatacccctcagcaatgtgtcccagtgcaccacaggcaagaatgaggtg

SEQ ID NO: 414572 - DNA, 120 bp, Artificial Sequence
  ENSG00000149136_6 (sequence is synthesized)
acactggaattccaccaaaacgatgacgcagaggtgtctctcatggaggtgcgcttctacgtcccacccacccaggaggatggtgtggaccctgttgaggcctttgcccagaatgtgttg

SEQ ID NO: 414573 - DNA, 120 bp, Artificial Sequence
  ENSG00000149136_7 (sequence is synthesized)
tcaaaggcggatgtaatccaggccacgggagatgccatctgcatcttccgggagctgcagtgtctgactcctcgtggtcgttatgacattcggatctaccccacctttctgcacctgcat

SEQ ID NO: 414574 - DNA, 120 bp, Artificial Sequence
  ENSG00000149136_8 (sequence is synthesized)
ggcaagacctttgactacaagatcccctacaccacagtactgcgtctgtttttgttaccccacaaggaccagcgccagatgttctttgtgatcagcctggatcccccaatcaagcaaggc

SEQ ID NO: 414575 - DNA, 120 bp, Artificial Sequence
  ENSG00000149136_9 (sequence is synthesized)
caaactcgctaccacttcctgatcctcctcttctccaaggacgaggacatttcgttgactctgaacatgaacgaggaagaagtggagaagcgctttgagggtcggctcaccaagaacatg

SEQ ID NO: 414576 - DNA, 120 bp, Artificial Sequence
  ENSG00000149136_10 (sequence is synthesized)
tcaggatccctctatgagatggtcagccgggtcatgaaagcactggtaaaccgcaagatcacagtgccaggcaacttccaagggcactcaggggcccagtgcattacctgttcctacaag

SEQ ID NO: 414577 - DNA, 120 bp, Artificial Sequence
  ENSG00000149136_11 (sequence is synthesized)
cttcgatgagatctcctttgtcaactttgctcgtggtaccactactactcgttcctttgactttgaaattgagaccaagcagggcactcagtataccttcagcagcattgagagggagga

SEQ ID NO: 414578 - DNA, 120 bp, Artificial Sequence
  ENSG00000149136_12 (sequence is synthesized)
gtacgggaaactgtttgattttgtcaacgcgaaaaagctcaacatcaaaaaccgaggattgaaagagggcatgaacccaagctacgatgaatatgctgactctgatgaggaccagcatga

SEQ ID NO: 414579 - DNA, 120 bp, Artificial Sequence
  ENSG00000149136_13 (sequence is synthesized)
tgcctacttggagaggatgaaggaggaaggcaagatccgggaggagaatgccaatgacagcagcgatgactcaggagaagaaaccgatgagtcattcaacccaggtgaagaggaggaaga

SEQ ID NO: 414580 - DNA, 120 bp, Artificial Sequence
  ENSG00000149136_14 (sequence is synthesized)
tgtggcagaggagtttgacagcaacgcctctgccagctcctccagtaatgagggtgacagtgaccgggatgagaagaagcggaaacagctcaaaaaggccaagatggccaaggaccgcaa

SEQ ID NO: 414581 - DNA, 120 bp, Artificial Sequence
  ENSG00000149136_15 (sequence is synthesized)
gagccgcaagaagcctgtggaggtgaagaagggcaaagaccccaatgcccccaagaggcccatgtctgcatacatgctgtggctcaatgccagccgagagaagatcaagtcagaccatcc

SEQ ID NO: 414582 - DNA, 120 bp, Artificial Sequence
  ENSG00000149136_16 (sequence is synthesized)
tggcatcagcatcacggatctttccaagaaggcaggcgagatctggaagggaatgtccaaagagaagaaagaggagtgggatcgcaaggctgaggatgccaggagggactatgaaaaagc

SEQ ID NO: 414583 - DNA, 120 bp, Artificial Sequence
  ENSG00000149136_17 (sequence is synthesized)
catgaaagaatatgaagggggccgaggcgagtcttctaagagggacaagtcaaagaagaagaagaaagtaaaggtaaagatggaaaagaaatccacgccctctaggggctcatcatccaa

SEQ ID NO: 414584 - DNA, 120 bp, Artificial Sequence
  ENSG00000149136_18 (sequence is synthesized)
gtcgtcctcaaggcagctaagcgagagcttcaagagcaaagagtttgtgtctagtgatgagagctcttcgggagagaacaagagcaaaaagaagaggaggaggagcgaggactctgaaga

SEQ ID NO: 414585 - DNA, 120 bp, Artificial Sequence
  ENSG00000149136_19 (sequence is synthesized)
agaagaactagccagtactccccccagctcagaggactcagcgtcaggatccgatgagtagaaacggaggaaggttctctttgcgcttgccttctcacaccccccgactccccacccata

SEQ ID NO: 414586 - DNA, 120 bp, Artificial Sequence
  ENSG00000149136_20 (sequence is synthesized)
ttttggtaccagtttctcctcatgaaatgcagtccctggattctgtgccatctgaacatgctctcctgttggtgtgtatgtcactagggcagtggggagacgtcttaactctgctgcttc

SEQ ID NO: 414587 - DNA, 120 bp, Artificial Sequence
  ENSG00000149136_21 (sequence is synthesized)
ccaaggatggctgtttataatttggggagagatagggtgggaggcagggcaatgcaggatccaaatcctcatcttactttcccgaccttaaggatgtagctgctgcttgtcctgttcaag

SEQ ID NO: 414588 - DNA, 120 bp, Artificial Sequence
  ENSG00000149136_22 (sequence is synthesized)
ttgctggagcaggggtcatgtgaggccaggcctgtagctcctacctggggcctatttctactttcattttgtatttctggtctgtgaaaatgatttaataaagggaactgactttggaaa

SEQ ID NO: 414589 - DNA, 120 bp, Artificial Sequence
  ENSG00000149136_23 (sequence is synthesized)
aggtaggtggtggtcgtccccggtcccaggaaggcaggggccccgctcccccacgggaccctcgacatggaccattccgcgttcgcaaccgcggggagcgggcgaatccattatgtgggg

SEQ ID NO: 414590 - DNA, 120 bp, Artificial Sequence
  ENSG00000149136_24 (sequence is synthesized)
cgggggtgaaccgtgggtctggggccgcggggtggtgggagcggtgcgagggaaaccctgcactctgagctggattgggtcgcgtgcgatgtgcgggctcctggcagaccctggggttcc

SEQ ID NO: 414591 - DNA, 120 bp, Artificial Sequence
  ENSG00000149136_25 (sequence is synthesized)
gctgctcgttgccatggctcccgccggagcggccagagcgggcgtcgggttgggtgtcagcggtattccgggcccggttctccacccaggcctggacctggaccctcgggcactgcagcg

SEQ ID NO: 414592 - DNA, 120 bp, Artificial Sequence
  ENSG00000149136_26 (sequence is synthesized)
tccgtctgtaggtttccaggcagaggaaatcctgagacatccaggcgcagctgggagttgctacctggctccatccgtgagcacagcgaggtgctgtctttcatgcttatctgtcttcct

SEQ ID NO: 414593 - DNA, 120 bp, Artificial Sequence
  ENSG00000149136_27 (sequence is synthesized)
gtcctggggaagactgaggtttggggaggaagatagggtgaagggtttcagccttttacttgttttgctcttttccctctgccactgtctctggtttcctatctatttgcatgttcatca

SEQ ID NO: 414594 - DNA, 120 bp, Artificial Sequence
  ENSG00000149136_28 (sequence is synthesized)
tgtgtttattgagtacctacagtatactgcctggggttggggttatagtctaaacagactaaccgcagtatcctgtctctgtggaactcagtttggtgggaatattgcttatgcagactt

SEQ ID NO: 414595 - DNA, 120 bp, Artificial Sequence
  ENSG00000149136_29 (sequence is synthesized)
gaggattgaaagaggtacttctgtgtggggaggatgagaccctctcctggtctttctataggggagaaaggggtggagattttttccggcttctttttcactctttcttctcttcttacc

SEQ ID NO: 414596 - DNA, 120 bp, Artificial Sequence
  ENSG00000149136_30 (sequence is synthesized)
cttatagaaaaaagaggtgcgtgtgaccctttccccctcctggtgcaggtttcctctgcatgaccttagaccagtctatgcagcccctcaggagcccccagtggggctgggagagggagg

SEQ ID NO: 414597 - DNA, 120 bp, Artificial Sequence
  ENSG00000149136_31 (sequence is synthesized)
ggcttggggcttggactaacccagttggcaggaagtacttgggcataggccctgcacgttggctgtgtgtggacaatccagccccaggtcttctgggagctgctgctctgacttgacagg

SEQ ID NO: 414598 - DNA, 120 bp, Artificial Sequence
  ENSG00000149136_32 (sequence is synthesized)
catgggggtgtgcttttgagtgtgcagggattctggctcgagggtgagttggccccaccgtgaactcttccctggctagggcatgaacccaagctacgatgaatatgctgactctgatga

SEQ ID NO: 414599 - DNA, 120 bp, Artificial Sequence
  ENSG00000149136_33 (sequence is synthesized)
aaattgtcaagggctttgtaagtgcaagacatattttgaagtcggaaaagtatagtgggatctatggccataccgccctgaatgtgccagttggggctggttcgtagttggatgaggaga

SEQ ID NO: 414600 - DNA, 120 bp, Artificial Sequence
  ENSG00000149136_34 (sequence is synthesized)
gaatgggaatgagctggtgcttgccacttacttgctgggggttgtcgagtaagtcattgaatctcaatttcctcatcagtagaaatgcagtagtacccctgctaaattggttaagacttt

SEQ ID NO: 414601 - DNA, 120 bp, Artificial Sequence
  ENSG00000149136_35 (sequence is synthesized)
ttgttagcagtgtcagaaatgtgattcactctcactttaaaagggaacatataaaagggaatttcataagttcatattactgcggagtctggggatttaattggcttcagacactactgg

SEQ ID NO: 414602 - DNA, 120 bp, Artificial Sequence
  ENSG00000149136_36 (sequence is synthesized)
attcaggcgctcaaatctatttcttccgatttccttaattaaaaataggtttaccccatggggtgcccagtgactctcagaagctcagggcaggcttaatcctactggtttaaaacaaca

SEQ ID NO: 414603 - DNA, 120 bp, Artificial Sequence
  ENSG00000149136_37 (sequence is synthesized)
ccagaagtgcctcttttggtgaacagcatagtgaacacagtggttacctgcccctttctagcctgagttattagaatgggctggggtctgatgggccagaaataggccaagtgcccaccc

SEQ ID NO: 414604 - DNA, 120 bp, Artificial Sequence
  ENSG00000149136_38 (sequence is synthesized)
ttagagcctgtggttggggtaagcccttcctgagtgggggcaaggtggttcccaacagaaaattgggactctgctctcttaatccagaaggattgtaaaagaatgtcgggcagcaaaaaa

SEQ ID NO: 414605 - DNA, 120 bp, Artificial Sequence
  ENSG00000149136_39 (sequence is synthesized)
aacacccaacaggagtcctctagttcagcctgccacatgcttatgaaggtttatgaaggtttaatgagcaaatacttgtgaaagtgccttgaagactgtccagcagcatacaggtgtaag

SEQ ID NO: 414606 - DNA, 120 bp, Artificial Sequence
  ENSG00000149136_40 (sequence is synthesized)
gtagttgcattgtttgaggagtttcacatatatcagacaagactgtcaattacaggggtaggcactgggttggactgaagttggttttcctctttttgtagtaactgattatcttttcat

SEQ ID NO: 414607 - DNA, 120 bp, Artificial Sequence
  ENSG00000149136_41 (sequence is synthesized)
cagaagactgtaggggccaatccttttgtagttcataaacataatggttgggtgttacgtgcgtgtgtgaaatgtgccaccctccagccttgttacgatgttgacacattacccatctga

SEQ ID NO: 414608 - DNA, 120 bp, Artificial Sequence
  ENSG00000149136_42 (sequence is synthesized)
catggaaaaaaaaagaagacaaaaaagactatagggtagattaaggtgattactccgagggaagtggtgaagtggatttgggccatgttccaggcatgaatgaggcagtgtttctgccag

SEQ ID NO: 414609 - DNA, 120 bp, Artificial Sequence
  ENSG00000149136_43 (sequence is synthesized)
tggtgtcctggggatggactaggacctggtttggccatgcccagggagatccgctgaagctcattgatttgtttttcattcattaattccaatcaagtaaccaattgctgtggctgggtc

SEQ ID NO: 414610 - DNA, 120 bp, Artificial Sequence
  ENSG00000149136_44 (sequence is synthesized)
tggagagggcatggctgaagccaccacagtgaatgggagaaagcagtgttggggattggtggtggatactgtcctctggtcttcctcccttgccccttttgggtgggtatctttggattt

SEQ ID NO: 414611 - DNA, 120 bp, Artificial Sequence
  ENSG00000149136_45 (sequence is synthesized)
tggcccagtcactgatttttgtggcagacttttttttttttaacaggccgaagttgagcattggaaagttaaagacagcagagatgcttctgactgcagtagggtagtgcttctcaaacc

SEQ ID NO: 414612 - DNA, 120 bp, Artificial Sequence
  ENSG00000149136_46 (sequence is synthesized)
tgggtaggccattgcccaagtatgggtgacacaatagggcattcaagtcactggggaaatatggcctcttttcctggaccattttatttgaaggtatgggggaacgaaaaaaatactatt

SEQ ID NO: 414613 - DNA, 120 bp, Artificial Sequence
  ENSG00000149136_47 (sequence is synthesized)
atggagtgcagtgcacagtttgcatgaactctaaaagataaagcaagaaatatcaagtaggttttgcacattgggctgctttaggctgtgccctctgattcttctggtgtactcatgata

SEQ ID NO: 414614 - DNA, 120 bp, Artificial Sequence
  ENSG00000149136_48 (sequence is synthesized)
ctctcccttggtgccctccaggctgacgcagctatttacgttcagagtgaaatgggctgtgtggctgggattgggaaaggccttgttaaagctgggagaggtttggtcatggtgacaggg

SEQ ID NO: 414615 - DNA, 120 bp, Artificial Sequence
  ENSG00000149136_49 (sequence is synthesized)
ggaggagtacgggaaactgtttgattttgtcaacgcgaaaaagctcaacatcaaaaaccgaggattgaaagagaaaaaagagggcatgaacccaagctacgatgaatatgctgactctga

SEQ ID NO: 414616 - DNA, 120 bp, Artificial Sequence
  ENSG00000149150_0 (sequence is synthesized)
acttcatccaagcccagcttcgcagacctctggcgcccggcgggttcccagttcccccgcttcttccgaggagacagcggaggcgaggccaccgggctgtcaggctgaagctccgtggcc

SEQ ID NO: 414617 - DNA, 120 bp, Artificial Sequence
  ENSG00000149150_1 (sequence is synthesized)
gccgggtcctgcacgcagagaagaccccagcgccggcgcggctcagggctgggcccacgggactccggacgcgccgcgaaagcgttgcgctcccggaggcgtccgcagctgctggctgct

SEQ ID NO: 414618 - DNA, 120 bp, Artificial Sequence
  ENSG00000149150_2 (sequence is synthesized)
catttgccggtgaccggaggctcggggccagcatggcccccacgctgcaacaggcgtaccggaggcgctggtggatggcctgcacggctgtgctggagaacctcttcttctctgctgtac

SEQ ID NO: 414619 - DNA, 120 bp, Artificial Sequence
  ENSG00000149150_3 (sequence is synthesized)
tcctgggctggggctccctgttgatcattctgaagaacgagggcttctattccagcacgtgcccagctgagagcagcaccaacaccacccaggatgagcagcgcaggtggccaggctgtg

SEQ ID NO: 414620 - DNA, 120 bp, Artificial Sequence
  ENSG00000149150_4 (sequence is synthesized)
accagcaggacgagatgctcaacctgggcttcaccattggttccttcgtgctcagcgccaccaccctgccactggggatcctcatggaccgctttggcccccgacccgtgcggctggttg

SEQ ID NO: 414621 - DNA, 120 bp, Artificial Sequence
  ENSG00000149150_5 (sequence is synthesized)
gcagtgcctgcttcactgcgtcctgcaccctcatggccctggcctcccgggacgtggaagctctgtctccgttgatattcctggcgctgtccctgaatggctttggtggcatctgcctaa

SEQ ID NO: 414622 - DNA, 120 bp, Artificial Sequence
  ENSG00000149150_6 (sequence is synthesized)
cgttcacttcactcacgctgcccaacatgtttgggaacctgcgctccacgttaatggccctcatgattggctcttacgcctcttctgccattacgttcccaggaatcaagctgatctacg

SEQ ID NO: 414623 - DNA, 120 bp, Artificial Sequence
  ENSG00000149150_7 (sequence is synthesized)
atgccggtgtggccttcgtggtcatcatgttcacctggtctggcctggcctgccttatctttctgaactgcaccctcaactggcccatcgaagcctttcctgcccctgaggaagtcaatt

SEQ ID NO: 414624 - DNA, 120 bp, Artificial Sequence
  ENSG00000149150_8 (sequence is synthesized)
acacgaagaagatcaagctgagtgggctggccctggaccacaaggtgacaggtgacctcttctacacccatgtgaccaccatgggccagaggctcagccagaaggcccccagcctggagg

SEQ ID NO: 414625 - DNA, 120 bp, Artificial Sequence
  ENSG00000149150_9 (sequence is synthesized)
acggttcggatgccttcatgtcaccccaggatgttcggggcacctcagaaaaccttcctgagaggtctgtccccttacgcaagagcctctgctcccccactttcctgtggagcctcctca

SEQ ID NO: 414626 - DNA, 120 bp, Artificial Sequence
  ENSG00000149150_10 (sequence is synthesized)
tggcagagacagttgggttctactcctccgtcttcggggccatgcagctgttgtgccttctcacctgccccctcattggctacatcatggactggcggatcaaggactgcgtggacgccc

SEQ ID NO: 414627 - DNA, 120 bp, Artificial Sequence
  ENSG00000149150_11 (sequence is synthesized)
caactcagggcactgtcctcggagatgccagggacggggttgctaccaaatccatcagaccacgctactgcaagatccaaaagctcaccaatgccatcagtgccttcaccctgaccaacc

SEQ ID NO: 414628 - DNA, 120 bp, Artificial Sequence
  ENSG00000149150_12 (sequence is synthesized)
tgctgcttgtgggttttggcatcacctgtctcatcaacaacttacacctccagtttgtgacctttgtcctgcacaccattgttcgaggtttcttccactcagcctgtgggagtctctatg

SEQ ID NO: 414629 - DNA, 120 bp, Artificial Sequence
  ENSG00000149150_13 (sequence is synthesized)
ctgcagtgttcccatccaaccactttgggacgctgacaggcctgcagtccctcatcagtgctgtgttcgccttgcttcagcagccacttttcatggcgatggtgggacccctgaaaggag

SEQ ID NO: 414630 - DNA, 120 bp, Artificial Sequence
  ENSG00000149150_14 (sequence is synthesized)
agcccttctgggtgaatctgggcctcctgctattctcactcctgggattcctgttgccttcctacctcttctattaccgtgcccggctccagcaggagtacgccgccaatgggatgggcc

SEQ ID NO: 414631 - DNA, 120 bp, Artificial Sequence
  ENSG00000149150_15 (sequence is synthesized)
cactgaaggtgcttagcggctctgaggtgaccgcatagacttctcagaccaagggacctggatgacaggcaatcaaggcctgagcaaccaaaaggagtgccccatatggcttttctacct

SEQ ID NO: 414632 - DNA, 120 bp, Artificial Sequence
  ENSG00000149150_16 (sequence is synthesized)
gtaacatgcacatagagccatggccgtagatttataaataccaagagaagttctatttttgtaaagactgcaaaaaggaggaaaaaaaaccttcaaaaacgccccctaagtcaacgctcc

SEQ ID NO: 414633 - DNA, 120 bp, Artificial Sequence
  ENSG00000149150_17 (sequence is synthesized)
attgactgaagacagtccctatcctagaggggttgagccttcttcctccttgggttggaggagaccagggtgcctcttatctccttctagcggtctgcctcctggtacctcttgggggga

SEQ ID NO: 414634 - DNA, 120 bp, Artificial Sequence
  ENSG00000149150_18 (sequence is synthesized)
tcggcaaacaggctacccctgaggtcccatgtgccatgagtgtgcacacatgcatgtgtctgtgtatgtgtgaatgtgagagagacacagccctcctttcagaaggaaaggggcctgagg

SEQ ID NO: 414635 - DNA, 120 bp, Artificial Sequence
  ENSG00000149150_19 (sequence is synthesized)
tgccagctgtgtcctgggttaggggttgggggtcggccccttccagggccaggagggcaggttccctctctggtgctgctgcttgcaagtcttagaggaaataaaaagggaagtgagaga

SEQ ID NO: 414636 - DNA, 120 bp, Artificial Sequence
  ENSG00000149150_20 (sequence is synthesized)
gtcagcagccgccagacttcctgccgaagtccgagccccctcccggggctggaggggggcaagcgggttccgaggtgcaaagcctggtgccccgagccctgcggagctcggggccagcat

SEQ ID NO: 414637 - DNA, 120 bp, Artificial Sequence
  ENSG00000149150_21 (sequence is synthesized)
aacgagggcttctattccagcacgtgcccagctgttcctggtgtcatgtgctgagccctcccttccccctcctcagctgagagcagcaccaacaccacccaggatgagcagcgcaggtgg

SEQ ID NO: 414638 - DNA, 120 bp, Artificial Sequence
  ENSG00000149150_22 (sequence is synthesized)
tcttggaggggcaactggaagatggggtcgtagggtagccttgaacttgcccttcttcctgccagcttctaggggtctttcctggcgcgagagtccggacatgggcccgcggtgcttcag

SEQ ID NO: 414639 - DNA, 120 bp, Artificial Sequence
  ENSG00000149150_23 (sequence is synthesized)
gctgctcttggcccagacttggacgaggacgtcccgtgctgagtcttgcgggcccagctgctgttgccacgcacgctgcaaggccgccagcccggggttagccggccggcctcgccttac

SEQ ID NO: 414640 - DNA, 120 bp, Artificial Sequence
  ENSG00000149150_24 (sequence is synthesized)
ggaacaaagtgactttccaaaggtcatgccattcaaaggagggtgaatcttaggttggacgcaggctgtctgactctggagtctgaggtgttaatgctgcctcctccatgggaacagccc

SEQ ID NO: 414641 - DNA, 120 bp, Artificial Sequence
  ENSG00000149150_25 (sequence is synthesized)
aagtgaaaaacagctgatccactcttcatttacttggcatctgtgctaagctggtccctgagccaagctctgagcaacagaaacagaagctctgcattaggagcttgtgagcatgtcaat

SEQ ID NO: 414642 - DNA, 80 bp, Artificial Sequence
  ENSG00000149177_0 (sequence is synthesized)
agccccagccgcatgacgcgcggaggaggcagcgggagcagccgcgggagccgggaccgggtagccgcgcgctgggggtg

SEQ ID NO: 414643 - DNA, 80 bp, Artificial Sequence
  ENSG00000149177_1 (sequence is synthesized)
cgccgccgctgccatgtctccggggaagcccggggcgggcggagcggggacgaggcggaccggctggcggaggaggaggc

SEQ ID NO: 414644 - DNA, 120 bp, Artificial Sequence
  ENSG00000149177_2 (sequence is synthesized)
tggcggaggaggaggcgaaggagacggcaggaggcggcgacgacggtgcccgggctcgggcgcacggcggggcccgattcgcgcgtccggggcacgttccagggcgcgcggggcatgaag

SEQ ID NO: 414645 - DNA, 120 bp, Artificial Sequence
  ENSG00000149177_3 (sequence is synthesized)
cggcgcgggaggcgcggctgcctccgcgctcgcccgggctgcgctgggcgctgccgctgctgctgctgctgctgcgcctgggccagatcctgtgcgcaggtggcacccctagtccaattc

SEQ ID NO: 414646 - DNA, 120 bp, Artificial Sequence
  ENSG00000149177_4 (sequence is synthesized)
attcctgacccttcagtagcaactgttgccacaggggaaaatggcataacgcagatcagcagtacagcagaatcctttcataaacagaatggaactggaacacctcaggtggaaacaaac

SEQ ID NO: 414647 - DNA, 120 bp, Artificial Sequence
  ENSG00000149177_5 (sequence is synthesized)
accagtgaggatggtgaaagctctggagccaacgatagtttaagaacacctgaacaaggatctaatgggactgatggggcatctcaaaaaactcccagtagcactgggcccagtcctgtg

SEQ ID NO: 414648 - DNA, 120 bp, Artificial Sequence
  ENSG00000149177_6 (sequence is synthesized)
tttgacattaaagctgtttccatcagtccaaccaatgtgatcttaacttggaaaagtaatgacacagctgcttctgagtacaagtatgtagtaaagcataagatggaaaatgagaagaca

SEQ ID NO: 414649 - DNA, 120 bp, Artificial Sequence
  ENSG00000149177_7 (sequence is synthesized)
attactgttgtgcatcaaccatggtgtaacatcacaggcttacgtccagcgacttcatatgtattctccatcactccaggaataggcaatgagacttggggagatcccagagtcataaaa

SEQ ID NO: 414650 - DNA, 120 bp, Artificial Sequence
  ENSG00000149177_8 (sequence is synthesized)
gtcatcacagagccgatcccagtttctgatctccgtgttgccctcacgggtgtgaggaaggctgctctctcctggagcaatggcaatggcactgcctcctgccgggttcttcttgaaagc

SEQ ID NO: 414651 - DNA, 120 bp, Artificial Sequence
  ENSG00000149177_9 (sequence is synthesized)
attggaagccatgaggagttgactcaagactcaagacttcaggtcaatatctcgggcctgaagccaggggttcaatacaacatcaacccgtatcttctacaatcaaataagacaaaggga

SEQ ID NO: 414652 - DNA, 120 bp, Artificial Sequence
  ENSG00000149177_10 (sequence is synthesized)
gaccccttgggcacagaaggtggcttggatgccagcaatacagagagaagccgggcagggagccccaccgcccctgtgcatgatgagtccctcgtgggacctgtggacccatcctccggc

SEQ ID NO: 414653 - DNA, 120 bp, Artificial Sequence
  ENSG00000149177_11 (sequence is synthesized)
cagcagtcccgagacacggaagtcctgcttgtcgggttagagcctggcacccgatacaatgccaccgtttattcccaagcagcgaatggcacagaaggacagccccaggccatagagttc

SEQ ID NO: 414654 - DNA, 120 bp, Artificial Sequence
  ENSG00000149177_12 (sequence is synthesized)
aggacaaatgctattcaggtttttgacgtcaccgctgtgaacatcagtgccacaagcctgaccctgatctggaaagtcagcgataacgagtcgtcatctaactatacctacaagatacat

SEQ ID NO: 414655 - DNA, 120 bp, Artificial Sequence
  ENSG00000149177_13 (sequence is synthesized)
gtggcgggggagacagattcttccaatctcaacgtcagtgagcctcgcgctgtcatccccggactccgctccagcaccttctacaacatcacagtgtgtcctgtcctaggtgacatcgag

SEQ ID NO: 414656 - DNA, 120 bp, Artificial Sequence
  ENSG00000149177_14 (sequence is synthesized)
ggcacgccgggcttcctccaagtgcacaccccccctgttccagtttctgacttccgagtgacagtggtcagcacgacggagatcggcttagcatggagcagccatgatgcagaatcattt

SEQ ID NO: 414657 - DNA, 120 bp, Artificial Sequence
  ENSG00000149177_15 (sequence is synthesized)
cagatgcatatcacacaggagggagctggcaattctcgggtagaaataaccaccaaccaaagtattatcattggtggcttgttccctggaaccaagtattgctttgaaatagttccaaaa

SEQ ID NO: 414658 - DNA, 120 bp, Artificial Sequence
  ENSG00000149177_16 (sequence is synthesized)
ggaccaaatgggactgaaggggcatctcggacagtttgcaatagaactgttcccagtgcagtgtttgacatccacgtggtctacgtcaccaccacggagatgtggctggactggaagagc

SEQ ID NO: 414659 - DNA, 120 bp, Artificial Sequence
  ENSG00000149177_17 (sequence is synthesized)
cctgacggtgcttccgagtatgtctaccatttagtcatagagtccaagcatggctctaaccacacaagcacgtatgacaaagcgattactctccagggcctgattccgggcaccttatat

SEQ ID NO: 414660 - DNA, 120 bp, Artificial Sequence
  ENSG00000149177_18 (sequence is synthesized)
aacatcaccatctctccagaagtggaccacgtctggggggaccccaactccactgcacagtacacacggcccagcaatgtgtccaacattgatgtaagtaccaacaccacagcagcaact

SEQ ID NO: 414661 - DNA, 120 bp, Artificial Sequence
  ENSG00000149177_19 (sequence is synthesized)
ttaagttggcagaactttgatgacgcctctcccacgtactcctactgccttcttattgagaaggctggaaattccagcaacgcaacacaagtagtcacggacattggaattactgacgct

SEQ ID NO: 414662 - DNA, 120 bp, Artificial Sequence
  ENSG00000149177_20 (sequence is synthesized)
acagtcactgaattaatacctggctcatcatacacagtggagatctttgcacaagtaggggatgggatcaagtcactggaacctggccggaagtcattctgtacagatcctgcgtccatg

SEQ ID NO: 414663 - DNA, 120 bp, Artificial Sequence
  ENSG00000149177_21 (sequence is synthesized)
gcctccttcgactgcgaagtggtccccaaagagccagccctggttctcaaatggacctgccctcctggcgccaatgcaggctttgagctggaggtcagcagtggagcctggaacaatgcg

SEQ ID NO: 414664 - DNA, 120 bp, Artificial Sequence
  ENSG00000149177_22 (sequence is synthesized)
acccacctggagagctgctcctctgagaatggcactgagtatagaacggaagtcacgtatttgaatttttctacctcgtacaacatcagcatcaccactgtgtcctgtggaaagatggca

SEQ ID NO: 414665 - DNA, 120 bp, Artificial Sequence
  ENSG00000149177_23 (sequence is synthesized)
gcccccacccggaacacctgcactactggcatcacagatccccctcctccagatggatcccctaatattacatctgtcagtcacaattcagtaaaggtcaagttcagtggatttgaagcc

SEQ ID NO: 414666 - DNA, 120 bp, Artificial Sequence
  ENSG00000149177_24 (sequence is synthesized)
agccacggacccatcaaagcctatgctgtcattctcaccaccggggaagctggtcacccttctgcagatgtcctgaaatacacgtatgaggatttcaaaaagggagcctcagatacttat

SEQ ID NO: 414667 - DNA, 120 bp, Artificial Sequence
  ENSG00000149177_25 (sequence is synthesized)
gtgacatacctcataagaacagaagaaaagggacgttctcagagcttgtctgaagttttgaaatatgaaattgacgttgggaatgagtcaaccacacttggttattacaatgggaagctg

SEQ ID NO: 414668 - DNA, 120 bp, Artificial Sequence
  ENSG00000149177_26 (sequence is synthesized)
gaacctctgggctcctaccgggcttgtgtggctggcttcaccaacattaccttccaccctcaaaacaaggggctcattgatggggctgagagctatgtgtccttcagtcgctactcagat

SEQ ID NO: 414669 - DNA, 120 bp, Artificial Sequence
  ENSG00000149177_27 (sequence is synthesized)
gctgtttccttgccccaggatccaggtgtcatctgtggagcggtttttggctgtatctttggtgccctggttattgtgactgtgggaggcttcatcttctggagaaagaagaggaaagat

SEQ ID NO: 414670 - DNA, 120 bp, Artificial Sequence
  ENSG00000149177_28 (sequence is synthesized)
gcaaagaataatgaagtgtccttttctcaaattaaacctaaaaaatctaagttaatcagagtggagaattttgaggcctacttcaagaagcagcaagctgactccaactgtgggttcgca

SEQ ID NO: 414671 - DNA, 120 bp, Artificial Sequence
  ENSG00000149177_29 (sequence is synthesized)
gaggaatacgaagatctgaagcttgttggaattagtcaacctaaatatgcagcagaactggctgagaatagaggaaagaatcgctataataatgttctgccctatgatatttcccgtgtc

SEQ ID NO: 414672 - DNA, 120 bp, Artificial Sequence
  ENSG00000149177_30 (sequence is synthesized)
aaactttcggtccagacccattcaacggatgactacatcaatgccaactacatgcctggctaccactccaagaaagattttattgccacacaaggacctttaccgaacactttgaaagat

SEQ ID NO: 414673 - DNA, 120 bp, Artificial Sequence
  ENSG00000149177_31 (sequence is synthesized)
ttttggcgtatggtttgggagaaaaatgtatatgccatcattatgttgactaaatgtgttgaacagggaagaaccaaatgtgaggagtattggccctccaagcaggctcaggactatgga

SEQ ID NO: 414674 - DNA, 120 bp, Artificial Sequence
  ENSG00000149177_32 (sequence is synthesized)
accatcagagatttcacagtgaaaaatatccagacaagtgagagtcaccctctgagacagttccatttcacctcctggccagaccacggtgttcccgacaccactgacctgctcatcaac

SEQ ID NO: 414675 - DNA, 120 bp, Artificial Sequence
  ENSG00000149177_33 (sequence is synthesized)
ttccggtacctcgttcgtgactacatgaagcagagtcctcccgaatcgccgattctggtgcattgcagtgctggggtcggaaggacgggcactttcattgccattgatcgtctcatctac

SEQ ID NO: 414676 - DNA, 120 bp, Artificial Sequence
  ENSG00000149177_34 (sequence is synthesized)
cagatagagaatgagaacaccgtggatgtgtatgggattgtgtatgaccttcgaatgcataggcctttaatggtgcagacagaggaccagtatgttttcctcaatcagtgtgttttggat

SEQ ID NO: 414677 - DNA, 120 bp, Artificial Sequence
  ENSG00000149177_35 (sequence is synthesized)
attgtcagatcccagaaagactcaaaagtagatcttatctaccagaacacaactgcaatgacaatctatgaaaaccttgcgcccgtgaccacatttggaaagaccaatggttacatcgcc

SEQ ID NO: 414678 - DNA, 120 bp, Artificial Sequence
  ENSG00000149177_36 (sequence is synthesized)
taattccaaaggaataacctttctggagtgaaccagaccgtcgcacccacagcgaaggcacatgccccgatgtcgacatgtttttatatgtctaatatcttaattctttgttctgttttg

SEQ ID NO: 414679 - DNA, 120 bp, Artificial Sequence
  ENSG00000149177_37 (sequence is synthesized)
tgagaactaattttgagggcatgaagctgcatatgatagatgacaaattggggctgtcgggggctgtggatgggtggggagcaaatcatctgcattcctgatgaccaatgggatgaggtc

SEQ ID NO: 414680 - DNA, 120 bp, Artificial Sequence
  ENSG00000149177_38 (sequence is synthesized)
actttttttttttttcccccttgaggattgtggaaaaccaggaaaagggagctatgatttttttttccaaaacaatttcttttttaaaaaagactattttatatgattcacatgctaaag

SEQ ID NO: 414681 - DNA, 120 bp, Artificial Sequence
  ENSG00000149177_39 (sequence is synthesized)
ccaggattgtgttgggttgaatatattttaagtatcagaggtctatttttacctactgtgtcttggaatctagccgatggaaaatacctaattgtggatgatgattgcgcagggaggggt

SEQ ID NO: 414682 - DNA, 120 bp, Artificial Sequence
  ENSG00000149177_40 (sequence is synthesized)
acgtggcacctcttccgaatgggttttctatttgaacatgtgccttttctgaattatgcttccacaggcaaaactcagtagagatctatatttttgtactgaatctcataattggaatat

SEQ ID NO: 414683 - DNA, 120 bp, Artificial Sequence
  ENSG00000149177_41 (sequence is synthesized)
acggaatatttaaacagtagcttagcatcagaggtttgcttcctcagtaacatttctgttctcatttgatcaggggaggcctctttgccccgactccgcttcccctgccccctgtacatt

SEQ ID NO: 414684 - DNA, 120 bp, Artificial Sequence
  ENSG00000149177_42 (sequence is synthesized)
tgtgctccattttttcttcccttttccctcccagttttctccaaagactcttctgttggcaacattttcaacccattggttgggtgagaatggcgactcaaatatcaccttgagaatttc

SEQ ID NO: 414685 - DNA, 120 bp, Artificial Sequence
  ENSG00000149177_43 (sequence is synthesized)
tgtgggtgggaatgggagaagcagaggaatcctacagtggcagaaatccttttcttgtccctgtattatcctttttctcatgtctgtatttggtatgaaggattatttaaaggtgcaata

SEQ ID NO: 414686 - DNA, 120 bp, Artificial Sequence
  ENSG00000149177_44 (sequence is synthesized)
tgtgaattagtgattcatgatgttctaggtttttagtaacgttttactcaggttggcattttatgtgtctgtgtctgtatgtgtgtgtgtatgttcagaagcgtggcaatctgtgaacac

SEQ ID NO: 414687 - DNA, 120 bp, Artificial Sequence
  ENSG00000149177_45 (sequence is synthesized)
acacttcagcgtgaattcagtgtcagattaatccctccttccccaaagtccactggctttcgtctctctctgccgtgacacatatcggaatctactgtgtatatatatatatatatatat

SEQ ID NO: 414688 - DNA, 120 bp, Artificial Sequence
  ENSG00000149177_46 (sequence is synthesized)
atatatatatatatatatacactaagctctcaaaaacagtcattcctatgaattgaggtgtacaaagtttgaatttgtatcaaagatgtaattattatttttaaaaccttttcactatac

SEQ ID NO: 414689 - DNA, 120 bp, Artificial Sequence
  ENSG00000149177_47 (sequence is synthesized)
atactgctgctgtaattactttgatttttaaaatgtagattaatttttttttttttgcttcaggtgtgtatccaccaagaatttcaaatttatgtggatttattttattggtacataatc

SEQ ID NO: 414690 - DNA, 120 bp, Artificial Sequence
  ENSG00000149177_48 (sequence is synthesized)
tgtaaacttcttaaggcattaacatgaaaagattttttctttttattttatattgtggctcaggttatattttgaagatgttttgagtttatcctccaataggcaatgaagttgacaagg

SEQ ID NO: 414691 - DNA, 120 bp, Artificial Sequence
  ENSG00000149177_49 (sequence is synthesized)
ttttatgaaggaataaccaagtccctggagtcctgtggctgttgccacagtaatgtgtcctgctgtaaacaggacaggtgtgtcctgttgagaatgtgagcgggctcttccagcctcctg

SEQ ID NO: 414692 - DNA, 120 bp, Artificial Sequence
  ENSG00000149177_50 (sequence is synthesized)
gtccctcctgactctgccacgcccctcacctcactggcacttcgataactgactggacgtgttaatgggtcttttagggttctaaagggtgaaccacacttttaaagccccggctgtggt

SEQ ID NO: 414693 - DNA, 120 bp, Artificial Sequence
  ENSG00000149177_51 (sequence is synthesized)
tcggagggttagtgctgtatgccttttatttccctttccctttgaggtactgaaaggatgaaaaggtggtgtcatgttttggggagaatcttacttctcaaatggaaattgcactttttg

SEQ ID NO: 414694 - DNA, 120 bp, Artificial Sequence
  ENSG00000149177_52 (sequence is synthesized)
ctgaatcctttgcatttttttggtagtaagcagttcattgagtatcaggtcctcaaaggaatgagttggcccggctagggtgggccctcttgacctaacttcagagggggccttggctca

SEQ ID NO: 414695 - DNA, 120 bp, Artificial Sequence
  ENSG00000149177_53 (sequence is synthesized)
gtaggtgtgaatcagggaagccacattgtcctcagggtgctgtatgaagctgggtgtgggcggattcctcccacaccttcacactggcctgcctccaactcatacagatctcggagcggt

SEQ ID NO: 414696 - DNA, 120 bp, Artificial Sequence
  ENSG00000149177_54 (sequence is synthesized)
cggtacttcattcataggtccctgttcaggcagcagttctgtgggctgtggccctctcccctccaatatgtccgaaaccattgtgatgggtggcaaatcccagggagctcctaagccctg

SEQ ID NO: 414697 - DNA, 120 bp, Artificial Sequence
  ENSG00000149177_55 (sequence is synthesized)
ctctgcccacatcactgccacagagaagtcagaggaagggacttgttgctaaaaaatcctttaaaaggttaaatactttaaaagattaaagcaacataactgtaaacatattgtataaaa

SEQ ID NO: 414698 - DNA, 120 bp, Artificial Sequence
  ENSG00000149177_56 (sequence is synthesized)
atgaaaaacacaggaaccctcttcccttccgcctggtgtgggcttgggaaatgggcaagcggccccagcaatcatgggaggaactcttgcgggggagcggtctgggattccaaatgggca

SEQ ID NO: 414699 - DNA, 120 bp, Artificial Sequence
  ENSG00000149177_57 (sequence is synthesized)
ggtcacacgaaggtcacgatgcttctctgcatcctgaaaagggctggggacagggccagtgggggtggtaagggtatttatagcacagtgcttgaaaagggaagattaatgtgtaaatat

SEQ ID NO: 414700 - DNA, 120 bp, Artificial Sequence
  ENSG00000149177_58 (sequence is synthesized)
aaaggacacacaggctgggggttggtcagaggcaagaggagggtgcctctgagcttcaacccctcccaggaacaatgagctcaaattggaagagtccagtggaatcggggggatggtgtg

SEQ ID NO: 414701 - DNA, 120 bp, Artificial Sequence
  ENSG00000149177_59 (sequence is synthesized)
agcacccctgttcagtctttgacaattgcatacagaaaagcagctggtatgggtttgggtgtcaatgaaagggccaaagactggtggccagctggtttgggggatttgggccattgatag

SEQ ID NO: 414702 - DNA, 120 bp, Artificial Sequence
  ENSG00000149177_60 (sequence is synthesized)
catctcccaggaacaacgactttttgcctccaaagttggatctagtgatgatcagcaccagcaggaaatgacatttggtgtctgcccactgcagccatactgtgacctccagccagactt

SEQ ID NO: 414703 - DNA, 120 bp, Artificial Sequence
  ENSG00000149177_61 (sequence is synthesized)
ccgcctaattgactccactggatttgtgctctgttgagtcagaggctcccgggggttggggatcgaggggcgggggtcagctatgcagcccatcacgtgtgtttttcatctgggatgaaa

SEQ ID NO: 414704 - DNA, 120 bp, Artificial Sequence
  ENSG00000149177_62 (sequence is synthesized)
aagcctggttctcttttgaaatgcttgattgtacttattgagctaaacaagtcttggtgactgttgttgatttgcctcaaaagttttaagtcctgggttttcagactactgtgtagcagc

SEQ ID NO: 414705 - DNA, 120 bp, Artificial Sequence
  ENSG00000149177_63 (sequence is synthesized)
tgtgtgtttaacatactgtagctttttctcccttgggggcacatacaaataggatgtgttgatgtggactctaaactgtaattttcctgtaactattttggaatgatgcatatttctaat

SEQ ID NO: 414706 - DNA, 120 bp, Artificial Sequence
  ENSG00000149177_64 (sequence is synthesized)
gtttgttatacttgtacagagtattgctgttggttgctttttttttttttaaggaaaaaatggcctgaaaacatttttttaaagacttacaaataccaaatataaaaaaatgtcaatgca

SEQ ID NO: 414707 - DNA, 120 bp, Artificial Sequence
  ENSG00000149177_65 (sequence is synthesized)
agctctgttttctgcaaggaatctatgttttattagtctcctgaagctggcttccttgtcatgttctactcttctaccaataaatacggatttcttgattaaaaaaacgtcaaataggtt

SEQ ID NO: 414708 - DNA, 120 bp, Artificial Sequence
  ENSG00000149177_66 (sequence is synthesized)
atcaagatccaggggagagaagaacttacttaaagtcacaaaaccaattagttacaaagtagggtctagaaatcagatttcctgaatcatattttagtgttttgtgaataatagtactct

SEQ ID NO: 414709 - DNA, 84 bp, Artificial Sequence
  ENSG00000149177_67 (sequence is synthesized)
cttcacggttggcgttggccttgttcactgctgtgtgccaagctgctgacagcatctggctatcgctcttgaactcccggcctc

SEQ ID NO: 414710 - DNA, 120 bp, Artificial Sequence
  ENSG00000149177_68 (sequence is synthesized)
acacctgcctggaattccatcatctgaaacagagttggcagataagaatggcccctatgccaaatttggctcattgtctgtttttgtaaataaagttttattggatcacagccatgttca

SEQ ID NO: 414711 - DNA, 120 bp, Artificial Sequence
  ENSG00000149177_69 (sequence is synthesized)
tttgcttatgtactgtctatggctactttggtgctagaattgagtagtggcagcagagaacgtgtggcttgtgaagcctgagatatttattttctggccattacagagaatgtttgctga

SEQ ID NO: 414712 - DNA, 120 bp, Artificial Sequence
  ENSG00000149177_70 (sequence is synthesized)
cctctgggctagatcagtggttttcaaattgtggtccagggctctctagggatccctaggttctttcaaggggtctccaaggtagtattatcataacaatactaaaatgttatttggctt

SEQ ID NO: 414713 - DNA, 120 bp, Artificial Sequence
  ENSG00000149177_71 (sequence is synthesized)
tttcattctcattctcttttggagttttccaactttgatccgatatgggatgacattgtctctcaggtctaatggaatatatgctgtggattcttacattttaaaaatttcttcatttta

SEQ ID NO: 414714 - DNA, 120 bp, Artificial Sequence
  ENSG00000149177_72 (sequence is synthesized)
aatccctgatatagtaaatattaataaatataacctatgtaaatacaaattctctgagagccttaataacttttaagatggtaaagaagtcctgagagcaaaaagtttaagaacctctgg

SEQ ID NO: 414715 - DNA, 120 bp, Artificial Sequence
  ENSG00000149177_73 (sequence is synthesized)
tcaagatgtgttagaaattaactactgtgctgtgttgggcaggtggactgttcacagtctttcctaaacaacactgtgatgagatactttgttagttctagaaggctaattgaaattgat

SEQ ID NO: 414716 - DNA, 120 bp, Artificial Sequence
  ENSG00000149177_74 (sequence is synthesized)
aaaatcattttatagtcagctacggtggcctgcacccatcgtcccagctacttgagaggctgcggcaggaggattgcttggcccaacagttgcagactagcaccagcctgggagaccctg

SEQ ID NO: 414717 - DNA, 120 bp, Artificial Sequence
  ENSG00000149177_75 (sequence is synthesized)
tctcaaaaaaaaatttttttttatagaaacagtttaaattattaaattatttctaggcctacaggagaaacttctgggaaatcctagagagtaatgttcattattgttgttttaaaattt

SEQ ID NO: 414718 - DNA, 120 bp, Artificial Sequence
  ENSG00000149177_76 (sequence is synthesized)
tgaaataattgttttttggaaaggttgaaaaacatacagtcttccttgatctaagattcaagatagttgaaatcttttatacagagggtagaataaagatatacctaatgtaaatgatga

SEQ ID NO: 414719 - DNA, 120 bp, Artificial Sequence
  ENSG00000149179_0 (sequence is synthesized)
cggcaacctgggttccggaagccggagagctggagctttgaagccaccccggtcaaaggatgctgagtccggagcgcctagccctaccggactacgagtatctggctcagcgacatgtcc

SEQ ID NO: 414720 - DNA, 120 bp, Artificial Sequence
  ENSG00000149179_1 (sequence is synthesized)
tcacctacatggaggatgcagtgtgccagctgctagaaaacagggaagatattagccaatatggaattgccaggttcttcactgaatattttaacagtgtatgccagggaacacacattc

SEQ ID NO: 414721 - DNA, 120 bp, Artificial Sequence
  ENSG00000149179_2 (sequence is synthesized)
tctttcgagaattcagcttcgtccaagccaccccccacaatagggtatcatttttacgggccttctggagatgcttccgaactgtgggcaaaaatggcgatttgctgaccatgaaagaat

SEQ ID NO: 414722 - DNA, 120 bp, Artificial Sequence
  ENSG00000149179_3 (sequence is synthesized)
atcactgtttgctgcaattactgtgtcctgatttcccgctggagctcactcagaaagcagccaggattgtgctcatggacgatgccatggactgcttgatgtctttttcagatttcctct

SEQ ID NO: 414723 - DNA, 120 bp, Artificial Sequence
  ENSG00000149179_4 (sequence is synthesized)
ttgccttccagatccagttttactactcagaattcctggacagtgtggctgccatctatgaggacctgctgtcaggcaagaaccccaacacagtgattgtgccgacgtcgtccagtgggc

SEQ ID NO: 414724 - DNA, 120 bp, Artificial Sequence
  ENSG00000149179_5 (sequence is synthesized)
agcaccgccaacgacctgccttgggcggggccggcacgctggagggcgtggaggcgtcgctgttctaccagtgtctggaaaacctgtgtgatcggcacaagtacagctgcccacccccag

SEQ ID NO: 414725 - DNA, 120 bp, Artificial Sequence
  ENSG00000149179_6 (sequence is synthesized)
ccaagccctcggagctttgcctgacaagggggatctgatgcacgacccagcaatggatgaagagctggaacggctgctggcccaggtcccaggcctggtcaactcggtcacagccagtcc

SEQ ID NO: 414726 - DNA, 120 bp, Artificial Sequence
  ENSG00000149179_7 (sequence is synthesized)
agaggccagttgcctgccttcccggacccctccccgggttggctctccctggagacctctccatcattcccgaaaagtggatggagagagtgatggctccactgaagagacagacgagtc

SEQ ID NO: 414727 - DNA, 120 bp, Artificial Sequence
  ENSG00000149179_8 (sequence is synthesized)
ggagacttgaggagtccaaagggtcctgcccacagcgccctgtacctgctcccacccagcccttggtgtgcccacccagcctcctctccagcaccttgctgtgctgccctctgctgctga

SEQ ID NO: 414728 - DNA, 120 bp, Artificial Sequence
  ENSG00000149179_9 (sequence is synthesized)
caaggtgaataacagccccaagaccagccagaggggctctgatgatcagcccagccagtggccccggaaggtgaatggcctgctctccctggccctatcagcctgtgaacttcacttagg

SEQ ID NO: 414729 - DNA, 120 bp, Artificial Sequence
  ENSG00000149179_10 (sequence is synthesized)
ccccaagctgacagactgtgctgaggccaccttgtcacgccgtagcctgttagtcctcctaacctcttaagagcagtctcttctgagccagcctctgcgggtcccccaataaggttcatc

SEQ ID NO: 414730 - DNA, 120 bp, Artificial Sequence
  ENSG00000149179_11 (sequence is synthesized)
tcctcacagcaactccattaagggggagaacccgaatagccacgcagggccttgcaccatcaagggtgacacctgcgacgcaagtaccaggaggacataaccgctgtggcctgttggaga

SEQ ID NO: 414731 - DNA, 120 bp, Artificial Sequence
  ENSG00000149179_12 (sequence is synthesized)
acagccagtagccttggtaatatgaagggtgggccagaagatgatttcacttgcaaaaactgcttcaagtcttgacccctttgtgtctaatagctaaacaaacatgtgaaacgaataaaa

SEQ ID NO: 414732 - DNA, 120 bp, Artificial Sequence
  ENSG00000149179_13 (sequence is synthesized)
caggggcctttggctttcagagaagagagaagcaggaggccctggagagagtgtcctcagcttcggtaccgacgccctaccattaccggtgggagcccagagagtgaggccaggggccgg

SEQ ID NO: 414733 - DNA, 120 bp, Artificial Sequence
  ENSG00000149179_14 (sequence is synthesized)
cactgggcagggaggcaggatccagaggacactgcttcactcagaccaacagggagccaggccctgcaggggctttattttgacaccactttgtttcaatacaaacagtccagaaagaaa

SEQ ID NO: 414734 - DNA, 120 bp, Artificial Sequence
  ENSG00000149179_15 (sequence is synthesized)
attttcataccagtgaagctcctttggtcaaaatggtgtaactggatgcctcccaccctggaaaagctttgtagaaatactgatcttaaaatctcacacctggaggttagagactagcat

SEQ ID NO: 414735 - DNA, 120 bp, Artificial Sequence
  ENSG00000149179_16 (sequence is synthesized)
tcccacatctgccagggaagggtctgggggccagtggaggcctgaggtgtccctccctctgagtcctttgggggctgcagcccaggggtttaccctagtgttaagagtgggcatggaggc

SEQ ID NO: 414736 - DNA, 120 bp, Artificial Sequence
  ENSG00000149179_17 (sequence is synthesized)
ctgactccaaagccagcgttcccaacctcgctgctattttactgccttcaagggtctctcccttggcaactgatcgtgcgtttgggtgcacattctcctccaccccacagctttaaaaaa

SEQ ID NO: 414737 - DNA, 120 bp, Artificial Sequence
  ENSG00000149179_18 (sequence is synthesized)
gcatacaccagtcctttgtcacactcccactctgctccccaattcacacagctgcacccttaagtctctctggaatcagatggaataaatatagacaaataaatataaatatacaccagc

SEQ ID NO: 414738 - DNA, 120 bp, Artificial Sequence
  ENSG00000149179_19 (sequence is synthesized)
agatgaggtgctgagcagaggatgaacatagccttggtcggatccctttatgagtcagacggttttcttcctgtgaggattgtgctcatggacgatgccatggactgcttgatgtctttt

SEQ ID NO: 414739 - DNA, 120 bp, Artificial Sequence
  ENSG00000149179_20 (sequence is synthesized)
gactgaccttctatggattcctcatggctctctcaaagcaccgtggaatcaaccaagccctcggtaagtcagagctaagcagccgtcagcctctcctgccgcacaacacagggagcagct

SEQ ID NO: 414740 - DNA, 120 bp, Artificial Sequence
  ENSG00000149179_21 (sequence is synthesized)
cagcctgggcaatatagggagaaccccgtctctttagaaaaaaaacaaaaattagctgggtgtggtggcatgtaccattggtctcagctacgcaggaggctgaggtgggaagatcgcttg

SEQ ID NO: 414741 - DNA, 61 bp, Artificial Sequence
  ENSG00000149179_22 (sequence is synthesized)
actctcattcaaccacttttactgcacactaacattgggtggttggatggaatgggagaca

SEQ ID NO: 414742 - DNA, 120 bp, Artificial Sequence
  ENSG00000149179_23 (sequence is synthesized)
ctgcacactaacattgggtggttggatggaatgggagacagaaagaagcatgtggtctcaggcctcacctgcatctccagcgtatgaaatagaaatccggagatacactggttgacgcgt

SEQ ID NO: 414743 - DNA, 120 bp, Artificial Sequence
  ENSG00000149179_24 (sequence is synthesized)
cacggaggtcagccctgttcccttagtccccagggcaccccacaaatgagagggttctatgagatgtactttgaaaaccactaacttagggcaagaggggccaggaggcatcatctgaaa

SEQ ID NO: 414744 - DNA, 120 bp, Artificial Sequence
  ENSG00000149179_25 (sequence is synthesized)
aagatttggaaaaaggggaaatctgcctgtgccgggttaattctggccctgacccagccttctcctcttgcccctgggatcctccttggagaagcagaggcagcattttttttttaacca

SEQ ID NO: 414745 - DNA, 120 bp, Artificial Sequence
  ENSG00000149179_26 (sequence is synthesized)
tctgtctccaaagtggggtcatcctgatttagggacacaaaattaggtaatgtctgacctttgggcttagcctggaccatatccttttcagcccagtacctgaggcctcaagaaggaact

SEQ ID NO: 414746 - DNA, 120 bp, Artificial Sequence
  ENSG00000149179_27 (sequence is synthesized)
caactcccagcaccaggtcacaaccaccacctggtgttggaaggggatcaccacactccttggctgtggtgtctgccccaggcagggaaagtaggcagtgggattcaataaatgtatcaa

SEQ ID NO: 414747 - DNA, 120 bp, Artificial Sequence
  ENSG00000149179_28 (sequence is synthesized)
gcaacagcgagcaccttcctgctccgtgactgttcttggcccctctagcagtcctcagatctttagatcggccctcgcagggtcagcagaacaggcagccgtgaaggtgaggggcatgga

SEQ ID NO: 414748 - DNA, 120 bp, Artificial Sequence
  ENSG00000149179_29 (sequence is synthesized)
caatggatgaagagctggaacggctgtaagtgtcaagtgggaggatactgcccccttgtgggggccagacgggtcggacacggctgtgccccatctggggccaacaccacttgtctgtaa

SEQ ID NO: 414749 - DNA, 120 bp, Artificial Sequence
  ENSG00000149179_30 (sequence is synthesized)
gagctttgaagccaccccggtcaaaggatgctgagtccggagcgcctagccctaccggactacgagtatctgggcatgcttgaaacaataacacttttgaatgtaagatatatgaaaggc

SEQ ID NO: 414750 - DNA, 90 bp, Artificial Sequence
  ENSG00000149179_31 (sequence is synthesized)
atttttacgggccttctggagatgcttccgaactgtgggcaaaaatggcgggtctcactcttgcctaggctggagtaaagtggtgctagt

SEQ ID NO: 414751 - DNA, 120 bp, Artificial Sequence
  ENSG00000149179_32 (sequence is synthesized)
tgatgggctcaccaaaaatgaagatctggctgcagactttggcttctttcactgaaaagctgatctagccagactttatcttcaaaagacaggccctgcacttctgatgttccctgagcc

SEQ ID NO: 414752 - DNA, 120 bp, Artificial Sequence
  ENSG00000149179_33 (sequence is synthesized)
tctcccactgagcctactctcgtccactgtagccatgatgctctctggattcagacaatggtgtgttgtcccagaacactgtatctggcctgtctgtgcttcacatctacccctttggct

SEQ ID NO: 414753 - DNA, 120 bp, Artificial Sequence
  ENSG00000149179_34 (sequence is synthesized)
tgggattacaggcgtgacccactgcgcccagcccagaaataatatctttaaggaaacctaattccaaatgcagtagagggaaaagtattctccaaaaagaaagatatgagtgccagtgtc

SEQ ID NO: 414754 - DNA, 120 bp, Artificial Sequence
  ENSG00000149179_35 (sequence is synthesized)
gtattctccaaaaagaaagatatgagtgccagtgtcatccagttagaggctaaaaggctttcctccatatgcgttgctcgaatgactgattcagatgtcctctgtgtgtacctgtggaag

SEQ ID NO: 414755 - DNA, 120 bp, Artificial Sequence
  ENSG00000149179_36 (sequence is synthesized)
cccagaggaggcgcttggaagcaggcaggatacttgaggaacagagcaggacaatgctgattaggtagtggcagtgaatgtttagttttggtaggttggttgtgggccgcccaaacatgt

SEQ ID NO: 414756 - DNA, 120 bp, Artificial Sequence
  ENSG00000149179_37 (sequence is synthesized)
tagttttgattacagtagcttaacaactgcttgtttgatctattagatctatttctgtaggtttctcttttaactttctcctttattcaaaatattcactttgatttcctttcgctgatg

SEQ ID NO: 414757 - DNA, 120 bp, Artificial Sequence
  ENSG00000149179_38 (sequence is synthesized)
ttcatctagcctgttttttttcatggctggcttttctcatggaatctaggctaatgttcctctgcagttttctttctacaggatgctgtgccaatcacttaatgatttaagtgtatttct

SEQ ID NO: 414758 - DNA, 120 bp, Artificial Sequence
  ENSG00000149179_39 (sequence is synthesized)
tgttcctataaatattgtttgaatgcatgctattcaaggcatttagaatacctcacttttgaggagttgtctggtttatgtcaaagatattactattaccactaccatcactaatggtac

SEQ ID NO: 414759 - DNA, 120 bp, Artificial Sequence
  ENSG00000149179_40 (sequence is synthesized)
ctattaagagccaagtgtagctctttacatgtagtaactcatttatctttacaagggctctctgtggtagataccataatccccattttgtaactaatgaaactgaggatcagagaggtt

SEQ ID NO: 414760 - DNA, 120 bp, Artificial Sequence
  ENSG00000149179_41 (sequence is synthesized)
aagtaacttggcaaggttacatagtaaattctgggcccagatttatacccaggcagtctgacttcacagcccttgctcttggcagatattaaaatgccatgcagtaaatacaaggaataa

SEQ ID NO: 414761 - DNA, 69 bp, Artificial Sequence
  ENSG00000149179_42 (sequence is synthesized)
gccaattagcaactgggtcacagcctgaagtaacctcatcccccttttctaagggcctttaaaaaggac

SEQ ID NO: 414762 - DNA, 120 bp, Artificial Sequence
  ENSG00000149179_43 (sequence is synthesized)
tgcaattactgtgtcctgatttcccgctggagctcactcagaaagcagccaggtacgtctcctggactcttgaaaccaactcagctctctgtgggccactgcttcctagagaaacctgga

SEQ ID NO: 414763 - DNA, 120 bp, Artificial Sequence
  ENSG00000149179_44 (sequence is synthesized)
gtgtatacaaatgaaaaaaaggagcatttagggaagaaactggcagtgggagaggggtctatttgggatgtgccccaaaacataatacattctgcatttccaaagggaagcgaaatgatc

SEQ ID NO: 414764 - DNA, 120 bp, Artificial Sequence
  ENSG00000149179_45 (sequence is synthesized)
ctttgtggtttctgtggggagcctcagggtctgaagatagagttggagggtggtgagatgaagaggcagaaaaagcccagacccctccaatacccccacacacacacaccctagaggata

SEQ ID NO: 414765 - DNA, 120 bp, Artificial Sequence
  ENSG00000149182_0 (sequence is synthesized)
gcggttgtgtctgggaaggagagaaaatggcggcggagccgaacaagaccgaaatccagactctttttaagaggcttcgcgcagttccaaccaacaaggcctgtttcgactgcggcgcca

SEQ ID NO: 414766 - DNA, 120 bp, Artificial Sequence
  ENSG00000149182_1 (sequence is synthesized)
agaatccgagttgggccagcatcacgtacggtgttttcttgtgcattgactgttccggggtgcaccgctccctgggcgtccatctgagcttcatcaggtccacagagttggattccaact

SEQ ID NO: 414767 - DNA, 120 bp, Artificial Sequence
  ENSG00000149182_2 (sequence is synthesized)
ggaactggttccagctgaggtgtatgcaggtcggcgggaatgccaatgcgacggctttttttcgccaacatggatgcacagccaatgatgccaacaccaaatataatagccgagctgccc

SEQ ID NO: 414768 - DNA, 120 bp, Artificial Sequence
  ENSG00000149182_3 (sequence is synthesized)
agatgtaccgggagaagatccggcagctggggagtgcggccctggctaggcatggcactgatctttggatagacaacatgagtagtgccgttcctaatcactccccagagaagaaggact

SEQ ID NO: 414769 - DNA, 120 bp, Artificial Sequence
  ENSG00000149182_4 (sequence is synthesized)
ctgatttcttcacagaacacactcaaccccctgcctgggatgcgccagccactgagccttcagggacccagcagccagccccgtctacagagagcagtggcctggcacagccggagcatg

SEQ ID NO: 414770 - DNA, 120 bp, Artificial Sequence
  ENSG00000149182_5 (sequence is synthesized)
gccccaacacagacctgcttggcacctcacccaaagcctcactggaactgaaaagctccatcattggcaagaagaagccagcagcagctaagaaagggctgggtgccaagaaaggcctag

SEQ ID NO: 414771 - DNA, 120 bp, Artificial Sequence
  ENSG00000149182_6 (sequence is synthesized)
gggcccagaaggtgagcagccagagcttcagtgagattgagcggcaggctcaggtggcagagaagctccgtgagcagcaggcagccgatgccaagaagcaggcggaggagtccatggtcg

SEQ ID NO: 414772 - DNA, 120 bp, Artificial Sequence
  ENSG00000149182_7 (sequence is synthesized)
cctccatgcgtctggcctaccaggagctccagattgatcgtaagaaagaggaaaagaagctacagaatctggaagggaagaagcgagagcaggcagaaaggttgggcatgggcttggtat

SEQ ID NO: 414773 - DNA, 120 bp, Artificial Sequence
  ENSG00000149182_8 (sequence is synthesized)
cccgaagctctgtctcccactccgtgctgtctgagatgcaggtgattgagcaggaaaccccagtgagtgcaaaatcctctcgctcgcagctggacttgtttgacgatgttggtactttcg

SEQ ID NO: 414774 - DNA, 120 bp, Artificial Sequence
  ENSG00000149182_9 (sequence is synthesized)
cctctggacccccaaagtacaaggacaatcccttttccttaggggaaagctttggctcccgctgggatacagatgctgcctggggtatggacagggtagaggagaaggagccagaagtga

SEQ ID NO: 414775 - DNA, 120 bp, Artificial Sequence
  ENSG00000149182_10 (sequence is synthesized)
ccatctcaagcatccggcctatttcagaaagagccacaaaccggagggaagtggagagccggagctcaggcctcgagtctagtgaggcgcgtcagaaattcgcaggagccaaagccatct

SEQ ID NO: 414776 - DNA, 120 bp, Artificial Sequence
  ENSG00000149182_11 (sequence is synthesized)
ctttgggcgggaggtggatgcagagtatgaggccaggtctcggctgcagcagctctcaggcagcagtgccatcagctcttcagacctctttggggacatggatggagctcacggagcagg

SEQ ID NO: 414777 - DNA, 120 bp, Artificial Sequence
  ENSG00000149182_12 (sequence is synthesized)
aagtgtatctctggggaacgtgctgcctacagcggacattgcccagtttaagcagggtgtcaagtctgtggctgggaaaatggctgtgctggccaatggtgtgatgaattccttgcagga

SEQ ID NO: 414778 - DNA, 120 bp, Artificial Sequence
  ENSG00000149182_13 (sequence is synthesized)
tcgctacggttcctactgatccgagctctgtgactcaggcttacgatggtgacggcaacaagaactccacagttcccaggctggggatgctttgccttgtggaagctggggaggatttgt

SEQ ID NO: 414779 - DNA, 120 bp, Artificial Sequence
  ENSG00000149182_14 (sequence is synthesized)
tacttcgtatgtgtggtgtgtgtgtggggtggcctttgaggcgctcactcctgtgaggggaatggtcagtaccagcccttgtcctctgcctgtggactgagccctttattccctctcaca

SEQ ID NO: 414780 - DNA, 120 bp, Artificial Sequence
  ENSG00000149182_15 (sequence is synthesized)
ccaccctccgtgtgttagactcttgtccttctgtcctgcccccacagctgctgctcacttatcctgccatactgggaaagggggttcccccacgatggcttattctgggtccagactttc

SEQ ID NO: 414781 - DNA, 120 bp, Artificial Sequence
  ENSG00000149182_16 (sequence is synthesized)
cccaggtagggaaagcggaaggtagaaggctttttttgctggctctagggttcttctagttcgaggccttgggtccccatcctctggaaccagggggaggcctggaaggagttcactgta

SEQ ID NO: 414782 - DNA, 120 bp, Artificial Sequence
  ENSG00000149182_17 (sequence is synthesized)
gacccgtcccatggggaaagaggctgcggacttgctgctgctgctgctgccagtggcctcttctgggtgccaggagaggggaaggacctttgtctgggcgttaccaagggctggaaactt

SEQ ID NO: 414783 - DNA, 120 bp, Artificial Sequence
  ENSG00000149182_18 (sequence is synthesized)
tacctggtacctaaaggtttcatttgggatcagaccggagacccttgggttctcccgtctcaccacccctttctacagtaagcacttggaagattgtttcagggtgtctcagggtccctc

SEQ ID NO: 414784 - DNA, 120 bp, Artificial Sequence
  ENSG00000149182_19 (sequence is synthesized)
tgtaccatctgctgtggaatgcaggaccctctgtgacattctttatcccttcttccccgggttggtggccatggagggtcttgtctgctgtgattcgactctggatgctgtgagcttgat

SEQ ID NO: 414785 - DNA, 120 bp, Artificial Sequence
  ENSG00000149182_20 (sequence is synthesized)
gctggccagggaagcagaggatgtgagaggcagaggcaggctcctggggctgagctccttcctctgcatcattctgggcttggcctggacagcacccgccagtgagagctgtgggcctca

SEQ ID NO: 414786 - DNA, 120 bp, Artificial Sequence
  ENSG00000149182_21 (sequence is synthesized)
ccctctggcagctgagccaagcactgtcattcttggtgccatcttcccctgccgcaccggcagtctcagcccagcccccacctttgggttgtaggttgggctcccaagcaacacagacca

SEQ ID NO: 414787 - DNA, 120 bp, Artificial Sequence
  ENSG00000149182_22 (sequence is synthesized)
ctcttccccttgcccctcccccagagggacttgactttctttctggactgtttgtattgaaacaaagtggtgtcaaaataaagcccctgcagggcctggctccctgttggtctgagtgaa

SEQ ID NO: 414788 - DNA, 120 bp, Artificial Sequence
  ENSG00000149182_23 (sequence is synthesized)
tccgcgcgccgtcgccccgccccggctgcggattggcccggcgcggcgttgattcttgcggccgcggttgtcgtcgccgcccccgtcccgccggctgcccattggtccagatcggactcc

SEQ ID NO: 414789 - DNA, 120 bp, Artificial Sequence
  ENSG00000149182_24 (sequence is synthesized)
ggctgcccattggtccagatcggactccaatcaccccacccctcggctggcccaggcaccgctgaggccggcctggtgagcccgccctccccgccgtggattggcccgcggcgggacccg

SEQ ID NO: 414790 - DNA, 120 bp, Artificial Sequence
  ENSG00000149182_25 (sequence is synthesized)
tggtatggtagaggggttaggagctgggtgcaggctacctgggttcactccttgaccttaccacttaccagctatatgactttggcaaaggtactgtgtttctccgaacctcgcctgtga

SEQ ID NO: 414791 - DNA, 120 bp, Artificial Sequence
  ENSG00000149182_26 (sequence is synthesized)
aagggatttaaagatttaaagggatttaaagcctgtcttcaagggctgctgggaggagtcggtgagatggagcacatctagtgcttggcggagtgcttggcacatacttggccctgtcag

SEQ ID NO: 414792 - DNA, 120 bp, Artificial Sequence
  ENSG00000149182_27 (sequence is synthesized)
ccgtcactggccagggaactcctacgtggaataaacaaagctgatgtgtaaagaattctgaggtgtgcttcacaggtcaccacacacagctagccttctgttggggtctggcccagccct

SEQ ID NO: 414793 - DNA, 120 bp, Artificial Sequence
  ENSG00000149182_28 (sequence is synthesized)
cagctgaggtgtatgcaggtcggcgggaatgccaatgcggtaaagctccttctacttccctcaccttccattcttctgcctggttactaactttgcacgactccctaagaggccctgtcg

SEQ ID NO: 414794 - DNA, 120 bp, Artificial Sequence
  ENSG00000149182_29 (sequence is synthesized)
ttttccctgttcagagggttctctgttctataacaccaccataagctattttctgaaaacttcgaaactggtcacagcttctcttaaatgggtttcagattccaattaaactgggcaggt

SEQ ID NO: 414795 - DNA, 120 bp, Artificial Sequence
  ENSG00000149182_30 (sequence is synthesized)
gttcttggggaaaagccacaggagttgggagccttcacagtcattgggtcttgtgggcctgccctggatgaaggatggggaggctgggtatgggatgttgtgctcaggcagcgttcagtg

SEQ ID NO: 414796 - DNA, 120 bp, Artificial Sequence
  ENSG00000149182_31 (sequence is synthesized)
gggcctggacttcagtcatatcagaggatggcccgctgcaaggtgttttttgcaggaatttcgagaaactttatctctgaaaaaccggtgtcagtagcgtgtatcatcctgtatagataa

SEQ ID NO: 414797 - DNA, 120 bp, Artificial Sequence
  ENSG00000149182_32 (sequence is synthesized)
taacttcgctgtcataaggagatgtctcctacagccaacacgtttccttcttgagaatcacccgtagcacgcgctgctctcttctttgctctccagacggctttttttcgccaacatgga

SEQ ID NO: 414798 - DNA, 120 bp, Artificial Sequence
  ENSG00000149182_33 (sequence is synthesized)
tgttttaggggtgtcttctcctttctagctttggatagacaacatgagtagtgccgttcctaatcactccccagagaagaaggactctgatttcttcacagaacacactcaagtgagtgc

SEQ ID NO: 414799 - DNA, 120 bp, Artificial Sequence
  ENSG00000149182_34 (sequence is synthesized)
ccacaaggaaccgttttcccagttgttcttgacaggcaatttaccaaggcccaggccttctgtgatcatggttgtagattccatttgctttgatgtgatgtcttggacaccacgtatgaa

SEQ ID NO: 414800 - DNA, 120 bp, Artificial Sequence
  ENSG00000149182_35 (sequence is synthesized)
gtccactgttcctgctgggtaggcctaggtgtttcctcctccataaatggaggtgcagtgtagccctccttagaaatcgactcctataaattgggctggcggggaagagaggcagcttct

SEQ ID NO: 414801 - DNA, 120 bp, Artificial Sequence
  ENSG00000149182_36 (sequence is synthesized)
tggcggggaagagaggcagcttcttgaagtttcaagaggtgtccggtgccccaaacaaattttcctggattcttcccctataagaaaggcactgtgggccgggcgcagtggctcacgcct

SEQ ID NO: 414802 - DNA, 120 bp, Artificial Sequence
  ENSG00000149182_37 (sequence is synthesized)
cctgcttggcacctcacccaaagcctcactgggtcagtatgccagcgggcaggcgtggggtgtctgggagagggtggacctcaaatgttcttttcagaggtcctactgcctggccgtgtg

SEQ ID NO: 414803 - DNA, 120 bp, Artificial Sequence
  ENSG00000149182_38 (sequence is synthesized)
gacagaggccacaggagactgagcatctatctgattctctggagtggggactgtgattgaaatagtggatgcaacactgattttagagccaagccctttgaattgatgaatctgggtggg

SEQ ID NO: 414804 - DNA, 120 bp, Artificial Sequence
  ENSG00000149182_39 (sequence is synthesized)
ctggtgtataaggcctggggtctgcctctgagtgtggggctgggtctagccaaagtgttggggaggccagcatgagactggacacctatccctgggctctgaggcagggctggcttgtct

SEQ ID NO: 414805 - DNA, 120 bp, Artificial Sequence
  ENSG00000149182_40 (sequence is synthesized)
gctaaaggggcccttcctgccagagaactgaaaagctccatcattggcaagaagaagccagcagcagctaagaaagggctgggtgccaagaaaggcctaggggcccagaaggtgagcagc

SEQ ID NO: 414806 - DNA, 120 bp, Artificial Sequence
  ENSG00000149182_41 (sequence is synthesized)
aaggtgcgtgagcagggggcgcgcggagtctctcgtcccgctggggcctgagggagggagaagggcggaggtgggttatgtttctggggtgtcggtgcctggcctttactcggggcccct

SEQ ID NO: 414807 - DNA, 120 bp, Artificial Sequence
  ENSG00000149182_42 (sequence is synthesized)
tcacagaacacactcaatccctttcctcatgggtttggagtatgatttcttgtccacaaggtgcttgtaggtcttggtgcttcttgccagcaggagtggctcaccgaggcatctgtgatc

SEQ ID NO: 414808 - DNA, 120 bp, Artificial Sequence
  ENSG00000149182_43 (sequence is synthesized)
ggagagtggctgcctcgacttgggccgctctgaattcggtgggaagcctctgggccgagagggtccggtagcctcctgccagagggaaccacctgtgtgggccctttggcacatgggcgg

SEQ ID NO: 414809 - DNA, 120 bp, Artificial Sequence
  ENSG00000149182_44 (sequence is synthesized)
tccgtctccgcctctgggccaaaacttcctcttttttgacggtcaggcttgagactctgagcgttagttgaggggaaagggaggcattgaccttgttgttgctgatatgttgttagacca

SEQ ID NO: 414810 - DNA, 120 bp, Artificial Sequence
  ENSG00000149187_0 (sequence is synthesized)
atgaacggcaccctggaccacccagaccaaccagatcttgatgctatcaagatgtttgtgggccaggttccaaggacctggtctgaaaaggacttgcgggaactcttcgaacagtatggt

SEQ ID NO: 414811 - DNA, 120 bp, Artificial Sequence
  ENSG00000149187_1 (sequence is synthesized)
gctgtgtatgaaatcaacgtcctaagggataggagccaaaacccgcctcagagcaaagggtgctgttttgttacattttacacccgtaaagctgcattagaagctcagaatgctcttcac

SEQ ID NO: 414812 - DNA, 120 bp, Artificial Sequence
  ENSG00000149187_2 (sequence is synthesized)
aacatgaaagtcctcccagggatgcatcaccctatacagatgaaacctgctgacagtgagaagaacaatgcagtggaagacaggaagctgtttattggtatgatttccaagaagtgcact

SEQ ID NO: 414813 - DNA, 120 bp, Artificial Sequence
  ENSG00000149187_3 (sequence is synthesized)
gaaaatgacatccgagtcatgttctcttcgtttggacagattgaagaatgccggatattgcggggacctgatggcctgagccgaggttgtgcatttgtgacttttacaacaagagccatg

SEQ ID NO: 414814 - DNA, 120 bp, Artificial Sequence
  ENSG00000149187_4 (sequence is synthesized)
gcacagacggctatcaaggcaatgcaccaagcacagaccatggagggttgctcatcacccatggtggtaaaatttgctgatacacagaaggacaaagaacagaagagaatggcccagcag

SEQ ID NO: 414815 - DNA, 120 bp, Artificial Sequence
  ENSG00000149187_5 (sequence is synthesized)
ctccagcagcagatgcagcaaatcagcgcagcatctgtgtggggaaaccttgctggtctaaatactcttggaccccagtatttagcactttatttgcagctccttcagcagactgcctcc

SEQ ID NO: 414816 - DNA, 120 bp, Artificial Sequence
  ENSG00000149187_6 (sequence is synthesized)
tctgggaacctcaacaccctgagcagcctccacccaatgggagggttgaatgcaatgcagttacagaatttggctgcactagctgctgcagctagtgcagctcagaacacaccaagtggt

SEQ ID NO: 414817 - DNA, 120 bp, Artificial Sequence
  ENSG00000149187_7 (sequence is synthesized)
accaatgctctcactacatccagcagtcccctcagcgtgctcactagttcagggtcctcacctagctctagcagcagtaattctgtcaaccccatagcctcacttggagccctgcagaca

SEQ ID NO: 414818 - DNA, 120 bp, Artificial Sequence
  ENSG00000149187_8 (sequence is synthesized)
gggcagcagtggcctttccaatggcaccgggagcaccatggaggccctcactcaggcctactcgggtatccagcaatatgctgctgctgcgctccccactctgtacaaccagaatcttct

SEQ ID NO: 414819 - DNA, 120 bp, Artificial Sequence
  ENSG00000149187_9 (sequence is synthesized)
gacacagcagagtattggtgctgctggaagccagaaggaaggtccagagggagccaacctgttcatctaccacctgccccaggagtttggtgatcaggacctgctgcagatgtttatgcc

SEQ ID NO: 414820 - DNA, 120 bp, Artificial Sequence
  ENSG00000149187_10 (sequence is synthesized)
ctttgggaatgtcgtgtctgccaaggttttcatagacaagcagacaaacctgagcaagtgttttggttttgtaagttacgacaatcctgtttcggcccaagctgccatccagtccatgaa

SEQ ID NO: 414821 - DNA, 120 bp, Artificial Sequence
  ENSG00000149187_11 (sequence is synthesized)
cggctttcagattggcatgaagcggcttaaagtgcagctcaaacgttcgaagaatgacagcaagccctactgagcgtgctcccctctgagactggagtgagagggtcttctgattcctgc

SEQ ID NO: 414822 - DNA, 120 bp, Artificial Sequence
  ENSG00000149187_12 (sequence is synthesized)
cgtttgttcatcgttgtgcctaaagcatgtcgatgtggcgtcaagtacatcgtccaaatccctgtctcttcagcttctctgatgcttgaactctcacctttgaccttgtgttgacctttg

SEQ ID NO: 414823 - DNA, 87 bp, Artificial Sequence
  ENSG00000149187_13 (sequence is synthesized)
cttttgtgctgccaaattggttttgctagaacgactgctgaaggggaaatatttaaacttgcatttgaatataaaaaaaatctattt

SEQ ID NO: 414824 - DNA, 120 bp, Artificial Sequence
  ENSG00000149187_14 (sequence is synthesized)
aatatttaaacttgcatttgaatataaaaaaaatctatttttctagaacttcataagataaccacttgattttgtgattccaattctttgtaattgtcttcagagcagccctactagcac

SEQ ID NO: 414825 - DNA, 120 bp, Artificial Sequence
  ENSG00000149187_15 (sequence is synthesized)
ataccgcgtggtgtttgtatttctgtgaacacacagccagtccgtttctaggctttgtttctctgtgtgcttagttttaaagacaactttgaagtaaacaatgaaataaaagatgtcact

SEQ ID NO: 414826 - DNA, 120 bp, Artificial Sequence
  ENSG00000149187_16 (sequence is synthesized)
aaaacctctgaggctcctgagcacattttgctgatacagtctgtggggcttgaggagaccgcatgtattgttctttcttttgtttttcttctgagttctcaactgcggagagcacctgaa

SEQ ID NO: 414827 - DNA, 120 bp, Artificial Sequence
  ENSG00000149187_17 (sequence is synthesized)
ggcggcgggacgcggaggctcccccgggattcggcctcagcagcgaggcggcggcggcggctgcggaggcgcaggcagcaactgaggcagcggcaggctcaggtgcagccgctggctgaa

SEQ ID NO: 414828 - DNA, 120 bp, Artificial Sequence
  ENSG00000149187_18 (sequence is synthesized)
ccgctggctgaacataacttctttttttcaaagttccctgtgttgtgaactgagcttgggtgaagtgaaatctttgaggaagctaaagctgtgtgtatttgtggatcagacaagtgcagc

SEQ ID NO: 414829 - DNA, 120 bp, Artificial Sequence
  ENSG00000149187_19 (sequence is synthesized)
aagttaatatcattggcttctgaaggggagagtgaggtgatggctgcgtttaagttggatttccttccagaaatgatggtggatcattgctctttgaattccagtcccgtctcaaagaaa

SEQ ID NO: 414830 - DNA, 120 bp, Artificial Sequence
  ENSG00000149187_20 (sequence is synthesized)
gccatatcctgaggttttttttgtttttgtttttgtttctcctttatttaaagtttgctgtgtttgtaaccagtgtgtgttgagaaggaccaacaccaaaccaccctggggaagggggac

SEQ ID NO: 414831 - DNA, 120 bp, Artificial Sequence
  ENSG00000149187_21 (sequence is synthesized)
agggaaacatttaacacagacgatgatcaggatttgccccaaaccaccccaagagagaggactgagtggaacaaaaaagtgacccccagaacctctcttagtgtgagggtgggtagaatg

SEQ ID NO: 414832 - DNA, 120 bp, Artificial Sequence
  ENSG00000149187_22 (sequence is synthesized)
agaactgacacctgggagctgtggggagcagagcggctttggggaagagtggagtgactagacacctaatgccctggcagctggagactcaaactcctgtacagctaccttctgggaaat

SEQ ID NO: 414833 - DNA, 120 bp, Artificial Sequence
  ENSG00000149187_23 (sequence is synthesized)
agtttttgacacctatttttcagattcttgtccggaatttctgctgctcttttcaaaaaagggcattaacaattctctggaaataaagcacctgttagcctgacatatgcaaaaagcagg

SEQ ID NO: 414834 - DNA, 120 bp, Artificial Sequence
  ENSG00000149187_24 (sequence is synthesized)
gcggcatcacccattacgagctcccccagccagcagtcagtattggattggccttgcctggctggtggcagtttgggagaaacagccaaagaggttagtttatttcaacaccaaattaga

SEQ ID NO: 414835 - DNA, 120 bp, Artificial Sequence
  ENSG00000149187_25 (sequence is synthesized)
ccatggcccatttccaacgggtctctttaaaggcctctatggaatacattgcctggtttccttctttgcagttcaccacagcaaggaatgtcacctccatcccaagccaccattttctca

SEQ ID NO: 414836 - DNA, 120 bp, Artificial Sequence
  ENSG00000149187_26 (sequence is synthesized)
tgaaggcaaatccaagaagggcttgcagttcttgctgaagggggtaccatttgtgggcagagtgatcaataccatctagttgggggaggaggagcttatttcttggtgtacttgaatcag

SEQ ID NO: 414837 - DNA, 120 bp, Artificial Sequence
  ENSG00000149187_27 (sequence is synthesized)
aaggtccctgcaagccagtatgcttcatttgccagtggccagaaattctcccttgcctccttgattgaggtgtcccagatgtagtattcccacaggggtctggcaggcccctcctgtaac

SEQ ID NO: 414838 - DNA, 120 bp, Artificial Sequence
  ENSG00000149187_28 (sequence is synthesized)
cactccagtcacattttctgctcttgaggcagaggtgacatcaggacgtttacagcctccacatgaattgagtgttcatttacctcagtattaccgtgttcatttttgtcctcgtgctac

SEQ ID NO: 414839 - DNA, 120 bp, Artificial Sequence
  ENSG00000149187_29 (sequence is synthesized)
agttagctccctgccgcctcttgcaggtcttacttcagctcttgcctgtgacccacacagcttctgggctctgcctctgctctaagaagtgctgtgggggtagagaaccaggaaggacat

SEQ ID NO: 414840 - DNA, 120 bp, Artificial Sequence
  ENSG00000149187_30 (sequence is synthesized)
gctgttgggaatgtacacctgggcagaggtggccctgttaagatgtgactgtagccacagccagggatgggatccctgggtctctggaatctgaaacctcaacaaataccagtcttgacc

SEQ ID NO: 414841 - DNA, 120 bp, Artificial Sequence
  ENSG00000149187_31 (sequence is synthesized)
cctagcagcagagataagaataaaggggttggtttgctattaagtcagatgggggctctctccttgtcatgctgtccctgtgggtaacagacagggattgaccatcttactgttgtacag

SEQ ID NO: 414842 - DNA, 120 bp, Artificial Sequence
  ENSG00000149187_32 (sequence is synthesized)
gtagctggtggtgttggattatcccattgaagctgggacagctgttcctttctcatagtgataacttgggtctgttgtcctctaaggaacgtgaaacatacacttcttaagctgaaccac

SEQ ID NO: 414843 - DNA, 120 bp, Artificial Sequence
  ENSG00000149187_33 (sequence is synthesized)
gtaaacttgaaattctgcgcactgggagaaatgtgtcctgtgtttcaaaggataaaactgttctaaaggcttccagggtcatgatgggattttttaaataaatgcaaaaaataaaaataa

SEQ ID NO: 414844 - DNA, 120 bp, Artificial Sequence
  ENSG00000149187_34 (sequence is synthesized)
gtctgtttaaggaatagcagaagacatgacatgtagacaaatttcaggttattttcagaagatactgggtttgttactgtattttaaaaggatactttcttggtttgttatgagatattc

SEQ ID NO: 414845 - DNA, 120 bp, Artificial Sequence
  ENSG00000149187_35 (sequence is synthesized)
taattaaacagtgatgaattcttactcctggtcagtgtaagtctaaattcaagtttgttgctttgttttacagtttcctttcactcccctcccccatcccctcatgagtcataagcatgc

SEQ ID NO: 414846 - DNA, 120 bp, Artificial Sequence
  ENSG00000149187_36 (sequence is synthesized)
agtgttgggaatagaacttgtcagctgagtggggatgagacagttctctgcccatactatttgtaactgtagtcaatgaggagaggaaaggacgttattaaatgctggagaaacaccttg

SEQ ID NO: 414847 - DNA, 120 bp, Artificial Sequence
  ENSG00000149187_37 (sequence is synthesized)
attgaggcagcttcttctgtggctgtgtggtatggatgcagagttctgtgtgactatacactgatgtattctggctctgaatcacttagggatctcttctgcaccttgtgcattgtaggt

SEQ ID NO: 414848 - DNA, 120 bp, Artificial Sequence
  ENSG00000149187_38 (sequence is synthesized)
tttggatgcttatttgtttagggtctaggacctggtgcttagcctctcctggatcctgtatatttactgactttccaaattcttttgagtgtggcattatatctgcttcatcttctcttt

SEQ ID NO: 414849 - DNA, 120 bp, Artificial Sequence
  ENSG00000149187_39 (sequence is synthesized)
cttggctattcttagtgcccttctcattttactgtcctaatgttttcccatttatactatgaatcattgtgcaccctatgtagagcctgtcattggagattaaaatcagtggcagctctt

SEQ ID NO: 414850 - DNA, 120 bp, Artificial Sequence
  ENSG00000149187_40 (sequence is synthesized)
accgggtgacggcggggactggcctggactctgggggactggcgggactctggaggagggcccggcggcctcggaggagggaccgaggtttcctgggcgggaaactgggaccccggcgaa

SEQ ID NO: 414851 - DNA, 120 bp, Artificial Sequence
  ENSG00000149187_41 (sequence is synthesized)
gggagagcgcgtcgcaggccagacacgtgtgagccctgtagcgtgggaaactgaggcccccgcctgtggccggtgacctccctcctccgagggaggggggttgtgaccccagagtttcac

SEQ ID NO: 414852 - DNA, 120 bp, Artificial Sequence
  ENSG00000149187_42 (sequence is synthesized)
attgtgtgctgggctgagcctcccttcacatggtcacatccccattttaatccaatactccctttccctaccccttccccagtcctgcctctttctgtggcacttattgctggtttccct

SEQ ID NO: 414853 - DNA, 120 bp, Artificial Sequence
  ENSG00000149187_43 (sequence is synthesized)
tgcccacacctttattaatgtacacttggcatggtatgctattggattagccatctcttctctgaggaaatgatttcaagtttcttaatgagtgatacatgaatcatttttggagccctg

SEQ ID NO: 414854 - DNA, 120 bp, Artificial Sequence
  ENSG00000149187_44 (sequence is synthesized)
taatgttgtttgtaaggcttatctagaacagttcctctttgtcagggaccagccctctgccagtgtgtgcttgtcattgctggaatggatatgaagcacccttatctgctggctaatctc

SEQ ID NO: 414855 - DNA, 120 bp, Artificial Sequence
  ENSG00000149187_45 (sequence is synthesized)
cccaaccggctggaaccaagaatgtcgtttctatttttatagaagttttatacagctccggggtggagaatatttattacctaaattatatctctggaaaaggccaggattttgtagaat

SEQ ID NO: 414856 - DNA, 120 bp, Artificial Sequence
  ENSG00000149187_46 (sequence is synthesized)
ccagaatgtgattgttatacacacagggtgctgtgtatgattgaaactactgactttctgtggcccgtttgcagcccagctaacctgcccaaggggaaggtgttaatgctgtgaattggc

SEQ ID NO: 414857 - DNA, 120 bp, Artificial Sequence
  ENSG00000149187_47 (sequence is synthesized)
agaggagagagctgtgctccatagggtgctgccggtgctgtgctccctagccttctgttctgtcttcctccttagccagaacgccactcccttcccacatccccttcttctctccgcctt

SEQ ID NO: 414858 - DNA, 120 bp, Artificial Sequence
  ENSG00000149187_48 (sequence is synthesized)
gataccagaccctgagggcttcatacctgctgatgggttttcttttctaaaaggaatgctcgccccagcagggtcctgggctgcttgagcagccagctggtgagaccatgcacttctctg

SEQ ID NO: 414859 - DNA, 120 bp, Artificial Sequence
  ENSG00000149187_49 (sequence is synthesized)
ttctctcctccccctgcccagtgagttagcacagcagtagcactgcccttgagcacagttctttccccaggccaaagatggttttgtgaagaagctgctcccctacaagtctcacgtgtg

SEQ ID NO: 414860 - DNA, 120 bp, Artificial Sequence
  ENSG00000149187_50 (sequence is synthesized)
aaagggctcagctcagagtggagactcgctgtcaagtcttaagcaatccttttctgttgtgtgaaggtttcacttacaatgtgttttctgctgtagttttgtttcttacttgggttacat

SEQ ID NO: 414861 - DNA, 120 bp, Artificial Sequence
  ENSG00000149187_51 (sequence is synthesized)
catgaaattgatttgccttgaatgcagccagaccactgtctcctgggttccccttgagtggccagggcctggatggaagctaagagcttggatttctgggaacaaagggccatccccata

SEQ ID NO: 414862 - DNA, 120 bp, Artificial Sequence
  ENSG00000149187_52 (sequence is synthesized)
agattgagcagaaattctggtcctcttccctgaaaaattttccccaccccagccagcatcttctgcttccccttgggttgtgaccagggagtggggagagaggctgaggctctgctcccc

SEQ ID NO: 414863 - DNA, 120 bp, Artificial Sequence
  ENSG00000149187_53 (sequence is synthesized)
tggagaccttctcttaggagttgggtgcttcatggaaaatccaagccttaggttcccttctgtctctggcaattagatgtgttcttggtgtcctccatgtcctttttgacttttccctgt

SEQ ID NO: 414864 - DNA, 120 bp, Artificial Sequence
  ENSG00000149187_54 (sequence is synthesized)
gtccattgttagcatgtgcaaaagttccctgtcattacccaacccctgcccgcccacctcatttcagggctgtacacacagtgagtgttcctgttctctctctctttgtttggatgtatt

SEQ ID NO: 414865 - DNA, 120 bp, Artificial Sequence
  ENSG00000149187_55 (sequence is synthesized)
ctttttcttttgtggttcttccctggagcgactctggggagtcctggatatcccgcctgccccttcccctcagccccatgcttgttccaacagtctccacagcaaaatgtgatgctttga

SEQ ID NO: 414866 - DNA, 120 bp, Artificial Sequence
  ENSG00000149187_56 (sequence is synthesized)
tttttttgttgttgtttttgtttttgtattgtttttgtgtttttgttttgaattttttcctttcctactaagattatgcccagaaaaaagttttgcatgtttcctgctgtttcttcacac

SEQ ID NO: 414867 - DNA, 120 bp, Artificial Sequence
  ENSG00000149187_57 (sequence is synthesized)
cttcgtatatatcaccttcacctctctgttttctatagtttgtgcaaaaactgatcgatttaaaagggtttcaaagaagctgttttaaattgttgtagggttgattatttttttcaagat

SEQ ID NO: 414868 - DNA, 120 bp, Artificial Sequence
  ENSG00000149187_58 (sequence is synthesized)
tgtattgtttaattttgaagtggcaactttctcctctattgcccttagagcgtttgcctgtgcacttagactgtcacttcgtgtggcctccaggtcttaccggggcttccgggaggctgg

SEQ ID NO: 414869 - DNA, 120 bp, Artificial Sequence
  ENSG00000149187_59 (sequence is synthesized)
ctgctttgctcagagagggtgggaagggggcctggagagacacgagaagcagaggtagagcctagaaggtggcagcaggtgggtaagaggcttatttagcacattaggggcagtgagcac

SEQ ID NO: 414870 - DNA, 120 bp, Artificial Sequence
  ENSG00000149187_60 (sequence is synthesized)
ctggaggaaggagggcgctcccaatcacccgtaggaggccatctgcacaccaagcggcaattcacctgctggcgcttttcctaggtgacaagcacaatactacagtcttcacactgttta

SEQ ID NO: 414871 - DNA, 120 bp, Artificial Sequence
  ENSG00000149187_61 (sequence is synthesized)
cagccctgggcaccagccacccggcactggctcttcatcacagctctgctcttgcttagctagtggggtgggggaaagggcagggatttgtttttttaattgggtggagagccaaacagc

SEQ ID NO: 414872 - DNA, 120 bp, Artificial Sequence
  ENSG00000149187_62 (sequence is synthesized)
tactgtccctgggtgccaagcaagccagttttttggttccctgagggaaactgaccctcctctcttgtggcaccatccagcctcagggtcttggagacttgagtaagaatgtgagtggag

SEQ ID NO: 414873 - DNA, 120 bp, Artificial Sequence
  ENSG00000149187_63 (sequence is synthesized)
ggggagaggtgaggagaggagcacagggtggatctgtggagggaagaggttacagggggaggagctgatgatagatcccacccagacttaagctgctggtgggtgggtgagctgggaagt

SEQ ID NO: 414874 - DNA, 120 bp, Artificial Sequence
  ENSG00000149187_64 (sequence is synthesized)
aggactgtccagggaagggtggagagatgtagctaggggctggggagggggaggtggaagcgctattgagcatcctccacaccaaggttgatgaaggaagggatcccagcagggtttctg

SEQ ID NO: 414875 - DNA, 120 bp, Artificial Sequence
  ENSG00000149187_65 (sequence is synthesized)
ctctggggctggcaggttgcctggtattatgcccaaggccgctctgcctgggggaaagggcagccaggcagaggcccagtgtctggtaggctgctgaatttcctggaaggggtgattgga

SEQ ID NO: 414876 - DNA, 120 bp, Artificial Sequence
  ENSG00000149187_66 (sequence is synthesized)
tggaaagaggccagaaaccccagcctgagagactgctgtgcaccccacagtctgactgcacagagccgcctctgttggcaggaggcactgaggctccccttcctgtgtattgagaagcag

SEQ ID NO: 414877 - DNA, 120 bp, Artificial Sequence
  ENSG00000149187_67 (sequence is synthesized)
tgtttgccaatatattttgctttcaattccaagaggagctctgggaaaacctgtggataaaaccaaatgccaaatgttggacgttgtttccttttccttttctctctctgattgttttaa

SEQ ID NO: 414878 - DNA, 120 bp, Artificial Sequence
  ENSG00000149187_68 (sequence is synthesized)
ttgttctgtggtggttttaatggatttgagaccctggagcggcagctgcctttctgatttccagctgctttttgtgaataatttaaaaagaaaaaaaaaaagaaactttacattttggag

SEQ ID NO: 414879 - DNA, 120 bp, Artificial Sequence
  ENSG00000149187_69 (sequence is synthesized)
acaaacctgtgtgagttttttattggtacaaacgttgtatttaacactaggggttttgtacagttttttgccttttctactagaaaacaatgtaaagtgatttcacaatgtgaagagaaa

SEQ ID NO: 414880 - DNA, 120 bp, Artificial Sequence
  ENSG00000149187_70 (sequence is synthesized)
aaaaaattgccactatgaccaaacgcacagtctgttctgcagcaacaacgggattcaatcaactcagtcgtgattcagccgtagaaatgcttttcctttatcttgtttgagcttttcctt

SEQ ID NO: 414881 - DNA, 120 bp, Artificial Sequence
  ENSG00000149187_71 (sequence is synthesized)
tctttcctgttttgatttgcaaaagaaaatgtcttttttgtgtgaacttgtgttgtactctgtagaaaattatggattttactttaatggtttaaaaaaaggcaaggagagccctcgtcg

SEQ ID NO: 414882 - DNA, 120 bp, Artificial Sequence
  ENSG00000149187_72 (sequence is synthesized)
cttttcttacctaatcacagagtttgtgtagtgaatttaaaaagaaaaaaaaattgttataagtttggagcaagggagtatgtgtttcaaaggaatctccttcctttttttgtgtgtttt

SEQ ID NO: 414883 - DNA, 120 bp, Artificial Sequence
  ENSG00000149187_73 (sequence is synthesized)
tccttttgtcccaatggggaacctaaatctgttttaattgcacagacacatggacaaaaagtcattttgtatctgccaagtgtggtaccttcctttgtttatttgctattaaactgtttg

SEQ ID NO: 414884 - DNA, 120 bp, Artificial Sequence
  ENSG00000149187_74 (sequence is synthesized)
gtttgctttctgcagactgtgcaagctcccagctgttccttcttctgctgtccctagccaacaaacacagtggcatttacaacttttggcatatagaaattatatgtaaaaattcaggta

SEQ ID NO: 414885 - DNA, 120 bp, Artificial Sequence
  ENSG00000149187_75 (sequence is synthesized)
gtactatttcttttagtcctgttagtctctttctctctctatatatatgtatctctggacatgcatctctggttatatcttgaggcttttgctgcaactaaagtgaattcctggtttccc

SEQ ID NO: 414886 - DNA, 120 bp, Artificial Sequence
  ENSG00000149187_76 (sequence is synthesized)
aaacctctttacaaatagcatacttggatagtgacactttttcttgtatttggcgagaatgccagtgatgggttgaattttaactccttgctttctaatagcagggtcctcacctagctc

SEQ ID NO: 414887 - DNA, 120 bp, Artificial Sequence
  ENSG00000149187_77 (sequence is synthesized)
atactttgaaaataacagctcttttttgttccctcgtgtgtctcttcccaattgtatccctattgtattttctcatagtatgtttcagcagaaatcaaggtagacgaagtaacctcttgt

SEQ ID NO: 414888 - DNA, 120 bp, Artificial Sequence
  ENSG00000149187_78 (sequence is synthesized)
agttccctgctcctccctctctgagcacggagcagaatctgttctgctgaagctgctgttccactttttagcttgctatatttgtacagcaacagcaggagcagcccactagctaggccg

SEQ ID NO: 414889 - DNA, 120 bp, Artificial Sequence
  ENSG00000149187_79 (sequence is synthesized)
tgtggccaccctttggcacccgcaccggctcagacctgctcaggactcagccagggcacacagtttgtgttcttacgtgcatccatctgtctgtctgtgtgcgtctctgtggaggactga

SEQ ID NO: 414890 - DNA, 120 bp, Artificial Sequence
  ENSG00000149196_0 (sequence is synthesized)
gttgcctgagcagtgggctgcttaggaagagaaggtcagagttcgcgggggcagaggcattcttgccgctggcccagtcactatgtagtggaggggcagacaccctcccgcaaattctgg

SEQ ID NO: 414891 - DNA, 120 bp, Artificial Sequence
  ENSG00000149196_1 (sequence is synthesized)
aaggttcttagtctcgactagggcagtagccccaggactcctagtcgccggcttcaggtcactgccggctgaacggagctgccgtcgccatgtttggctgcttggtggcggggaggctgg

SEQ ID NO: 414892 - DNA, 120 bp, Artificial Sequence
  ENSG00000149196_2 (sequence is synthesized)
tgcaaacagctgcacagcaagtggcagaggataaatttgtttttgacttacctgattatgaaagtatcaaccatgttgtggtttttatgctgggaacaatcccatttcctgagggaatgg

SEQ ID NO: 414893 - DNA, 120 bp, Artificial Sequence
  ENSG00000149196_3 (sequence is synthesized)
gaggatctgtctacttttcttatcctgattcaaatggaatgccagtatggcaactcctaggatttgtcacgaatgggaagccaagtgccatcttcaaaatttcaggtcttaaatctggag

SEQ ID NO: 414894 - DNA, 120 bp, Artificial Sequence
  ENSG00000149196_4 (sequence is synthesized)
gaatattgtccgaactccatctgttgctcagattggaatttcagtggaattattagacagtatggctcagcagactcctgtaggtaatgctgctgtatcctcagttgactcattcactca

SEQ ID NO: 414895 - DNA, 120 bp, Artificial Sequence
  ENSG00000149196_5 (sequence is synthesized)
gttcacacaaaagatgttggacaatttctacaattttgcttcatcatttgctgtctctcaggcccagatgacaccaagcccatctgaaatgttcattccggcaaatgtggttctgaaatg

SEQ ID NO: 414896 - DNA, 120 bp, Artificial Sequence
  ENSG00000149196_6 (sequence is synthesized)
gtatgaaaactttcaaagacgactagcacagaaccctctcttttggaaaacataatttgaataaaataatttttaatggattctgaaatttgtcatgttttgaagataactgactccatc

SEQ ID NO: 414897 - DNA, 120 bp, Artificial Sequence
  ENSG00000149196_7 (sequence is synthesized)
taaaagtatgaggtcaaaggatcacgaaacctaagtttaaaaactgcttagagactgaagcttaattaaaaatctttattaaaaattaaaaacattgaaaaatgaaaatatgttcatcat

SEQ ID NO: 414898 - DNA, 120 bp, Artificial Sequence
  ENSG00000149196_8 (sequence is synthesized)
taaagacttttttccccttaagcttaaaataccattcaaaggcaagacattttgttttggctatgattcattttttttacttaaaaataaaacctataccaaacagtagtgtgccaagta

SEQ ID NO: 414899 - DNA, 120 bp, Artificial Sequence
  ENSG00000149196_9 (sequence is synthesized)
tttgacatttaaacatattcttttattgtgaacatcagcactgcatgccattaaagtatgtactatagagatctgatgagaaacagttcttaccctaaatattttgttatattgtcgcca

SEQ ID NO: 414900 - DNA, 120 bp, Artificial Sequence
  ENSG00000149196_10 (sequence is synthesized)
ttatgaatttataaagacaggaaaatatagttgcctatgttttagggaccactattaaagcttataaatatttgtgtattttcatttagaagtaccatctatgagagtagtttatactgc

SEQ ID NO: 414901 - DNA, 120 bp, Artificial Sequence
  ENSG00000149196_11 (sequence is synthesized)
actgtgtacatgaatggctaatgaatctattttccaactttcccgtgttttatagatatttcttttcactttgagtatcctagagatgggaggatgcctaggaagagtttgttgagaagt

SEQ ID NO: 414902 - DNA, 120 bp, Artificial Sequence
  ENSG00000149196_12 (sequence is synthesized)
ggtaccatggtgtagcatggagagcattggaatgcactaggtttgaattttggcataatgtagctatgtgaccctgagcaaatttctctcatctgctcatctgtggaatgaggaaatagg

SEQ ID NO: 414903 - DNA, 120 bp, Artificial Sequence
  ENSG00000149196_13 (sequence is synthesized)
agttgaatttgatttttttccttaggtcccttctaggtcttaaatttgcagaagataaacaattactaaaatttcttatgatttgtgctctctgataaaagctaatcaaaactgccccga

SEQ ID NO: 414904 - DNA, 120 bp, Artificial Sequence
  ENSG00000149196_14 (sequence is synthesized)
tatttaaattcctatgcttgctgtctttttataagaataattacatttccagattatctttttagattttttatagctttttagaaatgacatgtaaaattgttttggataagtcatttg

SEQ ID NO: 414905 - DNA, 120 bp, Artificial Sequence
  ENSG00000149196_15 (sequence is synthesized)
gcagttaatgaaagatcctattttaattttcttgtgaatgtaaatatatgtgttttcttttctaggtatgaaaactttcaaagacgactagcacagaaccctctcttttggaaaacataa

SEQ ID NO: 414906 - DNA, 120 bp, Artificial Sequence
  ENSG00000149196_16 (sequence is synthesized)
ggtaccatggtgtagcatggagagcattggaatgcactaggtatgaaaactttcaaagacgactagcacagaaccctctcttttggaaaacataatttgaataaaataatttttaatgga

SEQ ID NO: 414907 - DNA, 78 bp, Artificial Sequence
  ENSG00000149196_17 (sequence is synthesized)
tcacttgagcctgggagatcaaggctaagagtgggaccctgtctcaaaaacaaacgaagaaactgttagtgactttac

SEQ ID NO: 414908 - DNA, 120 bp, Artificial Sequence
  ENSG00000149196_18 (sequence is synthesized)
ctgtctcaaaaacaaacgaagaaactgttagtgactttactgaacttttgatattaatcaggtgccttcgcagcagagtctcttggattatactgccttcatattattcaacaactgaat

SEQ ID NO: 414909 - DNA, 120 bp, Artificial Sequence
  ENSG00000149196_19 (sequence is synthesized)
aaaaaaacctaataagaccaattctcttgtgtagagaagagaaggcatggctgattttgtatatttgagaaagtgatgctggaaaggttatttttgagtgagtagaaggtagtattatct

SEQ ID NO: 414910 - DNA, 120 bp, Artificial Sequence
  ENSG00000149196_20 (sequence is synthesized)
tcagaagttcagttacttttagggttagtacttaagcccatttgattctcaggaaatgtgagtccatttacttctagcttctaccaaggagacttggagtatgttagtgaatttgatcat

SEQ ID NO: 414911 - DNA, 120 bp, Artificial Sequence
  ENSG00000149196_21 (sequence is synthesized)
tttagagtcaaggaagggaaacagattaggaaacagaggaaatggaatagtgctgcctttatcttctttccagcaatggaaataaccagttgctcctttataatatgtaaactcttatct

SEQ ID NO: 414912 - DNA, 120 bp, Artificial Sequence
  ENSG00000149196_22 (sequence is synthesized)
ttctggcaggtaaaagacttcttagagatggttactattttatatgagaaaataggttgatttgaggagagtgataattgaggagggacatagtggatgcagacatggagatgaaagaaa

SEQ ID NO: 414913 - DNA, 86 bp, Artificial Sequence
  ENSG00000149196_23 (sequence is synthesized)
tactcttaacattcttttttattcatttatttaattttatttttttgacacagggcctcactatgttgcacaggctggtcttgaat

SEQ ID NO: 414914 - DNA, 120 bp, Artificial Sequence
  ENSG00000149196_24 (sequence is synthesized)
ccagctttcagcattagactctcttagaactgacactccctataaacaagttaatgtgagaacacttttaatttaaaaatattgagttctaaatgaagtattcagtataatccattaatc

SEQ ID NO: 414915 - DNA, 120 bp, Artificial Sequence
  ENSG00000149196_25 (sequence is synthesized)
tctacttgctgcctactttcaacatctgcatgtgtgtgtgaatattaaatatcacaccaagacattgttcagaggagacagaatagtgagctgagataaatgagaatctctctatggaag

SEQ ID NO: 414916 - DNA, 120 bp, Artificial Sequence
  ENSG00000149196_26 (sequence is synthesized)
tgctgggaacaatcccatttcctgagggaatgggaggatctgtctacttttcttatcctgattcaaatggaatgccagtatgcaactcctaggatttgtcacgaatgggaagccaagtgc

SEQ ID NO: 414917 - DNA, 120 bp, Artificial Sequence
  ENSG00000149196_27 (sequence is synthesized)
agtttgtctcttgaatgactgggagacccctgtggtgatggtggtaattcataatcctggtgagataattttgccctgctcttaatagggaaaaaggacaaacctggaatgattgtgtga

SEQ ID NO: 414918 - DNA, 120 bp, Artificial Sequence
  ENSG00000149201_0 (sequence is synthesized)
actcggtgccggacatcagttcctgcggctcttgctgtgggagctgcccgagagccagagcagtggggagggacggcgagaaccaatgtttaagtttatttaagaaagaagaaaaagagt

SEQ ID NO: 414919 - DNA, 120 bp, Artificial Sequence
  ENSG00000149201_1 (sequence is synthesized)
caagaagttcaagattttcgtcactcttatttttaaggcacatccaaagctccgtggagaaggggctggagggtgggaaaattatttttgtgcacattccatataagaaagaagagaccc

SEQ ID NO: 414920 - DNA, 120 bp, Artificial Sequence
  ENSG00000149201_2 (sequence is synthesized)
atcgaacattcagtacggagtcacctggaaattggagatgttggatacgatcgcccgtgccctgcaggacctgggcaggcaggtgctgcccactctgccctcgctgagccaggaggaagt

SEQ ID NO: 414921 - DNA, 120 bp, Artificial Sequence
  ENSG00000149201_3 (sequence is synthesized)
ctctattatctgggggaatgtatcagaatttgtgagacggcagttaaccctgcacaagggggttcagattccagcatttggaactttcactttcataagacaaaagcttgaggtgggaaa

SEQ ID NO: 414922 - DNA, 120 bp, Artificial Sequence
  ENSG00000149201_4 (sequence is synthesized)
caacaaatttatcttaatccagaggcctgtgtttatcatggtggagaagctagtgcagattcatggactcaaacaaaacaaagtatatactcctggtgaaatcccaattgttccacttaa

SEQ ID NO: 414923 - DNA, 120 bp, Artificial Sequence
  ENSG00000149201_5 (sequence is synthesized)
ttttgtcatgatatccctggagggtccatttaacagagatgtagtggaaggatgtgtgaaggagacgttgctttttttatcgcgttccatttccatgaaacaaaatgtggagtttacatt

SEQ ID NO: 414924 - DNA, 120 bp, Artificial Sequence
  ENSG00000149201_6 (sequence is synthesized)
caaaggaattggggtcctcatgatcagagacagcaaagtgaagatgaggttttataaagacttcctttgtaccatggatggaagtggggctttggcaaaggccctagcaaataggcctgg

SEQ ID NO: 414925 - DNA, 120 bp, Artificial Sequence
  ENSG00000149201_7 (sequence is synthesized)
cactgtggactcggtgttgtctagcagagaggccttgaggaagtggcccagcagtgtgcttgcgtttccaaggattgagctcaaggagatggaaaacaaactgcctatggagacccttgt

SEQ ID NO: 414926 - DNA, 120 bp, Artificial Sequence
  ENSG00000149201_8 (sequence is synthesized)
agaagaatgtggagagaatagagaaaggaagtgcaagttaaaagaccagtcagacaaagaagaaggcaccagagatatctcatcacccaaaagacttcgagatagacaagctttgttccc

SEQ ID NO: 414927 - DNA, 120 bp, Artificial Sequence
  ENSG00000149201_9 (sequence is synthesized)
tgccaaagtgacaaatgtcagcttgctggaaaagtttgaacgaagtgagagtggtgggaagattatgacccctgaaagcttatcatatccaagttgtctgaaacacgacagtgagatgaa

SEQ ID NO: 414928 - DNA, 120 bp, Artificial Sequence
  ENSG00000149201_10 (sequence is synthesized)
aaaggaggagagagatagaagatgagagactcatacagcagtatcagatgttaaaggatcaggaggctctcttcagacaccagatgaaaagtctggctactagagaacagaatcagaaaa

SEQ ID NO: 414929 - DNA, 120 bp, Artificial Sequence
  ENSG00000149201_11 (sequence is synthesized)
atgctgcctataatcttggagttgctgaagctataagaaaccacaagaatgagaaaccggaattttataaatccttcctatttgacaaacggccactcagtcctgcgcttaatgctctta

SEQ ID NO: 414930 - DNA, 120 bp, Artificial Sequence
  ENSG00000149201_12 (sequence is synthesized)
agcaagaggaatattcccggagtctcctgaaacaaatggataacagacaggaaaacgaaataaagcaaagacaatacagagagttgatggaccgcctggaacaagtgcaactcacagagg

SEQ ID NO: 414931 - DNA, 120 bp, Artificial Sequence
  ENSG00000149201_13 (sequence is synthesized)
aacttgctgcgcaaagagcgaaatttttaaaagataagatggaagaaacacagtgttacaagagagctttggatgcacagataaagaacaaaccctctcggctgcccccctttgagccag

SEQ ID NO: 414932 - DNA, 120 bp, Artificial Sequence
  ENSG00000149201_14 (sequence is synthesized)
actcctctgagcccatctttggtaagaatgagggtgaactgatggtggaaaagcaaaagcgagaacaaaattacatgaaacaccagctggaggcagctgctaaccacaagaggaaagcca

SEQ ID NO: 414933 - DNA, 120 bp, Artificial Sequence
  ENSG00000149201_15 (sequence is synthesized)
tcctgcatcaactagtggaccagaggcgggatttgcaaatgcttcagaggacacaaagagagcacttggcagacagaaccgctgagctggagcgagtaaatagagtcaaccaatgcttac

SEQ ID NO: 414934 - DNA, 120 bp, Artificial Sequence
  ENSG00000149201_16 (sequence is synthesized)
aggaggactgggaaaggagtgctgcgatgaagaagcagcgagacctggaggacaaggcttttgaacgggcttcagacaagctgtttctcctagaccagtgtgagaagtatcggcgctgca

SEQ ID NO: 414935 - DNA, 120 bp, Artificial Sequence
  ENSG00000149201_17 (sequence is synthesized)
agcaatgccagaggcgcacctccaacgtgggcgagagcaacctgtggcccctgaacaagttcctgcctggctcccggttgcttgtgtaaaactcaaagtttggctcttcgtttcccgggg

SEQ ID NO: 414936 - DNA, 120 bp, Artificial Sequence
  ENSG00000149201_18 (sequence is synthesized)
aaagtttttatcttttacatgtttgggggtgattgtgaaactgcgtatttttacctcagagaaaaaaatcattgtttaggtttggtgctttcattagattgcttgttaagcccttattga

SEQ ID NO: 414937 - DNA, 120 bp, Artificial Sequence
  ENSG00000149201_19 (sequence is synthesized)
attcactcctgctttcctcccacccccaattatttcctatactagtttctgatggcagtgaaggtgtctgaatggtcctgagggctagaacctgctgcacaggggctgggaatgggatcc

SEQ ID NO: 414938 - DNA, 120 bp, Artificial Sequence
  ENSG00000149201_20 (sequence is synthesized)
agcttcattatggctgctggggtgctgctgacccagccctgctgctgctccatgactttgtgtacaaaacttttttcatctgtaatgaatagtggcaataataaatattttttaagcgcc

SEQ ID NO: 414939 - DNA, 120 bp, Artificial Sequence
  ENSG00000149201_21 (sequence is synthesized)
agaggacattaactgatttttattggaggatcctgacacccagtggtcgttggtacctgtaacacaaagcccttcagagcaggctacatcaacagttacattttgtgaagctccttctag

SEQ ID NO: 414940 - DNA, 120 bp, Artificial Sequence
  ENSG00000149201_22 (sequence is synthesized)
atttcagtgagaactgacagcaaaggtttcagtttagcaagaaatagacacataatcagaaccaggcttaaggtgattcacaacagtagtgatggagtgtttggagaccagtgatagaaa

SEQ ID NO: 414941 - DNA, 120 bp, Artificial Sequence
  ENSG00000149201_23 (sequence is synthesized)
cacaacactgggaatatctccctttgaagacagagattatactgcagtcacttcttcgatgacatggccttcaccaaacattcctgttttattttcttgccttcttcacaatgttaatgt

SEQ ID NO: 414942 - DNA, 120 bp, Artificial Sequence
  ENSG00000149201_24 (sequence is synthesized)
tttctctattttcttttcccttgcttagtcacttgtgtttattttctctttttgtagactttcatttgtatacctatctattttgccttgtaatatgtctgcagtgactggtaggctgag

SEQ ID NO: 414943 - DNA, 120 bp, Artificial Sequence
  ENSG00000149201_25 (sequence is synthesized)
tactggcagctgagaggctggactaaaaggaaagaaacagagtataggaaatccatttgggatgattcttcagataagttaaattagcctcaaaggaaattaatggttttacaggttgaa

SEQ ID NO: 414944 - DNA, 120 bp, Artificial Sequence
  ENSG00000149201_26 (sequence is synthesized)
gttgttaactggaaaaaggtttcaatcctattaaatcaaaccaggattgaagataaaagacctttgatccataaattatttgagagctaggaatttcagtatgcttttacagtgttcatg

SEQ ID NO: 414945 - DNA, 120 bp, Artificial Sequence
  ENSG00000149201_27 (sequence is synthesized)
tcccaaatttggtgcatgctcttccaagtattatggagccaggctgttcttttctctccaggcacttggcagacagaaccgctgagctggagcgagtaaatagagtcaaccaatgcttac

SEQ ID NO: 414946 - DNA, 120 bp, Artificial Sequence
  ENSG00000149201_28 (sequence is synthesized)
tagcaaccgagcgagcctttctcgcgtcccagcaacgcgcccttccctctgccgggcctattctccctggtgcccctcccttcctcgaggctgcagctcacccctcattgggtctctcgt

SEQ ID NO: 414947 - DNA, 120 bp, Artificial Sequence
  ENSG00000149201_29 (sequence is synthesized)
attcctcattggatttttaagctctggacttataagcgcttaacataaacaacaacaagaaaagtatcgtggtagccttgcctatgagcctgcagtttttaatttgtctgagtcctggac

SEQ ID NO: 414948 - DNA, 120 bp, Artificial Sequence
  ENSG00000149201_30 (sequence is synthesized)
caaagtgctgggattacacacatgagccactgtgcctggccgcctatggatttgaattactcttttctttcttaaaatgaaagctaccagaataaaacatcaatttttatttaccagact

SEQ ID NO: 414949 - DNA, 120 bp, Artificial Sequence
  ENSG00000149201_31 (sequence is synthesized)
cttgttcctatttaatacttattaaacatgttttgatgatgttaatccatattactaaagactgcaaaactgtggtccatcttctcttgttcttaactgccagacttgctgcgcaaagag

SEQ ID NO: 414950 - DNA, 120 bp, Artificial Sequence
  ENSG00000149201_32 (sequence is synthesized)
cgaaatttttaaaagataagatggaagaaacacagtgttacaagagagctttggatgcacaggtaaggggacagacaaatattatttttaaaattatgcaatgcatcaataacatcctaa

SEQ ID NO: 414951 - DNA, 120 bp, Artificial Sequence
  ENSG00000149201_33 (sequence is synthesized)
aatatgtgtaagttgttacgaatatttttatgtgttatgcatttggtagtttttgtgccccgcattccttcctgtaagatgctggtattttaccacattacagggttgtgcataaagctt

SEQ ID NO: 414952 - DNA, 120 bp, Artificial Sequence
  ENSG00000149212_0 (sequence is synthesized)
gcactgaggcgctgcggcggcggtggtggcggtggcagcggtggcggctgctcgtcctagcctggcgggggcgggggtctggaagatgggggcgggtggaacaacgggccggtgaggagc

SEQ ID NO: 414953 - DNA, 120 bp, Artificial Sequence
  ENSG00000149212_1 (sequence is synthesized)
agccgccgccgtctccgccgtcgctggggcagctgccgcggtggtcgcctctggcagtgccgctagctttcaggcagtcgcctctcctcccgacatcccgccttgaggaggctgaggcgg

SEQ ID NO: 414954 - DNA, 120 bp, Artificial Sequence
  ENSG00000149212_2 (sequence is synthesized)
cccgacatcccgccttgaggaggctgaggcggaatcgcggctggcggcggggggacggaccggccctgcagtggccgcagtgacagcccggacccggccctccgcccgctctcgcctcgg

SEQ ID NO: 414955 - DNA, 120 bp, Artificial Sequence
  ENSG00000149212_3 (sequence is synthesized)
agcccgtcggccgccgccaactacctgctctgtaccaactgccggaaagtgctgcggaaggataaaagaatcagagtgtctcaacccttgacaagaggaccaagtgcctttattccagag

SEQ ID NO: 414956 - DNA, 120 bp, Artificial Sequence
  ENSG00000149212_4 (sequence is synthesized)
aaggaagttgtccaagcaaacacagtggatgaacgtactaactttcttgtggaagaatactctacatccggtcgtctggacaacatcacacaggtcatgagtttacacactcagtacctg

SEQ ID NO: 414957 - DNA, 120 bp, Artificial Sequence
  ENSG00000149212_5 (sequence is synthesized)
gagtctttcttgcggagccagttttacatgttgcgcatggatggtccccttcctctaccatacaggcactatattgcaataatggctgcagctagacatcagtgttcttacttaataaac

SEQ ID NO: 414958 - DNA, 120 bp, Artificial Sequence
  ENSG00000149212_6 (sequence is synthesized)
atgcatgtggatgaatttttaaagactggaggtattgctgagtggttgaatggtttggaatatgtgccacaaagactgaaaaatcttaatgaaattaataagctgctagcacatcgacct

SEQ ID NO: 414959 - DNA, 120 bp, Artificial Sequence
  ENSG00000149212_7 (sequence is synthesized)
tggctgatcacaaaagagcacattcagaaacttgtcaaaactggagaaaataattggtctctgcctgaactggtacatgctgtggtcctcctggcacattatcatgctttggcaagcttt

SEQ ID NO: 414960 - DNA, 120 bp, Artificial Sequence
  ENSG00000149212_8 (sequence is synthesized)
gtttttggtagtggtatcaatccagagagagatccagaaatctccaatggattcaggctaatatcagtcaacaatttctgcgtttgtgatcttgctaatgacaacaacatagagaatgca

SEQ ID NO: 414961 - DNA, 120 bp, Artificial Sequence
  ENSG00000149212_9 (sequence is synthesized)
tctctttcaggcagcaactttgggattgtggattctctaagtgagctagaggccttaatggaaaggatgaaaagacttcaagaagaaagggaagatgaagaggcgtctcaagaagaaatg

SEQ ID NO: 414962 - DNA, 120 bp, Artificial Sequence
  ENSG00000149212_10 (sequence is synthesized)
agcactcgttttgaaaaggagaagaaagaaagtctttttgtggtctctggagatacttttcattcatttcctcattcagattttgaggatgacatgattataacatctgatgtctctcga

SEQ ID NO: 414963 - DNA, 120 bp, Artificial Sequence
  ENSG00000149212_11 (sequence is synthesized)
tatattgaagaccctggttttgggtatgaagactttgccagacgaggagaagagcatttgccaacattccgagctcaggactatacctgggaaaatcatgggttctccctggtgaacaga

SEQ ID NO: 414964 - DNA, 120 bp, Artificial Sequence
  ENSG00000149212_12 (sequence is synthesized)
ctttattctgacattggacatcttcttgatgaaaagtttcggatggtctacaatctcacatataacactatggccacccatgaggatgttgacacaaccatgctgcgcagagctttattt

SEQ ID NO: 414965 - DNA, 120 bp, Artificial Sequence
  ENSG00000149212_13 (sequence is synthesized)
aactatgttcactgtatgtttggaatcaggtatgatgactatgattatggagaagttaatcaattacttgaaagaagcctgaaggtttacattaagacagtgacctgctatcctgagaga

SEQ ID NO: 414966 - DNA, 120 bp, Artificial Sequence
  ENSG00000149212_14 (sequence is synthesized)
actacaaaacgcatgtatgatagttactggcggcagttcaaacactcagaaaaagttcatgtcaatctacttttaatggaagcacgaatgcaagctgaacttctttatgctcttcgtgcc

SEQ ID NO: 414967 - DNA, 120 bp, Artificial Sequence
  ENSG00000149212_15 (sequence is synthesized)
ataactcggcatttgacctgaagtatcacccaaggaaaatgtcatacatgtgtaaagacctttcacataagataaacattgaagctatttgtgatatagcatcaaaaattattcagttct

SEQ ID NO: 414968 - DNA, 120 bp, Artificial Sequence
  ENSG00000149212_16 (sequence is synthesized)
ctagtgtcaaagtttagccgtttgtttttttttttttgttttttgcggctgtaatgtgcaatgatgtgttttattttccttgatgcttaacattactaacaattgcaaaaataatactga

SEQ ID NO: 414969 - DNA, 120 bp, Artificial Sequence
  ENSG00000149212_17 (sequence is synthesized)
ggagcactactttgcattgtttgtagttggagttttggatactgatcataaatcatgaatctggcgtattaatgcttaacttcagcgcctttgggttgtgtgtatgtgtattttttctcc

SEQ ID NO: 414970 - DNA, 120 bp, Artificial Sequence
  ENSG00000149212_18 (sequence is synthesized)
ccccaccccgcccttttttttttaagaataaggacaagtgcttacaatctgctcaagcaattgtttttcagatattggaattcagcaaagagtgacctctctggccattctaaaacttta

SEQ ID NO: 414971 - DNA, 120 bp, Artificial Sequence
  ENSG00000149212_19 (sequence is synthesized)
atgttgtgtcctaaatctggtggaggaaaagcatgcgctgttgaaccaagctgctcactggacacatatttgtgtccccaggagattatttgtcaggcactgttttttatttgtttgttt

SEQ ID NO: 414972 - DNA, 120 bp, Artificial Sequence
  ENSG00000149212_20 (sequence is synthesized)
gttcatttattgttgttttactgctattggcgataacatgaaatgtgatacagctattgcccataatttaatgtgaaattaatcatgatgaattctatagcatgctactgaaatgccaaa

SEQ ID NO: 414973 - DNA, 120 bp, Artificial Sequence
  ENSG00000149212_21 (sequence is synthesized)
ttcagctattttctttctcttctaaaatggaagtttcagttttccatatcagatgtatataagtggaattataacacaatcctatcactgacagtaatcctcagtcaccttaaataatca

SEQ ID NO: 414974 - DNA, 120 bp, Artificial Sequence
  ENSG00000149212_22 (sequence is synthesized)
gtgctcacagtgctgcttacagttcatttagttggcacatataaacctgtacccacacaagactgaccaaaaattttctttgcacatttttcctttctcatagtttttttctatatttcg

SEQ ID NO: 414975 - DNA, 120 bp, Artificial Sequence
  ENSG00000149212_23 (sequence is synthesized)
ttaagcaaaggaaggttaatatgcctatttttcctgttaggcttttagaaattattttccatgacttttgttcttataataggttagacagtttatttttcaaaggtaaaaattgtgttt

SEQ ID NO: 414976 - DNA, 120 bp, Artificial Sequence
  ENSG00000149212_24 (sequence is synthesized)
ctatgcattaatgtgattgaactacaaaaacagagtgcaatatgttcaaaaaatactcaactaaactttccccctgtcatatcactgcaaaagtgtccttttaaacagagccataaagaa

SEQ ID NO: 414977 - DNA, 120 bp, Artificial Sequence
  ENSG00000149212_25 (sequence is synthesized)
atttttttcaaatttctttattgcacaggcttttttcagttttacctttctgggattgaacaatgttcctttcataatgccaaagcattcccttccccagaaaaatctccttggacaact

SEQ ID NO: 414978 - DNA, 120 bp, Artificial Sequence
  ENSG00000149212_26 (sequence is synthesized)
ggtttaaaaacgttattaagtcataggggaggaataagcggccaaaaagtcacatttttgcattggtttacgttgcttgattagactatcttcagagagcacattatgtgtttatagctt

SEQ ID NO: 414979 - DNA, 120 bp, Artificial Sequence
  ENSG00000149212_27 (sequence is synthesized)
taatttgtattatgtcaatgaaccagtgaagtgcctaaagagatgcttacaactatccagtaggacacaactgcactgctttttaaacactttttggttagttaagggtgacttgaattg

SEQ ID NO: 414980 - DNA, 120 bp, Artificial Sequence
  ENSG00000149212_28 (sequence is synthesized)
tacacatacatgctaatttttgaaaacttatccatttttcatagtaaataatatagataaaattttctgttagagttcccgcaaatatttcattttagacttacttgtgatataagattt

SEQ ID NO: 414981 - DNA, 120 bp, Artificial Sequence
  ENSG00000149212_29 (sequence is synthesized)
aacttttcttttgtgaaagaatcgtgaactagtgtttcatgaaatcattttcctcttccatttatcatcctcctctggtacaatatattgggttgctttcttttagattttgttccagat

SEQ ID NO: 414982 - DNA, 120 bp, Artificial Sequence
  ENSG00000149212_30 (sequence is synthesized)
aggaaaacaaatatgactgtatacttattaacataaggtagttctgcatttttggattccaggatcctgtttgaaatcttccatgtgaggaaaaaattactaatatttttaaagacaggg

SEQ ID NO: 414983 - DNA, 120 bp, Artificial Sequence
  ENSG00000149212_31 (sequence is synthesized)
tggtttatttaaagagattattcagagaacttgtgccatatctcgtctgttttattgcatatgccatatgttaacttttattcaatattacattatgtagatatgtaatacaaagaaaat

SEQ ID NO: 414984 - DNA, 120 bp, Artificial Sequence
  ENSG00000149212_32 (sequence is synthesized)
atttaggagaatggcaaaacacaaatggcaacataaatgtccatttgacttacctaacttcacaactttcaagttgaggatgtcatttattcttgaatttgtttttttactagatgcttt

SEQ ID NO: 414985 - DNA, 120 bp, Artificial Sequence
  ENSG00000149212_33 (sequence is synthesized)
caattaatagccctatatttttgtgcaggcgaactgtataacaggataaaaaatgatttgtatgtattgaaaaggaggagaaattctcacagaacaccatatgagctttagaccaaaagg

SEQ ID NO: 414986 - DNA, 120 bp, Artificial Sequence
  ENSG00000149212_34 (sequence is synthesized)
ggaaacaaggtttaagtaactaaaatggccacttagtttgtgtttatttttttccctggaaatgtaagtagttggagtttaggctatggaaatattagtgcctttaatagatctctttcc

SEQ ID NO: 414987 - DNA, 120 bp, Artificial Sequence
  ENSG00000149212_35 (sequence is synthesized)
ttgcaaagtttctttttagctcagcattgatctatcttatcaataggaaaataagttgacttggaactataaacaaaaacaacaccatatatttatgaacctcagtgaaccagcctagaa

SEQ ID NO: 414988 - DNA, 120 bp, Artificial Sequence
  ENSG00000149212_36 (sequence is synthesized)
aaattgacttctgcaggtgctaaagcacctactaatacgcagcatgcacagcatttcaggttgtgaataccattttacaacgagtttgctgttaactctctttatccaatgcaaacttga

SEQ ID NO: 414989 - DNA, 120 bp, Artificial Sequence
  ENSG00000149212_37 (sequence is synthesized)
aattctgatgcggttttccagggtggtattttttcagagtattgaatttactatttagtaatttatagtatagctttttatattaaaatgtgatatttttaaaagagatatctggttcaa

SEQ ID NO: 414990 - DNA, 120 bp, Artificial Sequence
  ENSG00000149212_38 (sequence is synthesized)
ttggtataatgacgtgattatgcaatatgctgatctacaccttgcgctcacattgtgccaaacttaaatgtgcaagtgtacgtgagaaaagcacatgtgaatgtgaattctttaattctt

SEQ ID NO: 414991 - DNA, 120 bp, Artificial Sequence
  ENSG00000149212_39 (sequence is synthesized)
tccagcttcaatggtaatttataatttctcagatcaccttaagaaatattgagatactctcccacctgaaaataatctgttctttaacccacctgactatgggagtagccaggcaggtgc

SEQ ID NO: 414992 - DNA, 120 bp, Artificial Sequence
  ENSG00000149212_40 (sequence is synthesized)
ctcactggcttcttcagacgaggcttcctcaggtggatatatgactattaggggaaaagaggcttttgagacagcttattacctccttcccctttttgaactaagtacattgtctcagtc

SEQ ID NO: 414993 - DNA, 120 bp, Artificial Sequence
  ENSG00000149212_41 (sequence is synthesized)
ccagtatgaatttgtcccatttggggtatttttaaaataaaagatggctaacatggaatctggggcatagccttggcctttaattatggttgtaagcccaaataatggcagagaaacaca

SEQ ID NO: 414994 - DNA, 120 bp, Artificial Sequence
  ENSG00000149212_42 (sequence is synthesized)
gggctgtttttacaacagaaaactcaatataagttttatataagaatcctataaaatttgaaccagagctcctatttagttgttataatgtctcctaaagatcttaaatgcttctaaaag

SEQ ID NO: 414995 - DNA, 120 bp, Artificial Sequence
  ENSG00000149212_43 (sequence is synthesized)
ctaattattattccagagcaactttttccttttcccccttataaagtttttttttaaatccaaaatcttagatttctgtgccacagcaaaataaaatgatcaacaattaaagatctgtac

SEQ ID NO: 414996 - DNA, 120 bp, Artificial Sequence
  ENSG00000149212_44 (sequence is synthesized)
ttaaaatagtacaccatttttagtggagggagggtgcatgcctatatgatggtaagattcttttgaactctaaggacaattcctcatggaaaaaataaatttcagtgcatattataaaaa

SEQ ID NO: 414997 - DNA, 120 bp, Artificial Sequence
  ENSG00000149212_45 (sequence is synthesized)
tgatttgcactgtgttagcaaaataaggtgttttaggttgtattttaaagacaattctaaatcatttctctggaaagcaagaccttaaattcttctctttaatagaactgcttttatgca

SEQ ID NO: 414998 - DNA, 120 bp, Artificial Sequence
  ENSG00000149212_46 (sequence is synthesized)
aagagatggtcttaacatggactaaacagtacataacaataatgtttgttatgtaaatagtatatcacatttgcttagtagcacaattcaacagcaggctgaaagtcgtggctcctctgc

SEQ ID NO: 414999 - DNA, 120 bp, Artificial Sequence
  ENSG00000149212_47 (sequence is synthesized)
tcagattgagttttaagttacctaatttatgtaatcagaatctattctaggtggccgtcaacgtaaactgtgtttccctattatatccctctggagactgagaatcaaattaaatagtct

SEQ ID NO: 415000 - DNA, 120 bp, Artificial Sequence
  ENSG00000149212_48 (sequence is synthesized)
ttcttcaaagcagtactgtaacatgaatgtatttatctcagtcaacagaacttatatgcccactgtatgtggagcttatttcaatgctaatttggcttagttagcagacctagaatctgc

SEQ ID NO: 415001 - DNA, 120 bp, Artificial Sequence
  ENSG00000149212_49 (sequence is synthesized)
ccaggtgagacctagaacaaaaatagctggggtgaaatggataagagaggtagaggtatatgtcaaggcagagccctatgaggaaggaagagttttcaaagaatatgaggaacatagtgc

SEQ ID NO: 415002 - DNA, 120 bp, Artificial Sequence
  ENSG00000149212_50 (sequence is synthesized)
tgagagtgtggctgccttcagcaccgtacacctaatctagagaaaatatttcccatgtgggaggtcctgtctgcattcagtccacccttttctgcctgcttcttcctccaagtgcctcaa

SEQ ID NO: 415003 - DNA, 120 bp, Artificial Sequence
  ENSG00000149212_51 (sequence is synthesized)
cctctacatgctcactctcctccccttccctcagcccatcttggtctaagcagctttcacaatccaaaccaaacatcaccagccacccgctgataagtcaccagcatttactttcctgag

SEQ ID NO: 415004 - DNA, 120 bp, Artificial Sequence
  ENSG00000149212_52 (sequence is synthesized)
ttactttttctccattcattgagactatggattcatcccaactccttctaaatccctcaaccatccagctatattttggctaacctttgccctagacactctaccagatgttaatgcagt

SEQ ID NO: 415005 - DNA, 120 bp, Artificial Sequence
  ENSG00000149212_53 (sequence is synthesized)
atcaagtgtaaattgtgtcaccctattctgttctacccttttccctgctgccgaaatatcttgctctcctctacctcatccccaaagagcctataaattcagagtatccaaccttttcat

SEQ ID NO: 415006 - DNA, 120 bp, Artificial Sequence
  ENSG00000149212_54 (sequence is synthesized)
ggattcactcactgttgttcagtaatacaacttccatattttaaataaatcataaaagatttttgccttctatcaaagtaggaaactttatatttatacatgatacagaaattgaactat

SEQ ID NO: 415007 - DNA, 120 bp, Artificial Sequence
  ENSG00000149212_55 (sequence is synthesized)
ttctatcgttcagaatttagcatataacaggattttaaagtgattgaattgccatcctaacttggatttgtattaggttatgaatgaatactgttgttagtccaagctatttgaatgtaa

SEQ ID NO: 415008 - DNA, 120 bp, Artificial Sequence
  ENSG00000149212_56 (sequence is synthesized)
agttaaaattctccagcaatccagaatgacttgtaacccttcagtggaatgggaaatttctggtatgcaaatagggtggtgttccagacatttgttttattggtggtgtttgggccttga

SEQ ID NO: 415009 - DNA, 120 bp, Artificial Sequence
  ENSG00000149212_57 (sequence is synthesized)
aacacatttctaatagaatgacatatggcaaagggtatttagatggtcctatgggatcacagaagcccatatgatttaaaatatagataaaataacacaaaattgggtacataagggttt

SEQ ID NO: 415010 - DNA, 120 bp, Artificial Sequence
  ENSG00000149212_58 (sequence is synthesized)
aaccaggctttcctgggttagactaagcctctaacctctgttcctatcctgttcttatgggaggaaaaaaaatgttccatgggatgaaaagaaaatgcattgactttgtagtctttattc

SEQ ID NO: 415011 - DNA, 120 bp, Artificial Sequence
  ENSG00000149212_59 (sequence is synthesized)
tcctagccgcacttcgggtatatccagaaggaagaggaaatgcaaagaggaagaagatgtaatagttcttctctccagctaggtgcacttgaggttgttcataaatgtaaaattatgtca

SEQ ID NO: 415012 - DNA, 120 bp, Artificial Sequence
  ENSG00000149212_60 (sequence is synthesized)
ggtttctaacatgggacactgcacacagttgtctgacctgatgaaccatcccatttgaaagtatagattattattatttcttgtagtatttggttgttttccatctcattcatgaacaac

SEQ ID NO: 415013 - DNA, 120 bp, Artificial Sequence
  ENSG00000149212_61 (sequence is synthesized)
tcaacctgatagtagtatccaataaatgcctttcagggctcaggaatgaattgacatcctagttaagaaatgagacttaataatggagactgaatgaggcggtttgtattaaattatatg

SEQ ID NO: 415014 - DNA, 120 bp, Artificial Sequence
  ENSG00000149212_62 (sequence is synthesized)
ccatgaagtgttcattttagctttaacctaattatgactgtaccaccatgaagtacagaatgaaaaattatatatatgggggggaaacagaatgaatatctgattcttttgaatgcttgt

SEQ ID NO: 415015 - DNA, 120 bp, Artificial Sequence
  ENSG00000149212_63 (sequence is synthesized)
ggaaatctttgagatcgtgcagggcataccacaaaatagcctttagaacagatacccaattttacagttcataggacaacatcaaacattagtaagtctaaataagatgaatagaatttt

SEQ ID NO: 415016 - DNA, 120 bp, Artificial Sequence
  ENSG00000149212_64 (sequence is synthesized)
tgttatgtaaattttgctagaacagtctattttcttgcacccctcaagttaacctcttaaaaaaatgaatgtataatttctaccgaaagaatatcagagagaatctctctggcctatagt

SEQ ID NO: 415017 - DNA, 120 bp, Artificial Sequence
  ENSG00000149212_65 (sequence is synthesized)
gttaaaatattgttcacaaatcctgattagttaagtgcatacattatgaaacttacagaataaaacttattatacatctctttcttaaattaatatctttacacattttcaactggctcc

SEQ ID NO: 415018 - DNA, 120 bp, Artificial Sequence
  ENSG00000149212_66 (sequence is synthesized)
ccaagtctgataaggaaggattaaaagaaaaaagaaatgtattagttgggtggccaaggagtttcctttgtaatgttgagagacttccgctttctgaatttcgctggttctctaaggtaa

SEQ ID NO: 415019 - DNA, 120 bp, Artificial Sequence
  ENSG00000149212_67 (sequence is synthesized)
aagagttaaatagtacccttgttcaccaaggaaagtgatccaaactatatatctagtgcagatatttcctttgcattatttagtcttctctggagagaaaatacagtttccccttcctct

SEQ ID NO: 415020 - DNA, 120 bp, Artificial Sequence
  ENSG00000149212_68 (sequence is synthesized)
ttctcttcacatttactcttttcaacccaaaataagagacatagaaagcaaaccacagccagtttggcatcttctcagtgctactagtataggcacatacacatacacagtctcagcaag

SEQ ID NO: 415021 - DNA, 120 bp, Artificial Sequence
  ENSG00000149212_69 (sequence is synthesized)
gttataaagaaccctgtcaggtccacttgcaacatggccttgctacttggattagctcctttaagcctgaaaataactttcctggtcatggaagaactggacgcatcttttaacttatga

SEQ ID NO: 415022 - DNA, 120 bp, Artificial Sequence
  ENSG00000149212_70 (sequence is synthesized)
aatagaagttgaacttgaaaactctttttaaaaaatcctggttttgcaggacagctacataatgaatgtatatattaagactgtagctgaattgcacatgaaatcagattgccaacttct

SEQ ID NO: 415023 - DNA, 120 bp, Artificial Sequence
  ENSG00000149212_71 (sequence is synthesized)
tgactttcaatgttagacatttatccttaagttgtgagcgatatatgtagcatgctgtgaaatgtctgttatagctctttaattcatcagtattaatacagaattatcatttgcgtttct

SEQ ID NO: 415024 - DNA, 120 bp, Artificial Sequence
  ENSG00000149212_72 (sequence is synthesized)
tggtactttttattcaatgtaatcagaagctgtgatgttttgcctttgtagtcctgtgctttgttactgtaattttttttttttttttacgaagcacgtgactggactaatgtaaggcag

SEQ ID NO: 415025 - DNA, 120 bp, Artificial Sequence
  ENSG00000149212_73 (sequence is synthesized)
atgacgtgatctttaagactgctatatatatcagtctcttactctataaggttttaaattagaataagcttttatcaaatagataattgatgcaatttaggattcacgcaagtttcagtg

SEQ ID NO: 415026 - DNA, 120 bp, Artificial Sequence
  ENSG00000149212_74 (sequence is synthesized)
tcaaatggcggtcttatagtttcaattctgaaaatagcaaacttaataaacagccactttaaacttgttctggcaaaccagaccctgctgtagatatagtctaaggtagttaaccatata

SEQ ID NO: 415027 - DNA, 120 bp, Artificial Sequence
  ENSG00000149212_75 (sequence is synthesized)
agccttttcaactcttaatgccctccacatgaatcagcagttaagaaggttctagaacccatgaaagcttttgtatgtattactaggttttgtttttcttatgtttgctgattttacagt

SEQ ID NO: 415028 - DNA, 120 bp, Artificial Sequence
  ENSG00000149212_76 (sequence is synthesized)
tctgactaaagctgacctaaatggatcagtttatgtgtaatattctagtgctttaatgactctttttttctttggagggagggtaacattatttggacagatgcagaaggaactgttagt

SEQ ID NO: 415029 - DNA, 120 bp, Artificial Sequence
  ENSG00000149212_77 (sequence is synthesized)
gagtcaagacaaacacatctgaaataaaggaactgtgtattaacatgttaacaattcataactgcactttttatgacattttgaaaatctatttataggtacagaacaatgggttttgtt

SEQ ID NO: 415030 - DNA, 120 bp, Artificial Sequence
  ENSG00000149212_78 (sequence is synthesized)
aaactgtatcacatttatacttgcagaaatttatttcattgttattagtaggaattttattggttcaataaaattggcaaaactgaacaccaatcatttgcctactttgtttatactgga

SEQ ID NO: 415031 - DNA, 120 bp, Artificial Sequence
  ENSG00000149212_79 (sequence is synthesized)
agtcctgtggccacggccatggccgggtggggagctgggctccagtgagcacagagctccttgccagtaggcgatgcaagttatctctggggcccggaggacacgatgctggaatgaatc

SEQ ID NO: 415032 - DNA, 120 bp, Artificial Sequence
  ENSG00000149212_80 (sequence is synthesized)
cattcatctttaaatacttaactgcttctactacaatgagtactactgccagtttccactaataatagcagtactcatggctgccatttccagagtactcactagaactcattcttttgg

SEQ ID NO: 415033 - DNA, 120 bp, Artificial Sequence
  ENSG00000149212_81 (sequence is synthesized)
aaaagtgaaatagaaaaacatactactatgcaaatgaccactattacataaagctgtaaaaactagaccagaagtttacctcacatgtacaccattctaaggttgaagtagtcaaagatg

SEQ ID NO: 415034 - DNA, 120 bp, Artificial Sequence
  ENSG00000149212_82 (sequence is synthesized)
gacagggcaacttcagtgttttccatgtggatatgtaaaaatgattctgctaccatctttctcttatttagttctcctcttctatcttaccctcatgctattgctttccctcaggctggt

SEQ ID NO: 415035 - DNA, 120 bp, Artificial Sequence
  ENSG00000149212_83 (sequence is synthesized)
tcatccttgaatgtatttcagattgagttgagagaaactttcagctttgtagttcatactctatcctggataaaatgttatttaaagcagatcagttacttataaagttagatagacata

SEQ ID NO: 415036 - DNA, 120 bp, Artificial Sequence
  ENSG00000149212_84 (sequence is synthesized)
aaacaggtgatgtcataatgcacagtcctgtggccacggccatggccgggtggggagctgggctccagtgagcacagagctccttgccagtaggcgatgcaagttatctctggggcccgg

SEQ ID NO: 415037 - DNA, 120 bp, Artificial Sequence
  ENSG00000149212_85 (sequence is synthesized)
aggacacgagtgaggaccgggcaccaatcaggttctcgctctgcgccggcctttgttctcactcgggagcaggttgcgggcgtctagcatcgggaacccgcattcgactcggacgcgcat

SEQ ID NO: 415038 - DNA, 120 bp, Artificial Sequence
  ENSG00000149212_86 (sequence is synthesized)
tgctagccccttcgggagacctggctcccctacccgtctgtcccgccacactcggtcagcctgcgctttccccagtcaagtctgccttctctccgcagaacgtggacgctaaaaccctga

SEQ ID NO: 415039 - DNA, 120 bp, Artificial Sequence
  ENSG00000149212_87 (sequence is synthesized)
ttttaagctttagaagagtgctggaatgaatccattcatctttaaatacttaactgcttctactacaatgagtactactgccagtttccactaataatagcagtactcatggctgccatt

SEQ ID NO: 415040 - DNA, 120 bp, Artificial Sequence
  ENSG00000149212_88 (sequence is synthesized)
tccagagtactcactaggataaaagaatcagagtgtctcaacccttgacaagaggaccaagtgcctttattccagagaaggaagttgtccaagcaaacacagtggatgaacgtactaact

SEQ ID NO: 415041 - DNA, 80 bp, Artificial Sequence
  ENSG00000149218_0 (sequence is synthesized)
gtagtgcgctccccgcccagcctgcagagctcgcgccgcggcagcccagccgctcggccccgccgcgctcgcagaggccg

SEQ ID NO: 415042 - DNA, 120 bp, Artificial Sequence
  ENSG00000149218_1 (sequence is synthesized)
cgccctggctgggctgctggaaggccggctcgtgggcgaggaggaagccggctttggcgaatgtgacaagttcttctacgccgggaccccgcctgcggggctggcggccgattcccacgt

SEQ ID NO: 415043 - DNA, 120 bp, Artificial Sequence
  ENSG00000149218_2 (sequence is synthesized)
gaagatctgtcagcgcgcggagggtgctgagcgcttcgccaccctctacagcacccgggaccgcatccccgtgtactccgcgttccgcgccccgcgccctgcgcccggcggcgccgagca

SEQ ID NO: 415044 - DNA, 120 bp, Artificial Sequence
  ENSG00000149218_3 (sequence is synthesized)
gcgatggctggtggagccgcagatcgatgaccccaacagcaaccttgaggaggcgattaatgaggcagaggccatcacctctgtgaacagcctgggaagcaagcaagccttgaatacaga

SEQ ID NO: 415045 - DNA, 120 bp, Artificial Sequence
  ENSG00000149218_4 (sequence is synthesized)
ttaccttgattctgattaccaaagaggacagctttacccattctcccttagcagtgatgtccaggtggccacatttactctcacaaattcagccccaatgactcagtccttccaggaacg

SEQ ID NO: 415046 - DNA, 120 bp, Artificial Sequence
  ENSG00000149218_5 (sequence is synthesized)
gtggtatgtgaatctccacagcctaatggaccgggctttgaccccacagtgtggcagtggggaagacctatatatcctcacaggcacagtgccctcagactacagagttaaagacaaagt

SEQ ID NO: 415047 - DNA, 120 bp, Artificial Sequence
  ENSG00000149218_6 (sequence is synthesized)
ggcagtccctgagtttgtttggctggcagcctgttgtgctgtccctggaggaggctgggccatgggctttgtcaagcacacccgggacagtgacatcatagaagatgtgatggtaaaaga

SEQ ID NO: 415048 - DNA, 120 bp, Artificial Sequence
  ENSG00000149218_7 (sequence is synthesized)
tcttcagaaactgcttccatttaaccctcagctgtttcagaacaactgtggtgaaactgagcaagacacagagaaaatgaaaaaaatcctggaagtggttaaccaaatccaggatgaaga

SEQ ID NO: 415049 - DNA, 120 bp, Artificial Sequence
  ENSG00000149218_8 (sequence is synthesized)
acgaatggtacaatctcaaaagagttctagtcccctttctagcaccaggagcaagaggtctactctgttgcctccagaggcatctgagggaagtagtagctttttgggaaaactcatggg

SEQ ID NO: 415050 - DNA, 120 bp, Artificial Sequence
  ENSG00000149218_9 (sequence is synthesized)
cttcattgctaccccattcatcaagctttttcaattaatttattaccttgtggtagcaatcctgaagaacattgtctatttcctgtggtgtgttaccaagcaggtgattaatggcataga

SEQ ID NO: 415051 - DNA, 120 bp, Artificial Sequence
  ENSG00000149218_10 (sequence is synthesized)
aagttgcctttaccgcctgggctcagccaccatctcatacttcatggccattggggaagagttggtgagcattccctggaaggtgctcaaggtcgtggccaaagtcatcagggctctcct

SEQ ID NO: 415052 - DNA, 120 bp, Artificial Sequence
  ENSG00000149218_11 (sequence is synthesized)
ccggatcctttgttgtctgctgaaggccatttgccgagttctgagcatccctgtccgtgtccttgtggatgtggccactttccctgtgtacaccatgggcgctattccaattgtttgcaa

SEQ ID NO: 415053 - DNA, 120 bp, Artificial Sequence
  ENSG00000149218_12 (sequence is synthesized)
ggacattgcactgggccttggtggcactgtctcactgctctttgacactgcttttggtaccctgggtggcctatttcaggtggtttttagtgtctgcaagcggattggctacaaggttac

SEQ ID NO: 415054 - DNA, 120 bp, Artificial Sequence
  ENSG00000149218_13 (sequence is synthesized)
ttttgacaattctggggagttataaactcaaaaaactaatagtatccagtcacagtgaatttgaaagctggaatagtttgtctttacaatgggtttctgttcactgtcagttatcattat

SEQ ID NO: 415055 - DNA, 120 bp, Artificial Sequence
  ENSG00000149218_14 (sequence is synthesized)
attttggcctttggtggggatgtctgcttgtttttgcaaaagaagatggcagaatttagacttgacagaggagaaatgctcagggtgagattaggtgtagtaatctgctgtttacctcca

SEQ ID NO: 415056 - DNA, 120 bp, Artificial Sequence
  ENSG00000149218_15 (sequence is synthesized)
gttatatgtgcaaactcccaagccactaataacttcagttatgcactctaacacagacgaccacctgaaatgcactggtatttatttctgataattaaaaattacaggggagggaagaac

SEQ ID NO: 415057 - DNA, 120 bp, Artificial Sequence
  ENSG00000149218_16 (sequence is synthesized)
tagaaaaagaacaactttagaccaaaggtgtctgagaaaaggagaaagggagcttgttcttcccattgctctttgtgatttaaggcaaaacagattaaaaaaaaaatctgcagccaattt

SEQ ID NO: 415058 - DNA, 120 bp, Artificial Sequence
  ENSG00000149218_17 (sequence is synthesized)
cttggcatttgcttctctttctcctcaactcgactgaccttggtggaatgcagataatgcctctttgttgaaataactttgtgggaatgtacaattttctatatctcttagctttccgtg

SEQ ID NO: 415059 - DNA, 120 bp, Artificial Sequence
  ENSG00000149218_18 (sequence is synthesized)
gttctcaaggatatgtacagttttcattttcctccaaagttgaattttgctacatttttcttttaggtaatgataagcattttttaaaaaatcatttttaggtaatggtaagcattttat

SEQ ID NO: 415060 - DNA, 120 bp, Artificial Sequence
  ENSG00000149218_19 (sequence is synthesized)
ccggtggaaagaagagaagagaaggtggacagccctgctcttagtaggtgctgcagatccaaggacatcttttgtccagcttggattaacttgacgtgtatccctgcctgacaaggttga

SEQ ID NO: 415061 - DNA, 120 bp, Artificial Sequence
  ENSG00000149218_20 (sequence is synthesized)
actgaaagatctatatgttaagctaacatgaaaattcatattctgcaacatagtagatttttctaatgcatgaaataagtacccagcacagtaaaaatactctgacttatgtccctaaat

SEQ ID NO: 415062 - DNA, 120 bp, Artificial Sequence
  ENSG00000149218_21 (sequence is synthesized)
aaatggttgttttgatacaactatatagaaaagagccacaaaataaagataaaagttattgtggccatctctgaaaaaaatatataaaatatttaagaataattatatcttaggaaatta

SEQ ID NO: 415063 - DNA, 120 bp, Artificial Sequence
  ENSG00000149218_22 (sequence is synthesized)
tacagtgtgtttgaggctacaaacataactcccccattaatacaaattaaatgtgagagctcattctcaaaatttttttgatcaagcacttgtcattttaaatcttgcactaaaaaatgg

SEQ ID NO: 415064 - DNA, 120 bp, Artificial Sequence
  ENSG00000149218_23 (sequence is synthesized)
taacaagagggaccaaactttgcttcccacaattgggatggaatcacctggatttttctgaatgttttaaagaattgctgagaggtagaaacagccaagtatgaaatactgatcttgggg

SEQ ID NO: 415065 - DNA, 120 bp, Artificial Sequence
  ENSG00000149218_24 (sequence is synthesized)
ctaccgcccaggatcaatcagaaagttatatgcaaaaattcggggtcccaacaaggagagaacaatatgtcaaccatttgcatggggtcgatggatgagaaacatgagcgtagcaagagt

SEQ ID NO: 415066 - DNA, 120 bp, Artificial Sequence
  ENSG00000149218_25 (sequence is synthesized)
tacattttgcagaaaaatagcggaggcacacccagagtagaacagcagccagcaagctgccatcctgatcaatttgtgatgcaaggttagggagtatgagcaccgcatgggtccatgcta

SEQ ID NO: 415067 - DNA, 120 bp, Artificial Sequence
  ENSG00000149218_26 (sequence is synthesized)
gggagatgtgcaccaggcttagctaagaaacttaaagcagtattttaccaactcttgtcttagggagcataaagtttggatgtccctttatttcagcagtgtgaaggtaaatggaagggt

SEQ ID NO: 415068 - DNA, 120 bp, Artificial Sequence
  ENSG00000149218_27 (sequence is synthesized)
gagggtttgacttggtactgattggtcaagaatcctgctggataaagaaaaggaattttagaagtgaccagagggacagtccagccaaactattatttgataaggaacccaaggccctgg

SEQ ID NO: 415069 - DNA, 120 bp, Artificial Sequence
  ENSG00000149218_28 (sequence is synthesized)
gaggcaacaggctagcccttagtttcatggctagctgagagcagattaggagccaacgttgtttgcacatgtcccatcacacctgagatgtcagacatgggaagttcgtgctattattca

SEQ ID NO: 415070 - DNA, 120 bp, Artificial Sequence
  ENSG00000149218_29 (sequence is synthesized)
gttgcctctctggaccatggcaagatttcctcattcatcaaacagactccaggccctgacaaagcagttggatttggcatgtgtgatgaaaacaattagccatccatgtacaacattatg

SEQ ID NO: 415071 - DNA, 120 bp, Artificial Sequence
  ENSG00000149218_30 (sequence is synthesized)
cttactgcatcccatggaaacttaattccctcctagcacatatttgcatactgaaaggtccgaaaagggcatccacggcagcttgagccccttagcaccatgtaaggagcacagcatcca

SEQ ID NO: 415072 - DNA, 120 bp, Artificial Sequence
  ENSG00000149218_31 (sequence is synthesized)
aacggcttcttgagaaccattggggaatgtctttctttttcacatccaattgtttagtgtctatttattcttgggtggccagttttgaaacctaaaaagggacaataaagcaaaaagtat

SEQ ID NO: 415073 - DNA, 120 bp, Artificial Sequence
  ENSG00000149218_32 (sequence is synthesized)
cagtaaggataggtggctgagacccactgccctgagctactagtgtggctgtgcctgtgggtctctagaaccatctgcattggacgtgaagccacagcaggtggctggactgctggcctg

SEQ ID NO: 415074 - DNA, 120 bp, Artificial Sequence
  ENSG00000149218_33 (sequence is synthesized)
ttcctaatgagctacgctgggctttgaggtagaggttggggtttatgaaccccaactctggcttaaagatcttgctgtggctctgttatgttctgaggccttgggattagcctcttcctc

SEQ ID NO: 415075 - DNA, 120 bp, Artificial Sequence
  ENSG00000149218_34 (sequence is synthesized)
attatggagctgattttctagtctgtggatcagctatgcctttggacacttctcttttccattgtgccttttgaatgttgtcttctcactcagcatcagcacttcgatctaaatgcagac

SEQ ID NO: 415076 - DNA, 120 bp, Artificial Sequence
  ENSG00000149218_35 (sequence is synthesized)
taggtagttgggaggaggaaccaaagtgaaccatccttcatttattcagtcattcgttcatctgtcaaacacgtatttggacatcaaggttgcagagatgaacaatgcatggatttcatc

SEQ ID NO: 415077 - DNA, 120 bp, Artificial Sequence
  ENSG00000149218_36 (sequence is synthesized)
tttgaggagttcaaaacctagtggagagaacacatggtacaatcgtaacacatgaaggacaagtaagtgctgcagtaaaggtactaataacatgttccttggaacagaggaagaaaaacc

SEQ ID NO: 415078 - DNA, 120 bp, Artificial Sequence
  ENSG00000149218_37 (sequence is synthesized)
acgaaaccatggaaattagggaagcctttacagagggtgtgacaaaactcaatttgacattttcaagctatgtacaatgatgtgcaccttgcagatgctcaataaagtaattactgacaa

SEQ ID NO: 415079 - DNA, 120 bp, Artificial Sequence
  ENSG00000149231_0 (sequence is synthesized)
ggctcactggggactcctttaaattttgcaattggtgttattaataagatgataagagggaagtctgcaaatactcttttcttgcctggtggataataatttacagaagtttctggccta

SEQ ID NO: 415080 - DNA, 120 bp, Artificial Sequence
  ENSG00000149231_1 (sequence is synthesized)
actcgtgcagtaaaattcggttacataattttttaaaaaagcatatttgtaaactctaaaccattttaatcgttatttttctgaaactaaaatacagcatgaatgagagataaaaataat

SEQ ID NO: 415081 - DNA, 120 bp, Artificial Sequence
  ENSG00000149231_2 (sequence is synthesized)
gatttttaaaggcttaatttttactatcttgtacaaatgtgatattggcagccgtcattgtgtggcactggacggggaatcaagagacccggtttctaatccctgctctgtcactaacaa

SEQ ID NO: 415082 - DNA, 120 bp, Artificial Sequence
  ENSG00000149231_3 (sequence is synthesized)
gctgcgtgatcttcggaaaaaagtaatcctcttggaaagctggaaacatagtccgaagcttaagtgaaaatgatacatgttagaagacatgaaacaaggagaaattctaagagtcacgtg

SEQ ID NO: 415083 - DNA, 120 bp, Artificial Sequence
  ENSG00000149231_4 (sequence is synthesized)
cctgagcagaaatctcgagttgattggaggcgaactaaaagaagtagtatctcacaattacttgatagtgatgaagagcttgatagtgaagaatttgatagtgatgaagagcttgatagt

SEQ ID NO: 415084 - DNA, 120 bp, Artificial Sequence
  ENSG00000149231_5 (sequence is synthesized)
gatgaaagttttgaaaatgatgaagagcttgatagtaacaagggacctgattgtaataaaacaccaggaagtgaaagagagctcaacttaagtaaaattcaaagtgaaggaaatgacagt

SEQ ID NO: 415085 - DNA, 120 bp, Artificial Sequence
  ENSG00000149231_6 (sequence is synthesized)
aagtgtctcattaactctggcaacggttcaacatatgaagaagaaacgaacaaaatcaaacataggaatattgacttacaagatcaggaaaaacatttaagtcaagaggataatgatctc

SEQ ID NO: 415086 - DNA, 120 bp, Artificial Sequence
  ENSG00000149231_7 (sequence is synthesized)
aacaaacaaactggacaaataatagaggatgatcaggaaaaacatttaagtcaagaggataatgatctcaacaaacaaactggacaaataatagaggatgatttagaagaagaagacatc

SEQ ID NO: 415087 - DNA, 120 bp, Artificial Sequence
  ENSG00000149231_8 (sequence is synthesized)
aagcgaggaaaaagaaaaaggctatcctctgtgatgtgtgacagtgatgagagtgatgacagcgatatcctagttagaaaagtaggtgttaaacgtccccgtagagtggttgaagatgaa

SEQ ID NO: 415088 - DNA, 120 bp, Artificial Sequence
  ENSG00000149231_9 (sequence is synthesized)
ggttcttcagtggaaatggagcaaaagactcctgaaaaaacattagctgcacaaaagcgagaaaaacttcagaagctcaaagaactctcaaaacaaagatctcgtcagagacgcagtagt

SEQ ID NO: 415089 - DNA, 120 bp, Artificial Sequence
  ENSG00000149231_10 (sequence is synthesized)
ggtagagattttgaggactctgaaaaggaatcttgcccaagcagtgatgaagttgatgaggaggaagaagaggataattatgaatctgatgaagatggagatgattatattatcgatgac

SEQ ID NO: 415090 - DNA, 120 bp, Artificial Sequence
  ENSG00000149231_11 (sequence is synthesized)
tttgtagtgcaagatgaggagggtgatgaagagaataaaaaccaacaaggagaaaaattgactacatcacaactgaaattagtaaaacagaattctctttattcttttagtgaccactat

SEQ ID NO: 415091 - DNA, 120 bp, Artificial Sequence
  ENSG00000149231_12 (sequence is synthesized)
gaacattatatgatggcacaaggcaaaaatcatatgcaaaagatatgctaacatctcttcattatttggataaccgctttgttcagcctcgtctagagagcttggtatctagaagtcgtt

SEQ ID NO: 415092 - DNA, 120 bp, Artificial Sequence
  ENSG00000149231_13 (sequence is synthesized)
ggaaagagcaatataaggagcgagtagaaaattattctaatgtaagtattcatttgaagaatcctgaaaactgttcctgccaggcttgtggactgcatcgctactgtaaatattcagtgc

SEQ ID NO: 415093 - DNA, 120 bp, Artificial Sequence
  ENSG00000149231_14 (sequence is synthesized)
atttatcaggagagttgtataacaccaggaccatgcaaatagataatttcatgtcacatgataaacaggtgttcactgttggcagaatttgtgccagccgtaccagaatttatcataaac

SEQ ID NO: 415094 - DNA, 120 bp, Artificial Sequence
  ENSG00000149231_15 (sequence is synthesized)
tgaaacattttaaattcaaactataccaggaatgttgcaccattgcaatgacagaagaagttgaagatgaacaagttaaagaaacagtggaaagaattttcaggcggtcaaaagaaaatg

SEQ ID NO: 415095 - DNA, 120 bp, Artificial Sequence
  ENSG00000149231_16 (sequence is synthesized)
gctggattaaggagaaatatggtcaacttgaagaatatctcaattttgcggattactttcaagaagagaagtttgagttgtaacacatttccatcagagaagattttttaaattcctgta

SEQ ID NO: 415096 - DNA, 120 bp, Artificial Sequence
  ENSG00000149231_17 (sequence is synthesized)
aatgtgaagatcatgattcttgtttttctgtatcatgtgacatgtttgtacattttatctatatcttcatggcaaaatattttgtttaaaacatgattatcttaattcctgtgaagtggc

SEQ ID NO: 415097 - DNA, 120 bp, Artificial Sequence
  ENSG00000149231_18 (sequence is synthesized)
actctacactctaattaaacttttatctgatgtacataaaagcattatcttaatttttaagtctgtaaatatattttaaagttatataataatggctttataacagatgactgtcaagtg

SEQ ID NO: 415098 - DNA, 120 bp, Artificial Sequence
  ENSG00000149231_19 (sequence is synthesized)
aatgagctgttgatatcctgtcagtttagtcaaaatatattgtatcttaaaaatgtatttagactaacgtctacatgtatttttacggaattcctgtccagatctgtttattcttttaca

SEQ ID NO: 415099 - DNA, 120 bp, Artificial Sequence
  ENSG00000149231_20 (sequence is synthesized)
gtattaaatgattttcactaatatattttttactgctatcatctaaatcagtgggccatggaagaaacctcatatatcattcagttcaatcccattgcttcagaatcagatcatagcata

SEQ ID NO: 415100 - DNA, 120 bp, Artificial Sequence
  ENSG00000149231_21 (sequence is synthesized)
tctattctaagtagaggaatgcttttttccttttcttgaaagtttctctttcaaatagatttcaggcctctagagtctttcaaccctcacattcaggaataattttatgtaaattttcat

SEQ ID NO: 415101 - DNA, 120 bp, Artificial Sequence
  ENSG00000149231_22 (sequence is synthesized)
tcatgctttataatgttcttacttttttctattcaattttgtctatatattgatgattaagatgtattttatttatttttatccatagctttttccatataagtatgtatcttagggtca

SEQ ID NO: 415102 - DNA, 120 bp, Artificial Sequence
  ENSG00000149231_23 (sequence is synthesized)
tgctgaaagagacaaactcagccaaaaacacttggaaagcatattttggtatctgcattgctttgcatatctaaattttcccataaagtaataaagtaaaatggttgcagagtgaacaaa

SEQ ID NO: 415103 - DNA, 120 bp, Artificial Sequence
  ENSG00000149231_24 (sequence is synthesized)
cagcacaacatacaacgtaattcagagtagatgttcatataattatttcatgggcattcagtaaattatttgttaaattaatgttctaccatcttcactcagatatttcatgtgattttg

SEQ ID NO: 415104 - DNA, 120 bp, Artificial Sequence
  ENSG00000149231_25 (sequence is synthesized)
tgtttgtggaccattaaataaagccaaataaatataatttataccataaatgcattcattgctctaatctggttatcactgttatattcctaacaactttattttatagaagcttaagtg

SEQ ID NO: 415105 - DNA, 120 bp, Artificial Sequence
  ENSG00000149231_26 (sequence is synthesized)
ggggaggagcatcgcttgtcctgagctggttgccggggcaggggcggaggcggaggcagaggtggaggcgctttgaaagccgtcattgtgtggcactggacggggaatcaagagacccgg

SEQ ID NO: 415106 - DNA, 120 bp, Artificial Sequence
  ENSG00000149231_27 (sequence is synthesized)
atttttgtaattaccttcagaattcgcagcacattttttgaagatttttaatggtagttaattctcatcttcttaagttggatttcatttctgcaagctgctaacaggtccttataaccg

SEQ ID NO: 415107 - DNA, 120 bp, Artificial Sequence
  ENSG00000149231_28 (sequence is synthesized)
agacaagtgaatgaagtgggtgttaaagtcactgtttgggataaaaaatgaagtgtgattattttcatatttttagattttttatagtgtgtggtttatagaaagactccaggaatattc

SEQ ID NO: 415108 - DNA, 120 bp, Artificial Sequence
  ENSG00000149231_29 (sequence is synthesized)
tgtgctgtggtggaaatattggaataatcagcctcataaggtgatttctttggtggggatagctgtcagttcaatatatacctctaacatgtagtttgaggtcggtctcattacattgtc

SEQ ID NO: 415109 - DNA, 120 bp, Artificial Sequence
  ENSG00000149231_30 (sequence is synthesized)
atatttctattccctaacaaccacagaactacatatgttattttttctagttatcttacgtgtcactaattgttcttttaatatatacttgtgataattttaatggaattcattcttttc

SEQ ID NO: 415110 - DNA, 120 bp, Artificial Sequence
  ENSG00000149231_31 (sequence is synthesized)
taaatgataaactgacagcttttgttttccttcccaatactatgctctgctttgccgtggaacttacttgttttattcacttaactacattattggattgttagttaagttttctattgg

SEQ ID NO: 415111 - DNA, 120 bp, Artificial Sequence
  ENSG00000149231_32 (sequence is synthesized)
ttatattgtgtatttaactttgaggggaaagccactcccattttactaaggtataaagaggctacaatcttagtggatatattatctctcaatttttcactgctgtcttctttatgtcat

SEQ ID NO: 415112 - DNA, 120 bp, Artificial Sequence
  ENSG00000149231_33 (sequence is synthesized)
ttgttactttataactttcttcgtgtaaattgatcttttatactttatatcatttctctattcagaatcctttgcctacagggtgagtcatcctggtaatcccattcagttttctattct

SEQ ID NO: 415113 - DNA, 120 bp, Artificial Sequence
  ENSG00000149231_34 (sequence is synthesized)
tttctccttttttccagcataaaactcttttttatacattttaagccatgcttatttactgaacataccatcttctttcttaaagccagagtttgcccttaccatattacttgcctgaca

SEQ ID NO: 415114 - DNA, 120 bp, Artificial Sequence
  ENSG00000149231_35 (sequence is synthesized)
tccctttttctttcgttctttctgttcaaatacaatgaatccttcagaatgctattagatcacatctgttcaagataaagtgaagcacttgccttactgatctccctgcatctttccact

SEQ ID NO: 415115 - DNA, 120 bp, Artificial Sequence
  ENSG00000149231_36 (sequence is synthesized)
ttgcagttatttatgttattcatttgatactaaatattaccttgaaattttcttaattattatatgttttagatattttagttctacatatagataataatcttctgaaggacagcacca

SEQ ID NO: 415116 - DNA, 120 bp, Artificial Sequence
  ENSG00000149231_37 (sequence is synthesized)
gccggggcaggggcggaggcggaggcagaggtggaggcgctttgaaagagctcttttggggtctgggggtttccgtcgtcctgcgcgcgtcatcgcgaagcttggcctgagggtccggtt

SEQ ID NO: 415117 - DNA, 120 bp, Artificial Sequence
  ENSG00000149231_38 (sequence is synthesized)
tcctagctactgtgcccctccctcctggaggcagagtgacggactagtgggctagcgggcgctgggttcctgcgtcccgccaaagagccgtcattgtgtggcactggacggggaatcaag

SEQ ID NO: 415118 - DNA, 120 bp, Artificial Sequence
  ENSG00000149231_39 (sequence is synthesized)
gggcaggggcggaggcggaggcagaggtggaggcgctttgaaaggtgagagcgcgagggcggtgcggggctgtctcccggctgggactcgctcgcgctcccggtgctaatggtttatgag

SEQ ID NO: 415119 - DNA, 120 bp, Artificial Sequence
  ENSG00000149231_40 (sequence is synthesized)
aggggcgggggaagccgtgcctcctcgcggactaagagaaaaattcccgcgggcgctctttgggtgggccggagaacgcccctcagccctttgcgcctctaaccctcctcagctgagctg

SEQ ID NO: 415120 - DNA, 120 bp, Artificial Sequence
  ENSG00000149231_41 (sequence is synthesized)
cagtgggcgcggtgcccgttatttccgccttggggaggtgcttggaactgatgtagggagctcggttggtgatttctcgggtttctggcctttccagacccttgtaattgttttctcggt

SEQ ID NO: 415121 - DNA, 120 bp, Artificial Sequence
  ENSG00000149231_42 (sequence is synthesized)
ctgcattaaccttcattgttaacggattttaatgaataatatagttatcccggataccatgctggcaggatccactttgcgaaattgtggactgttggactgtgattctaagtgggggaa

SEQ ID NO: 415122 - DNA, 120 bp, Artificial Sequence
  ENSG00000149231_43 (sequence is synthesized)
ataggctttcctctctttatgtttattttcttatatcctatttctgtcatgttctgtcttgttttcctgccaatagaagaactatgataaatttattcatagcagtgtgataagaacttg

SEQ ID NO: 415123 - DNA, 120 bp, Artificial Sequence
  ENSG00000149231_44 (sequence is synthesized)
atcttaatcatacactgtagccctcaaatcgtgtattatgctggcttgtttttggtgtccctagtaatttcatcagattgtgagctccttgggagcagagaccatgtttatttgaaatgg

SEQ ID NO: 415124 - DNA, 120 bp, Artificial Sequence
  ENSG00000149231_45 (sequence is synthesized)
tggcagcacagttcctagcaggtgcttgcattttggtagatattcaataattatttttcggcttattaatctttgctctccaaactgccatataaaagaaaacatcgaagaggagtgatg

SEQ ID NO: 415125 - DNA, 120 bp, Artificial Sequence
  ENSG00000149231_46 (sequence is synthesized)
ttttacacccaagaatggatccctcctggtagaatttcaaataatgacctggggttccactgcctttcaaatctgtaaagtgttaactaccacctgcattgtttatacagcaagtaggtg

SEQ ID NO: 415126 - DNA, 120 bp, Artificial Sequence
  ENSG00000149231_47 (sequence is synthesized)
atttctagaatgaatcttttcttgagtatgaattaacctcaaagtttagaaggaactatatttcttctgatgagaaagtcaaatggcatcatcaaagtacttttagctatagagttactg

SEQ ID NO: 415127 - DNA, 120 bp, Artificial Sequence
  ENSG00000149231_48 (sequence is synthesized)
tgttagagaaagaacacaagcaatatggattattgtctttaatatatattctttggcagataacatagctatgtatgtgcatcttatattaaccatgaaacacaaagatgtgatagtatt

SEQ ID NO: 415128 - DNA, 120 bp, Artificial Sequence
  ENSG00000149231_49 (sequence is synthesized)
gatcatcttcattcacttatttaatgctttctgtttggagtctctgtttttctctttgcttaaaggtaaggtatcattacagaagctcgataaaattctcatttcaggaaattaagtgta

SEQ ID NO: 415129 - DNA, 120 bp, Artificial Sequence
  ENSG00000149231_50 (sequence is synthesized)
tattcaacatatacagaagtaacattcatttgcatggattctcttttgagtagattctgaagaccaagaggtatcttacccatcaaactagctttccttcacatttctcttccgaggttc

SEQ ID NO: 415130 - DNA, 120 bp, Artificial Sequence
  ENSG00000149231_51 (sequence is synthesized)
actcaccttttccctccgttatcattcttcccttcccagctaatatagtaaagctacctacaatttaaaaagaagagccaaacatattcaaagtgtctttccttttcagtaacagaattt

SEQ ID NO: 415131 - DNA, 120 bp, Artificial Sequence
  ENSG00000149231_52 (sequence is synthesized)
tttaccttactgatataaatggtcattttgaaatatgagagaccctggcaatttggcagttggtccaatgaaacctgatttattttgtttaaataaaagatgctgcctcaggcattcaaa

SEQ ID NO: 415132 - DNA, 120 bp, Artificial Sequence
  ENSG00000149231_53 (sequence is synthesized)
cataaaaatagatatcttccttctaggatcattgtcaggatttaaaaatcaatgtgaaaatgcactaaaaacttaaagtttcttttatggcttaactgtgcagtcataagtttttaatag

SEQ ID NO: 415133 - DNA, 120 bp, Artificial Sequence
  ENSG00000149231_54 (sequence is synthesized)
tgtgattcttaatcatttccaccattgtcataggaatcacctgtttcatgataaataactgacattctgggcatgttatagttttgtaagataatcatctagtgtatatgaatttgcttt

SEQ ID NO: 415134 - DNA, 120 bp, Artificial Sequence
  ENSG00000149231_55 (sequence is synthesized)
tgggtactaataaaaatcatcgttaactttaatgttctttactgtccatatttgctttagtgtatctactgcaaccatatttgtcattgttttcataaatgttttttcattatttctccc

SEQ ID NO: 415135 - DNA, 120 bp, Artificial Sequence
  ENSG00000149231_56 (sequence is synthesized)
aattcaaacaggtttattagaaagccatgctttgttattacaatgtgatatactacacgtgcacatatgcacacttagcttacgcaaatttatgtgtttacaaatacttttttgtactat

SEQ ID NO: 415136 - DNA, 120 bp, Artificial Sequence
  ENSG00000149231_57 (sequence is synthesized)
acagcttaaaaatgtaagatgcctagttcgtgtggtgctaaaccaaagaaacagtaagctgcttaaaacctggaggagaaactgggtggacgtattgtaacgcagtatagtgtacacaaa

SEQ ID NO: 415137 - DNA, 120 bp, Artificial Sequence
  ENSG00000149231_58 (sequence is synthesized)
accatactttaatatagagatttttttaaagggtaattttgactacacacaattttcatctttgctgattttaatataagccttttgtaagatgcaacccaagggtaatttcaaatagca

SEQ ID NO: 415138 - DNA, 120 bp, Artificial Sequence
  ENSG00000149231_59 (sequence is synthesized)
agcagactgccctgttgaccagaatttgttagattgctattacaatgctgattatattttatagcaattactgacataaggttatactttgggcaatggctcatgcctgtaatcccagca

SEQ ID NO: 415139 - DNA, 120 bp, Artificial Sequence
  ENSG00000149231_60 (sequence is synthesized)
aaggtgggaggatcacttgaggtcaggagatcaggacatagtgagacctccatctctacaaaaaatttaaaaatcgaaacatatcgcttgagccccaggagttcaaggctgtagtaatct

SEQ ID NO: 415140 - DNA, 120 bp, Artificial Sequence
  ENSG00000149231_61 (sequence is synthesized)
gccactgcactccagcctggacaacaggacaagacctatctcttaaaaaaataaaagttatatttcatcctacacgctataatttctgctgtataattttggcagcccccgttctgattt

SEQ ID NO: 415141 - DNA, 120 bp, Artificial Sequence
  ENSG00000149231_62 (sequence is synthesized)
ccgttctgattttacatgaggtgttaaccattatacagaaagtcttattgccgtataaacataccagaatttgtacaattaaatgagctgtatcctctcttccacaatctataggaaaaa

SEQ ID NO: 415142 - DNA, 120 bp, Artificial Sequence
  ENSG00000149231_63 (sequence is synthesized)
gggacttcccttggtccccggaagggggggaggagcatcgcttgtcctgagctggttgccggggcaggggcggaggcggaggcagaggtggaggcgctttgaaagaaaacatcgaagagg

SEQ ID NO: 415143 - DNA, 120 bp, Artificial Sequence
  ENSG00000149231_64 (sequence is synthesized)
agttcttgtgacctgagagtgaagaagcacctggtgccagtctgaggaaaggatctcggctgccagttctaatacacccacatcctcttcttgaggacatgggactgagcagtgagcact

SEQ ID NO: 415144 - DNA, 120 bp, Artificial Sequence
  ENSG00000149231_65 (sequence is synthesized)
gtaactgaagatcgaggggaatgcagaggtttcagaccacagcactgattttgattcccccatatcctattgatcactaaatttgataacaggagtaaagtgggggttttgaagagtgca

SEQ ID NO: 415145 - DNA, 120 bp, Artificial Sequence
  ENSG00000149231_66 (sequence is synthesized)
ctggattcccgaagatctgctggcagcttacaagctctggtctgctcacagagcttttagaattgtttatggtatatggaaagaatgctaatacgactgcagtcttctaaaacaagtcta

SEQ ID NO: 415146 - DNA, 120 bp, Artificial Sequence
  ENSG00000149231_67 (sequence is synthesized)
gttacatgaatgtataagagagaacaaatagtagattttcaggcaactcttatcaacatttaatcttttaaagaaaagaaaaaagcctaacttgagatccattgcctggactatatcata

SEQ ID NO: 415147 - DNA, 120 bp, Artificial Sequence
  ENSG00000149231_68 (sequence is synthesized)
gggaaatttgtaaaagaggaatataaaaaataaggcaagagagcttaggcagatggaaagaaaacaaaacagaaacttttttagcacatgtcatatttagtggaggtctcccagtctaga

SEQ ID NO: 415148 - DNA, 120 bp, Artificial Sequence
  ENSG00000149231_69 (sequence is synthesized)
taatgacatcatcactggtttccctttgacaatttttctcccaccacaaaccaccacccagtgatcttgcctgccccccacatcttgatccttaagtctttctctcattttattcttttc

SEQ ID NO: 415149 - DNA, 120 bp, Artificial Sequence
  ENSG00000149231_70 (sequence is synthesized)
agctttttgtcttttactttgcttctacttctcctactccaaatgcttctccctgcttatccgtactttttcatttgctttaggagagagcacttattcaataacttcccgtcttcattt

SEQ ID NO: 415150 - DNA, 120 bp, Artificial Sequence
  ENSG00000149231_71 (sequence is synthesized)
tcctagacaacattaaattcttaagtgcttttattgatgcctttaagtgttgccaaccctctagtggaactgcaaaacctattgggatagcacagttataaagaattagatactaggtat

SEQ ID NO: 415151 - DNA, 120 bp, Artificial Sequence
  ENSG00000149231_72 (sequence is synthesized)
agaaaaatcactgtgcatatactgtatatgttatataatagtatcatatatggggaagaactttaaacttcttgaagaaaaaagcatttccaaatcatgtatcctagaaaaagcttaaca

SEQ ID NO: 415152 - DNA, 120 bp, Artificial Sequence
  ENSG00000149231_73 (sequence is synthesized)
aggtttaggacaccagaagggacctggaattttaaagacgttattctttatgcataacacttggcattcttttcttaggaaaagaaaggagcttaggctttcttttcaagaaagccaagt

SEQ ID NO: 415153 - DNA, 120 bp, Artificial Sequence
  ENSG00000149231_74 (sequence is synthesized)
gtcatgttatacataaagaataacatttagcattaggcattgaaggtatttcaagattgtgcatgtctaggacagtatacacatttttttccccatgaaaataccaaagaccttcatttt

SEQ ID NO: 415154 - DNA, 120 bp, Artificial Sequence
  ENSG00000149231_75 (sequence is synthesized)
tttgagatttctccacttaaaaaatttgttcctaggttttctcaaaagatttcctagaaaccacagaggtttatagccaatataaacccatttgcagctttttgtgctgtaatgaaattt

SEQ ID NO: 415155 - DNA, 120 bp, Artificial Sequence
  ENSG00000149231_76 (sequence is synthesized)
caaaatttgtcacgtgctctgacatttcccatcctcactctgtctgtccctctcactgtgtgcctttgagtgatagcactgcatgtactttgtgatgtgtgctgcctttagctacagtct

SEQ ID NO: 415156 - DNA, 120 bp, Artificial Sequence
  ENSG00000149231_77 (sequence is synthesized)
ggtagtcacagttactctaaccctttagaatgcctggggctcagtgttacttgaatgccgtctccatggcactttccgctcatatttcccatttatgtcaaccccttttgttgccttaca

SEQ ID NO: 415157 - DNA, 120 bp, Artificial Sequence
  ENSG00000149231_78 (sequence is synthesized)
aattatctcaggatgtctcagcatgtcttcccaaagacatgccaactagactgacttcattctttttgttcttccttctaaaggttgaactagggtgatccgtttttaatgtaatgatac

SEQ ID NO: 415158 - DNA, 120 bp, Artificial Sequence
  ENSG00000149231_79 (sequence is synthesized)
taaaggggtgtaggagcaacttgagtataagaaaagaatagataataggaaaattataataaaaccaaaatatttaataaacataataatgcatgtcttattctaaagaagagttcaata

SEQ ID NO: 415159 - DNA, 120 bp, Artificial Sequence
  ENSG00000149231_80 (sequence is synthesized)
acatactctaatatgacactggcaaaattctaacgaatatttgttcattaagaagaaagtgtatatgatgatgggacttcctgggaagttgaagatagtattgttgggattggctggtgg

SEQ ID NO: 415160 - DNA, 120 bp, Artificial Sequence
  ENSG00000149231_81 (sequence is synthesized)
atgcataaacaccaggtagtaaagaaagcatgtcaatagaagtatcagatgcccattcatactgtaaatactgtgtgtaaaactgttacaagtgacagttgtatgtaaattttaaatgca

SEQ ID NO: 415161 - DNA, 120 bp, Artificial Sequence
  ENSG00000149231_82 (sequence is synthesized)
ctgataaatattgtcatatacataataatttaaaattataattagatatcccttgccttccttaaacgcttctcttctttttcccctccttttcaactttttcccttgccccttttttcc

SEQ ID NO: 415162 - DNA, 120 bp, Artificial Sequence
  ENSG00000149231_83 (sequence is synthesized)
ccaccccttaaactgatgtttctcaaagcatggccctaaactacctatatcagaatcacctagaagtttttgaaaagtgtataatcccctagcctcatcccagatttattgaatgacaat

SEQ ID NO: 415163 - DNA, 120 bp, Artificial Sequence
  ENSG00000149231_84 (sequence is synthesized)
ccttgtggatgttaaacatccaatatttttagcattgatgattcttaaatagataaaagtttgaggatcactgctaaaaagtacccgttaacactgaattctgtcctcatcctctcaaag

SEQ ID NO: 415164 - DNA, 120 bp, Artificial Sequence
  ENSG00000149231_85 (sequence is synthesized)
ttgccttggcgaatcaattcccttctgcagttgtagctactacttctgagtagaagattccaaacttctcttatattctgacctctttcccacacttcatttccacaattccaactgttt

SEQ ID NO: 415165 - DNA, 120 bp, Artificial Sequence
  ENSG00000149231_86 (sequence is synthesized)
tcatcagtaggtccatcaggtgttgtaagagagtagtcttcactattaaaataagtagtcttcactattaaaaccctccaaatgtttagtaaagaattatgagagcagtatctttaggta

SEQ ID NO: 415166 - DNA, 120 bp, Artificial Sequence
  ENSG00000149231_87 (sequence is synthesized)
gagaggatggcagagtaatactaactgcaatgtctgtgagtttcactttccaagttttttttttcttgccaaagctgcatcctagccacaccatttaaatctcagaaacagcatactcta

SEQ ID NO: 415167 - DNA, 120 bp, Artificial Sequence
  ENSG00000149231_88 (sequence is synthesized)
aactggttaaaagtataagcttaagtatttgctttgccacttactagcagtagaatttgggagcaagctattttatttctcttagcctaagttttctcatctgtaaagtaggaacaaaaa

SEQ ID NO: 415168 - DNA, 120 bp, Artificial Sequence
  ENSG00000149231_89 (sequence is synthesized)
cagtaataataattagggttttgattgtggagattagatatgtaatacgttttaagcatttagtataggacctagcaattagtaagtgattgattaatcttagctgttacttgcaataaa

SEQ ID NO: 415169 - DNA, 120 bp, Artificial Sequence
  ENSG00000149231_90 (sequence is synthesized)
tagctgttacttgcaataaaagcaagtaacctcctatcttagtatagctgagatagattttaattgtcctagctgtgtgtggtggtgcacagctgtagtcacagctacttgggaggctga

SEQ ID NO: 415170 - DNA, 120 bp, Artificial Sequence
  ENSG00000149231_91 (sequence is synthesized)
ccaggagttcaaggccagcctgagcaagatagtgagaccctgtctcttaaaataatttttttaatttttaattttccaaaagaaatttaataaataataaaggaatatgaggaaaggtaa

SEQ ID NO: 415171 - DNA, 120 bp, Artificial Sequence
  ENSG00000149231_92 (sequence is synthesized)
tatgagaaacataaaaagtcaaacttttaaagtataggtttctaatcctagagtactttacttatatctaataaaacctatctaagtactaggccaaagaaaattcctaagtagtcccta

SEQ ID NO: 415172 - DNA, 120 bp, Artificial Sequence
  ENSG00000149231_93 (sequence is synthesized)
ggctatttccccttctgttatgtgtttccatctttcctgagaaggagatccagtcagatatcatacggttataaaaaagagtttcatggccttcaaggtgtagaaggaaaatgcacttct

SEQ ID NO: 415173 - DNA, 120 bp, Artificial Sequence
  ENSG00000149231_94 (sequence is synthesized)
caacattcccttctgtaggtccctatcaccacaaaagtcagggtcaccaggatcctctctcatttcactgaagattaaaacacagttcataaacagagtcaagaaactagtatgtcatta

SEQ ID NO: 415174 - DNA, 120 bp, Artificial Sequence
  ENSG00000149231_95 (sequence is synthesized)
atcccctcactgaaataaatactttgaactctatatgtctgaaactgaaatcatgatatctttccctcgcacaaacaacctgcaaaagagcctgccattattctactctgtcaactttga

SEQ ID NO: 415175 - DNA, 120 bp, Artificial Sequence
  ENSG00000149231_96 (sequence is synthesized)
aatctctaaatcattcttgacccctctcttaacttgttacactttgttctttactcttcatcttcattgccatgactcagatttgggccctcatgacctaaattgttatcacagacccat

SEQ ID NO: 415176 - DNA, 120 bp, Artificial Sequence
  ENSG00000149231_97 (sequence is synthesized)
aactagttgctgaactattctagaatgaatgttttaccgattttcttaaaatacacctgagatcagttcagtcccctgctccaaaacctttagcaactttccattacctgtcaaatgatt

SEQ ID NO: 415177 - DNA, 120 bp, Artificial Sequence
  ENSG00000149231_98 (sequence is synthesized)
gttcaattctttaaccagtattttataatttttgttctctgaactcagcctctttggttcagtcttagctctctctgttctcctaaaaatactcaggttgtagtcaaatcccatattttc

SEQ ID NO: 415178 - DNA, 120 bp, Artificial Sequence
  ENSG00000149231_99 (sequence is synthesized)
ttgtcacgtcactttgatggactgttccctcttactgaaaagtcttgccaccaactctttgcctaccaaatctgtttttccaggacaacttaaatgccactctttactgcttacctcaac

SEQ ID NO: 415179 - DNA, 120 bp, Artificial Sequence
  ENSG00000149231_100 (sequence is synthesized)
taaccatgacctatcttctgaaccctcataacagtgtctgtacctctttggcacttattactgattgttattggtgtattactactgaactgtattctccttaggggcaggaaaagtatc

SEQ ID NO: 415180 - DNA, 120 bp, Artificial Sequence
  ENSG00000149231_101 (sequence is synthesized)
ttttaaaaaacactgtacctagacagtcattagcagagcctttgatatatatgttcaacaaactttttattaagttattgaggttactacatttctactgtaatcatgataatataaaaa

SEQ ID NO: 415181 - DNA, 120 bp, Artificial Sequence
  ENSG00000149231_102 (sequence is synthesized)
aatttaaaacacagttataaaattaataatattcactttgatcactttccaatgctttctatatggaaatatatgagttatatatgagttaggaatgcttatttgaaattaagttcctgt

SEQ ID NO: 415182 - DNA, 120 bp, Artificial Sequence
  ENSG00000149231_103 (sequence is synthesized)
ctgtttatcataaaaagatttttgttcacgattaccatgaaatggacttatcctaattgtgtctgtagtttgcaaaggcccagtttgtcttcattgctttgagtaaaataactagctttt

SEQ ID NO: 415183 - DNA, 120 bp, Artificial Sequence
  ENSG00000149231_104 (sequence is synthesized)
ttcataaataatcctaagtatcctaaggaaaatttgacccaagtggaaacatttttagcatataatccaccaaattggcaacccacaagtaaataatggaagatagctgttcatctaata

SEQ ID NO: 415184 - DNA, 120 bp, Artificial Sequence
  ENSG00000149231_105 (sequence is synthesized)
ggagagaattcaaaaaacactgtgcttcaactagactctgttagaagtatgtcagagtctagagcaatcaccacatagttaagatgctattaattctgtatgaatagaaaaaactgaaga

SEQ ID NO: 415185 - DNA, 120 bp, Artificial Sequence
  ENSG00000149231_106 (sequence is synthesized)
gtaagtgttttttagacaagagcatagcagtataatgtgaaatgataaaaagcacagatgctgacaacttctatttattttttcaatcttactttataagattgctgcatttacaaatgt

SEQ ID NO: 415186 - DNA, 120 bp, Artificial Sequence
  ENSG00000149231_107 (sequence is synthesized)
gaaaattatatttataaatgcaagaaatactgagcgctttttctggtaagtctacatatccatggaggaggtgtatatttagagaggtagagacccaaagttgtctctgaatcctcccag

SEQ ID NO: 415187 - DNA, 120 bp, Artificial Sequence
  ENSG00000149231_108 (sequence is synthesized)
tcaattattaagatggaaatataatatttatctaaattcttctattaaactggatagtgatttctcagtattatcgagcagtagttgaccagatccctctgagagatctgggttgcaaga

SEQ ID NO: 415188 - DNA, 120 bp, Artificial Sequence
  ENSG00000149231_109 (sequence is synthesized)
atgacttagaaggtttttatggggataatgaattcagaattggtctgtaatgttttgtttgatatgttactataaaaatatgaatatatatgtatatttaatagtcatatgcaaatttcc

SEQ ID NO: 415189 - DNA, 120 bp, Artificial Sequence
  ENSG00000149231_110 (sequence is synthesized)
ccattgtttaaaaactgatctatgactttttatgacataagatatctggaatcctagcaaaagtgatttcgtacattagggaccatgttctgttatgtatatcaaatacattgctgtacc

SEQ ID NO: 415190 - DNA, 120 bp, Artificial Sequence
  ENSG00000149231_111 (sequence is synthesized)
ttcatggtctttgctgtctatagctaattctgaagaggaaagtggagtaagaaaatcacttctagagctctgacattcctgtgaagcagtaaagattctatataaaatagttattcaaat

SEQ ID NO: 415191 - DNA, 120 bp, Artificial Sequence
  ENSG00000149231_112 (sequence is synthesized)
atttaaaaaaacaataaactgaaagcatgaactaaaagcaaagaacatcaatattgccagtcacgtaagagaaaactataaaagttaacaaatatatgggaaaatgcttattctgcatgt

SEQ ID NO: 415192 - DNA, 120 bp, Artificial Sequence
  ENSG00000149231_113 (sequence is synthesized)
aagggtatataattaaaactaccttaagatgccagttggtaattcttaaagtggcaaagtattctcaaatcaaatgataaaatgcaatgctatcaaggttgcactgaaactagtaagttc

SEQ ID NO: 415193 - DNA, 120 bp, Artificial Sequence
  ENSG00000149231_114 (sequence is synthesized)
atggaaagtaagattcctagaggaaaaaaggggtgatacgtatcttttaaaaatactagatttttagagctagagtcacaaagctatatacatactcaatgtctataagtttatcttttg

SEQ ID NO: 415194 - DNA, 120 bp, Artificial Sequence
  ENSG00000149231_115 (sequence is synthesized)
caaagcagttcagtaaagagcaaatggtataatcatgaagttgaaaaataatgctagtttgaaagtatgataacaattagtatttgcactgtctaggcatctatataaaaatgtgtgtat

SEQ ID NO: 415195 - DNA, 120 bp, Artificial Sequence
  ENSG00000149231_116 (sequence is synthesized)
gcgtatataactatatgtaaacgttaagttagttattgggtatgttaagagagtgtgattaaattttttaaagagaaattgttttttcagtaattttttctttaaagtgaagaatgactt

SEQ ID NO: 415196 - DNA, 120 bp, Artificial Sequence
  ENSG00000149231_117 (sequence is synthesized)
acaaaaatttatcttacatcctacttcaatacaatgtaaatgcatatatgtaaagaaggaaagaaagggagagaaaataaacctagttatgatccagagcattaaaaagattgtgcttgg

SEQ ID NO: 415197 - DNA, 120 bp, Artificial Sequence
  ENSG00000149231_118 (sequence is synthesized)
actggaagttaataatgcattttgattctactactaaagaaaatccaaaaaccagaaaggatatatattcgttgtcagataacaatctttatttcttgatttaggtgttcactgttggca

SEQ ID NO: 415198 - DNA, 120 bp, Artificial Sequence
  ENSG00000149231_119 (sequence is synthesized)
catgttctaaatcattgactagaaactgtggtttcattttcagataaccttgtcagtttaatagtttattccagtggtctcaggaaccatttacatttttcaaaattattaaccccaaca

SEQ ID NO: 415199 - DNA, 120 bp, Artificial Sequence
  ENSG00000149231_120 (sequence is synthesized)
cgcctttacttcaatgagttatgcctgtcaatatttaccattgtagaaatcaaaactcagaaatttaaaatatatttattaattcatttaaaataatccttagtaaatttattacattaa

SEQ ID NO: 415200 - DNA, 120 bp, Artificial Sequence
  ENSG00000149231_121 (sequence is synthesized)
tgtaaataacaattttatgaaaagtaactatatttttccccaaaatgtgataaatggcattgttttacattcttgtaaatctttaatgtctagcttatagaagccagctagattcttata

SEQ ID NO: 415201 - DNA, 120 bp, Artificial Sequence
  ENSG00000149231_122 (sequence is synthesized)
tctgcttttacgttcagtctgttgtgacatgttgttttggttgaagtgtatgaaaacaattttgcctcacacaggtagctggaaaagggaggagtattttaatagtattttaaaaataat

SEQ ID NO: 415202 - DNA, 120 bp, Artificial Sequence
  ENSG00000149231_123 (sequence is synthesized)
tgttgatattctcatttgatactatgccaaaatttgacaaatgatactgttttcttaaagataatatggaattcaaaaccatataaatgaacttttagtacttgcattacaaccattggt

SEQ ID NO: 415203 - DNA, 120 bp, Artificial Sequence
  ENSG00000149231_124 (sequence is synthesized)
ttaaatagataatttccccatgcatgattttgtgataaaatgcatcagtcatttggaaaatactggttcactggatgatacagatcctccaaaatattgacatatttcattatatatata

SEQ ID NO: 415204 - DNA, 120 bp, Artificial Sequence
  ENSG00000149231_125 (sequence is synthesized)
tttttaattatattcattaatatcaccaccaatcccatgagaatatttctcaggtattgagaagccgtcaggctcagaatagcacatacaagtttttcaaaattctaatttctgctttaa

SEQ ID NO: 415205 - DNA, 120 bp, Artificial Sequence
  ENSG00000149231_126 (sequence is synthesized)
aacttgattgttttcattggcgacaaaacaccgaattgttctttttgaactgacaggcttactttgttcttttttgagaaaagtctgacagattcccaagtctgaataaccagagcttgt

SEQ ID NO: 415206 - DNA, 120 bp, Artificial Sequence
  ENSG00000149231_127 (sequence is synthesized)
cactctttctttcaaataaaaatggtatttcatgaaaaatgaggctttccccccacacacacagttgcacaggtgtttttccctcaaaacaaccattgtactttggtatgcagtatgagt

SEQ ID NO: 415207 - DNA, 120 bp, Artificial Sequence
  ENSG00000149231_128 (sequence is synthesized)
gctttttatgcactttccatttcatcctatagagtactacaaagatgtgtacttcacattcaagatttaatacagttaatagttttactgcttcaacgaggacattcttaagtgaaagtg

SEQ ID NO: 415208 - DNA, 120 bp, Artificial Sequence
  ENSG00000149231_129 (sequence is synthesized)
gctttttttactgtgagtgcatagtggtaatgacagtaatgattactagtagtttgatgctactgccatgattcaagttaaggggccagctgccttacccatcactgcttttacatcatc

SEQ ID NO: 415209 - DNA, 120 bp, Artificial Sequence
  ENSG00000149231_130 (sequence is synthesized)
aatgaaaatgtcaacacagtgaaaaaagcaaataaataatattgttattacttgaaatcacagatttccttaaatggacttgggcactatcaggggtctgcggacaaacactttgagaac

SEQ ID NO: 415210 - DNA, 120 bp, Artificial Sequence
  ENSG00000149231_131 (sequence is synthesized)
cattggttttatcagactttttgaagcttctctcaaacagtgaaacctatcagagataggacgttacttacatgaaaatataaatcatggaacctgaaaatgtaggatatatttaaatta

SEQ ID NO: 415211 - DNA, 120 bp, Artificial Sequence
  ENSG00000149231_132 (sequence is synthesized)
ttattattatgattcctataattctacaaaatttcaaagattgtttttatgatgttttacagctctggtaggaacaaggtgttggatggatatacttttattttttttctttgagtgcat

SEQ ID NO: 415212 - DNA, 120 bp, Artificial Sequence
  ENSG00000149231_133 (sequence is synthesized)
tctttccaaatatttcagaaaaggccatattgactaaaataaagtgtgacatgacttgatttatatctcatgatttataataaaatagtggatttggagatatgaatcaaatttcaagaa

SEQ ID NO: 415213 - DNA, 120 bp, Artificial Sequence
  ENSG00000149231_134 (sequence is synthesized)
atttggcagttatagagatgccagttacagttatctctacactgcaagttaatgactgttttccttatatcagtaggcactggttcacttgccacctggacatttaaattacagggatac

SEQ ID NO: 415214 - DNA, 120 bp, Artificial Sequence
  ENSG00000149231_135 (sequence is synthesized)
tcaattaggagatatcctattttgggttatctagaatgtgatggaacatttgctgagagatgccaactcatatcaactcctgccaattaatggaaataaaaggctagcatatgggaactt

SEQ ID NO: 415215 - DNA, 120 bp, Artificial Sequence
  ENSG00000149231_136 (sequence is synthesized)
caacttctttacaccttttagttgttttttttaagggcacttttggagttacagaaatattgaatggaatgtacagagttcaaatatacttcctcacgtacacagtttcccctattatta

SEQ ID NO: 415216 - DNA, 120 bp, Artificial Sequence
  ENSG00000149231_137 (sequence is synthesized)
acctcttttattagtttggtacctctgttacagttattaactgtagttcatacttcacaacagggctcattttttagtaccttttatgggttttgacaagtgtgtaatgacatgtatcta

SEQ ID NO: 415217 - DNA, 120 bp, Artificial Sequence
  ENSG00000149231_138 (sequence is synthesized)
ccattacactatcatacagagtagtttcattgtcctcaaaatgccctgtgctttaattcattctcctttcctccctcctctgaatcactgatgtttttaccctctccatagttttgcttt

SEQ ID NO: 415218 - DNA, 120 bp, Artificial Sequence
  ENSG00000149231_139 (sequence is synthesized)
tgccaaactgtcatatagttggaatcacacagcatataacttttcagattgtcttctttcacttaataatatgcacttaggtttcctccatgtctaaatgtggcttaatagcgcatttct

SEQ ID NO: 415219 - DNA, 120 bp, Artificial Sequence
  ENSG00000149231_140 (sequence is synthesized)
ttttatcgctgaatatttttcattgtatggatgtaccacagttttgttcatccattcacctattgaaagacatcttggttgcttacaagttttggcaattgtgaataaagctgctataaa

SEQ ID NO: 415220 - DNA, 120 bp, Artificial Sequence
  ENSG00000149243_0 (sequence is synthesized)
atgcggcaaggccatgcgccggaggagtcggagccgggctgcgaagcgccgtgcgcgggtccgtgccacgcgcagcgcgtgctgcaggccctgaacgcctaccggcggagcggcaccctc

SEQ ID NO: 415221 - DNA, 120 bp, Artificial Sequence
  ENSG00000149243_1 (sequence is synthesized)
agcggcaccctcaccgacgtggtgctgcgcgccggcgggcgcgactttccgtgccaccgcgcggcgctcagcgcgggcagcgcctacttccgcagcttgttcgcggccgggcggcccgag

SEQ ID NO: 415222 - DNA, 120 bp, Artificial Sequence
  ENSG00000149243_2 (sequence is synthesized)
gtggtgccagtggtgccagtagctcccgaggcgccaggcacgagcccggccggggcggcggcggcgctggccgtggtgctcgactacgtgtacggagcgggcgtgcggctgcgcgcggag

SEQ ID NO: 415223 - DNA, 120 bp, Artificial Sequence
  ENSG00000149243_3 (sequence is synthesized)
cgactacgtgtacggagcgggcgtgcggctgcgcgcggaggacgaggcggcggccgtgctggcgctggcggagcggctgggcgtggcgggcctgcgcgaggcctgcgtgcgctttctcga

SEQ ID NO: 415224 - DNA, 120 bp, Artificial Sequence
  ENSG00000149243_4 (sequence is synthesized)
gtggccgccgccttctcgctggccccgctggccgagcgctgcggccgcgtcctgcgtcaggccttcgccgaggtggcgcgccacgccgacttcctggagctggcgcctgacgaggtggtg

SEQ ID NO: 415225 - DNA, 120 bp, Artificial Sequence
  ENSG00000149243_5 (sequence is synthesized)
gctgggcgtggcgcgcgaggaggccgtgtttgaagcggccatgcgctgggtgcgccacgacgcgccggcccgccgcggccagctgcgacgcctgctggagcacgtgcgcctgccgctact

SEQ ID NO: 415226 - DNA, 120 bp, Artificial Sequence
  ENSG00000149243_6 (sequence is synthesized)
cacgtgcgcctgccgctactggcgcccgcttacttcctggagaaggtggaggcggacgagctgctgcaggcctgcggcgagtgccgcccgctgctgctcgaggctcgcgcctgcttcatc

SEQ ID NO: 415227 - DNA, 120 bp, Artificial Sequence
  ENSG00000149243_7 (sequence is synthesized)
ctgggccgcgaggccggtgcgctgcggacccggccgcggagattcatggacctagctgaagtgatcgtggtcatcggcggttgcgaccgcaaaggtctcctgaagctgcccttcgccgat

SEQ ID NO: 415228 - DNA, 120 bp, Artificial Sequence
  ENSG00000149243_8 (sequence is synthesized)
gccagcggtggaccccactgcccagcctgcccggctacactcgctcagaattcgccgcctgtgctctccgcaatgacgtctacgtctccggaggccacatcaacagtcatgatgtgtgga

SEQ ID NO: 415229 - DNA, 120 bp, Artificial Sequence
  ENSG00000149243_9 (sequence is synthesized)
tgtttagctcccatctgcacacctggatcaaggtagcctctctgcacaagggcaggtggaggcacaagatggcagttgtgcaggggcagctgttcgcggtgggtggcttcgacggcctga

SEQ ID NO: 415230 - DNA, 120 bp, Artificial Sequence
  ENSG00000149243_10 (sequence is synthesized)
ggcgcctgcacagcgtggagcgctacgaccccttctccaacacctgggcggccgccgcgcccctcccggaggccgtgagctcggcggcggtggcgtcctgcgcgggcaagctcttcgtga

SEQ ID NO: 415231 - DNA, 120 bp, Artificial Sequence
  ENSG00000149243_11 (sequence is synthesized)
ttgggggcgccaggcagggcggcgtcaacacggacaaggtgcagtgctttgaccccaaggaggaccggtggagcctgcggtcaccagcacccttctcacagcggtgtctcgaggctgtct

SEQ ID NO: 415232 - DNA, 120 bp, Artificial Sequence
  ENSG00000149243_12 (sequence is synthesized)
cccttgaggacaccatctatgtcatggggggtctcatgagcaaaatcttcacctatgatccaggcacagatgtgtggggggaggcagctgtcctccccagccctgtggaaagctgtggag

SEQ ID NO: 415233 - DNA, 120 bp, Artificial Sequence
  ENSG00000149243_13 (sequence is synthesized)
tcactgtgtgtgacgggaaggtccacatccttggcgggcgggatgatcgcggagaaagcaccgataaggtcttcacctttgaccccagcagtgggcaggtggaggtccagccatccctgc

SEQ ID NO: 415234 - DNA, 120 bp, Artificial Sequence
  ENSG00000149243_14 (sequence is synthesized)
agcgctgcaccagctcccacggctgtgtcaccatcatccagagcttgggcaggtgattcagatttggacagcctgagccaggaggcggagaggcaggcggagctcagatgcacactctgc

SEQ ID NO: 415235 - DNA, 120 bp, Artificial Sequence
  ENSG00000149243_15 (sequence is synthesized)
tccctcatggcacctccacgcaaacagcccttaacttaatggtcccttttcttgtataaataaaatcttgttgggtctgtgttccagctgcagtctgccctgcctggagatggaatgtct

SEQ ID NO: 415236 - DNA, 120 bp, Artificial Sequence
  ENSG00000149243_16 (sequence is synthesized)
cctctctttgtaagaaggggtctgaagccccccaaaaaaggagacttgtccaaggtcacataataatggctgatgctaataataatagcaattactgtaatagtaacagcctgatggtca

SEQ ID NO: 415237 - DNA, 120 bp, Artificial Sequence
  ENSG00000149243_17 (sequence is synthesized)
gtcaagggtatgggctctggggccatagagtctaggtttgaatcttgactgtgccactcaagaataaaagaatctgtcggccgggcgcagtggctgtaatcccagcactttgggaggcca

SEQ ID NO: 415238 - DNA, 62 bp, Artificial Sequence
  ENSG00000149243_18 (sequence is synthesized)
gtcaattatctttgtaagctacatcccgaattcagaaacaaagatgcttcttagaatcaatt

SEQ ID NO: 415239 - DNA, 120 bp, Artificial Sequence
  ENSG00000149243_19 (sequence is synthesized)
atcccgaattcagaaacaaagatgcttcttagaatcaattaagtggggtggtaaagtctcaatactagctattattattaagcatcagcttggtgccaggtattttacagctgtaaccat

SEQ ID NO: 415240 - DNA, 120 bp, Artificial Sequence
  ENSG00000149243_20 (sequence is synthesized)
gcaggttaaggtctcatccccgctaaatgagaggaaaccggctcagggaggtacagcaactgggtggaggctgcccaggtggtggcagcactgggctcgggggtcagtttggtcctgaaa

SEQ ID NO: 415241 - DNA, 120 bp, Artificial Sequence
  ENSG00000149243_21 (sequence is synthesized)
ctgggttggggacagggatagtttccagctcaaagactgtaaggactgaagcgatgaggccgagggccctaaggccctggcacccggctccccggcccatgtcctcacttgcagctgttc

SEQ ID NO: 415242 - DNA, 120 bp, Artificial Sequence
  ENSG00000149243_22 (sequence is synthesized)
gagggtcgtaactcagacattcccaccacttattcaaagcacactgggtcacaggtccagagtcttacaccagctcaagaagtcctcctgctgccttcccttaacccttcctttggatct

SEQ ID NO: 415243 - DNA, 120 bp, Artificial Sequence
  ENSG00000149243_23 (sequence is synthesized)
ggggcaggtaggcacgagctgcagcggctgccctgggacacaagctgttcgcggtgggtggcttcgacggcctgaggcgcctgcacagcgtggagcgctacgaccccttctccaacacct

SEQ ID NO: 415244 - DNA, 120 bp, Artificial Sequence
  ENSG00000149243_24 (sequence is synthesized)
agcattttccacgtgattatcaactttacagccatcatttcaatgtctgtactattccacatggtggatgaactagagtctactcatcttttattgttgggacatttaggctttttgcaa

SEQ ID NO: 415245 - DNA, 120 bp, Artificial Sequence
  ENSG00000149243_25 (sequence is synthesized)
ataaaaatatttatcatagcagttccttccctcccctgatggcctcataagcctgtggtcctaggacttgactctttcccaaattagggtgcccacgcttccttattccctgaccacatt

SEQ ID NO: 415246 - DNA, 120 bp, Artificial Sequence
  ENSG00000149243_26 (sequence is synthesized)
cttccagcaaaccctcctggagctgagtgataggcactcatggtgggaggccccatttaacaccatccatgcagcactgatttgttataggctgctgtggggggagggggtctccaagga

SEQ ID NO: 415247 - DNA, 120 bp, Artificial Sequence
  ENSG00000149243_27 (sequence is synthesized)
aacagttgaggaaacagagagtgaggtgagcaggcagctaaatacagaaactgttaagggcatcagaaacacccatgggcatgtggacagctgtagaaatagggctgcaagacacctcag

SEQ ID NO: 415248 - DNA, 120 bp, Artificial Sequence
  ENSG00000149243_28 (sequence is synthesized)
ctagaatctaatgacctgagagcaccaggaaaagagaagggagttgacagtgtatgcagctaggaacacatccccgtcgggggtctgctctgaggaccctctataaccctaaagcagaca

SEQ ID NO: 415249 - DNA, 120 bp, Artificial Sequence
  ENSG00000149243_29 (sequence is synthesized)
gtacctctcccagctcagtatgatgtgctctatgattaatctaacatgaggcgactgtgttctccatcaaaggagagactgttcctgtgtgtgtgtgttgaggggtgaggggagggggga

SEQ ID NO: 415250 - DNA, 120 bp, Artificial Sequence
  ENSG00000149243_30 (sequence is synthesized)
acaccagggagacctttaaggatggggtggcatttgagcaggacctcgaaagatgaggaggcttttgacaaagggagtccagaggcagaggacagaacatagaactagatgaagagccct

SEQ ID NO: 415251 - DNA, 120 bp, Artificial Sequence
  ENSG00000149243_31 (sequence is synthesized)
tgagggcagggacggtggacctccccctccctcccagatgctggctcaggcctggtggacactggcaaatgtcgttttgaatgagtgcccccggggggagaggtggcagcatgtgggcgg

SEQ ID NO: 415252 - DNA, 120 bp, Artificial Sequence
  ENSG00000149243_32 (sequence is synthesized)
ttttattatacatcactctctagctcatcctcacagtgatagtgaaccatgcatttcacagatgaggagactggccttagagaggttcagcacctggcccaggccaacaactaggccctg

SEQ ID NO: 415253 - DNA, 120 bp, Artificial Sequence
  ENSG00000149243_33 (sequence is synthesized)
ttaaggcagagcctagaaccctgcagtcccaagtgctatagctttgagtggggatttggtccaaatgaccctgtggtctctcctgccccgaaggccactgctagtaaccaatcatgaggt

SEQ ID NO: 415254 - DNA, 120 bp, Artificial Sequence
  ENSG00000149243_34 (sequence is synthesized)
aagatgtggggaagggagttgctaaggtctgctctagtgatatcagagcagggaggcccaagtcctggaagctctggcccctgcaattccctgcctcccctaccttcttctccatcccct

SEQ ID NO: 415255 - DNA, 120 bp, Artificial Sequence
  ENSG00000149243_35 (sequence is synthesized)
gaaactccagagactacacagatatggttggactggaggtctctgccagttctgacctttggtgaccttagaggtgagatttctggcttgagtctgagattctaagatggcggcagtcga

SEQ ID NO: 415256 - DNA, 120 bp, Artificial Sequence
  ENSG00000149243_36 (sequence is synthesized)
gattattgttattggtgtgcttaccacattccaggctctatgtaaaatgctttatatgcttaacttccattaactgttaagggaaccctgtgaagaaggcactttagttcttctcccttt

SEQ ID NO: 415257 - DNA, 120 bp, Artificial Sequence
  ENSG00000149243_37 (sequence is synthesized)
gccgatgaggaaactgaggtccagagaggttaagtgacttgcctaacgccattcactgaataagggtcaagctagagctggaactcaggtccatccagtttcctgcctctctacagtcca

SEQ ID NO: 415258 - DNA, 120 bp, Artificial Sequence
  ENSG00000149243_38 (sequence is synthesized)
gattgcctgttcacagtctgtgggtcaaggttctattatctggcctggccaggcagggacagaggaagccccaggctggacctgatagttgtctttctgtttgtccacccaggaaagctg

SEQ ID NO: 415259 - DNA, 120 bp, Artificial Sequence
  ENSG00000149256_0 (sequence is synthesized)
attcatgtaacctgcgtgtgcgtgtgcgtgtgtgtgtgtgtctctctctcgctcgccctctctttctgtgtgtaagagagcgagggtgggggacggaggcaggcaggcgagcaggcaggg

SEQ ID NO: 415260 - DNA, 120 bp, Artificial Sequence
  ENSG00000149256_1 (sequence is synthesized)
acacacacacacacacactcacacacgcgcgcgcacacacccgccccaaccccccagaagcctcgggattgcagctgtttcatgtggggcagcagtgctggcagggacgccggccgggag

SEQ ID NO: 415261 - DNA, 120 bp, Artificial Sequence
  ENSG00000149256_2 (sequence is synthesized)
gcagcagtgctggcagggacgccggccgggagcggccgggagcgggagccggtcgtgcgcgcgcggctggaggctcgctggggctccgctccccgcgggagctattgttggtctcgctgg

SEQ ID NO: 415262 - DNA, 120 bp, Artificial Sequence
  ENSG00000149256_3 (sequence is synthesized)
agctgagcgcagagcccggacctgctccttcctgggcgccccgctacggctcgcggagcagaggagccgcgccgccgagagagagaggagccaccggcgcggcgccttgcctccctgccg

SEQ ID NO: 415263 - DNA, 120 bp, Artificial Sequence
  ENSG00000149256_4 (sequence is synthesized)
ccgtcctcgccgcttccccggcggtagcagcctgcagccacgatggaaaaactgagaatcagagagggctagtgatctctcagacacttggtcggtagaaaagatcccgcaccatcctcc

SEQ ID NO: 415264 - DNA, 120 bp, Artificial Sequence
  ENSG00000149256_5 (sequence is synthesized)
aggatccaatggccttggagagagggctgcagggcccacggacattgctgactcttcagaacgtgctgacatggagccaggtagactgaaattaccatgtgtccaaattaaaattgcata

SEQ ID NO: 415265 - DNA, 120 bp, Artificial Sequence
  ENSG00000149256_6 (sequence is synthesized)
cttcaaggattatttgaaggactattcttagacccttttaagaagatttaaagaaaaaccactcggccctgagtgcggcgaggaccctgtttgtggatgtggaggagcgcgggccggagg

SEQ ID NO: 415266 - DNA, 120 bp, Artificial Sequence
  ENSG00000149256_7 (sequence is synthesized)
ccatggacgtgaaggagaggaagccttaccgctcgctgacccggcgccgcgacgccgagcgccgctacaccagctcgtccgcggacagcgaggagggcaaagccccgcagaaatcgtaca

SEQ ID NO: 415267 - DNA, 120 bp, Artificial Sequence
  ENSG00000149256_8 (sequence is synthesized)
gctccagcgagaccctgaaggcctacgaccaggacgcccgcctagcctatggcagccgcgtcaaggacattgtgccgcaggaggccgaggaattctgccgcacaggtgccaacttcaccc

SEQ ID NO: 415268 - DNA, 120 bp, Artificial Sequence
  ENSG00000149256_9 (sequence is synthesized)
tgcgggagctggggctggaagaagtaacgccccctcacgggaccctgtaccggacagacattggcctcccccactgcggctactccatgggggctggctctgatgccgacatggaggctg

SEQ ID NO: 415269 - DNA, 120 bp, Artificial Sequence
  ENSG00000149256_10 (sequence is synthesized)
acacggtgctgtcccctgagcaccccgtgcgtctgtggggccggagcacacggtcagggcgcagctcctgcctgtccagccgggccaattccaatctcacactcaccgacaccgagcatg

SEQ ID NO: 415270 - DNA, 120 bp, Artificial Sequence
  ENSG00000149256_11 (sequence is synthesized)
aaaacactgagactgatcatccgggcggcctgcagaaccacgcgcggctccggacgccgccgccgccgctctcgcacgcccacacccccaaccagcaccacgcggcctccattaactccc

SEQ ID NO: 415271 - DNA, 120 bp, Artificial Sequence
  ENSG00000149256_12 (sequence is synthesized)
tgaaccggggcaacttcacgccgaggagcaaccccagcccggcccccacggaccactcgctctccggagagccccctgccggcggcgcccaggagcctgcccacgcccaggagaactggc

SEQ ID NO: 415272 - DNA, 120 bp, Artificial Sequence
  ENSG00000149256_13 (sequence is synthesized)
tgctcaacagcaacatccccctggagaccagaaacctaggcaagcagccattcctagggacattgcaggacaacctcattgagatggacattctcggcgcctcccgccatgatggggctt

SEQ ID NO: 415273 - DNA, 120 bp, Artificial Sequence
  ENSG00000149256_14 (sequence is synthesized)
acagtgacgggcacttcctcttcaagcctggaggcacctccccgctcttctgcaccacatcaccagggtacccactgacgtccagcacagtgtactctcctccgccccgacccctgcccc

SEQ ID NO: 415274 - DNA, 120 bp, Artificial Sequence
  ENSG00000149256_15 (sequence is synthesized)
gcagcaccttcgcccggccggcctttaacctcaagaagccctccaagtactgtaactggaagtgcgcagccctgagcgccatcgtcatctcagccactctggtcatcctgctggcatact

SEQ ID NO: 415275 - DNA, 120 bp, Artificial Sequence
  ENSG00000149256_16 (sequence is synthesized)
ttgtggccatgcacctgtttggcctaaactggcacctgcagccgatggaggggcagatgtatgagatcacggaggacacagccagcagttggcctgtgccaaccgacgtctccctatacc

SEQ ID NO: 415276 - DNA, 120 bp, Artificial Sequence
  ENSG00000149256_17 (sequence is synthesized)
cctcagggggcactggcttagagacccctgacaggaaaggcaaaggaaccacagaaggaaagcccagtagtttctttccagaggacagtttcatagattctggagaaattgatgtgggaa

SEQ ID NO: 415277 - DNA, 120 bp, Artificial Sequence
  ENSG00000149256_18 (sequence is synthesized)
ggcgagcttcccagaagattcctcctggcactttctggagatctcaagtgttcatagaccatcctgtgcatctgaaattcaatgtgtctctgggaaaggcagccctggttggcatttatg

SEQ ID NO: 415278 - DNA, 120 bp, Artificial Sequence
  ENSG00000149256_19 (sequence is synthesized)
gcagaaaaggcctccctccttcacatacacagtttgactttgtggagctgctggatggcaggaggctcctaacccaggaggcgcggagcctagaggggaccccgcgccagtctcggggaa

SEQ ID NO: 415279 - DNA, 120 bp, Artificial Sequence
  ENSG00000149256_20 (sequence is synthesized)
ctgtgcccccctccagccatgagacaggcttcatccagtatttggattcaggaatctggcacttggctttttacaatgacggaaaggagtcagaagtggtttcctttctcaccactgcca

SEQ ID NO: 415280 - DNA, 120 bp, Artificial Sequence
  ENSG00000149256_21 (sequence is synthesized)
ttgagtcggtggataactgccccagcaactgctatggcaatggtgactgcatctctgggacctgccactgcttcctgggtttcctgggccccgactgtggcagagcctcctgccccgtgc

SEQ ID NO: 415281 - DNA, 120 bp, Artificial Sequence
  ENSG00000149256_22 (sequence is synthesized)
tctgtagcggaaatggccaatacatgaaaggcagatgcttgtgccacagtggctggaaaggcgctgagtgcgatgtgcccaccaaccagtgtatcgatgtggcctgcagcaaccatggca

SEQ ID NO: 415282 - DNA, 120 bp, Artificial Sequence
  ENSG00000149256_23 (sequence is synthesized)
cctgcatcacgggcacctgcatctgcaaccctggctacaagggcgagagctgtgaggaagtggactgcatggaccccacatgttcaggccggggtgtctgcgtgagaggcgaatgccact

SEQ ID NO: 415283 - DNA, 120 bp, Artificial Sequence
  ENSG00000149256_24 (sequence is synthesized)
gctctgtgggatggggaggcaccaactgcgagacccccagggccacatgcttagaccagtgttcaggccacggaaccttcctcccggacaccgggctttgcagctgtgacccaagctgga

SEQ ID NO: 415284 - DNA, 120 bp, Artificial Sequence
  ENSG00000149256_25 (sequence is synthesized)
ctggacacgactgttctatcgagatctgtgctgccgactgtggtggccatggcgtgtgcgtagggggcacctgccgctgcgaggatggctggatgggggcagcctgcgaccagcgggcct

SEQ ID NO: 415285 - DNA, 120 bp, Artificial Sequence
  ENSG00000149256_26 (sequence is synthesized)
gccacccgcgctgtgccgagcatgggacctgccgcgacggcaagtgcgagtgcagccctggctggaatggcgaacactgcaccatcgctcactatctggatagggtagttaaagagggtt

SEQ ID NO: 415286 - DNA, 120 bp, Artificial Sequence
  ENSG00000149256_27 (sequence is synthesized)
gccctgggttgtgcaatggcaacggcagatgtaccttagacctgaatggttggcactgcgtctgccagctgggctggagaggagctggctgtgacacttccatggagactgcctgcggtg

SEQ ID NO: 415287 - DNA, 120 bp, Artificial Sequence
  ENSG00000149256_28 (sequence is synthesized)
acagcaaagacaatgatggagatggcctggtggactgcatggaccctgactgctgcctccagcccctgtgccatatcaacccgctgtgccttggctcccctaaccctctggacatcatcc

SEQ ID NO: 415288 - DNA, 120 bp, Artificial Sequence
  ENSG00000149256_29 (sequence is synthesized)
aggagacacaggtccctgtgtcacagcagaacctacactccttctatgaccgcatcaagttcctcgtgggcagggacagcacgcacataatccccggggagaacccctttgatggagggc

SEQ ID NO: 415289 - DNA, 120 bp, Artificial Sequence
  ENSG00000149256_30 (sequence is synthesized)
atgcttgtgttattcgtggccaagtgatgacatcagatggaacccccctggttggtgtgaacatcagttttgtcaataaccctctctttggatatacaatcagcaggcaagatggcagct

SEQ ID NO: 415290 - DNA, 120 bp, Artificial Sequence
  ENSG00000149256_31 (sequence is synthesized)
ttgacttggtgacaaatggcggcatctccatcatcctgcggttcgagcgggcacctttcatcacacaggagcacaccctgtggctgccatgggatcgcttctttgtcatggaaaccatca

SEQ ID NO: 415291 - DNA, 120 bp, Artificial Sequence
  ENSG00000149256_32 (sequence is synthesized)
tcatgagacatgaggagaatgagattcccagctgtgacctgagcaattttgcccgccccaacccagtcgtctctccatccccactgacgtccttcgccagctcctgtgcagagaaaggcc

SEQ ID NO: 415292 - DNA, 120 bp, Artificial Sequence
  ENSG00000149256_33 (sequence is synthesized)
ccattgtgccggaaattcaggctttgcaggaggaaatctctatctctggctgcaagatgaggctgagctacctgagcagccggacccctggctacaaatctgtcctgaggatcagcctca

SEQ ID NO: 415293 - DNA, 120 bp, Artificial Sequence
  ENSG00000149256_34 (sequence is synthesized)
cccacccgaccatccccttcaacctcatgaaggtgcacctcatggtagcggtggagggccgcctcttcaggaagtggttcgctgcagccccagacctgtcctattatttcatttgggaca

SEQ ID NO: 415294 - DNA, 120 bp, Artificial Sequence
  ENSG00000149256_35 (sequence is synthesized)
agacagacgtctacaaccagaaggtgtttgggctttcagaagcctttgtttccgtgggttatgaatatgaatcctgcccagatctaatcctgtgggaaaaaagaacaacagtgctgcagg

SEQ ID NO: 415295 - DNA, 120 bp, Artificial Sequence
  ENSG00000149256_36 (sequence is synthesized)
gctatgaaattgacgcgtccaagcttggaggatggagcctagacaaacatcatgccctcaacattcaaagtggcatcctgcacaaagggaatggggagaaccagtttgtgtctcagcagc

SEQ ID NO: 415296 - DNA, 120 bp, Artificial Sequence
  ENSG00000149256_37 (sequence is synthesized)
ctcctgtcattgggagcatcatgggcaatgggcgccggagaagcatctcctgccccagctgcaacggccttgctgacggcaacaagctcctggccccagtggccctcacctgtggctctg

SEQ ID NO: 415297 - DNA, 120 bp, Artificial Sequence
  ENSG00000149256_38 (sequence is synthesized)
acgggagcctctatgtgggtgatttcaactacattagaaggatcttcccctctggaaatgtcaccaacatcctagagctgagaaataaagatttcagacatagtcacagtccagcacaca

SEQ ID NO: 415298 - DNA, 120 bp, Artificial Sequence
  ENSG00000149256_39 (sequence is synthesized)
aatactacctggccacagaccccatgagtggggccgtcttcctttctgacagcaacagccggcgggtctttaaaatcaagtccactgtggtggtgaaggaccttgtcaagaactctgagg

SEQ ID NO: 415299 - DNA, 120 bp, Artificial Sequence
  ENSG00000149256_40 (sequence is synthesized)
tggttgcggggacaggtgaccagtgcctcccctttgatgacactcgctgcggggatggtgggaaggccacagaagccacactcaccaatcccaggggcattacagtggacaagtttgggc

SEQ ID NO: 415300 - DNA, 120 bp, Artificial Sequence
  ENSG00000149256_41 (sequence is synthesized)
tgatctacttcgtggatggcaccatgatcagacgcatcgatcagaatgggatcatctccaccctgctcggctctaatgatctcacatcagcccggccactcagctgtgattctgtcatgg

SEQ ID NO: 415301 - DNA, 120 bp, Artificial Sequence
  ENSG00000149256_42 (sequence is synthesized)
atatttcccaggttcacctggagtggcccacagacttagccatcaacccaatggacaactcactttatgtcctcgacaacaatgtggtcctgcaaatctctgaaaaccaccaggtgcgca

SEQ ID NO: 415302 - DNA, 120 bp, Artificial Sequence
  ENSG00000149256_43 (sequence is synthesized)
ttgtcgccgggaggcccatgcactgccaggtccctggcattgaccacttcctgctaagcaaggtggccatccacgcaaccctggagtcagccaccgctttggctgtttcacacaatgggg

SEQ ID NO: 415303 - DNA, 120 bp, Artificial Sequence
  ENSG00000149256_44 (sequence is synthesized)
tcctgtatattgctgagactgatgagaaaaagatcaaccgcatcaggcaggtcaccactagtggagagatctcactcgttgctggggcccccagtggctgtgactgtaaaaatgatgcca

SEQ ID NO: 415304 - DNA, 120 bp, Artificial Sequence
  ENSG00000149256_45 (sequence is synthesized)
actgtgattgtttttctggagacgatggttatgccaaggatgcaaagttaaataccccatcttccttggctgtgtgtgctgatggggagctctacgtggccgaccttgggaacatccgaa

SEQ ID NO: 415305 - DNA, 120 bp, Artificial Sequence
  ENSG00000149256_46 (sequence is synthesized)
ttcggtttatccggaagaacaagcctttcctcaacacccagaacatgtatgagctgtcttcaccaattgaccaggagctctatctgtttgataccaccggcaagcacctgtacacccaaa

SEQ ID NO: 415306 - DNA, 120 bp, Artificial Sequence
  ENSG00000149256_47 (sequence is synthesized)
gcctgcccacaggagactacctgtacaacttcacctacactggggacggcgacatcacactcatcacagacaacaatggcaacatggtaaatgtccgccgagactctactgggatgcccc

SEQ ID NO: 415307 - DNA, 120 bp, Artificial Sequence
  ENSG00000149256_48 (sequence is synthesized)
tctggctggtggtcccagatggccaggtgtactgggtgaccatgggcaccaacagtgcactcaagagtgtgaccacacaaggacacgagttggccatgatgacataccatggcaattccg

SEQ ID NO: 415308 - DNA, 120 bp, Artificial Sequence
  ENSG00000149256_49 (sequence is synthesized)
gccttctggcaaccaaaagcaatgaaaacggatggacaacattttatgagtacgacagctttggccgcctgacaaatgtgaccttccctactggccaggtgagcagtttccgaagtgata

SEQ ID NO: 415309 - DNA, 120 bp, Artificial Sequence
  ENSG00000149256_50 (sequence is synthesized)
cagacagttcagtgcatgtccaggtagagacctccagcaaggatgatgtcaccataaccaccaacctgtctgcctcaggcgccttctacacactgctgcaagaccaagtccggaacagct

SEQ ID NO: 415310 - DNA, 120 bp, Artificial Sequence
  ENSG00000149256_51 (sequence is synthesized)
actacatcggggccgatggctccttgcggctgctgctggccaacggcatggaggtggcgctgcagactgagccccacttgctggctggcaccgtcaaccccaccgtgggcaagaggaatg

SEQ ID NO: 415311 - DNA, 120 bp, Artificial Sequence
  ENSG00000149256_52 (sequence is synthesized)
tcacgctgcccatcgacaacggcctcaacctggtggagtggcgccagcgcaaagagcaggctcggggccaggtcactgtctttgggcgccggctgcgggttcacaaccgaaatctcctat

SEQ ID NO: 415312 - DNA, 120 bp, Artificial Sequence
  ENSG00000149256_53 (sequence is synthesized)
ctctggactttgatcgcgtaacacgcacagagaagatctatgatgaccaccgcaagttcacccttcggattctgtacgaccaggcggggcggcccagcctctggtcacccagcagcaggc

SEQ ID NO: 415313 - DNA, 120 bp, Artificial Sequence
  ENSG00000149256_54 (sequence is synthesized)
tgaatggtgtcaacgtgacatactcccctgggggttacattgctggcatccagaggggcatcatgtctgaaagaatggaatacgaccaggcgggccgcatcacatccaggatcttcgctg

SEQ ID NO: 415314 - DNA, 120 bp, Artificial Sequence
  ENSG00000149256_55 (sequence is synthesized)
atgggaagacatggagctacacatacttagagaagtccatggtgctgctactacacagccagaggcagtatatctttgagttcgacaagaatgaccgcctctcttctgtgacgatgccca

SEQ ID NO: 415315 - DNA, 120 bp, Artificial Sequence
  ENSG00000149256_56 (sequence is synthesized)
acgtggcgcggcagacactagagaccatccgctcagtgggctactacagaaacatctatcagccccctgagggcaatgcctcagtcatacaggacttcactgaggatgggcacctccttc

SEQ ID NO: 415316 - DNA, 120 bp, Artificial Sequence
  ENSG00000149256_57 (sequence is synthesized)
acaccttctacctgggcactggccgcagggtgatatacaagtatggcaaactgtcaaagctggcagagacgctctatgacaccaccaaggtcagtttcacctatgacgagacggcaggca

SEQ ID NO: 415317 - DNA, 120 bp, Artificial Sequence
  ENSG00000149256_58 (sequence is synthesized)
tgctgaagaccatcaacctacagaatgagggcttcacctgcaccatccgctaccgtcagattgggcccctgattgaccgacagatcttccgcttcactgaggaaggcatggtcaacgccc

SEQ ID NO: 415318 - DNA, 120 bp, Artificial Sequence
  ENSG00000149256_59 (sequence is synthesized)
tcaggcaagacagagcagtttgggaagtttggtgtcatttactatgacattaaccagatcatcaccacagctgtcatgacccacaccaagcattttgatgcatatggcaggatgaaggaa

SEQ ID NO: 415319 - DNA, 120 bp, Artificial Sequence
  ENSG00000149256_60 (sequence is synthesized)
gtgcagtatgagatcttccgctcgctcatgtactggatgaccgtccagtatgataacatggggcgagtagtgaagaaggagctgaaggtaggaccctacgccaataccactcgctactcc

SEQ ID NO: 415320 - DNA, 120 bp, Artificial Sequence
  ENSG00000149256_61 (sequence is synthesized)
tatgagtatgatgctgacggccagctgcagacagtctccatcaatgacaagccactctggcgctacagctacgacctcaatgggaacctgcacttactgagccctgggaacagtgcacgg

SEQ ID NO: 415321 - DNA, 120 bp, Artificial Sequence
  ENSG00000149256_62 (sequence is synthesized)
ctcacaccactacggtatgacatccgcgaccgcatcactcggctgggtgacgtgcaatacaagatggatgaggatggcttcctgaggcagcggggcggtgatatctttgagtacaactca

SEQ ID NO: 415322 - DNA, 120 bp, Artificial Sequence
  ENSG00000149256_63 (sequence is synthesized)
gctggcctgctcatcaaggcctacaaccgggctggcagctggagtgtcaggtaccgctacgatggcctggggcggcgcgtgtccagcaagagcagccacagccaccacctgcagttcttc

SEQ ID NO: 415323 - DNA, 120 bp, Artificial Sequence
  ENSG00000149256_64 (sequence is synthesized)
tatgcagacctgaccaaccccaccaaggtcacccacctgtacaaccactccagctctgagatcacctccctctactacgacttgcaaggacacctctttgccatggagctgagcagtggt

SEQ ID NO: 415324 - DNA, 120 bp, Artificial Sequence
  ENSG00000149256_65 (sequence is synthesized)
gatgagttttacatagcttgtgacaacatcgggacccctcttgctgtctttagtggaacaggtttgatgatcaagcaaatcctgtacacagcctatggggagatctacatggataccaac

SEQ ID NO: 415325 - DNA, 120 bp, Artificial Sequence
  ENSG00000149256_66 (sequence is synthesized)
cccaactttcagatcatcataggctaccatggtggcctctatgatccactcaccaagcttgtccacatgggccggcgagattatgatgtgctggccggacgctggactagcccagaccac

SEQ ID NO: 415326 - DNA, 120 bp, Artificial Sequence
  ENSG00000149256_67 (sequence is synthesized)
gagctgtggaagcaccttagtagcagcaacgtcatgccttttaatctctatatgttcaaaaacaacaaccccatcagcaactcccaggacatcaagtgcttcatgacagatgttaacagc

SEQ ID NO: 415327 - DNA, 120 bp, Artificial Sequence
  ENSG00000149256_68 (sequence is synthesized)
tggctgctcacctttggattccagctacacaacgtgatccctggttatcccaaaccagacatggatgccatggaaccctcctacgagctcatccacacacagatgaaaacgcaggagtgg

SEQ ID NO: 415328 - DNA, 120 bp, Artificial Sequence
  ENSG00000149256_69 (sequence is synthesized)
gacaacagcaagtctatcctcggggtacagtgtgaagtacagaagcagctcaaggcctttgtcaccttagaacggtttgaccagctctatggctccacaatcaccagctgccagcaggct

SEQ ID NO: 415329 - DNA, 120 bp, Artificial Sequence
  ENSG00000149256_70 (sequence is synthesized)
ccaaagaccaagaagtttgcatccagcggctcagtctttggcaagggggtcaagtttgccttgaaggatggccgagtgaccacagacatcatcagtgtggccaatgaggatgggcgaagg

SEQ ID NO: 415330 - DNA, 120 bp, Artificial Sequence
  ENSG00000149256_71 (sequence is synthesized)
gttgctgccatcttgaaccatgcccactacctagagaacctgcacttcaccattgatggggtggatacccattactttgtgaaaccaggaccttcagaaggtgacctggccatcctgggc

SEQ ID NO: 415331 - DNA, 120 bp, Artificial Sequence
  ENSG00000149256_72 (sequence is synthesized)
ctcagtggggggcggcgaaccctggagaatggggtcaacgtcactgtgtcccagatcaacacagtacttaatggcaggactagacgctacacagacatccagctccagtacggggcactg

SEQ ID NO: 415332 - DNA, 120 bp, Artificial Sequence
  ENSG00000149256_73 (sequence is synthesized)
tgcttgaacacacgctacgggacaacgttggatgaggagaaggcacgggtcctggagctggcccggcagagagccgtgcgccaagcgtgggcccgcgagcagcagagactgcgggaaggg

SEQ ID NO: 415333 - DNA, 120 bp, Artificial Sequence
  ENSG00000149256_74 (sequence is synthesized)
gaggaaggcctgcgggcctggacagagggggagaagcagcaggtgctgagcacagggcgggtgcaaggctacgacggctttttcgtgatctctgtcgagcagtacccagaactgtcagac

SEQ ID NO: 415334 - DNA, 120 bp, Artificial Sequence
  ENSG00000149256_75 (sequence is synthesized)
agcgccaacaacatccacttcatgagacagagcgagatgggccggaggtgacagagaggaccaaggacttcttgccaaagacagctactcttttgtggccgcatacctgactgtgttgta

SEQ ID NO: 415335 - DNA, 120 bp, Artificial Sequence
  ENSG00000149256_76 (sequence is synthesized)
cttttaaaaaaatgattttttaacaagtgcagaaacaaaaagatactggttgcattgtaactcatgcaacatccttttttttagaaaagaaaaacacagatttggccttcgcacattttt

SEQ ID NO: 415336 - DNA, 120 bp, Artificial Sequence
  ENSG00000149256_77 (sequence is synthesized)
tgcaaagaacagaaggtatttttttctgtagtgtgatcacaatgaaaactttattgtcttttgttccctttttccttgaggatttttcccttgtcgtttggggtatgtatctcctctctg

SEQ ID NO: 415337 - DNA, 120 bp, Artificial Sequence
  ENSG00000149256_78 (sequence is synthesized)
agatgcatctcctggggtgtgtcctcgtctgtccctaggtacccagtgtgatgtgggacatgaatgtctgtgctaacttgtctcatgtgcaaccctttcttcttcgactggggtcgggca

SEQ ID NO: 415338 - DNA, 120 bp, Artificial Sequence
  ENSG00000149256_79 (sequence is synthesized)
ggagtaaagggagtgatgggccagtacaacaccccttccaagggggcctgggaggagggtctgtaggacctgaggctccttggcagggctcctgcagaagagtggtggatttcttctcac

SEQ ID NO: 415339 - DNA, 120 bp, Artificial Sequence
  ENSG00000149256_80 (sequence is synthesized)
cttgttctctgcctccagaggatcatagatggcttcatcttgctccagggaatttcatggtgttgttcagcaccttttttaagctgccccaaactcctgttcaagctttctattttgatg

SEQ ID NO: 415340 - DNA, 120 bp, Artificial Sequence
  ENSG00000149256_81 (sequence is synthesized)
ctgaatgaaaccccctaccacttttgcaaatcctgtgtagttgtcggtgccacccccatgctgggatagagaaagtgtctcccaggtcctttcccccagaccagtgacataacatcctgg

SEQ ID NO: 415341 - DNA, 120 bp, Artificial Sequence
  ENSG00000149256_82 (sequence is synthesized)
gctcagagtcccatcctcccgggagggaaagcacccaggatgcctgtgattggttggtcctccatgatgttcctgttcatctcctcctttctcccaaagccagatgtgagaacgagcact

SEQ ID NO: 415342 - DNA, 120 bp, Artificial Sequence
  ENSG00000149256_83 (sequence is synthesized)
gcacagcaagccttcaatgtgggcaccatgtccacagaacagaaggccacccatggcaaaggcatggcagtggtggcgagggcaccagcctgccttccgaggcaaagccctctctctatg

SEQ ID NO: 415343 - DNA, 120 bp, Artificial Sequence
  ENSG00000149256_84 (sequence is synthesized)
actttgagtatcttccctccaccactcagccgccaccactgagacgtaggaatgtggagggaggtgcttggtggcctttgattctggaaaaatgcttaacaaaaaaagccagccaaagag

SEQ ID NO: 415344 - DNA, 120 bp, Artificial Sequence
  ENSG00000149256_85 (sequence is synthesized)
aggaaggcataagctaagcatccttctaaccagttcccaaagtcccatctgcctccatgtaccagctgatcgcagagctggactggggcaggctgggcttccaggaaattcctgaagttc

SEQ ID NO: 415345 - DNA, 120 bp, Artificial Sequence
  ENSG00000149256_86 (sequence is synthesized)
tgaaacagcttcccctctagagaagcccacccaatgtgttttttagtgacaggaagaaaggagggaagagctgatgtggtgtggcctgcccatatcatacaaccccaccaggagcagggc

SEQ ID NO: 415346 - DNA, 120 bp, Artificial Sequence
  ENSG00000149256_87 (sequence is synthesized)
agttcccaaggtgggtgcccgtagatctgggaggccaggctggcatgattcctgtgaagaactgtgcctgtgtcgtcagggagaggcctgagccctctcagaagcagggacagcccacac

SEQ ID NO: 415347 - DNA, 120 bp, Artificial Sequence
  ENSG00000149256_88 (sequence is synthesized)
ctgaagagcacgcccaagctgaggcagcagccagcaggctgggggagcagtgagggcagggggagtcacagccagagctgggagccccttgttcaaggattccattcctggttcatccgc

SEQ ID NO: 415348 - DNA, 120 bp, Artificial Sequence
  ENSG00000149256_89 (sequence is synthesized)
ctaattaccattgtcattaccactcacaggaggctctgggagatgggaggggaagccaaatgcttccttttaagctgggcttcttagaaaatggaacttttatgggttacatttacatta

SEQ ID NO: 415349 - DNA, 120 bp, Artificial Sequence
  ENSG00000149256_90 (sequence is synthesized)
agtgtggaaaatgaattctgagtctgagctattccccgtggaaaccttgttggactgataagctcatggcacctctatagccttactcacatagtcttcagaatattacacaagttaatg

SEQ ID NO: 415350 - DNA, 120 bp, Artificial Sequence
  ENSG00000149256_91 (sequence is synthesized)
aaactgagaaggtctgactgcatgaggatcggagcagcatgtagtctgggttctgcctggcagagggaggcaaccaaaacttcttggggagaggagatttcgccttaacgtcatcccact

SEQ ID NO: 415351 - DNA, 120 bp, Artificial Sequence
  ENSG00000149256_92 (sequence is synthesized)
gggattagaggatgtgtttcgctaagtgctcttcctgtttccaaaaaaaaagccaccctgctgcagcagtgcgctttggcctgcttgtccactggttgcccattgcccctggatccagag

SEQ ID NO: 415352 - DNA, 120 bp, Artificial Sequence
  ENSG00000149256_93 (sequence is synthesized)
ctctactgagtcagatacagtgctctgcaggcctgctgtgggaggcatgagctggagatgggggctcccatctggcaggatcattcttggatgagatggaaaacagtttggcctgaagaa

SEQ ID NO: 415353 - DNA, 120 bp, Artificial Sequence
  ENSG00000149256_94 (sequence is synthesized)
cacaagttttgtcctccagaagggacttacgcctctcaaaatgtactcttcataccaagggcccttgggcaaagtgctcctgcccagttgatcagtcccatcctggctgcctgacatcag

SEQ ID NO: 415354 - DNA, 120 bp, Artificial Sequence
  ENSG00000149256_95 (sequence is synthesized)
tgaagacctgctggggatgtctgctcagaggtcaggaacggcatgcggtccacaggaaccagctccctacgcttcccccacgccctgtccctcctccacagccccctccccaaaggaata

SEQ ID NO: 415355 - DNA, 88 bp, Artificial Sequence
  ENSG00000149256_96 (sequence is synthesized)
cgccctgtccctcctccacagccccctccccaaaggaatagggtggacttttagggatcaaaaacagaattattgggtgtttcataga

SEQ ID NO: 415356 - DNA, 120 bp, Artificial Sequence
  ENSG00000149256_97 (sequence is synthesized)
ctggggttacaggtgtgagccactgcgcctggactgagtgtttgtttctttaaaggatcttatatttttcctgtgctacataccaccacagcagcccagcttctgtggggagagaagttg

SEQ ID NO: 415357 - DNA, 120 bp, Artificial Sequence
  ENSG00000149256_98 (sequence is synthesized)
accacagcagcccagcttctgtggggagagaagttgaaggatcccgaagctttagaaaaaggatctcagctgtggcacaggcagtgttatgcgcctcactgccacattggtgctgttgta

SEQ ID NO: 415358 - DNA, 120 bp, Artificial Sequence
  ENSG00000149256_99 (sequence is synthesized)
ttgaaggtggtgcttctggccttggcccttttgagttggtttccatttgggctgcaggtgactcagtgactccctcctcaagctgtcctcctgctaagaccagcagtcacaaacccatgg

SEQ ID NO: 415359 - DNA, 120 bp, Artificial Sequence
  ENSG00000149256_100 (sequence is synthesized)
caagggtgagtgtgaaggcctaaccctgtgcctatgtaataggctccaagcatcgactcccatcctgagaggaccggcccttttgacactcaccaaccaaatctgttcattcgatagagt

SEQ ID NO: 415360 - DNA, 120 bp, Artificial Sequence
  ENSG00000149256_101 (sequence is synthesized)
gaccaggcctccctcacctgcccaggtgtatgatcctacagttcctgccttctctcctaccccgcacagctgccaactggtcctacatcctcagcccctctgccaccaccttaaatagga

SEQ ID NO: 415361 - DNA, 120 bp, Artificial Sequence
  ENSG00000149256_102 (sequence is synthesized)
ctttactgattccccaactttgtttttttgtaggatgagatttcctttttatcccacccccccacaccccaaacagacattgctggagggcagactggaggaaggggaaggcatgcaggt

SEQ ID NO: 415362 - DNA, 120 bp, Artificial Sequence
  ENSG00000149256_103 (sequence is synthesized)
aaattactgccttgtcagcctctgaccctcatctctcagaattgttggctgagaattaacccaaggaccacaccagtgcctgatttctacttagggagagaggattggaaacgatcccta

SEQ ID NO: 415363 - DNA, 120 bp, Artificial Sequence
  ENSG00000149256_104 (sequence is synthesized)
agaaactgactgagggtgagaatggccaggaggtgtgtgtccaaataaccaggagggggcacagaagatgatggcaaggcagactgggcagtgttttgtagacacagaacaaagaatcag

SEQ ID NO: 415364 - DNA, 120 bp, Artificial Sequence
  ENSG00000149256_105 (sequence is synthesized)
aatttgaaaaaagaagaaaaacaaatcttcgcagctgcaactttaaagtatcacctttatagatggcagggatttccattatgcaaatggaatctaagatttcaatgtgaaatcttagaa

SEQ ID NO: 415365 - DNA, 120 bp, Artificial Sequence
  ENSG00000149256_106 (sequence is synthesized)
tgcagttttaccacttgcagtcttgtatttgtggtggccatgtggtgagggcggtgatgctgagctttctgcccaggaggaatgagctttcaagctctcagcagggtgtcaggcttgggg

SEQ ID NO: 415366 - DNA, 120 bp, Artificial Sequence
  ENSG00000149256_107 (sequence is synthesized)
atttgagcatccactgctcaaagtccaggctattctccagtcctcacggcagccactaagcccaggagccagacctggcccggggacacatctcctgagggatcccagaaagaacccagt

SEQ ID NO: 415367 - DNA, 120 bp, Artificial Sequence
  ENSG00000149256_108 (sequence is synthesized)
ctttcctttcccttggggtccttgttagaatgaaaacctctctatttaaggcacatcattcccagctaggtttatacacttgtctatattttactggaggaaagggaattaaaaaagaac

SEQ ID NO: 415368 - DNA, 120 bp, Artificial Sequence
  ENSG00000149256_109 (sequence is synthesized)
tctgcagttcaaggccctttcatttaaccttccaaaaacagcaaactcattttaaagactcattgctgaggtgatagagagaaaccttatcctctccaaccttcacattcacaaaaacca

SEQ ID NO: 415369 - DNA, 120 bp, Artificial Sequence
  ENSG00000149256_110 (sequence is synthesized)
tccttgtgtacttgactgccctagacagtggtgactcttaggtttcattacgaatgtggaatatcagagtgtgggaaggcccaggcgagggccaatgttgtgtttcttaccccctctgga

SEQ ID NO: 415370 - DNA, 120 bp, Artificial Sequence
  ENSG00000149256_111 (sequence is synthesized)
atgccaaaggcaaggtactaggtgacctcctggtccccaagaaaatgtgatttattctgagggcgaacagccaagggaggactagtctggagcacgctcggccgtcctggcaggagctga

SEQ ID NO: 415371 - DNA, 120 bp, Artificial Sequence
  ENSG00000149256_112 (sequence is synthesized)
gcctcaggtgtctggcggtgccccagcagccctggattcacccaacaccagaatcccacttttctaaatccacctgttgttctgagcacctctgaacccgcagcttcggcaaaaggagtc

SEQ ID NO: 415372 - DNA, 120 bp, Artificial Sequence
  ENSG00000149256_113 (sequence is synthesized)
tgtaccaagctgcttctggatgaccaacactggagactctggccttaccatgtggaaatcattttcctgaagtctggaactaattttgagaagtttttttctcaacacttttgtgtttct

SEQ ID NO: 415373 - DNA, 120 bp, Artificial Sequence
  ENSG00000149256_114 (sequence is synthesized)
aacactgtatcttgactgtgtaaataccaacaaggctgtaaataaatgcagatgtagataccttctagaaaaaaaaaagcataaaaacaaaaccagaagtgatcccgtgtagccttcgtt

SEQ ID NO: 415374 - DNA, 120 bp, Artificial Sequence
  ENSG00000149256_115 (sequence is synthesized)
gacaaataaagactattttgtgtttacaggtgtctggtggcctttgcttggagataaaggcttcctcttgcctgtcccagcccccgagccatcctgggtttgcacttccctgctggctgc

SEQ ID NO: 415375 - DNA, 120 bp, Artificial Sequence
  ENSG00000149256_116 (sequence is synthesized)
tatcaggatgacctgggagaggactcagtcctaggccccagggtccctctaaatccctccaggctgcagctctgtcaagagggatgtccagagggtctctaagaccctgaagcttgactt

SEQ ID NO: 415376 - DNA, 120 bp, Artificial Sequence
  ENSG00000149256_117 (sequence is synthesized)
tgcaattgcatgacaggaataaatatcacagctcctctgacatcactagtgcagcgtggctccccatcccactgctgccctcgttcagggacaggctgaaggggccaacgaacccaaccc

SEQ ID NO: 415377 - DNA, 120 bp, Artificial Sequence
  ENSG00000149256_118 (sequence is synthesized)
tcccagaggagggagccttgctccaccactgggcacacagagtcatccaccatgccactgccttccacaagggatgtgagccgttgcactttaaaaataaatgactgtatattcatcata

SEQ ID NO: 415378 - DNA, 120 bp, Artificial Sequence
  ENSG00000149256_119 (sequence is synthesized)
agatcaccccgctgctttgtagaaggcggtggtggggcaagctcgggattccaatcgccggggtggggggtggggggaagagggtgcccatgtactgagctctgaggccgagtaaggaga

SEQ ID NO: 415379 - DNA, 120 bp, Artificial Sequence
  ENSG00000149256_120 (sequence is synthesized)
ctctggatctctccacctggtctgattctgtccagaggcctgggaggattggcattattaagatgttattgaaaatgctggcacatataatcggcttggattagaaaccaaagctcttcg

SEQ ID NO: 415380 - DNA, 120 bp, Artificial Sequence
  ENSG00000149256_121 (sequence is synthesized)
cagagtaacaagaaaagatcccgcaccatcctccaggatccaatggccttggagagagggctgcagggcccacggacattgctgactcttcagaacgtgctgacatggagccaggtagac

SEQ ID NO: 415381 - DNA, 120 bp, Artificial Sequence
  ENSG00000149256_122 (sequence is synthesized)
tgagtgtctcactttccctttgaatgttctggaggcatcccacatcatcatgtgatcacaattactcacctgcagctgtggcagtgggcaccccatttataccctatgaccatttcagta

SEQ ID NO: 415382 - DNA, 120 bp, Artificial Sequence
  ENSG00000149256_123 (sequence is synthesized)
cagccagcccaacttccaagtctactttcttctcctgaagctctttctggcctctaaaggcagctttgcccatacatggagcagatcagaagtgaaaagaaccggctttctctgtggtta

SEQ ID NO: 415383 - DNA, 120 bp, Artificial Sequence
  ENSG00000149256_124 (sequence is synthesized)
ctctctaagcagaagagccctggtggcctctgtgcatgaagaccatttggggcctaatgaagtgcaaagttgggaaattcagctcctaaccaactcatcaccagaaacacagtggcagac

SEQ ID NO: 415384 - DNA, 120 bp, Artificial Sequence
  ENSG00000149256_125 (sequence is synthesized)
agctgttagggccgaacattatcatcatcataatacctatcacggagtgaacccctgctatgtgccaggcactgtccaggcatcttcactaagattacagcctttgacactcactacagt

SEQ ID NO: 415385 - DNA, 120 bp, Artificial Sequence
  ENSG00000149256_126 (sequence is synthesized)
ctaatacagtgtaatttcttgccttcattttctagtggaggagagaaaatgggatttccccaaagatgtactgctgtaagtggtagaatcaagatttattataaaatgaggttgatctga

SEQ ID NO: 415386 - DNA, 120 bp, Artificial Sequence
  ENSG00000149256_127 (sequence is synthesized)
tgtgccgggtgcctgggtggtggggctggggttttatttataatattgatttcctgctccactgccggggctctggtgaagttggtgaaaaattgctttactctcaggggtcaaatgtca

SEQ ID NO: 415387 - DNA, 120 bp, Artificial Sequence
  ENSG00000149256_128 (sequence is synthesized)
gcagggcccacggacattgctgactcttcagaacgtgctgacatggagccagaccactcggccctgagtgcggcgaggaccctgtttgtggatgtggaggagcgcgggccggaggccatg

SEQ ID NO: 415388 - DNA, 120 bp, Artificial Sequence
  ENSG00000149256_129 (sequence is synthesized)
ggttaaggctccaactctggcatcaaacagacctagatttgaactgtggctctgccatttttagtattctcagctactttacctgtgcaaagggataaacagtacctaataggtggtgag

SEQ ID NO: 415389 - DNA, 120 bp, Artificial Sequence
  ENSG00000149256_130 (sequence is synthesized)
gattgatgagaactataaatgaaacacttgacaccagtacctggcacagaacagatgcttcagaaatgctgcctgttattcattgtcatctctggatctcactgaagagaagagacaaaa

SEQ ID NO: 415390 - DNA, 120 bp, Artificial Sequence
  ENSG00000149256_131 (sequence is synthesized)
tggtctctgaaagcttttcttttgctccgtcctgtccgtaagtgacagagctcagtgagccccggttggcttggacctagcacatgaggctcagggaaggggcggctccttgtctttgta

SEQ ID NO: 415391 - DNA, 120 bp, Artificial Sequence
  ENSG00000149256_132 (sequence is synthesized)
aataacaaataagcattctcatctcataggcaggcatgtgcgtagcagtttacaaaatactctccttcaaattatcaccctggatcctcaaaaatcctttgaaggtagcaggtcatagat

SEQ ID NO: 415392 - DNA, 120 bp, Artificial Sequence
  ENSG00000149257_0 (sequence is synthesized)
agagggaggggccgggggccggggaggttttgagggaggtctttggctttttttggcggagctggggcgccctccggaagcgtttccaactttccagaagtttctcgggacgggcaggag

SEQ ID NO: 415393 - DNA, 120 bp, Artificial Sequence
  ENSG00000149257_1 (sequence is synthesized)
ggggtggggactgccatatatagatcccgggagcaggggagcgggctaagagtagaatcgtgtcgcggctcgagagcgagagtcacgtcccggcgctagcccagcccgacccaggcccac

SEQ ID NO: 415394 - DNA, 120 bp, Artificial Sequence
  ENSG00000149257_2 (sequence is synthesized)
cgtggtgcacgcaaaccacttcctggccatgcgctccctcctgcttctcagcgccttctgcctcctggaggcggccctggccgccgaggtgaagaaacctgcagccgcagcagctcctgg

SEQ ID NO: 415395 - DNA, 120 bp, Artificial Sequence
  ENSG00000149257_3 (sequence is synthesized)
cactgcggagaagttgagccccaaggcggccacgcttgccgagcgcagcgccggcctggccttcagcttgtaccaggccatggccaaggaccaggcagtggagaacatcctggtgtcacc

SEQ ID NO: 415396 - DNA, 120 bp, Artificial Sequence
  ENSG00000149257_4 (sequence is synthesized)
cgtggtggtggcctcgtcgctagggctcgtgtcgctgggcggcaaggcgaccacggcgtcgcaggccaaggcagtgctgagcgccgagcagctgcgcgacgaggaggtgcacgccggcct

SEQ ID NO: 415397 - DNA, 120 bp, Artificial Sequence
  ENSG00000149257_5 (sequence is synthesized)
gggcgagctgctgcgctcactcagcaactccacggcgcgcaacgtgacctggaagctgggcagccgactgtacggacccagctcagtgagcttcgctgatgacttcgtgcgcagcagcaa

SEQ ID NO: 415398 - DNA, 120 bp, Artificial Sequence
  ENSG00000149257_6 (sequence is synthesized)
gcagcactacaactgcgagcactccaagatcaacttccgcgacaagcgcagcgcgctgcagtccatcaacgagtgggccgcgcagaccaccgacggcaagctgcccgaggtcaccaagga

SEQ ID NO: 415399 - DNA, 120 bp, Artificial Sequence
  ENSG00000149257_7 (sequence is synthesized)
cgtggagcgcacggacggcgccctgctagtcaacgccatgttcttcaagccacactgggatgagaaattccaccacaagatggtggacaaccgtggcttcatggtgactcggtcctatac

SEQ ID NO: 415400 - DNA, 120 bp, Artificial Sequence
  ENSG00000149257_8 (sequence is synthesized)
cgtgggtgtcatgatgatgcaccggacaggcctctacaactactacgacgacgagaaggaaaagctgcaaatcgtggagatgcccctggcccacaagctctccagcctcatcatcctcat

SEQ ID NO: 415401 - DNA, 120 bp, Artificial Sequence
  ENSG00000149257_9 (sequence is synthesized)
ggatggggaagatgcagaagaaggctgttgccatctccttgcccaagggtgtggtggaggtgacccatgacctgcagaaacacctggctgggctgggcctgactgaggccattgacaaga

SEQ ID NO: 415402 - DNA, 120 bp, Artificial Sequence
  ENSG00000149257_10 (sequence is synthesized)
acaaggccgacttgtcacgcatgtcaggcaagaaggacctgtacctggccagcgtgttccacgccaccgcctttgagttggacacagatggcaacccctttgaccaggacatctacgggc

SEQ ID NO: 415403 - DNA, 120 bp, Artificial Sequence
  ENSG00000149257_11 (sequence is synthesized)
gcgaggagctgcgcagccccaagctgttctacgccgaccaccccttcatcttcctagtgcgggacacccaaagcggctccctgctattcattgggcgcctggtccggcctaagggtgaca

SEQ ID NO: 415404 - DNA, 120 bp, Artificial Sequence
  ENSG00000149257_12 (sequence is synthesized)
agatgcgagacgagttatagggcctcagggtgcacacaggatggcaggaggcatccaaaggctcctgagacacatgggtgctattggggttgggggggaggtgaggtaccagccttggat

SEQ ID NO: 415405 - DNA, 120 bp, Artificial Sequence
  ENSG00000149257_13 (sequence is synthesized)
actccatggggtgggggtggaaaaacagaccggggttcccgtgtgcctgagcggaccttcccagctagaattcactccacttggacatgggccccagataccatgatgctgagcccggaa

SEQ ID NO: 415406 - DNA, 120 bp, Artificial Sequence
  ENSG00000149257_14 (sequence is synthesized)
actccacatcctgtgggacctgggccatagtcattctgcctgccctgaaagtcccagatcaagcctgcctcaatcagtattcatatttatagccaggtaccttctcacctgtgagaccaa

SEQ ID NO: 415407 - DNA, 120 bp, Artificial Sequence
  ENSG00000149257_15 (sequence is synthesized)
attgagctaggggggtcagccagccctcttctgacactaaaacacctcagctgcctccccagctctatcccaacctctcccaactataaaactaggtgctgcagcccctgggaccaggca

SEQ ID NO: 415408 - DNA, 120 bp, Artificial Sequence
  ENSG00000149257_16 (sequence is synthesized)
cccccagaatgacctggccgcagtgaggcggattgagaaggagctcccaggaggggcttctgggcagactctggtcaagaagcatcgtgtctggcgttgtggggatgaactttttgtttt

SEQ ID NO: 415409 - DNA, 120 bp, Artificial Sequence
  ENSG00000149257_17 (sequence is synthesized)
gtttcttccttttttagttcttcaaagatagggagggaagggggaacatgagcctttgttgctatcaatccaagaacttatttgtacattttttttttcaataaaacttttccaatgaca

SEQ ID NO: 415410 - DNA, 120 bp, Artificial Sequence
  ENSG00000149257_18 (sequence is synthesized)
aatctgggggtgcgcgagggagtaagaggggcgaggggaccctgcgaagcgttgggtgccgagccagagcctacaaattggagtcctcggcactttgggggccgctggagggtttggaat

SEQ ID NO: 415411 - DNA, 120 bp, Artificial Sequence
  ENSG00000149257_19 (sequence is synthesized)
cgagagcccagggctagccagtgatggtgccagctgagggctagggcggagatcggagccgggttgggagtccgtgcactcggaggactgggaaaaagtgcagggacccctaaaaggtgg

SEQ ID NO: 415412 - DNA, 120 bp, Artificial Sequence
  ENSG00000149257_20 (sequence is synthesized)
tggtggcagatacgagactaggtgctgtgtaaagggggctgggggcagagagcagagcctctgcggaaagaaacagaggaggaaggagatgggtctggtgcctcttcccgcaagggtagg

SEQ ID NO: 415413 - DNA, 120 bp, Artificial Sequence
  ENSG00000149257_21 (sequence is synthesized)
gaggataggccggcctcgcagttccaggtcacttccgttctggggttgaggctcaggggcagcggtgattggtggcccagcctcctcacaggcttgctgagggaatttgagcttccggtg

SEQ ID NO: 415414 - DNA, 120 bp, Artificial Sequence
  ENSG00000149257_22 (sequence is synthesized)
gtgggaaaggaggtgaaatcgtctcgactcctggggtccgtgtgctctggtagaagtgggcgacagtggctcaatttctgatcagcagcttgcagcctagatgatggcagccaaaggaaa

SEQ ID NO: 415415 - DNA, 120 bp, Artificial Sequence
  ENSG00000149257_23 (sequence is synthesized)
gacttggccagcgaggctccctaccactccgaaaaaagagagtgggggtcagcagggtctgctctgctctggggattaaggggctgactagaaggatttgagtctttccttctgtccact

SEQ ID NO: 415416 - DNA, 120 bp, Artificial Sequence
  ENSG00000149257_24 (sequence is synthesized)
gccacagggttcttggagtaactgcagggtttaaactgcagggtctaacttccagaggctggggttccctgccccccagcttagagacattcctgaggtggctgaagagcaggaaggaga

SEQ ID NO: 415417 - DNA, 120 bp, Artificial Sequence
  ENSG00000149257_25 (sequence is synthesized)
atgaatgcacttccagactggcccagagtctcagcccctcctcttccttgtttcccgctggtccctctgggctgtacggcccggatggaggcctgaggaaaatgagggggctttggttct

SEQ ID NO: 415418 - DNA, 120 bp, Artificial Sequence
  ENSG00000149257_26 (sequence is synthesized)
ccggaattccggccggggccacaccctcctgtcttcagatggttcatgtacccatccccccttcccgtcctctcctttgtctcctctgtcaccgggactcccagcagagatttttttttt

SEQ ID NO: 415419 - DNA, 120 bp, Artificial Sequence
  ENSG00000149257_27 (sequence is synthesized)
gtactggctgtgtaacaggacaccgcatgcagccctcaggaggggctctgtgcttctgtgaggaaggacccctgtgctgggaaggcagacccctgtttatcccgagggacctggggtgac

SEQ ID NO: 415420 - DNA, 120 bp, Artificial Sequence
  ENSG00000149257_28 (sequence is synthesized)
cccctgccctggccttgtttctcccattttacagtgaggtggtcgatctccaaggtccctgtagattggggactggttgtgccctctgcgccaggggcctcctcaccatctctcctttgc

SEQ ID NO: 415421 - DNA, 120 bp, Artificial Sequence
  ENSG00000149257_29 (sequence is synthesized)
gagtacctccatagacaacactattctcacagtttgctgtgagaatgaagtaaccctcgttttacaaatgaggccaagctaggagagctgaggtctccccgagtcagtggctgagcttgg

SEQ ID NO: 415422 - DNA, 120 bp, Artificial Sequence
  ENSG00000149257_30 (sequence is synthesized)
attggaacacaggtctggctgtgagcaagggcagggttcaggccactctcagacattttttgttgttattttctggtcatggagacagaacttgcagaggaaaacgaagggtgggctgag

SEQ ID NO: 415423 - DNA, 90 bp, Artificial Sequence
  ENSG00000149257_31 (sequence is synthesized)
tgggaggccaaggtgggtggatcacatgagcccaggaatttgagaccagcctgggtaagatggcgaaaccccatgtctactggtagtccc

SEQ ID NO: 415424 - DNA, 120 bp, Artificial Sequence
  ENSG00000149257_32 (sequence is synthesized)
actctggaggctgaggtgggaggatcgctggagcctgggaattcaagactgcagtgtgtcatgattgtaccactgcactccagctgtaggatggagtgggacggaccttgtctcaaaaag

SEQ ID NO: 415425 - DNA, 120 bp, Artificial Sequence
  ENSG00000149257_33 (sequence is synthesized)
tgtaggatggagtgggacggaccttgtctcaaaaagaaaaagataaaaaaaaaattaagggtggtcatggggcactccctgcccagggcacagctgtcccccaggtaccagggagggtag

SEQ ID NO: 415426 - DNA, 120 bp, Artificial Sequence
  ENSG00000149257_34 (sequence is synthesized)
aaagcccacctcagagcatgtttccaaaatatctgacaagtgctagagccgggggtggccatagaggtggctgacctgagggcggaattaattctctatcatatgggagcagcaggcact

SEQ ID NO: 415427 - DNA, 120 bp, Artificial Sequence
  ENSG00000149257_35 (sequence is synthesized)
gactgtagggaaccgcatcctcagatggcatgtcctggggccaagaccccttcccaaagctgggaacatagactctgtgggctgggtgctctatagctgggccctgaagaatggagcaaa

SEQ ID NO: 415428 - DNA, 120 bp, Artificial Sequence
  ENSG00000149257_36 (sequence is synthesized)
gacctgtggcaaggataaatcaaggtctgcagccgggggtggctgtgggctgtgattgtgtttgggggcggccatgtgtctctgaccctgtgttttgccccaactacagcacactgggat

SEQ ID NO: 415429 - DNA, 120 bp, Artificial Sequence
  ENSG00000149257_37 (sequence is synthesized)
cgggactcccagcagagattttttttttgtactggctgtgtaacaggacaccgcatgcagccctcaggaggggctctgtgcttctaatgaaaaaggcaggcattgacctccctctgaggc

SEQ ID NO: 415430 - DNA, 120 bp, Artificial Sequence
  ENSG00000149257_38 (sequence is synthesized)
actcaccaattcagcaggtctgtcccaagaccccctggatgtccaggcagtgctgggctctgtgatgggggaagctggggcaggaggtgtgggccatgcccttgggaagatgatgataat

SEQ ID NO: 415431 - DNA, 120 bp, Artificial Sequence
  ENSG00000149257_39 (sequence is synthesized)
cttgggaagatgatgataataccagcagctaaatataacggaacattcctgtatgctaggcgttcttctaagcactttatatgtattattattattttttttttgagatggagtctcact

SEQ ID NO: 415432 - DNA, 120 bp, Artificial Sequence
  ENSG00000149257_40 (sequence is synthesized)
tttattaggtaggactataagtttcatcttagagatgaggaaactgaggctcagaaaggttaagtaacctgtgcaaagtcacacagctagtaattcagacatcttgcaccagagctaacc

SEQ ID NO: 415433 - DNA, 120 bp, Artificial Sequence
  ENSG00000149257_41 (sequence is synthesized)
ctcggtcactgcactgcctctgaggtctgaagtgcccccagttatagattgtttaagctagaggattatctaccatccaataatcagactggtagctatgggtcatctaggatggccaga

SEQ ID NO: 415434 - DNA, 120 bp, Artificial Sequence
  ENSG00000149257_42 (sequence is synthesized)
aacttaacacacattctcaagattctcccttgcaaccaccctgggtagtgggcagaggctcagagagaagcaatgactccctaaggttccccaggctcataagtggtggagttgcaatta

SEQ ID NO: 415435 - DNA, 120 bp, Artificial Sequence
  ENSG00000149257_43 (sequence is synthesized)
gacctcaaggtaaaaacataatagccgcctttttgtcaatcgagagatatttttgacttacccaaaaaaggaaactttcgtgtcattctttccttggatgccacaaatggttctcacctg

SEQ ID NO: 415436 - DNA, 120 bp, Artificial Sequence
  ENSG00000149257_44 (sequence is synthesized)
cagaatcgatccagacttgctgcccagagagcttggagagataaagctggagatgaagtggggcttaggctccaaaccagggacaagtggagctcgtactggtctgtgctgtagaccctg

SEQ ID NO: 415437 - DNA, 120 bp, Artificial Sequence
  ENSG00000149257_45 (sequence is synthesized)
ggagttcctggagaggggtcactgtctctctcctggtcctggccctgatccttccccagccccttctccagtggctgttgtcccacccccttctccccttgttcctctggtgtcttcctg

SEQ ID NO: 415438 - DNA, 120 bp, Artificial Sequence
  ENSG00000149257_46 (sequence is synthesized)
gaaccctcagtggagaccccaccccccagatatggggtagattgagttaggaaatttgaggcggatgacgtgtgcaaggtcatccgggtgggaagagctgggcctacctcgaatgcctgt

SEQ ID NO: 415439 - DNA, 120 bp, Artificial Sequence
  ENSG00000149257_47 (sequence is synthesized)
ctcatgaccccctgactctcaggacctcaggcctagttcctgtgtggccttgccagggaggtggatgttatcctgaagaatcctggacccggatgctgccattcactcagcccacagcca

SEQ ID NO: 415440 - DNA, 120 bp, Artificial Sequence
  ENSG00000149257_48 (sequence is synthesized)
tttactgtcctctctcctgcattgagagccagggagagcgctggacatgggccccgccctcagggagctccaagccagaaacacctggctgggctgggcctgactgaggccattgacaag

SEQ ID NO: 415441 - DNA, 120 bp, Artificial Sequence
  ENSG00000149257_49 (sequence is synthesized)
aagagtagaatcgtgtcgcggctcgagagcgagagtcacgtcccggcgctagcccagcccgacccaggtgaggggcgggagacgcctgcgtgcgtgcggcccgggggagcgccgagcaat

SEQ ID NO: 415442 - DNA, 120 bp, Artificial Sequence
  ENSG00000149260_0 (sequence is synthesized)
ggccagagcccgaggctgctgcgccgggcggctgcagcctccgctccagcgcccgcgccgtgccctgcatcccgggagcccggctggacccgcggcggctcggccgatgagaattctgaa

SEQ ID NO: 415443 - DNA, 120 bp, Artificial Sequence
  ENSG00000149260_1 (sequence is synthesized)
gagaattctgaagcacaaagaggttaactgctttgcacctcgctggcctcagtctccccatctgaggacgggtgttccccctcccctccctggggcagcagccaccatgttctcgtgtgt

SEQ ID NO: 415444 - DNA, 120 bp, Artificial Sequence
  ENSG00000149260_2 (sequence is synthesized)
gaagccctatgaggaccagaactactcagccctgaggcgggactgccggcgcaggaaggtgctcttcgaggaccccctcttccccgccactgacgactcactctactataagggcacgcc

SEQ ID NO: 415445 - DNA, 120 bp, Artificial Sequence
  ENSG00000149260_3 (sequence is synthesized)
ggggcccgccgtcaggtggaagcgacccaagggcatctgcgaggacccccgcctctttgtggatggcatcagctcccacgacctgcaccagggccaggtgggcaactgctggtttgtggc

SEQ ID NO: 415446 - DNA, 120 bp, Artificial Sequence
  ENSG00000149260_4 (sequence is synthesized)
agcctgctcgtcacttgcctcccgggagtcgctgtggcaaaaggtcatcccagactggaaggagcaggaatgggaccccgaaaagcccaacgcctacgcgggcatcttccacttccactt

SEQ ID NO: 415447 - DNA, 120 bp, Artificial Sequence
  ENSG00000149260_5 (sequence is synthesized)
ctggcgcttcggggaatgggtggacgtggtcatcgatgaccggctgcccacagtcaacaaccagctcatctactgccactccaactcccgcaatgagttttggtgcgccctagtggagaa

SEQ ID NO: 415448 - DNA, 120 bp, Artificial Sequence
  ENSG00000149260_6 (sequence is synthesized)
ggcctatgccaaactggcaggctgttaccaggccctggatggaggcaacacagcagacgcactggtggacttcacgggtggtgtttctgagcccatcgacctgaccgagggtgactttgc

SEQ ID NO: 415449 - DNA, 120 bp, Artificial Sequence
  ENSG00000149260_7 (sequence is synthesized)
caacgatgagactaagaggaaccagctctttgagcgcatgttaaaggtgcacagccggggcggcctcatcagtgcctccatcaaggcagtgacagcagctgacatggaggcccgcctggc

SEQ ID NO: 415450 - DNA, 120 bp, Artificial Sequence
  ENSG00000149260_8 (sequence is synthesized)
gtgcggcctggtaaagggccacgcatacgccgtcactgatgtgcgcaaggtgcgcctgggccacggcctactggccttcttcaagtcagagaagttggacatgatccgcctgcgcaaccc

SEQ ID NO: 415451 - DNA, 120 bp, Artificial Sequence
  ENSG00000149260_9 (sequence is synthesized)
agaaagtgagcaagagtgagcgggagaagatgggtgtgaccgtgcaggacgacggtgagttctggatgaccttcgaggacgtgtgccggtacttcacggacatcatcaagtgccgcgtga

SEQ ID NO: 415452 - DNA, 120 bp, Artificial Sequence
  ENSG00000149260_10 (sequence is synthesized)
tcaacacatcccacctgagcatccacaagacgtgggaggaggcccggctgcatggcgcctggacgctgcatgaggacccgcgacagaaccgcggtggcggctgcatcaaccacaaggaca

SEQ ID NO: 415453 - DNA, 120 bp, Artificial Sequence
  ENSG00000149260_11 (sequence is synthesized)
ccttcttccagaacccacagtacatcttcgaagtcaagaagccagaagatgaagtcctgatctgcatccagcagcggccaaagcggtctacgcgccgggagggcaagggtgagaacctgg

SEQ ID NO: 415454 - DNA, 120 bp, Artificial Sequence
  ENSG00000149260_12 (sequence is synthesized)
ccattggctttgacatctacaaggtggaggagaaccgccagtaccgcatgcacagcctgcagcacaaggccgccagctccatctacatcaactcacgcagcgtcttcctgcgcaccgacc

SEQ ID NO: 415455 - DNA, 120 bp, Artificial Sequence
  ENSG00000149260_13 (sequence is synthesized)
agcccgagggccgctatgtcatcatccccacaaccttcgagccaggccacactggcgagttcctgctccgagtcttcactgatgtgccctccaactgccgggagctgcgcctggatgagc

SEQ ID NO: 415456 - DNA, 120 bp, Artificial Sequence
  ENSG00000149260_14 (sequence is synthesized)
ccccacacacctgctggagctccctctgtggctacccccagctggtgacccaggtacatgtcctgggagctgctggcctcaaggactccccaacaggggctaactcttatgtgatcatca

SEQ ID NO: 415457 - DNA, 120 bp, Artificial Sequence
  ENSG00000149260_15 (sequence is synthesized)
agtgtgagggagacaaagtccgctcggctgtgcagaagggcacctccacaccagagtacaatgtgaaaggcatcttctaccgcaagaagctgagccagcccatcactgtacaggtctgga

SEQ ID NO: 415458 - DNA, 120 bp, Artificial Sequence
  ENSG00000149260_16 (sequence is synthesized)
accaccgagtgctgaaggatgaatttctgggccaggtgcacctaaaggctgacccggacaacctccaggccctgcataccctccacctccgggaccgaaatagccggcagcccagcaacc

SEQ ID NO: 415459 - DNA, 120 bp, Artificial Sequence
  ENSG00000149260_17 (sequence is synthesized)
tgccaggcactgtggccgtgcacattctcagcagcacctccctcatggctgtctgacacctgcccacctacctggctctgaccgttcccaccaccatctgcatgtccccactgggcctga

SEQ ID NO: 415460 - DNA, 120 bp, Artificial Sequence
  ENSG00000149260_18 (sequence is synthesized)
gtctagcctgggagccaggatactggggtccttttcccactcttccactgacttgctgtgtgaccttaggaagtctctgcccctctctcagcctcagtgtcccgagggccccgaagcatt

SEQ ID NO: 415461 - DNA, 80 bp, Artificial Sequence
  ENSG00000149260_19 (sequence is synthesized)
agtcccagctggatctccggccagagcccgaggctgctgcgccgggcggctgcagcctccgctccagcgcccgcgccgtg

SEQ ID NO: 415462 - DNA, 120 bp, Artificial Sequence
  ENSG00000149260_20 (sequence is synthesized)
accactgctaagggactctatccattgagcacattttcctaaggccctgctgtctgccgaggagcgccaagaagatgtcacttgtttacacacgaactgccacatccccaagctccgttc

SEQ ID NO: 415463 - DNA, 120 bp, Artificial Sequence
  ENSG00000149260_21 (sequence is synthesized)
ttgcccctcgtgtcctaggcccaacccagcctcccagacctcactttccccatcagcaatacctggtgttctcccaccttgaaaggactcttggctcctgccgggttcctgctcaggctg

SEQ ID NO: 415464 - DNA, 120 bp, Artificial Sequence
  ENSG00000149260_22 (sequence is synthesized)
gaattgggaaaatatgcaggtgacatttgttcattctctaatcccatcctctcacccatccatttcctcactcagtggagatttgccaaatgaataaacgacacctttgaggccccaggt

SEQ ID NO: 415465 - DNA, 120 bp, Artificial Sequence
  ENSG00000149260_23 (sequence is synthesized)
gaagcggggccctactccggcctctgccttgggcctcgcctctgtcctcaggtcctctcagaggcagatacctaggggagctgctgctgcctgctcattctagcttccgattccattccc

SEQ ID NO: 415466 - DNA, 120 bp, Artificial Sequence
  ENSG00000149260_24 (sequence is synthesized)
agcccctgcgttaaggtccctggagaggtggcgtcagtgggggtgaggaagggcatcttcctgactcctctgcccagtgctggaaggagcatgcctgggttagtgggccaggggccaggc

SEQ ID NO: 415467 - DNA, 120 bp, Artificial Sequence
  ENSG00000149260_25 (sequence is synthesized)
agctgggggcctttggggaccagaaggggagatgtgctcccagagcctctctgctgtaagaccccagcttttcctggaagatgggactctggggtgtgtggtgctcaccagagtcaggcc

SEQ ID NO: 415468 - DNA, 120 bp, Artificial Sequence
  ENSG00000149260_26 (sequence is synthesized)
acccactgggctcggcaggagatagggagccccatcacctgaccacagccccccaccaacattcccccaaaatgcagcctaggaggccgcagtgctcttcttcctgcccagaccaaaatg

SEQ ID NO: 415469 - DNA, 120 bp, Artificial Sequence
  ENSG00000149260_27 (sequence is synthesized)
ttccttttagtcctcaatgttttatattctttttgttttgaaaatctcaattttaatcaggggttttaaaagaaaattgaaagcctgaacctccatttttcttcttggctccagttttgc

SEQ ID NO: 415470 - DNA, 120 bp, Artificial Sequence
  ENSG00000149260_28 (sequence is synthesized)
tggtcctctggagaactcttcgtgagcactggtgccgtgacccacttgggatctctgctgtgcccttctcgggcttccagaccaggtgtagcaaatgaaaaagtgcagttaattcaagaa

SEQ ID NO: 415471 - DNA, 120 bp, Artificial Sequence
  ENSG00000149260_29 (sequence is synthesized)
caggaatccctgtgtccttgctgggatttccttttgggaacctgactttccgactccagatcctgctgtctggatcagtgttctggctggaggtgctggattctctgattttgcctcctc

SEQ ID NO: 415472 - DNA, 120 bp, Artificial Sequence
  ENSG00000149260_30 (sequence is synthesized)
actctgtgtctggctttgctcctgggtcttggccctgggccatatgaggggccaggaaatgaacgacaaggaggataagagtgttctttcttgaaagccgggacttcccctcaagaacct

SEQ ID NO: 415473 - DNA, 120 bp, Artificial Sequence
  ENSG00000149260_31 (sequence is synthesized)
gggcctggggccgggactctgcatgactgggagcaagtcacttaaacctcctgtgcctcgatttcccccttctacaaagtggggccaatgattcttgtgtgtcagcactgttactaccga

SEQ ID NO: 415474 - DNA, 120 bp, Artificial Sequence
  ENSG00000149260_32 (sequence is synthesized)
gtgctgagtaagggcaaaataatacccctttctctatgtatctctgtatgcacacgcactatatatatatatatatatatatatacattcatgtaatcaccacttctcgatgtctatttc

SEQ ID NO: 415475 - DNA, 120 bp, Artificial Sequence
  ENSG00000149260_33 (sequence is synthesized)
aaatcaaggctcctgagtagggggtgaagtgagccagcttgcacctcaggctaacacataggactttgctcagccatgtcccctgggatacaggggcacaccaggaccaagtggcagacc

SEQ ID NO: 415476 - DNA, 120 bp, Artificial Sequence
  ENSG00000149260_34 (sequence is synthesized)
tgtgggcttcagcctcggggccggggcatgcctgccaccccctgacaaaaacaggttccacagtgctacccttgcttcctgccccttgaggtgggccaggctggctcctggctatgcagg

SEQ ID NO: 415477 - DNA, 120 bp, Artificial Sequence
  ENSG00000149260_35 (sequence is synthesized)
gatctctggtccccaggagaccttgggggccaggcaggtaaggatcaggggtgataggggagagcaattactttgttcactgtatgcacccgcgggggcctgggagtccccatttgcagg

SEQ ID NO: 415478 - DNA, 120 bp, Artificial Sequence
  ENSG00000149260_36 (sequence is synthesized)
tgggtagggcctccagcccacaccacccagacctaggcttccctcttctcaggatccaccacagggttaggggacaggaagcctgttctattctcaataaatcttacaaaattccaaaaa

SEQ ID NO: 415479 - DNA, 120 bp, Artificial Sequence
  ENSG00000149260_37 (sequence is synthesized)
tgccaagtaggtgccagcagcaggcaggtgggtgggaggcccagacgggggtggcaccggatgggctcctcgtggtattccgttagccagggctttaggcacagagaagtgaggggctgg

SEQ ID NO: 415480 - DNA, 120 bp, Artificial Sequence
  ENSG00000149260_38 (sequence is synthesized)
gtttggtggatgaggaaggggaagattactggtggttggggccgggccctgggaggctctgggcatctactgggcccccactgctcctccctcaggcctcagggccccttgcagcccctt

SEQ ID NO: 415481 - DNA, 120 bp, Artificial Sequence
  ENSG00000149260_39 (sequence is synthesized)
agccttcctgcattggaggccttgctgggcaccaggaggaggcatccttgagcatagccaggtggggtcacctatggccgcaccgcctggcctggaacctgaggccttccacgtgttgtg

SEQ ID NO: 415482 - DNA, 120 bp, Artificial Sequence
  ENSG00000149260_40 (sequence is synthesized)
atgcccagtgtgtggtgacagtcagcatggcgggaccccatgtgcctgtcagaccttgagaacggaatgaagccaccgggccctgcagaggctgggtacatgctgagtccttggcatctg

SEQ ID NO: 415483 - DNA, 120 bp, Artificial Sequence
  ENSG00000149260_41 (sequence is synthesized)
atgtgcctggccacgccgtggcactttgtttatactcttgtgctggtacattcattgcatgctagtgtcttgtgacatattgttgtgactttgccatgtgacgatcttcactagtgtgac

SEQ ID NO: 415484 - DNA, 120 bp, Artificial Sequence
  ENSG00000149260_42 (sequence is synthesized)
cagaacacttttttcaggattgtcaggcaggtcctggcagctggtgatggcatttcgtggacaggtgctgtgacctctgcagatcctgatacttggttgtgctgttggagtcagaaaccc

SEQ ID NO: 415485 - DNA, 120 bp, Artificial Sequence
  ENSG00000149260_43 (sequence is synthesized)
cactgacattgttaccagggggattcctattgccctctattttttttgtttgtttgttttacagagggtcttgctctgtaacccagaccagagggcagtggtgctgtcatagctcattac

SEQ ID NO: 415486 - DNA, 120 bp, Artificial Sequence
  ENSG00000149260_44 (sequence is synthesized)
agtctcaaactcctggactcaaacgatcctcccacctcagtctccctagtagttgggactataggtgaacaccaccatgcctggctaatttttaagttttttgtagagctggggtctcgc

SEQ ID NO: 415487 - DNA, 81 bp, Artificial Sequence
  ENSG00000149260_45 (sequence is synthesized)
ctggctaatttttaagttttttgtagagctggggtctcgctttgttgcccatgctgaccttgaacgtccagcttcaagtgt

SEQ ID NO: 415488 - DNA, 120 bp, Artificial Sequence
  ENSG00000149260_46 (sequence is synthesized)
gagatataattcacagagcatgcaattcagccatgtaaagtatacaatctaatgacttttgtgtgatcagagtttatgcaaccatcaccacaatcaactgtagaacattttcatctcccc

SEQ ID NO: 415489 - DNA, 120 bp, Artificial Sequence
  ENSG00000149260_47 (sequence is synthesized)
aaaagaaacccactccctttaaccaccaccacccattcccattgacctcttcccttcagccctgggcaaacacgaatccgcttctgttattatagatttgcctgttccggacatttcata

SEQ ID NO: 415490 - DNA, 120 bp, Artificial Sequence
  ENSG00000149260_48 (sequence is synthesized)
gccggttgtctctccggtggggagtgagcgagcacacagcccccaccccaccccgggtgagagagaatgtcctgcacagggacgcccagctgtatctacctgctgtcagcactttctctg

SEQ ID NO: 415491 - DNA, 120 bp, Artificial Sequence
  ENSG00000149262_0 (sequence is synthesized)
aagctgagagggcccgcgggtaggcatggcggcgcaccttaagaagcgggtttatgaggaattcacgaaagtggttcagccacaggaggaaattgctactaagaaactccgactaacaaa

SEQ ID NO: 415492 - DNA, 120 bp, Artificial Sequence
  ENSG00000149262_1 (sequence is synthesized)
accaagtaaatctgcagcactccacatagatctgtgtaaagctacctccccagcagatgctttgcaatacttgctccagtttgccaggaagcctgtcgaggcggaaagcgtagagggagt

SEQ ID NO: 415493 - DNA, 120 bp, Artificial Sequence
  ENSG00000149262_2 (sequence is synthesized)
agtcaggattctcttggaacattattacaaggagaatgatccatctgtgagactgaaaattgcatcattgttgggtttattatcaaagacagcaggattttcaccagactgcattatgga

SEQ ID NO: 415494 - DNA, 120 bp, Artificial Sequence
  ENSG00000149262_3 (sequence is synthesized)
tgatgccatcaacatcctgcagaatgaaaagtctcatcaagtcctagctcaactgctggatactttgcttgcaattggcactaagctaccagagaatcaagctatccaaatgcgattagt

SEQ ID NO: 415495 - DNA, 120 bp, Artificial Sequence
  ENSG00000149262_4 (sequence is synthesized)
tgatgtggcctgcaagcatctgacagatacgtctcatggtgtaagaaataagtgcctgcagttacttggcaatcttggctctttggagaaaagtgtcacaaaagatgcagaaggcctagc

SEQ ID NO: 415496 - DNA, 120 bp, Artificial Sequence
  ENSG00000149262_5 (sequence is synthesized)
tgccagagatgtccagaagattataggggattacttcagtgaccaagacccacgtgtcagaacagcagctataaaagccatgttgcagctccatgaaagaggactgaaattacaccaaac

SEQ ID NO: 415497 - DNA, 120 bp, Artificial Sequence
  ENSG00000149262_6 (sequence is synthesized)
aatttataatcaggcctgtaaattactctctgatgactatgaacaagtgcgcagtgctgcagtccagcttatctgggtcgtcagtcagctctatcctgaaagcattgtcccaattccttc

SEQ ID NO: 415498 - DNA, 120 bp, Artificial Sequence
  ENSG00000149262_7 (sequence is synthesized)
ttctaatgaagaaatacgcttagttgatgatgcgtttggcaaaatttgtcacatggtcagtgatggctcttgggtggttcgtgttcaggcagcaaaactgttgggctctatggagcaagt

SEQ ID NO: 415499 - DNA, 120 bp, Artificial Sequence
  ENSG00000149262_8 (sequence is synthesized)
cagttctcatttcttggagcagacccttgacaagaagctgatgtcagatctgaggaggaaacgtactgcacatgagcgtgccaaggaactttacagttcgggggagttttccagtggcag

SEQ ID NO: 415500 - DNA, 120 bp, Artificial Sequence
  ENSG00000149262_9 (sequence is synthesized)
aaagtggggagatgatgctcccaaggaagaagtagataccggggctgtgaacttgattgagtcaggagcttgtggagcttttgttcatgggttggaagatgagatgtatgaggttcgtat

SEQ ID NO: 415501 - DNA, 120 bp, Artificial Sequence
  ENSG00000149262_10 (sequence is synthesized)
tgctgctgtggaggccctctgcatgttggcccagtcttcaccctcttttgctgagaagtgccttgatttcctagttgacatgttcaacgatgaaattgaggaagtacgtctgcagtctat

SEQ ID NO: 415502 - DNA, 120 bp, Artificial Sequence
  ENSG00000149262_11 (sequence is synthesized)
acataccatgagaaaaatctctaacaacatcaccctccgagaagatcagcttgacactgtcctggctgtgctagaggattcatccagagatattcgagaggctcttcatgaactcttatg

SEQ ID NO: 415503 - DNA, 120 bp, Artificial Sequence
  ENSG00000149262_12 (sequence is synthesized)
ctgtactaatgtttcaaccaaagaagggattcatcttgcattggtggagctgctgaaaaatttaaccaagtaccctactgatagggactccatatggaagtgcttgaagtttctgggaag

SEQ ID NO: 415504 - DNA, 120 bp, Artificial Sequence
  ENSG00000149262_13 (sequence is synthesized)
tggtgccagagcttctgagcacccacccattttttgacacagctgaaccagacatggatgatccagcttatattgcagttttggtacttattttcaatgctgctaaaacctgtccaacaa

SEQ ID NO: 415505 - DNA, 120 bp, Artificial Sequence
  ENSG00000149262_14 (sequence is synthesized)
tgccagcattgttctcagatcacaccttcaggcactatgcctacctccgagacagtctttctcatcttgttcctgccttgaggttaccaggtagaaaactggtgtcatcagctgtttctc

SEQ ID NO: 415506 - DNA, 120 bp, Artificial Sequence
  ENSG00000149262_15 (sequence is synthesized)
ccagcatcatacctcaagaggatccttcccagcagttcctgcagcagagccttgaaagagtgtatagtcttcagcacttggaccctcagggagcccaggagctgctggaattcaccatca

SEQ ID NO: 415507 - DNA, 120 bp, Artificial Sequence
  ENSG00000149262_16 (sequence is synthesized)
gggatctgcaaagacttggagaacttcaatctgaattggcaggagtagctgatttctctgccacctatcttcgctgtcaactacttctcatcaaggccttgcaggaaaagttgtggaatg

SEQ ID NO: 415508 - DNA, 120 bp, Artificial Sequence
  ENSG00000149262_17 (sequence is synthesized)
tagctgcccctttgtatttgaagcagagtgatttggcctcagcagcagcgaaacagattatggaagagacctacaaaatggaattcatgtacagtggtgtggagaataagcaggtggtga

SEQ ID NO: 415509 - DNA, 120 bp, Artificial Sequence
  ENSG00000149262_18 (sequence is synthesized)
ttatacatcacatgaggctgcaggccaaagctttgcaacttatagtaacagcacgaactacacgaggacttgaccccttatttgggatgtgtgaaaaatttttacaggaagtagactttt

SEQ ID NO: 415510 - DNA, 120 bp, Artificial Sequence
  ENSG00000149262_19 (sequence is synthesized)
ttcagaggtatttcatcgctgatttgccccacttgcaggacagctttgtggacaaactccttgaccttatgccccgactcatgacatccaaacctgcagaagtggtcaaaattctacaga

SEQ ID NO: 415511 - DNA, 120 bp, Artificial Sequence
  ENSG00000149262_20 (sequence is synthesized)
ccatgctgcgacagagtgcctttctgcatctcccgcttccagagcagatccacaaagcctcagccaccatcatcgagccagcgggcgagtcagacaaccctttgcggtttacctctgggt

SEQ ID NO: 415512 - DNA, 120 bp, Artificial Sequence
  ENSG00000149262_21 (sequence is synthesized)
tggtggttgccctggatgttgatgcaaccctggagcatgtgcaggatcctcagaacactgttaaggtccaggtcttatatccagatggccaggctcagatgattcaccccaagcctgcag

SEQ ID NO: 415513 - DNA, 120 bp, Artificial Sequence
  ENSG00000149262_22 (sequence is synthesized)
acttccggaatcctggcccagggcggcaccggctcatcactcaggtttatctctcccacaccgcttggacagaggcatgccaggtggaagtgaggctgctgctggcctacaactccagtg

SEQ ID NO: 415514 - DNA, 120 bp, Artificial Sequence
  ENSG00000149262_23 (sequence is synthesized)
ctcgcattccaaaatgcccctggatggagggtggtgagatgtcaccacaggtggaaaccagcatcgagggcaccattcccttcagcaagcctgtaaaagtttatataatgcccaaacctg

SEQ ID NO: 415515 - DNA, 120 bp, Artificial Sequence
  ENSG00000149262_24 (sequence is synthesized)
cacggcgctaaggcaaaaacagtcttcccaaccgtggcctagagggcccttcttaggtgtcagaatgagccaagcctgaagcacttcacctggaattgatgtgtaggcttaaggagtatg

SEQ ID NO: 415516 - DNA, 120 bp, Artificial Sequence
  ENSG00000149262_25 (sequence is synthesized)
tgacccttacagtctcatctggtatcaaacacaggataaattgtttcttcattaaaaaataaaaaaccttcaagtctacttacccttctcctgtccacaataaagttgagaaaacaccaa

SEQ ID NO: 415517 - DNA, 120 bp, Artificial Sequence
  ENSG00000149262_26 (sequence is synthesized)
ggtgcttgaagtttctgggaagtcggcatccaaccctggtgcttcccttggtgccagagcttctgagcacccacccattttttgacacagctgaaccagacatggatgatccagcttgta

SEQ ID NO: 415518 - DNA, 120 bp, Artificial Sequence
  ENSG00000149262_27 (sequence is synthesized)
caagcaaccctcctgcttggccctcccaaaggattgggattacagacgtgagctaccacatctgaccaaaatcaggatttctgttctcaagaagttttcgatctctcagtgatctatttt

SEQ ID NO: 415519 - DNA, 120 bp, Artificial Sequence
  ENSG00000149262_28 (sequence is synthesized)
ccgagaatgatccatctgtgagactgaaaattgcatcattgttgggtttattatcaaagacagcaggattttcaccagactgcattatggatgatgccatcaacatcctgcagaatgaaa

SEQ ID NO: 415520 - DNA, 120 bp, Artificial Sequence
  ENSG00000149262_29 (sequence is synthesized)
ttccgtccttatagattgaggatagtacggccctgaattttgcctttactttagaaacctgattcaacttaaccgaactctcaggaatctgattcctaagctgagtatcacattttagat

SEQ ID NO: 415521 - DNA, 120 bp, Artificial Sequence
  ENSG00000149262_30 (sequence is synthesized)
tacttactaatttgtgcatctatccacctagcaaatattatgtgcctgctgtgtgctgactatgcaccaacccttgtggtagctgttacaagtatagaaataaattaattagatttcctc

SEQ ID NO: 415522 - DNA, 120 bp, Artificial Sequence
  ENSG00000149262_31 (sequence is synthesized)
gtggttcagctcttgggctggacctgccttttccgagcactttgctgcctgcctgatacctgagtaaaatcagggctctctcaggaagaaagatgggggaaatggctcttggttaaataa

SEQ ID NO: 415523 - DNA, 120 bp, Artificial Sequence
  ENSG00000149262_32 (sequence is synthesized)
ccagttcttttatctttataataaccagtttttttagatgaattaaccgagttccagaataactgggtgacttatctgaagtcatagagttagcaaaagtatatggttgagaatttccaa

SEQ ID NO: 415524 - DNA, 120 bp, Artificial Sequence
  ENSG00000149262_33 (sequence is synthesized)
atgaactcttatgctgtactaatgtttcaaccaaagaagggattcatcttgcattggtggagctgctgaaaaatttaaccaagtgcttgaagtttctgggaagtcggcatccaaccctgg

SEQ ID NO: 415525 - DNA, 120 bp, Artificial Sequence
  ENSG00000149262_34 (sequence is synthesized)
actatgcctacctccgagacaattatggaagagacctacaaaatggaattcatgtacagtggtgtggagaataagcaggtggtgattatacatcacatgaggctgcaggccaaagctttg

SEQ ID NO: 415526 - DNA, 120 bp, Artificial Sequence
  ENSG00000149262_35 (sequence is synthesized)
tacaggcgtgagccactgtgcccggcctaggctcattctttcttctgtcttcatcttctgcatcaagcagcctctgcttaacaattcagatctaactgtgccccctgtattccatcctgt

SEQ ID NO: 415527 - DNA, 120 bp, Artificial Sequence
  ENSG00000149262_36 (sequence is synthesized)
gatctaactgtgccccctgtattccatcctgtggggaaaaggaaacaggaagagaaaggcatctccttcttgatgtcaaagtccccaggaggcatcgttaactatcgtaacgttacctgc

SEQ ID NO: 415528 - DNA, 120 bp, Artificial Sequence
  ENSG00000149262_37 (sequence is synthesized)
cgagcatgagatgggaggaagtgtcatagtccagtggacggttttttccaggctactgtgaaacctgatgtgttatgccggccctgaaacagacagcttcccaagtgactcagaccttaa

SEQ ID NO: 415529 - DNA, 120 bp, Artificial Sequence
  ENSG00000149262_38 (sequence is synthesized)
tattatattaaagatctgttaccaataatcatctataataatacttcttagagcagttaacattatattgcttgttagagtttgaaagcactttccatatgtaatattttatttaatcct

SEQ ID NO: 415530 - DNA, 120 bp, Artificial Sequence
  ENSG00000149262_39 (sequence is synthesized)
ggtgacagcaccattgttatctctaaattccagatatggaactaagcttagagctgtttagtatccaaggtcacccagctagtaaatggaaggtatggatttgaacttgggttttttttt

SEQ ID NO: 415531 - DNA, 120 bp, Artificial Sequence
  ENSG00000149262_40 (sequence is synthesized)
taaaaaaccttttgttatggaacatttcagatatatactatgtaagtaaagagaatagtttaattaattcccatgtacccattacctggcttcaaaaattatcattttgtggccaaactt

SEQ ID NO: 415532 - DNA, 120 bp, Artificial Sequence
  ENSG00000149262_41 (sequence is synthesized)
gtttcattttccctcttccccaatccacttctacttctttaccctcaccttctccaccagattcttatgaaaataaattcctggcatcatattattttaatcataaattttgatttatat

SEQ ID NO: 415533 - DNA, 120 bp, Artificial Sequence
  ENSG00000149262_42 (sequence is synthesized)
ccatctgtgagactgaaaattgcatcattgttgggtttattatcaaagacagcaggattttcaccagactgcattatggatgatgccatcaacatcctgcagaatgaaatctcatcaagt

SEQ ID NO: 415534 - DNA, 120 bp, Artificial Sequence
  ENSG00000149262_43 (sequence is synthesized)
cctagctcaactgctggatactttgcttgcaattggcactaagctaccagagaatcaagctatccaaatgcgattagttgatgtggcctgcaaggtaagagtataaaatctattcagatc

SEQ ID NO: 415535 - DNA, 120 bp, Artificial Sequence
  ENSG00000149262_44 (sequence is synthesized)
catcctaaactggtaactgaggactgctaaggaccattaatggttttaggagctgccttatttttttcatctcttggtgttggattaggaataaagttaagtacacttgttataaagtgt

SEQ ID NO: 415536 - DNA, 120 bp, Artificial Sequence
  ENSG00000149262_45 (sequence is synthesized)
atttcgtcatcctttcaaaacaaatgaaaataattacagtacatagttactgtgtatattgtgcctaataatgcactctgcttgttatggtgctttgtattcagtttttcatttggtcct

SEQ ID NO: 415537 - DNA, 120 bp, Artificial Sequence
  ENSG00000149262_46 (sequence is synthesized)
acaatccttcaagtaagtaccgttatttctcttttacaaaggtgaaaattaagatttatggagtctgatttgtctaagtttgcacagctaggaggttgcagtaccagggtataaactgta

SEQ ID NO: 415538 - DNA, 120 bp, Artificial Sequence
  ENSG00000149262_47 (sequence is synthesized)
ttttttctgaccccaaacttgttttgtttttattatgccttgttgcttcaataaacagaccaactatacacaagtaaatgtatgggaaaagttttgtacgttctttttttctgattttta

SEQ ID NO: 415539 - DNA, 120 bp, Artificial Sequence
  ENSG00000149262_48 (sequence is synthesized)
aatacatgtattaatacattaattgtgccttttgatttaatttggaggttaattagcctctttgtgtatacacagcaacccctagaaccctgtagaattgattttactttggatcttttt

SEQ ID NO: 415540 - DNA, 120 bp, Artificial Sequence
  ENSG00000149262_49 (sequence is synthesized)
gataactttgagaatataaaaaagtcaaatgcatttgaattgtgttagagtattatattcttgaaattagaaagctatctcagagatgcaggaaagattacttgatttatcttaaaacaa

SEQ ID NO: 415541 - DNA, 120 bp, Artificial Sequence
  ENSG00000149262_50 (sequence is synthesized)
gatgcaggaaagattacttgatttatcttaaaacaacaggcatacataaaaccaaaaacactttgacaagtacaatactaaaagcttaaatagggccaggtgcggtggctcacacctata

SEQ ID NO: 415542 - DNA, 90 bp, Artificial Sequence
  ENSG00000149262_51 (sequence is synthesized)
gctgaggcaggagaatcgcttgaacctgcaagacggaggttatgtgagtggagattgagccactgcactccagtctgggtgatcaaaaaa

SEQ ID NO: 415543 - DNA, 120 bp, Artificial Sequence
  ENSG00000149269_0 (sequence is synthesized)
gccctcccgcggctgcagccggagccgaaggtggtggctgcacagtagacgccccctcacggcttcccccacacgctcccgccccctcgctcgcccatcgcgcttccctcacaggctctg

SEQ ID NO: 415544 - DNA, 120 bp, Artificial Sequence
  ENSG00000149269_1 (sequence is synthesized)
cagtcctcccccacagacgccttcccccttggactctcattcccttttccacggagccccgcgctttcgtgagccccctcgaggaacctggtctccgcatccagttaccacctcctgcct

SEQ ID NO: 415545 - DNA, 120 bp, Artificial Sequence
  ENSG00000149269_2 (sequence is synthesized)
cagaggccatctgagcccttcgcacctcgcccctcagtccccccttccccccccgcccgcgtcgcctcgctccctcccgcccccccatcatcccttccctcgcagttcccctgtcctgag

SEQ ID NO: 415546 - DNA, 120 bp, Artificial Sequence
  ENSG00000149269_3 (sequence is synthesized)
gggagccccgccacgggcagcgcggcggcggcggcaggagggagaaagtgaagcggtagctcgcgcacactcgcgccctcactcccggctaggcggcacccaccgccgggaggaggagga

SEQ ID NO: 415547 - DNA, 120 bp, Artificial Sequence
  ENSG00000149269_4 (sequence is synthesized)
ggagccgagaggagctgagcgagcgcggaagtagctgctgctggtggtgacaatgtcaaataacggcctagacattcaagacaaacccccagcccctccgatgagaaataccagcactat

SEQ ID NO: 415548 - DNA, 120 bp, Artificial Sequence
  ENSG00000149269_5 (sequence is synthesized)
gattggagccggcagcaaagatgctggaaccctaaaccatggttctaaacctctgcctccaaacccagaggagaagaaaaagaaggaccgattttaccgatccattttacctggagataa

SEQ ID NO: 415549 - DNA, 120 bp, Artificial Sequence
  ENSG00000149269_6 (sequence is synthesized)
aacaaataaaaagaaagagaaagagcggccagagatttctctcccttcagattttgaacacacaattcatgtcggttttgatgctgtcacaggggagtttacgggaatgccagagcagtg

SEQ ID NO: 415550 - DNA, 120 bp, Artificial Sequence
  ENSG00000149269_7 (sequence is synthesized)
ggcccgcttgcttcagacatcaaatatcactaagtcggagcagaagaaaaacccgcaggctgttctggatgtgttggagttttacaactcgaagaagacatccaacagccagaaatacat

SEQ ID NO: 415551 - DNA, 120 bp, Artificial Sequence
  ENSG00000149269_8 (sequence is synthesized)
gagctttacagataagtcagctgaggattacaattcttctaatgccttgaatgtgaaggctgtgtctgagactcctgcagtgccaccagtttcagaagatgaggatgatgatgatgatga

SEQ ID NO: 415552 - DNA, 120 bp, Artificial Sequence
  ENSG00000149269_9 (sequence is synthesized)
tgctaccccaccaccagtgattgctccacgcccagagcacacaaaatctgtatacacacggtctgtgattgaaccacttcctgtcactccaactcgggacgtggctacatctcccatttc

SEQ ID NO: 415553 - DNA, 120 bp, Artificial Sequence
  ENSG00000149269_10 (sequence is synthesized)
acctactgaaaataacaccactccaccagatgctttgacccggaatactgagaagcagaagaagaagcctaaaatgtctgatgaggagatcttggagaaattacgaagcatagtgagtgt

SEQ ID NO: 415554 - DNA, 120 bp, Artificial Sequence
  ENSG00000149269_11 (sequence is synthesized)
gggcgatcctaagaagaaatatacacggtttgagaagattggacaaggtgcttcaggcaccgtgtacacagcaatggatgtggccacaggacaggaggtggccattaagcagatgaatct

SEQ ID NO: 415555 - DNA, 120 bp, Artificial Sequence
  ENSG00000149269_12 (sequence is synthesized)
tcagcagcagcccaagaaagagctgattattaatgagatcctggtcatgagggaaaacaagaacccaaacattgtgaattacttggacagttacctcgtgggagatgagctgtgggttgt

SEQ ID NO: 415556 - DNA, 120 bp, Artificial Sequence
  ENSG00000149269_13 (sequence is synthesized)
tatggaatacttggctggaggctccttgacagatgtggtgacagaaacttgcatggatgaaggccaaattgcagctgtgtgccgtgagtgtctgcaggctctggagttcttgcattcgaa

SEQ ID NO: 415557 - DNA, 120 bp, Artificial Sequence
  ENSG00000149269_14 (sequence is synthesized)
ccaggtcattcacagagacatcaagagtgacaatattctgttgggaatggatggctctgtcaagctaactgactttggattctgtgcacagataaccccagagcagagcaaacggagcac

SEQ ID NO: 415558 - DNA, 120 bp, Artificial Sequence
  ENSG00000149269_15 (sequence is synthesized)
actggatggcaccagaggttgtgacacgaaaggcctatgggcccaaggttgacatctggtccctgggcatcatggccatcgaaatgattgaaggggagcctccatacctcaatgaaaacc

SEQ ID NO: 415559 - DNA, 120 bp, Artificial Sequence
  ENSG00000149269_16 (sequence is synthesized)
ctctgagagccttgtacctcattgccaccaatgggaccccagaacttcagaacccagagaagctgtcagctatcttccgggactttctgaaccgctgtctcgagatggatgtggagaaga

SEQ ID NO: 415560 - DNA, 120 bp, Artificial Sequence
  ENSG00000149269_17 (sequence is synthesized)
gaggttcagctaaagagctgctacagcatcaattcctgaagattgccaagcccctctccagcctcactccactgattgctgcagctaaggaggcaacaaagaacaatcactaaaaccaca

SEQ ID NO: 415561 - DNA, 120 bp, Artificial Sequence
  ENSG00000149269_18 (sequence is synthesized)
ctcaccccagcctcattgtgccaagccttctgtgagataaatgcacatttcagaaattccaactcctgatgccctcttctccttgccttgcttctcccatttcctgatctagcactcctc

SEQ ID NO: 415562 - DNA, 120 bp, Artificial Sequence
  ENSG00000149269_19 (sequence is synthesized)
aagactttgatccttggaaaccgtgtgtccagcattgaagagaactgcaactgaatgactaatcagatgatggccatttctaaataaggaatttcctcccaattcatggatatgagggtg

SEQ ID NO: 415563 - DNA, 120 bp, Artificial Sequence
  ENSG00000149269_20 (sequence is synthesized)
gtttatgattaagggtttatataaataaatgtttctagtcttccgtgtgtcaaaatcctcacctccttcataaccatctcccacaattaattcttgactatataaatttatggtttgata

SEQ ID NO: 415564 - DNA, 120 bp, Artificial Sequence
  ENSG00000149269_21 (sequence is synthesized)
atattatcaatttgtaatcaattgagatttctttagtgcttgcttttctgtgactcaactgcccagacacctcattgtacttgaaaactggaacagcttgggaatgccatggggtttgat

SEQ ID NO: 415565 - DNA, 120 bp, Artificial Sequence
  ENSG00000149269_22 (sequence is synthesized)
aatctgccagggacatgaagaggctcagcttcctggaccatgactttggctcagctgatcctgacatgggagaacaaccacatttttctttgtgtgtgcttctagcagctgttcgggagg

SEQ ID NO: 415566 - DNA, 120 bp, Artificial Sequence
  ENSG00000149269_23 (sequence is synthesized)
accttgacccaatagtgttcccatgctgtttcttgtgaaatgctctcggctatgtagcagcttttgattccctgcataccctaggctgctgcccctatcctgtcccttgtttataacatt

SEQ ID NO: 415567 - DNA, 120 bp, Artificial Sequence
  ENSG00000149269_24 (sequence is synthesized)
gagaggttttctagggcacatactgagtgagagcagtgttgagaagtcggggaaaatggtgactacttttagagcaaggctgggcatcagcacctgtccagctctacttgtgtgatgttt

SEQ ID NO: 415568 - DNA, 120 bp, Artificial Sequence
  ENSG00000149269_25 (sequence is synthesized)
caggaactcagcccctttttctgcctaggataaggagctgaaagattaacttggatcttctaatggtccaaatcttttggtcacaataaagagtctccaaattagagactgcatgttagt

SEQ ID NO: 415569 - DNA, 120 bp, Artificial Sequence
  ENSG00000149269_26 (sequence is synthesized)
tctggatggatttggtggcctgacatgataccctgccagctgtgaggggaccccgtttttaagatgcatggccaagctctctgcaaatggaaatgcttacactgggtgttggggatgttt

SEQ ID NO: 415570 - DNA, 120 bp, Artificial Sequence
  ENSG00000149269_27 (sequence is synthesized)
gctacctcctgctatttttgtggttttggttctcccactatggtaggacccctggccagcattgtggcttgtcatgtcagccccattgactaccttctcatgctctgaggtactactgcc

SEQ ID NO: 415571 - DNA, 120 bp, Artificial Sequence
  ENSG00000149269_28 (sequence is synthesized)
tctgcagcacaaatttctatttctgtcaataaaaggagatgaaaatattctattggagtatgcctttcttttttctcttcgttttttctttccttttctaattttttatatgaaataatg

SEQ ID NO: 415572 - DNA, 120 bp, Artificial Sequence
  ENSG00000149269_29 (sequence is synthesized)
agtagtttcttcctgaaccatttgagagtggtaagttgcagatagaatgcccctttaccactatatacctgaatgtgtattctttctttttaacacttttattttaaatataaattaaga

SEQ ID NO: 415573 - DNA, 120 bp, Artificial Sequence
  ENSG00000149269_30 (sequence is synthesized)
gaaatgggccaaaaccatttgtattgtttaaagaataattataaacacacttgtatccaccaaatcaagaaatggaacactgacagtaagaaccttctctatcttgtccttcctttctca

SEQ ID NO: 415574 - DNA, 120 bp, Artificial Sequence
  ENSG00000149269_31 (sequence is synthesized)
tgctttgcagaaaaggagaagcgcgcggcttcctcccgcctccttccctcctttcttcccccgccccttctgtttcgccaaccccgacgcggcgccttcgctgccgccctgcgagagcgc

SEQ ID NO: 415575 - DNA, 120 bp, Artificial Sequence
  ENSG00000149269_32 (sequence is synthesized)
gagcgtgctgcacctcgggagctggcggctgagctgccaggagcccagcccagctgaatcgagcggagccggtggagcaggggccttgtgggtacccggttgggcagggagaggtgcggc

SEQ ID NO: 415576 - DNA, 120 bp, Artificial Sequence
  ENSG00000149269_33 (sequence is synthesized)
gatgagtttattggggtttgctctgtggatgttctaacctcacatctaggagaggttcccctatgctaacaaaggctggtcttgccaaaattttgcactaataatgcaggtatacacacg

SEQ ID NO: 415577 - DNA, 120 bp, Artificial Sequence
  ENSG00000149269_34 (sequence is synthesized)
tgtgtgccggcatatatgattttgctttttttttgcctctcataaaccttgttcttctttctccactttacccctcacccatctggagttgttatgtgagactgacttgagatttggcag

SEQ ID NO: 415578 - DNA, 120 bp, Artificial Sequence
  ENSG00000149269_35 (sequence is synthesized)
aattatgcttaatatgagagagatgccattagctgaccatgttgctaaaaatacccctgcagtgacagtgagagaacggttttttttcttagcacaaaaccaacttcccaaattacaact

SEQ ID NO: 415579 - DNA, 120 bp, Artificial Sequence
  ENSG00000149269_36 (sequence is synthesized)
ctgcttttccggatgaaccctgtttgtcctagtgctgagatccaccagcactaatataaaatggaagacccaaaactataaatccttctactactgtgataggacctgtttttctaggta

SEQ ID NO: 415580 - DNA, 120 bp, Artificial Sequence
  ENSG00000149269_37 (sequence is synthesized)
acacgacatcggatagttttcaaattcagcccttgacaacgagctcatagatgcggtggtgctttgttaacctgaaaaggaccctcagcgccggaagttagccgtctttctccatcctga

SEQ ID NO: 415581 - DNA, 120 bp, Artificial Sequence
  ENSG00000149269_38 (sequence is synthesized)
ctactacagtagccctcccagaaatcgtcccaaaattgtctgatagaaaggctgcacggaaacaacccgccacggacagcggaccgagaacagtgacgcgacgcgatgacgtcacgcagc

SEQ ID NO: 415582 - DNA, 120 bp, Artificial Sequence
  ENSG00000149269_39 (sequence is synthesized)
tggcgtcacgcgccgatgacgtaatcccaggcgttcgccctcatgcgggccagggtttggcctcgctcccacggcacgtctgaggcattggtttttcatccttccaaacttttggtctac

SEQ ID NO: 415583 - DNA, 120 bp, Artificial Sequence
  ENSG00000149269_40 (sequence is synthesized)
actttcttaagatcctacctagtaggtactaggtagaagtaccaggttggaattcaggtctcctggccactagagcctacattctctgtactacctcttatagcttcttaaatgtgagaa

SEQ ID NO: 415584 - DNA, 120 bp, Artificial Sequence
  ENSG00000149269_41 (sequence is synthesized)
tggatgctgcagggagaggattatttttactgctcttgtttttgacactcacagattgtgtgtagaactgcatttgacaaatatcactttattgaacactgtgtttttttccctctttct

SEQ ID NO: 415585 - DNA, 120 bp, Artificial Sequence
  ENSG00000149269_42 (sequence is synthesized)
aacaatcgccagagatgccggggctagccttccccaccaggatggatagaatggtgctatctgagctgttataatgttggcctcatgcctagctttatattgcagcacgtctgaggcatt

SEQ ID NO: 415586 - DNA, 120 bp, Artificial Sequence
  ENSG00000149269_43 (sequence is synthesized)
tttaacttggggaagcataaaatattacaaatgaaggggattcttacctaatagaattgtcttcaactaatttcttttgttacagaatatttcttttagcttggggaatacaggatattt

SEQ ID NO: 415587 - DNA, 120 bp, Artificial Sequence
  ENSG00000149269_44 (sequence is synthesized)
cttttagcttggggaagcataaaatattacagatgaaggggattcttatctaatagaattgtctttaactaatttcttttgatagttgtctagcctctattgaatatctttagtgctgag

SEQ ID NO: 415588 - DNA, 120 bp, Artificial Sequence
  ENSG00000149269_45 (sequence is synthesized)
tctgcgacggaaacaatcgccagagatgccggggctagccttccccaccagcacgtctgaggcattggtttttcatccttccaaacttttggtctacagagactattagaagattaagct

SEQ ID NO: 415589 - DNA, 120 bp, Artificial Sequence
  ENSG00000149273_0 (sequence is synthesized)
gcaagatggcagtgcaaatatccaagaagaggaagtttgtcgctgatggcatcttcaaagctgaactgaatgagtttcttactcgggagctggctgaagatggctactctggagttgagg

SEQ ID NO: 415590 - DNA, 120 bp, Artificial Sequence
  ENSG00000149273_1 (sequence is synthesized)
tgcgagttacaccaaccaggacagaaatcattatcttagccaccagaacacagaatgttcttggtgagaagggccggcggattcgggaactgactgctgtagttcagaagaggtttggct

SEQ ID NO: 415591 - DNA, 120 bp, Artificial Sequence
  ENSG00000149273_2 (sequence is synthesized)
ttccagagggcagtgtagagctttatgctgaaaaggtggccactagaggtctgtgtgccattgcccaggcagagtctctgcgttacaaactcctaggagggcttgctgtgcggagggcct

SEQ ID NO: 415592 - DNA, 120 bp, Artificial Sequence
  ENSG00000149273_3 (sequence is synthesized)
gagagtggggccaaaggctgcgaggttgtggtgtctgggaaactccgaggacagagggctaaatccatgaagtttgtggatggcctgatgatccacagcggagaccctgttaactactac

SEQ ID NO: 415593 - DNA, 120 bp, Artificial Sequence
  ENSG00000149273_4 (sequence is synthesized)
gttgacactgctgtgcgccacgtgttgctcagacagggtgtgctgggcatcaaggtgaagatcatgctgccctgggacccaactggtaagattggccctaagaagcccctgcctgaccac

SEQ ID NO: 415594 - DNA, 120 bp, Artificial Sequence
  ENSG00000149273_5 (sequence is synthesized)
gtgagcattgtggaacccaaagatgagatactgcccaccacccccatctcagaacagaagggtgggaagccagagccgcctgccatgccccagccagtccccacagcataacaggtatgt

SEQ ID NO: 415595 - DNA, 120 bp, Artificial Sequence
  ENSG00000149273_6 (sequence is synthesized)
ctgcaagggcaggggcctcttggggcataatagggtccttccgagtctttctgttaatacttgtatcccacattctggtaagcgtttggtgaataaaaatttcatttatttgctttatgt

SEQ ID NO: 415596 - DNA, 120 bp, Artificial Sequence
  ENSG00000149273_7 (sequence is synthesized)
gacagtaactttgtctgggatgagtgtgggaaaggatgtgtttgggaacagacgcgagcctgcagaggtgtttgtaaccatctctttctaagtggtgggaagcagacattttattcttta

SEQ ID NO: 415597 - DNA, 120 bp, Artificial Sequence
  ENSG00000149273_8 (sequence is synthesized)
actgttaatatatatagtgtgtgttttttatgcatgaaatattttatagtttttaaaaatgcccacactactattttgaaagtaaatgaggtaatgtatgtgtcagaacccaatacccaa

SEQ ID NO: 415598 - DNA, 120 bp, Artificial Sequence
  ENSG00000149273_9 (sequence is synthesized)
agcgatcgtagtaagaggtggggcctttgggaaggcattaaattgcttagggaatgagggtggaaccctcatgaatgagattagagccttataggagaggttggagggagttgcctggcc

SEQ ID NO: 415599 - DNA, 120 bp, Artificial Sequence
  ENSG00000149273_10 (sequence is synthesized)
tccctctcccatgtgaagactcagcaagaaaacattatttaggaagcagagagccctcatcaaacaccagatctgctggccacctgatctggcactttccagccttcagaactgtgagaa

SEQ ID NO: 415600 - DNA, 120 bp, Artificial Sequence
  ENSG00000149273_11 (sequence is synthesized)
acaaggtctgactagactgttcagtattcagactgaggggcatgttggcctctggagcattacatatcttcttggttttaaccatacttgtggtatttgcaagggccagaacagtaagac

SEQ ID NO: 415601 - DNA, 120 bp, Artificial Sequence
  ENSG00000149273_12 (sequence is synthesized)
gaaataatatttgtgtgatagagaaggctgatagcaagcaaggcagcaccttgattcgttgtcctgtagttcaggattgtaggtttagaagagggatatgtttgagtttttcctatgcat

SEQ ID NO: 415602 - DNA, 120 bp, Artificial Sequence
  ENSG00000149273_13 (sequence is synthesized)
aaggcgatccacgttgcacatagaaagtgaatataaatggccattatattttgtgtcatgctgtgctctaagtgttctttacatatgtactcgttaatcaacctctctaaagtgtaaagg

SEQ ID NO: 415603 - DNA, 120 bp, Artificial Sequence
  ENSG00000149273_14 (sequence is synthesized)
aaatttgcttgcaccactgaaggcacataaggctcagaagtaaatttgcctaagcagtataaagctatcattagaatccacattcctaagttgtgttctcttaggggatcatggaaccag

SEQ ID NO: 415604 - DNA, 120 bp, Artificial Sequence
  ENSG00000149273_15 (sequence is synthesized)
tcattggtactacaggctattatgttctggagaactgtgaagaacatttaaattgtctctgattttatctatcaatgttttgaagtattttctaccagtgtctgtacttcacaagaaatt

SEQ ID NO: 415605 - DNA, 120 bp, Artificial Sequence
  ENSG00000149273_16 (sequence is synthesized)
cggcactattttttcaggcaaaactagtgagggacaggttggcttgaaaatcatgagactgttgttaaatcagatgctggttgatcacagaggggacttccagggaaagctgttatcagg

SEQ ID NO: 415606 - DNA, 120 bp, Artificial Sequence
  ENSG00000149273_17 (sequence is synthesized)
tggctgcttcctggtgatgcagcctggctgatgagataaccctggctccacagatggcttagcaggtgctgtgatgatttggttttcttctcaattagactgagctgcacatggtgttta

SEQ ID NO: 415607 - DNA, 120 bp, Artificial Sequence
  ENSG00000149273_18 (sequence is synthesized)
tattgcttggcacatggtaagggcttaatatttgaggtaattatgtagggcgtacactgacaagtatctgacccccccttcctttttgactcataaattggtcatcttaaccatttaagt

SEQ ID NO: 415608 - DNA, 120 bp, Artificial Sequence
  ENSG00000149273_19 (sequence is synthesized)
gtacacttctatagtgacagagttagccctctgtccaagggatttgcatctgtggattcaaccaactttgggtcaaaaataatcaaaaaggatggttgtgtgtgtattgaacatgtagac

SEQ ID NO: 415609 - DNA, 120 bp, Artificial Sequence
  ENSG00000149273_20 (sequence is synthesized)
ttatttttcttattttcaaaatactatattttcttgtcacttattttcttgtacactgcagttgtaacagctatgtagcatgtacattaggtattaaaagtaatccagtgaagattgaaa

SEQ ID NO: 415610 - DNA, 120 bp, Artificial Sequence
  ENSG00000149273_21 (sequence is synthesized)
atgatgacgagtctgacttggggatgttctctttgcccaggtggcctactctgtgctgcgttctgtggcacagtttaaagagccctggttgaagtaatttcctaaagatgacttagaggc

SEQ ID NO: 415611 - DNA, 120 bp, Artificial Sequence
  ENSG00000149273_22 (sequence is synthesized)
ctttattctttccagaaagaagttcctgcttttactcgtgtatatgaaatagttttcccttatcctcccttatttgctcaaaatttttggctcagtgcaacctctgcctcccatgttcaa

SEQ ID NO: 415612 - DNA, 120 bp, Artificial Sequence
  ENSG00000149273_23 (sequence is synthesized)
gactcctgacctcaggtgagccactgtgcttggctgctcaagattttctaggcacttttgctattctgtcctttagcagcccctgtaaaacactaacaagcctcctgtggtcaacacttg

SEQ ID NO: 415613 - DNA, 120 bp, Artificial Sequence
  ENSG00000149273_24 (sequence is synthesized)
gggtttttttgtttataggtgttgtctctccaggtgccttgtattttttttttttatatgaaaaaggacaaacccttatgtatgcattttattaatgttgctgcaaaccctaagtgggag

SEQ ID NO: 415614 - DNA, 120 bp, Artificial Sequence
  ENSG00000149273_25 (sequence is synthesized)
tgtgtatccatttggtaaatcaggaacttaataactctggtaaagtttcttacttttgtgctttatttggtttcagggtctccttggcagctgtattctggagtctggatgttgctctct

SEQ ID NO: 415615 - DNA, 120 bp, Artificial Sequence
  ENSG00000149273_26 (sequence is synthesized)
cgttcctgcgggccgcggatggcggtggattgagtgagaggccccagccaggagggcgctgtgtggccgggttccaagtgaagcgcagagagatgggcaccaggcgccccttctgtcccg

SEQ ID NO: 415616 - DNA, 120 bp, Artificial Sequence
  ENSG00000149273_27 (sequence is synthesized)
actttaattgtttgttcattacaaatggactggtataactgttgaaattctcttaatgaataatgggcttaactttgtaagcctattctgctaatggctgatggttaaaggattttacat

SEQ ID NO: 415617 - DNA, 120 bp, Artificial Sequence
  ENSG00000149273_28 (sequence is synthesized)
tcaacttgggtatagaaatgatgcatatgatggattaactgtccccattggtgtacttggcatggccaaaggagccagggtgggagggcaaggaacctgcattgtgtgtaggtggtagaa

SEQ ID NO: 415618 - DNA, 120 bp, Artificial Sequence
  ENSG00000149273_29 (sequence is synthesized)
tccgatcttttggcctccgtaggctacgttggaagaagaaatgtcttgggccacactactactggtagcgcaaaaaatcacgatgttgaatttgtgttgggccacaatcaaagccatctc

SEQ ID NO: 415619 - DNA, 120 bp, Artificial Sequence
  ENSG00000149273_30 (sequence is synthesized)
ctgggcagcatgcggcccgtgggttgggcaagcttggtgtagaaagtgatacttgtgtggcaaatgccaaattttcaactttcagttgaaaataatggtgatggtaacaggatatccctt

SEQ ID NO: 415620 - DNA, 120 bp, Artificial Sequence
  ENSG00000149273_31 (sequence is synthesized)
tctgctagtctcccagggttataataagatactaagtcatgccctcactgaactggcaggctaacaagactactaaagcagcaagaactgtaaagggtggtcagtcctgtaatggagaag

SEQ ID NO: 415621 - DNA, 120 bp, Artificial Sequence
  ENSG00000149273_32 (sequence is synthesized)
tgttctgggtgctttgggagttaaacacaaatagaactgtccaaggaggggaccaactcctgttggtcttcttgagaaggctttacaaagagccctgttgcggggggcggggcagtgggc

SEQ ID NO: 415622 - DNA, 120 bp, Artificial Sequence
  ENSG00000149273_33 (sequence is synthesized)
aatgaggaataattaggcctgttactgggtgtgttacgtatccctaggtagaagtgccttagtactagttaggataccatgaaactttagtagcaatcattcaaatctgcttagtgtgtt

SEQ ID NO: 415623 - DNA, 120 bp, Artificial Sequence
  ENSG00000149273_34 (sequence is synthesized)
gttgcatgcagatagtagtaatgtgagggtctactggtaagatttcaacaggaagttctttgtgcagtttgactgtatgtaaaggcactgaaatgccttgcctagaggaatgacaggaaa

SEQ ID NO: 415624 - DNA, 120 bp, Artificial Sequence
  ENSG00000149273_35 (sequence is synthesized)
gctgtgctgtaggaaggttgactggtagggatgggtagtgtaggcaaggctctaggtaaggacatagaaaagacggcttacctggtttgagtgccagctaggctgcttagaacaatggtt

SEQ ID NO: 415625 - DNA, 120 bp, Artificial Sequence
  ENSG00000149273_36 (sequence is synthesized)
ctcaagattaatgccagccccagacccaccaaatgggaaactggatgtgtgactcagcaatctgtcttaataacccctccacatgctgtttgcacacattgaagcaagttaatgaacctc

SEQ ID NO: 415626 - DNA, 120 bp, Artificial Sequence
  ENSG00000149273_37 (sequence is synthesized)
tcagcctgggatctgttatcttctaaggtggaccattataccacctctcagttgtggaatattaagtaagataatgtgaaagggcctggaggtggctagctctccagttagtatctcgca

SEQ ID NO: 415627 - DNA, 120 bp, Artificial Sequence
  ENSG00000149273_38 (sequence is synthesized)
gagcgtaaactgccgaatgagttggggggtaggtcatattttaaagtgttttatcagcgttctaatagcaagatagccaggatcctaggtgggtaagctttcctagtgaatgagacttcg

SEQ ID NO: 415628 - DNA, 120 bp, Artificial Sequence
  ENSG00000149273_39 (sequence is synthesized)
gaggttgcagagtatttcaagggaccacaaagtgggtaattgtggagtgtaaatgtggttctcagttttggttatacatgagaatcacccagggagcatttttaaatagatattcctgga

SEQ ID NO: 415629 - DNA, 120 bp, Artificial Sequence
  ENSG00000149273_40 (sequence is synthesized)
ctttgcacatttaattggcctagagtagggcctagatgtcagggtttcttttgttttttattttagccttctgaggtgattccagtatgcagccagggttggaaagtacatatttaggag

SEQ ID NO: 415630 - DNA, 120 bp, Artificial Sequence
  ENSG00000149273_41 (sequence is synthesized)
cttgacatacttgatgaatattaccctaaggttcggaatgataggtgtggaagagaattggtattcttggggccggactctggtcaaattattctccattaaaggaacattgaaaaccaa

SEQ ID NO: 415631 - DNA, 120 bp, Artificial Sequence
  ENSG00000149289_0 (sequence is synthesized)
attgttcttcttgcctgcctggaagtctgcagctaaaattgtgttaaggagtttactgctgaagctgctacagaaaccaatgtctttgtattttcctgctaacgaatacggggtgctttg

SEQ ID NO: 415632 - DNA, 120 bp, Artificial Sequence
  ENSG00000149289_1 (sequence is synthesized)
cattcaggaatacagaaaaaacagcaaagtggagtcaagtacacgtaacaacttcatgggcttgaaggatcacctagggcatgacctcggccacctttatgtggagagcactgacccaca

SEQ ID NO: 415633 - DNA, 120 bp, Artificial Sequence
  ENSG00000149289_2 (sequence is synthesized)
gttaagtccagctgtaccttggtcaacagtagaaaacccaagtatggataccgttaatgtggggaaggatgaaaaagaggcgtctgaagagaatgcaagctctggtgactctgaagaaaa

SEQ ID NO: 415634 - DNA, 120 bp, Artificial Sequence
  ENSG00000149289_3 (sequence is synthesized)
cacaaattctgatcatgagtcagaacaattgggtagcatttcagtagagccaggcttgataactaagactcacagacagctctgcaggtctccctgtttagagcctcacatactcaagcg

SEQ ID NO: 415635 - DNA, 120 bp, Artificial Sequence
  ENSG00000149289_4 (sequence is synthesized)
caatgaaattttgcaagactttaaacctgaagagtcccagactacatccaaggaagcaaagaaaccacctgatgtggtgcgagaataccaaacaaaactggagtttgcacttaagttagg

SEQ ID NO: 415636 - DNA, 120 bp, Artificial Sequence
  ENSG00000149289_5 (sequence is synthesized)
ttattctgaagaacaggttcagcttgtactaaacaaacttggtactgatgctttaatcaatgatattttgggagaacttgtcaaacttggaaataaaagtgaggctgatcaaacggttag

SEQ ID NO: 415637 - DNA, 120 bp, Artificial Sequence
  ENSG00000149289_6 (sequence is synthesized)
tacaattaacactataacacgggaaacttcttccctggaatctcagaggtctgaatctccaatgcaagagattgtaacagatgatggtgaaaatctgagaccaatagttattgatggcag

SEQ ID NO: 415638 - DNA, 120 bp, Artificial Sequence
  ENSG00000149289_7 (sequence is synthesized)
caatgtggcaatgagccatggaaacaaagaagtattttcctgcagaggaataaaattggcagtggattggtttttggaaagaggccacaaagacattacagtttttgttcctgcttggag

SEQ ID NO: 415639 - DNA, 120 bp, Artificial Sequence
  ENSG00000149289_8 (sequence is synthesized)
gaaagagcaatcccgacctgatgctctcattacagatcaggaaattttacgtaaattagagaaggagaaaatcctggtgttcacgccatcccggcgagtccaggggaggagagtggtgtg

SEQ ID NO: 415640 - DNA, 120 bp, Artificial Sequence
  ENSG00000149289_9 (sequence is synthesized)
ctatgacgacaggttcatcgtgaagctggcttttgagtcggacggtatcattgtgtccaatgataactacagggacttggctaatgagaagccagaatggaagaagttcatagatgaacg

SEQ ID NO: 415641 - DNA, 120 bp, Artificial Sequence
  ENSG00000149289_10 (sequence is synthesized)
attattaatgtattcatttgtcaatgacaagttcatgccccctgatgaccctcttggcagacatggccccagtctggataattttctgaggaagaaacctattgttcctgaacacaaaaa

SEQ ID NO: 415642 - DNA, 120 bp, Artificial Sequence
  ENSG00000149289_11 (sequence is synthesized)
gcagccttgtccatatggaaagaagtgtacctatggacacaagtgcaaatattaccatcccgaaaggggcagtcagccacagcggtcagtggctgatgaactccgtgccatgtctagaaa

SEQ ID NO: 415643 - DNA, 120 bp, Artificial Sequence
  ENSG00000149289_12 (sequence is synthesized)
tccttgtagcaccaaggctgatagcacttctgatgtcaaacgaggtgctccaaagaggcaatcagatccaagcataaggacacaagtctaccaagacctagaagaaaagcttcccaccaa

SEQ ID NO: 415644 - DNA, 120 bp, Artificial Sequence
  ENSG00000149289_13 (sequence is synthesized)
aaacaaattggaaaccaggtctgtaccttccttagttagcatcccagctacttctactgcaaaaccccaaagcactacatctttaagcaatggccttccatctggagttcatttcccacc

SEQ ID NO: 415645 - DNA, 120 bp, Artificial Sequence
  ENSG00000149289_14 (sequence is synthesized)
tcaggatcaaagaccacagggacaatatccttcaatgatgatggcaaccaaaaatcatggaacgccaatgccttatgaacagtatccaaaatgtgactcacctgtcgacatcggatatta

SEQ ID NO: 415646 - DNA, 120 bp, Artificial Sequence
  ENSG00000149289_15 (sequence is synthesized)
ttccatgttgaatgcatactcaaatctgagtctctcaggcccacgaagccctgaaaggcgtttctccttagacacagattatagaataagttccgtagcttctgactgcagcagtgaagg

SEQ ID NO: 415647 - DNA, 120 bp, Artificial Sequence
  ENSG00000149289_16 (sequence is synthesized)
gagcatgagctgtgggagcagtgactcctacgtgggttacaatgaccggtcctatgtcagctcccccgacccacagctagaggagaatttgaagtgtcaacacatgcaccctcacagccg

SEQ ID NO: 415648 - DNA, 120 bp, Artificial Sequence
  ENSG00000149289_17 (sequence is synthesized)
ccttaatcctcaaccgttcctgcagaatttccacgaccccttaaccagagggcaaagttacagtcacgaagaaccaaagttccatcacaagcctcctcttccgcacctggctctgcacct

SEQ ID NO: 415649 - DNA, 120 bp, Artificial Sequence
  ENSG00000149289_18 (sequence is synthesized)
gccgcactccgctgtgggcgcccggtccagctgtcctggcgactacccctctcctccaagttcagcacactctaaggcaccacacctagggaggtccttggtggccacgagaatagacag

SEQ ID NO: 415650 - DNA, 120 bp, Artificial Sequence
  ENSG00000149289_19 (sequence is synthesized)
catctctgactctcgactttatgacagttctccttcacgacaaagaaagccttattcccgccaggaaggcctgggaagctgggagaggccaggctatgggatcgacgcctatgggtaccg

SEQ ID NO: 415651 - DNA, 120 bp, Artificial Sequence
  ENSG00000149289_20 (sequence is synthesized)
gcagacttattccttgcccgataactccacacagccgtgttatgagcagttcaccttccagagcctccctgagcaacaggagccagcctggcggatcccatactgtggaatgccgcaaga

SEQ ID NO: 415652 - DNA, 120 bp, Artificial Sequence
  ENSG00000149289_21 (sequence is synthesized)
tcccccgaggtatcaagacaaccgagaaaagatttatatcaatttgtgcaacatcttcccccctgaccttgtgagaattgtcatgaaaaggaatcctcacatgacagacgcccagcagct

SEQ ID NO: 415653 - DNA, 120 bp, Artificial Sequence
  ENSG00000149289_22 (sequence is synthesized)
cgccgcagccattttagtggagaaatcccagctgggttattgaaagatgatgcatctttgtggtgtttagtagttttttgttcagctcaaatgctgagggaggtttgctacaatagcaca

SEQ ID NO: 415654 - DNA, 120 bp, Artificial Sequence
  ENSG00000149289_23 (sequence is synthesized)
tgtgatctccttctcagcaaggaggttatatagtatccatttatgtgaaatactgtatcatggaatctgtatgtatagccccacatggtggaagtatcacgggattgctttacatttaaa

SEQ ID NO: 415655 - DNA, 120 bp, Artificial Sequence
  ENSG00000149289_24 (sequence is synthesized)
aagtgcagatagaataaaacttttaccttttcctggaatgaaatagactgttgtttccctggcacttaataaggatagcataatgctagaaattatattgtgttactatgttccatagtc

SEQ ID NO: 415656 - DNA, 120 bp, Artificial Sequence
  ENSG00000149289_25 (sequence is synthesized)
aaaaaatcatgattactagggcaaaaccctgttcatctcttaagaagaatttaactcactttgtaattatttaattcccttctgtctatcttagaatatgtgctctttcattgcagtatc

SEQ ID NO: 415657 - DNA, 120 bp, Artificial Sequence
  ENSG00000149289_26 (sequence is synthesized)
tatgttatttttgaaagttctttagattgctgttaagcttcatccagattaataatgatttttcaagtataagttaatggtttctttctatgtggctttctttttaaaagaatatttata

SEQ ID NO: 415658 - DNA, 120 bp, Artificial Sequence
  ENSG00000149289_27 (sequence is synthesized)
gatacttatgaattctgttagagaaaaatgtaaattttaacctgtcatgcatattaaaaacatactttttgatgatattctatgtgtcactctagaattataagccgtcctaaaagtaga

SEQ ID NO: 415659 - DNA, 120 bp, Artificial Sequence
  ENSG00000149289_28 (sequence is synthesized)
aaaatctgatccatcgagattgagaaggagcatgatatagtgggaaaagcatgggttttagaatcagacgaaactgggtaaaaaaatacagttctactacttatttactttgttgccttg

SEQ ID NO: 415660 - DNA, 120 bp, Artificial Sequence
  ENSG00000149289_29 (sequence is synthesized)
gaggaattacatggcctttctaatttatgacttcttcatctgaaaaatggcagatgatactctcttggcaagggtgttaggagggaggagaggatgtagacaaaatacaaagtattttga

SEQ ID NO: 415661 - DNA, 120 bp, Artificial Sequence
  ENSG00000149289_30 (sequence is synthesized)
tctttgatattaatctttggtgcatcaggggtttatatgcagcactttttatccttgttttgtgttttattaacttggtgtttgtctatcaattgcaagcaattacaataccttcagaat

SEQ ID NO: 415662 - DNA, 120 bp, Artificial Sequence
  ENSG00000149289_31 (sequence is synthesized)
gtgggacatttgactagacctagcaaactgttttttcgagccaagcttagttagactcttttacagctttttaagttatttttatttggggaaagtgggcttctttgtgctataatcatt

SEQ ID NO: 415663 - DNA, 120 bp, Artificial Sequence
  ENSG00000149289_32 (sequence is synthesized)
atttatagaaacaaagttatactacagcactgactttatattttaaacagaatgtaagttaccagttttatgttgaaatgtgttacagtatatatatattagaatgatttacaatatggc

SEQ ID NO: 415664 - DNA, 120 bp, Artificial Sequence
  ENSG00000149289_33 (sequence is synthesized)
acttttcgatgtgttatttttgtttggatttttttttctgttaagaaattagttaatttaatatggtcaatttaaaagaaagcagatgcaatcaatggaaaaatgtttccattttttaaa

SEQ ID NO: 415665 - DNA, 120 bp, Artificial Sequence
  ENSG00000149289_34 (sequence is synthesized)
aatgaataaggcaaaagctgtaactgttacaggttagagctttgttatccagctatgatgtgcttcttgacagtagaagtggaattgaattcctagatttccattaacctgtatttttaa

SEQ ID NO: 415666 - DNA, 120 bp, Artificial Sequence
  ENSG00000149289_35 (sequence is synthesized)
tatgtctgtctttttgttttggggcacaacaatactggataaaataaccctttcacagcacttgcctgtttttaatgaatctaattattcacaatgcaacttttatatttaacatactct

SEQ ID NO: 415667 - DNA, 120 bp, Artificial Sequence
  ENSG00000149289_36 (sequence is synthesized)
ttagctttcctgctatttatcaaggctggcctgaggtgggtttatgtgttgaggttatgcaacatttcttgatactgcactatagagaaatggtgatggaggagttgtaaatggtaactt

SEQ ID NO: 415668 - DNA, 120 bp, Artificial Sequence
  ENSG00000149289_37 (sequence is synthesized)
aaaatttttgtaagatattgtatattttccattttcctgaaggtagttttcttgggggggcctgttatattattaaggccagactcttgccacaaatagtgtagttttagatacagacta

SEQ ID NO: 415669 - DNA, 120 bp, Artificial Sequence
  ENSG00000149289_38 (sequence is synthesized)
tgaatacatttctgcggagtagaagatagattttgcagtcagtggcagacagttgtgtgattgacatcacttgactgttgcgtccaggttttgaattgtacttcacgtaacagatgcatt

SEQ ID NO: 415670 - DNA, 120 bp, Artificial Sequence
  ENSG00000149289_39 (sequence is synthesized)
cagatctttttctgtagtctgcttagatgccctggctattctgattatcctacatgctacagtttgaagtgaagccctgaaaaaccagaaagtaccttttactgttgatacaaattgtat

SEQ ID NO: 415671 - DNA, 120 bp, Artificial Sequence
  ENSG00000149289_40 (sequence is synthesized)
ctttttaactataagaactattttgatttgtagatctagttaaaacacaagtatgtaactatgattagacttttgggcaacattttatcccttatttaaatacaaatttttaaagtaaaa

SEQ ID NO: 415672 - DNA, 120 bp, Artificial Sequence
  ENSG00000149289_41 (sequence is synthesized)
agataaatagaaatgtctgtcttagttttatataatatattaaaacacagtaaataaatttattggcattttctttctcctaaaacttacctagtgtgaacttaaaataaaggtaaaatg

SEQ ID NO: 415673 - DNA, 120 bp, Artificial Sequence
  ENSG00000149289_42 (sequence is synthesized)
taaaacttacctagtgtgaacttaaaataaaggtaaaatgctgcctgaaaataatgtccaagcacctttgactaggataacattttcactacttgtgtgacactgtgtgttgcacgaagt

SEQ ID NO: 415674 - DNA, 120 bp, Artificial Sequence
  ENSG00000149289_43 (sequence is synthesized)
aggatttgggtatacagtaaatgcttctaaaaggcattgtgcatattgacataaccaataatctgaaccgtgttcagcaaacttaattcaggaaagtggtattctacacaattattgctg

SEQ ID NO: 415675 - DNA, 120 bp, Artificial Sequence
  ENSG00000149289_44 (sequence is synthesized)
ttgtgtttgaaatgagtgtggcactcatctgtatccagaaataatatgggtgaggccacacaacccattctgagtggtgtctgtctgaaagcaaccctactcgcatgtgaaattgttctc

SEQ ID NO: 415676 - DNA, 120 bp, Artificial Sequence
  ENSG00000149289_45 (sequence is synthesized)
cttgatttggtcactataaagcaagtttaaatgtagaggctaactcagtgccaaaaacagggttacaaatgtgtagtatcttttattttagtcatattctaagacttctttttagtatga

SEQ ID NO: 415677 - DNA, 120 bp, Artificial Sequence
  ENSG00000149289_46 (sequence is synthesized)
aatcacttttaaattatacatgtaggttttgcttccattttcttcattttaccattttaattatttgaacattcgccaaattttacatttatttaaatgagatcttaggtgagatgtgtg

SEQ ID NO: 415678 - DNA, 120 bp, Artificial Sequence
  ENSG00000149289_47 (sequence is synthesized)
tgacactttgaatttgaccttcttgtgttattagctgactatttgtcattgcctcatggattttaaattatgggaaaatagtgtagccagctgccacctctactgaagtgagtagctctg

SEQ ID NO: 415679 - DNA, 120 bp, Artificial Sequence
  ENSG00000149289_48 (sequence is synthesized)
aactacccacactaaatccttcagtgtaattaattatgagtttaaaaatagcagttttcttatgtgaagaggacagtttgtcccctttttttgaagcaccgatgttgcgttcagagctgt

SEQ ID NO: 415680 - DNA, 120 bp, Artificial Sequence
  ENSG00000149289_49 (sequence is synthesized)
agaatgagataattggcagactttaggtacagcaaattcttacttatctaaagcaataagtcaaaggagtccatcattaaattaaatccatagctgatcacaagccttcattttagccaa

SEQ ID NO: 415681 - DNA, 120 bp, Artificial Sequence
  ENSG00000149289_50 (sequence is synthesized)
aactttctctctaaccaaatcttttaccagacttgctaataaataaccagagagatgtgttaataagtgaagttgccagaaatggtcaactgatcggaaaaaaaaggattcagactggag

SEQ ID NO: 415682 - DNA, 120 bp, Artificial Sequence
  ENSG00000149289_51 (sequence is synthesized)
tattttgcccctgaataattgacagttgactgtgctttacacagtaactagccagtctgttgtctctgtgtcttagtccagagggaatagtacccaattggccaaatactggcccttagt

SEQ ID NO: 415683 - DNA, 120 bp, Artificial Sequence
  ENSG00000149289_52 (sequence is synthesized)
atctcctcctttcttgcatgggatacagacgttttcagtcttgtttttatgatctctctctatatcctgataagagtttgtcattgacttacacatttggaagaaatgcacaccagtgta

SEQ ID NO: 415684 - DNA, 120 bp, Artificial Sequence
  ENSG00000149289_53 (sequence is synthesized)
atttgatactggtggaaacttgaactttgtgtttttatgaaaattcatttatgagaatatgtaatataactgaagagtattttatgtatatctatatacacaaatatgtatttgttatga

SEQ ID NO: 415685 - DNA, 120 bp, Artificial Sequence
  ENSG00000149289_54 (sequence is synthesized)
atgaggtattaaaaacaggggttggggggagtgcttctgatggctaacttttctctaattaaactatgtttctttgagttgtgaacgaccgagtctggggtctggacggccaatgataag

SEQ ID NO: 415686 - DNA, 120 bp, Artificial Sequence
  ENSG00000149289_55 (sequence is synthesized)
atttagaaccacttggatggaaagcagttcttcactggttttattcttggtattttcaaagaattattttgatatttttaatagaatgtgtaattttaaaatacacaaaaaacttaaagt

SEQ ID NO: 415687 - DNA, 120 bp, Artificial Sequence
  ENSG00000149289_56 (sequence is synthesized)
ttatacaaataattatttaacatgtcttatggatgtatctatatgtatatagacagtaatatatttataaaacaaatatactttgcttatgttatagctcttagtttgtgacaggtggga

SEQ ID NO: 415688 - DNA, 120 bp, Artificial Sequence
  ENSG00000149289_57 (sequence is synthesized)
gtgtgtgtgtgtgtgtgtgtgttttgaaaactctcaagctgttttccctctgatttacaatggtatttactttaaagtatgtttggttttcattattctttttgctctccaacttcctta

SEQ ID NO: 415689 - DNA, 120 bp, Artificial Sequence
  ENSG00000149289_58 (sequence is synthesized)
gtttggttttcattattctttttgctctccaacttccttattcaagataaaataagacatacagttttctggccattctgttggtgtgtggtgcacccattttattgtcatctaactcct

SEQ ID NO: 415690 - DNA, 120 bp, Artificial Sequence
  ENSG00000149289_59 (sequence is synthesized)
ggagaattcccacgtgacctgaaatcaaacagattctggctggacatatgcttatgttccaaatatattaaagatgttaattcagctaacagttaagtttccaaggtatacaccaacaaa

SEQ ID NO: 415691 - DNA, 120 bp, Artificial Sequence
  ENSG00000149289_60 (sequence is synthesized)
taaaatgaggtattaaaaagagatggattacacacatgcattagaataagagaaaacagtagtgttaataaaagtaaagaaacatacactatcttagccccctagggcaggggttgactt

SEQ ID NO: 415692 - DNA, 120 bp, Artificial Sequence
  ENSG00000149289_61 (sequence is synthesized)
tttctgtaaaggatcagatagtaaataatacaggaatcatatggacttcaaatgccattgtaaaaactactcagctctgcctttagagcataagaacagccacagataacatgtaaatta

SEQ ID NO: 415693 - DNA, 120 bp, Artificial Sequence
  ENSG00000149289_62 (sequence is synthesized)
ggctgtgttccaataaaactttatttacagaaacgggaagccggtcagattgggcctgtgggccataatttgctgatctcaagcagtaaatcctggtatatgttaatagaagaaatcata

SEQ ID NO: 415694 - DNA, 120 bp, Artificial Sequence
  ENSG00000149289_63 (sequence is synthesized)
cataattgcatttcagttgacattaaaagaaaatctggtagtttttgatgtccttcaaaagaggattgttagacattgatgttaaagcatcttaattcatttgagttttcttacctgttt

SEQ ID NO: 415695 - DNA, 120 bp, Artificial Sequence
  ENSG00000149289_64 (sequence is synthesized)
acacccattatttattagagatatttcttgtgtttaaccacaaaaaaaagcactctgttaaaatgttttaatatgtattgaatttctttcataaacttttcatttctgttgataaatggg

SEQ ID NO: 415696 - DNA, 120 bp, Artificial Sequence
  ENSG00000149289_65 (sequence is synthesized)
aatcccttaccaaccttttgttttttaaaagtctcatagaccaaaaaaaatctgttgcagcatttaattagccacagatacattttggctgcatttaccagttacatttttccattggtt

SEQ ID NO: 415697 - DNA, 120 bp, Artificial Sequence
  ENSG00000149289_66 (sequence is synthesized)
ttggcttctaataaataacatatctgccattctttaaaaatgattttaaagaagataaatatattgtaatttcacatgctatagctttattctgtaagattaaaaattgtgactagtata

SEQ ID NO: 415698 - DNA, 120 bp, Artificial Sequence
  ENSG00000149289_67 (sequence is synthesized)
attgtagctataatgtgagtggcatgttacaatgtaactctttatgagaaataaaatgtatctctgctttgtctgtccagatctttaggatttttagatgccttgggactgtccttggtg

SEQ ID NO: 415699 - DNA, 120 bp, Artificial Sequence
  ENSG00000149289_68 (sequence is synthesized)
aatgatattcttcatatgatcatatgtaattttgaattcgttggaagtacacgctgctgagcatgtttattcacagtgctttataccgggtgttgcatcagtaatcattttcataagaac

SEQ ID NO: 415700 - DNA, 120 bp, Artificial Sequence
  ENSG00000149289_69 (sequence is synthesized)
atttaaacagcatgaacatcatcatccacttaaatagttaaactttcttttaaaattggaatgcaactgtaggttttaacaatgtttattgttttttaagtggttactttgtttttcctt

SEQ ID NO: 415701 - DNA, 120 bp, Artificial Sequence
  ENSG00000149289_70 (sequence is synthesized)
aatactttctgttaacttaattattactcctgttgcagtgttactgttatgtattagaagtggcttttccccctaagatccttagtcttttaaagacaatttaaggtattggccatttgg

SEQ ID NO: 415702 - DNA, 120 bp, Artificial Sequence
  ENSG00000149289_71 (sequence is synthesized)
cagtagaaaatgtgcatgttttaacttggttttataaaatctgtaatgtttcacttcttgaaccatgtaccaaatttgccaattttctgtccaagtgtttcagatgaataacaaaacgct

SEQ ID NO: 415703 - DNA, 120 bp, Artificial Sequence
  ENSG00000149289_72 (sequence is synthesized)
gttcattgaagctttcgccacctttcttaaagcagcgtatgttccaagggaaaaaggcattgaaaagcaatcgtttgtttttatgaagaataggtgttcagattccttcagtttttttga

SEQ ID NO: 415704 - DNA, 120 bp, Artificial Sequence
  ENSG00000149289_73 (sequence is synthesized)
aattagaaatttcttaccttatgtgaaatattcacaaacgtgcacacttctgcagagacaaagcatttcactgcacgtgtaccaggttattgattttatcttttcctttcagggttttgt

SEQ ID NO: 415705 - DNA, 120 bp, Artificial Sequence
  ENSG00000149289_74 (sequence is synthesized)
cctcccaaaccagagtcatatgctgctagtagaattttttatttgatcctgcgaacttttcttataggaaaagtaaggcaaaggatgtgtagtgcaaccatctgataaactagtgtgatt

SEQ ID NO: 415706 - DNA, 120 bp, Artificial Sequence
  ENSG00000149289_75 (sequence is synthesized)
gtatttatcctctgttctgtgtatttctgtaatggaatctttacaattcccaaaacggtattttagacctactggaaatctgtatcgaaacagctatgtgattctgccactgagaaaaaa

SEQ ID NO: 415707 - DNA, 120 bp, Artificial Sequence
  ENSG00000149289_76 (sequence is synthesized)
aaaatttttaattcgtttttcttatgctggtttgtttttctttaatgaagaaattgatctcatatggcatcatagatgctaaataaataaaagcatcatacttctctagtttgcctgcat

SEQ ID NO: 415708 - DNA, 120 bp, Artificial Sequence
  ENSG00000149289_77 (sequence is synthesized)
tcagtggctaacattatgagcattgtgtaagataaacacatggtcagtatcaatgtaaatgttagagccatgattaattcctatgaaaattgaaattaaatgtcaaagacaactagacat

SEQ ID NO: 415709 - DNA, 120 bp, Artificial Sequence
  ENSG00000149292_0 (sequence is synthesized)
cttggtcccgccccgggcccctggctcctggccccgccccagcccaggcaggtcactgcgccatttcctgtccaaagctgggcgaatcagggattccggttcacaatggatgctgataaa

SEQ ID NO: 415710 - DNA, 120 bp, Artificial Sequence
  ENSG00000149292_1 (sequence is synthesized)
gagaaagatttgcagaaatttcttaaaaatgtggatgaaatctccaatttaattcaggagatgaattctgatgacccagttgtgcaacagaaagctgtcctggagacagaaaagagacta

SEQ ID NO: 415711 - DNA, 120 bp, Artificial Sequence
  ENSG00000149292_2 (sequence is synthesized)
ctgcttatggaggaagaccaggaggaggatgaatgcaggaccaccttgaacaagactatgatcagtcctccacaaactgctatgaagagtgcagaagaaataaactcagaggccttcttg

SEQ ID NO: 415712 - DNA, 120 bp, Artificial Sequence
  ENSG00000149292_3 (sequence is synthesized)
gcatctgtggagaaggatgcaaaggaacgagccaagagaagaagggaaaacaaagtcttggcggatgccctaaaagaaaaagggaatgaagcatttgctgaaggcaattatgaaacagct

SEQ ID NO: 415713 - DNA, 120 bp, Artificial Sequence
  ENSG00000149292_4 (sequence is synthesized)
atcctgcgctacagtgagggtttggagaagctgaaggacatgaaagtgctgtacaccaaccgagcccaggcttatatgaaacttgaggactatgagaaggcactggtggattgtgagtgg

SEQ ID NO: 415714 - DNA, 120 bp, Artificial Sequence
  ENSG00000149292_5 (sequence is synthesized)
gctctcaagtgtgatgaaaaatgcacaaaagcatattttcacatgggaaaagccaacctggccctgaagaactacagtgtgtctagagagtgttataagaagatcttagaaataaacccc

SEQ ID NO: 415715 - DNA, 120 bp, Artificial Sequence
  ENSG00000149292_6 (sequence is synthesized)
aagctgcaaacccaggtgaaaggttacctgaatcaagtagatcttcaggaaaaagcagaccttcaagaaaaggaagcccacgaactgctggattcaggaaagaacacagccgtgaccacc

SEQ ID NO: 415716 - DNA, 120 bp, Artificial Sequence
  ENSG00000149292_7 (sequence is synthesized)
aagaacctcctggagaccctttccaagcctgaccagatccccttgttctatgctggggggattgagatcctgactgaaatgataaatgagtgcacagaacaaactttattcagaatgcac

SEQ ID NO: 415717 - DNA, 120 bp, Artificial Sequence
  ENSG00000149292_8 (sequence is synthesized)
aatggatttagtatcatcagtgacaacgaggtcataagaaggtgtttttccacagcaggaaatgatgcagttgaagaaatggtctgtgtgtctgttctcaagctctggcaagcagtgtgc

SEQ ID NO: 415718 - DNA, 120 bp, Artificial Sequence
  ENSG00000149292_9 (sequence is synthesized)
acaccatgacagggccaggctgttggccgccctcttgtcctccaaggtcctggccatccggcagcagagctttgccctgctgctgcatctcgcccagactgagagcggacggagcctgat

SEQ ID NO: 415719 - DNA, 120 bp, Artificial Sequence
  ENSG00000149292_10 (sequence is synthesized)
catcaaccaccttgacctgaccagattattggaagcgctggtgtcatttcttgatttctcggataaggaggccaacactgctatgggactgttcacagacttggctctggaagaaagatt

SEQ ID NO: 415720 - DNA, 120 bp, Artificial Sequence
  ENSG00000149292_11 (sequence is synthesized)
ccaagtctggttccaggccaaccttccaggtgttctccctgcactcacaggcgttctgaagacagatcccaaggtaagcagctcctcggctctgtgccagtgcattgccatcatgggaaa

SEQ ID NO: 415721 - DNA, 120 bp, Artificial Sequence
  ENSG00000149292_12 (sequence is synthesized)
cctcagtgctgagcccactacccgaagacacatggcggcctgtgaggaatttggggatggctgcttgagcctcctggccaggtgtgaggaggatgtggacctgttcagagaggttatcta

SEQ ID NO: 415722 - DNA, 120 bp, Artificial Sequence
  ENSG00000149292_13 (sequence is synthesized)
cacactcctgggactcatgatgaacctgtgtcttcaggctccctttgtctctgaggtttgggctgtggaggtgagcagaaggtgcctgtctttactaaacagccaggatggaggaatcct

SEQ ID NO: 415723 - DNA, 120 bp, Artificial Sequence
  ENSG00000149292_14 (sequence is synthesized)
gacaagagctgctggtgttctgagccggaccctttcttcctctctgaaaattgttgaggaggccttgcgagcaggagtggtaaagaaaatgatgaaattcctgaagacaggaggtgagac

SEQ ID NO: 415724 - DNA, 120 bp, Artificial Sequence
  ENSG00000149292_15 (sequence is synthesized)
tgcatcacgttatgctataaagatactagctatctgcacgaatagttatcatgaagctcgggaagaagtaataagactggataaaaagttgagcgttatgatgaagctgctcagctcgga

SEQ ID NO: 415725 - DNA, 120 bp, Artificial Sequence
  ENSG00000149292_16 (sequence is synthesized)
ggatgaggttctggtgggcaacgctgccctctgccttggtaactgcatggaggtgcccaacgttgcgtcttccctgctaaagacggaccttttgcaggtcttgttaaagcttgcaggcag

SEQ ID NO: 415726 - DNA, 120 bp, Artificial Sequence
  ENSG00000149292_17 (sequence is synthesized)
tgacacacagaagacggccgtgcaggtgaacgcaggcattgctctggggaagctgtgcacagctgagcccagatttgctgctcaactgagaaagcttcatggcctagaaattctcaactc

SEQ ID NO: 415727 - DNA, 120 bp, Artificial Sequence
  ENSG00000149292_18 (sequence is synthesized)
tacgatgaaatacatcagtgattcttgagagagacagggtttgtgtgcatttggggaacacacagatgcacaccgtgtgttgttcctatgctaataaagacctttgatgtatccacttca

SEQ ID NO: 415728 - DNA, 120 bp, Artificial Sequence
  ENSG00000149292_19 (sequence is synthesized)
gctctggggaagctgtgcacagctgagcccagagtgcctgccgagagcagtcatctccaatttggaagagagtctgctgcacctgaagctctgtctcctcgcaggtgggaagagatgttt

SEQ ID NO: 415729 - DNA, 120 bp, Artificial Sequence
  ENSG00000149292_20 (sequence is synthesized)
cacatgctagtattctccctctccagtgtggatccacccccgccaccgccccaaacttgttacccctaacacatgctaccatgcagaccttccaggcagcatggaaaataccagcgccat

SEQ ID NO: 415730 - DNA, 120 bp, Artificial Sequence
  ENSG00000149292_21 (sequence is synthesized)
ctttcagaaggcctcatctccacttgccaggagccccgacaccacccttggagacacggcttgttccagatgaggaaactgaggtgcaaagcagttaagcaactggtccaagatctagac

SEQ ID NO: 415731 - DNA, 120 bp, Artificial Sequence
  ENSG00000149292_22 (sequence is synthesized)
caggtactcaaccaccccactccacatgcaactgtccccaacccatgcgattcatcctttccctgaaggcttgtgtggtgctgccttttaaattcataacataatgacttcattgttatg

SEQ ID NO: 415732 - DNA, 120 bp, Artificial Sequence
  ENSG00000149292_23 (sequence is synthesized)
agtgcgtgcggcctggcctctttgcgcccggcgggcagcgcgcgtctggggcaggctccgcgcggggctcgggcacaggtccccgctgccgcagccctaccgagtgaagcactgagcgcg

SEQ ID NO: 415733 - DNA, 120 bp, Artificial Sequence
  ENSG00000149292_24 (sequence is synthesized)
gcgccgcttcgccatcacctggctctggccctctcaccctagcgtaggggggcactggccaggcagtgaggaccctgagatccatgccctgggagacagaggttgtctcctgtccatgca

SEQ ID NO: 415734 - DNA, 120 bp, Artificial Sequence
  ENSG00000149292_25 (sequence is synthesized)
cccgcgcgcctgccttctaaccttcataccgttgggcagattaattcactggactaggcctctgttccgtgggagttgaaaagatttgacctggaagaaaccctagcgattattcagtta

SEQ ID NO: 415735 - DNA, 120 bp, Artificial Sequence
  ENSG00000149292_26 (sequence is synthesized)
ttttccatcctaaagaggatgtggccgggatggaactccatcaccatcctgaagccacagcagaggtggcagaattctctggggcctcatccaagtggctgtgtatatcagtagttgctg

SEQ ID NO: 415736 - DNA, 120 bp, Artificial Sequence
  ENSG00000149292_27 (sequence is synthesized)
agtcctattccataatacagcactatggtgtgtttagccattcattggttgaaggacatctgagcggtttccagattttagctattgcaaataaagctgcaatgagcattcatatacaga

SEQ ID NO: 415737 - DNA, 120 bp, Artificial Sequence
  ENSG00000149292_28 (sequence is synthesized)
atgcacagaaggtgaactgaaggaggctccaccatggaagcggcaagcctttctcctggatcctgttgcataccctgcaggtgtaggttgctggcacattgcctccacctgggggctgtc

SEQ ID NO: 415738 - DNA, 120 bp, Artificial Sequence
  ENSG00000149292_29 (sequence is synthesized)
agataagacctctcaccctggcgcagtgagaggttaagaataggctttcaagaagacagacctgtctgacacacagcattcattcatctaacaactgtgttgtgctgggcactgttctag

SEQ ID NO: 415739 - DNA, 120 bp, Artificial Sequence
  ENSG00000149292_30 (sequence is synthesized)
cggcttgttccagttggttgaatctgcaaatttggaacccgagggtacagagggctgactgtatctgctttgttggagtccatctgattcattgtctaaatacaattaattgctccaaaa

SEQ ID NO: 415740 - DNA, 120 bp, Artificial Sequence
  ENSG00000149292_31 (sequence is synthesized)
ggtcactgcgccatttcctgtccaaagctgggcgaatcaggtccctaaatcgccggggttgatgttggctttggaagaactatttgcagagcgttttctgcactggaaggagggctggaa

SEQ ID NO: 415741 - DNA, 120 bp, Artificial Sequence
  ENSG00000149292_32 (sequence is synthesized)
gctttctggaagcattgccgcacgtaaatgagtgcctcttggcctaaaacagcagttggaatgaaagggatcaccctgctgttattcattgacataaacaaaactgtcataaaaataatc

SEQ ID NO: 415742 - DNA, 120 bp, Artificial Sequence
  ENSG00000149292_33 (sequence is synthesized)
aaagctgggcgaatcaggtcggtgccgcggggtaccccggaatcccccctgggagctggtcctgcactggccttcagagccgagcagaggacgctgctttgggccccagagcatgggaag

SEQ ID NO: 415743 - DNA, 120 bp, Artificial Sequence
  ENSG00000149292_34 (sequence is synthesized)
ttgctagccctgcgattctgtagcatcccttgtcaggttccctaagccctgccttcaccgtggaagaggtccctgtattcaactctcctcagttgcccagtgcaagtgtgccatctgttt

SEQ ID NO: 415744 - DNA, 120 bp, Artificial Sequence
  ENSG00000149292_35 (sequence is synthesized)
ggccagcaagggtcacatgttcatgcaggagaaaacagtggagaaggagagacgcagaacagcatgccgaggtccccaatttgctgctcaactgagaaagcttcatggcctagaaattct

SEQ ID NO: 415745 - DNA, 120 bp, Artificial Sequence
  ENSG00000149292_36 (sequence is synthesized)
gcatccgtggcctgggactcatggttccgtgattgatcctggtgacccatggctctggattataaaactatactttctcaaacctgtatttggtgaatctaggggtgaaataaaaccaaa

SEQ ID NO: 415746 - DNA, 120 bp, Artificial Sequence
  ENSG00000149292_37 (sequence is synthesized)
aggtccctgtattcaactctcctcagttgcccagtgcaagtgtgccatctgtttcctggcaggaccatgactgatccaggtaggggatagttctcgctgacattctactgttcgaatgtt

SEQ ID NO: 415747 - DNA, 120 bp, Artificial Sequence
  ENSG00000149292_38 (sequence is synthesized)
cttaaattattgcctttgagcttacaaacaacctgtgaacaaaaacctactgatcatcccattctgttactagtgatcagcgggaatgtccctgagaggtttttctttattttctcttgg

SEQ ID NO: 415748 - DNA, 120 bp, Artificial Sequence
  ENSG00000149292_39 (sequence is synthesized)
ctgtacaccaaccgagcccagtgtgatgaaaaatgcacaaaagcatattttcacatgggaaaagccaacctggccctgaagaactacagtgtgtctagagagtgttataagaagatctta

SEQ ID NO: 415749 - DNA, 120 bp, Artificial Sequence
  ENSG00000149294_0 (sequence is synthesized)
gctgaggctgggactgtcactcattctccgatcagcgcgtgaacgcagctcggctgccgctggcaggaaacaattctgcaaaaataatcatactcagcctggcaattgtctgcccctagg

SEQ ID NO: 415750 - DNA, 120 bp, Artificial Sequence
  ENSG00000149294_1 (sequence is synthesized)
tctgtcgctcagccgccgtccacactcgctgcaggggggggggcacagaatttaccgcggcaagaacatccctcccagccagcagattacaatgctgcaaactaaggatctcatctggac

SEQ ID NO: 415751 - DNA, 120 bp, Artificial Sequence
  ENSG00000149294_2 (sequence is synthesized)
tttgtttttcctgggaactgcagtttctctgcaggtggatattgttcccagccagggggagatcagcgttggagagtccaaattcttcttatgccaagtggcaggagatgccaaagataa

SEQ ID NO: 415752 - DNA, 120 bp, Artificial Sequence
  ENSG00000149294_3 (sequence is synthesized)
agacatctcctggttctcccccaatggagaaaagctcaccccaaaccagcagcggatctcagtggtgtggaatgatgattcctcctccaccctcaccatctataacgccaacatcgacga

SEQ ID NO: 415753 - DNA, 120 bp, Artificial Sequence
  ENSG00000149294_4 (sequence is synthesized)
cgccggcatttacaagtgtgtggttacaggcgaggatggcagtgagtcagaggccaccgtcaacgtgaagatctttcagaagctcatgttcaagaatgcgccaaccccacaggagttccg

SEQ ID NO: 415754 - DNA, 120 bp, Artificial Sequence
  ENSG00000149294_5 (sequence is synthesized)
ggagggggaagatgccgtgattgtgtgtgatgtggtcagctccctcccaccaaccatcatctggaaacacaaaggccgagatgtcatcctgaaaaaagatgtccgattcatagtcctgtc

SEQ ID NO: 415755 - DNA, 120 bp, Artificial Sequence
  ENSG00000149294_6 (sequence is synthesized)
caacaactacctgcagatccggggcatcaagaaaacagatgagggcacttatcgctgtgagggcagaatcctggcacggggggagatcaacttcaaggacattcaggtcattgtgaatgt

SEQ ID NO: 415756 - DNA, 120 bp, Artificial Sequence
  ENSG00000149294_7 (sequence is synthesized)
gccacctaccatccaggccaggcagaatattgtgaatgccaccgccaacctcggccagtccgtcaccctggtgtgcgatgccgaaggcttcccagagcccaccatgagctggacaaagga

SEQ ID NO: 415757 - DNA, 120 bp, Artificial Sequence
  ENSG00000149294_8 (sequence is synthesized)
tggggaacagatagagcaagaggaagacgatgagaagtacatcttcagcgacgatagttcccagctgaccatcaaaaaggtggataagaacgacgaggctgagtacatctgcattgctga

SEQ ID NO: 415758 - DNA, 120 bp, Artificial Sequence
  ENSG00000149294_9 (sequence is synthesized)
gaacaaggctggcgagcaggatgcgaccatccacctcaaagtctttgcaaaacccaaaatcacatatgtagagaaccagactgccatggaattagaggagcaggtcactcttacctgtga

SEQ ID NO: 415759 - DNA, 120 bp, Artificial Sequence
  ENSG00000149294_10 (sequence is synthesized)
agcctccggagaccccattccctccatcacctggaggacttctacccggaacatcagcagcgaagaaaaggcttcgtggactcgaccagagaagcaagagactctggatgggcacatggt

SEQ ID NO: 415760 - DNA, 120 bp, Artificial Sequence
  ENSG00000149294_11 (sequence is synthesized)
ggtgcgtagccatgcccgtgtgtcgtcgctgaccctgaagagcatccagtacactgatgccggagagtacatctgcaccgccagcaacaccatcggccaggactcccagtccatgtacct

SEQ ID NO: 415761 - DNA, 120 bp, Artificial Sequence
  ENSG00000149294_12 (sequence is synthesized)
tgaagtgcaatatgccccaaagctacagggccctgtggctgtgtacacttgggaggggaaccaggtgaacatcacctgcgaggtatttgcctatcccagtgccacgatctcatggtttcg

SEQ ID NO: 415762 - DNA, 120 bp, Artificial Sequence
  ENSG00000149294_13 (sequence is synthesized)
ggatggccagctgctgccaagctccaattacagcaatatcaagatctacaacaccccctctgccagctatctggaggtgaccccagactctgagaatgattttgggaactacaactgtac

SEQ ID NO: 415763 - DNA, 120 bp, Artificial Sequence
  ENSG00000149294_14 (sequence is synthesized)
tgcagtgaaccgcattgggcaggagtccttggaattcatccttgttcaagcagacaccccctcttcaccatccatcgaccaggtggagccatactccagcacagcccaggtgcagtttga

SEQ ID NO: 415764 - DNA, 120 bp, Artificial Sequence
  ENSG00000149294_15 (sequence is synthesized)
tgaaccagaggccacaggtggggtgcccatcctcaaatacaaagctgagtggagagcagttggtgaagaagtatggcattccaagtggtatgatgccaaggaagccagcatggagggcat

SEQ ID NO: 415765 - DNA, 120 bp, Artificial Sequence
  ENSG00000149294_16 (sequence is synthesized)
cgtcaccatcgtgggcctgaagcccgaaacaacgtacgccgtaaggctggcggcgctcaatggcaaagggctgggtgagatcagcgcggcctccgagttcaagacgcagccagtccaagg

SEQ ID NO: 415766 - DNA, 120 bp, Artificial Sequence
  ENSG00000149294_17 (sequence is synthesized)
ggaacccagtgcacctaagctcgaagggcagatgggagaggatggaaactctattaaagtgaacctgatcaagcaggatgacggcggctcccccatcagacactatctggtcaggtaccg

SEQ ID NO: 415767 - DNA, 120 bp, Artificial Sequence
  ENSG00000149294_18 (sequence is synthesized)
agcgctctcctccgagtggaaaccagagatcaggctcccgtctggcagtgaccacgtcatgctgaagtccctggactggaatgctgagtatgaggtctacgtggtggctgagaaccagca

SEQ ID NO: 415768 - DNA, 120 bp, Artificial Sequence
  ENSG00000149294_19 (sequence is synthesized)
aggaaaatccaaggcggctcattttgtgttcaggacctcggcccagcccacagccatcccagccaacggcagccccacctcaggcctgagcaccggggccatcgtgggcatcctcatcgt

SEQ ID NO: 415769 - DNA, 120 bp, Artificial Sequence
  ENSG00000149294_20 (sequence is synthesized)
catcttcgtcctgctcctggtggttgtggacatcacctgctacttcctgaacaagtgtggcctgttcatgtgcattgcggtcaacctgtgtggaaaagccgggcccggggccaagggcaa

SEQ ID NO: 415770 - DNA, 120 bp, Artificial Sequence
  ENSG00000149294_21 (sequence is synthesized)
ggacatggaggagggcaaggccgccttctcgaaagatgagtccaaggagcccatcgtggaggttcgaacggaggaggagaggaccccaaaccatgatggagggaaacacacagagcccaa

SEQ ID NO: 415771 - DNA, 120 bp, Artificial Sequence
  ENSG00000149294_22 (sequence is synthesized)
cgagaccacgccactgacggagcccgagaagggccccgtagaagcaaagccagagtgccaggagacagaaacgaagccagcgccagccgaagtcaagacggtccccaatgacgccacaca

SEQ ID NO: 415772 - DNA, 120 bp, Artificial Sequence
  ENSG00000149294_23 (sequence is synthesized)
gacaaaggagaacgagagcaaagcatgatgggtgaagagaaccgagcaaagatcaaaataaaaagtgacacagcagcttcaccagagcatttccaacaccacagacacacacacgcacgc

SEQ ID NO: 415773 - DNA, 120 bp, Artificial Sequence
  ENSG00000149294_24 (sequence is synthesized)
aaaacatgggaatctcctttttgtaggtttatagaaagggtccctttgttgcacactcacttgtaagaaaatgagacaaaaaggttaaacccacagccaaactaggacactccgttccct

SEQ ID NO: 415774 - DNA, 120 bp, Artificial Sequence
  ENSG00000149294_25 (sequence is synthesized)
gaaaccgttaaaaaatcaaacaaaaggaccccaaattaagaatctaggaagctcagaaacgaaatctaggttcaggaagaccacacttggtgttacccgattggcacagaccagtttcag

SEQ ID NO: 415775 - DNA, 120 bp, Artificial Sequence
  ENSG00000149294_26 (sequence is synthesized)
agaaatactttcaggcactaagactaatcgaatgaacaaagtccacagtttatttttatactttcagtcaagtttgaactctgtaaaacctcataaataagttataatttctgttcactt

SEQ ID NO: 415776 - DNA, 120 bp, Artificial Sequence
  ENSG00000149294_27 (sequence is synthesized)
tgtatttgttcagtatgcaaagtgtgtcaccctttctagctgaattcaattcccacgtagactcttattttataggacgaatgccaaattgcagcttctgggggtagatctcaatttgca

SEQ ID NO: 415777 - DNA, 120 bp, Artificial Sequence
  ENSG00000149294_28 (sequence is synthesized)
gtattcagacttctttttctttcttttacattcttttttctttctttctttctgccaactttgttttccagtgtttacaaggtgacaaatgtttgactttggttgtgtttaaatgtccgt

SEQ ID NO: 415778 - DNA, 120 bp, Artificial Sequence
  ENSG00000149294_29 (sequence is synthesized)
gtaaaatagctgccttttattttttaaggtaacaaataccacctagaggtaggtaggatcatcccacgcttgctttagcacaggacaactttacaaaacatgattgtttacagctgctct

SEQ ID NO: 415779 - DNA, 120 bp, Artificial Sequence
  ENSG00000149294_30 (sequence is synthesized)
tcccctcttttctgatctgcagtttttgcctgggtcccactcaggtgaaaatccatctcattctggaatggttttgcttttgaatttttggttatttttgtgtttctttgggggttagac

SEQ ID NO: 415780 - DNA, 120 bp, Artificial Sequence
  ENSG00000149294_31 (sequence is synthesized)
cactttctgattagccgccacctgcctgcatctgtgaaaagggatctgctcccaggcgttctcacccttcttttgaaggactccttaggctttgttgaatgaagcagagaagattgtata

SEQ ID NO: 415781 - DNA, 120 bp, Artificial Sequence
  ENSG00000149294_32 (sequence is synthesized)
gttggggctggtcttggtgaacacacattattaccccacacatcccctttgtgtagaaagccaaataaaatctatacataccatttccttttgagcccagaatctagatttgagcggaag

SEQ ID NO: 415782 - DNA, 120 bp, Artificial Sequence
  ENSG00000149294_33 (sequence is synthesized)
agcatgtgtgcttcagggaattagtgtctttttttggaaatctgttgaagtaaagtaacatcggccttctgttcacttaggcagcatttatagaaacaaaagaagaaagaaacaacctac

SEQ ID NO: 415783 - DNA, 120 bp, Artificial Sequence
  ENSG00000149294_34 (sequence is synthesized)
tgtctggagtcataacacaactttcctggattggaaaccaagtgggggaaaaaatacagaaactttaagggggatgggaggggggggagaagggaaaagccagccctttgtatagaaatt

SEQ ID NO: 415784 - DNA, 120 bp, Artificial Sequence
  ENSG00000149294_35 (sequence is synthesized)
ttgcttttttttccctcattctactttagaactgcaagcttgtgcactgtggatgcgtgaatattttagtgtgaaacgtgtttttgtcatagtattgaaataaaacttcaacatagtttg

SEQ ID NO: 415785 - DNA, 120 bp, Artificial Sequence
  ENSG00000149294_36 (sequence is synthesized)
gttgtggaaggtatagcagatagttcagaaaaaatattcaggaaacaaaaatcactcaaacggaatcgaagccttttaacaaagaaaatgaaatacagatgatgatgatgatgatgaaga

SEQ ID NO: 415786 - DNA, 120 bp, Artificial Sequence
  ENSG00000149294_37 (sequence is synthesized)
tgatgctaagtaaacagaaatcagtactccgcatgcgctcctctcctaaggtacaaagcagcaagaggttagggtggcaaggctgcctctgggtccattctgtgggccactctccccaac

SEQ ID NO: 415787 - DNA, 120 bp, Artificial Sequence
  ENSG00000149294_38 (sequence is synthesized)
gttctgacacttctgcagtctgatcagtggcgatgctagattataatttcaaactgtgaagaataatggtcttgtcatttgctcaatgtggggttatgttgcattttctcagctcctggg

SEQ ID NO: 415788 - DNA, 120 bp, Artificial Sequence
  ENSG00000149294_39 (sequence is synthesized)
gatggaaatggaggatcccagaacacacagccctggcccctttgattctagggcctgcacagatctctggttcaaatgcacaggccctcagaatagaggaacatgaagagagatcttaga

SEQ ID NO: 415789 - DNA, 120 bp, Artificial Sequence
  ENSG00000149294_40 (sequence is synthesized)
gcacacagtagaatgtgagagcctgggtgtctgagaccgggagggcccagcagtgaggggcaggctcttctggtcaccaggctgttcagtggactcagttcttcatcttgtaatgtcgat

SEQ ID NO: 415790 - DNA, 120 bp, Artificial Sequence
  ENSG00000149294_41 (sequence is synthesized)
ggctttgccacaccaggccaagcccatgccataccttgtcaagactgtcaaagtggttgtggttaggtcaaactggttttggttctgatggttaggaagaaacaggtcagccctcagatc

SEQ ID NO: 415791 - DNA, 120 bp, Artificial Sequence
  ENSG00000149294_42 (sequence is synthesized)
acctggcccgggacagctgaccccctagaaccctggctctgccattagctaggacctaagactctgcccacattttggtctgttctctcccattacacataggtttgtctcagcatgcaa

SEQ ID NO: 415792 - DNA, 120 bp, Artificial Sequence
  ENSG00000149294_43 (sequence is synthesized)
aaaaaaaaaaaaaaaaaaaagcaatgctttctctaaaatcaaagagggagtcattttattccaagatgttttatcttttatgttaagagatcaaagcttataattttcttttttaatttt

SEQ ID NO: 415793 - DNA, 120 bp, Artificial Sequence
  ENSG00000149294_44 (sequence is synthesized)
taattttcttttttaatttttgaaggagggatcaactccagtttccaatgtctatgtgtctatgtgtgtatgtgccatacatatgtattcacatgaagaccggcatggccaagttctgct

SEQ ID NO: 415794 - DNA, 120 bp, Artificial Sequence
  ENSG00000149294_45 (sequence is synthesized)
ggaggagcactcaagtgtgacgagcagggccactggaccctgcagggctgtggtgtatatagtgcagctttggaggtggaactctattttcacacttttctatggagccttccgagtccc

SEQ ID NO: 415795 - DNA, 120 bp, Artificial Sequence
  ENSG00000149294_46 (sequence is synthesized)
aggttttcacttgaggctgtctgtctggatggcggttttcagacctccattaacatccctacccagcattctgtacttcgggggccttctctcttgttataaaactttttaccaagtgaa

SEQ ID NO: 415796 - DNA, 120 bp, Artificial Sequence
  ENSG00000149294_47 (sequence is synthesized)
acatcgataccacctttgtttccattctcactggtgtaaatactgagtactaactgagaattttgactttgcattctgtcggaatacttgtgttcaataaaaattgaaagaaaaaagcta

SEQ ID NO: 415797 - DNA, 120 bp, Artificial Sequence
  ENSG00000149294_48 (sequence is synthesized)
ttctctgcagtgactcttcttttgctctgttaggaacttgaacacaaaaattaaatttgcttaaaagcccagttcctatgaaaaagatcagtgccccctttggaagaacctggcaggacc

SEQ ID NO: 415798 - DNA, 120 bp, Artificial Sequence
  ENSG00000149294_49 (sequence is synthesized)
tgtctctcttacctccttgatgttcggcactatttgtggccggcgtggtggaaggacacagtgaggttctcacccccgccccccgctcctcgctcccatcccagttccatcaaaacgaac

SEQ ID NO: 415799 - DNA, 120 bp, Artificial Sequence
  ENSG00000149294_50 (sequence is synthesized)
cattctgtgtggaagagaaggttttgtgattggaaaaagctttacctccagacatgtcaccactcacagatacttttgtgccacttcataaggagtttgccccctttttaatggcagtaa

SEQ ID NO: 415800 - DNA, 120 bp, Artificial Sequence
  ENSG00000149294_51 (sequence is synthesized)
aaagaatttgagagctctttctttaaatgctatttttaaaaaccatcatgctagatttacagagaagtttctgcatatctgctacttgttgcattttgggttcaaacctaaatatgatgt

SEQ ID NO: 415801 - DNA, 120 bp, Artificial Sequence
  ENSG00000149294_52 (sequence is synthesized)
agcagaggaagaattctaagtaccttctaaagcttgtgtcagattgttaaaatcaccacacattcccctcattctaactctgtgctccttgtcctcccttcaataataattggctttgct

SEQ ID NO: 415802 - DNA, 120 bp, Artificial Sequence
  ENSG00000149294_53 (sequence is synthesized)
tgcaattaagcatttaagtgcccatgttaaaagagccagaccgcactgattcacatgagcgttttgctgacatgatgggcaactgaagtcacccctgttgcccatgcactggaaaaaaag

SEQ ID NO: 415803 - DNA, 120 bp, Artificial Sequence
  ENSG00000149294_54 (sequence is synthesized)
ttgaatttgttggatattttctggggctgatgaacgttctgggatgtgctttcagtcctcgtattacggccagcaccttacactgtctctgtgaacggggccaagccatgatgtgccaac

SEQ ID NO: 415804 - DNA, 120 bp, Artificial Sequence
  ENSG00000149294_55 (sequence is synthesized)
aagtgtcagctttgaaaggtgtttgtctcccaatcggggtgactcccctgctgcctggcagcatgtcgcagatcagcacagagtggggccgtggttcagcagtgacccacagaatggctt

SEQ ID NO: 415805 - DNA, 120 bp, Artificial Sequence
  ENSG00000149294_56 (sequence is synthesized)
tgagcatcagtctacaggacaggttggaagcatccactgtgaaccaggcattagtcccctacctggcctgtgtgtgctcagtagagaaggagagggacaggccactcccagactgcccag

SEQ ID NO: 415806 - DNA, 120 bp, Artificial Sequence
  ENSG00000149294_57 (sequence is synthesized)
cccaggagggttaataaattggggccgagccaacctgtcagtgcttcctgaatgccccagcctctgtattggtgcgttggttcagtgacattttctaaactctcctgaaaatccagctgc

SEQ ID NO: 415807 - DNA, 120 bp, Artificial Sequence
  ENSG00000149294_58 (sequence is synthesized)
tcctccctgctgcttgggagttcacccaggagaggaaatgggtgtgttttgttaaggtcccttgtggagactcagggctgaatcctgcttggtaatatcagtgtgtgtgcttggggatgg

SEQ ID NO: 415808 - DNA, 120 bp, Artificial Sequence
  ENSG00000149294_59 (sequence is synthesized)
accttctactgaataaaaactccctccctccccccattgtggtcacatatcattctacatatctcatctctgagcatctccatggaagcttgatttttgttctttttggtttctttatgt

SEQ ID NO: 415809 - DNA, 120 bp, Artificial Sequence
  ENSG00000149294_60 (sequence is synthesized)
atttttttctgttgttattattttttaatgttcaaagactagcctttccctttgggattccaaatgatcccatgctgtggtctgaggggcaaagccacctatgttggcgctcgccattaa

SEQ ID NO: 415810 - DNA, 120 bp, Artificial Sequence
  ENSG00000149294_61 (sequence is synthesized)
tccccagcgctcagtttagaggctcacgtgcagacatcagaggctccatgctgcacagtagctcaggcagggtagtgcctctcaacccagccacaaaactctccccgctggagtcccaga

SEQ ID NO: 415811 - DNA, 120 bp, Artificial Sequence
  ENSG00000149294_62 (sequence is synthesized)
tggcgcttcacaccagggcagtggaggcaggcatggtttttgggcacagggcagagcataaggatcccaggtcagtgtgggagagctactggctcttaggatcaccttgggcagaagtca

SEQ ID NO: 415812 - DNA, 120 bp, Artificial Sequence
  ENSG00000149294_63 (sequence is synthesized)
cacggcttcatcctaggagggcccagcttgggagtctgcctccccctgatcccaggaccacccacaggagaggggcagtgtccatctttctgaagggaccctttggagatctcgtcctaa

SEQ ID NO: 415813 - DNA, 120 bp, Artificial Sequence
  ENSG00000149294_64 (sequence is synthesized)
gtgtggagaggactgacgtggccctgtcatctcaacacatcccagggtcaggcaggcctcagctgaaacaatgtcagggtcctcaagggtcccatttagacagacccacggcttgtaaca

SEQ ID NO: 415814 - DNA, 120 bp, Artificial Sequence
  ENSG00000149294_65 (sequence is synthesized)
gtgcgctcctcaggaggcagcactagcgcatacccactccccacggacactgagttcctggtgacagctgcagccccagccccgccaggagtcctggagacagcagccctcagagaccct

SEQ ID NO: 415815 - DNA, 120 bp, Artificial Sequence
  ENSG00000149294_66 (sequence is synthesized)
gcaggagtgagtgcaccccaccttgctcagccacaccccactcccctgtgccctgtagttgtgctgcccatgctccacacaccatggggcccctttgctcatttttggactatttataca

SEQ ID NO: 415816 - DNA, 120 bp, Artificial Sequence
  ENSG00000149294_67 (sequence is synthesized)
gcaggtttggatcatgtttttctactaataagaatgctaacattgttgtgtagataatcagtgagggctttatgaagtttacacctttgcattattaaaggaaataacagttcatgtgaa

SEQ ID NO: 415817 - DNA, 120 bp, Artificial Sequence
  ENSG00000149294_68 (sequence is synthesized)
tgttagggagtatggaaatgttggggccagtgccatggttgtatgttgagggagtgaaactctcttctcaggttcaggagaaggtattacaagaagaggaacccatacccagacagccct

SEQ ID NO: 415818 - DNA, 120 bp, Artificial Sequence
  ENSG00000149294_69 (sequence is synthesized)
gctgttgtcctgcattgttgagggaggaattatgtcctatgtgtttgtagtaacagaatccacagctaagaaaagacaagctcaggagggaagtccttgggtagatgctaaagagccttc

SEQ ID NO: 415819 - DNA, 120 bp, Artificial Sequence
  ENSG00000149294_70 (sequence is synthesized)
tctttgttctttgtgccagaagctataggtttctaattatgatggcaggagaagtgtccttatgaagtgtgtcgctgtgtataaaaatatctctatgttttgttattgctgtgttctttg

SEQ ID NO: 415820 - DNA, 120 bp, Artificial Sequence
  ENSG00000149294_71 (sequence is synthesized)
tgtgatagatgttattaggagcacactctgtcctttccaaggacgtaatctgactgttttctgtttcctcttcttttttgctttgctttccaacctgatgatgtgctgctgtgttctgtt

SEQ ID NO: 415821 - DNA, 120 bp, Artificial Sequence
  ENSG00000149294_72 (sequence is synthesized)
aggaatgataaatcataagtcctggcttcccctagtagtacacattgcaactgctccccacctgtggattggattaaatgcatttatacctccccatcagcaaaagatcgcaacaaaaag

SEQ ID NO: 415822 - DNA, 120 bp, Artificial Sequence
  ENSG00000149294_73 (sequence is synthesized)
ctgtgagatgatgttgtcatccctccctctggaaggtatagaaagaccctgttttctcaattctggggcatagaaggtccccaggaaggtgtcactctgggcatgaatgccatgactctg

SEQ ID NO: 415823 - DNA, 120 bp, Artificial Sequence
  ENSG00000149294_74 (sequence is synthesized)
tcctctgggccctccccacccgcaggggcttttgctggcagggtctggaggtctcgcatctcagtctgttaaccaccagccatctctctcccactcaagccaacggcagccccacctcag

SEQ ID NO: 415824 - DNA, 120 bp, Artificial Sequence
  ENSG00000149294_75 (sequence is synthesized)
taatttagctaaagaataggtcgatagtggtagacattacttagcaatagtatcattttaggatgagcaagcaagctgtgttgggagtggatgaacaaatccatattatttcctaaaact

SEQ ID NO: 415825 - DNA, 120 bp, Artificial Sequence
  ENSG00000149294_76 (sequence is synthesized)
ggatcttattctcttgctggtgctggtaaaatcacatccaggtaattacaccaatagaaataaattgcccccaattcccaggccaggcattttgaaatggtgaaagttttttgactcaca

SEQ ID NO: 415826 - DNA, 120 bp, Artificial Sequence
  ENSG00000149294_77 (sequence is synthesized)
tggttgatgtggctctggaccataaagtcacagagttagtgatctaaaaacccactcctccctttcctttccagctcaactcatcttgttgctcacttattttataatgatcagtcttgg

SEQ ID NO: 415827 - DNA, 120 bp, Artificial Sequence
  ENSG00000149294_78 (sequence is synthesized)
taaattatcacatcacgtttcatctcaaaagcaatgcaaatgacatctctcgttggttttcccaaattgctaaacgtatctctgttacttttatagagcattaaatttatgagattagaa

SEQ ID NO: 415828 - DNA, 120 bp, Artificial Sequence
  ENSG00000149294_79 (sequence is synthesized)
attaatatgtatggttttgcttttaataagtgttcaaggaaatagcatggcatagtttccataaatttattctaaattaaattattttcagctacaaggaaatgtcattggtacagagta

SEQ ID NO: 415829 - DNA, 120 bp, Artificial Sequence
  ENSG00000149294_80 (sequence is synthesized)
taagtggagatagattccagtcaactgtggaatatcctcttaaaatattttataaaacatggtttacactcaatacacaataaaaaaatagatatgtgcaggattttactgtcttatttt

SEQ ID NO: 415830 - DNA, 120 bp, Artificial Sequence
  ENSG00000149294_81 (sequence is synthesized)
ctatttctgggcagtttcactgccctcccaatgtttcctatatatgctgctaatttaatttgatttctccttttatttagtctgtgattttgttgttgatttttctccctgcccattgtt

SEQ ID NO: 415831 - DNA, 120 bp, Artificial Sequence
  ENSG00000149294_82 (sequence is synthesized)
tacatcagtttttaatttttttgtattttccatgtgacctcctccactttcctttcaaccaatatcatgtgcgtgcgtatcatgtgactttgtcatgtggcttgcatggtgctgatgatg

SEQ ID NO: 415832 - DNA, 120 bp, Artificial Sequence
  ENSG00000149294_83 (sequence is synthesized)
acccctgttccattgtctccaccagatacaacttggcctcttcctgcccttgcaaccacagaaccagctaaaaacattgcacagaatcactgctgtaacatgttccaagctggtcttcat

SEQ ID NO: 415833 - DNA, 120 bp, Artificial Sequence
  ENSG00000149294_84 (sequence is synthesized)
aatgctctaatgaagtaagatgtgtgtggaggacctgaatctcctgaagaatccatatgagtatgcgtgcatgttcatagtgttcaagcatcaaagctgtgtgggagttttagattttat

SEQ ID NO: 415834 - DNA, 120 bp, Artificial Sequence
  ENSG00000149294_85 (sequence is synthesized)
cttggtacttagatcaggctgcctgacataactgagtctcattttctgtttcggatactcccaggttctcatgctgcttcccagtgcctcccccattagatggtacctaaagtaagaaag

SEQ ID NO: 415835 - DNA, 120 bp, Artificial Sequence
  ENSG00000149294_86 (sequence is synthesized)
ccattgacacagagaggagagaggaagtgagacgggtcacagacaagtgatggcctagtctcccagcccccatcctgccatagcactgttgcccttcaccctgccttgggctctgacatg

SEQ ID NO: 415836 - DNA, 120 bp, Artificial Sequence
  ENSG00000149294_87 (sequence is synthesized)
ttcagtcaaggtttgaggcttgtgcagctgttcctggcccagactttacctgaactgcagggtttggcaggtgcacagtctcaaggtttgacgttagagagagccctgctcctcgctagt

SEQ ID NO: 415837 - DNA, 120 bp, Artificial Sequence
  ENSG00000149294_88 (sequence is synthesized)
gccctggccagctgttcacacacggtgttgttcttcccactttaactcacttcagctcctcatactgatgccccagggttgttgcttccatttttttttcattcagtatctgtgtgcctc

SEQ ID NO: 415838 - DNA, 120 bp, Artificial Sequence
  ENSG00000149294_89 (sequence is synthesized)
atccaaggcggctcattttgtgttcaggacctcggcccagcccacagccatcccaggtatggctgcctctgctttctgtttgtttccgctttgaattaatgcacaagtgctgcacctcct

SEQ ID NO: 415839 - DNA, 120 bp, Artificial Sequence
  ENSG00000149294_90 (sequence is synthesized)
accgtattaacatgctgaaacagcaccaacttatataacatgcaaaaggagatgcattttaatcactgggaatttttttactttaagagaaaaagtgatggattgtgaggacctcaattc

SEQ ID NO: 415840 - DNA, 120 bp, Artificial Sequence
  ENSG00000149294_91 (sequence is synthesized)
tgtttggctgatggatttcacatctcctggggcctggtgttgaataagactcaggtttatgtgtgtgatgggggaggaagtcaggggggaatctttgtgtttatgagtttttgtcagcag

SEQ ID NO: 415841 - DNA, 120 bp, Artificial Sequence
  ENSG00000149294_92 (sequence is synthesized)
ctcacaaacttggagaaacattcacagacatttcacagttaagctgtgtaaagacaaaaatattaaataaaaaggtgagagggatgttaatattgctttggctccagactttgaagcaaa

SEQ ID NO: 415842 - DNA, 120 bp, Artificial Sequence
  ENSG00000149294_93 (sequence is synthesized)
agtaattcaactaataatgagttcattaaatatgtgtcatgataggggagaggccatttaggttctttgccaaatgagaaaatttgtaattttgtatctgctaatcacatccacctacca

SEQ ID NO: 415843 - DNA, 120 bp, Artificial Sequence
  ENSG00000149294_94 (sequence is synthesized)
cactacggccactgtcgaggacatgctgccttctgtcaccaccgtcaccactaactctgacactatcaccgaaacctttgccactgctcagaacagccccaccagtgagaccaccaccct

SEQ ID NO: 415844 - DNA, 120 bp, Artificial Sequence
  ENSG00000149294_95 (sequence is synthesized)
gacctccagtattgccccgccggccacggccacgcctgactcaaactctgtaccggctggccaggccaccccttccaaggggcccagcgcctctgccccctccccggccccagcttcagc

SEQ ID NO: 415845 - DNA, 120 bp, Artificial Sequence
  ENSG00000149294_96 (sequence is synthesized)
ccccaaggtcgcccccctcgttgacctgagcgacaccccgacctcaacccctgccgctagcaatttgtcttctagtgtcctggctaaccaaggggctgtcctcagcccaagcgcccctgc

SEQ ID NO: 415846 - DNA, 120 bp, Artificial Sequence
  ENSG00000149294_97 (sequence is synthesized)
cagtcctctagcagcagcggctgcccctgccacagaagcccctcaggccaagcaggaggctcccagcaccaaaggcccggacccggagcccacccagcccggagccgcgaagagcccggc

SEQ ID NO: 415847 - DNA, 120 bp, Artificial Sequence
  ENSG00000149294_98 (sequence is synthesized)
cgaggcagccacagcccttgctagcccgaagagcgaggctgcctccgtcagcaccacaaacccttcccagggcgaggactttaaaatggacgaagggaacttcaagaccccagatattga

SEQ ID NO: 415848 - DNA, 120 bp, Artificial Sequence
  ENSG00000149294_99 (sequence is synthesized)
ccttgcaaaggatgtttttgcagccctgggctctcctgctcccgccgctggggccagtggacaagcccctgagcttgctccttccactgcagacagctctgtttcgcctgcgccagcaaa

SEQ ID NO: 415849 - DNA, 80 bp, Artificial Sequence
  ENSG00000149295_0 (sequence is synthesized)
agagccggccgagctgctgcccgccggggctctgaacggcgcggcggggccgggagccagggaccggccgaggagagtgg

SEQ ID NO: 415850 - DNA, 120 bp, Artificial Sequence
  ENSG00000149295_1 (sequence is synthesized)
gcggccgcgcgtggatgcggcgggagctggaagcctcaagcagccggcgccgtctctgcccccgggcgccctatggcttgaagagcctggccacccagtggctccaccgccctgatggat

SEQ ID NO: 415851 - DNA, 120 bp, Artificial Sequence
  ENSG00000149295_2 (sequence is synthesized)
ccactgaatctgtcctggtatgatgatgatctggagaggcagaactggagccggcccttcaacgggtcagacgggaaggcggacagaccccactacaactactatgccacactgctcacc

SEQ ID NO: 415852 - DNA, 120 bp, Artificial Sequence
  ENSG00000149295_3 (sequence is synthesized)
ctgctcatcgctgtcatcgtcttcggcaacgtgctggtgtgcatggctgtgtcccgcgagaaggcgctgcagaccaccaccaactacctgatcgtcagcctcgcagtggccgacctcctc

SEQ ID NO: 415853 - DNA, 120 bp, Artificial Sequence
  ENSG00000149295_4 (sequence is synthesized)
gtcgccacactggtcatgccctgggttgtctacctggaggtggtaggtgagtggaaattcagcaggattcactgtgacatcttcgtcactctggacgtcatgatgtgcacggcgagcatc

SEQ ID NO: 415854 - DNA, 120 bp, Artificial Sequence
  ENSG00000149295_5 (sequence is synthesized)
ctgaacttgtgtgccatcagcatcgacaggtacacagctgtggccatgcccatgctgtacaatacgcgctacagctccaagcgccgggtcaccgtcatgatctccatcgtctgggtcctg

SEQ ID NO: 415855 - DNA, 120 bp, Artificial Sequence
  ENSG00000149295_6 (sequence is synthesized)
tccttcaccatctcctgcccactcctcttcggactcaataacgcagaccagaacgagtgcatcattgccaacccggccttcgtggtctactcctccatcgtctccttctacgtgcccttc

SEQ ID NO: 415856 - DNA, 120 bp, Artificial Sequence
  ENSG00000149295_7 (sequence is synthesized)
attgtcaccctgctggtctacatcaagatctacattgtcctccgcagacgccgcaagcgagtcaacaccaaacgcagcagccgagctttcagggcccacctgagggctccactaaagggc

SEQ ID NO: 415857 - DNA, 120 bp, Artificial Sequence
  ENSG00000149295_8 (sequence is synthesized)
aactgtactcaccccgaggacatgaaactctgcaccgttatcatgaagtctaatgggagtttcccagtgaacaggcggagagtggaggctgcccggcgagcccaggagctggagatggag

SEQ ID NO: 415858 - DNA, 120 bp, Artificial Sequence
  ENSG00000149295_9 (sequence is synthesized)
atgctctccagcaccagcccacccgagaggacccggtacagccccatcccacccagccaccaccagctgactctccccgacccgtcccaccatggtctccacagcactcccgacagcccc

SEQ ID NO: 415859 - DNA, 120 bp, Artificial Sequence
  ENSG00000149295_10 (sequence is synthesized)
aagatctttgagatccagaccatgcccaatggcaaaacccggacctccctcaagaccatgagccgtaggaagctctcccagcagaaggagaagaaagccactcagatgctcgccattgtt

SEQ ID NO: 415860 - DNA, 120 bp, Artificial Sequence
  ENSG00000149295_11 (sequence is synthesized)
ctcggcgtgttcatcatctgctggctgcccttcttcatcacacacatcctgaacatacactgtgactgcaacatcccgcctgtcctgtacagcgccttcacgtggctgggctatgtcaac

SEQ ID NO: 415861 - DNA, 120 bp, Artificial Sequence
  ENSG00000149295_12 (sequence is synthesized)
agcgccgtgaaccccatcatctacaccaccttcaacattgagttccgcaaggccttcctgaagatcctccactgctgactctgctgcctgcccgcacagcagcctgcttcccacctccct

SEQ ID NO: 415862 - DNA, 120 bp, Artificial Sequence
  ENSG00000149295_13 (sequence is synthesized)
gcccaggccggccagcctcacccttgcgaaccgtgagcaggaaggcctgggtggatcggcctcctcttcaccccggcaggccctgcagtgttcgcttggctccatgctcctcactgcccg

SEQ ID NO: 415863 - DNA, 120 bp, Artificial Sequence
  ENSG00000149295_14 (sequence is synthesized)
cacaccctcactctgccagggcagtgctagtgagctgggcatggtaccagccctggggctgggccccccagctcaggggcagctcatagagtcccccctcccacctccagtccccctatc

SEQ ID NO: 415864 - DNA, 120 bp, Artificial Sequence
  ENSG00000149295_15 (sequence is synthesized)
cttggcaccaaagatgcagccgccttccttgaccttcctctggggctctagggttgctggagcctgagtcagggcccagaggctgagttttctctttgtggggcttggcgtggagcaggc

SEQ ID NO: 415865 - DNA, 120 bp, Artificial Sequence
  ENSG00000149295_16 (sequence is synthesized)
ggtggggagagatggacagttcacaccctgcaaggcccacaggaggcaagcaagctctcttgccgaggagccaggcaacttcagtcctgggagacccatgtaaataccagactgcaggtt

SEQ ID NO: 415866 - DNA, 120 bp, Artificial Sequence
  ENSG00000149295_17 (sequence is synthesized)
ggaccccagagattcccaagccaaaaaccttagctccctcccgcaccccgatgtggacctctactttccaggctagtccggacccacctcaccccgttacagctccccaagtggtttcca

SEQ ID NO: 415867 - DNA, 120 bp, Artificial Sequence
  ENSG00000149295_18 (sequence is synthesized)
catgctctgagaagaggagccctcatcttgaagggcccaggagggtctatggggagaggaactccttggcctagcccaccctgctgccttctgacggccctgcaatgtatcccttctcac

SEQ ID NO: 415868 - DNA, 120 bp, Artificial Sequence
  ENSG00000149295_19 (sequence is synthesized)
agcacatgctggccagcctggggcctggcagggaggtcaggccctggaactctatctgggcctgggctaggggacatcagaggttctttgagggactgcctctgccacactctgacgcaa

SEQ ID NO: 415869 - DNA, 120 bp, Artificial Sequence
  ENSG00000149295_20 (sequence is synthesized)
aaccactttccttttctattccttctggcctttcctctctcctgtttcccttcccttccactgcctctgccttagaggagcccacggctaagaggctgctgaaaaccatctggcctggcc

SEQ ID NO: 415870 - DNA, 120 bp, Artificial Sequence
  ENSG00000149295_21 (sequence is synthesized)
tggccctgccctgaggaaggaggggaagctgcagcttgggagagcccctggggcctagactctgtaacatcactatccatgcaccaaactaataaaactttgacgagtcaccttccagga

SEQ ID NO: 415871 - DNA, 120 bp, Artificial Sequence
  ENSG00000149295_22 (sequence is synthesized)
ttaagaagtgtttgttgaatgaataaataaatgatggatcagctctgttcaagctcatcttattatgcatttttaaaaaattgtgtttgctcatttgtcctaccagctgtaaaaacttgc

SEQ ID NO: 415872 - DNA, 120 bp, Artificial Sequence
  ENSG00000149295_23 (sequence is synthesized)
tagcaaaagagtggcagaaggcccaacatttttagaaaattcttagccgtaaaccttaaaatcccgagttggaaaattctcattattaaatgccaggagttggtcttcttcctggagacc

SEQ ID NO: 415873 - DNA, 120 bp, Artificial Sequence
  ENSG00000149295_24 (sequence is synthesized)
gtgcaggcgacggtggcggcagtagcggagggtgaccgcccggctctcggcccggctctatgatggaccgagagcccctctagggtggtatgcggagacaagagacacctctaagcacca

SEQ ID NO: 415874 - DNA, 120 bp, Artificial Sequence
  ENSG00000149295_25 (sequence is synthesized)
gacagagcgcttccctatccctgtctgaggcgggcagcccttgagtgcttcctcttgaagagcagagagcctggccacccagtggctccaccgccctgatggatccactgaatctgtcct

SEQ ID NO: 415875 - DNA, 120 bp, Artificial Sequence
  ENSG00000149295_26 (sequence is synthesized)
gacaccccccaaccaactccaagggtccccacctaaccattaccaagagggctcatcttatgctcaggtgggggcttgggaaacctcagcaagggttaggtctaggctaaaggaattccc

SEQ ID NO: 415876 - DNA, 120 bp, Artificial Sequence
  ENSG00000149295_27 (sequence is synthesized)
gccagatgctgactgcctgtcagaattcagtccctacacaccccgccccatgtctgtctgtcttgcttcatggaccactcacaccccagagttccgcctgccttctctgttgcccaccaa

SEQ ID NO: 415877 - DNA, 120 bp, Artificial Sequence
  ENSG00000149295_28 (sequence is synthesized)
gtctttctgcccctagggaagcccactggccatggttctgagacctcagaagctggccaatgggagaagcaccccagaaacccccaccttgcctcagctgaaggcagactcaccgtgcac

SEQ ID NO: 415878 - DNA, 120 bp, Artificial Sequence
  ENSG00000149295_29 (sequence is synthesized)
acctccaagcaggcatgaagtgagacacctcggttctgcaaggcatggatgtgtacgagaaaatggttggccataccaacgtaataaaaatgataataatggctattcacatttctcaaa

SEQ ID NO: 415879 - DNA, 120 bp, Artificial Sequence
  ENSG00000149295_30 (sequence is synthesized)
catctaccatatccctattatctcatcaaatcctcaccacgaccccgggaggtaagtctctttgatcgaaccgatcttcagttgacagaagaggaaacaggctcagaaagattaggcaac

SEQ ID NO: 415880 - DNA, 120 bp, Artificial Sequence
  ENSG00000149295_31 (sequence is synthesized)
tcacccgtctcaagagttggtgacactaagcccagacctgtgtgactctgaaatccacacctgtgttctttccactgacatgagctgccttatggatgggcaggttctggggtaggacgc

SEQ ID NO: 415881 - DNA, 120 bp, Artificial Sequence
  ENSG00000149300_0 (sequence is synthesized)
ggaaatgcacaagcctcttgatgcataaaaacagctgggctcccttggagacagagcgccatgggaaaccgggtctgctgcggaggaagctggagctgcccatcaactttccagaagaaa

SEQ ID NO: 415882 - DNA, 120 bp, Artificial Sequence
  ENSG00000149300_1 (sequence is synthesized)
aagaaaacaggaagccaaacaagacggacactgaagccgcagccacaacagctgcagcagaatctcccaaagggccatgaaacaacaggacatacgtatgaacgggtgttacagcagcaa

SEQ ID NO: 415883 - DNA, 120 bp, Artificial Sequence
  ENSG00000149300_2 (sequence is synthesized)
gggtctcaagagaggagtccaggcctcatgtcggaagacagcaacttacattatgctgacattcaagtgtgcagccgtccccatgcccgggaagtgaaacacgtgcatttagaaaacgct

SEQ ID NO: 415884 - DNA, 120 bp, Artificial Sequence
  ENSG00000149300_3 (sequence is synthesized)
acagagtatgcgacccttcgcttcccccaggccacacctcgctatgacagcaagaacgggaccctggtgtgagcgcttgggaggaaggcccagtccatcgttaaccactacacctgtggg

SEQ ID NO: 415885 - DNA, 120 bp, Artificial Sequence
  ENSG00000149300_4 (sequence is synthesized)
tgggtggcaacccagggatgttgtccacgttttaagcttaaagaactccaaagcccctggaattgtgggcgtcccattttctcccctggcctcttacttgccactgttaggttggagtta

SEQ ID NO: 415886 - DNA, 120 bp, Artificial Sequence
  ENSG00000149300_5 (sequence is synthesized)
atagttggtttagctatgggtggatagctaaacttagctatccacatgaggttaggtggagtgtgcagggaggtaggtcttcgaccccaccattgttgctcctgctcttgcaaagtgcag

SEQ ID NO: 415887 - DNA, 120 bp, Artificial Sequence
  ENSG00000149300_6 (sequence is synthesized)
aaagagcaggtaaaaagttagcccataagcacgtgggctgatcttgttggactttaattaatggtatcctttttcacacaccttaaactccaaagctgaaggggaggtgctccggaaaag

SEQ ID NO: 415888 - DNA, 120 bp, Artificial Sequence
  ENSG00000149300_7 (sequence is synthesized)
cattctgagcttttacattcagacactagggctggcttgggccatttcctcagtggctgagtcaggttccagaccttaacagacaaatgggggaagggggctgaggcgtggaggaaacgc

SEQ ID NO: 415889 - DNA, 120 bp, Artificial Sequence
  ENSG00000149300_8 (sequence is synthesized)
tttcaggacctcaagtcagtgataaccgacagcacagtgaggcctggaaacttccctcggagggactgttggctctcgcaggtgcggggccgctaggatcaataaacggcctgagaaaca

SEQ ID NO: 415890 - DNA, 120 bp, Artificial Sequence
  ENSG00000149300_9 (sequence is synthesized)
cagagctgagtggtgggccctgaacatccacttaaaggacaataaccaggcatccgaggaaaacactaaaaatggggtgagagaactgaacacaagaatgatgggtttcacagattctcg

SEQ ID NO: 415891 - DNA, 120 bp, Artificial Sequence
  ENSG00000149300_10 (sequence is synthesized)
tagagcccatattttctactgcttgaagctcaagttcatggcttcatcaaaagacgcttcaaatcctgaagttgagatagctctcacctggagcccgtgtgttgttctaccctttggctg

SEQ ID NO: 415892 - DNA, 120 bp, Artificial Sequence
  ENSG00000149300_11 (sequence is synthesized)
ggaagctggtgagtaggctggaagggcaaaggggaacatctatctctgttggtggatgtagaggccccgaaaatcagaggacctggagatagttgtctgccagcctcccactgccacctt

SEQ ID NO: 415893 - DNA, 120 bp, Artificial Sequence
  ENSG00000149300_12 (sequence is synthesized)
cctctgcctggtacctccttgttccaacaccagagcagcacctcctttcaggaggccttagaagacagagccaagtggctgggcgcggtggctcacgcctctactcccagcactttggga

SEQ ID NO: 415894 - DNA, 120 bp, Artificial Sequence
  ENSG00000149305_0 (sequence is synthesized)
acggtctgatcttggggcagaaccaaagggagaagttaagggatttcatgacggcatcaattccaaaacatttgcatggtgctggtattgcctttggtcccactgagtgtttacaaaata

SEQ ID NO: 415895 - DNA, 120 bp, Artificial Sequence
  ENSG00000149305_1 (sequence is synthesized)
gcaccagtaaggatagcatcaactggcaaacggagaaggaggagaacagagtggagaggaaccctgttaggagaaattgagcggcattccatctggtaggcaagtttgcatttctccttt

SEQ ID NO: 415896 - DNA, 120 bp, Artificial Sequence
  ENSG00000149305_2 (sequence is synthesized)
ttgggatctgcccaggaatgttgtcaagtgtaatggctcccctgtgggcctgcatcctggtggctgcaggaattctagccacagatacacatcatccccaggattctgctctgtatcatc

SEQ ID NO: 415897 - DNA, 120 bp, Artificial Sequence
  ENSG00000149305_3 (sequence is synthesized)
tcagcaagcagctattacagaaatatcataaagaagtgagacctgtttacaactggaccaaggccaccacagtctacctggacctgttcgtccatgctatattggatgtggatgcagaga

SEQ ID NO: 415898 - DNA, 120 bp, Artificial Sequence
  ENSG00000149305_4 (sequence is synthesized)
atcaaatattaaagacaagtgtatggtaccaagaggtctggaatgatgaatttttatcctggaactccagcatgtttgatgagattagagagatctccctacctctaagtgccatctggg

SEQ ID NO: 415899 - DNA, 120 bp, Artificial Sequence
  ENSG00000149305_5 (sequence is synthesized)
cccccgatatcatcatcaatgagtttgtggacattgaaagataccctgaccttccctatgtttatgtgaactcatctgggaccattgagaactataagcccatccaggtggtctctgcgt

SEQ ID NO: 415900 - DNA, 120 bp, Artificial Sequence
  ENSG00000149305_6 (sequence is synthesized)
gcagtttagagacatatgcttttccatttgatgtccagaattgcagcctgaccttcaagagcattctgcatacagtggaagacgtagacctggcctttctgaggagcccagaagacattc

SEQ ID NO: 415901 - DNA, 120 bp, Artificial Sequence
  ENSG00000149305_7 (sequence is synthesized)
agcatgacaaaaaggcgtttttgaatgacagtgagtgggaacttctatctgtgtcctccacatacagcatcctgcagagcagcgctggaggatttgcacagattcagtttaatgtggtga

SEQ ID NO: 415902 - DNA, 120 bp, Artificial Sequence
  ENSG00000149305_8 (sequence is synthesized)
tgcgcaggcaccccctggtctatgtcgtgagtctgctgattcctagcatctttctcatgctggtggacctggggagcttctacctgccacccaactgccgagccaggattgtgttcaaga

SEQ ID NO: 415903 - DNA, 120 bp, Artificial Sequence
  ENSG00000149305_9 (sequence is synthesized)
ccagtgtgctggtgggctacaccgtcttcagggtcaacatgtccaaccaggtgccacggagtgtagggagcacccctctgattgggcacttcttcaccatctgcatggccttcttggttc

SEQ ID NO: 415904 - DNA, 120 bp, Artificial Sequence
  ENSG00000149305_10 (sequence is synthesized)
tcagcttagctaagtccatcgtgttggtcaaattcctccatgatgagcagcgtggtggacaggagcagcccttcttgtgccttcgaggggacaccgatgctgacaggcctagagtggaac

SEQ ID NO: 415905 - DNA, 120 bp, Artificial Sequence
  ENSG00000149305_11 (sequence is synthesized)
ccagggcccaacgtgctgtggtaacagagtcctcgctgtatggagagcacctggcccagccaggaaccctgaaggaagtctggtcgcagcttcaatctatcagcaactacctccaaactc

SEQ ID NO: 415906 - DNA, 120 bp, Artificial Sequence
  ENSG00000149305_12 (sequence is synthesized)
aggaccagacagaccaacaggaggcagagtggctggtcctcctgtcccgctttgaccgactgctcttccaaagctaccttttcatgctggggatctacaccatcactctgtgctccctct

SEQ ID NO: 415907 - DNA, 120 bp, Artificial Sequence
  ENSG00000149305_13 (sequence is synthesized)
gggcactgtggggcggcgtgtgaagactgaagtgttcttcagtaattgtgctggcacttaggagagagaggagggggaataatagtgggttaaaaagctttctgggtcgggtgtggtggt

SEQ ID NO: 415908 - DNA, 80 bp, Artificial Sequence
  ENSG00000149305_14 (sequence is synthesized)
aatagtgggttaaaaagctttctgggtcgggtgtggtggttcttgcctatagtcccagtgctttgggaggccatagagca

SEQ ID NO: 415909 - DNA, 73 bp, Artificial Sequence
  ENSG00000149305_15 (sequence is synthesized)
aataaataaataaataaataaatagctgggcatagtggctcatgcctgtactcttcaaggctgcagtgagcca

SEQ ID NO: 415910 - DNA, 120 bp, Artificial Sequence
  ENSG00000149305_16 (sequence is synthesized)
caagaccctgtctcaaaaaaaataaaataaaaggctttctgccttcattgcctctccattgagtccagcttcatacacctaatagtctgctgtgtgacccaaggatcatatgttcatgaa

SEQ ID NO: 415911 - DNA, 120 bp, Artificial Sequence
  ENSG00000149305_17 (sequence is synthesized)
aatagtctgctgtgtgacccaaggatcatatgttcatgaaaatgtataaacagtatgagtatacagtaaaaaagtaaactttccttcttatcccagtccactcacccaaagcaaccactg

SEQ ID NO: 415912 - DNA, 120 bp, Artificial Sequence
  ENSG00000149305_18 (sequence is synthesized)
ccatcttccagccctgccttggccatttattcagtcacccattcaacaaaacctttattgagtattaagtcctaggcattatgttaggcacaccagagaatacaaaataagtcagcacag

SEQ ID NO: 415913 - DNA, 120 bp, Artificial Sequence
  ENSG00000149305_19 (sequence is synthesized)
gttattattcacttgttgtgattcccatggtcaacctggtaccaaccaaccagagcataaaattcctgccatatccctcaccttctgaggctcttgttaccacttcccagctaagtccac

SEQ ID NO: 415914 - DNA, 120 bp, Artificial Sequence
  ENSG00000149305_20 (sequence is synthesized)
cacttcccagctaagtccactgcctccaccctcttcctgtgccccttcagcagtgcatccccactggagagaacccaggtgccaaggcttctttttttttttttgaggcagagtcttgct

SEQ ID NO: 415915 - DNA, 120 bp, Artificial Sequence
  ENSG00000149305_21 (sequence is synthesized)
attttagtagcaggtgccaaggcttctaagcccagtctagcacatcatttagtccacacacaaggggcaatgcatggagtgggaggacaggcatagttcacggtcctttgcttcaaggaa

SEQ ID NO: 415916 - DNA, 120 bp, Artificial Sequence
  ENSG00000149305_22 (sequence is synthesized)
gttataatccactgtccctgaactagtcagctaggaaatactacacactaagttgctttaagagagatttattttctcaccagtctggaagctagaagcctaagatcaaggtgcaaacag

SEQ ID NO: 415917 - DNA, 120 bp, Artificial Sequence
  ENSG00000149305_23 (sequence is synthesized)
ggtgggtggctttcttctgagccctgtccttggcttgcaggttgctgacttcttgctttgttttcacatgacctttcctctgtgcatgctcatgtctgtgtccagattttctcttctaac

SEQ ID NO: 415918 - DNA, 120 bp, Artificial Sequence
  ENSG00000149305_24 (sequence is synthesized)
aagggcaccagtgttgttggtttagggtccatcctagtgacctcttttaaccttaatcacttttttcaaggccctatgttcaaacagtcatattctgagtactaggggttaggatgtcaa

SEQ ID NO: 415919 - DNA, 120 bp, Artificial Sequence
  ENSG00000149305_25 (sequence is synthesized)
catatgaattttggggagtgggcagcagacaaaggggacatatttcagcccataacactagtgattccggaggtttagcaagtccagattctgcagagtaggctggcaggctggagacct

SEQ ID NO: 415920 - DNA, 120 bp, Artificial Sequence
  ENSG00000149305_26 (sequence is synthesized)
gctgacagtcttaacgctgtcagtagaagacacaaaagtccaaaagctgtttgctagaaactttttccagcactaaaattgcctttagaaaaatctgcccccctccatccccccaaagaa

SEQ ID NO: 415921 - DNA, 120 bp, Artificial Sequence
  ENSG00000149305_27 (sequence is synthesized)
aaagaatttaaattcaaacagcctttacctgcatcttccctctctcattacctcccagttagtgctcagcgccaattgtccatgaaattccactgctgctgttaatgaaatgaggaacat

SEQ ID NO: 415922 - DNA, 120 bp, Artificial Sequence
  ENSG00000149305_28 (sequence is synthesized)
aagaagtttgtgaacaggaagtgtccatgcaaacctccacctgtttccttcctcacttcctactttctactgctggcctcctctgctttgacgtgctcagttaggcatcacggtcctgat

SEQ ID NO: 415923 - DNA, 120 bp, Artificial Sequence
  ENSG00000149305_29 (sequence is synthesized)
gtcaccttagcttgccatccatgtcgattctggctttctccacttcctcctccagttaacagaggaggaaaggaggaaaaggcctgaggtgaactcctcactgtggggtctctctccttc

SEQ ID NO: 415924 - DNA, 120 bp, Artificial Sequence
  ENSG00000149305_30 (sequence is synthesized)
ccaactatgtcttagagaaagcaccagtgtcagagtcaggagtcctgatgattacggtcctggctctgccattacctagccaggggacctctgtgagcttaacttctcagacttcaactt

SEQ ID NO: 415925 - DNA, 120 bp, Artificial Sequence
  ENSG00000149305_31 (sequence is synthesized)
accttatttgaaattggggctgtttatatttgctctacccctatcaaagagttatgaggatcaaaatgaaaaaatgtattgaacaatgctttgaaaagtaaataatggggcgtggtggct

SEQ ID NO: 415926 - DNA, 85 bp, Artificial Sequence
  ENSG00000149305_32 (sequence is synthesized)
attgcactccagcccgggcaacaagagctaaactctatctcaaaaaaaaaaaaaagtttaaagtgctttgggaataatgggtgca

SEQ ID NO: 415927 - DNA, 120 bp, Artificial Sequence
  ENSG00000149305_33 (sequence is synthesized)
aattattctgtctccaaaatgcaagattgttgtaaaatggaattgtaggtacagttttccaaccttggagatggcgttgatttacttgtttttacaatgaggtttctccattgggcactt

SEQ ID NO: 415928 - DNA, 120 bp, Artificial Sequence
  ENSG00000149305_34 (sequence is synthesized)
aggccatcagcttactttaagcatttgccaaaggccccaccagctggctgtgaattgatgcagattttggtgagctgaaagctatattctagtaaaagccaccgagtcctgaacagtctg

SEQ ID NO: 415929 - DNA, 120 bp, Artificial Sequence
  ENSG00000149308_0 (sequence is synthesized)
agtgccgccactggaaccaggagatgcggcgcaggagctgtcgctgtgtttgctttaacctgagtcttgttccttattgtggttcctgctgtggttttgatcatgttgttaccctcggac

SEQ ID NO: 415930 - DNA, 120 bp, Artificial Sequence
  ENSG00000149308_1 (sequence is synthesized)
gtagcccggcttgtattgggttacttacagcaagaaaacctcatttctacctgccagacttttattttggaaagttcagatttaaaagaatatgcagaacattgtacagatgaagggttt

SEQ ID NO: 415931 - DNA, 120 bp, Artificial Sequence
  ENSG00000149308_2 (sequence is synthesized)
attccagcctgcttactgtccttatttggaaaaaacttgacaacaattttaaatgagtatgtagctatgaaaacaaaagaaacatcaaataatgtcccagcaataatgtcatctctatgg

SEQ ID NO: 415932 - DNA, 120 bp, Artificial Sequence
  ENSG00000149308_3 (sequence is synthesized)
aagaaattggaccatacactttctcagatcaggagcatgcaaagttccccaaggtttgctggcagtcagagagcccgaacgagaactggaattgcagaaatcaaacggcagagaaagctt

SEQ ID NO: 415933 - DNA, 120 bp, Artificial Sequence
  ENSG00000149308_4 (sequence is synthesized)
gcatctcaaacagctccagccagtgcagagttgctcactttaccttacctttcaggacagtttaccactcctccttccacaggtacacaggttactcgaccaagtggccaaatttcagat

SEQ ID NO: 415934 - DNA, 120 bp, Artificial Sequence
  ENSG00000149308_5 (sequence is synthesized)
ccatcgaggtcatattttgtagtggtcaaccactcacagtcacaagatactgtaaccactggagaagctttaaatgtcattcctggtgctcaggaaaagaaagcacatgccagtttaatg

SEQ ID NO: 415935 - DNA, 120 bp, Artificial Sequence
  ENSG00000149308_6 (sequence is synthesized)
tctcccggtagacgcaaaagtgaatctcagagaaaaagtaccactttgtctggccctcattcaacaatacggaatttccaagatccaaacgcttttgcagtagaaaaacaaatggttatt

SEQ ID NO: 415936 - DNA, 120 bp, Artificial Sequence
  ENSG00000149308_7 (sequence is synthesized)
gaaaatgcacgagaaaaaatactaagcaacaaatctcttcaagaaaagctagcagaaaacataaataaatttttaactagtgataacaatattgcccaagtacctaagcaaacagataac

SEQ ID NO: 415937 - DNA, 120 bp, Artificial Sequence
  ENSG00000149308_8 (sequence is synthesized)
aaccctacggagccagagacttcaattgatgaattcctaggacttccgagtgaaattcacatgtctgaagaagctatacaggacatattggaacagacagaatcagacccagcatttcag

SEQ ID NO: 415938 - DNA, 120 bp, Artificial Sequence
  ENSG00000149308_9 (sequence is synthesized)
gcactctttgatctctttgactatggcaaaacaaagaataataaaaatatatcacaaagtatttccagtcaacctatggaatccaatcccagtatagtcttagcagatgaaactaatcta

SEQ ID NO: 415939 - DNA, 120 bp, Artificial Sequence
  ENSG00000149308_10 (sequence is synthesized)
gcagttaaaggttcttttgaaacagaagaatctgatggtcagtctggtcagcccgctttttgtacatcctatcagaatgatgacccattaaatgctttgaagaatagcaacaaccatgat

SEQ ID NO: 415940 - DNA, 120 bp, Artificial Sequence
  ENSG00000149308_11 (sequence is synthesized)
gtgcttagacaagaagaccaggaaaatttttcccaaataagtaccagcatacagaaaaaggcctttaaaacagctgtacccactgaacagaagtgtgacattgacattacctttgagtcc

SEQ ID NO: 415941 - DNA, 120 bp, Artificial Sequence
  ENSG00000149308_12 (sequence is synthesized)
gtgcctaatttgaatgactttaaccaaagagggaattctaatgctgaatgtaatccacattgtgctgaattatacaccaatcagatgtccactgaaactgaaatggctatagggattgaa

SEQ ID NO: 415942 - DNA, 120 bp, Artificial Sequence
  ENSG00000149308_13 (sequence is synthesized)
aagaactctttgtcttcaaatgtaccgagtgaatctcagttacagcctgatcagcctgatataccaataacttcatttgtttcacttggttgtgaagctaacaatgaaaacttaattctc

SEQ ID NO: 415943 - DNA, 120 bp, Artificial Sequence
  ENSG00000149308_14 (sequence is synthesized)
tctgggaagagttctcaacttttatcccaagatacttcattaactggaaagccatctaaaaaaagtcaattttgtgaaaattctaatgatacagtaaaacttaaaattaattttcatggt

SEQ ID NO: 415944 - DNA, 120 bp, Artificial Sequence
  ENSG00000149308_15 (sequence is synthesized)
tccaagtcatcagattctagtgaagttcacaagagtaaaatagaaattaatgtgttagaaccagttatgtcacagctatcaaattgccaagataattcttgtcttcaaagtgaaatacta

SEQ ID NO: 415945 - DNA, 120 bp, Artificial Sequence
  ENSG00000149308_16 (sequence is synthesized)
cctgtgtctgttgaaagttcacatttaaatgtatctggacaagtagaaattcatcttggagattcgctgtcttctactaaacaaccatctaatgattcagcatctgttgagttaaatcat

SEQ ID NO: 415946 - DNA, 120 bp, Artificial Sequence
  ENSG00000149308_17 (sequence is synthesized)
acagaaaatgaagctcaggcatccaagtctgagaattcacaggagccttcatcttctgtaaaagaagagaatactatttttctctctttaggtggaaatgctaactgtgagaaagttgca

SEQ ID NO: 415947 - DNA, 120 bp, Artificial Sequence
  ENSG00000149308_18 (sequence is synthesized)
ctgacgcctccagaaggcactcctgtagaaaacagtcactctcttcctccagaatctgtgtgttcttcagtgggagattctcaccctgagtcccaaaatactgatgataaaccttctagc

SEQ ID NO: 415948 - DNA, 120 bp, Artificial Sequence
  ENSG00000149308_19 (sequence is synthesized)
aacaactcagcagagatagatgcatcaaatatcgtctctctcaaagttatcattagtgatgatccatttgtttcctcagatactgaacttaccagtgctgtttctagtattaatggagaa

SEQ ID NO: 415949 - DNA, 120 bp, Artificial Sequence
  ENSG00000149308_20 (sequence is synthesized)
aacctgccaactataatcttgtcttctcctactaaatcacctactaaaaatgcagaactagttaaatgcctatcttcagaagaaactgtaggtgctgttgtatatgccgaagtaggggat

SEQ ID NO: 415950 - DNA, 120 bp, Artificial Sequence
  ENSG00000149308_21 (sequence is synthesized)
tcagcctcaatggaacagagtcttttaacattcaaatctgaagactctgcagtaaacaatactcagaatgaagatggcattgctttttcagctaatgttacaccatgtgtttccaaggat

SEQ ID NO: 415951 - DNA, 120 bp, Artificial Sequence
  ENSG00000149308_22 (sequence is synthesized)
ggaggatatatacagttgatgccagccacaagcacagcttttggcaattcaaataacattctgatagctacctgtgtgactgatccaacagcgttaggaacatctgtaagtcagtctaat

SEQ ID NO: 415952 - DNA, 120 bp, Artificial Sequence
  ENSG00000149308_23 (sequence is synthesized)
gtagtggtgttgcctggaaattctgcacctatgactgctcaacctctaccacctcagttacagacaccaccaaggtcaaacagtgtatttgctgtcaaccaagctgtgtcaccaaacttt

SEQ ID NO: 415953 - DNA, 120 bp, Artificial Sequence
  ENSG00000149308_24 (sequence is synthesized)
tcacaaggatctgccataataattgcctctccagtccagcctgtactccaaggaatggtagggatgatcccagtatctgtggttggacagaatggaaataacttttctactcctcctcgg

SEQ ID NO: 415954 - DNA, 120 bp, Artificial Sequence
  ENSG00000149308_25 (sequence is synthesized)
aaaacaagtaaataatttggtggattcgtcaggtcattcagttggatgtcatgcacaaaaaactgaagtttctgacaaaagtattgccacagatcttgggaaaaaatcagaagaaaccac

SEQ ID NO: 415955 - DNA, 120 bp, Artificial Sequence
  ENSG00000149308_26 (sequence is synthesized)
agttcccttcccagaagagagtatagttccagctgctaaaccatgccacagacgtgtactctgtttcgacagcactactgctcctgtggcaaatacgcaggggccaaaccataagatggt

SEQ ID NO: 415956 - DNA, 120 bp, Artificial Sequence
  ENSG00000149308_27 (sequence is synthesized)
gtcccaaaacaaagaaaggaatgcagtctcttttcctaatcttgactcacccaatgtgtcctccaccttaaaacccccttctaataatgctatcaaaagagagaaagagaagcctcctct

SEQ ID NO: 415957 - DNA, 120 bp, Artificial Sequence
  ENSG00000149308_28 (sequence is synthesized)
gcctaagattttatctaaatcggaaagtgccattagccggcataccaccataagagaaactcaatcagaaaagaaagtttcaccaacagaaattgtgcttgaatctttccataaagcaac

SEQ ID NO: 415958 - DNA, 120 bp, Artificial Sequence
  ENSG00000149308_29 (sequence is synthesized)
agctaataaggagaatgaattatgcagcgatgtagaaagacagaaaaatccagaaaattcaaaactatctattgggcagcaaaatgggggtttgcgaagtgagaaatctatagcttcact

SEQ ID NO: 415959 - DNA, 120 bp, Artificial Sequence
  ENSG00000149308_30 (sequence is synthesized)
gcaagaaatgaccaaaaaacaaggcacatcttcaaacaataaaaatgtactttcagtaggtacagctgtgaaggatctaaaacaagaacaaactaaatccgccagttctttgattaccac

SEQ ID NO: 415960 - DNA, 120 bp, Artificial Sequence
  ENSG00000149308_31 (sequence is synthesized)
agaaatgttacaggatatacagaggcacagctcagtaagtaggcttgctgatagtagtgatttacctgtgccccggacacctggctcaggggcaggggaaaaacataaagaagaacctat

SEQ ID NO: 415961 - DNA, 120 bp, Artificial Sequence
  ENSG00000149308_32 (sequence is synthesized)
agatattatcaaggccccctctagtaggcgtttcagtgaagacagtagtacatcaaaagtaatggtccctcctgtcaccccagacttgcctgcctgcagccctgccagtgaaacaggaag

SEQ ID NO: 415962 - DNA, 120 bp, Artificial Sequence
  ENSG00000149308_33 (sequence is synthesized)
tgaaaacagtgtaaatatggctgcccacacattaatgattctctccagggcagccatttctaggactacttcagcaactcctctgaaagataacacacaacagtttagagcatcttcaag

SEQ ID NO: 415963 - DNA, 120 bp, Artificial Sequence
  ENSG00000149308_34 (sequence is synthesized)
gagcaccacaaaaaagcggaaaattgaggaattagatgaacgtgagcgaaactctcgtccttctagtaaaaatcttacaaattcatcaataccaatgaaaaagaagaaaattaagaaaaa

SEQ ID NO: 415964 - DNA, 120 bp, Artificial Sequence
  ENSG00000149308_35 (sequence is synthesized)
gaagcttcccagttcatttccagcaggaatggatgtagacaaatttttgttatcattgcattatgatgagtaaacattctggacacataagaacagtaggtgttaaaaactcatatccct

SEQ ID NO: 415965 - DNA, 120 bp, Artificial Sequence
  ENSG00000149308_36 (sequence is synthesized)
taaactgagtgtagggaatgggatattgacagaatctgaaagcatgacctgcactttcattgtactgaaacttcactttatatctaaatcatgctgtttctgaaacagcttcctagtttg

SEQ ID NO: 415966 - DNA, 120 bp, Artificial Sequence
  ENSG00000149308_37 (sequence is synthesized)
taaatagacttacttggtatatttttattttgggaaaaacgtttgcagaaatgtaagtaaagccaatctgcaaaactgtatagctttgacaattccatattgtaaatactgtgtaaatct

SEQ ID NO: 415967 - DNA, 120 bp, Artificial Sequence
  ENSG00000149308_38 (sequence is synthesized)
tgttgaaatagaggttaaatcaacctaatgttcttacactgtgttttttgacttcttatgatccctaattctgagacttactcatctggaatagtttctcacttgttttggaggaaaatg

SEQ ID NO: 415968 - DNA, 120 bp, Artificial Sequence
  ENSG00000149308_39 (sequence is synthesized)
atgcttattcttataaattaccttcagtaactattcaataagacatttaaatacacaatcactaagtactacaaaataataaccacctcaactgatagcaaaatatctaattagaaatca

SEQ ID NO: 415969 - DNA, 120 bp, Artificial Sequence
  ENSG00000149308_40 (sequence is synthesized)
acagtttgatgagtttttttcctagagtgaatactacccctttcttataattgctgtaagtattatatttctggaatttcacactttacctactctgatcactctgttctctttgtttta

SEQ ID NO: 415970 - DNA, 120 bp, Artificial Sequence
  ENSG00000149308_41 (sequence is synthesized)
aagagagaattttgtaaaccatttattgaatgttctgatctttcatttataacttaagattttttacagaactttaagtggttagactattgagccataaaattttggtttgtagtagag

SEQ ID NO: 415971 - DNA, 120 bp, Artificial Sequence
  ENSG00000149308_42 (sequence is synthesized)
atttctcggtatgtacttttcccctaaatgctggggatttaaagaattgcactaattcatagaactctttacattgtagtgaccaatgcacatataatttaaatcttgtgttctatgtga

SEQ ID NO: 415972 - DNA, 120 bp, Artificial Sequence
  ENSG00000149308_43 (sequence is synthesized)
gagtttatgtggaggattatcttctggtgttgtgtccatcataagatgtaaaaagagaaatcatagttttatattttagtttctcctacaatgggtatgttaaataactatatctatact

SEQ ID NO: 415973 - DNA, 120 bp, Artificial Sequence
  ENSG00000149308_44 (sequence is synthesized)
tagatatagtgcattgtctgtgtcccttaaagtgttacaaagagtttctctcaaaaggtccttaaggagagtgagagatgagagaggtgccttctctgtattagactcacacacatcagt

SEQ ID NO: 415974 - DNA, 120 bp, Artificial Sequence
  ENSG00000149308_45 (sequence is synthesized)
ccagttgaagaattggtttaaacttttaaatgagaacagaaattataattagtacctgaccaattgtgcctagatattaaagtatgttctctttagtactttccgttcaattaaatatca

SEQ ID NO: 415975 - DNA, 120 bp, Artificial Sequence
  ENSG00000149308_46 (sequence is synthesized)
gtatattagggatttttttctacaggtgtatattttgttgaagagtcactttcctcaaccatttttttgtactgggcctttaaaaaaataaatccatccaactttaacacaacatttctc

SEQ ID NO: 415976 - DNA, 120 bp, Artificial Sequence
  ENSG00000149308_47 (sequence is synthesized)
agtgtagaaatcatgtcttcttaattgctgaaccttactgcaaaaacttgtgatgtaagaaatttgtatggtgtggcagtggtctattcctaaggaactaaatatcatatagttaatgtt

SEQ ID NO: 415977 - DNA, 120 bp, Artificial Sequence
  ENSG00000149308_48 (sequence is synthesized)
tatttaactcagcttgagactgtactacagttaggtttgaataaatattttcattaacttcaaaagtttgaattactttacattggcagtcttgtttagaaactgattaaattcctttgc

SEQ ID NO: 415978 - DNA, 120 bp, Artificial Sequence
  ENSG00000149308_49 (sequence is synthesized)
aagtcagttctttttgggagtttgtacaatgctgaaaatcacagttttcttcttattcaattcatagttgtatgtactaagcactgaaaattcatatacaaataaaataagtttactttc

SEQ ID NO: 415979 - DNA, 120 bp, Artificial Sequence
  ENSG00000149308_50 (sequence is synthesized)
gttttgttttgttttgtttttggagagtggatcgtaaggaagagggattgttcatagaatttatttcaaagcagtaattaatttgtgccaaacatttgtttgttttgtgccaaaacattt

SEQ ID NO: 415980 - DNA, 120 bp, Artificial Sequence
  ENSG00000149308_51 (sequence is synthesized)
gatgcggcgcaggagctgtcgctgtgtttgctttaacctgagtcttgttccttattgtggttcctgctgtggttttgatcatgttgttaccctcggacgtagcccggcttgtattggaca

SEQ ID NO: 415981 - DNA, 120 bp, Artificial Sequence
  ENSG00000149308_52 (sequence is synthesized)
gggtctcaccctgttgcccaggctcgagtgcagtggtgcagtcatggttcgctgcagcctcgacctcctgggctcaagctatcctcccacctccacctccagagcagctggaactacagg

SEQ ID NO: 415982 - DNA, 120 bp, Artificial Sequence
  ENSG00000149308_53 (sequence is synthesized)
agaaaagattctgaaatttgtgattacgctgcttctttatgctagctaattcaaaccttttttatttttcttaatctgctagtaagctatgggctttagtggtttttcttttttcttttc

SEQ ID NO: 415983 - DNA, 120 bp, Artificial Sequence
  ENSG00000149308_54 (sequence is synthesized)
acaaatacttctcaatctatgtgctagtaagttacaataaacagaaaagacagactaattcatcacatagttgtataaaacccaatgttgtgggggagtttttaaaaatagctcttatag

SEQ ID NO: 415984 - DNA, 120 bp, Artificial Sequence
  ENSG00000149308_55 (sequence is synthesized)
agtttttaaaaatagctcttatagtcatggtcttcagggaattcatcatctttttggagaaattttcaagaaaaacttgaatttcagccggttatggtggctcacgcctgtaatcccagc

SEQ ID NO: 415985 - DNA, 120 bp, Artificial Sequence
  ENSG00000149308_56 (sequence is synthesized)
tgtctcaaaaaaaaaaaaaaacttgaatttcttcctttataaaatcctttctaattgatctctgtctttaaaatcctttgtttatggctgggctcagtggctcatgactgtaatcccagc

SEQ ID NO: 415986 - DNA, 120 bp, Artificial Sequence
  ENSG00000149308_57 (sequence is synthesized)
atttggtggattcgtcaggtcattcagttggatgtcatgcacaaaattttgttttgttttgttttagaactgaagtttctgacaaaagtattgccacagatcttgggaaaaaatcagaag

SEQ ID NO: 415987 - DNA, 120 bp, Artificial Sequence
  ENSG00000149311_0 (sequence is synthesized)
ccggagcccgagccgaagggcgagccgcaaacgctaagtcgctggccattggtggacatggcgcaggcgcgtttgctccgacgggccgaatgttttggggcagtgttttgagcgcggaga

SEQ ID NO: 415988 - DNA, 120 bp, Artificial Sequence
  ENSG00000149311_1 (sequence is synthesized)
ccgcgtgatactggatgcgcatgggcataccgtgctctgcggctgcttggcgttgcttcttcctccagaagtgggcgctgggcagtcacgcagggtttgaaccggaagcgggagtaggta

SEQ ID NO: 415989 - DNA, 120 bp, Artificial Sequence
  ENSG00000149311_2 (sequence is synthesized)
gctgcgtggctaacggagaaaagaagccgtggccgcgggaggaggcgagaggagtcgggatctgcgctgcagccaccgccgcggttgatactactttgaccttccgagtgcagtgacagt

SEQ ID NO: 415990 - DNA, 120 bp, Artificial Sequence
  ENSG00000149311_3 (sequence is synthesized)
gatgtgtgttctgaaattgtgaaccatgagtctagtacttaatgatctgcttatctgctgccgtcaactagaacatgatagagctacagaacgaaagaaagaagttgagaaatttaagcg

SEQ ID NO: 415991 - DNA, 120 bp, Artificial Sequence
  ENSG00000149311_4 (sequence is synthesized)
cctgattcgagatcctgaaacaattaaacatctagatcggcattcagattccaaacaaggaaaatatttgaattgggatgctgtttttagatttttacagaaatatattcagaaagaaac

SEQ ID NO: 415992 - DNA, 120 bp, Artificial Sequence
  ENSG00000149311_5 (sequence is synthesized)
agaatgtctgagaatagcaaaaccaaatgtatcagcctcaacacaagcctccaggcagaaaaagatgcaggaaatcagtagtttggtcaaatacttcatcaaatgtgcaaacagaagagc

SEQ ID NO: 415993 - DNA, 120 bp, Artificial Sequence
  ENSG00000149311_6 (sequence is synthesized)
acctaggctaaaatgtcaagaactcttaaattatatcatggatacagtgaaagattcatctaatggtgctatttacggagctgattgtagcaacatactactcaaagacattctttctgt

SEQ ID NO: 415994 - DNA, 120 bp, Artificial Sequence
  ENSG00000149311_7 (sequence is synthesized)
gagaaaatactggtgtgaaatatctcagcaacagtggttagaattgttctctgtgtacttcaggctctatctgaaaccttcacaagatgttcatagagttttagtggctagaataattca

SEQ ID NO: 415995 - DNA, 120 bp, Artificial Sequence
  ENSG00000149311_8 (sequence is synthesized)
tgctgttaccaaaggatgctgttctcagactgacggattaaattccaaatttttggactttttttccaaggctattcagtgtgcgagacaagaaaagagctcttcaggtctaaatcatat

SEQ ID NO: 415996 - DNA, 120 bp, Artificial Sequence
  ENSG00000149311_9 (sequence is synthesized)
cttagcagctcttactatcttcctcaagactttggctgtcaactttcgaattcgagtgtgtgaattaggagatgaaattcttcccactttgctttatatttggactcaacataggcttaa

SEQ ID NO: 415997 - DNA, 120 bp, Artificial Sequence
  ENSG00000149311_10 (sequence is synthesized)
tgattctttaaaagaagtcattattgaattatttcaactgcaaatttatatccatcatccgaaaggagccaaaacccaagaaaaaggtgcttatgaatcaacaaaatggagaagtatttt

SEQ ID NO: 415998 - DNA, 120 bp, Artificial Sequence
  ENSG00000149311_11 (sequence is synthesized)
atacaacttatatgatctgctagtgaatgagataagtcatataggaagtagaggaaagtattcttcaggatttcgtaatattgccgtcaaagaaaatttgattgaattgatggcagatat

SEQ ID NO: 415999 - DNA, 120 bp, Artificial Sequence
  ENSG00000149311_12 (sequence is synthesized)
ctgtcaccaggtttttaatgaagataccagatccttggagatttctcaatcttacactactacacaaagagaatctagtgattacagtgtcccttgcaaaaggaagaaaatagaactagg

SEQ ID NO: 416000 - DNA, 120 bp, Artificial Sequence
  ENSG00000149311_13 (sequence is synthesized)
ctgggaagtaataaaagatcaccttcagaagtcacagaatgattttgatcttgtgccttggctacagattgcaacccaattaatatcaaagtatcctgcaagtttacctaactgtgagct

SEQ ID NO: 416001 - DNA, 120 bp, Artificial Sequence
  ENSG00000149311_14 (sequence is synthesized)
gtctccattactgatgatactatctcagcttctaccccaacagcgacatggggaacgtacaccatatgtgttacgatgccttacggaagttgcattgtgtcaagacaagaggtcaaacct

SEQ ID NO: 416002 - DNA, 120 bp, Artificial Sequence
  ENSG00000149311_15 (sequence is synthesized)
agaaagctcacaaaagtcagatttattaaaactctggaataaaatttggtgtattacctttcgtggtataagttctgagcaaatacaagctgaaaactttggcttacttggagccataat

SEQ ID NO: 416003 - DNA, 120 bp, Artificial Sequence
  ENSG00000149311_16 (sequence is synthesized)
tcagggtagtttagttgaggttgacagagaattctggaagttatttactgggtcagcctgcagaccttcatgtcctgcagtatgctgtttgactttggcactgaccaccagtatagttcc

SEQ ID NO: 416004 - DNA, 120 bp, Artificial Sequence
  ENSG00000149311_17 (sequence is synthesized)
aggaacggtaaaaatgggaatagagcaaaatatgtgtgaagtaaatagaagcttttctttaaaggaatcaataatgaaatggctcttattctatcagttagagggtgacttagaaaatag

SEQ ID NO: 416005 - DNA, 120 bp, Artificial Sequence
  ENSG00000149311_18 (sequence is synthesized)
cacagaagtgcctccaattcttcacagtaattttcctcatcttgtactggagaaaattcttgtgagtctcactatgaaaaactgtaaagctgcaatgaattttttccaaagcgtgccaga

SEQ ID NO: 416006 - DNA, 120 bp, Artificial Sequence
  ENSG00000149311_19 (sequence is synthesized)
atgtgaacaccaccaaaaagataaagaagaactttcattctcagaagtagaagaactatttcttcagacaacttttgacaagatggactttttaaccattgtgagagaatgtggtataga

SEQ ID NO: 416007 - DNA, 120 bp, Artificial Sequence
  ENSG00000149311_20 (sequence is synthesized)
aaagcaccagtccagtattggcttctctgtccaccagaatctcaaggaatcactggatcgctgtcttctgggattatcagaacagcttctgaataattactcatctgagattacaaattc

SEQ ID NO: 416008 - DNA, 120 bp, Artificial Sequence
  ENSG00000149311_21 (sequence is synthesized)
agaaactcttgtccggtgttcacgtcttttggtgggtgtccttggctgctactgttacatgggtgtaatagctgaagaggaagcatataagtcagaattattccagaaagccaagtctct

SEQ ID NO: 416009 - DNA, 120 bp, Artificial Sequence
  ENSG00000149311_22 (sequence is synthesized)
aatgcaatgtgcaggagaaagtatcactctgtttaaaaataagacaaatgaggaattcagaattggttccttgagaaatatgatgcagctatgtacacgttgcttgagcaactgtaccaa

SEQ ID NO: 416010 - DNA, 120 bp, Artificial Sequence
  ENSG00000149311_23 (sequence is synthesized)
gaagagtccaaataagattgcatctggctttttcctgcgattgttaacatcaaagctaatgaatgacattgcagatatttgtaaaagtttagcatccttcatcaaaaagccatttgaccg

SEQ ID NO: 416011 - DNA, 120 bp, Artificial Sequence
  ENSG00000149311_24 (sequence is synthesized)
tggagaagtagaatcaatggaagatgatactaatggaaatctaatggaggtggaggatcagtcatccatgaatctatttaacgattaccctgatagtagtgttagtgatgcaaacgaacc

SEQ ID NO: 416012 - DNA, 120 bp, Artificial Sequence
  ENSG00000149311_25 (sequence is synthesized)
tggagagagccaaagtaccataggtgccattaatcctttagctgaagaatatctgtcaaagcaagatctacttttcttagacatgctcaagttcttgtgtttgtgtgtaactactgctca

SEQ ID NO: 416013 - DNA, 120 bp, Artificial Sequence
  ENSG00000149311_26 (sequence is synthesized)
gaccaatactgtgtcctttagggcagctgatattcggaggaaattgttaatgttaattgattctagcacgctagaacctaccaaatccctccacctgcatatgtatctaatgcttttaaa

SEQ ID NO: 416014 - DNA, 120 bp, Artificial Sequence
  ENSG00000149311_27 (sequence is synthesized)
ggagcttcctggagaagagtaccccttgccaatggaagatgttcttgaacttctgaaaccactatccaatgtgtgttctttgtatcgtcgtgaccaagatgtttgtaaaactattttaaa

SEQ ID NO: 416015 - DNA, 120 bp, Artificial Sequence
  ENSG00000149311_28 (sequence is synthesized)
ccatgtccttcatgtagtgaaaaacctaggtcaaagcaatatggactctgagaacacaagggatgctcaaggacagtttcttacagtaattggagcattttggcatctaacaaaggagag

SEQ ID NO: 416016 - DNA, 120 bp, Artificial Sequence
  ENSG00000149311_29 (sequence is synthesized)
gaaatatatattctctgtaagaatggccctagtaaattgccttaaaactttgcttgaggctgatccttattcaaaatgggccattcttaatgtaatgggaaaagactttcctgtaaatga

SEQ ID NO: 416017 - DNA, 120 bp, Artificial Sequence
  ENSG00000149311_30 (sequence is synthesized)
agtatttacacaatttcttgctgacaatcatcaccaagttcgcatgttggctgcagagtcaatcaatagattgttccaggacacgaagggagattcttccaggttactgaaagcacttcc

SEQ ID NO: 416018 - DNA, 120 bp, Artificial Sequence
  ENSG00000149311_31 (sequence is synthesized)
tttgaagcttcagcaaacagcttttgaaaatgcatacttgaaagctcaggaaggaatgagagaaatgtcccatagtgctgagaaccctgaaactttggatgaaatttataatagaaaatc

SEQ ID NO: 416019 - DNA, 120 bp, Artificial Sequence
  ENSG00000149311_32 (sequence is synthesized)
tgttttactgacgttgatagctgtggttttatcctgtagccctatctgcgaaaaacaggctttgtttgccctgtgtaaatctgtgaaagagaatggattagaacctcaccttgtgaaaaa

SEQ ID NO: 416020 - DNA, 120 bp, Artificial Sequence
  ENSG00000149311_33 (sequence is synthesized)
ggttttagagaaagtttctgaaacttttggatatagacgtttagaagactttatggcatctcatttagattatctggttttggaatggctaaatcttcaagatactgaatacaacttatc

SEQ ID NO: 416021 - DNA, 120 bp, Artificial Sequence
  ENSG00000149311_34 (sequence is synthesized)
ttcttttccttttattttattaaactacacaaatattgaggatttctatagatcttgttataaggttttgattccacatctggtgattagaagtcattttgatgaggtgaagtccattgc

SEQ ID NO: 416022 - DNA, 120 bp, Artificial Sequence
  ENSG00000149311_35 (sequence is synthesized)
taatcagattcaagaggactggaaaagtcttctaacagactgctttccaaagattcttgtaaatattcttccttattttgcctatgagggtaccagagacagtgggatggcacagcaaag

SEQ ID NO: 416023 - DNA, 120 bp, Artificial Sequence
  ENSG00000149311_36 (sequence is synthesized)
agagactgctaccaaggtctatgatatgcttaaaagtgaaaacttattgggaaaacagattgatcacttattcattagtaatttaccagagattgtggtggagttattgatgacgttaca

SEQ ID NO: 416024 - DNA, 120 bp, Artificial Sequence
  ENSG00000149311_37 (sequence is synthesized)
tgagccagcaaattctagtgccagtcagagcactgacctctgtgacttttcaggggatttggatcctgctcctaatccacctcattttccatcgcatgtgattaaagcaacatttgccta

SEQ ID NO: 416025 - DNA, 120 bp, Artificial Sequence
  ENSG00000149311_38 (sequence is synthesized)
tatcagcaattgtcataaaaccaagttaaaaagcattttagaaattctttccaaaagccctgattcctatcagaaaattcttcttgccatatgtgagcaagcagctgaaacaaataatgt

SEQ ID NO: 416026 - DNA, 120 bp, Artificial Sequence
  ENSG00000149311_39 (sequence is synthesized)
ttataagaagcacagaattcttaaaatatatcacctgtttgttagtttattactgaaagatataaaaagtggcttaggaggagcttgggcctttgttcttcgagacgttatttatacttt

SEQ ID NO: 416027 - DNA, 120 bp, Artificial Sequence
  ENSG00000149311_40 (sequence is synthesized)
gattcactatatcaaccaaaggccttcttgtatcatggatgtgtcattacgtagcttctccctttgttgtgacttattaagtcaggtttgccagacagccgtgacttactgtaaggatgc

SEQ ID NO: 416028 - DNA, 120 bp, Artificial Sequence
  ENSG00000149311_41 (sequence is synthesized)
tctagaaaaccatcttcatgttattgttggtacacttataccccttgtgtatgagcaggtggaggttcagaaacaggtattggacttgttgaaatacttagtgatagataacaaggataa

SEQ ID NO: 416029 - DNA, 120 bp, Artificial Sequence
  ENSG00000149311_42 (sequence is synthesized)
tgaaaacctctatatcacgattaagcttttagatccttttcctgaccatgttgtttttaaggatttgcgtattactcagcaaaaaatcaaatacagtagaggacccttttcactcttgga

SEQ ID NO: 416030 - DNA, 120 bp, Artificial Sequence
  ENSG00000149311_43 (sequence is synthesized)
ggaaattaaccattttctctcagtaagtgtttatgatgcacttccattgacaagacttgaaggactaaaggatcttcgaagacaactggaactacataaagatcagatggtggacattat

SEQ ID NO: 416031 - DNA, 120 bp, Artificial Sequence
  ENSG00000149311_44 (sequence is synthesized)
gagagcttctcaggataatccgcaagatgggattatggtgaaactagttgtcaatttgttgcagttatccaagatggcaataaaccacactggtgaaaaagaagttctagaggctgttgg

SEQ ID NO: 416032 - DNA, 120 bp, Artificial Sequence
  ENSG00000149311_45 (sequence is synthesized)
aagctgcttgggagaagtgggtcctatagatttctctaccatagctatacaacatagtaaagatgcatcttataccaaggcccttaagttatttgaagataaagaacttcagtggacctt

SEQ ID NO: 416033 - DNA, 120 bp, Artificial Sequence
  ENSG00000149311_46 (sequence is synthesized)
cataatgctgacctacctgaataacacactggtagaagattgtgtcaaagttcgatcagcagctgttacctgtttgaaaaacattttagccacaaagactggacatagtttctgggagat

SEQ ID NO: 416034 - DNA, 120 bp, Artificial Sequence
  ENSG00000149311_47 (sequence is synthesized)
ttataagatgacaacagatccaatgctggcctatctacagccttttagaacatcaagaaaaaagtttttagaagtacccagatttgacaaagaaaacccttttgaaggcctggatgatat

SEQ ID NO: 416035 - DNA, 120 bp, Artificial Sequence
  ENSG00000149311_48 (sequence is synthesized)
aaatctgtggattcctctaagtgaaaatcatgacatttggataaagacactgacttgtgcttttttggacagtggaggcacaaaatgtgaaattcttcaattattaaagccaatgtgtga

SEQ ID NO: 416036 - DNA, 120 bp, Artificial Sequence
  ENSG00000149311_49 (sequence is synthesized)
agtgaaaactgacttttgtcagactgtacttccatacttgattcatgatattttactccaagatacaaatgaatcatggagaaatctgctttctacacatgttcagggatttttcaccag

SEQ ID NO: 416037 - DNA, 120 bp, Artificial Sequence
  ENSG00000149311_50 (sequence is synthesized)
ctgtcttcgacacttctcgcaaacgagccgatccacaacccctgcaaacttggattcagagtcagagcactttttccgatgctgtttggataaaaaatcacaaagaacaatgcttgctgt

SEQ ID NO: 416038 - DNA, 120 bp, Artificial Sequence
  ENSG00000149311_51 (sequence is synthesized)
tgtggactacatgagaagacaaaagagaccttcttcaggaacaatttttaatgatgctttctggctggatttaaattatctagaagttgccaaggtagctcagtcttgtgctgctcactt

SEQ ID NO: 416039 - DNA, 120 bp, Artificial Sequence
  ENSG00000149311_52 (sequence is synthesized)
tacagctttactctatgcagaaatctatgcagataagaaaagtatggatgatcaagagaaaagaagtcttgcatttgaagaaggaagccagagtacaactatttctagcttgagtgaaaa

SEQ ID NO: 416040 - DNA, 120 bp, Artificial Sequence
  ENSG00000149311_53 (sequence is synthesized)
aagtaaagaagaaactggaataagtttacaggatcttctcttagaaatctacagaagtataggggagccagatagtttgtatggctgtggtggagggaagatgttacaacccattactag

SEQ ID NO: 416041 - DNA, 120 bp, Artificial Sequence
  ENSG00000149311_54 (sequence is synthesized)
atcccctcatcaacacgccaggcaggaatcattcaggccttgcagaatttgggactctgccatattctttccgtctatttaaaaggattggattatgaaaataaagactggtgtcctgaa

SEQ ID NO: 416042 - DNA, 120 bp, Artificial Sequence
  ENSG00000149311_55 (sequence is synthesized)
ctagaagaacttcattaccaagcagcatggaggaatatgcagtgggaccattgcacttccgtcagcaaagaagtagaaggaaccagttaccatgaatcattgtacaatgctctacaatct

SEQ ID NO: 416043 - DNA, 120 bp, Artificial Sequence
  ENSG00000149311_56 (sequence is synthesized)
ctaagagacagagaattctctacattttatgaaagtctcaaatatgccagagtaaaagaagtggaagagatgtgtaagcgcagccttgagtctgtgtattcgctctatcccacacttagc

SEQ ID NO: 416044 - DNA, 120 bp, Artificial Sequence
  ENSG00000149311_57 (sequence is synthesized)
aggttgcaggccattggagagctggaaagcattggggagcttttctcaagatcagtcacacatagacaactctctgaagtatatattaagtggcagaaacactcccagcttctcaaggac

SEQ ID NO: 416045 - DNA, 120 bp, Artificial Sequence
  ENSG00000149311_58 (sequence is synthesized)
agtgattttagttttcaggagcctatcatggctctacgcacagtcattttggagatcctgatggaaaaggaaatggacaactcacaaagagaatgtattaaggacattctcaccaaacac

SEQ ID NO: 416046 - DNA, 120 bp, Artificial Sequence
  ENSG00000149311_59 (sequence is synthesized)
cttgtagaactctctatactggccagaactttcaagaacactcagctccctgaaagggcaatatttcaaattaaacagtacaattcagttagctgtggagtctctgagtggcagctggaa

SEQ ID NO: 416047 - DNA, 120 bp, Artificial Sequence
  ENSG00000149311_60 (sequence is synthesized)
gaagcacaagtattctgggcaaaaaaggagcagagtcttgccctgagtattctcaagcaaatgatcaagaagttggatgccagctgtgcagcgaacaatcccagcctaaaacttacatac

SEQ ID NO: 416048 - DNA, 120 bp, Artificial Sequence
  ENSG00000149311_61 (sequence is synthesized)
acagaatgtctgagggtttgtggcaactggttagcagaaacgtgcttagaaaatcctgcggtcatcatgcagacctatctagaaaaggcagtagaagttgctggaaattatgatggagaa

SEQ ID NO: 416049 - DNA, 120 bp, Artificial Sequence
  ENSG00000149311_62 (sequence is synthesized)
agtagtgatgagctaagaaatggaaaaatgaaggcatttctctcattagcccggttttcagatactcaataccaaagaattgaaaactacatgaaatcatcggaatttgaaaacaagcaa

SEQ ID NO: 416050 - DNA, 120 bp, Artificial Sequence
  ENSG00000149311_63 (sequence is synthesized)
gctctcctgaaaagagccaaagaggaagtaggtctccttagggaacataaaattcagacaaacagatacacagtaaaggttcagcgagagctggagttggatgaattagccctgcgtgca

SEQ ID NO: 416051 - DNA, 120 bp, Artificial Sequence
  ENSG00000149311_64 (sequence is synthesized)
ctgaaagaggatcgtaaacgcttcttatgtaaagcagttgaaaattatatcaactgcttattaagtggagaagaacatgatatgtgggtattccgactttgttccctctggcttgaaaat

SEQ ID NO: 416052 - DNA, 120 bp, Artificial Sequence
  ENSG00000149311_65 (sequence is synthesized)
tctggagtttctgaagtcaatggcatgatgaagagagacggaatgaagattccaacatataaatttttgcctcttatgtaccaattggctgctagaatggggaccaagatgatgggaggc

SEQ ID NO: 416053 - DNA, 120 bp, Artificial Sequence
  ENSG00000149311_66 (sequence is synthesized)
ctaggatttcatgaagtcctcaataatctaatctctagaatttcaatggatcacccccatcacactttgtttattatactggccttagcaaatgcaaacagagatgaatttctgactaaa

SEQ ID NO: 416054 - DNA, 120 bp, Artificial Sequence
  ENSG00000149311_67 (sequence is synthesized)
ccagaggtagccagaagaagcagaataactaaaaatgtgcctaaacaaagctctcagcttgatgaggatcgaacagaggctgcaaatagaataatatgtactatcagaagtaggagacct

SEQ ID NO: 416055 - DNA, 120 bp, Artificial Sequence
  ENSG00000149311_68 (sequence is synthesized)
cagatggtcagaagtgttgaggcactttgtgatgcttatattatattagcaaacttagatgccactcagtggaagactcagagaaaaggcataaatattccagcagaccagccaattact

SEQ ID NO: 416056 - DNA, 120 bp, Artificial Sequence
  ENSG00000149311_69 (sequence is synthesized)
aaacttaagaatttagaagatgttgttgtccctactatggaaattaaggtggaccacacaggagaatatggaaatctggtgactatacagtcatttaaagcagaatttcgcttagcagga

SEQ ID NO: 416057 - DNA, 120 bp, Artificial Sequence
  ENSG00000149311_70 (sequence is synthesized)
ggtgtaaatttaccaaaaataatagattgtgtaggttccgatggcaaggagaggagacagcttgttaagggccgtgatgacctgagacaagatgctgtcatgcaacaggtcttccagatg

SEQ ID NO: 416058 - DNA, 120 bp, Artificial Sequence
  ENSG00000149311_71 (sequence is synthesized)
tgtaatacattactgcagagaaacacggaaactaggaagaggaaattaactatctgtacttataaggtggttcccctctctcagcgaagtggtgttcttgaatggtgcacaggaactgtc

SEQ ID NO: 416059 - DNA, 120 bp, Artificial Sequence
  ENSG00000149311_72 (sequence is synthesized)
cccattggtgaatttcttgttaacaatgaagatggtgctcataaaagatacaggccaaatgatttcagtgcctttcagtgccaaaagaaaatgatggaggtgcaaaaaaagtcttttgaa

SEQ ID NO: 416060 - DNA, 120 bp, Artificial Sequence
  ENSG00000149311_73 (sequence is synthesized)
gagaaatatgaagtcttcatggatgtttgccaaaattttcaaccagttttccgttacttctgcatggaaaaattcttggatccagctatttggtttgagaagcgattggcttatacgcgc

SEQ ID NO: 416061 - DNA, 120 bp, Artificial Sequence
  ENSG00000149311_74 (sequence is synthesized)
agtgtagctacttcttctattgttggttacatacttggacttggtgatagacatgtacagaatatcttgataaatgagcagtcagcagaacttgtacatatagatctaggtgttgctttt

SEQ ID NO: 416062 - DNA, 120 bp, Artificial Sequence
  ENSG00000149311_75 (sequence is synthesized)
gaacagggcaaaatccttcctactcctgagacagttccttttagactcaccagagatattgtggatggcatgggcattacgggtgttgaaggtgtcttcagaagatgctgtgagaaaacc

SEQ ID NO: 416063 - DNA, 120 bp, Artificial Sequence
  ENSG00000149311_76 (sequence is synthesized)
atggaagtgatgagaaactctcaggaaactctgttaaccattgtagaggtccttctatatgatccactctttgactggaccatgaatcctttgaaagctttgtatttacagcagaggccg

SEQ ID NO: 416064 - DNA, 120 bp, Artificial Sequence
  ENSG00000149311_77 (sequence is synthesized)
gaagatgaaactgagcttcaccctactctgaatgcagatgaccaagaatgcaaacgaaatctcagtgatattgaccagagtttcaacaaagtagctgaacgtgtcttaatgagactacaa

SEQ ID NO: 416065 - DNA, 120 bp, Artificial Sequence
  ENSG00000149311_78 (sequence is synthesized)
gagaaactgaaaggagtggaagaaggcactgtgctcagtgttggtggacaagtgaatttgctcatacagcaggccatagaccccaaaaatctcagccgacttttcccaggatggaaagct

SEQ ID NO: 416066 - DNA, 120 bp, Artificial Sequence
  ENSG00000149311_79 (sequence is synthesized)
tgggtgtgatcttcagtatatgaattaccctttcattcagcctttagaaattatattttagcctttatttttaacctgccaacatactttaagtagggattaatatttaagtgaactatt

SEQ ID NO: 416067 - DNA, 120 bp, Artificial Sequence
  ENSG00000149311_80 (sequence is synthesized)
gtgggtttttttgaatgttggttttaatacttgatttaatcaccactcaaaaatgttttgatggtcttaaggaacatctctgctttcactctttagaaataatggtcattcgggctgggc

SEQ ID NO: 416068 - DNA, 89 bp, Artificial Sequence
  ENSG00000149311_81 (sequence is synthesized)
gaaacgtatttggatttttcctagtaagatcactcagtgttactaaataatgaagttgttatggagaacaaatttcaaagacacagtta

SEQ ID NO: 416069 - DNA, 120 bp, Artificial Sequence
  ENSG00000149311_82 (sequence is synthesized)
atgaagttgttatggagaacaaatttcaaagacacagttagtgtagttactatttttttaagtgtgtattaaaacttctcattctattctctttatcttttaagcccttctgtactgtcc

SEQ ID NO: 416070 - DNA, 120 bp, Artificial Sequence
  ENSG00000149311_83 (sequence is synthesized)
atgtatgttatctttctgtgataacttcatagattgccttctagttcatgaattctcttgtcagatgtatataatctcttttaccctatccattgggcttcttctttcagaaattgtttt

SEQ ID NO: 416071 - DNA, 120 bp, Artificial Sequence
  ENSG00000149311_84 (sequence is synthesized)
tcatttctaattatgcatcatttttcagatctctgtttcttgatgtcatttttaatgtttttttaatgttttttatgtcactaattattttaaatgtctgtacttgatagacactgtaat

SEQ ID NO: 416072 - DNA, 120 bp, Artificial Sequence
  ENSG00000149311_85 (sequence is synthesized)
agttctattaaatttagttcctgctgtttatatctgttgatttttgtatttgataggctgttcatccagttttgtctttttgaaaagtgagtttattttcagcaaggctttatctatggg

SEQ ID NO: 416073 - DNA, 120 bp, Artificial Sequence
  ENSG00000149311_86 (sequence is synthesized)
aatcttgagtgtctgtttatgtcatattcccagggctgttgctgcacacaagcccattcttattttaatttcttggctttagggtttccatacctgaagtgtagcataaatactgatagg

SEQ ID NO: 416074 - DNA, 120 bp, Artificial Sequence
  ENSG00000149311_87 (sequence is synthesized)
agatttcccaggccaaggcaaacacacttcctcctcatctccttgtgctagtgggcagaatatttgattgatgcctttttcactgagagtataagcttccatgtgtcccacctttatggc

SEQ ID NO: 416075 - DNA, 120 bp, Artificial Sequence
  ENSG00000149311_88 (sequence is synthesized)
aggggtggaaggaggtacatttaattcccactgcctgcctttggcaagccctgggttctttgctccccatatagatgtctaagctaaaagccgtgggttaatgagactggcaaattgttc

SEQ ID NO: 416076 - DNA, 120 bp, Artificial Sequence
  ENSG00000149311_89 (sequence is synthesized)
taaaagccgtgggttaatgagactggcaaattgttccaggacagctacagcatcagctcacatattcacctctctggtttttcattcccctcatttttttctgagacagagtcttgctct

SEQ ID NO: 416077 - DNA, 120 bp, Artificial Sequence
  ENSG00000149311_90 (sequence is synthesized)
ttttgaccgtaaggatttcccctttcttgtaagttctgctatgtatttaaaagaatgttttctacattttatccagcatttctctgtgttctgttggaagggaagggcttaggtatctag

SEQ ID NO: 416078 - DNA, 120 bp, Artificial Sequence
  ENSG00000149311_91 (sequence is synthesized)
tttgatacataggtagaagtggaacatttctctgtcccccagctgtcatcatataagataaacatcagataaaaagccacctgaaagtaaaactactgactcgtgtattagtgagtataa

SEQ ID NO: 416079 - DNA, 120 bp, Artificial Sequence
  ENSG00000149311_92 (sequence is synthesized)
tctcttctccatccttaggaaaatgttcatcccagctgcggagattaacaaatgggtgattgagctttctcctcgtatttggaccttgaaggttatataaatttttttcttatgaagagt

SEQ ID NO: 416080 - DNA, 120 bp, Artificial Sequence
  ENSG00000149311_93 (sequence is synthesized)
tggcatttctttttattgccaatggcaggcactcattcatatttgatctcctcaccttcccctcccctaaaaccaatctccagaactttttggactataaatttcttggtttgacttctg

SEQ ID NO: 416081 - DNA, 120 bp, Artificial Sequence
  ENSG00000149311_94 (sequence is synthesized)
gagaactgttcagaatattactttgcatttcaaattacaaacttaccttggtgtatctttttcttacaagctgcctaaatgaatatttggtatatattggtagttttattactatagtaa

SEQ ID NO: 416082 - DNA, 120 bp, Artificial Sequence
  ENSG00000149311_95 (sequence is synthesized)
atcaaggaaatgcagtaaacttaaaatgtctttaagaaagccctgaaatcttcatgggtgaaattagaaattatcaactagataatagtatagataaatgaatttgtagctaattcttgc

SEQ ID NO: 416083 - DNA, 120 bp, Artificial Sequence
  ENSG00000149311_96 (sequence is synthesized)
tagttgttgcatccagagagctttgaataacatcattaatctactctttagccttgcatggtatgctatgaggctcctgttctgttcaagtattctaatcaatggctttgaaaagtttat

SEQ ID NO: 416084 - DNA, 120 bp, Artificial Sequence
  ENSG00000149311_97 (sequence is synthesized)
gctttgaaaagtttatcaaatttacatacagatcacaagcctaggagaaataactaattcacagatgacagaattaagattataaaagattttttttttgtaattttagtagagacaggg

SEQ ID NO: 416085 - DNA, 120 bp, Artificial Sequence
  ENSG00000149311_98 (sequence is synthesized)
ctctgcctcaaaaaaaaaaaaaaaaaggttttggcaagctggaactctttctgcaaatgactaagatagaaaactgccaaggacaaatgaggagtagttagattttgaaaatattaatca

SEQ ID NO: 416086 - DNA, 120 bp, Artificial Sequence
  ENSG00000149311_99 (sequence is synthesized)
gattttgaaaatattaatcatagaatagttgttgtatgctaagtcactgacccatattatgtacagcatttctgatctttactttgcaagattagtgatactatcccaatacactgctgg

SEQ ID NO: 416087 - DNA, 120 bp, Artificial Sequence
  ENSG00000149311_100 (sequence is synthesized)
agaaatcagaatttggagaaataagttgtccaaggcaagaagatagtaaattataagtacaagtgtaatatggacagtatctaacttgaaaagatttcaggcgaaaagaatctggggttt

SEQ ID NO: 416088 - DNA, 120 bp, Artificial Sequence
  ENSG00000149311_101 (sequence is synthesized)
gccagtcagttgctcaaaaggtcaatgaaaaccaaatagtgaagctatcagagaagctaataaattatagactgcttgaacagttgtgtccagattaagggagataatagctttcccacc

SEQ ID NO: 416089 - DNA, 120 bp, Artificial Sequence
  ENSG00000149311_102 (sequence is synthesized)
ctactttgtgcaggtcatacctccccaaagtgtttacctaatcagtaggttcacaaactcttggtcattatagtatatgcctaaaatgtatgcacttaggaatgctaaaaatttaaatat

SEQ ID NO: 416090 - DNA, 120 bp, Artificial Sequence
  ENSG00000149311_103 (sequence is synthesized)
ggtctaaagcaaataaaagcaaagaggaaaaactttggacagcgtaaagactagaatagtcttttaaaaagaaagccagtatattggtttgaaatatagagatgtgtcccaatttcaagt

SEQ ID NO: 416091 - DNA, 120 bp, Artificial Sequence
  ENSG00000149311_104 (sequence is synthesized)
tgtcccaatttcaagtattttaattgcaccttaatgaaattatctattttctatagattttagtactattgaatgtattactttactgttacctgaatttattataaagtgtttttgaat

SEQ ID NO: 416092 - DNA, 120 bp, Artificial Sequence
  ENSG00000149311_105 (sequence is synthesized)
gcgagaggagtcgggatctgcgctgcagccaccgccgcggttgatactactttgaccttccgagtgcagtgaggcatacatcacaatttggaattatgcattggtttatcaatttacttg

SEQ ID NO: 416093 - DNA, 120 bp, Artificial Sequence
  ENSG00000149311_106 (sequence is synthesized)
gccgcgggaggaggcgagaggagtcgggatctgcgctgcagccaccgccgcggttgatactactttgaccttccgagtgcagtggtaggggcgcggaggcaacgcagcggcttctgcgct

SEQ ID NO: 416094 - DNA, 120 bp, Artificial Sequence
  ENSG00000149311_107 (sequence is synthesized)
gggaaattcagtcgtgtgcgacccagtctgtcctctccccagaccgccaatctcatgcacccctccagagtggcccttgactcctccctctcctcactccatctttcctggcctctctcc

SEQ ID NO: 416095 - DNA, 120 bp, Artificial Sequence
  ENSG00000149311_108 (sequence is synthesized)
gggtgcttagcggacttggccaataacctcctccttttaaacgccctgaattgaaccctgcctcctgcgcatcctctttttgtgtcaccttagggttcagatttaactacgcgacttgac

SEQ ID NO: 416096 - DNA, 120 bp, Artificial Sequence
  ENSG00000149311_109 (sequence is synthesized)
tagtcatcttttgatctctctctcgtatttagtacttttagtcagcgagcatttattgatatttcaacttcagcctcgcggttaagagcttgggctctggaatcatacggctggaattgg

SEQ ID NO: 416097 - DNA, 120 bp, Artificial Sequence
  ENSG00000149311_110 (sequence is synthesized)
aattctgtcagtcgtgtggccgctctctactgtcttgtgaagataagtgagataatcttgacctgtggtgagcactcgtgagcgttagctgctgtatttaccaggtacagataagacaac

SEQ ID NO: 416098 - DNA, 120 bp, Artificial Sequence
  ENSG00000149311_111 (sequence is synthesized)
tacagtggatgataatgtatgtggtgataggggagtactctgatggtagaggagtgactttggttctctgcaaactcagcctgagactatcaattcagtttgtggtgagacctcgcagtg

SEQ ID NO: 416099 - DNA, 120 bp, Artificial Sequence
  ENSG00000149311_112 (sequence is synthesized)
ttaccttggcagatggtagaagccttccagatggaaggaaaaatgcgtgtaaaggcacaaagtgtagaaggaccctgaagctccagcgtgaggcctggcattgaatgaaatatattttgt

SEQ ID NO: 416100 - DNA, 120 bp, Artificial Sequence
  ENSG00000149311_113 (sequence is synthesized)
gggttttcagctgctgaagtcataggaatggatgagaccaagaaaacaaagctgtttttgaggtatgagcggaagaagagatatcaggagactttcgaaacagtcataacggaagttaat

SEQ ID NO: 416101 - DNA, 120 bp, Artificial Sequence
  ENSG00000149311_114 (sequence is synthesized)
atgatcattgctaacatttgctgtgtttcaggcactgtaagcatgtatatgggtccttaaagggactcatagaggtaggtactagtattgtttttccttttatcattgagaaactgaggt

SEQ ID NO: 416102 - DNA, 120 bp, Artificial Sequence
  ENSG00000149311_115 (sequence is synthesized)
ttgaagagattagtgaacttgctctagattatacagtttgtaagtggctgaaccaggatttgaactaatacaatctgactacagaggccacactccttagcactagaaaagaatggcatg

SEQ ID NO: 416103 - DNA, 120 bp, Artificial Sequence
  ENSG00000149311_116 (sequence is synthesized)
ccaagggcagagttatttctaggaagatgggatataagcgtcattgtcaagttgtgcaaaggggtcaacttggttgagatctaaaaaggaacactgaattcgtcaattcagaggctcgta

SEQ ID NO: 416104 - DNA, 120 bp, Artificial Sequence
  ENSG00000149311_117 (sequence is synthesized)
ggaagtaggaaatccttatcttttcgtttgaaccttgagtggaacctagatattctggattaatgtataaatgaagttcatctttatatggtgacactcatactctagttgactacctaa

SEQ ID NO: 416105 - DNA, 120 bp, Artificial Sequence
  ENSG00000149311_118 (sequence is synthesized)
tagttcctctgccttctttcagttccgccaacatactgtgttctttaacattgtagaaccctttggctatgctagtctccttccctgaagtgttggtcctctagccctttttttgattgg

SEQ ID NO: 416106 - DNA, 120 bp, Artificial Sequence
  ENSG00000149311_119 (sequence is synthesized)
caccagttagttcagatcttggctttattataaactcctctgagatatatgttccctgacagtttatctaaaatgattctctctacagttattttctattactgtgtttttgtttcctca

SEQ ID NO: 416107 - DNA, 120 bp, Artificial Sequence
  ENSG00000149311_120 (sequence is synthesized)
gaggcatacatcacaatttggaattatgcattggtttatcaatttacttgtttattgtcaccctgctgcccagatatgacttcatgagggtaggatttgtatctgtttagttcattattt

SEQ ID NO: 416108 - DNA, 120 bp, Artificial Sequence
  ENSG00000149311_121 (sequence is synthesized)
gtctagctataagtagtaaatattgtttgcatctatcagtgaatgagcatcttctgtttatgtagataatactgaactgttttgttttcttcaaagtaatcattaagctgaaggtaagaa

SEQ ID NO: 416109 - DNA, 120 bp, Artificial Sequence
  ENSG00000149311_122 (sequence is synthesized)
aaacaagttcaaggaagtcacaccatggggaaaaaaaagtcaagtttagggctgcctcttccgggaagtgtcaaatctttagtatatttaggaataaaggtgccaaaccttatggttctt

SEQ ID NO: 416110 - DNA, 120 bp, Artificial Sequence
  ENSG00000149311_123 (sequence is synthesized)
tggatattgctaaggtattttcattggttagattaccagtttcattttccttattgactcaagagggctttaaactgagattgaagaagtaagaagattcctagataaaaccataaggaa

SEQ ID NO: 416111 - DNA, 120 bp, Artificial Sequence
  ENSG00000149311_124 (sequence is synthesized)
tggaaaaacaaaaatgataatacttgtccacaggaagtatataatcaaatgaaaagaactcaaataacaatctgtaatctatagcagagtaaagcggaagttgtaatagtgttgggggat

SEQ ID NO: 416112 - DNA, 120 bp, Artificial Sequence
  ENSG00000149311_125 (sequence is synthesized)
gggggaagtcagaagaaccaccagtgaatataaaaggagaagagaatcagagccatctgctaataaaatgggtagtcagctctttttgttttttttgtcttgttttgttttgagacagtc

SEQ ID NO: 416113 - DNA, 120 bp, Artificial Sequence
  ENSG00000149311_126 (sequence is synthesized)
tcgctctgtcgcccatgctggagtgcaattgcgtgatctcagctaactgcactttccgcctcctgggttcaagtgagtctcctacctcagtctccccagtagctaggattgcaggcacat

SEQ ID NO: 416114 - DNA, 61 bp, Artificial Sequence
  ENSG00000149311_127 (sequence is synthesized)
ggggtttcacgatgttggccaggctggctggtctcgaactcctgacctcgtggaccggtag

SEQ ID NO: 416115 - DNA, 120 bp, Artificial Sequence
  ENSG00000149311_128 (sequence is synthesized)
attacaggcatgagccaccacgcctagccccggtagtcagctcttactgagaatattcaaagacagggcattcattttgtaagagacattccttccttcataggaagattggacctggtc

SEQ ID NO: 416116 - DNA, 120 bp, Artificial Sequence
  ENSG00000149311_129 (sequence is synthesized)
aagtagaatttagatggatggataggagaaggactttccctacctttttacttcttgagatatagttatttgtaggtataatatacataaatatatgtattttttctctgtttacagaca

SEQ ID NO: 416117 - DNA, 120 bp, Artificial Sequence
  ENSG00000149311_130 (sequence is synthesized)
ttcatagtttaataaaaaacttctttgtattatataaaggtttagatcagaactagtaaaacagaatgctgtttctttttttttcttttctattttactttaggttctgtgggtagatgt

SEQ ID NO: 416118 - DNA, 120 bp, Artificial Sequence
  ENSG00000149311_131 (sequence is synthesized)
gcgggtttgttacatgggtaaattgcatgttgctgaggcttggtgtacgaatgatcctgtcactcaggtagtgagcatagtacctgataggtagcccttcaagccatacctccctttctt

SEQ ID NO: 416119 - DNA, 120 bp, Artificial Sequence
  ENSG00000149311_132 (sequence is synthesized)
tccaaccctcaaacagtccccagtctctgttcttcccatctttgtgtccatgttgaaatgctgttcttactacatttttttgaaggacatcaaaagagagtttgattatatcagaagccc

SEQ ID NO: 416120 - DNA, 120 bp, Artificial Sequence
  ENSG00000149311_133 (sequence is synthesized)
ccaaaagaagagagctactcagtggaatcaaggcatagtaaaatatagttgatccttgatatttgcaaaggataccaccatagcatagaatttgcttcatttccttttaaaacagaaatg

SEQ ID NO: 416121 - DNA, 120 bp, Artificial Sequence
  ENSG00000149311_134 (sequence is synthesized)
tcattttactcctattgttatgtgttaaataagaaccttaataccagttgagatggaagtggtagacaaagcttactagctctgataacctcctacttatcagctccaaagcatgtttta

SEQ ID NO: 416122 - DNA, 88 bp, Artificial Sequence
  ENSG00000149311_135 (sequence is synthesized)
tctgataacctcctacttatcagctccaaagcatgttttaagcctttggctcagcaaaatgacatgtctctccatataagcaagagtg

SEQ ID NO: 416123 - DNA, 90 bp, Artificial Sequence
  ENSG00000149311_136 (sequence is synthesized)
agcacactaccacgcctggccaagagtgcttttaaatagttcattgtcaatgttaaatccttgagtgctcatttccttatttacctggct

SEQ ID NO: 416124 - DNA, 120 bp, Artificial Sequence
  ENSG00000149311_137 (sequence is synthesized)
tgttaaatccttgagtgctcatttccttatttacctggctgttttctattcatctttcatgtctcaatttaaatgtcatgtttctttggtctcagagtaataaaaagtaaatatacttcc

SEQ ID NO: 416125 - DNA, 88 bp, Artificial Sequence
  ENSG00000149311_138 (sequence is synthesized)
tttctttggtctcagagtaataaaaagtaaatatacttcccccatctcccgccccgcagagcctcgatcttggctcactgaaagctct

SEQ ID NO: 416126 - DNA, 120 bp, Artificial Sequence
  ENSG00000149311_139 (sequence is synthesized)
gattacaggcgtgagccactgcgtccagtgtaaattatacttttattttaatcctgctactactgcaagcaaggcaaacatttttgtgttacagcattacttgtatagattttaagaaaa

SEQ ID NO: 416127 - DNA, 120 bp, Artificial Sequence
  ENSG00000149311_140 (sequence is synthesized)
ttgtatagattttaagaaaatctcattttaaatacggaaatgttaagaaaaattattgtgcctttgaccagaatgtgcctctaattgtacagttaaatctaactataaatactgcagtat

SEQ ID NO: 416128 - DNA, 120 bp, Artificial Sequence
  ENSG00000149311_141 (sequence is synthesized)
atctcagcaacagtggttaggtatgttttgaaggttgttgtttgtgaatttttcctcatgaaatgaaacttcaccaaagaaagcactctgtctgtatctgtctatatcccccaagtgacc

SEQ ID NO: 416129 - DNA, 120 bp, Artificial Sequence
  ENSG00000149311_142 (sequence is synthesized)
tgacagtttaacagtactttagtaaaattatatggttatcgaactgacccttaatttttatttattatgtagcttttgaataaagtcatgaataatatatcaggtgcctgatatcagagc

SEQ ID NO: 416130 - DNA, 120 bp, Artificial Sequence
  ENSG00000149311_143 (sequence is synthesized)
cggaattacagttgaaaaataccatctccatcgtcaaggagttgacagtggcagaagaaaacccaagtaaaccagagttcataatgtgctgtgatacagacatatttgggttcagtaggt

SEQ ID NO: 416131 - DNA, 120 bp, Artificial Sequence
  ENSG00000149311_144 (sequence is synthesized)
cagtaggtatacaaaacaatgacacctaaactcaaccatgatttaagtagaaagggagaaaaccaagagagggaagtaccataaaagtgaaagcaggcagggtgcagtggctcacgcctg

SEQ ID NO: 416132 - DNA, 77 bp, Artificial Sequence
  ENSG00000149311_145 (sequence is synthesized)
tggaggttaaggctgcagtgagctgtgatcacactgcactccggcctccatgacagagtgagaccctgtttccattt

SEQ ID NO: 416133 - DNA, 75 bp, Artificial Sequence
  ENSG00000149311_146 (sequence is synthesized)
caaactctgcagtgagccccagtccagcctgagcaacacagcaagatcccgtttaaaaaagaagaagaagaagaa

SEQ ID NO: 416134 - DNA, 120 bp, Artificial Sequence
  ENSG00000149311_147 (sequence is synthesized)
acacagcaagatcccgtttaaaaaagaagaagaagaagaagatgccattatttggaccaggagtctacaaatgttttctgtgaaggaccaaataataaagatttattttctttgtaaaaa

SEQ ID NO: 416135 - DNA, 120 bp, Artificial Sequence
  ENSG00000149311_148 (sequence is synthesized)
gaattcttaacagtaaagttctgtaattgagacagaattcccaaataaagtcaagagtaaaattcagatagaggagcagttatacatcagtgggaaatttggttggcagaaaaattacca

SEQ ID NO: 416136 - DNA, 120 bp, Artificial Sequence
  ENSG00000149311_149 (sequence is synthesized)
ggtcatacaacttaatgatagacctgaagtcttatttaaaatgattctctaaaattgaagaattggattaagggggccttgtttggctgattttcatactttttcctcttagtctacagg

SEQ ID NO: 416137 - DNA, 120 bp, Artificial Sequence
  ENSG00000149311_150 (sequence is synthesized)
ttggctgcatagaagaaaaaggtagagttatttataatcttgtaaatcttggactttgagtcatctattttcttttacagtcatcgaatacttttggaaataaggtaatatatgcctttt

SEQ ID NO: 416138 - DNA, 120 bp, Artificial Sequence
  ENSG00000149311_151 (sequence is synthesized)
taagcagtctttctatcctgttcttcctgtttttttgctttgttttgttttgttttgagacaaagactcactctgtccgcccaggctgggtgcagtcacggctcactgcatcctcaacct

SEQ ID NO: 416139 - DNA, 120 bp, Artificial Sequence
  ENSG00000149311_152 (sequence is synthesized)
cctgggttcagattatccttcctcctcaccctgccgggtagctggggctacaggagcataccaccatgcctgactaattttttgtgttttttgtagaggtggggtttcaccatattgccc

SEQ ID NO: 416140 - DNA, 75 bp, Artificial Sequence
  ENSG00000149311_153 (sequence is synthesized)
ccaacctatcctgttcttttaattgaaagtttatatgcttctaagaggtagataccagaatgttgctttctgaat

SEQ ID NO: 416141 - DNA, 120 bp, Artificial Sequence
  ENSG00000149311_154 (sequence is synthesized)
tgcttctaagaggtagataccagaatgttgctttctgaattttgctttttaagatgtctattatatttacttattagtttttaaaaattgcgctacttgcctgggaaacatagcagacct

SEQ ID NO: 416142 - DNA, 81 bp, Artificial Sequence
  ENSG00000149311_155 (sequence is synthesized)
ttaaaaattgcgctacttgcctgggaaacatagcagacctcgtttctactaaaaattttttaaaaaagaaaattagggcaa

SEQ ID NO: 416143 - DNA, 120 bp, Artificial Sequence
  ENSG00000149311_156 (sequence is synthesized)
ccagcctgggcaacatgatgtgaaaacccatctctacaaaaattttttaaaaaataagccagggattgtggcatgcacctgtagtctcacctactccagaggctgaggtgggaggatggc

SEQ ID NO: 416144 - DNA, 88 bp, Artificial Sequence
  ENSG00000149311_157 (sequence is synthesized)
gtagtctcacctactccagaggctgaggtgggaggatggcttgcgctcaggaggcagaggttacaggttacagtgagcaaagattgtg

SEQ ID NO: 416145 - DNA, 120 bp, Artificial Sequence
  ENSG00000149311_158 (sequence is synthesized)
atttgctgtgtttcaggcactgtaagcatgtatatgggtccttaaagggactcatagagaggcatacatcacaatttggaattatgcattggtttatcaatttacttgtttattgtcacc

SEQ ID NO: 416146 - DNA, 120 bp, Artificial Sequence
  ENSG00000149311_159 (sequence is synthesized)
cttctagctttagtgttgaatgattcttgtgcttctgtttgtgattttgctaaggtgttgacttatctgcacaatttgtttaagacattttattttctctgttgtcacatattgctaatc

SEQ ID NO: 416147 - DNA, 120 bp, Artificial Sequence
  ENSG00000149311_160 (sequence is synthesized)
actttcaaaagaatctgttgtattaaggaagttcagattcattccctacatattttttgagctactcatgacttaaaaccttttttaaactttatagaagttttctagtcagataattta

SEQ ID NO: 416148 - DNA, 120 bp, Artificial Sequence
  ENSG00000149311_161 (sequence is synthesized)
agaaacacggaaactaggaagaggaaattaactatctgtacttataaggtaactatttgtacttctgttagttcaccaaaaacatataaaagatgccatttggttgggtgaagtggctca

SEQ ID NO: 416149 - DNA, 62 bp, Artificial Sequence
  ENSG00000149311_162 (sequence is synthesized)
aacatataaaagatgccatttggttgggtgaagtggctcatgcccatattcatacagcaaca

SEQ ID NO: 416150 - DNA, 120 bp, Artificial Sequence
  ENSG00000149311_163 (sequence is synthesized)
cttccgagtgcagtgaggcatacatcacaatttggaattatgcattggtttatcaatttacttgtttattgtcaccctgctgcccagatatgacttcatgagggttctgtgggtagatgt

SEQ ID NO: 416151 - DNA, 120 bp, Artificial Sequence
  ENSG00000149311_164 (sequence is synthesized)
tatttctacctgtttctttttgaaagaatattttgcaaagtcttgctcttggtttcattgtcacagacttagttcagactctcatcatttagttcagaccctcatttctcatctaactgt

SEQ ID NO: 416152 - DNA, 120 bp, Artificial Sequence
  ENSG00000149311_165 (sequence is synthesized)
ctctgccagatgatttctctaaacccaaatatgatcatgtttttctactgcctaaattttttttttaagagacagagtttttttttttttttaagagtctcactctgtcacctaggctgg

SEQ ID NO: 416153 - DNA, 120 bp, Artificial Sequence
  ENSG00000149311_166 (sequence is synthesized)
acttactatgaccttgaattcctgggtacaaggaattctcctgtctcagccttctgaatagctggaacaacaggcacacaccactacacctagctactttatttattttttttatttttt

SEQ ID NO: 416154 - DNA, 120 bp, Artificial Sequence
  ENSG00000149311_167 (sequence is synthesized)
gtagggacaggggtcccactatgttgcctaggttggtctcgaattcttggcctcaagtgatcctcctgccttagcctcacaaagcattgggattagaggtgtgagccacggcatctagcc

SEQ ID NO: 416155 - DNA, 77 bp, Artificial Sequence
  ENSG00000149311_168 (sequence is synthesized)
tatcttagctcactgcaacctccacctcctgagctcagattctcgtgcctcagccttcctagtagctaggattacag

SEQ ID NO: 416156 - DNA, 62 bp, Artificial Sequence
  ENSG00000149311_169 (sequence is synthesized)
cactatcttagctcactgcaacctccacctcctgagctcagattctcgtgcctcagccttcc

SEQ ID NO: 416157 - DNA, 120 bp, Artificial Sequence
  ENSG00000149311_170 (sequence is synthesized)
aaaagaagccgtggccgcgggaggaggcgagaggagtcgggatctgcgctgcagccaccgccgcggttgatactactttgaccttccgagtgcagtgtctcgctctgtcgcccatgctgg

SEQ ID NO: 416158 - DNA, 120 bp, Artificial Sequence
  ENSG00000149311_171 (sequence is synthesized)
gcttaacagattactgtcgcgtgagttttttttttttttcagatcattttaaggacttaactgttgcataagtttgttctaaatagaataagataaaagttgagtgtaagtacatataat

SEQ ID NO: 416159 - DNA, 120 bp, Artificial Sequence
  ENSG00000149311_172 (sequence is synthesized)
taagataaaagttgagtgtaagtacatataatgatttttatttttattaaaaggtttttttttagggctagtcaagtgaagcagtgggagtttagaaggaacaaagaaatctgtaactgg

SEQ ID NO: 416160 - DNA, 120 bp, Artificial Sequence
  ENSG00000149311_173 (sequence is synthesized)
tcaggccagcctgatttttaatattacaagttcaaatatttggggaaatttatgcaagcatagaatgacagaaatctgaggattgaagggatttatttatttaagagatagggtgtcact

SEQ ID NO: 416161 - DNA, 120 bp, Artificial Sequence
  ENSG00000149311_174 (sequence is synthesized)
cacccaggctggagtgcaatggtgtgatgatagctcactgcaggctgaagcttctctgttcctaagtgatcctcctgtcttggcttcctagtagctaggactacagaagtgcatcaccat

SEQ ID NO: 416162 - DNA, 120 bp, Artificial Sequence
  ENSG00000149311_175 (sequence is synthesized)
ctccctagttattggtattacagatgtgagccaccatgcccagtgaaggaattaaaaattactgtttaaactacccagtcttggatgccctctctacgtccctagcctttaggtagaagt

SEQ ID NO: 416163 - DNA, 120 bp, Artificial Sequence
  ENSG00000149311_176 (sequence is synthesized)
gcctttaggtagaagtgcagtcttcatgattgaatatactttcaaggctttcttttccatctttgaatagcattaacagtattaaaaactggccaggcgcagtggctcattcctgtaatc

SEQ ID NO: 416164 - DNA, 89 bp, Artificial Sequence
  ENSG00000149311_177 (sequence is synthesized)
acgccactacactccatcctgggcgacagagcgagactgtcaaaaaaagaaaagtattaaaaacctgtcttttgttactgcttctccct

SEQ ID NO: 416165 - DNA, 120 bp, Artificial Sequence
  ENSG00000149311_178 (sequence is synthesized)
aaaagtattaaaaacctgtcttttgttactgcttctcccttctgagagtatatcaaaaactcctatttatgtttttagtgtgacatccttagagatgtttgaaagtagccacaatatttc

SEQ ID NO: 416166 - DNA, 120 bp, Artificial Sequence
  ENSG00000149311_179 (sequence is synthesized)
ctaagtcctcatctctaaagttcataatctcactttcttcagctcacgtgacctaggttttatgctactctcctctgaatattcttcactttaattgtctgtcttaaagtgtgggcctct

SEQ ID NO: 416167 - DNA, 120 bp, Artificial Sequence
  ENSG00000149311_180 (sequence is synthesized)
acttacagggaagaggccagaaaaacaaacaaaaaagtgtgggactcattttttttaatacaggctcttgctctgtagcccaggctggagtgcatgcagtggtgcaatcttggctcactg

SEQ ID NO: 416168 - DNA, 120 bp, Artificial Sequence
  ENSG00000149311_181 (sequence is synthesized)
cttccgagtgcagtgaggcatacatcacaatttggaattatgcattggtttatcaatttacttgtttattgtcaccctgctgcccagatatgacttcatgaggtctcgctctgtcgccca

SEQ ID NO: 416169 - DNA, 120 bp, Artificial Sequence
  ENSG00000149311_182 (sequence is synthesized)
tgacatatataagtactcaataaatgtgacttgctccaataatggcaataataataataaacagaggatgatcatttcctacatgggattattaaaatagttgtatggcaaaagcagatg

SEQ ID NO: 416170 - DNA, 120 bp, Artificial Sequence
  ENSG00000149311_183 (sequence is synthesized)
aggaaaaactttttttttcccacccaccaaggaaaaacatttttaacctgcttttttccccgtacatgaagggcagttgggtacagtcatggtaatgcattatattttaagattttgcct

SEQ ID NO: 416171 - DNA, 120 bp, Artificial Sequence
  ENSG00000149311_184 (sequence is synthesized)
aggttaattcttgaagtacagaaaaacagcattatagttttgaaattagaaaatttcagttttatgtatgatctcttacctatgactctactgaaatagaatttctatatgtagaggctg

SEQ ID NO: 416172 - DNA, 120 bp, Artificial Sequence
  ENSG00000149311_185 (sequence is synthesized)
agccaaagaggaagtaggtctccttagggaacataaaattcagacaaacaggtaactaggtttctacaagtgacaattttatgttcaccagttaactgagtgagtgtttttgcatagaaa

SEQ ID NO: 416173 - DNA, 120 bp, Artificial Sequence
  ENSG00000149311_186 (sequence is synthesized)
ccgcgtccgcgcttacccaatacaagccgggctacgtccgagggtaacaacatgatcaaaaccacagcaggaaccacaataaggaacaagactcaggttaaagcaaacacagcgacagct

SEQ ID NO: 416174 - DNA, 120 bp, Artificial Sequence
  ENSG00000149311_187 (sequence is synthesized)
cctgcgccgcatctcctggttccagtggcggcactgaactcgcggcaatttgtcccgcctctttcgcttcacggcagccaatcgcttccgccagagaaagaaaggcgccgaaatgaaacc

SEQ ID NO: 416175 - DNA, 120 bp, Artificial Sequence
  ENSG00000149313_0 (sequence is synthesized)
gcgtccgcgccatcaggcccgagatagcggcgaggtccgctttcagtgtatggttttccctgccaaacggttctgcttggtgccatccatggagggcgtgcgctgggccttttcctgcgg

SEQ ID NO: 416176 - DNA, 120 bp, Artificial Sequence
  ENSG00000149313_1 (sequence is synthesized)
cacttggctgccgagccgagccgaatggctgctggcagtgcgatcgattcagcccgaggagaaggagcgcattggccagttcgtctttgcccgggacgctaaggcagccatggctggtcg

SEQ ID NO: 416177 - DNA, 120 bp, Artificial Sequence
  ENSG00000149313_2 (sequence is synthesized)
tctgatgataaggaaattagttgcagagaaattgaatatcccttggaatcatattcgtttgcaaagaactgcaaaaggaaaaccagttcttgcaaaggactcatcgaatccttacccgaa

SEQ ID NO: 416178 - DNA, 120 bp, Artificial Sequence
  ENSG00000149313_3 (sequence is synthesized)
tttcaactttaacatctctcatcaaggagactatgcagtgcttgctgctgaacctgagctgcaagttggaattgatataatgaagactagttttccaggtcgtggttcaattccagaatt

SEQ ID NO: 416179 - DNA, 120 bp, Artificial Sequence
  ENSG00000149313_4 (sequence is synthesized)
ctttcatattatgaaaagaaagtttaccaacaaagaatgggaaacaatcagaagctttaaggatgagtggactcagctggatatgttttataggaattgggcacttaaggaaagcttcat

SEQ ID NO: 416180 - DNA, 120 bp, Artificial Sequence
  ENSG00000149313_5 (sequence is synthesized)
aaaagccattggtgttggactaggatttgaattgcagcggcttgaatttgatctatctccattaaacttggatataggccaagtttataaagaaacacgtttattcctggatggagagga

SEQ ID NO: 416181 - DNA, 120 bp, Artificial Sequence
  ENSG00000149313_6 (sequence is synthesized)
agaaaaagaatgggcatttgaggaaagcaaaatagatgagcaccattttgttgcagttgctcttaggaaacccgatggatctagacatcaggatgttccatctcaggatgattccaaacc

SEQ ID NO: 416182 - DNA, 120 bp, Artificial Sequence
  ENSG00000149313_7 (sequence is synthesized)
aacccagaggcaatttactattctcaactttaatgatttaatgtcatctgccgttcccatgacacctgaagatccttcattttgggactgtttttgcttcacagaagaaattccaatacg

SEQ ID NO: 416183 - DNA, 120 bp, Artificial Sequence
  ENSG00000149313_8 (sequence is synthesized)
aaatggtacaaagtcatgatgattccctgagtaacaaagggaaatgaaaactgtttgtgatcttccgtattcactgaaaaataaatgcttgtttagtatcaaattttatttcacgaaagt

SEQ ID NO: 416184 - DNA, 120 bp, Artificial Sequence
  ENSG00000149313_9 (sequence is synthesized)
ttttttaaagaacagaaacttttccaattaaaaaaaaaaagcagacttctggttcaagatagctcactggaatacatgtttacctctttctttcctaaattgcattgaattgataggaag

SEQ ID NO: 416185 - DNA, 120 bp, Artificial Sequence
  ENSG00000149313_10 (sequence is synthesized)
gatggcggaatcttaaagtgatacatgctaactgtagaaaaaaatagaaaatgcacataagcaaaaggaaacatttaaatgctatctttcaaagataactactcttaaaaccttgagtat

SEQ ID NO: 416186 - DNA, 120 bp, Artificial Sequence
  ENSG00000149313_11 (sequence is synthesized)
gacctttttcttggcaaatgaatccatattgacatatttgatttttttaaaaacatggaaacgtactgttttgtaaattctttttaactgcacatctactgttcataaatatacctctgt

SEQ ID NO: 416187 - DNA, 120 bp, Artificial Sequence
  ENSG00000149313_12 (sequence is synthesized)
aacataactttttgtggttctaatgtactctgttgtatagctaatacaagttaggatgcttttggccagaggtaacagtgtccaaatataattggcctaagtaacctaggaaattgtttg

SEQ ID NO: 416188 - DNA, 120 bp, Artificial Sequence
  ENSG00000149313_13 (sequence is synthesized)
acataacacagggttcaggggtgtcattaaagacacactttttttgccttgacctcagttggtttgttttgccttaggctattccacctctcgatcacaagagctgctgctataacttcc

SEQ ID NO: 416189 - DNA, 120 bp, Artificial Sequence
  ENSG00000149313_14 (sequence is synthesized)
agttttacatctttgtaaaattgtatctcaaaggcagaaaaggccatttcgtctctcatttgttttatccatgaggaagatttttaacaaaagcctccagaagatttcccctcagtttcc

SEQ ID NO: 416190 - DNA, 120 bp, Artificial Sequence
  ENSG00000149313_15 (sequence is synthesized)
attgacttagatcaggttacagagaaaggcaatgtctgacatttttggtctctgttagaagtagactctgttgaaaagaaagaagctaagctaggtgtgaagaatggaattggaagccca

SEQ ID NO: 416191 - DNA, 120 bp, Artificial Sequence
  ENSG00000149313_16 (sequence is synthesized)
ctgccttcccataagaaaggtttaccataatttactcacttttttctgtgttagacattttgattatctgcagtttattactacaagcagtggcagagtgaatgtccttgtacattttga

SEQ ID NO: 416192 - DNA, 120 bp, Artificial Sequence
  ENSG00000149313_17 (sequence is synthesized)
gttacatgcttaattatgtccttgagaaagtttctaaaagtggaatgattggtttgactggttcatagggctttaattatacaatttacccctctaattagtactatatgtatgtgactt

SEQ ID NO: 416193 - DNA, 120 bp, Artificial Sequence
  ENSG00000149313_18 (sequence is synthesized)
ccctccccctgccagaatactccttggtcaattgtaggtattctttttggtttaatttttgccaatgtaattaaaaaatggtatgtcatttttaaaatttgtatttctttcattacaaat

SEQ ID NO: 416194 - DNA, 120 bp, Artificial Sequence
  ENSG00000149313_19 (sequence is synthesized)
aagattgttatgtcagtattgttattggcttttcgtattcctcttaacgtgaaccgtctgttcattgtttttacctgttttcgttttagcaagtagtacttaatttaaagtgtgaactta

SEQ ID NO: 416195 - DNA, 120 bp, Artificial Sequence
  ENSG00000149313_20 (sequence is synthesized)
atatataagatgccaggaccatcatattgatgacaaaaatctattatgtggttgtagtgcatgtcttggagttaaactcttaagtatcaagaagtaaaataatttcattgtttctgttac

SEQ ID NO: 416196 - DNA, 120 bp, Artificial Sequence
  ENSG00000149313_21 (sequence is synthesized)
taacattaaaagtgtgcaaattgtataaaattaggtacttcgattagtaaaagaaaaaaatttgaatgttttttttttttattttattaagcatgcccagttatgccaagcatagtaaat

SEQ ID NO: 416197 - DNA, 120 bp, Artificial Sequence
  ENSG00000149313_22 (sequence is synthesized)
aaaggtcaagtagcatttataatagaggaagtattgttatccctagcatgagtgtaatggtgatatgaaaaactttgtcttgtcattataataataaaaaaatgaacatttattatggaa

SEQ ID NO: 416198 - DNA, 120 bp, Artificial Sequence
  ENSG00000149313_23 (sequence is synthesized)
gggcatttgaggtaagaaatttgttagaattgttaaaactaagaatttctattttttatgcatgtatgtgtgattaatttgggtaagctagtcactgaatttggacgcaactgaatccag

SEQ ID NO: 416199 - DNA, 120 bp, Artificial Sequence
  ENSG00000149313_24 (sequence is synthesized)
tcctgctgctctgaaagtgaaatcagggctactatgagagcatgtaacatttatactaatacttgaaagaagttgaaagatgagtcattgtgagttcagtacgggaaaggaaaagaggct

SEQ ID NO: 416200 - DNA, 120 bp, Artificial Sequence
  ENSG00000149313_25 (sequence is synthesized)
ctgacaaggagctttgcatgtatgaacagccaaacgcagccactttggctgggccataatgagggtatttaagagagattccagatcaggctggtagatcctacaaggtattgatcaagt

SEQ ID NO: 416201 - DNA, 120 bp, Artificial Sequence
  ENSG00000149313_26 (sequence is synthesized)
taaatattttggtttcttactgtattttgtttctgtcactggcagttcctggttgctagtgagagaagccaacacacacagccaaaaaaccccccaaaacagtattataggttactagag

SEQ ID NO: 416202 - DNA, 120 bp, Artificial Sequence
  ENSG00000149313_27 (sequence is synthesized)
tgattcagtaactgtccccagtattagctagaattaggggatgaaatatttagagctctttttgtctcctagttttgcctttctctacattttggcttcagttttctcccacccatgttt

SEQ ID NO: 416203 - DNA, 120 bp, Artificial Sequence
  ENSG00000149313_28 (sequence is synthesized)
ctcattctgtacaccagctttctcagcctctctggtctgcatgacagaaaacatggctcttgcatgtaacatactgttgcatgtaacagtttataaacaatttacagtttaaaaacctaa

SEQ ID NO: 416204 - DNA, 120 bp, Artificial Sequence
  ENSG00000149313_29 (sequence is synthesized)
acaaactggtaaactcactttctgttccaagcccaaaaatcctagagaagggatgccctggcctagcttgggctagttgtttatctccagaccagtcattatactgtgattggtcctgct

SEQ ID NO: 416205 - DNA, 120 bp, Artificial Sequence
  ENSG00000149313_30 (sequence is synthesized)
tgtgtccagcaaacgggctatagagcagttctctgacttacaagatcatctgttgagatactgaatactagaaaataaatgagatgttaagtttgagataccaaacatctaagtgaagat

SEQ ID NO: 416206 - DNA, 120 bp, Artificial Sequence
  ENSG00000149313_31 (sequence is synthesized)
gtcagataggtgaatggaatggagggctgggctagaggaaaaaaattataatcataatggttataagtataaccattatgtcaatggtagttgaaaccatggatttgaagttgaaactgt

SEQ ID NO: 416207 - DNA, 120 bp, Artificial Sequence
  ENSG00000149313_32 (sequence is synthesized)
gagattacctaaggaacagctatatattgaatctatgaagagagaagtggaaattgaaaccacaagaagttagaagtaaggcctagaatagagccctgagaatatatatggtccccagtt

SEQ ID NO: 416208 - DNA, 120 bp, Artificial Sequence
  ENSG00000149313_33 (sequence is synthesized)
tatgatggtttaactttttttgactttatgacagtatgaaagtgataatgcattcagtagaattcatatttgcagaacccacgcaaccattccttttttcattttcaatacaatattcaa

SEQ ID NO: 416209 - DNA, 120 bp, Artificial Sequence
  ENSG00000149313_34 (sequence is synthesized)
taaattacatgagctattcagcattttattataaatgaggctttgtgttagatgatttcgcccactgtaggctgatataagtattctgagcacatttaaggtaggctatgctatgctatg

SEQ ID NO: 416210 - DNA, 120 bp, Artificial Sequence
  ENSG00000149313_35 (sequence is synthesized)
atgtttggtaggttaggtgtattaagtgcattttccatgtaaccatattttcttacagtgagtttattgggatataacatcatcgtgagtcgtggagcatctatactaatattcaaaggt

SEQ ID NO: 416211 - DNA, 120 bp, Artificial Sequence
  ENSG00000149313_36 (sequence is synthesized)
gaatttgtggaggggactgataaagaatgaccaaaatggtataagagagtagtgttggtatccaaggacagaaagcattttgaagaagagagctgggtcaataactgctaaggactagat

SEQ ID NO: 416212 - DNA, 120 bp, Artificial Sequence
  ENSG00000149313_37 (sequence is synthesized)
gtggtggttcatgcttgttatcccaacactttgggaggccaagacactgcctctacaaaaaatttaaaaaatgaaagtttcaaaacagtatatccattagttaacattctttagtgtcca

SEQ ID NO: 416213 - DNA, 120 bp, Artificial Sequence
  ENSG00000149313_38 (sequence is synthesized)
tccaactatcaattgttagtgtacatacacctctcattatacattaagcatgattcttatttattgaaatattcaatacatataagaactatatcttatatgctaaatttctgaaaaatt

SEQ ID NO: 416214 - DNA, 120 bp, Artificial Sequence
  ENSG00000149313_39 (sequence is synthesized)
tagatatttttaaatttgtacattccagttacttttttcttgtttgtttaaagagaaaacagaacagggctacatagcagacttactttgcgataactttgacatagtaaatcttctgat

SEQ ID NO: 416215 - DNA, 120 bp, Artificial Sequence
  ENSG00000149313_40 (sequence is synthesized)
acttagtcttatatttttcctctttaaacatatcttaaatttatccttactgaatttcactttatgctgacttgggtacctgaaggtatgaagataggaagaagaagataaaaaatgaaa

SEQ ID NO: 416216 - DNA, 120 bp, Artificial Sequence
  ENSG00000149313_41 (sequence is synthesized)
aagctccctaagtactatttctaattgtagtttcttctgacgttttatggaagaatgctttagtaaagtggtttttcagtgaaaagtttgttcagcttttaagtgtttacaattttttct

SEQ ID NO: 416217 - DNA, 120 bp, Artificial Sequence
  ENSG00000149313_42 (sequence is synthesized)
ggtaactgcttcaatatatattacattttaaagtccccttcccctttgtctcatatgtagaggaaagtagaaaattgcatattggttatgttttacctataaatttccaccatgattttt

SEQ ID NO: 416218 - DNA, 120 bp, Artificial Sequence
  ENSG00000149313_43 (sequence is synthesized)
catacgtgatagtatgtagtttactaaatgcttacataccaatgttgcaacttgattttttttttttaaccttgtactttattatacatactaacatcaccagtgaaggacagatagctg

SEQ ID NO: 416219 - DNA, 120 bp, Artificial Sequence
  ENSG00000149313_44 (sequence is synthesized)
ttattaataaaaagcagatttagggaatttgtactttaaaacgttaatgtcataaaaaacaaaagaaaggctaacaagacatgacaactgaatgcaatacttgtccctacttgcccatta

SEQ ID NO: 416220 - DNA, 120 bp, Artificial Sequence
  ENSG00000149313_45 (sequence is synthesized)
ctgggctcctgttctggaggagggatatgccacaaaggatgctattggattaattcacagaatttggaatacagctaataaagtattgtttcaatgttaaacttactgacgttattaact

SEQ ID NO: 416221 - DNA, 120 bp, Artificial Sequence
  ENSG00000149313_46 (sequence is synthesized)
gctgtggttatgtaagagaatgtgcctactaggaaatacatgttgaagtatttaagagtaaagggccagcacatatgtaacttctaaagtagtttagcggaggtggggaaatatatatat

SEQ ID NO: 416222 - DNA, 120 bp, Artificial Sequence
  ENSG00000149313_47 (sequence is synthesized)
gcacgcgtgtgagtgtacgtatatgtatatatatatagagagagagagaatgagatttagaaaatgtaaacaaagttacatctaggtttacatattttataatctatatttatttacctt

SEQ ID NO: 416223 - DNA, 80 bp, Artificial Sequence
  ENSG00000149328_0 (sequence is synthesized)
ccgcccccgcttgcgcgaggcctagggctgcaggcgcggagccgcgagccccagccaatgagcgccggcgggccggttgc

SEQ ID NO: 416224 - DNA, 120 bp, Artificial Sequence
  ENSG00000149328_1 (sequence is synthesized)
aggctcccgcgcgcggctgagtgcggactggagtgggaacccgggtccccgcgcttagagaacacgcgatgaccacgtggagcctccggcggaggccggcccgcacgctgggactcctgc

SEQ ID NO: 416225 - DNA, 120 bp, Artificial Sequence
  ENSG00000149328_2 (sequence is synthesized)
tgctggtcgtcttgggcttcctggtgctccgcaggctggactggagcaccctggtccctctgcggctccgccatcgacagctggggctgcaggccaagggctggaacttcatgctggagg

SEQ ID NO: 416226 - DNA, 120 bp, Artificial Sequence
  ENSG00000149328_3 (sequence is synthesized)
attccaccttctggatcttcgggggctccatccactatttccgtgtgcccagggagtactggagggaccgcctgctgaagatgaaggcctgtggcttgaacaccctcaccacctatgttc

SEQ ID NO: 416227 - DNA, 120 bp, Artificial Sequence
  ENSG00000149328_4 (sequence is synthesized)
cgtggaacctgcatgagccagaaagaggcaaatttgacttctctgggaacctggacctggaggccttcgtcctgatggccgcagagatcgggctgtgggtgattctgcgtccaggcccct

SEQ ID NO: 416228 - DNA, 120 bp, Artificial Sequence
  ENSG00000149328_5 (sequence is synthesized)
acatctgcagtgagatggacctcgggggcttgcccagctggctactccaagaccctggcatgaggctgaggacaacttacaagggcttcaccgaagcagtggacctttattttgaccacc

SEQ ID NO: 416229 - DNA, 120 bp, Artificial Sequence
  ENSG00000149328_6 (sequence is synthesized)
tgatgtccagggtggtgccactccagtacaagcgtgggggacctatcattgccgtgcaggtggagaatgaatatggttcctataataaagaccccgcatacatgccctacgtcaagaagg

SEQ ID NO: 416230 - DNA, 120 bp, Artificial Sequence
  ENSG00000149328_7 (sequence is synthesized)
cactggaggaccgtggcattgtggaactgctcctgacttcagacaacaaggatgggctgagcaaggggattgtccagggagtcttggccaccatcaacttgcagtcaacacacgagctgc

SEQ ID NO: 416231 - DNA, 120 bp, Artificial Sequence
  ENSG00000149328_8 (sequence is synthesized)
agctactgaccacctttctcttcaacgtccaggggactcagcccaagatggtgatggagtactggacggggtggtttgactcgtggggaggccctcacaatatcttggattcttctgagg

SEQ ID NO: 416232 - DNA, 120 bp, Artificial Sequence
  ENSG00000149328_9 (sequence is synthesized)
ttttgaaaaccgtgtctgccattgtggacgccggctcctccatcaacctctacatgttccacggaggcaccaactttggcttcatgaatggagccatgcacttccatgactacaagtcag

SEQ ID NO: 416233 - DNA, 120 bp, Artificial Sequence
  ENSG00000149328_10 (sequence is synthesized)
atgtcaccagctatgactatgatgctgtgctgacagaagccggcgattacacggccaagtacatgaagcttcgagacttcttcggctccatctcaggcatccctctccctcccccacctg

SEQ ID NO: 416234 - DNA, 120 bp, Artificial Sequence
  ENSG00000149328_11 (sequence is synthesized)
accttcttcccaagatgccgtatgagcccttaacgccagtcttgtacctgtctctgtgggacgccctcaagtacctgggggagccaatcaagtctgaaaagcccatcaacatggagaacc

SEQ ID NO: 416235 - DNA, 120 bp, Artificial Sequence
  ENSG00000149328_12 (sequence is synthesized)
tgccagtcaatgggggaaatggacagtccttcgggtacattctctatgagaccagcatcacctcgtctggcatcctcagtggccacgtgcatgatcgggggcaggtgtttgtgaacacag

SEQ ID NO: 416236 - DNA, 120 bp, Artificial Sequence
  ENSG00000149328_13 (sequence is synthesized)
aagattgctgtccccctgatccagggttacaccgtgctgaggatcttggtggagaatcgtgggcgagtcaactatggggagaatattgatgaccagcgcaaaggcttaattggaaatctc

SEQ ID NO: 416237 - DNA, 120 bp, Artificial Sequence
  ENSG00000149328_14 (sequence is synthesized)
tatctgaatgattcacccctgaaaaacttcagaatctatagcctggatatgaagaagagcttctttcagaggttcggcctggacaaatggagttccctcccagaaacacccacattacct

SEQ ID NO: 416238 - DNA, 120 bp, Artificial Sequence
  ENSG00000149328_15 (sequence is synthesized)
gctttcttcttgggtagcttgtccatcagctccaccccttgtgacacctttctgaagctggagggctgggagaagggggttgtattcatcaatggccagaaccttggacgttactggaac

SEQ ID NO: 416239 - DNA, 120 bp, Artificial Sequence
  ENSG00000149328_16 (sequence is synthesized)
attggaccccagaagacgctttacctcccaggtccctggttgagcagcggaatcaaccaggtcatcgtttttgaggagacgatggcgggccctgcattacagttcacggaaaccccccac

SEQ ID NO: 416240 - DNA, 120 bp, Artificial Sequence
  ENSG00000149328_17 (sequence is synthesized)
ctgggcaggaaccagtacattaagtgagcggtggcaccccctcctgctggtgccagtgggagactgccgcctcctcttgacctgaagcctggtggctgctgccccacccctcactgcaaa

SEQ ID NO: 416241 - DNA, 120 bp, Artificial Sequence
  ENSG00000149328_18 (sequence is synthesized)
agcatctccttaagtagcaacctcagggactgggggctacagtctgcccctgtctcagctcaaaaccctaagcctgcagggaaaggtgggatggctctgggcctggctttgttgatgatg

SEQ ID NO: 416242 - DNA, 120 bp, Artificial Sequence
  ENSG00000149328_19 (sequence is synthesized)
gctttcctacagccctgctcttgtgccgaggctgtcgggctgtctctagggtgggagcagctaatcagatcgcccagcctttggccctcagaaaaagtgctgaaacgtgcccttgcactg

SEQ ID NO: 416243 - DNA, 120 bp, Artificial Sequence
  ENSG00000149328_20 (sequence is synthesized)
gacgtcacagccctgcgagcatctgctggactcaggcgtgctctttgctggttcctgggaggcttggccacatccctcatggccccattttatccccgaaatcctgggtgtgtcaccagt

SEQ ID NO: 416244 - DNA, 120 bp, Artificial Sequence
  ENSG00000149328_21 (sequence is synthesized)
gtagagggtggggaaggggtgtctcacctgagctgactttgttcttccttcacaaccttctgagccttctttgggattctggaaggaactcggcgtgagaaacatgtgacttcccctttc

SEQ ID NO: 416245 - DNA, 120 bp, Artificial Sequence
  ENSG00000149328_22 (sequence is synthesized)
ccttcccactcgctgcttcccacagggtgacaggctgggctggagaaacagaaatcctcaccctgcgtcttcccaagttagcaggtgtctctggtgttcagtgaggaggacatgtgagtc

SEQ ID NO: 416246 - DNA, 120 bp, Artificial Sequence
  ENSG00000149328_23 (sequence is synthesized)
ctggcagaagccatggcccatgtctgcacatccagggaggaggacagaaggcccagctcacatgtgagtcctggcagaagccatggcccatgtctgcacatccagggaggaggacagaag

SEQ ID NO: 416247 - DNA, 120 bp, Artificial Sequence
  ENSG00000149328_24 (sequence is synthesized)
gcccagctcacatgtgagtcctggcagaagccatggcccatgtctgcacatccagggaggaggacagaaggcccagctcagtggcccccgccccccaccccccacgcccgaacagcaggg

SEQ ID NO: 416248 - DNA, 120 bp, Artificial Sequence
  ENSG00000149328_25 (sequence is synthesized)
gcagagcagccctccttcgaagtgtgtccaagtccgcatttgagccttgttctggggcccagcccaacacctggcttgggctcactgtcctgagttgcagtaaagctataaccttgaatc

SEQ ID NO: 416249 - DNA, 120 bp, Artificial Sequence
  ENSG00000149328_26 (sequence is synthesized)
aagcagtggggagctgtggcactcagactcccccttctcaccccgcccatgtggcacctggccatgcatgagaggggcatgtgggcacacctgcggagggggcgtccgggcgtgagtgag

SEQ ID NO: 416250 - DNA, 120 bp, Artificial Sequence
  ENSG00000149328_27 (sequence is synthesized)
aaggctaacctgtcaggtggggttagaatgtgggggtgtcggtctggaggaaactgctctctcctcaccccttgtttgacccacagaaatgggataatttcctgaccctgtttaggactt

SEQ ID NO: 416251 - DNA, 120 bp, Artificial Sequence
  ENSG00000149328_28 (sequence is synthesized)
ccagaccagggcaagaggagcctcagagccttttgttagaaaatatgtgtcttctcagaacctgaagtgagaaggaagagccctgactccagctttggaaccaatccacgctgctgtgtt

SEQ ID NO: 416252 - DNA, 120 bp, Artificial Sequence
  ENSG00000149328_29 (sequence is synthesized)
cctctggggagtttgggatcatagcaacagggtggagggagaattcaactcttgctcacctgctgctctgggctgtgcgccactgatgccaaggcgttagccacgttggcaaggatgggg

SEQ ID NO: 416253 - DNA, 120 bp, Artificial Sequence
  ENSG00000149328_30 (sequence is synthesized)
actgcctcctgctcagcccctcgcagtctctgtcaggcttgttttttggggtgacgctagaaggttgtgtctcctccttccacagcctcagtgattcctaacccttttgacttcactttt

SEQ ID NO: 416254 - DNA, 120 bp, Artificial Sequence
  ENSG00000149328_31 (sequence is synthesized)
tgaaatgggatcacagagcaagttgttgaaaactaggcctggagtcctgtgaaaagcttttctcactgctggcagccaggccctgtagctgtggagctggaaatgaacttccaccaggct

SEQ ID NO: 416255 - DNA, 120 bp, Artificial Sequence
  ENSG00000149328_32 (sequence is synthesized)
gcacccctggcctgcattgctgcagtagcattttcactgttgactccataatgtgttctcagcatatcagcctccgtgtgcctctgaaaatgtcgtccagattaccctatcctgctgaac

SEQ ID NO: 416256 - DNA, 120 bp, Artificial Sequence
  ENSG00000149328_33 (sequence is synthesized)
gccaggcatctctgtcacactcagagtgaagcgcaggttctgggaatgacctcgaaaggcctctccacttggcctccaggacctagctgagctcacctcctgctccttccctttgctcac

SEQ ID NO: 416257 - DNA, 120 bp, Artificial Sequence
  ENSG00000149328_34 (sequence is synthesized)
accgtttcaccctctttactgttcctccaacatccagatccccagcctggggggctttgctcttcttccagagagctacatggctgttctccgaagttagcgaggctttctgtagcacca

SEQ ID NO: 416258 - DNA, 120 bp, Artificial Sequence
  ENSG00000149328_35 (sequence is synthesized)
cacttgaaattgaacttcttccttcgtggggctcactcaatccttctccctgctttcttttcgccctctcaccttccagaccgagctgctggaagatctctctatatccctgcagcagcg

SEQ ID NO: 416259 - DNA, 120 bp, Artificial Sequence
  ENSG00000149328_36 (sequence is synthesized)
cctagctggcacccagggagtgaaggtccatgaatggcgaggaaaaggcttttgtccccaggcagagtcagtcaaggacccagacctcgtgtctccggcatggggaggaccagcagtgat

SEQ ID NO: 416260 - DNA, 120 bp, Artificial Sequence
  ENSG00000149328_37 (sequence is synthesized)
ccccacggcttccacgcggtggcgccgtctccccacggctgcttccaaggcctgctccgggctccgcagggctgtggctgtgttgggagactcctggtgctggagcacgttttagcgctt

SEQ ID NO: 416261 - DNA, 120 bp, Artificial Sequence
  ENSG00000149328_38 (sequence is synthesized)
ggcggcctcccggtttcaggccttgcaaggaagcccgggagccgccactgcttttccctgtggccctcccacctccaggcacccacctgcgtgcccctgttgccacctgctgcccggaat

SEQ ID NO: 416262 - DNA, 120 bp, Artificial Sequence
  ENSG00000149328_39 (sequence is synthesized)
aacttcttttttttttttttaattaaaaaaattaaatggtctaaaagtgaaataatcgaaaatgttggtagagaaatacagtgttgcctactcttcgttacattctccagaaatgaccat

SEQ ID NO: 416263 - DNA, 120 bp, Artificial Sequence
  ENSG00000149328_40 (sequence is synthesized)
tttcaactctttgactttttctttggatattttccttcttatttccaaatactgtgaacatacagccctgcatcgtttgctttaaaagttctgcctattggccgggcagtggctcaggcc

SEQ ID NO: 416264 - DNA, 68 bp, Artificial Sequence
  ENSG00000149328_41 (sequence is synthesized)
tttaaaagttctgcctattggccgggcagtggctcaggcctgtcatcccagcgctcccaacatggcga

SEQ ID NO: 416265 - DNA, 120 bp, Artificial Sequence
  ENSG00000149328_42 (sequence is synthesized)
tagcctgggtgacaagagcaaaactccgttaaaaaaaaaaattctgcctattgacttcttgttccagtaggtgatgagtgttctttcctgccagcatggctgttcagccctgataggcgc

SEQ ID NO: 416266 - DNA, 120 bp, Artificial Sequence
  ENSG00000149328_43 (sequence is synthesized)
ttctttcctgccagcatggctgttcagccctgataggcgccagcgtgggcctcgcggatgtgtatgacaacggttcactgcaggcacctgccacgtgggtgatgccctgcacagtatctg

SEQ ID NO: 416267 - DNA, 120 bp, Artificial Sequence
  ENSG00000149328_44 (sequence is synthesized)
tttctcttcaacgtccaggaggccacatgtggcaggagaactggtgtgcaggcgaatttggccctcacctatgccccacctccaaagacctctaaggcagtgggggactcagcccaagat

SEQ ID NO: 416268 - DNA, 77 bp, Artificial Sequence
  ENSG00000149328_45 (sequence is synthesized)
aatttagcccttcctttttaaaaaaaatctagctaaatgtgggtggtttcaggcttaattggaaatctctatctgaa

SEQ ID NO: 416269 - DNA, 120 bp, Artificial Sequence
  ENSG00000149328_46 (sequence is synthesized)
gcaaatcctcctgtaaggtggagaagccccttggatcacacttccacgcagacctgagcaggacacactgtggtttcctaagcccccgccccgtcagttgagcccgatggccttcctgct

SEQ ID NO: 416270 - DNA, 120 bp, Artificial Sequence
  ENSG00000149328_47 (sequence is synthesized)
gatctgtaagcaggctgagcaacgcttgttccgcctggtggagagttcgttcttcttgggcccggggagctgcatgtcagggtgttgctgcttcgctcaagggtcacttatcacggaggc

SEQ ID NO: 416271 - DNA, 120 bp, Artificial Sequence
  ENSG00000149328_48 (sequence is synthesized)
ctctgtggtcaccctacagagcactgaccctctccactgctacctctgtctccccgactcaccctcatcctccatacaacagattgcatctgaaataatatgcattcgttattgcctgtc

SEQ ID NO: 416272 - DNA, 120 bp, Artificial Sequence
  ENSG00000149328_49 (sequence is synthesized)
ggaagctgcggcccgccctgctcagcggcctatgggaattctgaatgcctgtcagcgtgctcagcttccccagcgcagggagctggactcagggctgatggcctctggccccccgcccat

SEQ ID NO: 416273 - DNA, 120 bp, Artificial Sequence
  ENSG00000149328_50 (sequence is synthesized)
agtgtggacatcacccactgccctgagagaggggcccttttggtgcactcctagaggactcgacttttgtggcctcaactagctccagacttgctcccagggattgaggggggaaggaaa

SEQ ID NO: 416274 - DNA, 120 bp, Artificial Sequence
  ENSG00000149328_51 (sequence is synthesized)
aacttccctgtcctatactacacaggcatccgaccttaacctgtgaggcccctgcaatcctagaaagattattgtcatcagcaaggcagaaagcctggtccactccaggtgcggagagag

SEQ ID NO: 416275 - DNA, 120 bp, Artificial Sequence
  ENSG00000149328_52 (sequence is synthesized)
ggaggagtttccagatgtccctcaatatctgtcagactgatgggcatttatgccaccctgtagttctgactggcctctttctcgagctcgcgtgcccctccgaagcaggtggatggacag

SEQ ID NO: 416276 - DNA, 120 bp, Artificial Sequence
  ENSG00000149328_53 (sequence is synthesized)
ggccatgctgcagccctctgcagacctgagaggccccagctgtcccctggctcactgaggggcgtggatgctccagactgcccccacgctgcatcgtcacactggtcctgggcctggagt

SEQ ID NO: 416277 - DNA, 120 bp, Artificial Sequence
  ENSG00000149346_0 (sequence is synthesized)
gaaagtgcttcccttaagcttctgaaggttggctgcagttccggctacctgtgtagtccgagtttccacagccaggtactactccgccagtgaccctggacagtaacaaaacatataaag

SEQ ID NO: 416278 - DNA, 120 bp, Artificial Sequence
  ENSG00000149346_1 (sequence is synthesized)
cccgagcccaaaccccgccaccatcataggtctgtagttactgtggaatcaataagccatggcatctaagaaatttgctgttaaatgtgggaattttgctgtcctcgtggatcttcatat

SEQ ID NO: 416279 - DNA, 120 bp, Artificial Sequence
  ENSG00000149346_2 (sequence is synthesized)
cttgccacaaggttcaaacaaagatacaagctggttttctgaacagaagaaagaggaagtctgtttactgttaaaagaaaccattgattcaagagttcaggagtacttggaagttcgcaa

SEQ ID NO: 416280 - DNA, 120 bp, Artificial Sequence
  ENSG00000149346_3 (sequence is synthesized)
acagcacaggccatcaaatgcagaattcacaagatccaatcccttgtccttaaaaggttatggctttcaaatcacagcctatttcctcaagagagggatacgccttcgctgcatcaggag

SEQ ID NO: 416281 - DNA, 120 bp, Artificial Sequence
  ENSG00000149346_4 (sequence is synthesized)
cacacagaatgctgaactctgtgtattccctgacagatttgtggtttgtgtcagtcagcttgcattcagtcgtgatcttttagcaagtcagaatgaagatttgacagaaagagttctcca

SEQ ID NO: 416282 - DNA, 120 bp, Artificial Sequence
  ENSG00000149346_5 (sequence is synthesized)
tggagtgtctgattactttgctgagtgtgcagagagttcacttcctcccagtgcaaagctccggagaaatgctctgaaagaaattgtgaaaagaactgaaacaaaaagcagtgtcacgag

SEQ ID NO: 416283 - DNA, 120 bp, Artificial Sequence
  ENSG00000149346_6 (sequence is synthesized)
caaatcgcagaccagaagagacactgtggaaacatctagtgactcagtgattgcagagatagcaaggaggaggaatgatggtcaggcttcctccagtcccccatcagaatccatgggaca

SEQ ID NO: 416284 - DNA, 120 bp, Artificial Sequence
  ENSG00000149346_7 (sequence is synthesized)
agcaaaggattccataaaggcagctgagagccactgggggcttcctgttcaaaagctggaaaaagttaatcagacccagccagaagacactagtggccagcaaaaacctcatcctgggga

SEQ ID NO: 416285 - DNA, 120 bp, Artificial Sequence
  ENSG00000149346_8 (sequence is synthesized)
gcggttaaagacagggcttctaagcaggagccccgtctgtagctgtgagtcagcatcaccatgtccaaaacaaagtccacgagtggccaaaacccaacagaaacgcaggaactgcagctc

SEQ ID NO: 416286 - DNA, 120 bp, Artificial Sequence
  ENSG00000149346_9 (sequence is synthesized)
tgcggaagacttcgaccaccacgggagagtttctcttggaagtgatcgattagtcccgagagaaataatagtggaaaaaagcaaagctgtcagggttttgccagcttcagagttgtcaga

SEQ ID NO: 416287 - DNA, 120 bp, Artificial Sequence
  ENSG00000149346_10 (sequence is synthesized)
tccagggttacttttgaaacaagatttggcaaaaaccacgtctaaggaagagttgcatgttttggaaagtctctcctccagacatcttatgaaaaataacccagggcaggcacagcaaac

SEQ ID NO: 416288 - DNA, 120 bp, Artificial Sequence
  ENSG00000149346_11 (sequence is synthesized)
cggcttagccacaaacactgaaagattatctacaattcagaacagcccaaccaagaaaagaaagaaatacgaaagaggccattaacaccgaagaggtttgtaccgttggagttgaggaca

SEQ ID NO: 416289 - DNA, 120 bp, Artificial Sequence
  ENSG00000149346_12 (sequence is synthesized)
tagtggccaaacctgtgacaagagagctgcgaatatagatgccgggattttaaaggaattaattagaatgactaatttaaataggaagtgtgttatctgtgttatggctatggtttgttt

SEQ ID NO: 416290 - DNA, 120 bp, Artificial Sequence
  ENSG00000149346_13 (sequence is synthesized)
tcaaagcatttcaaaccgggaggctatatgcttgttctaacagcgttgcttctttatcattgtattttatgactgtcttcagagaattagtaatgacaaagagccatccaccttgtcagg

SEQ ID NO: 416291 - DNA, 120 bp, Artificial Sequence
  ENSG00000149346_14 (sequence is synthesized)
gaggagactgtgcaaggactgcatgaagaaactgatcatgagccccttcttggcacatcactgtgcagaccacacaatggaccgtgcaaagacagtgctgccgtgctgcctttcagctcc

SEQ ID NO: 416292 - DNA, 120 bp, Artificial Sequence
  ENSG00000149346_15 (sequence is synthesized)
aggggtacaatccatccccctgctcctcagcctgagtaggagggcagtgaaagaacaagctagtggttcttagcgcgtggtcctgggaccagcttcgttgtctggaaatgtgctagaaat

SEQ ID NO: 416293 - DNA, 120 bp, Artificial Sequence
  ENSG00000149346_16 (sequence is synthesized)
gtggttattgggccctgccccatgctgagtaactgcctttgggtgattctgaaacatgctcgcgtttgagaaccactggactaatagaacactccccagtgcttcctgcagcctggttgc

SEQ ID NO: 416294 - DNA, 120 bp, Artificial Sequence
  ENSG00000149346_17 (sequence is synthesized)
catggcctccagctcaccagttggggccagatgtgcacatgcatcccctcggactccctcaaactcgtaaaacacttgggtttggtgtatgggtcactctcttccgggttctacagtatg

SEQ ID NO: 416295 - DNA, 120 bp, Artificial Sequence
  ENSG00000149346_18 (sequence is synthesized)
gcagccatggcacccatgaaggtgttactttcccttataattgttgaagtcgatgggcgattctgcccaaccttaggagaagacatcagagaggctcgttgttgcctgtagctcaagcat

SEQ ID NO: 416296 - DNA, 120 bp, Artificial Sequence
  ENSG00000149346_19 (sequence is synthesized)
gtcccagtccctgctcttgcacccacctccaggattttggtttgggacagactataacctaacaggaactcagtgaccaggttccagtttcccagttggaaggcttcgcaggcagttcaa

SEQ ID NO: 416297 - DNA, 120 bp, Artificial Sequence
  ENSG00000149346_20 (sequence is synthesized)
atttcaagatgggagccttccctttacaatgtcacccactgtctccagtgggcttgatgaaatgtcacatagtgaattgtagcaatgacttattttggatggacacccgctaaaagtttc

SEQ ID NO: 416298 - DNA, 120 bp, Artificial Sequence
  ENSG00000149346_21 (sequence is synthesized)
caataaccgaatttcactctaaaagaggaaagaaacaatattcaaggtccattcattcaatacatcttttttttttttctgttcaacatggggtggtcctttgaaatggcacctccccta

SEQ ID NO: 416299 - DNA, 120 bp, Artificial Sequence
  ENSG00000149346_22 (sequence is synthesized)
agtaataaggaaaaccaagtatattccctaaagtgttgaagttagcagaaaaatcacccagaaaagcccaaaacaatgacaagagtacagaaacaggcatagtgtaggttcatgcttgag

SEQ ID NO: 416300 - DNA, 120 bp, Artificial Sequence
  ENSG00000149346_23 (sequence is synthesized)
atggattagtggtttattccatcccgttctatcctttcccgtatctcctgtccccacttgttaagaccagtaagactcatgaagcagcagctatatttcatggcaccattttgggtcatg

SEQ ID NO: 416301 - DNA, 120 bp, Artificial Sequence
  ENSG00000149346_24 (sequence is synthesized)
aaattccatcttggtcaccaagcctgactgtggtggtagatactgttactttaatgttccaaaccctgcctagaaacctgttcctgtcccatgatcccagcctcaccacccccacttgaa

SEQ ID NO: 416302 - DNA, 120 bp, Artificial Sequence
  ENSG00000149346_25 (sequence is synthesized)
agcggaacccagtcaggggattctataggagaagagggagcccaacagaatactaacttcagtggagctgactctgcttatacaataggggtgggctgcacagagtggaaaccgagtacc

SEQ ID NO: 416303 - DNA, 120 bp, Artificial Sequence
  ENSG00000149346_26 (sequence is synthesized)
tggtagaatgtgcatttccatggcccactgtaggcgcctctcttagagcaaacagtattttaggtgtgctctttattgaacacaggaccacagtgtgtcactgaatcttcttaaacagaa

SEQ ID NO: 416304 - DNA, 120 bp, Artificial Sequence
  ENSG00000149346_27 (sequence is synthesized)
gcaattagaacgatttagatatagggagggcacaagtaataagtaacccaggggatagaccaagaagcagctctctggaagagtctggaattaaaaagacggctgtactagaacagtagc

SEQ ID NO: 416305 - DNA, 120 bp, Artificial Sequence
  ENSG00000149346_28 (sequence is synthesized)
cactgcctgctccagaactaggggggagatatttgagctggagccaccagagaacatttctattgagaagtttttatttgtttgttctgttggttttttgttatttctgttttcttctaa

SEQ ID NO: 416306 - DNA, 120 bp, Artificial Sequence
  ENSG00000149346_29 (sequence is synthesized)
tctttctctgaagtatcactctggtattgagaaatttttatttcattagctaacctgggcttggtggttaaggctagtacttgtacttagaatgattctctgtcaggaaaagtcttggct

SEQ ID NO: 416307 - DNA, 120 bp, Artificial Sequence
  ENSG00000149346_30 (sequence is synthesized)
ttagagtttgttatagttggggatataacaattactgtgatcgaagagaaaaaatagcacctttggttgtagatagatgtagttttcctcacagccctcacgtcccttcatgtaaaaggg

SEQ ID NO: 416308 - DNA, 120 bp, Artificial Sequence
  ENSG00000149346_31 (sequence is synthesized)
attttaacaggatttacagagggaatggctctcagttcccacactgtgacatgtgtttgaggaattttgcctttaagcatttttcttgcacatggctgaaacacccctggctctcttgtt

SEQ ID NO: 416309 - DNA, 120 bp, Artificial Sequence
  ENSG00000149346_32 (sequence is synthesized)
atttgagtggttgcatgattctttggatatttggaagtacaaaggggtaaatggatgccaggggttttttgttgttgttgcttattaggtaggatatgaagagttctcactgttgggaat

SEQ ID NO: 416310 - DNA, 63 bp, Artificial Sequence
  ENSG00000149346_33 (sequence is synthesized)
cggcctgttttgacattcttaatgatcttaataatttggcatctgaaagtctgaaacagtgtc

SEQ ID NO: 416311 - DNA, 120 bp, Artificial Sequence
  ENSG00000149346_34 (sequence is synthesized)
gatcttaataatttggcatctgaaagtctgaaacagtgtcagtattgttagtcaaaaagaacaagttcttcaaccacttgcgtagtaccccaaattatattcaagtccctgtgactccaa

SEQ ID NO: 416312 - DNA, 120 bp, Artificial Sequence
  ENSG00000149346_35 (sequence is synthesized)
tgcttggagaagtcattgatatgatttgattaatgttataactttgaatttcctaactttctcagcggcatagattctaagccacttccatgtgctttcagatggcatcttaatagattg

SEQ ID NO: 416313 - DNA, 120 bp, Artificial Sequence
  ENSG00000149346_36 (sequence is synthesized)
gtgttgaggttattttaatgtccataaacaagaaaggtctgggaacaatctgtatgatttttctttcacattttcttatctttgccactggaggttaactgtcgtccagatatgcatatg

SEQ ID NO: 416314 - DNA, 120 bp, Artificial Sequence
  ENSG00000149346_37 (sequence is synthesized)
aattgtgaaatgcaaagaagcaaacatttgggggtaggggagtaagtgctgtagttcttttgttcacttattttaatactatagaagtgtatttcattttataaaaagcaagaatcataa

SEQ ID NO: 416315 - DNA, 120 bp, Artificial Sequence
  ENSG00000149346_38 (sequence is synthesized)
aaaccctctgtattttgatttatgaagaatatagcttctctctgaagtatctcaagatatatcttggggaccacaatgggatcacagtgtaattgtttgctgttggtgtcatgtttggat

SEQ ID NO: 416316 - DNA, 120 bp, Artificial Sequence
  ENSG00000149346_39 (sequence is synthesized)
tttagcatggtttgttatgcatgtcagtggcctctgatttcagaaagagcttggcgagggcagaacacataagggaaggaaacctctgctcaagagagtggcctgggatcacagtgtcgt

SEQ ID NO: 416317 - DNA, 120 bp, Artificial Sequence
  ENSG00000149346_40 (sequence is synthesized)
cattcccaatttccttgaattccttcttggcagaccttactgtaatattacacaaaactgtaatgagtggccctcctttggaggtaacagatgcctttcctaagaactcaaagttctctt

SEQ ID NO: 416318 - DNA, 120 bp, Artificial Sequence
  ENSG00000149346_41 (sequence is synthesized)
ttcagcgtgctgtgacttgaatatggaaatcattttaatttcttcttttctcttatggggaaatttccatgcttggtttgtcaagacaagagaattcattccttattattgaaacattaa

SEQ ID NO: 416319 - DNA, 120 bp, Artificial Sequence
  ENSG00000149346_42 (sequence is synthesized)
tgaactgaaacacgttgaagcaagtaaaaaatcaaaattaggttggtttatcttaaatagttaaaagccttccttagtacaaaataaattaagcattgtaaaacgaagttaattcaggta

SEQ ID NO: 416320 - DNA, 120 bp, Artificial Sequence
  ENSG00000149346_43 (sequence is synthesized)
attactcagtacagaaatctaaccgtatatatcattggtattgcaatttaagggtataattaaattctcagaaatctgcaggactcactctaatttgctttctatatttatttacaagac

SEQ ID NO: 416321 - DNA, 120 bp, Artificial Sequence
  ENSG00000149346_44 (sequence is synthesized)
agggaacaaatatgtgtcaatgtgcagcttaacagaggggacttgaatggataaaattatctttaattatctagagctacccagtactgggcttgaatttaatcatagtcaaatgtttcc

SEQ ID NO: 416322 - DNA, 120 bp, Artificial Sequence
  ENSG00000149346_45 (sequence is synthesized)
tctggcagcataatattaccatacaccatattaccttataattgccattacagttccttatcaaaaatgttaattctttgcttgagcaaaaatcaataaaaccttatgtttgaccctaaa

SEQ ID NO: 416323 - DNA, 120 bp, Artificial Sequence
  ENSG00000149346_46 (sequence is synthesized)
gtatttgatcagggaacagaaggtgtgaattggacagatcccccgaataactttcttcaatcaagttgaaaaaccaaacagctatgtaagtccccaggagagctctttttcccttatctt

SEQ ID NO: 416324 - DNA, 120 bp, Artificial Sequence
  ENSG00000149346_47 (sequence is synthesized)
ctcatttgttttgttataaactgtttaaatagttcaaatggttgtgcatgcctaggggatgaaacctatgtaatagaaatgtactgttttatgaataaggagtaaaattgttttaaaaaa

SEQ ID NO: 416325 - DNA, 120 bp, Artificial Sequence
  ENSG00000149346_48 (sequence is synthesized)
ttacaaaccaccagaacaaggttttgcttcaggatagtgtttgactccactgctgcgaaatgactgtctcctggctagtaggatctagatttctccctccctttgaccccaccttgtgga

SEQ ID NO: 416326 - DNA, 120 bp, Artificial Sequence
  ENSG00000149346_49 (sequence is synthesized)
aacccagctgtctactggcagacattggtgagaaagcggagctacgctagggcagggagatgtcatggaaacctcaactcttcgctgtccgggtccttcaggccacctccccaatgagcc

SEQ ID NO: 416327 - DNA, 120 bp, Artificial Sequence
  ENSG00000149357_0 (sequence is synthesized)
atgtgaccggaagggctcctcacggacgccgtccctcctcggcgcggcctgagcgcccggcccgaccccggccatggggtgctgctacagcagcgagaacgaggactcggaccaggaccg

SEQ ID NO: 416328 - DNA, 120 bp, Artificial Sequence
  ENSG00000149357_1 (sequence is synthesized)
agaggagcggaagctgctgctggaccctagcagcccccctaccaaagctctcaatggagccgagcccaactaccacagcctgccttccgctcgcactgatgagcaggccctgctctcttc

SEQ ID NO: 416329 - DNA, 120 bp, Artificial Sequence
  ENSG00000149357_2 (sequence is synthesized)
catccttgccaagacagccagcaacatcattgatgtgtctgctgcagactcacagggcatggagcagcatgagtacatggaccgtgccaggcagtacagcacccgcttggctgtgctgag

SEQ ID NO: 416330 - DNA, 120 bp, Artificial Sequence
  ENSG00000149357_3 (sequence is synthesized)
cagcagcctgacccattggaagaagctgccaccgctgccgtctcttaccagccagccccaccaagtgctggccagtgagcccatcccgttctctgatttgcagcaggtctccaggatagc

SEQ ID NO: 416331 - DNA, 120 bp, Artificial Sequence
  ENSG00000149357_4 (sequence is synthesized)
ctacagtgcactttctcagatccgtgtggacgcaaaagaggagctggttgtacagtttgggatcccatgaagagaggggtccttggacagctcttctcctctcttcatcccatctctacc

SEQ ID NO: 416332 - DNA, 120 bp, Artificial Sequence
  ENSG00000149357_5 (sequence is synthesized)
ccacccccttggcccccagcctcactgcggcttatacagtaccctaacctgctactaatcacagagaaaaatgtgaagaaggaggagaagaggaaggctagaagcctgagcaagtgaggg

SEQ ID NO: 416333 - DNA, 120 bp, Artificial Sequence
  ENSG00000149357_6 (sequence is synthesized)
tagaaccttttgggactggcctttgaagctctggccagggatggggtgggggccaaaaggacagagcctggtatgtcttcatagtcattgagaatgtggagataccagtttgggtggggg

SEQ ID NO: 416334 - DNA, 120 bp, Artificial Sequence
  ENSG00000149357_7 (sequence is synthesized)
gtgatcaccaggggacctagggagatccccttcccaccctctctgttggcctcagagtcactcctgccccctctccctgacttggtgctcacatgcacctcactagggtttgtgaccagg

SEQ ID NO: 416335 - DNA, 120 bp, Artificial Sequence
  ENSG00000149357_8 (sequence is synthesized)
gtctggatgagcttgaatttgaatgaattgagtttgtatttctagaaccctgggtttttacatgtttggtctttttttgttttggtttgtcaccctcgataaaggaagtatattcatcca

SEQ ID NO: 416336 - DNA, 120 bp, Artificial Sequence
  ENSG00000149357_9 (sequence is synthesized)
tgcttgctgctctgtgcctgaccagaagaaatgaagccaagatacaaataatagaaccctgtcatgagcacagaaagacctgctgagtttctattgattgtggtaaaccagcctgcatcc

SEQ ID NO: 416337 - DNA, 120 bp, Artificial Sequence
  ENSG00000149357_10 (sequence is synthesized)
agttccaagtaacagctgcccacttagtgaatactctctcatgtttcaacactcagttctagtgtagcctcttctataaagcctttcttttccagataaaattggttaatgtgtcctgtg

SEQ ID NO: 416338 - DNA, 120 bp, Artificial Sequence
  ENSG00000149357_11 (sequence is synthesized)
ttaggctgattgttttgatgatccctattcatggtctcccctgtatccatctctttttgcctataacattgtagtcccatctcactctgatgctgggaccagacatgtgacttgttttag

SEQ ID NO: 416339 - DNA, 120 bp, Artificial Sequence
  ENSG00000149357_12 (sequence is synthesized)
ccaatgagatgtcgataaacatgaagcaaacagaagctttaaaggaggcctgccctcttgctctttgccagtgccatgagaacatggctgatcagctggagggttatgagatgtgtaggt

SEQ ID NO: 416340 - DNA, 120 bp, Artificial Sequence
  ENSG00000149357_13 (sequence is synthesized)
gcacctggccagcgtgggtccctcaggctacttgggctcccaccctccatcactgttccagctttggagcctggcccctagtccaagcttctcatttggtgcagccctggagactgacca

SEQ ID NO: 416341 - DNA, 120 bp, Artificial Sequence
  ENSG00000149357_14 (sequence is synthesized)
cagatcacttgggtgcttcagtagttattcatgtcagccctgtttaccctgtgacactcttgagggcgctgaggccaagggagatgggcctagattgagtctgtgatgagctgagacctt

SEQ ID NO: 416342 - DNA, 120 bp, Artificial Sequence
  ENSG00000149357_15 (sequence is synthesized)
gaccgtgccaggcagtacagacatacagggcatcacactgaaaaggagctgtgatctgagggtcaggagtgtgggcctgggtaccagcactgccactgacttgcctctctcagccttagt

SEQ ID NO: 416343 - DNA, 120 bp, Artificial Sequence
  ENSG00000149357_16 (sequence is synthesized)
tgccccttcactgaagacctttccagctttggtgatctacgattctatcacagcaagcaacaggaagacagagcatcatgctaggcacataagaagcttttaaaatactggttaaattga

SEQ ID NO: 416344 - DNA, 120 bp, Artificial Sequence
  ENSG00000149357_17 (sequence is synthesized)
gatcaccacaccaggggaatagtgtccaagtcatgctccagctcctttcccctcttagggatcttggactagaaaaggccaaactttatttcttaaaacttgaatctgagttcacagaaa

SEQ ID NO: 416345 - DNA, 120 bp, Artificial Sequence
  ENSG00000149357_18 (sequence is synthesized)
cctcagaggaggtagggaaggtggagttagggagcctggtagccttgtaggccccagctccctcccacctcgttctcttaactttttatgtctttcctatctccttcctgcaacctttat

SEQ ID NO: 416346 - DNA, 120 bp, Artificial Sequence
  ENSG00000149357_19 (sequence is synthesized)
ttctgtctctcccatccctgtctttctctttgccttcctgttccccttcattccctccttctccatcaccatctaatctcccctccccatttttcctgattgccctcctcacctgtctct

SEQ ID NO: 416347 - DNA, 120 bp, Artificial Sequence
  ENSG00000149380_0 (sequence is synthesized)
gtctgaggggaagttcgcgagcgctggctatgggtcctggggcgcggctggcggcgctgctggcggtgctggcgctcgggacaggagacccagaaagggctgcggctcggggcgacacgt

SEQ ID NO: 416348 - DNA, 120 bp, Artificial Sequence
  ENSG00000149380_1 (sequence is synthesized)
tctcggcgctgaccagcgtggcgcgcgccctggcgcccgagcgccggctgctggggctgctgaggcggtacctgcgcggggaggaggcgcggctgcgggacctgactagattctacgaca

SEQ ID NO: 416349 - DNA, 120 bp, Artificial Sequence
  ENSG00000149380_2 (sequence is synthesized)
aggtactttctttgcatgaggattcaacaacccctgtggctaaccctctgcttgcatttactctcatcaaacgcctgcagtctgactggaggaatgtggtacatagtctggaggccagtg

SEQ ID NO: 416350 - DNA, 120 bp, Artificial Sequence
  ENSG00000149380_3 (sequence is synthesized)
agaacatccgagctctgaaggatggctatgagaaggtggagcaagaccttccagcctttgaggaccttgagggagcagcaagggccctgatgcggctgcaggacgtgtacatgctcaatg

SEQ ID NO: 416351 - DNA, 120 bp, Artificial Sequence
  ENSG00000149380_4 (sequence is synthesized)
tgaaaggcctggcccgaggtgtctttcagagagtcactggctctgccatcactgacctgtacagccccaaacggctcttttctctcacaggggatgactgcttccaagttggcaaggtgg

SEQ ID NO: 416352 - DNA, 120 bp, Artificial Sequence
  ENSG00000149380_5 (sequence is synthesized)
cctatgacatgggggattattaccatgccattccatggctggaggaggctgtcagtctcttccgaggatcttacggagagtggaagacagaggatgaggcaagtctagaagatgccttgg

SEQ ID NO: 416353 - DNA, 120 bp, Artificial Sequence
  ENSG00000149380_6 (sequence is synthesized)
atcacttggcctttgcttatttccgggcaggaaatgtttcgtgtgccctcagcctctctcgggagtttcttctctacagcccagataataagaggatggccaggaatgtcttgaaatatg

SEQ ID NO: 416354 - DNA, 120 bp, Artificial Sequence
  ENSG00000149380_7 (sequence is synthesized)
aaaggctcttggcagagagccccaaccacgtggtagctgaggctgtcatccagaggcccaatataccccacctgcagaccagagacacctacgaggggctatgtcagaccctgggttccc

SEQ ID NO: 416355 - DNA, 120 bp, Artificial Sequence
  ENSG00000149380_8 (sequence is synthesized)
agcccactctctaccagatccctagcctctactgttcctatgagaccaattccaacgcctacctgctgctccagcccatccggaaggaggtcatccacctggagccctacattgctctct

SEQ ID NO: 416356 - DNA, 120 bp, Artificial Sequence
  ENSG00000149380_9 (sequence is synthesized)
ttacaagtggagtaccgcatcagcaaaagtgcctggctgaaggacactgttgacccaaaactggtgaccctcaaccaccgcattgctgccctcacaggccttgatgtccggcctccctat

SEQ ID NO: 416357 - DNA, 120 bp, Artificial Sequence
  ENSG00000149380_10 (sequence is synthesized)
gcagagtatctgcaggtggtgaactatggcatcggaggacactatgagcctcactttgaccatgctacgtcaccaagcagccccctctacagaatgaagtcaggaaaccgagttgcaaca

SEQ ID NO: 416358 - DNA, 120 bp, Artificial Sequence
  ENSG00000149380_11 (sequence is synthesized)
tttatgatctatctgagctcggtggaagctggaggagccacagccttcatctatgccaacctcagcgtgcctgtggttaggaatgcagcactgttttggtggaacctgcacaggagtggt

SEQ ID NO: 416359 - DNA, 120 bp, Artificial Sequence
  ENSG00000149380_12 (sequence is synthesized)
gaaggggacagtgacacacttcatgctggctgtcctgtcctggtgggagataagtgggtggccaacaagtggatacatgagtatggacaggaattccgcagaccctgcagctccagccct

SEQ ID NO: 416360 - DNA, 120 bp, Artificial Sequence
  ENSG00000149380_13 (sequence is synthesized)
gaagactgaactgttggcagagagaagctggtggagtcctgtggctttccagagaagccaggagccaaaagctggggtaggagaggagaaagcagagcagcctcctggaagaaggccttg

SEQ ID NO: 416361 - DNA, 120 bp, Artificial Sequence
  ENSG00000149380_14 (sequence is synthesized)
tcagctttgtctgtgcctcgcaaatcagaggcaagggagaggttgttaccaggggacactgagaatgtacatttgatctgccccagccacggaagtcagagtaggatgcacagtacaaag

SEQ ID NO: 416362 - DNA, 120 bp, Artificial Sequence
  ENSG00000149380_15 (sequence is synthesized)
gaggggggagtggaggcctgagagggaagtttctggagttcagatactctctgttgggaacaggacatctcaacagtctcaggttcgatcagtgggtcttttggcactttgaaccttgac

SEQ ID NO: 416363 - DNA, 120 bp, Artificial Sequence
  ENSG00000149380_16 (sequence is synthesized)
cacagggaccaagaagtggcaatgaggacacctgcaggaggggctagcctgactcccagaactttaagactttctccccactgccttctgctgcagcccaagcagggagtgtccccctcc

SEQ ID NO: 416364 - DNA, 120 bp, Artificial Sequence
  ENSG00000149380_17 (sequence is synthesized)
cagaagcatatcccagatgagtggtacattatataaggattttttttaagttgaaaacaactttcttttctttttgtatgatggttttttaacacagtcattaaaaatgtttataaatca

SEQ ID NO: 416365 - DNA, 120 bp, Artificial Sequence
  ENSG00000149380_18 (sequence is synthesized)
gggagcattagaacaattcagcatctccttctgagatgcattgagagtcatgcaaagaggccagcaggccacgggtagctctgccaatgcatggggcatcttgcagccaaagtgggtaca

SEQ ID NO: 416366 - DNA, 120 bp, Artificial Sequence
  ENSG00000149380_19 (sequence is synthesized)
gcaaataaggaaccacttcacacttcctaggatggatacaattaaaaaacagaaaataagtgtcactacggatgtgaagaaactggaactctcatgcgttgctggtgggaatgtgaaatg

SEQ ID NO: 416367 - DNA, 120 bp, Artificial Sequence
  ENSG00000149380_20 (sequence is synthesized)
gtgcagccactgtggaaaacagattggtgatttctcagaaagataaacatagaactgtcatctgacccagttattccactcccagattaagaagactaaagctgaggcaagtcagataac

SEQ ID NO: 416368 - DNA, 120 bp, Artificial Sequence
  ENSG00000149380_21 (sequence is synthesized)
ttgcccagagtcaaaaaattactggaaaagcagtattcaaaactcagttttccgaacttcagagaccttacttttaccatcttaccatgctgtcttctaaacaggtatttataccttttt

SEQ ID NO: 416369 - DNA, 120 bp, Artificial Sequence
  ENSG00000149380_22 (sequence is synthesized)
atatctggattatcttgagcctttccctttcctaaaacttctaacaataagaaaaatactggccagctgcagtggctcacacctataatcttcgcactctgggaggccaaggcaggtgga

SEQ ID NO: 416370 - DNA, 84 bp, Artificial Sequence
  ENSG00000149380_23 (sequence is synthesized)
ggcgtggtggtgcatgcctgtaatcccactactggggtgggtgaggcccggaactgcttcgtcccaccgcactccagcctgggc

SEQ ID NO: 416371 - DNA, 120 bp, Artificial Sequence
  ENSG00000149380_24 (sequence is synthesized)
cttcagagaccttacttttaccatcttaccatgctgtcttctaaacagggataggacactttaaaggaaacacttactgccatttcaacctggaacctcagcctgtcctattccccacaa

SEQ ID NO: 416372 - DNA, 120 bp, Artificial Sequence
  ENSG00000149380_25 (sequence is synthesized)
gcccctcctacatgcacactgaacttcacagggaaatgacaaatttaagaccaagggggaagagtaagacctactgtttgacttggccaaccattgagacacgggcagactccagatttc

SEQ ID NO: 416373 - DNA, 120 bp, Artificial Sequence
  ENSG00000149380_26 (sequence is synthesized)
gaatctggccactcttcacactgggaaagaaaagaaaggaagagagaaggttattcagtatctattgtatcacatcattggaatcaaataaataattctacagattatgtgagacctaat

SEQ ID NO: 416374 - DNA, 120 bp, Artificial Sequence
  ENSG00000149380_27 (sequence is synthesized)
atggctacagaggtcagtggtggcatcaggggagaagcagttacaagtggagtaccgcatcagcaaaagtcaccaagcagccccctctacagaatgaagtcaggaaaccgagttgcaaca

SEQ ID NO: 416375 - DNA, 120 bp, Artificial Sequence
  ENSG00000149380_28 (sequence is synthesized)
aactagtccatggtggaaaaaaatcacaatagtgcttgcctctagagggaaaggattaactggatgatgtacaagaggattctctggggtattgaaaatgtgctctcaatatcttgttag

SEQ ID NO: 416376 - DNA, 120 bp, Artificial Sequence
  ENSG00000149380_29 (sequence is synthesized)
ggacgtggtacatgtggctgtatgcatttgtcaaaactcaccaaatggtccacttgagacctgtgtatatcattgtatgtaagtttaacctaaaaaaagacaaataaaaaagaacacttc

SEQ ID NO: 416377 - DNA, 120 bp, Artificial Sequence
  ENSG00000149403_0 (sequence is synthesized)
cctttcccgattccccgacgtttcgggaggagtggggtcggagcgcagggctgggaagggtcttaggacccaggaaggagacgggtgcctcccagagaggaccccatcccctccgaggtc

SEQ ID NO: 416378 - DNA, 120 bp, Artificial Sequence
  ENSG00000149403_1 (sequence is synthesized)
ccgaggtccgggcggctcccggcctctccctggggtgccgtagcccccctcgacccgccttcccgcagccgcagtcgttcgggcctggaggtggccgggcatcggtgccgacgccgcgag

SEQ ID NO: 416379 - DNA, 120 bp, Artificial Sequence
  ENSG00000149403_2 (sequence is synthesized)
ccgcggcgggaatactaatgcaccctaaagggcacggccgccgccgcagcagagttatgtcatgcccaggccagcagggggctccatgaggattcatagaagatgccccgcgtctcggcg

SEQ ID NO: 416380 - DNA, 120 bp, Artificial Sequence
  ENSG00000149403_3 (sequence is synthesized)
cctttggtgctgcttcctgcgtggctcgtgatggtcgcctgcagcccgcactccttgaggatcgctgctatcttggacgaccccatggagtgcagcagaggggagcggctctccatcacc

SEQ ID NO: 416381 - DNA, 120 bp, Artificial Sequence
  ENSG00000149403_4 (sequence is synthesized)
ctggccaagaaccgcatcaaccgcgctcctgagaggctgggcaaggccaaggtcgaagtggacatctttgagcttctcagagacagcgagtacgagactgcagaaaccatgtgtcagatc

SEQ ID NO: 416382 - DNA, 120 bp, Artificial Sequence
  ENSG00000149403_5 (sequence is synthesized)
ctccccaagggggtggtcgctgtcctcggaccatcgtccagcccagcctccagctccatcatcagcaacatctgtggagagaaggaggtccctcacttcaaagtggccccagaggagttc

SEQ ID NO: 416383 - DNA, 120 bp, Artificial Sequence
  ENSG00000149403_6 (sequence is synthesized)
gtcaagttccagttccagagattcacaaccctgaacctccaccccagcaacactgacatcagcgtggctgtagctgggatcctgaacttcttcaactgcaccaccgcctgcctcatctgt

SEQ ID NO: 416384 - DNA, 120 bp, Artificial Sequence
  ENSG00000149403_7 (sequence is synthesized)
gccaaagcagaatgccttttaaacctagagaagctgctccggcaattccttatctccaaggacacgctgtccgtccgcatgctggatgacacccgggaccccaccccgctcctcaaggag

SEQ ID NO: 416385 - DNA, 120 bp, Artificial Sequence
  ENSG00000149403_8 (sequence is synthesized)
atccgggacgacaagaccgccaccatcatcatccacgccaacgcctccatgtcccacaccatcctcctgaaggcagccgaacttgggatggtgtcagcctattacacatacatcttcact

SEQ ID NO: 416386 - DNA, 120 bp, Artificial Sequence
  ENSG00000149403_9 (sequence is synthesized)
aatctggagttctcactccagagaatggacagccttgtggatgatcgtgtcaacatcctgggattttccattttcaaccaatcccatgctttcttccaagagtttgcccagagcctcaac

SEQ ID NO: 416387 - DNA, 120 bp, Artificial Sequence
  ENSG00000149403_10 (sequence is synthesized)
cagtcctggcaggagaactgtgaccatgtgcccttcactgggcctgcgctctcctcggccctgctgtttgatgctgtctatgctgtggtgactgcggtgcaggaactgaaccggagccaa

SEQ ID NO: 416388 - DNA, 120 bp, Artificial Sequence
  ENSG00000149403_11 (sequence is synthesized)
gagatcggcgtgaagcccttgtcctgcggctcggcccagatctggcagcacggcaccagcctcatgaactacctgcgcatggtagaattggaaggtcttaccggccacattgaattcaac

SEQ ID NO: 416389 - DNA, 120 bp, Artificial Sequence
  ENSG00000149403_12 (sequence is synthesized)
agcaaaggccagaggtccaactacgctttgaaaatcttacagttcacaaggaatggttttcggcagatcggccagtggcacgtggcagagggcctcagcatggacagccacctctatgcc

SEQ ID NO: 416390 - DNA, 120 bp, Artificial Sequence
  ENSG00000149403_13 (sequence is synthesized)
tccaacatctcggacactctcttcaacaccaccctggtcgtcaccaccatcctggagaacccatatttaatgctgaaggggaaccaccaggagatggaaggcaatgaccgctacgagggc

SEQ ID NO: 416391 - DNA, 120 bp, Artificial Sequence
  ENSG00000149403_14 (sequence is synthesized)
ttctgtgtggacatgctcaaggagctggcagagatcctccgattcaactacaagatccgcctggttggggatggcgtgtacggcgttcccgaggccaacggcacctggacgggaatggtc

SEQ ID NO: 416392 - DNA, 120 bp, Artificial Sequence
  ENSG00000149403_15 (sequence is synthesized)
ggggagctgatcgctaggaaagcagatctggctgtggcaggcctcaccattacagctgaacgggagaaggtgattgatttctctaagccattcatgactctgggaattagcattctttac

SEQ ID NO: 416393 - DNA, 120 bp, Artificial Sequence
  ENSG00000149403_16 (sequence is synthesized)
cgcgttcatatgggacgcaaacccggctatttctccttcctggacccattttctccgggcgtctggctcttcatgcttctagcctatctggccgtcagctgtgtcctcttcctggtggct

SEQ ID NO: 416394 - DNA, 120 bp, Artificial Sequence
  ENSG00000149403_17 (sequence is synthesized)
cgagtggtacagcccacacccatgtgcccagggccggtgcaacctcctggtgaaccagtactccctgggcaacagcctctggtttccggtcggggggttcatgcagcaaggctccaccat

SEQ ID NO: 416395 - DNA, 120 bp, Artificial Sequence
  ENSG00000149403_18 (sequence is synthesized)
cgcccctcgcgccttatccacccgctgtgtcagtggcgtctggtgggcattcacgctgatcatcatctcatcctacacggccaacctggcagccttcctgaccgtgcagcgcatggatgt

SEQ ID NO: 416396 - DNA, 120 bp, Artificial Sequence
  ENSG00000149403_19 (sequence is synthesized)
gcccattgagtcagtggatgacctggctgaccagaccgccattgaatatggcacaattcacggaggctccagcatgaccttcttccaaaattcccgctaccagacctaccaacgcatgtg

SEQ ID NO: 416397 - DNA, 120 bp, Artificial Sequence
  ENSG00000149403_20 (sequence is synthesized)
gaattacatgtattccaagcagcccagcgtgttcgtgaagagcacagaggagggaatcgccagggtgttgaattccaactacgccttcctcctggaatccaccatgaacgagtactatcg

SEQ ID NO: 416398 - DNA, 120 bp, Artificial Sequence
  ENSG00000149403_21 (sequence is synthesized)
gcagcgaaactgcaacctcactcagattgggggcctgctggacaccaagggctatgggattggcatgccagtcggctcggttttccgggacgagtttgatctggccattctccagctgca

SEQ ID NO: 416399 - DNA, 120 bp, Artificial Sequence
  ENSG00000149403_22 (sequence is synthesized)
ggagaacaaccgcctggagatcctgaagcgcaaatggtgggaaggagggaagtgccccaaggaggaagatcacagagctaaaggcctgggaatggagaatattggtggaatctttgtggt

SEQ ID NO: 416400 - DNA, 120 bp, Artificial Sequence
  ENSG00000149403_23 (sequence is synthesized)
tcttatttgtggcttaatcgtggccatttttatggctatgttggagtttttatggactctcagacactcagaagcaactgaggtgtccgtctgccaggagatggtgaccgagctgcgcag

SEQ ID NO: 416401 - DNA, 120 bp, Artificial Sequence
  ENSG00000149403_24 (sequence is synthesized)
cattatcctgtgtcaggacagtatccacccccgccggcggcgcgccgcagtcccgccgccccggccccccatccccgaggagcgccgaccgcggggcacggcgacgctcagcaacgggaa

SEQ ID NO: 416402 - DNA, 120 bp, Artificial Sequence
  ENSG00000149403_25 (sequence is synthesized)
gctgtgcggggcaggggagcccgaccagctcgcgcagagactggcgcaggaggccgccctggtggcccgcggctgcacgcacatccgcgtctgccccgagtgccgccgcttccagggcct

SEQ ID NO: 416403 - DNA, 120 bp, Artificial Sequence
  ENSG00000149403_26 (sequence is synthesized)
gcgggcacggccgtcgcccgcccgcagcgaggagagcctggagtgggagaaaaccaccaacagcagcgagcccgagtagtcccggaggccacaggacgcgcagaggccgggcggggcggg

SEQ ID NO: 416404 - DNA, 120 bp, Artificial Sequence
  ENSG00000149403_27 (sequence is synthesized)
aggggaggggcggggcgggcgctgctgtcagccgccagccggaacttgtacagcgtcgacacctctccagatttcggatccagtcacttttcaaaaagatcaaggagcctgacgccccag

SEQ ID NO: 416405 - DNA, 120 bp, Artificial Sequence
  ENSG00000149403_28 (sequence is synthesized)
ccagagaccgcgcccggtcagggagcagggtccacccggaaacgttgcacccaaagggcaaaggacggccctccctcctgggcacaaggacccatcttctcccagtgggtctttccctct

SEQ ID NO: 416406 - DNA, 120 bp, Artificial Sequence
  ENSG00000149403_29 (sequence is synthesized)
cgccaaaataacaagagtatagggtggggggtccctacccagaccagtccaatgaattggtggaatcatcagttgaatttccccctagtcaggggccaatgtaccctccgtctagttctt

SEQ ID NO: 416407 - DNA, 120 bp, Artificial Sequence
  ENSG00000149403_30 (sequence is synthesized)
acagaaaaaaaaaaaattaaacagggaagtttttcttttctggatttgtatatttttgttaatgttcttttcccttttctttcctcctctccttttcttctttgtcatcttctcagtcct

SEQ ID NO: 416408 - DNA, 120 bp, Artificial Sequence
  ENSG00000149403_31 (sequence is synthesized)
gttaatttgttttgtgttttttggagggggaggctgggttagggaatggaagcctaaataatccctatttcttctttttcctgaattttggaatattgcgttaccagtgcatccgatttc

SEQ ID NO: 416409 - DNA, 120 bp, Artificial Sequence
  ENSG00000149403_32 (sequence is synthesized)
aggtgcttaactctctgtatggtgactgaggggcctgcaggagcacaggagaaggagtcttgggaagaatcagatggagagtctcaaaagtccattgcagtaaactttgagatgccaaaa

SEQ ID NO: 416410 - DNA, 120 bp, Artificial Sequence
  ENSG00000149403_33 (sequence is synthesized)
agcaattaactcatcctatactcagaccttgaaacgcctggaatgtcaagggttaatctgtcttttctttccctttctctttctgactgtcactattactgggtttgatttgatcttttt

SEQ ID NO: 416411 - DNA, 120 bp, Artificial Sequence
  ENSG00000149403_34 (sequence is synthesized)
gtgaatgtagtctctgaagacagacaggggaggagaacagaatgcacaaagtatcctaggactttgtttaaggagcggaaagagcagatagaattttcccataccatggccttggcttcc

SEQ ID NO: 416412 - DNA, 120 bp, Artificial Sequence
  ENSG00000149403_35 (sequence is synthesized)
tgcgctcctcccgcgctccccgcgccgggctcgctcgcagccggacacagactgccttcagctgcgggcggatcgggctggagccgccacggctgctgcggaagaggaaaaacggccaac

SEQ ID NO: 416413 - DNA, 120 bp, Artificial Sequence
  ENSG00000149403_36 (sequence is synthesized)
agcagccccgcggccggcccggcagcgcccggcccccggctcagcccccggagtgcggagccgaccagcagatactttctgagtgcctactatgtgccagcctgtgctaggcactgagga

SEQ ID NO: 416414 - DNA, 120 bp, Artificial Sequence
  ENSG00000149403_37 (sequence is synthesized)
aaccaaactcaaatgagtggctgcctatgaagccagacccccaagactatcatggattgggtggtttcttgctacttagacgtgagacctgggtgcaagtgtatgtgtgtgtatgtgtgc

SEQ ID NO: 416415 - DNA, 120 bp, Artificial Sequence
  ENSG00000149403_38 (sequence is synthesized)
gcgcgtgtgcgtgtgtgtatttattcaacagaaagaccttaagtattcaagaatttgctaggttcctgggagagaggtggagtctcctagtcaatacacgggcctgggaaccaggaactc

SEQ ID NO: 416416 - DNA, 120 bp, Artificial Sequence
  ENSG00000149403_39 (sequence is synthesized)
ttgagtcgtaacctcagcttgagcagtagccctcccaccttgtatgactttaggtaaagcatttaacttctcttccatctaccaaataggagttactgatgctgtccaggttaccaggtg

SEQ ID NO: 416417 - DNA, 120 bp, Artificial Sequence
  ENSG00000149403_40 (sequence is synthesized)
actgctagtgactgctctccatgtgagaagtttgcagagtccagagcacacatctgatgggaggggcgaggctttctacagctgcttgacctttgcttggcttcactaattgggagtttc

SEQ ID NO: 416418 - DNA, 120 bp, Artificial Sequence
  ENSG00000149403_41 (sequence is synthesized)
acgcagagttctcattggctgatggaaaacaaattctatgcaatttctgattgtaaacttagaaaattcagagagaaacaaacagccgctaccaaccacctccacctccaccaccgctgc

SEQ ID NO: 416419 - DNA, 120 bp, Artificial Sequence
  ENSG00000149403_42 (sequence is synthesized)
caccaccttgaatggaattgtcctcacttttgttgctgttgcaaatgtactaaaataaagacatctttggaagatgacgagcttaattcatgtttttgccatttgggttggtcggcatcc

SEQ ID NO: 416420 - DNA, 120 bp, Artificial Sequence
  ENSG00000149403_43 (sequence is synthesized)
tctttatgccaggacaatcagttagggctgccgtcctgggggccaaatggtaccctgattattcctgtgagggatactcgttttgtcctcacctgacctcactcatgaatttgaatcctt

SEQ ID NO: 416421 - DNA, 120 bp, Artificial Sequence
  ENSG00000149403_44 (sequence is synthesized)
tatcttttttctctttaaccatcaaatgacaacaagctgtgcaagacacttgtgtctttttttaaaccttgccttgatcctcgtggagaaacgtggatttggtgggaagggcacccgaag

SEQ ID NO: 416422 - DNA, 120 bp, Artificial Sequence
  ENSG00000149403_45 (sequence is synthesized)
gccagctgacaacaaaccccaatggtgccactctgctccaacctgcagctccatcctatgcttctcacagacaacgtggttcctactgtcagatcacatttggggcgggaagggtggttt

SEQ ID NO: 416423 - DNA, 120 bp, Artificial Sequence
  ENSG00000149403_46 (sequence is synthesized)
tttaaaaaaactcgtttttatgagcaggctatcttgatcaatagcaaactttttttaatggattagtgaaataaatgtccccatgcatcatttatagtctgtttctttctccgtgtggaa

SEQ ID NO: 416424 - DNA, 120 bp, Artificial Sequence
  ENSG00000149403_47 (sequence is synthesized)
tcaagataagactgccagcactagacggtttctgttagctgctgagaccagggcctcaccttgctcaagctagtgggtgaatttgcaaccagctaatactcttccttggtttgtttccac

SEQ ID NO: 416425 - DNA, 120 bp, Artificial Sequence
  ENSG00000149403_48 (sequence is synthesized)
tttttatctgttggttgttggctttcttttccattctgtattttctatctgactctgtatactgtataaagcagttttttcttgtctgtttatctttcttcaactggaatatttacaata

SEQ ID NO: 416426 - DNA, 120 bp, Artificial Sequence
  ENSG00000149403_49 (sequence is synthesized)
aaacagaaacaaatcctgaaatgttagtgatggatgacagctgtttgggtttagaaagtatggttcagtgtgtctaatatccaggtactagacttgaaaagcaaataaaatcataaaccc

SEQ ID NO: 416427 - DNA, 120 bp, Artificial Sequence
  ENSG00000149403_50 (sequence is synthesized)
ctcaaaccactgaatacagcattgaatccagtaccccctgttgttagaaccagtttaacagtgactttacgtgggcattctaaagttttttttttttttttaaagcaaacacacatattt

SEQ ID NO: 416428 - DNA, 120 bp, Artificial Sequence
  ENSG00000149403_51 (sequence is synthesized)
cctttaatcaacgaccagtgctcaatccttaattattaaagagctagttgattagttactgattgattaattgactaatttaaagggctaatagtaattattaaagggcatgttaatgtc

SEQ ID NO: 416429 - DNA, 120 bp, Artificial Sequence
  ENSG00000149403_52 (sequence is synthesized)
gcttgaggacgatccaaggccaggcgtggtagcatgtgcctgtaatcccagtgctttgggacaccgaggcaggaggatcactcgagcccaggagtgcgaggctgcagtgacgctagactt

SEQ ID NO: 416430 - DNA, 120 bp, Artificial Sequence
  ENSG00000149403_53 (sequence is synthesized)
caggaagaccccccatttctgctcccctcctgggcttggagaagagtacagctgctcttgactggtgggaccttttgctggctaggggtgatgggagaagcaagagagggatccacacac

SEQ ID NO: 416431 - DNA, 120 bp, Artificial Sequence
  ENSG00000149403_54 (sequence is synthesized)
aataaaaaggcaggaagacagactggctgacttctgggtagactgtctctaagtgtctgtaattaactcattcattcttactccgcccagaacatgcatttgaagggaatacctttctaa

SEQ ID NO: 416432 - DNA, 120 bp, Artificial Sequence
  ENSG00000149403_55 (sequence is synthesized)
cattgcccctctgtgggccaacccctgggcaacacatcttcttggagtccagccgtctcctgctccagtcccagctcagaaagggaggtagagaggtgtgggaagtggttgcagggtatg

SEQ ID NO: 416433 - DNA, 120 bp, Artificial Sequence
  ENSG00000149403_56 (sequence is synthesized)
ttaggtagggctcaagatgggtgggcagcggaaactgggtgaactttaatcccttccattcctgaaatgtgttcgttttatgaaatatctctctccgcaaaatgtctccaccacttgact

SEQ ID NO: 416434 - DNA, 120 bp, Artificial Sequence
  ENSG00000149403_57 (sequence is synthesized)
ttggatttctaagaaatgtttctctgaatagatgtagagtagcatttcccagattgcgttctgaagcacgccactgccaggcactcatggattttggaggagaaaaaaaaacccatagtc

SEQ ID NO: 416435 - DNA, 120 bp, Artificial Sequence
  ENSG00000149403_58 (sequence is synthesized)
gaaaaacggccaacagcagccccgcggccggcccggcagcgcccggcccccggctcagcccccggagtgcggagccgaccagagggtaacgcttctcacaggggaccctgtctcagcagc

SEQ ID NO: 416436 - DNA, 120 bp, Artificial Sequence
  ENSG00000149418_0 (sequence is synthesized)
gtgagagcggagctgcagccggagaaagaggaagagggagagagagcgcgccagggcgagggcaccgccgccggtcgggcgcgctgggcctgcccggaatcccgccgcctgcgccccgcg

SEQ ID NO: 416437 - DNA, 120 bp, Artificial Sequence
  ENSG00000149418_1 (sequence is synthesized)
cctgcgggccatgggagccggccgccggcagggacgacgcctgtgagacccgcgagcggcctcggggaccatggggagcgatcgggcccgcaagggcggagggggcccgaaggacttcgg

SEQ ID NO: 416438 - DNA, 120 bp, Artificial Sequence
  ENSG00000149418_2 (sequence is synthesized)
gacttcggcgcgggactcaagtacaactcccggcacgagaaagtgaatggcttggaggaaggcgtggagttcctgccagtcaacaacgtcaagaaggtggaaaagcatggcccggggcgc

SEQ ID NO: 416439 - DNA, 120 bp, Artificial Sequence
  ENSG00000149418_3 (sequence is synthesized)
tgggtggtgctggcagccgtgctgatcggcctcctcttggtcttgctggggatcggcttcctggtgtggcatttgcagtaccgggacgtgcgtgtccagaaggtcttcaatggctacatg

SEQ ID NO: 416440 - DNA, 120 bp, Artificial Sequence
  ENSG00000149418_4 (sequence is synthesized)
aggatcacaaatgagaattttgtggatgcctacgagaactccaactccactgagtttgtaagcctggccagcaaggtgaaggacgcgctgaagctgctgtacagcggagtcccattcctg

SEQ ID NO: 416441 - DNA, 120 bp, Artificial Sequence
  ENSG00000149418_5 (sequence is synthesized)
ggcccctaccacaaggagtcggctgtgacggccttcagcgagggcagcgtcatcgcctactactggtctgagttcagcatcccgcagcacctggtggaggaggccgagcgcgtcatggcc

SEQ ID NO: 416442 - DNA, 120 bp, Artificial Sequence
  ENSG00000149418_6 (sequence is synthesized)
gaggagcgcgtagtcatgctgcccccgcgggcgcgctccctgaagtcctttgtggtcacctcagtggtggctttccccacggactccaaaacagtacagaggacccaggacaacagctgc

SEQ ID NO: 416443 - DNA, 120 bp, Artificial Sequence
  ENSG00000149418_7 (sequence is synthesized)
agctttggcctgcacgcccgcggtgtggagctgatgcgcttcaccacgcccggcttccctgacagcccctaccccgctcatgcccgctgccagtgggccctgcggggggacgccgactca

SEQ ID NO: 416444 - DNA, 120 bp, Artificial Sequence
  ENSG00000149418_8 (sequence is synthesized)
gtgctgagcctcaccttccgcagctttgaccttgcgtcctgcgacgagcgcggcagcgacctggtgacggtgtacaacaccctgagccccatggagccccacgccctggtgcagttgtgt

SEQ ID NO: 416445 - DNA, 120 bp, Artificial Sequence
  ENSG00000149418_9 (sequence is synthesized)
ggcacctaccctccctcctacaacctgaccttccactcctcccagaacgtcctgctcatcacactgataaccaacactgagcggcggcatcccggctttgaggccaccttcttccagctg

SEQ ID NO: 416446 - DNA, 120 bp, Artificial Sequence
  ENSG00000149418_10 (sequence is synthesized)
cctaggatgagcagctgtggaggccgcttacgtaaagcccaggggacattcaacagcccctactacccaggccactacccacccaacattgactgcacatggaacattgaggtgcccaac

SEQ ID NO: 416447 - DNA, 120 bp, Artificial Sequence
  ENSG00000149418_11 (sequence is synthesized)
aaccagcatgtgaaggtgcgcttcaaattcttctacctgctggagcccggcgtgcctgcgggcacctgccccaaggactacgtggagatcaacggggagaaatactgcggagagaggtcc

SEQ ID NO: 416448 - DNA, 120 bp, Artificial Sequence
  ENSG00000149418_12 (sequence is synthesized)
cagttcgtcgtcaccagcaacagcaacaagatcacagttcgcttccactcagatcagtcctacaccgacaccggcttcttagctgaatacctctcctacgactccagtgacccatgcccg

SEQ ID NO: 416449 - DNA, 120 bp, Artificial Sequence
  ENSG00000149418_13 (sequence is synthesized)
ctgcaccgaccacagcgatgagctcaactgcagttgcgacgccggccaccagttcacgtgcaagaacaagttctgcaagcccctcttctgggtctgcgacagtgtgaacgactgcggaga

SEQ ID NO: 416450 - DNA, 120 bp, Artificial Sequence
  ENSG00000149418_14 (sequence is synthesized)
caacagcgacgagcaggggtgcagttgtccggcccagaccttcaggtgttccaatgggaagtgcctctcgaaaagccagcagtgcaatgggaaggacgactgtggggacgggtccgacga

SEQ ID NO: 416451 - DNA, 120 bp, Artificial Sequence
  ENSG00000149418_15 (sequence is synthesized)
ggcctcctgccccaaggtgaacgtcgtcacttgtaccaaacacacctaccgctgcctcaatgggctctgcttgagcaagggcaaccctgagtgtgacgggaaggaggactgtagcgacgg

SEQ ID NO: 416452 - DNA, 120 bp, Artificial Sequence
  ENSG00000149418_16 (sequence is synthesized)
ctcagatgagaaggactgcgactgtgggctgcggtcattcacgagacaggctcgtgttgttgggggcacggatgcggatgagggcgagtggccctggcaggtaagcctgcatgctctggg

SEQ ID NO: 416453 - DNA, 120 bp, Artificial Sequence
  ENSG00000149418_17 (sequence is synthesized)
ccagggccacatctgcggtgcttccctcatctctcccaactggctggtctctgccgcacactgctacatcgatgacagaggattcaggtactcagaccccacgcagtggacggccttcct

SEQ ID NO: 416454 - DNA, 120 bp, Artificial Sequence
  ENSG00000149418_18 (sequence is synthesized)
gggcttgcacgaccagagccagcgcagcgcccctggggtgcaggagcgcaggctcaagcgcatcatctcccaccccttcttcaatgacttcaccttcgactatgacatcgcgctgctgga

SEQ ID NO: 416455 - DNA, 120 bp, Artificial Sequence
  ENSG00000149418_19 (sequence is synthesized)
gctggagaaaccggcagagtacagctccatggtgcggcccatctgcctgccggacgcctcccatgtcttccctgccggcaaggccatctgggtcacgggctggggacacacccagtatgg

SEQ ID NO: 416456 - DNA, 120 bp, Artificial Sequence
  ENSG00000149418_20 (sequence is synthesized)
aggcactggcgcgctgatcctgcaaaagggtgagatccgcgtcatcaaccagaccacctgcgagaacctcctgccgcagcagatcacgccgcgcatgatgtgcgtgggcttcctcagcgg

SEQ ID NO: 416457 - DNA, 120 bp, Artificial Sequence
  ENSG00000149418_21 (sequence is synthesized)
cggcgtggactcctgccagggtgattccgggggacccctgtccagcgtggaggcggatgggcggatcttccaggccggtgtggtgagctggggagacggctgcgctcagaggaacaagcc

SEQ ID NO: 416458 - DNA, 120 bp, Artificial Sequence
  ENSG00000149418_22 (sequence is synthesized)
aggcgtgtacacaaggctccctctgtttcgggactggatcaaagagaacactggggtataggggccggggccacccaaatgtgtacacctgcggggccacccatcgtccaccccagtgtg

SEQ ID NO: 416459 - DNA, 120 bp, Artificial Sequence
  ENSG00000149418_23 (sequence is synthesized)
cacgcctgcaggctggagactggaccgctgactgcaccagcgcccccagaacatacactgtgaactcaatctccagggctccaaatctgcctagaaaacctctcgcttcctcagcctcca

SEQ ID NO: 416460 - DNA, 120 bp, Artificial Sequence
  ENSG00000149418_24 (sequence is synthesized)
aagtggagctgggaggtagaaggggaggacactggtggttctactgacccaactgggggcaaaggtttgaagacacagcctcccccgccagccccaagctgggccgaggcgcgtttgtgc

SEQ ID NO: 416461 - DNA, 120 bp, Artificial Sequence
  ENSG00000149418_25 (sequence is synthesized)
atatctgcctcccctgtctctaaggagcagcgggaacggagcttcggggcctcctcagtgaaggtggtggggctgccggatctgggctgtggggcccttgggccacgctcttgaggaagc

SEQ ID NO: 416462 - DNA, 120 bp, Artificial Sequence
  ENSG00000149418_26 (sequence is synthesized)
ccaggctcggaggaccctggaaaacagacgggtctgagactgaaattgttttaccagctcccagggtggacttcagtgtgtgtatttgtgtaaatgagtaaaacattttatttcttttta

SEQ ID NO: 416463 - DNA, 120 bp, Artificial Sequence
  ENSG00000149418_27 (sequence is synthesized)
tttattctcaaagtgctttttattttgctagttcgtttgaaccctggggaatgctgtgtggcaggtggcattcccagttcctttctcaggtcagaaaacaggctcaggaaggtgacactc

SEQ ID NO: 416464 - DNA, 120 bp, Artificial Sequence
  ENSG00000149418_28 (sequence is synthesized)
ggtgtgtcctcgcttgtggccaaactccaatgggtttcccctcctcattcctacccctgagcagcccccagaatcggtctggttggggatgagactgtgagagcagagggcaaagggcaa

SEQ ID NO: 416465 - DNA, 120 bp, Artificial Sequence
  ENSG00000149418_29 (sequence is synthesized)
ggcctcttgctttggggtggaaagagggatgacacaagaggagctggggaagggcctctgcagatggcaggcccaggtgtgccccgagccgcccatgtgtcctggagtcgctctgggcgc

SEQ ID NO: 416466 - DNA, 120 bp, Artificial Sequence
  ENSG00000149418_30 (sequence is synthesized)
gtccccagaagcatgtccctctgaatgaagtatattatgacgatctttccaggcccttcctcttccaggcccttctgagaagcccccttcctgatttcccgaggcccagggcagcctggg

SEQ ID NO: 416467 - DNA, 120 bp, Artificial Sequence
  ENSG00000149428_0 (sequence is synthesized)
aatgagcgcgcgccgcgtccggggccggctggtgcgcgagacgccgccgagaggttggtggctaatgtaacagtttgcaaaccgagaggagttgtgaagggcgcgggtggggggcgctgc

SEQ ID NO: 416468 - DNA, 120 bp, Artificial Sequence
  ENSG00000149428_1 (sequence is synthesized)
cggcctcgtgggtacgttcgtgccgcgtctgtcccagagctggggccgcaggagcggaggcaagaggggcactatggcagacaaagttaggaggcagaggccgaggaggcgagtctgttg

SEQ ID NO: 416469 - DNA, 120 bp, Artificial Sequence
  ENSG00000149428_2 (sequence is synthesized)
ggccttggtggctgtgctcttggcagacctgttggcactgagtgatacactggcagtgatgtctgtggacctgggcagtgagtccatgaaggtggccattgtcaaacctggagtgcccat

SEQ ID NO: 416470 - DNA, 120 bp, Artificial Sequence
  ENSG00000149428_3 (sequence is synthesized)
ggaaattgtcttgaataaggaatctcggaggaaaacaccggtgatcgtgaccctgaaagaaaatgaaagattctttggagacagtgcagcaagcatggcgattaagaatccaaaggctac

SEQ ID NO: 416471 - DNA, 120 bp, Artificial Sequence
  ENSG00000149428_4 (sequence is synthesized)
gctacgttacttccagcacctcctggggaagcaggcagataacccccatgtagctctttaccaggcccgcttcccggagcacgagctgactttcgacccacagaggcagactgtgcactt

SEQ ID NO: 416472 - DNA, 120 bp, Artificial Sequence
  ENSG00000149428_5 (sequence is synthesized)
tcagatcagctcgcagctgcagttctcacctgaggaagtgttgggcatggttctcaattattctcgttctctagctgaagattttgcagagcagcccatcaaggatgcagtgatcaccgt

SEQ ID NO: 416473 - DNA, 120 bp, Artificial Sequence
  ENSG00000149428_6 (sequence is synthesized)
gccagtcttcttcaaccaggccgagcgccgagctgtgctgcaggctgctcgtatggctggcctcaaagtgctgcagctcatcaatgacaacaccgccactgccctcagctatggtgtctt

SEQ ID NO: 416474 - DNA, 120 bp, Artificial Sequence
  ENSG00000149428_7 (sequence is synthesized)
ccgccggaaagatattaacaccactgcccagaatatcatgttctatgacatgggctcaggcagcaccgtatgcaccattgtgacctaccagatggtgaagactaaggaagctgggatgca

SEQ ID NO: 416475 - DNA, 120 bp, Artificial Sequence
  ENSG00000149428_8 (sequence is synthesized)
gccacagctgcagatccggggagtaggatttgaccgtaccctggggggcctggagatggagctccggcttcgagaacgcctggctgggcttttcaatgagcagcgcaagggtcagagagc

SEQ ID NO: 416476 - DNA, 120 bp, Artificial Sequence
  ENSG00000149428_9 (sequence is synthesized)
aaaggatgtgcgggagaacccgcgtgccatggccaagctgctgcgtgaggctaatcggctcaaaaccgtcctcagtgccaacgctgaccacatggcacagattgaaggcctgatggatga

SEQ ID NO: 416477 - DNA, 120 bp, Artificial Sequence
  ENSG00000149428_10 (sequence is synthesized)
tgtggacttcaaggcaaaagtgactcgtgtggaatttgaggagttgtgtgcagacttgtttgagcgggtgcctgggcctgtacagcaggccctccagagtgccgaaatgagtctggatga

SEQ ID NO: 416478 - DNA, 120 bp, Artificial Sequence
  ENSG00000149428_11 (sequence is synthesized)
gattgagcaggtgatcctggtgggtggggccactcgggtccccagagttcaggaggtgctgctgaaggccgtgggcaaggaggagctggggaagaacatcaatgcagatgaagcagccgc

SEQ ID NO: 416479 - DNA, 120 bp, Artificial Sequence
  ENSG00000149428_12 (sequence is synthesized)
catgggggcagtgtaccaggcagctgcgctcagcaaagcctttaaagtgaagccatttgtcgtccgagatgcagtggtctaccccatcctggtggagttcacgagggaggtggaggagga

SEQ ID NO: 416480 - DNA, 120 bp, Artificial Sequence
  ENSG00000149428_13 (sequence is synthesized)
gcctgggattcacagcctgaagcacaataaacgggtactcttctctcggatggggccctaccctcaacgcaaagtcatcacctttaaccgctacagccatgatttcaacttccacatcaa

SEQ ID NO: 416481 - DNA, 120 bp, Artificial Sequence
  ENSG00000149428_14 (sequence is synthesized)
ctacggcgacctgggcttcctggggcctgaagatcttcgggtatttggctcccagaatctgaccacagtgaagctaaaaggggtgggtgacagcttcaagaagtatcctgactacgagtc

SEQ ID NO: 416482 - DNA, 120 bp, Artificial Sequence
  ENSG00000149428_15 (sequence is synthesized)
caagggcatcaaggctcacttcaacctggatgagagtggcgtgctcagtctagacagggtggagtctgtatttgagacactggtagaggacagcgcagaagaggaatctactctcaccaa

SEQ ID NO: 416483 - DNA, 120 bp, Artificial Sequence
  ENSG00000149428_16 (sequence is synthesized)
acttggcaacaccatttccagcctgtttggaggcggtaccacaccagatgccaaggagaatggtactgatactgtccaggaggaagaggagagccctgcagaggggagcaaggacgagcc

SEQ ID NO: 416484 - DNA, 120 bp, Artificial Sequence
  ENSG00000149428_17 (sequence is synthesized)
tggggagcaggtggagctcaaggaggaagctgaggccccagtggaggatggctctcagcccccaccccctgaacctaagggagatgcaacccctgagggagaaaaggccacagaaaaaga

SEQ ID NO: 416485 - DNA, 120 bp, Artificial Sequence
  ENSG00000149428_18 (sequence is synthesized)
aaatggggacaagtctgaggcccagaaaccaagtgagaaggcagaggcagggcctgagggcgtcgctccagccccagagggagagaagaagcagaagcccgccaggaagcggcgaatggt

SEQ ID NO: 416486 - DNA, 120 bp, Artificial Sequence
  ENSG00000149428_19 (sequence is synthesized)
ctgacttgccagaggataagctggctcagtcggtgcagaaacttcaggacttgacactccgagacctggagaagcaggaacgggaaaaagctgccaacagcttggaagcattcatatttg

SEQ ID NO: 416487 - DNA, 120 bp, Artificial Sequence
  ENSG00000149428_20 (sequence is synthesized)
agacccaggacaagctgtaccagcccgagtaccaggaagtgtccacagaggagcagcgtgaggagatctctgggaagctcagcgccgcatccacctggctggaggatgagggtgttggag

SEQ ID NO: 416488 - DNA, 120 bp, Artificial Sequence
  ENSG00000149428_21 (sequence is synthesized)
ccaccacagtgatgttgaaggagaagctggctgagctgaggaagctgtgccaagggctgttttttcgggtagaggagcgcaagaagtggcccgaacggctgtctgccctcgataatctcc

SEQ ID NO: 416489 - DNA, 120 bp, Artificial Sequence
  ENSG00000149428_22 (sequence is synthesized)
tcaaccattccagcatgttcctcaagggggcccggctcatcccagagatggaccagatcttcactgaggtggagatgacaacgttagagaaagtcatcaatgagacctgggcctggaaga

SEQ ID NO: 416490 - DNA, 120 bp, Artificial Sequence
  ENSG00000149428_23 (sequence is synthesized)
atgcaactctggccgagcaggctaagctgcccgccacagagaagcctgtgttgctctcaaaagacattgaagctaagatgatggccctggaccgagaggtgcagtatctgctcaataagg

SEQ ID NO: 416491 - DNA, 120 bp, Artificial Sequence
  ENSG00000149428_24 (sequence is synthesized)
ccaagtttaccaagccccggccccggcctaaggacaagaatgggacccgggcagagccacccctcaatgccagtgccagtgaccagggggagaaggtcatccctccagcaggccagactg

SEQ ID NO: 416492 - DNA, 120 bp, Artificial Sequence
  ENSG00000149428_25 (sequence is synthesized)
aagatgcagagcccatttcagaacctgagaaagtagagactggatccgagccaggagacactgagcctttggagttaggaggtcctggagcagaacctgaacagaaagaacaatcgacag

SEQ ID NO: 416493 - DNA, 120 bp, Artificial Sequence
  ENSG00000149428_26 (sequence is synthesized)
gacagaagcggcctttgaagaacgacgaactataacccccacctctgttttccccattcatctccacccccttcccccaccacttctatttatttaacatcgagggttgggggaggggtt

SEQ ID NO: 416494 - DNA, 120 bp, Artificial Sequence
  ENSG00000149428_27 (sequence is synthesized)
ggtcctgccctcggctggagttcctttctcacccctgtgatttggaggtgtggagaaggggaagggagggacagctcactggttccttctgcagtacctctgtggttaaaaatggaaact

SEQ ID NO: 416495 - DNA, 120 bp, Artificial Sequence
  ENSG00000149428_28 (sequence is synthesized)
gttctcctccccagccccactccctgttccctacccatataggccctaaatttgggaaaaatcactattaatttctgaatcctttgcctgtgggtaggaagagaatggctgccagtggct

SEQ ID NO: 416496 - DNA, 120 bp, Artificial Sequence
  ENSG00000149428_29 (sequence is synthesized)
gatgggtcccggtgatgggaagggtatcaggttgctggggagtttccactcttctctggtgattgttccttccctcccttcctctcccaccatgcgatgagcatcctttcaggccagtgt

SEQ ID NO: 416497 - DNA, 120 bp, Artificial Sequence
  ENSG00000149428_30 (sequence is synthesized)
ctgcagagcctcagttaccaggtttggtttctgagtgcctatctgtgctctttcctccctctgcgggcttctcttgctctgagcctcccttccccattcccatccagctcctttccccct

SEQ ID NO: 416498 - DNA, 120 bp, Artificial Sequence
  ENSG00000149428_31 (sequence is synthesized)
gggtttccttggcttcctgcagcaaattgggcagttctctgccccttgcctaaaagcctgtacctctggattggcggaagtaaatctggaaggattctcactcgtatttcccacccctag

SEQ ID NO: 416499 - DNA, 120 bp, Artificial Sequence
  ENSG00000149428_32 (sequence is synthesized)
tggccagaggagggaggggcacagtgaagaagggagcccaccacctctccgaagaggaaagccacgtagagtggttggcatggggtgccagcatcgtgcaagctctgtcataatctgcat

SEQ ID NO: 416500 - DNA, 120 bp, Artificial Sequence
  ENSG00000149428_33 (sequence is synthesized)
cttcccagcagcctggtaccccaggttcctgtaactccctgcctcctcctctcttctgctgttctgctcctcccagacagagcctttccctcaccccctgaccccctgggctgaccaaaa

SEQ ID NO: 416501 - DNA, 120 bp, Artificial Sequence
  ENSG00000149428_34 (sequence is synthesized)
tgtgctttctactgtgagtccctatcccaagatcctggggaaaggagagaccatggtgtgaatgtagagatgccacctccctctctctgaggcaggcctgtggatgaaggaggagggtca

SEQ ID NO: 416502 - DNA, 120 bp, Artificial Sequence
  ENSG00000149428_35 (sequence is synthesized)
gggctggccttcctctgtgcatcactctgctaggttgggggcccccgacccaccatacctacgcctagggagcccgtcctccagtattccgtctgtagcaggagctagggctgctgcctc

SEQ ID NO: 416503 - DNA, 120 bp, Artificial Sequence
  ENSG00000149428_36 (sequence is synthesized)
tgtcttttccttttttttttttttttgccacattggcagagatgggacctaagggtcccacccctcaccccacccccacctcttctgtatgtttgaattctttcagtagctgttgatgct

SEQ ID NO: 416504 - DNA, 120 bp, Artificial Sequence
  ENSG00000149428_37 (sequence is synthesized)
tcttctgtatgtttgaattctttcagtagctgttgatgctggttggacaggtttgagtcaaattgtactttgctccattgttaattgagaaactgtttcaataaaatattcttttctaca

SEQ ID NO: 416505 - DNA, 120 bp, Artificial Sequence
  ENSG00000149428_38 (sequence is synthesized)
agggccgggcggccgaggctccaatgagcgcgcgccgcgtccggggccggctggtgcgcgagacgccgccgagaggggcactatggcagacaaagttaggaggcagaggccgaggaggcg

SEQ ID NO: 416506 - DNA, 120 bp, Artificial Sequence
  ENSG00000149428_39 (sequence is synthesized)
ggtcagtgggcaggaggcagcagcccccccactgggcttacacctggctctgtgggccttgcctctgggcttgtgggtgcatgtgtttacatgtccccctccccaggacaagctgtacca

SEQ ID NO: 416507 - DNA, 120 bp, Artificial Sequence
  ENSG00000149428_40 (sequence is synthesized)
tgccacagtccaagcaggccattgaccgtttccatacagcagtcacctgtatggaacccccatggggtcggcggtgccgagccaggcctgcctggaggctctgctcctgatcgttccctg

SEQ ID NO: 416508 - DNA, 120 bp, Artificial Sequence
  ENSG00000149428_41 (sequence is synthesized)
aagaggtagcgggggtggatggaggtgcgggccggccacccctcctaggggagacagcgtgcgagctccgggggcgggtcgggagcgcaagggagggccgcgcggacgccgggcgctcgg

SEQ ID NO: 416509 - DNA, 120 bp, Artificial Sequence
  ENSG00000149428_42 (sequence is synthesized)
cctcgcaccggggggcacgcagctcggcccccggtctgtccccacttgctggggcgggccgggatccgtttccgggagtgggagccgccgccttcgtcaggggcactatggcagacaaag

SEQ ID NO: 416510 - DNA, 120 bp, Artificial Sequence
  ENSG00000149428_43 (sequence is synthesized)
aatgtaacagtttgcaaaccgagaggagttgtgaagggcgcgggtggggggcgctgccggcctcgtggcttctctgtttagggatgtggcaaagccgaggacccatgctctttcacttgg

SEQ ID NO: 416511 - DNA, 120 bp, Artificial Sequence
  ENSG00000149428_44 (sequence is synthesized)
gcctttgtgtgggcgctgctgggatgattagagaatggtttgtacccatcaggagggagaaggggagaagtaggctgatctgccctgggggcactatggcagacaaagttaggaggcaga

SEQ ID NO: 416512 - DNA, 120 bp, Artificial Sequence
  ENSG00000149428_45 (sequence is synthesized)
cctgggtaatcacttcgtaaatacttaaccagatacttagctgccatcctaggtactgtgggagaggtggagagatgaagccacagcagcccctgcctcctggcttagcatctaacctga

SEQ ID NO: 416513 - DNA, 120 bp, Artificial Sequence
  ENSG00000149428_46 (sequence is synthesized)
aagcccatcccatgaggacagagaaagctgctttgaggggctgggatttgagctaggttcagaacatgggccagggtttggctaggtgaaactgatgtgtcatgtgaagcagaaactgtt

SEQ ID NO: 416514 - DNA, 120 bp, Artificial Sequence
  ENSG00000149428_47 (sequence is synthesized)
aaactgatgtgtcatgtgaagcagaaactgttttggatgtgtggggactcttgagccagagctcagtaaagtggagagtcaagaaatgagtattcagctgggcgcggtggctcacgcctg

SEQ ID NO: 416515 - DNA, 120 bp, Artificial Sequence
  ENSG00000149428_48 (sequence is synthesized)
ggctcctcattggtgtgtgttcctgattgtcctgccttaatgcctggctttccttggctccaactaccttccttcccctcaggcagctgcagttctcacctgaggaagtgttgggcatgg

SEQ ID NO: 416516 - DNA, 120 bp, Artificial Sequence
  ENSG00000149428_49 (sequence is synthesized)
gcaaaccgagaggagttgtgaagggcgcgggtggggggcgctgccggcctcgtgggtacgttcgtgccgcgtctgtcccagagctggggccgcaggagcggaggcaagagggatgtggca

SEQ ID NO: 416517 - DNA, 120 bp, Artificial Sequence
  ENSG00000149428_50 (sequence is synthesized)
gggagtagggtaagtggatacttggcagggagggctgcttgtgaagaccctcaagtcaggggtttcttcttggaggagacacactgctttgctttcctgcatgctgcaggaatggtctcc

SEQ ID NO: 416518 - DNA, 120 bp, Artificial Sequence
  ENSG00000149428_51 (sequence is synthesized)
tgattgaggcatcagtcattgtaggggaccactcacaaagagtaaggggaagctgaggctcaggggaggacagtttgggaaaactggaagacatggaactttcaaaatgtattctaagga

SEQ ID NO: 416519 - DNA, 120 bp, Artificial Sequence
  ENSG00000149428_52 (sequence is synthesized)
aatccatggagccgcaggcaatatgtagggtgtcagattcaatcatgtttttgttctcttgtcatttccagttaaataatttaccattcttgttgtcttacctctttttaaatttttttt

SEQ ID NO: 416520 - DNA, 120 bp, Artificial Sequence
  ENSG00000149428_53 (sequence is synthesized)
tcaggagatcctgagaacatgtgccctgttgtcttatttcttgaaatcatctttttccgtcttcaccattaccacccagcccaagttaccatcacctcttatttgcagaattaaaaacat

SEQ ID NO: 416521 - DNA, 120 bp, Artificial Sequence
  ENSG00000149428_54 (sequence is synthesized)
ttcttcttaaaatccaacctaatcattacctgtttctttaaaaacctgtcgctggctccataactttccctgtgcctgtctcaaccctgccttctgcagcctgtctgagccctgagccct

SEQ ID NO: 416522 - DNA, 120 bp, Artificial Sequence
  ENSG00000149428_55 (sequence is synthesized)
ctcgctttttgagccccagtgatgcttgccctcctccggaacttgccatgcactctcccacttcaaggtctttatgaacgttgttgcctctgtctagaatgttctttcccctccagctag

SEQ ID NO: 416523 - DNA, 120 bp, Artificial Sequence
  ENSG00000149428_56 (sequence is synthesized)
tgaactctgaactcttcagttcaagtgatgcttgcactgaactcatccttcaggtttcagttcaagcatcactttttaggagacatgttcttgggtctccctcagtagcctgaatctccc

SEQ ID NO: 416524 - DNA, 120 bp, Artificial Sequence
  ENSG00000149428_57 (sequence is synthesized)
cccatgcatgttctgcaggcattgtcccctcacctttacaacatgtgacgtagtgataatttcacatttgtgtgattattcaacttttccatagcagggaccctgtctctctccccaccg

SEQ ID NO: 416525 - DNA, 120 bp, Artificial Sequence
  ENSG00000149428_58 (sequence is synthesized)
ccacatttgtattcccagagggaagtacataagtaatgctcagtaaacactgtcgaatgaatgagtggaagaagggtcactgcgaggtgtcagctgtgctgtagagagttgagggcagag

SEQ ID NO: 416526 - DNA, 120 bp, Artificial Sequence
  ENSG00000149428_59 (sequence is synthesized)
tgtgtgtccacacatggggcactggagatgaacaaggtcccctgagatgaaggaaaggtgccatgtggggatgagaggctcctgtgcagatgcggggactccatgtgttcttcacttttt

SEQ ID NO: 416527 - DNA, 120 bp, Artificial Sequence
  ENSG00000149428_60 (sequence is synthesized)
ctatattttgtcccacgtagagggtgggggaccctgccactgaactgggctgctcgtgcctggcatggcccatgctcctcccgctaccatcctcccaaagacctattctttttgtttctg

SEQ ID NO: 416528 - DNA, 120 bp, Artificial Sequence
  ENSG00000149428_61 (sequence is synthesized)
tcctactcaccaagagagcgggagctgggcaagaaccccctgacagtccccatcctctcccagattgaaggcctgatggatgatgtggacttcaaggcaaaagtgactcgtgtggaattt

SEQ ID NO: 416529 - DNA, 120 bp, Artificial Sequence
  ENSG00000149428_62 (sequence is synthesized)
aacagtttgcaaaccgagaggagttgtgaagggcgcgggtggggggcgctgccggcctcgtgggtacgttcgtgccgcgtctgtcccagagctggggccgcaggagcggaggggcactat

SEQ ID NO: 416530 - DNA, 120 bp, Artificial Sequence
  ENSG00000149428_63 (sequence is synthesized)
agtttgcaaaccgagaggagttgtgaagggcgcgggtggggggcgctgccggcctcgtgggtacgttcgtgccgcgtctgtcccagagctggggccgcaggagcggaggcaagagcttct

SEQ ID NO: 416531 - DNA, 120 bp, Artificial Sequence
  ENSG00000149428_64 (sequence is synthesized)
agggtggggaacgagggagtctgggctccaagtgtgaatgtgttagtcatagtgcccacagcagacttcggcatctgagtggttaaatgtgtgtgagtgtcgaggcttctgagtccttct

SEQ ID NO: 416532 - DNA, 120 bp, Artificial Sequence
  ENSG00000149435_0 (sequence is synthesized)
attgaatgcagcaagggtctggaggctgaggaccaggcagacaaacattcagagttgctggaatgcgacagagacagggagtcagactggtcatgcaaggccagctctggggtctcggca

SEQ ID NO: 416533 - DNA, 120 bp, Artificial Sequence
  ENSG00000149435_1 (sequence is synthesized)
ggtggtccgcgacatgacctccgagttcttctctgcccagctccgggcccagatctctgacgacaccactcacccgatctcctactacaagcccgagttctacatgccggatgacggggg

SEQ ID NO: 416534 - DNA, 120 bp, Artificial Sequence
  ENSG00000149435_2 (sequence is synthesized)
cactgctcacctgtctgtggtcgcagaggacggcagtgctgtgtccgccaccagcaccatcaacctctactttggctccaaggtgcgctccccagtcagcgggatcctgctcaataatga

SEQ ID NO: 416535 - DNA, 120 bp, Artificial Sequence
  ENSG00000149435_3 (sequence is synthesized)
aatggatgacttcagctctaccagcatcaccaacgagtttggggtacccccctcacctgccaatttcatccagccagggaagcagccgctctcgtccatgtgcccgacgatcatggtggg

SEQ ID NO: 416536 - DNA, 85 bp, Artificial Sequence
  ENSG00000149435_4 (sequence is synthesized)
ggccaggacggccaggtccggatggtggtgggagctgccgggggcacgcagatcaccatggccactgcacttgaagtgggccgtg

SEQ ID NO: 416537 - DNA, 120 bp, Artificial Sequence
  ENSG00000149435_5 (sequence is synthesized)
ggctatgacgtgaagtgggccgtggaggagccccggctgcacaaccagcttctgcccaacgtcacgacagtggagagaaacattgaccaggaagtgactgcagccctggagacccggcac

SEQ ID NO: 416538 - DNA, 120 bp, Artificial Sequence
  ENSG00000149435_6 (sequence is synthesized)
aagccatcgtccgcatggctggtggctgggcagctgcctcggactccaggaaaggtggggaacctgctggctactgattgctccaggcggacaaggctgacaagcaatccaggaacaaaa

SEQ ID NO: 416539 - DNA, 120 bp, Artificial Sequence
  ENSG00000149435_7 (sequence is synthesized)
tactcaccaggacgaggaagaggactttgggggacaggcttctcctgtgagcagcagagcagcacaataaatgaggccactgtgccaggctccaggtggcctccctggcctgtctcccca

SEQ ID NO: 416540 - DNA, 81 bp, Artificial Sequence
  ENSG00000149435_8 (sequence is synthesized)
tggtcagagccacagtcaggggccttctgagacctgtgccccctccccaccctccctccccacctccctaggccagctctg

SEQ ID NO: 416541 - DNA, 120 bp, Artificial Sequence
  ENSG00000149435_9 (sequence is synthesized)
ctcgagagctgggctctgcgtcctcgtccagccgccaactcggccaaaggcgaagccagcagtttcttctgctgccgggcaacgcgccttttaaacctgagggagtgggcgcgtgagcac

SEQ ID NO: 416542 - DNA, 80 bp, Artificial Sequence
  ENSG00000149451_0 (sequence is synthesized)
cctggccaggctccgagcggggttggcggggaggggaggcgggagcgagggcgggcggtgggaggtgggggcgggaaggt

SEQ ID NO: 416543 - DNA, 120 bp, Artificial Sequence
  ENSG00000149451_1 (sequence is synthesized)
gtgggggcgggaaggtccgaaggcggcggcctgaggctgcaccgggcacgggtcggccgcaatccagcctgggcggagccggagttgcgagccgctgcctagaggccgaggagctcacag

SEQ ID NO: 416544 - DNA, 120 bp, Artificial Sequence
  ENSG00000149451_2 (sequence is synthesized)
ctatgggctggaggccccggagagctcgggggaccccgttgctgctgctgctactactgctgctgctctggccagtgccaggcgccggggtgcttcaaggacatatccctgggcagccag

SEQ ID NO: 416545 - DNA, 120 bp, Artificial Sequence
  ENSG00000149451_3 (sequence is synthesized)
tcaccccgcactgggtcctggatggacaaccctggcgcaccgtcagcctggaggagccggtctcgaagccagacatggggctggtggccctggaggctgaaggccaggagctcctgcttg

SEQ ID NO: 416546 - DNA, 120 bp, Artificial Sequence
  ENSG00000149451_4 (sequence is synthesized)
agctggagaagaaccacaggctgctggccccaggatacatagaaacccactacggcccagatgggcagccagtggtgctggcccccaaccacacggatcattgccactaccaagggcgag

SEQ ID NO: 416547 - DNA, 120 bp, Artificial Sequence
  ENSG00000149451_5 (sequence is synthesized)
taaggggcttccccgactcctgggtagtcctctgcacctgctctgggatgagtggcctgatcaccctcagcaggaatgccagctattatctgcgtccctggccaccccggggctccaagg

SEQ ID NO: 416548 - DNA, 120 bp, Artificial Sequence
  ENSG00000149451_6 (sequence is synthesized)
acttctcaacccacgagatctttcggatggagcagctgctcacctggaaaggaacctgtggccacagggatcctgggaacaaagcgggcatgaccagccttcctggtggtccccagagca

SEQ ID NO: 416549 - DNA, 120 bp, Artificial Sequence
  ENSG00000149451_7 (sequence is synthesized)
ggggcaggcgagaagcgcgcaggacccggaagtacctggaactgtacattgtggcagaccacaccctgttcttgactcggcaccgaaacttgaaccacaccaaacagcgtctcctggaag

SEQ ID NO: 416550 - DNA, 120 bp, Artificial Sequence
  ENSG00000149451_8 (sequence is synthesized)
tcgccaactacgtggaccagcttctcaggactctggacattcaggtggcgctgaccggcctggaggtgtggaccgagcgggaccgcagccgcgtcacgcaggacgccaacgccacgctct

SEQ ID NO: 416551 - DNA, 120 bp, Artificial Sequence
  ENSG00000149451_9 (sequence is synthesized)
cgcaggacgccaacgccacgctctgggccttcctgcagtggcgccgggggctgtgggcgcagcggccccacgactccgcgcagctgctcacgggccgcgccttccagggcgccacagtgg

SEQ ID NO: 416552 - DNA, 120 bp, Artificial Sequence
  ENSG00000149451_10 (sequence is synthesized)
gccgcgccgagagctcgggaggcgtgagcacggaccactcggagctccccatcggcgccgcagccaccatggcccatgagatcggccacagcctcggcctcagccacgaccccgacggct

SEQ ID NO: 416553 - DNA, 120 bp, Artificial Sequence
  ENSG00000149451_11 (sequence is synthesized)
gctgcgtggaggctgcggccgagtccggaggctgcgtcatggctgcggccaccgggcacccgtttccgcgcgtgttcagcgcctgcagccgccgccagctgcgcgccttcttccgcaagg

SEQ ID NO: 416554 - DNA, 120 bp, Artificial Sequence
  ENSG00000149451_12 (sequence is synthesized)
ggggcggcgcttgcctctccaatgccccggaccccggactcccggtgccgccggcgctctgcgggaacggcttcgtggaagcgggcgaggagtgtgactgcggccctggccaggagtgcc

SEQ ID NO: 416555 - DNA, 120 bp, Artificial Sequence
  ENSG00000149451_13 (sequence is synthesized)
gcgacctctgctgctttgctcacaactgctcgctgcgcccgggggcccagtgcgcccacggggactgctgcgtgcgctgcctgctgaagccggctggagcgctgtgccgccaggccatgg

SEQ ID NO: 416556 - DNA, 120 bp, Artificial Sequence
  ENSG00000149451_14 (sequence is synthesized)
gtgactgtgacctccctgagttttgcacgggcacctcctcccactgtcccccagacgtttacctactggacggctcaccctgtgccaggggcagtggctactgctgggatggcgcatgtc

SEQ ID NO: 416557 - DNA, 120 bp, Artificial Sequence
  ENSG00000149451_15 (sequence is synthesized)
aactctgcgggagatgctcatggaaactgcggccaggacagcgagggccacttcctgccctgtgcagggagggatgccctgtgtgggaagctgcagtgccagggtggaaagcccagcctg

SEQ ID NO: 416558 - DNA, 120 bp, Artificial Sequence
  ENSG00000149451_16 (sequence is synthesized)
ctcgcaccgcacatggtgccagtggactctaccgttcacctagatggccaggaagtgacttgtcggggagccttggcactccccagtgcccagctggacctgcttggcctgggcctggta

SEQ ID NO: 416559 - DNA, 120 bp, Artificial Sequence
  ENSG00000149451_17 (sequence is synthesized)
gagccaggcacccagtgtggacctagaatggtgtgccagagcaggcgctgcaggaagaatgccttccaggagcttcagcgctgcctgactgcctgccacagccacggggtttgcaatagc

SEQ ID NO: 416560 - DNA, 120 bp, Artificial Sequence
  ENSG00000149451_18 (sequence is synthesized)
aaccataactgccactgtgctccaggctgggctccacccttctgtgacaagccaggctttggtggcagcatggacagtggccctgtgcaggctgaaaaccatgacaccttcctgctggcc

SEQ ID NO: 416561 - DNA, 120 bp, Artificial Sequence
  ENSG00000149451_19 (sequence is synthesized)
atgctcctcagcgtcctgctgcctctgctcccaggggccggcctggcctggtgttgctaccgactcccaggagcccatctgcagcgatgcagctggggctgcagaagggaccctgcgtgc

SEQ ID NO: 416562 - DNA, 120 bp, Artificial Sequence
  ENSG00000149451_20 (sequence is synthesized)
agtggccccaaagatggcccacacagggaccaccccctgggcggcgttcaccccatggagttgggccccacagccactggacagccctggcccctggaccctgagaactctcatgagccc

SEQ ID NO: 416563 - DNA, 120 bp, Artificial Sequence
  ENSG00000149451_21 (sequence is synthesized)
agcagccaccctgagaagcctctgccagcagtctcgcctgacccccaagcagatcaagtccagatgccaagatcctgcctctggtgagaggtagctcctaaaatgaacagatttaaagac

SEQ ID NO: 416564 - DNA, 120 bp, Artificial Sequence
  ENSG00000149451_22 (sequence is synthesized)
aggtggccactgacagccactccaggaacttgaactgcaggggcagagccagtgaatcaccggacctccagcacctgcaggcagcttggaagtttcttccccgagtggagcttcgaccca

SEQ ID NO: 416565 - DNA, 120 bp, Artificial Sequence
  ENSG00000149451_23 (sequence is synthesized)
cccactccaggaacccagagccacattagaagttcctgagggctggagaacactgctgggcacactctccagctcaataaaccatcagtcccagaagcaaaggtcacacagcccctgacc

SEQ ID NO: 416566 - DNA, 120 bp, Artificial Sequence
  ENSG00000149451_24 (sequence is synthesized)
tccctcaccagtggaggctgggtagtgctggccatcccaaaagggctctgtcctgggagtctggtgtgtctcctacatgcaatttccacggacccagctctgtggagggcatgactgctg

SEQ ID NO: 416567 - DNA, 120 bp, Artificial Sequence
  ENSG00000149451_25 (sequence is synthesized)
gccagaagctagtggtcctggggccctatggttcgactgagtccacactcccctggagcctggctggcctctgcaaacaaacataattttggggaccttccttcctgtttcttcccaccc

SEQ ID NO: 416568 - DNA, 120 bp, Artificial Sequence
  ENSG00000149451_26 (sequence is synthesized)
tgtcttctcccctaggtggttcctgagcccccacccccaatcccagtgctacacctgaggttctggagctcagaatctgacagcctctcccccattctgtgtgtgtcggggggacagagg

SEQ ID NO: 416569 - DNA, 120 bp, Artificial Sequence
  ENSG00000149451_27 (sequence is synthesized)
ctctcccccattctgtgtgtgtcggggggacagagggaaccatttaagaaaagataccaaagtagaagtcaaaagaaagacatgttggctataggcgtggtggctcatgcctataatccc

SEQ ID NO: 416570 - DNA, 120 bp, Artificial Sequence
  ENSG00000149451_28 (sequence is synthesized)
ggccagcaggtccacaccagcctgggcaacacagcaagacaccgcatctacagaaaaattttaaaattagctgggcgtggtggtgtgtacctgtaggcctagctgctcaggaggctgaag

SEQ ID NO: 416571 - DNA, 64 bp, Artificial Sequence
  ENSG00000149451_29 (sequence is synthesized)
ggctgaagcaggaggatcacttgagcctgagttcaacactgcagtgagctatgattttaaaaag

SEQ ID NO: 416572 - DNA, 120 bp, Artificial Sequence
  ENSG00000149451_30 (sequence is synthesized)
tttcggccctttgccacttcctctgcacaaatcacctctgtcacccccttgaagttcccaaatgctgggcccagcacatcttttcactccataccactggtcagctgcggtgctggctgc

SEQ ID NO: 416573 - DNA, 120 bp, Artificial Sequence
  ENSG00000149451_31 (sequence is synthesized)
ccctgtgccagggccctgccttaacccagttctctgtgacctgggtggtggcggagtggggagtcacataatactaagcatggctgtcctaggactcaccctgcaccagggccctaggca

SEQ ID NO: 416574 - DNA, 120 bp, Artificial Sequence
  ENSG00000149451_32 (sequence is synthesized)
gggcaggcactctgtggccatgtctgacatagcctggtcttgggagtgctccgggcaagccaagggagatggcatgatttgggccagagatgggggcagagggcataacagacaggggca

SEQ ID NO: 416575 - DNA, 120 bp, Artificial Sequence
  ENSG00000149451_33 (sequence is synthesized)
gggcaccacctgggccccgggtggcagctaagaggaccctgacaaagcgagttgtgattgagggtctgtgggcagaggagcaaggtggccagagcctggcgtgtcagcacggagggggcg

SEQ ID NO: 416576 - DNA, 120 bp, Artificial Sequence
  ENSG00000149451_34 (sequence is synthesized)
ctgcagagggtggcggctgcttctcatccccaggcgggagtctcagggcaggggagaatgttttgaaggaacatcacaggaaatgacaaggccttgggggatgggatggggacagtcaaa

SEQ ID NO: 416577 - DNA, 120 bp, Artificial Sequence
  ENSG00000149451_35 (sequence is synthesized)
gatggcttggaatcatcaagggcagcagggcacccaggggcaaggagagcagacatagctgccgaaggggcggacatccaaggttctttggaagctgagcgatgccagcatctggagagt

SEQ ID NO: 416578 - DNA, 120 bp, Artificial Sequence
  ENSG00000149451_36 (sequence is synthesized)
gccaggctgctgtcagagcctggaggaaatgttaggactagagagaggaggtgccagccgagggcatgaggctcacttggagcctggatcccaaggctcccctgaagagggagcaggaag

SEQ ID NO: 416579 - DNA, 120 bp, Artificial Sequence
  ENSG00000149451_37 (sequence is synthesized)
ggagctgagagggtgacttggagcagatgggtgccccaagaaactcagtaaacgcagaactccctgggctggacaccatgctgcggggaggcaataacccactcaggatcactgtgccaa

SEQ ID NO: 416580 - DNA, 120 bp, Artificial Sequence
  ENSG00000149451_38 (sequence is synthesized)
cctcctggactcttatcacgttgctcagccccaaagatggcccacacagggaccaccccctgggcggcgttcaccccatggagttgggccccacagccactggacagccctggcccctgg

SEQ ID NO: 416581 - DNA, 120 bp, Artificial Sequence
  ENSG00000149451_39 (sequence is synthesized)
cagcacccagtcaccttgagtcccctatgcccctccccagccccaggggctcctgctgaccatattcacaacatttaccctccaccatttctcccagaccctgagaactctcatgagccc

SEQ ID NO: 416582 - DNA, 120 bp, Artificial Sequence
  ENSG00000149451_40 (sequence is synthesized)
tgctggcccccaaccacacggtgagatgcttccatgggctctgggatgcaccgccagaggtacccccccaccattcctacccctactcctccttgcattcctaaggggcggttggagcca

SEQ ID NO: 416583 - DNA, 120 bp, Artificial Sequence
  ENSG00000149451_41 (sequence is synthesized)
gcccctaccacaccctccctcttgcccctcttgctccagccctggctgagatttggggctggccccttcctccctaggatcattgccactaccaagggcgagtaaggggcttccccgact

SEQ ID NO: 416584 - DNA, 120 bp, Artificial Sequence
  ENSG00000149451_42 (sequence is synthesized)
cctgggtagtcctctgcacctgctctgggatgaggtgagctctgggagaggaggctgggcctgggatggggaaagagctccctcacacccgctcctacccctctgcaccctagtggcctg

SEQ ID NO: 416585 - DNA, 120 bp, Artificial Sequence
  ENSG00000149451_43 (sequence is synthesized)
gaagaaacaagttccagaaaacatgttaaacttccttctgggagctgggattggtggtcagggctcaagcccagcagcttccacgagcttcagcgctgcctgactgcctgccacagccac

SEQ ID NO: 416586 - DNA, 80 bp, Artificial Sequence
  ENSG00000149451_44 (sequence is synthesized)
cacgtgggtgcctctgacccggacgcgggtcccgggtggggcggcctcacctcccggccccgcctggtcacgccgcgctc

SEQ ID NO: 416587 - DNA, 120 bp, Artificial Sequence
  ENSG00000149451_45 (sequence is synthesized)
tggggacttcctccgctgcgtttctttggtcgtccctcagtttcctcttctgtaaaatggggataatgatcatagtgtccgcttcagggtggtttatgaggcttaaagggaagaagctca

SEQ ID NO: 416588 - DNA, 120 bp, Artificial Sequence
  ENSG00000149451_46 (sequence is synthesized)
ggcaaagtggattctcaacggtatgaagattattttccgagtaacctggcgaggttactcctacaccgggaggagcaccgtcgggtcgcgattccaccttgggtcccgggctgctcacta

SEQ ID NO: 416589 - DNA, 120 bp, Artificial Sequence
  ENSG00000149451_47 (sequence is synthesized)
ttggggccgcatcgtcccctgtcccgcttgttgtgtgactttgcgcgggttacttcccctctctgggctctgcgcgtctggcggctgtagccaagcccaggggtggggatcagagaagcg

SEQ ID NO: 416590 - DNA, 120 bp, Artificial Sequence
  ENSG00000149452_0 (sequence is synthesized)
acagcttgttagagctgagctgccctactacagcagctgccggcccctaggacagagcagggacctcaactacactgatcaccagccccatcggatccagacccggccaccagctctggc

SEQ ID NO: 416591 - DNA, 120 bp, Artificial Sequence
  ENSG00000149452_1 (sequence is synthesized)
tcgtcttgccccagtgccatgaccttctcggagatcctggaccgtgtgggaagcatgggccatttccagttcctgcatgtagccatactgggcctcccgatcctcaacatggccaaccac

SEQ ID NO: 416592 - DNA, 120 bp, Artificial Sequence
  ENSG00000149452_2 (sequence is synthesized)
aacctgctgcagatcttcacagccgccacccctgtccaccactgtcgcccgccccacaatgcctccacagggccttgggtgctccccatgggcccaaatgggaagcctgagaggtgcctc

SEQ ID NO: 416593 - DNA, 120 bp, Artificial Sequence
  ENSG00000149452_3 (sequence is synthesized)
cgttttgtacatccgcccaatgccagcctgcccaatgacacccagagggccatggagccatgcctggatggctgggtctacaacagcaccaaggactccattgtgacagagtgggacttg

SEQ ID NO: 416594 - DNA, 120 bp, Artificial Sequence
  ENSG00000149452_4 (sequence is synthesized)
gtgtgcaactccaacaaactgaaggagatggcccagtctatcttcatggcaggtatactgattggagggctcgtgcttggagacctgtctgacaggtttggccgcaggcccatcctgacc

SEQ ID NO: 416595 - DNA, 120 bp, Artificial Sequence
  ENSG00000149452_5 (sequence is synthesized)
tgcagctacctgctgctggcagccagcggctccggtgcagccttcagccccaccttccccatctacatggtcttccgcttcctgtgtggctttggcatctcaggcattaccctgagcacc

SEQ ID NO: 416596 - DNA, 120 bp, Artificial Sequence
  ENSG00000149452_6 (sequence is synthesized)
gtcatcttgaatgtggaatgggtgcctacccggatgcgggccatcatgtcgacagcactcgggtactgctacacctttggccagttcattctgcccggcctggcctacgccatcccccag

SEQ ID NO: 416597 - DNA, 120 bp, Artificial Sequence
  ENSG00000149452_7 (sequence is synthesized)
tggcgttggctgcagttaactgtgtccattcccttcttcgtcttcttcctatcatcctggtggacaccagagtccatacgctggttggtcttgtctggaaagtcctcgaaggccctgaag

SEQ ID NO: 416598 - DNA, 120 bp, Artificial Sequence
  ENSG00000149452_8 (sequence is synthesized)
atactccggcgggtggctgtcttcaatggcaagaaggaagagggagaaaggctcagcttggaggagctcaaactcaacctgcagaaggagatctccttggccaaggccaagtacaccgca

SEQ ID NO: 416599 - DNA, 120 bp, Artificial Sequence
  ENSG00000149452_9 (sequence is synthesized)
catgctgcgccgcatgaccttctgtctttccctggcctggtttgctaccggttttgcctactatagtttggctatgggtgtggaagaatttggagtcaacctctacatcctccagatcat

SEQ ID NO: 416600 - DNA, 120 bp, Artificial Sequence
  ENSG00000149452_10 (sequence is synthesized)
ctttggtggggtcgatgtcccagccaagttcatcaccatcctctccttaagctacctgggccggcataccactcaggccgctgccctgctcctggcaggaggggccatcttggctctcac

SEQ ID NO: 416601 - DNA, 120 bp, Artificial Sequence
  ENSG00000149452_11 (sequence is synthesized)
ctttgtgcccttggacttgcagaccgtgaggacagtattggctgtgtttgggaagggatgcctatccagctccttcagctgcctcttcctctacacaagtgaattataccccacagtcat

SEQ ID NO: 416602 - DNA, 120 bp, Artificial Sequence
  ENSG00000149452_12 (sequence is synthesized)
caggcaaacaggtatgggcgtaagtaacctgtggacccgcgtgggaagcatggtgtccccgctggtgaaaatcacgggtgaggtacagcccttcatccccaatatcatctacgggatcac

SEQ ID NO: 416603 - DNA, 120 bp, Artificial Sequence
  ENSG00000149452_13 (sequence is synthesized)
cgccctcctcgggggcagtgctgccctcttcctgcctgagaccctgaatcagcccttgccagagactatcgaagacctggaaaactggtccctgcgggcaaagaagccaaagcaggagcc

SEQ ID NO: 416604 - DNA, 120 bp, Artificial Sequence
  ENSG00000149452_14 (sequence is synthesized)
agaggtggaaaaggcctcccagaggatccctctacagcctcacggaccaggcctgggctccagctgaggacaacggaaccccctttccctgccctccagagactgatcctagccaggcac

SEQ ID NO: 416605 - DNA, 120 bp, Artificial Sequence
  ENSG00000149452_15 (sequence is synthesized)
cttaggagtatagggaggccccatataggtccatcctcctaggatgaagccttctgagagcttggtgaaggtgtctccatcaccaccaccagagcctcctgcccagccctggccagttca

SEQ ID NO: 416606 - DNA, 120 bp, Artificial Sequence
  ENSG00000149452_16 (sequence is synthesized)
aaggttcagccatccctgcccttgttctccctgcaacccaggccctgccattcttctgtctagcccttccccactggccaccttcccccactgtcccggtcctcttcccctgaggtcccc

SEQ ID NO: 416607 - DNA, 120 bp, Artificial Sequence
  ENSG00000149452_17 (sequence is synthesized)
tgatatcccctggctcagtcctaacaagactgagtcttaacaagatgagaagtcctccccttcttgcctcccacacttttctttgatgggaggtttcaataaacagcgataagaactcta

SEQ ID NO: 416608 - DNA, 120 bp, Artificial Sequence
  ENSG00000149452_18 (sequence is synthesized)
tgttccaggccccttccccagctcacatccctgccgctcagtgtccccatgctctccctctctgtcactgcccccctctgggtcagctctgccctctggaaccccacagagcaaggctag

SEQ ID NO: 416609 - DNA, 120 bp, Artificial Sequence
  ENSG00000149452_19 (sequence is synthesized)
accaatgggtttcagactcgaagacaaaaattatgtttatctcaagttttctcctctgtctgactttctcctgctccctgaaagccctttctgtgacctggtttctgcttcccatcctgg

SEQ ID NO: 416610 - DNA, 120 bp, Artificial Sequence
  ENSG00000149452_20 (sequence is synthesized)
ccatttctttgtgaataggattcaatttgtccaggaacccttcaaagggatcccacagttcagagagaggaagggaaacatctgacccaggcatacagctcaatgctcacctcgccagtc

SEQ ID NO: 416611 - DNA, 120 bp, Artificial Sequence
  ENSG00000149452_21 (sequence is synthesized)
tggatgttaaactgctgcccaaccaggagagatcatttactgcctcctttggtctccgagattccctccagtcctgatcttctctagagtcagttattggcacctttgccaccacaccct

SEQ ID NO: 416612 - DNA, 120 bp, Artificial Sequence
  ENSG00000149452_22 (sequence is synthesized)
ggaccatgcccacgtcagacatgaccagtcaatcacagcactttctccctgagcccagacacgatctcagaaacctcaaaaggacactcaagcagcccctatcatcagttgcagttggca

SEQ ID NO: 416613 - DNA, 120 bp, Artificial Sequence
  ENSG00000149452_23 (sequence is synthesized)
caagaagtgaagctattcatcatcctggtgacccaatgaccagcatggggagtggcctctgcctggctgcaggtgctaaccaatccttctctgcctctcaggtttgctaccggttttgcc

SEQ ID NO: 416614 - DNA, 120 bp, Artificial Sequence
  ENSG00000149452_24 (sequence is synthesized)
aggttgggtgccagggacttcactgctggctctgcctctaagtcactgtgttaccttgagcaggtccctgcactctctggggctcagggtctctcttctagaaaataacgcaattgggct

SEQ ID NO: 416615 - DNA, 120 bp, Artificial Sequence
  ENSG00000149452_25 (sequence is synthesized)
agatgacatgaaagctcctttccagatctgacttggactgggcaaaaagtatggtggtatctggatagtgtgaaaatttttgaggtattgagagtgtcctgagtgacatcactgtagaga

SEQ ID NO: 416616 - DNA, 120 bp, Artificial Sequence
  ENSG00000149452_26 (sequence is synthesized)
tatgggtgttagttggttgataacacctatacccttccaaaagaacttgaggtattttaagacaagaacaagaacatatacaacaaaatataaatggaaatagaggatcagaggcagggg

SEQ ID NO: 416617 - DNA, 120 bp, Artificial Sequence
  ENSG00000149452_27 (sequence is synthesized)
aaaacacaaacatagcaggacacaggcatgcaaagcattactcagctttaagtttggatctgagcttcttggaagccaaagcaaaaagggagacaagatcagctaaggagtgagaactct

SEQ ID NO: 416618 - DNA, 120 bp, Artificial Sequence
  ENSG00000149452_28 (sequence is synthesized)
ggtcagtcactgcctctggccccatcagtgctcctccctggggaagcaggtctgggcccagggcttttccttagctctctgtccctaggtccctgcgggcaaagaagccaaagcaggagc

SEQ ID NO: 416619 - DNA, 120 bp, Artificial Sequence
  ENSG00000149452_29 (sequence is synthesized)
atactgaggacttaccctggacctgacactctgctaggtacacaatctcattcaataccacttgcaagtaagtgacactattattcccattttacagatcaggaaactgaggcagaacaa

SEQ ID NO: 416620 - DNA, 120 bp, Artificial Sequence
  ENSG00000149452_30 (sequence is synthesized)
ggaaagtcacttgccactggagaagcagtggttaagagcatgagtttggaaacagacacacctaggtttgagtcctatcgccttgagcctcagctgtggcatctgtaaaatggggatgat

SEQ ID NO: 416621 - DNA, 120 bp, Artificial Sequence
  ENSG00000149452_31 (sequence is synthesized)
gaacttagggtcagcatcagaacagcaggaagacccaacggagggcgatatcaacagcatccgtggggaggatgtcagtagccgtggggatgcagaagctggtgccccttcacgcggagg

SEQ ID NO: 416622 - DNA, 120 bp, Artificial Sequence
  ENSG00000149452_32 (sequence is synthesized)
tagtctgggagcagaacccctgtgctccactcttgggctggcccctccccttgcctctgttcccctggctcacagcctataccacatctgattccctgagctcctctagaggcaccacgc

SEQ ID NO: 416623 - DNA, 120 bp, Artificial Sequence
  ENSG00000149452_33 (sequence is synthesized)
ctgcatctccctctcttcgtcctgcccactagctggtcattaatggcacccctccccctcctctgcccgaaggagctcaaactcaacctgcagaaggagatctccttggccaaggccaag

SEQ ID NO: 416624 - DNA, 120 bp, Artificial Sequence
  ENSG00000149452_34 (sequence is synthesized)
gcctccagtaggctcacttaagggcaaggcctagggcatctgaaagagaagtcagagaatcccctctcctgggccaccacagcccagccccaaccccagaaatctgctgcattcctgccc

SEQ ID NO: 416625 - DNA, 120 bp, Artificial Sequence
  ENSG00000149452_35 (sequence is synthesized)
tccatccacacttcatgtacgacaggcctgtgtacaggcaccacaggtacatgcaagctggactgatgtgaacatgagcaagcacatgtgagtgctctgaggtgtgtacaccacgcctgt

SEQ ID NO: 416626 - DNA, 120 bp, Artificial Sequence
  ENSG00000149452_36 (sequence is synthesized)
gcatgaaaatacatgtgtgtgtctacacgtcccagcatgcatatgagcagatgactgaccaagcccagagtggctgcagacagaagccagagcccctccaatcctgatttctttcccctg

SEQ ID NO: 416627 - DNA, 120 bp, Artificial Sequence
  ENSG00000149452_37 (sequence is synthesized)
atcaccccaaatctctgatctatgtctcagccccatgcccagcagatagtttttctcgtgttaactgagaaaactgcaatggtagctgaccgctgtcaatatcagaaaactgcaatggta

SEQ ID NO: 416628 - DNA, 120 bp, Artificial Sequence
  ENSG00000149452_38 (sequence is synthesized)
gctgaccgctgtcaatatctgctgccatgttcccggttccctccagccacagcagaacagccaatccctccaccagcagccatccctttccctctggggtctctgcccattccctctgtc

SEQ ID NO: 416629 - DNA, 120 bp, Artificial Sequence
  ENSG00000149452_39 (sequence is synthesized)
ttggctgccgcccatcaccagttaaacaagcttaggcttctcccaacttaacaaaaatcaacacaaacacatgccaggatgttgtatctccttccaagggccacactggctctttctccc

SEQ ID NO: 416630 - DNA, 120 bp, Artificial Sequence
  ENSG00000149452_40 (sequence is synthesized)
cttcgaagccagacttcataaaggagctgtctgcctcccctgtatccaccttctagcctcatacatctcccccactgcactccggctcctaccccttccctccctggaaccgctttcacc

SEQ ID NO: 416631 - DNA, 120 bp, Artificial Sequence
  ENSG00000149452_41 (sequence is synthesized)
aaggacgctcatcccctccctgtgctggatccataagtcactcttcagccctcctcttactggccttttggcaaatttggtcctactggtcactctcttcttccttagtttctgagaggc

SEQ ID NO: 416632 - DNA, 120 bp, Artificial Sequence
  ENSG00000149452_42 (sequence is synthesized)
cacgtgtttgcagctcccccccacacactggctactccttctcaggcccctctgcggtatcctataaatgctgcagtgttcactttgcctatcctgcccccaccccttttctaaggatct

SEQ ID NO: 416633 - DNA, 120 bp, Artificial Sequence
  ENSG00000149452_43 (sequence is synthesized)
gcatccccggaatctgccaactgaacagttccataatctgccatctctggtggtgaccaactagaccacagggcactccagatccaaatctcatttatcacatactctctcctgggctag

SEQ ID NO: 416634 - DNA, 120 bp, Artificial Sequence
  ENSG00000149452_44 (sequence is synthesized)
gatttgagatcttaagaggttcttatccatctctttgtccttgccctgggaaggcaggttagcatgaggctaggctggcccagatgcagatagagcagagaaagccagttgcagcaagag

SEQ ID NO: 416635 - DNA, 120 bp, Artificial Sequence
  ENSG00000149452_45 (sequence is synthesized)
aataaggcagacacacagagaaaaagagaacaagagaccacatgggcccagataaaaagagctggtgaggcgacttccactggttcttaatgaattccaggtctcggttcctcatcagcc

SEQ ID NO: 416636 - DNA, 120 bp, Artificial Sequence
  ENSG00000149452_46 (sequence is synthesized)
ctggatgcgctttttaccccggggttctattaaatatccctgaattctccaaataaattcccctttctgtttaagctaacttgatgggctgctccttgtaaccaaagagctccaaaagca

SEQ ID NO: 416637 - DNA, 120 bp, Artificial Sequence
  ENSG00000149452_47 (sequence is synthesized)
gctcctctcgctctaccatctcttcaacactgatttgccccaggaatctttcctaggaactcttcctgtaacattcttccccagcactgtccagtggaaatagaatgcaagccacatatg

SEQ ID NO: 416638 - DNA, 120 bp, Artificial Sequence
  ENSG00000149452_48 (sequence is synthesized)
taactccaaatcatctagtagccatttttaaaaagctaaaagaaaacaggtgaaattaattttgaatatattatgtacataatataataatatttgacccactatattcaaatattgcat

SEQ ID NO: 416639 - DNA, 120 bp, Artificial Sequence
  ENSG00000149452_49 (sequence is synthesized)
ttcaggattaatcaatattaacattattaattagatattttataaccttaaattcagactaagtcttcaaattctggtgtgtatgttccactagcagcatatttcagtttggactagctc

SEQ ID NO: 416640 - DNA, 120 bp, Artificial Sequence
  ENSG00000149452_50 (sequence is synthesized)
aattcaagcactcagtagtggctactggctaccaccttggacaactcagacatactgcagggctttaattatcagccacagagctaattactctcaaatctgtatttagatatttgagag

SEQ ID NO: 416641 - DNA, 120 bp, Artificial Sequence
  ENSG00000149452_51 (sequence is synthesized)
acagcttaataaatgtgaaagggatggtattgtacccctgcgtcaaccttctggtgacttcccactgggataaaatctaaagtctttcacaaggcctgccatgaccaggcccaacctgcc

SEQ ID NO: 416642 - DNA, 120 bp, Artificial Sequence
  ENSG00000149452_52 (sequence is synthesized)
tcaacagctttggtttttaacactctacctcgtacccagaaatccagcctcaactgatctttttcagatcctagactgcccctgctcttcaccatgcccagcacttggcttctccccatc

SEQ ID NO: 416643 - DNA, 120 bp, Artificial Sequence
  ENSG00000149452_53 (sequence is synthesized)
caactctacagcacttggctcatgccaactcatccttaaggcctagcttggatggattcctctgaaaagccttctgtgaccacccctcaactgccccagagcctgggttgagcaccctgc

SEQ ID NO: 416644 - DNA, 120 bp, Artificial Sequence
  ENSG00000149452_54 (sequence is synthesized)
ttatcagacaatgaactgtgatcacagttgtgtcttagtgggtgtttccctggaagcagactcaagacaagaatttaagtccaagtaccatagattatttggcaggagatcctagaaagc

SEQ ID NO: 416645 - DNA, 120 bp, Artificial Sequence
  ENSG00000149452_55 (sequence is synthesized)
acaagtaggggagttaggcggtaagtcagggaagagaatcaagaggcaagaggaaagagaatgagaagggaagaaggttctcccatcctagcccatctgtcatccagccatgtgggaagc

SEQ ID NO: 416646 - DNA, 120 bp, Artificial Sequence
  ENSG00000149452_56 (sequence is synthesized)
tgctgggactggccatttatgatcatgttggatgcaggactccccccttgccaacctgtagataacctggggctggcgcctaggaccagccttgtgctacactgccccctgagatctggc

SEQ ID NO: 416647 - DNA, 120 bp, Artificial Sequence
  ENSG00000149452_57 (sequence is synthesized)
ccttatgctgagagtgctatggggttggatggggagaagccacctagtttctatcttggaacctggtttctacctatagagtttctactgtggagcctaggatcagctgacaacagagcc

SEQ ID NO: 416648 - DNA, 120 bp, Artificial Sequence
  ENSG00000149452_58 (sequence is synthesized)
agcaatgcttccccttagtttgactgggtctcgacctggagggagaaggactaggctcagggaggaatactgaccccactatgcccccatctttcagttgtccggaattccgagtggctg

SEQ ID NO: 416649 - DNA, 120 bp, Artificial Sequence
  ENSG00000149452_59 (sequence is synthesized)
ccaggatgtcctggccatgactattcctgtgcttcagggtgcttattgcaaggacacacatgaagggaagggaagacacccaagaaaatactttccaggtacatggtcaggacttatggt

SEQ ID NO: 416650 - DNA, 120 bp, Artificial Sequence
  ENSG00000149452_60 (sequence is synthesized)
gaactgagatgttgttcaggacaaactggccactcacaagacccgttcttcttgcaatccccaaatccccattctggattcctccttctctccattgctgcttattcctctacaacccca

SEQ ID NO: 416651 - DNA, 120 bp, Artificial Sequence
  ENSG00000149452_61 (sequence is synthesized)
gctccgcttgctttttctactccctcccttctgtctctaagcagggactccacctggctcggtacatggagatccaatatggagcaccacttttgggcagagtcctcatgctgcgtcaac

SEQ ID NO: 416652 - DNA, 120 bp, Artificial Sequence
  ENSG00000149452_62 (sequence is synthesized)
tcataggtcactggcctcatgtccagcctttatatggaagtctttggatgaatttctaatttctgcaccatccgtcagccaggatagtcaggccacaaggcacaaagctcacagtgtatc

SEQ ID NO: 416653 - DNA, 120 bp, Artificial Sequence
  ENSG00000149452_63 (sequence is synthesized)
tcagaattccttactcagaatgttgcgaggggcctggcagacacttggaatctgctggaccctccccaagtcaatcgtttcaaacccatgcttaggacatgtgatctaagtaagagtgtt

SEQ ID NO: 416654 - DNA, 120 bp, Artificial Sequence
  ENSG00000149452_64 (sequence is synthesized)
ttatatgatctgtaaattatgtatttgaaaaatctcacaaaagaataaaaacaaaaatcacaggtagtcccacactttaaatcccaattataaaatggaataaagttatacaaaatcagg

SEQ ID NO: 416655 - DNA, 120 bp, Artificial Sequence
  ENSG00000149452_65 (sequence is synthesized)
cagacaaacccaaggagctccgagccgggctgaaaaaggaaacggtccttgggaggtaggggcaaagtcagggcgctgggagaggaagcccacatgtatgaggccacaggctgagcatgg

SEQ ID NO: 416656 - DNA, 120 bp, Artificial Sequence
  ENSG00000149474_0 (sequence is synthesized)
agaagatgttattggcaaaaggatctcaaaaatcatgacttgaatgtgaaatatctgttggacagacaacacgagtttgtgtgtgtgtgttgatggagagtagcttagtagtatcttcat

SEQ ID NO: 416657 - DNA, 120 bp, Artificial Sequence
  ENSG00000149474_1 (sequence is synthesized)
ctttttttttggtcactgtccttttaaacttgatcaaataaaggacagtgggtcatataagttactgctttcagggtcccttatatctgaataaaggagtgtgggcagacactttttgga

SEQ ID NO: 416658 - DNA, 120 bp, Artificial Sequence
  ENSG00000149474_2 (sequence is synthesized)
agagtctgtctgggtgatcctggtagaagccccattagggtcactgtccagtgcttagggttgttactgagaagcactgccgagcttgtgagaaggaagggatggatagtagcatccacc

SEQ ID NO: 416659 - DNA, 120 bp, Artificial Sequence
  ENSG00000149474_3 (sequence is synthesized)
tgagtagtctgatcagtcggcatgatgacgaagccacgagaacatcgacctcagaaggactggaggaaggtgaagtggagggagagacgctcctgatcgtcgaatccgaggatcaggcat

SEQ ID NO: 416660 - DNA, 120 bp, Artificial Sequence
  ENSG00000149474_4 (sequence is synthesized)
cagtggacttatcgcacgaccagagtggggattccctcaacagtgatgaaggagacgtgtcttggatggaggagcagctgtcctacttctgtgacaagtgccaaaaatggataccagcca

SEQ ID NO: 416661 - DNA, 120 bp, Artificial Sequence
  ENSG00000149474_5 (sequence is synthesized)
gtcagctgagggaacagctcagttaccttaagggtgataatttttttaggtttacttgttcggattgctcagcagatggcaaggagcagtatgaaaggctgaagctgacatggcagcaag

SEQ ID NO: 416662 - DNA, 120 bp, Artificial Sequence
  ENSG00000149474_6 (sequence is synthesized)
tcgtcatgttggcaatgtacaacttgtctctggaaggaagtggacgtcaaggttatttcaggtggaaagaagatatctgtgcttttattgagaaacattggacttttttactagggaata

SEQ ID NO: 416663 - DNA, 120 bp, Artificial Sequence
  ENSG00000149474_7 (sequence is synthesized)
ggaaaaagacgtctacctggtggagcaccgtggcaggttgcctcagcgtgggaagtcccatgtacttccgttcaggtgctcaggaatttggagagccaggatggtggaaacttgttcata

SEQ ID NO: 416664 - DNA, 120 bp, Artificial Sequence
  ENSG00000149474_8 (sequence is synthesized)
acaagcccccaacgatgaaacctgaaggagagaagttgtctgcctctactttgaaaataaaagcagcctcaaaaccaactttagatcccatcattactgttgagggacttagaaaacgag

SEQ ID NO: 416665 - DNA, 120 bp, Artificial Sequence
  ENSG00000149474_9 (sequence is synthesized)
caagtcggaatcctgtggaatctgccatggaattaaaagagaaaaggtctcgaactcaggaagcaaaagacattagaagagcccagaaggaggccgctggctttcttgacaggagcacat

SEQ ID NO: 416666 - DNA, 120 bp, Artificial Sequence
  ENSG00000149474_10 (sequence is synthesized)
cttctacccctgtaaaattcataagccgaggccgcaggccagatgtgattctggaaaaaggcgaagtgattgacttttcctccttgagctcctctgaccgcaccccgctgacaagcccat

SEQ ID NO: 416667 - DNA, 120 bp, Artificial Sequence
  ENSG00000149474_11 (sequence is synthesized)
ctccttctccttctctggatttctctgcccctggtacacctgcctctcattctgccacacctagcttgctttcagaagcagatctgattccagatgtgatgcccccacaagccttgtttc

SEQ ID NO: 416668 - DNA, 120 bp, Artificial Sequence
  ENSG00000149474_12 (sequence is synthesized)
atgatgacgatgagatggaaggcgatggagtcatagacccagggatggagtacgtcccaccccctgctgggtcagtagcttctgggccagtggttggggtcagaaagaaggtcagaggcc

SEQ ID NO: 416669 - DNA, 120 bp, Artificial Sequence
  ENSG00000149474_13 (sequence is synthesized)
ctgaacagataaagcaggaggtagagagtgaggaggaaaaacccgacaggatggatattgacagtgaagacacagattcaaacacatctttgcaaacaagggctagagaaaagaggaagc

SEQ ID NO: 416670 - DNA, 120 bp, Artificial Sequence
  ENSG00000149474_14 (sequence is synthesized)
ctcagctggagaaggacacaaagccgaaagagcccaggtatactcccgtgagcatctacgaggaaaagctgctgctcaagaggctggaagcttgtcccggtgctgttgccatgactccgg

SEQ ID NO: 416671 - DNA, 120 bp, Artificial Sequence
  ENSG00000149474_15 (sequence is synthesized)
gcaaactgattgtcagacaagcgaaaagggataggggattaccactttttgacttggatcaagttgttaatgctgctcttttgttagttgacgggatttatggagccaaagaaggaggaa

SEQ ID NO: 416672 - DNA, 120 bp, Artificial Sequence
  ENSG00000149474_16 (sequence is synthesized)
tttccagacttccagctggacaagccacgtacagaaccacctgtcaggacttcagaatccttgaccgataccagacttccttgccgtccaggaagggatttcgacaccagaccaccaagt

SEQ ID NO: 416673 - DNA, 120 bp, Artificial Sequence
  ENSG00000149474_17 (sequence is synthesized)
ttttgtatcgcttggtaggatcagaagatatggctgtggaccagagtattgtcagcccttatacctctcggatcttgaaaccttatatcaggcgtgattatgaaacaaagccacccaaac

SEQ ID NO: 416674 - DNA, 120 bp, Artificial Sequence
  ENSG00000149474_18 (sequence is synthesized)
tgcagctcctgtcacagattcgttcccacctgcacaggagcgaccctcactggacgccggagcccgacgcacctctcgattactgttatgtgcggccaaatcacatcccaacgatcaact

SEQ ID NO: 416675 - DNA, 120 bp, Artificial Sequence
  ENSG00000149474_19 (sequence is synthesized)
ccatgtgtcaggagtttttttggcctggcattgacctgtctgagtgtctgcagtacccagacttcagtgttgttgttctttataaaaaagtcatcattgcctttggcttcatggttcctg

SEQ ID NO: 416676 - DNA, 120 bp, Artificial Sequence
  ENSG00000149474_20 (sequence is synthesized)
atgtgaaatacaatgaagcttacatttcatttctgttcgtccaccctgaatggagaagagcagggattgcaactttcatgatctatcatctgattcagacctgcatgggcaaggacgtaa

SEQ ID NO: 416677 - DNA, 120 bp, Artificial Sequence
  ENSG00000149474_21 (sequence is synthesized)
cccttcacgtctcagcaagcaaccccgctatgctactgtaccagaagtttggattcaagactgaagaatatgtattagatttctatgataaatattacccattggagagtacagagtgta

SEQ ID NO: 416678 - DNA, 120 bp, Artificial Sequence
  ENSG00000149474_22 (sequence is synthesized)
aacacgcattctttctgaggctccggcgctgatgcgaatacagctcacagagaaacgcatgtgctattggagaacaggtctttgtggagatctaaaggcagtgattgatttcacagggag

SEQ ID NO: 416679 - DNA, 120 bp, Artificial Sequence
  ENSG00000149474_23 (sequence is synthesized)
ctctaatctctgtgattacatggtccttcaaactcccaaccaaagtgagaaaagcggcatgcagtgaaatgagcagtgagcagccctttagcaaaatcgccctccagtccttcctggaga

SEQ ID NO: 416680 - DNA, 120 bp, Artificial Sequence
  ENSG00000149474_24 (sequence is synthesized)
tgccttcagccagcatcccagactccacagttatttatgaatgatgtcgtgattctccctccacctgacagtttgtaagagtgaaagagcatctaacctgatgctcttggagagagataa

SEQ ID NO: 416681 - DNA, 120 bp, Artificial Sequence
  ENSG00000149474_25 (sequence is synthesized)
cctgtctgtcataacttaaaggatgagaaaatgtggtgtagctattaaagattcatgcagtcccaaaaggcactgtcctgggatgatgagagattataaggtgatttcataaaaggaatc

SEQ ID NO: 416682 - DNA, 120 bp, Artificial Sequence
  ENSG00000149474_26 (sequence is synthesized)
caaccctgtgcccggccattgatgtgttgtcattgaatccaggaggatttctagggcactgaagttttgttgtttcttttgctgactttggttacagtcagaaaaaataaactagatgtt

SEQ ID NO: 416683 - DNA, 120 bp, Artificial Sequence
  ENSG00000149474_27 (sequence is synthesized)
tgtgtctacatgttctacctgttgtacctattagcatcttcctgcagggacttgggcccatggcctgggaggttggtttgggattggggttgttgggcagcctgccattcacctggccta

SEQ ID NO: 416684 - DNA, 120 bp, Artificial Sequence
  ENSG00000149474_28 (sequence is synthesized)
tcctggcccttctcatgcccaagacagttgtttcacaggagtggaagtgtgggtgatgcaagtagaaccctctagatgtaccctgtgtggtctgcaggactggactgtttgctgtgtttg

SEQ ID NO: 416685 - DNA, 120 bp, Artificial Sequence
  ENSG00000149474_29 (sequence is synthesized)
tggatgttggcgatagactgtcaattaggttgtttgtgatccaacaagaacatttccaaaagtatctaggtgttctcaaataaaaagctttctttgcacaacccatggccagagcgtcaa

SEQ ID NO: 416686 - DNA, 120 bp, Artificial Sequence
  ENSG00000149474_30 (sequence is synthesized)
gctcccggcgggcgtgtgcagcccgcagattcaggacgacccggctgcccggcttagcgcctttggagctccgcgctgaaggggccttgctccgcacaggcacggcacgcaagcttttgg

SEQ ID NO: 416687 - DNA, 120 bp, Artificial Sequence
  ENSG00000149474_31 (sequence is synthesized)
ggtgcccagtggctctgttttcaagtcacagccggcccgcagggtgcggacctttccacatctcacttgggccgctagaaaatagaaggtggggaaggagtttcttggggtgcattctgc

SEQ ID NO: 416688 - DNA, 120 bp, Artificial Sequence
  ENSG00000149474_32 (sequence is synthesized)
gctaccagcctccctcctggcccaagaggcttcgtgacggagttatcagagacattgagaggcaaattcggaaaaaagaaaacattcgtcttttgggagaacagattattttgactgagc

SEQ ID NO: 416689 - DNA, 120 bp, Artificial Sequence
  ENSG00000149474_33 (sequence is synthesized)
attttgcaattgtgggttggctgaagaaaagaagacaacatgggaaaggaaaatctgggtgataaacggattaaacctttaggttaccgctgctctagataaacccatgatgtgactttt

SEQ ID NO: 416690 - DNA, 120 bp, Artificial Sequence
  ENSG00000149476_0 (sequence is synthesized)
accgcctcgcctctttccgccagcgcccgcaggacccggatgagagcgcacgcttcggggtctccgggaagtcgcggcgccttcggatgtggcggatgcggccgtgagccggcgggggag

SEQ ID NO: 416691 - DNA, 120 bp, Artificial Sequence
  ENSG00000149476_1 (sequence is synthesized)
gtgctgctgctgcctccactgtactcagacccaggtagcacaggattgtccatcctccagcagctcagtgcaacggtgtgaactcagcctgtttcagagcctccacaccatgacctccaa

SEQ ID NO: 416692 - DNA, 120 bp, Artificial Sequence
  ENSG00000149476_2 (sequence is synthesized)
gaagctggtgaactcggtggctggctgtgctgatgacgctcttgctggcctggtggcctgcaaccccaacctgcagctcctgcagggccaccgcgtggccctccgttctgacctggacag

SEQ ID NO: 416693 - DNA, 120 bp, Artificial Sequence
  ENSG00000149476_3 (sequence is synthesized)
cctcaagggccgggtggcactgctgtcgggtgggggctctggccatgagcctgcccatgctggtttcatagggaaggggatgctgactggggtcatcgcgggagctgtgttcacctcccc

SEQ ID NO: 416694 - DNA, 120 bp, Artificial Sequence
  ENSG00000149476_4 (sequence is synthesized)
ggcagtgggcagcatcctggcagccatcagggccgtggcccaggccggcacagtggggacgctccttatcgtgaagaactacactggggatcggctcaacttcggcctggcccgggagca

SEQ ID NO: 416695 - DNA, 120 bp, Artificial Sequence
  ENSG00000149476_5 (sequence is synthesized)
ggcccgggctgaaggcatcccggtggagatggtggtgattggggacgacagcgccttcactgtcctgaagaaggcaggccggcgggggctgtgcggcacggtgcttatacacaaggtggc

SEQ ID NO: 416696 - DNA, 120 bp, Artificial Sequence
  ENSG00000149476_6 (sequence is synthesized)
aggtgctctggctgaggctggtgtggggctggaggagatcgcaaagcaggtgaacgtggtcgccaaggccatgggtaccctgggggtgagcttatcctcctgcagcgtccctggttccaa

SEQ ID NO: 416697 - DNA, 120 bp, Artificial Sequence
  ENSG00000149476_7 (sequence is synthesized)
acccaccttcgagctctcagccgacgaggtggagctgggcctggggatccacggggaagctggtgtgcgccggataaagatggcaaccgccgatgagattgtgaaactcatgctcgacca

SEQ ID NO: 416698 - DNA, 120 bp, Artificial Sequence
  ENSG00000149476_8 (sequence is synthesized)
catgacaaacaccaccaacgcgtcccatgtgcctgtgcagcccggctcctcagttgtgatgatggtcaacaacctgggtggcctgtcattcctggaactgggcatcatagccgacgctac

SEQ ID NO: 416699 - DNA, 120 bp, Artificial Sequence
  ENSG00000149476_9 (sequence is synthesized)
cgtccgctccctggagggccgcggggtgaagattgcccgtgccctggtgggcaccttcatgtcagcactggagatgcctggcatttctctcaccctcctgctggtggatgagcctctcct

SEQ ID NO: 416700 - DNA, 120 bp, Artificial Sequence
  ENSG00000149476_10 (sequence is synthesized)
gaaactgatagatgctgaaaccactgcagcagcctggcctaacgtggctgcagtctccattactgggcggaagcggagccgggtagcccctgccgagccccaggaggcccctgattccac

SEQ ID NO: 416701 - DNA, 120 bp, Artificial Sequence
  ENSG00000149476_11 (sequence is synthesized)
tgctgcaggaggctcagcctcgaagcggatggcgctggtgctggaacgggtgtgcagcactctcctgggcctggaggaacacctgaatgccctggaccgggctgctggtgacggcgactg

SEQ ID NO: 416702 - DNA, 120 bp, Artificial Sequence
  ENSG00000149476_12 (sequence is synthesized)
tggcaccacccacagccgtgcggccagagcaatccaggagtggctgaaggagggcccaccccctgccagccctgcccagctgctctccaagttgtctgtcctgctcctggagaagatggg

SEQ ID NO: 416703 - DNA, 120 bp, Artificial Sequence
  ENSG00000149476_13 (sequence is synthesized)
aggctcatctggggcgctctatggcctgttcctgactgcggctgcacagcccctgaaggccaagaccagcctcccagcctggtctgctgccatggatgccggcctggaagccatgcagaa

SEQ ID NO: 416704 - DNA, 120 bp, Artificial Sequence
  ENSG00000149476_14 (sequence is synthesized)
gtatggcaaggctgctccaggggacaggactatgctggattctctgtgggcagcggggcaggagctccaagcctggaagagcccaggagctgatctgttacaagtcctgaccaaagcagt

SEQ ID NO: 416705 - DNA, 120 bp, Artificial Sequence
  ENSG00000149476_15 (sequence is synthesized)
caagagtgccgaagctgcagccgaggccaccaagaatatggaagctggagccggaagagccagttatatcagctcagcacggctggagcagccagaccccggggcggtggcagctgctgc

SEQ ID NO: 416706 - DNA, 120 bp, Artificial Sequence
  ENSG00000149476_16 (sequence is synthesized)
catcctccgggccatcttggaggtcttgcagagctagggtgtgtgactgcctcccttggcctcagctcctctcactgctgtgctgaggtggcctttgtcacttccttctgccttccaacc

SEQ ID NO: 416707 - DNA, 120 bp, Artificial Sequence
  ENSG00000149476_17 (sequence is synthesized)
ctcaccttcccccggcctggccccattggcccaccctctaagttgagcaggaaatcctccaccaagcttccagaactacagacagcacccagagtgagctggagtgggtccccatgcctc

SEQ ID NO: 416708 - DNA, 120 bp, Artificial Sequence
  ENSG00000149476_18 (sequence is synthesized)
tccagcatgccctttccctttgcaggagggtggagtccctgggtcatgccctcccctgccagctctgggcttcagagataaggcattttccttgtgcagcctttacctggcaatcctaat

SEQ ID NO: 416709 - DNA, 120 bp, Artificial Sequence
  ENSG00000149476_19 (sequence is synthesized)
ctgtgaaatgctttccgcaccttaaccccagtgagcgtgaaaaagaaagttaataaactataatacatggaagcaagaaagacactgcctcctctgagggaccttttcccaagcatgtaa

SEQ ID NO: 416710 - DNA, 120 bp, Artificial Sequence
  ENSG00000149476_20 (sequence is synthesized)
acaagggggcccacagccctggctgcaggcatcatgacccatcttctaccaggcagatctttattacctgagcccctaaggcagtgtctcctcagctgggctgcttccactgagaccccc

SEQ ID NO: 416711 - DNA, 120 bp, Artificial Sequence
  ENSG00000149476_21 (sequence is synthesized)
gacccatcccctttccagtacacacacctgatgcatgtaagaatggtagaggggcttttcttagcattgaattaataattcagtggctcctcgggagtcgaatgggcatttgggacacca

SEQ ID NO: 416712 - DNA, 120 bp, Artificial Sequence
  ENSG00000149476_22 (sequence is synthesized)
ggctcctcgggagtcgaatgggcatttgggacaccagaaggaaaagaaatcatcatagtctaaggttcagttgtagatcaaaaaatgcagccaggccgggcacggtggctcacacctgca

SEQ ID NO: 416713 - DNA, 120 bp, Artificial Sequence
  ENSG00000149476_23 (sequence is synthesized)
gggcaacatggtaaaaccctgtctctaccaaaaaatacaaaattagccaggcatagtagtgtgtgcctatagtcctaacttgggaggctgagttgggaggatggcttgggcccaggaggt

SEQ ID NO: 416714 - DNA, 120 bp, Artificial Sequence
  ENSG00000149476_24 (sequence is synthesized)
gtgtgcctatagtcctaacttgggaggctgagttgggaggatggcttgggcccaggaggtcgaggctgcggtgagccataagcatgccactatactccagcctgggcaacaaagcgagac

SEQ ID NO: 416715 - DNA, 120 bp, Artificial Sequence
  ENSG00000149476_25 (sequence is synthesized)
aactgcagccaagccagcccctaggtctctttctagagcgatcactgatggcaccagggtgagcaggggcactgtatgcatgtggagacaaacagcacatgcctggcacacatgtagggt

SEQ ID NO: 416716 - DNA, 120 bp, Artificial Sequence
  ENSG00000149476_26 (sequence is synthesized)
agggagtggttaaaggcactggctgtcgactcatacacatgatctgaaatctgattctgctttaacccggctacaggagctaaggcctattttttagccctttgggatctgtaaaatcag

SEQ ID NO: 416717 - DNA, 120 bp, Artificial Sequence
  ENSG00000149476_27 (sequence is synthesized)
aatggtacccacctcatggggacatgaaaggattcaaatgaattgatgaagatgggccataaagcccagcacagtccaagtgctcactcactgagagttacggttatcacaggggttggg

SEQ ID NO: 416718 - DNA, 120 bp, Artificial Sequence
  ENSG00000149476_28 (sequence is synthesized)
cccccagcccctcccaggtcatctgctctaccactagctggtaggaaagagcctcctgccctcccaacccccgtcacctacttggcccaaatttggctgcaggctccccgagtgcctggg

SEQ ID NO: 416719 - DNA, 120 bp, Artificial Sequence
  ENSG00000149476_29 (sequence is synthesized)
cttctctacccagggtcctgtctgtcggctgcaccatacgtccctgaccacaaggcatccacgtgcacaggagtatgcgcccagcagctgggaaggaggctgacctcagacggtggcctg

SEQ ID NO: 416720 - DNA, 120 bp, Artificial Sequence
  ENSG00000149476_30 (sequence is synthesized)
tggatcccagctctgtcatttcctggctgggtgacctcaacctagtcaccctttttgagtcttgttttctcagattatgaaataggaaaaatttccttcctcgtgagataagcacgtgcc

SEQ ID NO: 416721 - DNA, 120 bp, Artificial Sequence
  ENSG00000149476_31 (sequence is synthesized)
attagctattaaggacacgcacataaatgagctgcatgtgaatccacacatgccattccatgaagacagaggatcatgtggatctttggtgccttccggttggcccctccctaggtctgt

SEQ ID NO: 416722 - DNA, 120 bp, Artificial Sequence
  ENSG00000149476_32 (sequence is synthesized)
gagggtcagacctgtcctgaggcttttacaaattggcccagaactcatttaaccacagcatcatttcattagagggctgttattagagactgaatgtttgtgtcccccccaaattcctgt

SEQ ID NO: 416723 - DNA, 120 bp, Artificial Sequence
  ENSG00000149476_33 (sequence is synthesized)
gttgaaaggctcacccccactatggtagtgttaggacgtggggcctttgggaggtgatggggttatgagggtggagccccagagagctctcacgccctttccaccatgtgaggttatggt

SEQ ID NO: 416724 - DNA, 120 bp, Artificial Sequence
  ENSG00000149476_34 (sequence is synthesized)
gagaagatggtctctgaggaagctggcccttgccacacaccacatttgccagcgccttcatcttggatgtctatagcctccagaactgtgagaaataaacacttgttgtttaagccaccc

SEQ ID NO: 416725 - DNA, 120 bp, Artificial Sequence
  ENSG00000149476_35 (sequence is synthesized)
aggctattatatttttgttatagcagcctgaacaaagacagctttgattcttaacatatttaatgaaactcgagcttcataaaccagtgaaatgcctacccctatggagatggggagctg

SEQ ID NO: 416726 - DNA, 120 bp, Artificial Sequence
  ENSG00000149476_36 (sequence is synthesized)
gtcatgggacccaggtgcctggaggacatcccagtggctttgaaggctccagccagtcaagacggtcaatattagcccttctgccaacatctggcaatgtgaggctggggtggacgttgg

SEQ ID NO: 416727 - DNA, 120 bp, Artificial Sequence
  ENSG00000149476_37 (sequence is synthesized)
cctgatgttgccaggagtaggatgctgatgctgccagagagtaggtgggctccaaaccccaggcttctcacttgcttactaagcacagcagtctgaagcttgggacctggcagtgcgtct

SEQ ID NO: 416728 - DNA, 120 bp, Artificial Sequence
  ENSG00000149476_38 (sequence is synthesized)
ttggagaaggcaaaaaagccacagcagcaacacttaggagcaagacccttcccgctctccaccctatttcctcccctgaagaagagcaacagctcaagctctagcatggcacagaacgct

SEQ ID NO: 416729 - DNA, 120 bp, Artificial Sequence
  ENSG00000149476_39 (sequence is synthesized)
attctgaggatcactgtcctttagtgatgaagtgggtgctgttcctggacataaaggcagacctgtgcttgacatggattgatctgtcttctggcagtgaagtgcaggcatgaaccttgg

SEQ ID NO: 416730 - DNA, 120 bp, Artificial Sequence
  ENSG00000149476_40 (sequence is synthesized)
tcagccccacactcttctccatccgtagcccatgtactagagtttggacttggaccgaagtctggggcagctccctaattactagggtgctgaaggcgtgattgtgccagtcgactgcga

SEQ ID NO: 416731 - DNA, 120 bp, Artificial Sequence
  ENSG00000149476_41 (sequence is synthesized)
cccggatgagagcgcacgcttcggggtctccgggaagtcgcggcgccttcggatgtggcggatgcggccgtgagccggcgggggagttcctccagatccagctggtgccctcgcctgacg

SEQ ID NO: 416732 - DNA, 120 bp, Artificial Sequence
  ENSG00000149476_42 (sequence is synthesized)
tttgaacgaccacctgctcacctcctcccttttgcgcgttgattcttcagacttcaaagggcccaccggtctgcttgcccaacgttattagtgcccctattgctctacaaattcgaacct

SEQ ID NO: 416733 - DNA, 120 bp, Artificial Sequence
  ENSG00000149476_43 (sequence is synthesized)
caaacacaaaaccagtatttctccgtagggaaccttaatgagccaggagagccgtcagccctgcagcctccagggtaccccacatcaaacaggctccccgggaacaagaggaataccacg

SEQ ID NO: 416734 - DNA, 120 bp, Artificial Sequence
  ENSG00000149476_44 (sequence is synthesized)
tggcttggcacactcgcagaatgccagagaggagccaacccccattttacagatgaggaagctgaggcttagggaggaattggtttacctaagaccctccccacaaccccaagtaggctg

SEQ ID NO: 416735 - DNA, 120 bp, Artificial Sequence
  ENSG00000149476_45 (sequence is synthesized)
aggcagagctatgttgattcttcctattgtgcacccacacagaggccaacacgctgctgaaccaggctgaactgaggaaaagctagaaagtcatcgtggtttacatcttgcctttcccat

SEQ ID NO: 416736 - DNA, 120 bp, Artificial Sequence
  ENSG00000149476_46 (sequence is synthesized)
agcagagactctgcctgactttggaggcactgaattatcagtagtaaaaacacactctgtagaaaaactagacattggtttagattctggctgttacctgtattaccttggacaagtccc

SEQ ID NO: 416737 - DNA, 120 bp, Artificial Sequence
  ENSG00000149476_47 (sequence is synthesized)
tctccaagttgtctgtcctgctcctggagaagatgggaggctcatctggggcggtgggtgcctgggggctgaagggctgacagggaggtggctgggctggctggggtccaggccagcacc

SEQ ID NO: 416738 - DNA, 120 bp, Artificial Sequence
  ENSG00000149476_48 (sequence is synthesized)
cctgccaggaggaaatcaggacatctccctcccgacctcagagccccagcttccaaggtccttgcttttctgttgttttctttccctgatgcccatttttcccttttggactgccacact

SEQ ID NO: 416739 - DNA, 120 bp, Artificial Sequence
  ENSG00000149476_49 (sequence is synthesized)
gtgaggctgggcccagccacctggggagacaggcttctagccagcagactcctgtctccatgtgaccctgagcaagttaataaccttcctggaccgcagtttccttctctgtacaatgga

SEQ ID NO: 416740 - DNA, 120 bp, Artificial Sequence
  ENSG00000149476_50 (sequence is synthesized)
gatgagcacctatctcagaaggtggttatgtggctaaggaaatatgtagagccccgcacactgcctgggatgtgacagggcctcagtgaatggtgacccttttccctgctggaagtagat

SEQ ID NO: 416741 - DNA, 120 bp, Artificial Sequence
  ENSG00000149476_51 (sequence is synthesized)
gggtaccatggctgaggtggagagtctggcagcctttctcagagaagagggtacctgtgggcagggcctctgagatgctgctgccacccttcctgatgcccagtgctaagagtggaacag

SEQ ID NO: 416742 - DNA, 120 bp, Artificial Sequence
  ENSG00000149476_52 (sequence is synthesized)
tttcattattctgtccatttccatcccccactcccgcccacttactgtgtgagtccagcactgtgtgagtccttgataaaaacgatgagcaaatccccaggccttgagtgggtcagcagt

SEQ ID NO: 416743 - DNA, 120 bp, Artificial Sequence
  ENSG00000149476_53 (sequence is synthesized)
gaccacatctatccgcagggatccacggggaagctggtgtgcgccggataaaggtaggtggtccctctggcacaggccgccctaaggccaaggccccccagatgcagctcattcctggct

SEQ ID NO: 416744 - DNA, 120 bp, Artificial Sequence
  ENSG00000149476_54 (sequence is synthesized)
cagccctttggaaagggctgagggagggtcttgtgatggcagagaacacggactgtgcgtcagataagcctgagttaaatcgtctctctgccacctaattgccggataccttgagcctct

SEQ ID NO: 416745 - DNA, 120 bp, Artificial Sequence
  ENSG00000149476_55 (sequence is synthesized)
ctttataccgttgttttgaggattaagtgagattaaacatatgtaagacactcaacacagcgcccagcacctggcacgaactgagtaaatgagacctgtaattactcatcttccccgacg

SEQ ID NO: 416746 - DNA, 120 bp, Artificial Sequence
  ENSG00000149476_56 (sequence is synthesized)
cactggactagaaggagttggtattaggatcctcctcagagaggcctgaccctttcccagggaccctctctccatacccctgtatacagtaggcactcagtccatgcttgtcgaggtgga

SEQ ID NO: 416747 - DNA, 120 bp, Artificial Sequence
  ENSG00000149476_57 (sequence is synthesized)
ctcccttcctccagggctgctgagaaagccaggccaccagggtcaggatgggagggtccaagccctgctgaatccctggctggacagccgtgtctaagagagttatcttgctgcccttag

SEQ ID NO: 416748 - DNA, 120 bp, Artificial Sequence
  ENSG00000149476_58 (sequence is synthesized)
ggcttagccctggccctggctggatgcaggacaggttggcagggaggcagcagagccaaattttgtacaaaggagctggtgctagcaagctcaggaagaagccacagccggaagttcacc

SEQ ID NO: 416749 - DNA, 120 bp, Artificial Sequence
  ENSG00000149476_59 (sequence is synthesized)
ctctttccgccagcgcccgcaggacccggatgagagcgcacgcttcggggtctccgggaagtcgcggcgccttcggatgtggcggatgcggccttcctccagatccagctggtgccctcg

SEQ ID NO: 416750 - DNA, 120 bp, Artificial Sequence
  ENSG00000149476_60 (sequence is synthesized)
ggctgctccaggggacaggactatggtatgtactcaggctgtggcctcagacctttctccttttggccctgtaagtctaaagagcaccctcggttgcagggcccgtgctcagcccccttt

SEQ ID NO: 416751 - DNA, 120 bp, Artificial Sequence
  ENSG00000149476_61 (sequence is synthesized)
ccttcaccttgtccagctggattctctgtgggcagcggggcaggagctccaagcctggaagagcccaggagctgatctgttacaagtcctgaccaaagcagtcaaggtgagtgaggctgg

SEQ ID NO: 416752 - DNA, 120 bp, Artificial Sequence
  ENSG00000149476_62 (sequence is synthesized)
ccctattccctcctcttcaccttagagttggggaccccactgcactcacaaactgaagaaaagcttctcattaatgcccgaaatgacggatgcgatggacagagagaggatggcggctcc

SEQ ID NO: 416753 - DNA, 120 bp, Artificial Sequence
  ENSG00000149476_63 (sequence is synthesized)
aaaaaagacgtggataggttttaggaggctgcgcagccacatggacgcccagggcaggaggaagacagcaaagcccaggaaccactgtggacaaaagggaggacacacccgactgtgcta

SEQ ID NO: 416754 - DNA, 120 bp, Artificial Sequence
  ENSG00000149476_64 (sequence is synthesized)
tgtgtgaccaaagcacatcccaccccatcagtgcctcctccccatctctgctccctggctcttctttcacaactcaaaccttcccacctggcattgcccactaccgtgctagcttcctca

SEQ ID NO: 416755 - DNA, 120 bp, Artificial Sequence
  ENSG00000149480_0 (sequence is synthesized)
agtgggccttgttctccggatcggccgaaggtgttccggaaggaggcgaaccctgaggcgggcccggcaagccttccctgcggccggcagagcccaacgactagtgggactccgcggggg

SEQ ID NO: 416756 - DNA, 120 bp, Artificial Sequence
  ENSG00000149480_1 (sequence is synthesized)
cgggggtagctggagcctggctctggcctggcaggagccgagctcgttccggaagaagccgagcggacgggggccagcctcagcgtcccgggagtgaggcgatagctgcggcggcgacag

SEQ ID NO: 416757 - DNA, 120 bp, Artificial Sequence
  ENSG00000149480_2 (sequence is synthesized)
cgcgggccgggatgaaccgcgacggctgaggcagcggaggtgccggctgcgcgggccccagtgagactccctcgaagcggcagcccaccgttcggggctttgcctcgagccgagccctgc

SEQ ID NO: 416758 - DNA, 120 bp, Artificial Sequence
  ENSG00000149480_3 (sequence is synthesized)
ccccgcgagcctcccggacccctttgtgcggccggaggcggcggcgggaacggccatggcggccaacatgtaccgggtgggagattacgtctattttgagaactcttccagcaatcctta

SEQ ID NO: 416759 - DNA, 120 bp, Artificial Sequence
  ENSG00000149480_4 (sequence is synthesized)
cctggttagacggattgaggagctcaacaagactgcaaatggaaatgtggaggcaaaggttgtctgtcttttccggcgcagggacatttctagtagcctcaacagcctggctgatagtaa

SEQ ID NO: 416760 - DNA, 120 bp, Artificial Sequence
  ENSG00000149480_5 (sequence is synthesized)
tgccagggagtttgaagaggaatcaaagcagccaggggtgtctgagcagcagcgccatcaactgaagcaccgggaactttttctttctcggcaatttgaatcattaccagccacccacat

SEQ ID NO: 416761 - DNA, 120 bp, Artificial Sequence
  ENSG00000149480_6 (sequence is synthesized)
acgggggaaatgcagtgtgaccctcttgaatgagacagatatcttgagccagtacctggaaaaggaggactgctttttttactcactggtgtttgaccccgtgcagaagacacttctcgc

SEQ ID NO: 416762 - DNA, 120 bp, Artificial Sequence
  ENSG00000149480_7 (sequence is synthesized)
tgatcagggcgagattagagttggttgcaaataccaagctgagatcccagatcgcctagtagagggagaatctgataatcggaaccagcagaagatggagatgaaggtctgggacccaga

SEQ ID NO: 416763 - DNA, 120 bp, Artificial Sequence
  ENSG00000149480_8 (sequence is synthesized)
caaccctctcacagaccggcagatcgaccagtttcttgtggtggcccgagctgtgggaacctttgcaagagccctagattgtagcagctccattcggcagccaagcttgcacatgagtgc

SEQ ID NO: 416764 - DNA, 120 bp, Artificial Sequence
  ENSG00000149480_9 (sequence is synthesized)
agctgctgcctcccgagatatcactctgtttcacgccatggataccttgcaaaggaacggctacgacctggctaaggccatgtcgaccctggtaccccagggaggcccggtgctgtgtcg

SEQ ID NO: 416765 - DNA, 120 bp, Artificial Sequence
  ENSG00000149480_10 (sequence is synthesized)
ggatgagatggaggaatggtcagcctcagaggccatgctatttgaggaggccctagagaagtatgggaaggacttcaatgatattcgccaggattttctaccctggaagtcacttgccag

SEQ ID NO: 416766 - DNA, 120 bp, Artificial Sequence
  ENSG00000149480_11 (sequence is synthesized)
catagtccagttttattacatgtggaaaaccacagaccggtatattcagcagaaaaggttgaaagctgctgaagcagacagcaaactgaaacaggtctacattcccacctacactaagcc

SEQ ID NO: 416767 - DNA, 120 bp, Artificial Sequence
  ENSG00000149480_12 (sequence is synthesized)
gccacaccacacagtctgctcagtggtatgcctggggcccacctaacatgcagtgccgcctctgtgcttcctgttggatctactggaagaagtatgggggactgaagaccccaactcagc

SEQ ID NO: 416768 - DNA, 120 bp, Artificial Sequence
  ENSG00000149480_13 (sequence is synthesized)
ttgagggggccactcggggcaccacggagccacactcaaggggtcatttatccagacctgaagctcaaagtctctctccttacacaaccagcgccaacagggccaagctactggctaaga

SEQ ID NO: 416769 - DNA, 120 bp, Artificial Sequence
  ENSG00000149480_14 (sequence is synthesized)
acagacaaactttcctgcttcagaccacaaagctgacccgtcttgccagacgcatgtgcagggacctattacagccaaggagggccgcccgacggccttatgctcctatcaatgccaatg

SEQ ID NO: 416770 - DNA, 120 bp, Artificial Sequence
  ENSG00000149480_15 (sequence is synthesized)
ccatcaaagcagagtgctccattcgacttcctaaggccgccaagactccattgaagattcaccctctggtgcggctgcccctggcaactatcgtcaaagatctggtggcccaggcacccc

SEQ ID NO: 416771 - DNA, 120 bp, Artificial Sequence
  ENSG00000149480_16 (sequence is synthesized)
tgaaaccaaaaacacctcggggtaccaagacaccgatcaacagaaaccagctgtcccagaaccggggactggggggcattatggtgaaacgggcctatgagactatggcaggggcagggg

SEQ ID NO: 416772 - DNA, 120 bp, Artificial Sequence
  ENSG00000149480_17 (sequence is synthesized)
ttcctttctctgccaatggaaggcctctggcttcagggattcgttcaagctcacagccagcagccaagcgtcagaaactaaacccagctgatgcccccaatcctgtggtgtttgtggcca

SEQ ID NO: 416773 - DNA, 120 bp, Artificial Sequence
  ENSG00000149480_18 (sequence is synthesized)
caaaggataccagggccctacggaaggctctgacccatctggaaatgcggcgagctgctcgccgacccaacttgcccctgaaggtgaagccaacgctgattgcagtgcggccccctgtcc

SEQ ID NO: 416774 - DNA, 120 bp, Artificial Sequence
  ENSG00000149480_19 (sequence is synthesized)
ctctacctgcaccctcacatcctgccagcaccaatgagcctattgtcctggaggactgagcacctgtggggaagggaggtgggctgagaggtagagggtggatgcccagggcacccaaac

SEQ ID NO: 416775 - DNA, 120 bp, Artificial Sequence
  ENSG00000149480_20 (sequence is synthesized)
ctcccttccctttcgtgtcgaagggagtgaggagtgaattaaggaagagagcaagtgagtgtgtgtccctggaggggttgggcgccctctggtgttaccacctcgagacttgtctcatgc

SEQ ID NO: 416776 - DNA, 120 bp, Artificial Sequence
  ENSG00000149480_21 (sequence is synthesized)
ctccatgcttgccgatggaggacagactgcaggaacttggcccatgtgggaacctagcctgttttggggggtaggacccacagatgtcttggacagttttggggggagggttttttaatt

SEQ ID NO: 416777 - DNA, 120 bp, Artificial Sequence
  ENSG00000149480_22 (sequence is synthesized)
ttttaaaaattttgcctccctttgtgaaaggggatggggaggggaagagtaaacagataacaggtggtggtacctggttgggggaggggggcgtgcactgccatgtcttttttttttttt

SEQ ID NO: 416778 - DNA, 120 bp, Artificial Sequence
  ENSG00000149480_23 (sequence is synthesized)
ttttttttttttttcctaattgggggtttctctttctgtccggtgtccggactttcctaattggagtttgaggcccctaagctggcatcaaccccaggccacgctcgctctttccttccc

SEQ ID NO: 416779 - DNA, 120 bp, Artificial Sequence
  ENSG00000149480_24 (sequence is synthesized)
tcccctccccctctgccttttgtacgccagttctcagaaataaagatcttttgtccgtttttttaacctcggattctgtaattggttcttatagtaacaaataaaaagctgttttcttca

SEQ ID NO: 416780 - DNA, 120 bp, Artificial Sequence
  ENSG00000149480_25 (sequence is synthesized)
gagagggtgcggggaaccgcgacgcggcagggctccgagactcccagagagaagctgcgggcagccccgacggcactttcggggctgcgtcaggggctccccggggcacggagtggcctt

SEQ ID NO: 416781 - DNA, 120 bp, Artificial Sequence
  ENSG00000149480_26 (sequence is synthesized)
cggaaccggttccgaaggagctgacagggtagggagggaacgcgaggggctggggcgacggctttgccaccgcgggggagccgcccggaggtttcctcttcccaggcgttattgtgcgcc

SEQ ID NO: 416782 - DNA, 120 bp, Artificial Sequence
  ENSG00000149480_27 (sequence is synthesized)
gagccagtacctggaaaaggaggtgagaaagagatgttgagagaagagcgaggggaatgggtattgcccgcaaaagagagggggaaaggagcacaatgatgaggtacagggttgccagac

SEQ ID NO: 416783 - DNA, 120 bp, Artificial Sequence
  ENSG00000149480_28 (sequence is synthesized)
tgccggtcatggaaactcagatacacctccctccccgccgcctatgtggattgctgccttgcttaccttgtctctccccaattccaggactgctttttttactcactggtgtttgacccc

SEQ ID NO: 416784 - DNA, 120 bp, Artificial Sequence
  ENSG00000149480_29 (sequence is synthesized)
tttctcctttggcttaatttcccagcccacttgggcttttgacttttctttcgcttttgacttctcaatttctcccttagagctgtgggaacctttgcaagagccctagattgtagcagc

SEQ ID NO: 416785 - DNA, 120 bp, Artificial Sequence
  ENSG00000149480_30 (sequence is synthesized)
cttcaatgatattcgccaggattttgtaagtggatggcactaggaggagaagtgggagagatgacaggtgagggaaccaggacctggggccagatgccagctcattcttcctccctctgc

SEQ ID NO: 416786 - DNA, 120 bp, Artificial Sequence
  ENSG00000149480_31 (sequence is synthesized)
cccccttagctaccctggaagtcacttgccagcatagtccagttttattacatgtggaaaaccacagaccggtatattcagcaggtattatctgggctggggagggtggaccataggcta

SEQ ID NO: 416787 - DNA, 120 bp, Artificial Sequence
  ENSG00000149480_32 (sequence is synthesized)
ccaatctctctcctatagggggaaatgcagtgtgaccctcttgaatgagacagatatcttgagccagtacctggaaaaggaggtgagaaagagatgttgagagaagagcgaggggaatgg

SEQ ID NO: 416788 - DNA, 120 bp, Artificial Sequence
  ENSG00000149483_0 (sequence is synthesized)
ggaagccgggacgatgtccgcatgacaaccgacgttggagtttggaggtgcttgccttagagcaagggaaacagctctcattcaaaggaactagaagcctctccctcagtggtagggaga

SEQ ID NO: 416789 - DNA, 120 bp, Artificial Sequence
  ENSG00000149483_1 (sequence is synthesized)
cagccaggagcggttttctgggaactgtgggatgtgcccttgggggcccgagaaaacagaaggaagatgctccagaccagtaactacagcctggtgctctctctgcagttcctgctgctg

SEQ ID NO: 416790 - DNA, 120 bp, Artificial Sequence
  ENSG00000149483_2 (sequence is synthesized)
tcctatgacctctttgtcaattccttctcagaactgctccaaaagactcctgtcatccagcttgtgctcttcatcatccaggatattgcagtcctcttcaacatcatcatcattttcctc

SEQ ID NO: 416791 - DNA, 120 bp, Artificial Sequence
  ENSG00000149483_3 (sequence is synthesized)
atgttcttcaacaccttcgtcttccaggctggcctggtcaacctcctattccataagttcaaagggaccatcatcctgacagctgtgtactttgccctcagcatctcccttcatgtctgg

SEQ ID NO: 416792 - DNA, 120 bp, Artificial Sequence
  ENSG00000149483_4 (sequence is synthesized)
gtcatgaacttacgctggaaaaactccaacagcttcatatggacagatggacttcaaatgctgtttgtattccagagactagcagcagtgttgtactgctacttctataaacggacagcc

SEQ ID NO: 416793 - DNA, 120 bp, Artificial Sequence
  ENSG00000149483_5 (sequence is synthesized)
gtaagactaggcgatcctcacttctaccaggactctttgtggctgcgcaaggagttcatgcaagttcgaaggtgacctcttgtcacactgatggatacttttccttcctgatagaagcca

SEQ ID NO: 416794 - DNA, 120 bp, Artificial Sequence
  ENSG00000149483_6 (sequence is synthesized)
atgggcaaacagctggactttccaaggaaggttcagactagctgtgttcagcattcaagaaggaagatcctccctcttgcacaattagagtgtccccatcggtctccagtgcggcatccc

SEQ ID NO: 416795 - DNA, 120 bp, Artificial Sequence
  ENSG00000149483_7 (sequence is synthesized)
ttccttgccttctacctctgttccaccccctttccttcctttcctctctgtaccattcattctccctgaccggcctttcttgccgagggttctgtggctcttacccttgtgaagcttttc

SEQ ID NO: 416796 - DNA, 120 bp, Artificial Sequence
  ENSG00000149483_8 (sequence is synthesized)
ctttagcctgggacagaaggacctcccagcccccaaaggatctcccagtgaccaaaggatgcgaagagtgatagttacgtgctcctgactgatcacaccgcagacatttagatttttata

SEQ ID NO: 416797 - DNA, 120 bp, Artificial Sequence
  ENSG00000149483_9 (sequence is synthesized)
cccaaggcactttaaaaaaatgttttataaatagagaataaattgaattcttgttccataaatgggggagtctgtctgtctagctagatctcttcatgttaagaggcgtgccaaggtcca

SEQ ID NO: 416798 - DNA, 120 bp, Artificial Sequence
  ENSG00000149483_10 (sequence is synthesized)
gcttaacatctacttgacccagagggaagatggagccacagatgaaatacagatctttgttgagatccattatgagtacaaagtattttagcagaaattcaagatggaatctgatgctgc

SEQ ID NO: 416799 - DNA, 120 bp, Artificial Sequence
  ENSG00000149483_11 (sequence is synthesized)
atcccccactcctggagctccagatgtgtgtgctctgttcagactctctttccttatcagaagccttaactgccctcagaagaataaaaatattcccttagccagctttggcaaaagaaa

SEQ ID NO: 416800 - DNA, 120 bp, Artificial Sequence
  ENSG00000149483_12 (sequence is synthesized)
gagacaggcatgggcgtttctgcataacggatcctcaaaacagccctggatggtggcctatgagtagtggttaagagcacgggtttggcgtcacagttatgaagccgggttctgctgact

SEQ ID NO: 416801 - DNA, 120 bp, Artificial Sequence
  ENSG00000149483_13 (sequence is synthesized)
tgagacctggaggaatgccttgagctctgacttctgtgtcctttcctgtagaataggaataattcccaccttgcagacttgtagggaggattaaaggaaacgatcttggttgacaagttt

SEQ ID NO: 416802 - DNA, 84 bp, Artificial Sequence
  ENSG00000149483_14 (sequence is synthesized)
gtagggaggattaaaggaaacgatcttggttgacaagtttatcgtggtgtgagtacctaggtagtagctatcagtgttatttaa

SEQ ID NO: 416803 - DNA, 81 bp, Artificial Sequence
  ENSG00000149483_15 (sequence is synthesized)
actctctctctctctaaaatttaatgaatgaggaaaccgcgaacatatgtccaataaggtgggacttcaccagctgaggtg

SEQ ID NO: 416804 - DNA, 120 bp, Artificial Sequence
  ENSG00000149483_16 (sequence is synthesized)
aacatatgtccaataaggtgggacttcaccagctgaggtggaggaggtgccttaaccttccggagcctctgtgtaaaatggggataatatacattgtaatggctacttctcaagatggtt

SEQ ID NO: 416805 - DNA, 120 bp, Artificial Sequence
  ENSG00000149483_17 (sequence is synthesized)
gtaggattacgtaaggttagaaatatgaaaagagcttataaattgcaaaacattttaccgatgctaatttaatcgctaacactccagagcattttgaaatttctttatagatttggcaca

SEQ ID NO: 416806 - DNA, 120 bp, Artificial Sequence
  ENSG00000149483_18 (sequence is synthesized)
gcagcgggtcataggacacccccagagcaacttgtgggtcttggaatagatgaaaagaaacaactgccactgtgttgcaaccataaccctaaagataaagctttccaggagacccctgtt

SEQ ID NO: 416807 - DNA, 120 bp, Artificial Sequence
  ENSG00000149483_19 (sequence is synthesized)
ttcacacttctttgctggcatttttcctgcctagttaaatactagtctatcaattatgtaagagacagcttagtccagtagttaagagcacagactgtggacccgtgcagcctgcatctg

SEQ ID NO: 416808 - DNA, 120 bp, Artificial Sequence
  ENSG00000149483_20 (sequence is synthesized)
aatactagctctgccacttactaacgacgtgaccttggacaaattattttacctctcttggcctcaaatttctcatctgtaaaatggggaaggtaataatgtattatgtcatctaccttg

SEQ ID NO: 416809 - DNA, 120 bp, Artificial Sequence
  ENSG00000149483_21 (sequence is synthesized)
tgaggtttaaataatgttagtgcttgtagaacactccctggcacattgtaagcaatgtataaggatttgctgccatttttgttaccaccgctactacatgaccaggcagtcattcttctc

SEQ ID NO: 416810 - DNA, 120 bp, Artificial Sequence
  ENSG00000149483_22 (sequence is synthesized)
agtaatactactagattcctttggttagagacagctctgcattgagaagattccaggcatggagaaaagctggtgaaggtcctagaataaatgacttcttgggggtttttgttgttggtt

SEQ ID NO: 416811 - DNA, 120 bp, Artificial Sequence
  ENSG00000149483_23 (sequence is synthesized)
ttgttcactaaagtatcccatgcaactggagtggtacctggcacacagtaggtcctcagtaaatgtttatggtattaatacatttctaaccttgcttatctttttgctccaacaggtgct

SEQ ID NO: 416812 - DNA, 120 bp, Artificial Sequence
  ENSG00000149483_24 (sequence is synthesized)
caggcctaccagggctaaaacaggtagttgaatgtgtctcatcattagctatttgggcaggtggatgttgatacaggttattcttaggcatcagtgccccatggctaatgctgtaggcag

SEQ ID NO: 416813 - DNA, 120 bp, Artificial Sequence
  ENSG00000149483_25 (sequence is synthesized)
tggatgtttttggaagtagccaagcaggattgctgcttgcccttgagtgctccatgccgtctgccaagctcccatcactttaactaggagaaccggcctccaggatccctccctttggtt

SEQ ID NO: 416814 - DNA, 120 bp, Artificial Sequence
  ENSG00000149483_26 (sequence is synthesized)
ctaacataggcctcagatcagatccagtgtctgtggtttcagatttcttctgcttcacaaattcttccagctctttgagtatcttgtatatttctcatgtactcaattcaattgaactct

SEQ ID NO: 416815 - DNA, 120 bp, Artificial Sequence
  ENSG00000149483_27 (sequence is synthesized)
aaaacctcagggttctctagttgtcacttcattattaaagccactttcacacctgaaccccctgttaggttgtgcttgtgattccacagaaagaagtagaggtcccaggaaagaagcaaa

SEQ ID NO: 416816 - DNA, 120 bp, Artificial Sequence
  ENSG00000149483_28 (sequence is synthesized)
gcaacaccagagtctccgggtgcttcctgaagaggattctgtgccctggttcctggagccaaaataggtcctggctttgtactataaaagccgttaatctcattaaaccctgagtacacc

SEQ ID NO: 416817 - DNA, 120 bp, Artificial Sequence
  ENSG00000149483_29 (sequence is synthesized)
aaagtctttatctgacaggagctgagccagcgatttttcaaggcaagacagtgaccagctgaactcctgagataatgaatatatcatttctccttggcaaaggttatggaattaaagaga

SEQ ID NO: 416818 - DNA, 120 bp, Artificial Sequence
  ENSG00000149483_30 (sequence is synthesized)
gctccttcgagaaacgctccttggggttgtagaaaggaggaagaggttagcatgattttaaagcaactggcatctctgcagctaaccaagttggagacattagggcttcttgtggccatt

SEQ ID NO: 416819 - DNA, 81 bp, Artificial Sequence
  ENSG00000149483_31 (sequence is synthesized)
gcttgtgcccggcctgaactctgaattcctgaatcgctaaagggctaggaataacttttcttttcttttcttttctttttt

SEQ ID NO: 416820 - DNA, 120 bp, Artificial Sequence
  ENSG00000149483_32 (sequence is synthesized)
tgggcaacagaatgaaaccctgtctcgaaaaataaggagtatcagagaatcttctataggactatgtatggaagaaattttaaaaataaaaaagagtattagagcaggaaagccttgact

SEQ ID NO: 416821 - DNA, 120 bp, Artificial Sequence
  ENSG00000149483_33 (sequence is synthesized)
atggactgcaaacccaactgatggggccagtgggtaattttaggtaattttagcttcatgtcattcaggtcccaaaacccatgttatctctgtgagggtttaagatgtcagatgcctatc

SEQ ID NO: 416822 - DNA, 120 bp, Artificial Sequence
  ENSG00000149483_34 (sequence is synthesized)
tcacaacaaaggacaggcctcgtggtgtccctcaggacatagtacctgctcttgggtcctcacacaggccttcattggttgtacttttttttatgtctacagcatccaggatattgcagt

SEQ ID NO: 416823 - DNA, 120 bp, Artificial Sequence
  ENSG00000149483_35 (sequence is synthesized)
aaaggccctgacagtggtgatttagtgtcttaaagttattagtaggctgggtacggtggctcacacccataatcccaggactttgggaagccaaggcaggaggatcttttgaggctggga

SEQ ID NO: 416824 - DNA, 83 bp, Artificial Sequence
  ENSG00000149483_36 (sequence is synthesized)
gtttgagctactaaaaatttttaaaattagctaggcatggtgccacacacctgtaatcgcagtgattcaggatgctgacgtgg

SEQ ID NO: 416825 - DNA, 89 bp, Artificial Sequence
  ENSG00000149483_37 (sequence is synthesized)
ggcctctgaagtgctaactgggatatcttttctctgggaacccagcttcattctttgacatctcacacaatccttcgtagagaacaggt

SEQ ID NO: 416826 - DNA, 120 bp, Artificial Sequence
  ENSG00000149483_38 (sequence is synthesized)
attctttgacatctcacacaatccttcgtagagaacaggtgaaatgaaagtggtttgggttggagccctgggcatgtgagagtttcataaggtactcttgaccaaccttatgtgttgaaa

SEQ ID NO: 416827 - DNA, 120 bp, Artificial Sequence
  ENSG00000149483_39 (sequence is synthesized)
cagacctgtcccagctggcttgggatggttgtgacagccacaccaggaacaggagggattactgcccctgcccttgctagaagactatgggaaatgaggaggcagggctgcccagcctca

SEQ ID NO: 416828 - DNA, 63 bp, Artificial Sequence
  ENSG00000149483_40 (sequence is synthesized)
gatccgccttctgttcttaacctgaaatgatactcaggagcacccctgaggcttctcttctgc

SEQ ID NO: 416829 - DNA, 120 bp, Artificial Sequence
  ENSG00000149485_0 (sequence is synthesized)
ggcagcccagctgtgagttgcccaagacccaccgggggacgggatctcgctccccgcgccacgaggctcggccaatgggaacgcgcgctgcgaggcccgccggtctgccctgcggtgctg

SEQ ID NO: 416830 - DNA, 120 bp, Artificial Sequence
  ENSG00000149485_1 (sequence is synthesized)
gctgaaaacccggcgcgcaggcggctggctctgggcgcgcgccagcaaatccactcctggagcccgcggaccccgagcacgcgcctgacagcccctgctggcccggcgcgcggcgtcgcc

SEQ ID NO: 416831 - DNA, 120 bp, Artificial Sequence
  ENSG00000149485_2 (sequence is synthesized)
cagctatggcccccgacccggtggccgccgagaccgcggctcagggacctaccccgcgctacttcacctgggacgaggtggcccagcgctcagggtgcgaggagcggtggctagtgatcg

SEQ ID NO: 416832 - DNA, 120 bp, Artificial Sequence
  ENSG00000149485_3 (sequence is synthesized)
accgtaaggtgtacaacatcagcgagttcacccgccggcatccagggggctcccgggtcatcagccactacgccgggcaggatgccacggatccctttgtggccttccacatcaacaagg

SEQ ID NO: 416833 - DNA, 120 bp, Artificial Sequence
  ENSG00000149485_4 (sequence is synthesized)
gccttgtgaagaagtatatgaactctctcctgattggagaactgtctccagagcagcccagctttgagcccaccaagaataaagagctgacagatgagttccgggagctgcgggccacag

SEQ ID NO: 416834 - DNA, 120 bp, Artificial Sequence
  ENSG00000149485_5 (sequence is synthesized)
tggagcggatggggctcatgaaggccaaccatgtcttcttcctgctgtacctgctgcacatcttgctgctggatggtgcagcctggctcaccctttgggtctttgggacgtcctttttgc

SEQ ID NO: 416835 - DNA, 120 bp, Artificial Sequence
  ENSG00000149485_6 (sequence is synthesized)
ccttcctcctctgtgcggtgctgctcagtgcagttcaggcccaggctggctggctgcagcatgactttgggcacctgtcggtcttcagcacctcaaagtggaaccatctgctacatcatt

SEQ ID NO: 416836 - DNA, 120 bp, Artificial Sequence
  ENSG00000149485_7 (sequence is synthesized)
ttgtgattggccacctgaagggggcccccgccagttggtggaaccacatgcacttccagcaccatgccaagcccaactgcttccgcaaagacccagacatcaacatgcatcccttcttct

SEQ ID NO: 416837 - DNA, 120 bp, Artificial Sequence
  ENSG00000149485_8 (sequence is synthesized)
ttgccttggggaagatcctctctgtggagcttgggaaacagaagaaaaaatatatgccgtacaaccaccagcacaaatacttcttcctaattgggcccccagccttgctgcctctctact

SEQ ID NO: 416838 - DNA, 120 bp, Artificial Sequence
  ENSG00000149485_9 (sequence is synthesized)
tccagtggtatattttctattttgttatccagcgaaagaagtgggtggacttggcctggatgattaccttctacgtccgcttcttcctcacttatgtgccactattggggctgaaagcct

SEQ ID NO: 416839 - DNA, 120 bp, Artificial Sequence
  ENSG00000149485_10 (sequence is synthesized)
tcctgggccttttcttcatagtcaggttcctggaaagcaactggtttgtgtgggtgacacagatgaaccatattcccatgcacattgatcatgaccggaacatggactgggtttccaccc

SEQ ID NO: 416840 - DNA, 120 bp, Artificial Sequence
  ENSG00000149485_11 (sequence is synthesized)
agctccaggccacatgcaatgtccacaagtctgccttcaatgactggttcagtggacacctcaacttccagattgagcaccatctttttcccacgatgcctcgacacaattaccacaaag

SEQ ID NO: 416841 - DNA, 120 bp, Artificial Sequence
  ENSG00000149485_12 (sequence is synthesized)
tggctcccctggtgcagtccttgtgtgccaagcatggcatagagtaccagtccaagcccctgctgtcagccttcgccgacatcatccactcactaaaggagtcagggcagctctggctag

SEQ ID NO: 416842 - DNA, 120 bp, Artificial Sequence
  ENSG00000149485_13 (sequence is synthesized)
atgcctatcttcaccaataacaacagccaccctgcccagtctggaagaagaggaggaagactctggagccaaggcagaggggagcttgagggacaatgccactatagtttaatactcaga

SEQ ID NO: 416843 - DNA, 120 bp, Artificial Sequence
  ENSG00000149485_14 (sequence is synthesized)
gggggttgggtttggggacataaagcctctgactcaaactcctcccttttatcttctagccacagttctaagacccaaagtggggggtggacacagaagtccctaggagggaaggagctg

SEQ ID NO: 416844 - DNA, 120 bp, Artificial Sequence
  ENSG00000149485_15 (sequence is synthesized)
ttggggcaggggtgtaaattatttcctttttctagtttggcacatgcaggtagttggtgaacagagagaaccaggagggtaacagaagaggagggacctactgaacccagagtcaggaag

SEQ ID NO: 416845 - DNA, 66 bp, Artificial Sequence
  ENSG00000149485_16 (sequence is synthesized)
aacagaagaggagggacctactgaacccagagtcaggaagagatttaacactaaaattccactcat

SEQ ID NO: 416846 - DNA, 120 bp, Artificial Sequence
  ENSG00000149485_17 (sequence is synthesized)
agactccatttcaaaaaaaaaaaaaaaatccactcatataaaaggtgagctcagctcactggtccatttctcagtggcttctccatcctcatttgcaaacctcagagggataaggcagtt

SEQ ID NO: 416847 - DNA, 120 bp, Artificial Sequence
  ENSG00000149485_18 (sequence is synthesized)
ctgatgagcaagaattataacagcaaggaaacattaatgcttagaattctgagatccagcacaactcagtctgtgggagctcagctcgctgcccagggataggtatgacctatgtctgcc

SEQ ID NO: 416848 - DNA, 120 bp, Artificial Sequence
  ENSG00000149485_19 (sequence is synthesized)
ttaggctgctgggagatgccattctccagtttcagaagcaggcagggcaaaggtcaagactgtggtattggggtcttttggctctgaaggatcctggaaccactgattttggtttattcc

SEQ ID NO: 416849 - DNA, 120 bp, Artificial Sequence
  ENSG00000149485_20 (sequence is synthesized)
ctccagggtctaaagagaacaagaggtgctagctcttaccaaaacagatggtagagagagttgctggctatttaaaaagctctttcatcttttaattcacctcttcttttcacctcttta

SEQ ID NO: 416850 - DNA, 120 bp, Artificial Sequence
  ENSG00000149485_21 (sequence is synthesized)
accactcctcaggaacagaacacttctaggactgggggtcttttagctccataagcaagtgagcagatgggacaagttagtcttttctccctagaaacaaaggggatgcccagtggtttc

SEQ ID NO: 416851 - DNA, 120 bp, Artificial Sequence
  ENSG00000149485_22 (sequence is synthesized)
cctttgcttcccaacctaaaatttcaagtttaataaaatagcaattagcagaagtgaccaaattgggagataattatcagtcatgaggaaagacacagatttcggtcataaagaatgtaa

SEQ ID NO: 416852 - DNA, 120 bp, Artificial Sequence
  ENSG00000149485_23 (sequence is synthesized)
gggctataagtagaaactttctataacctaaatgatgttatagaattatttttgagcaggagcagaaagattaaatatgatcacttcatacttctaaatcagaaataggaagattaaaac

SEQ ID NO: 416853 - DNA, 120 bp, Artificial Sequence
  ENSG00000149485_24 (sequence is synthesized)
cacagaacagtttgtgatttctattgctgtagctaggtatcttactctgtccactcttgttcaagtatctaactcttctggaaaccaaataggctttagaagagattatcctatattcct

SEQ ID NO: 416854 - DNA, 120 bp, Artificial Sequence
  ENSG00000149485_25 (sequence is synthesized)
atcagtataatactaaaatgtaactttttaatcatctggtttttaaaagataaacagtttagcccatctctccagagagcaaacataggaatatgactcaggagcctcctagggcttatc

SEQ ID NO: 416855 - DNA, 120 bp, Artificial Sequence
  ENSG00000149485_26 (sequence is synthesized)
atcagccctcacacccgcttccccctccaacccacagcctttgcttccaggtggcaggattactactttgcctcttcagcagcatctactctaggcatattgatcattttagacactggg

SEQ ID NO: 416856 - DNA, 120 bp, Artificial Sequence
  ENSG00000149485_27 (sequence is synthesized)
agaagagaacctcaaactaggaggaaaagacagagcctccacttagttttgggaggggatggcagacagtcaaggagatgagcgtcctaaggcatgttgggatagggtcagatgcaccac

SEQ ID NO: 416857 - DNA, 120 bp, Artificial Sequence
  ENSG00000149485_28 (sequence is synthesized)
ccatggagaggtttgtcaacacaaagacatggaaggttagaggtttgtcaacaaaaagacatggaaggttaggtttgtcaacacaaagacatggaagattagaggtttgtcaacacaaag

SEQ ID NO: 416858 - DNA, 120 bp, Artificial Sequence
  ENSG00000149485_29 (sequence is synthesized)
acacaggaagaatgggctgcagaagatttagatgttttccatttgggcacattttacttagctggagaactaggtttaaaacagcctgggtaggaaaattagaagcaagctggatgcagt

SEQ ID NO: 416859 - DNA, 81 bp, Artificial Sequence
  ENSG00000149485_30 (sequence is synthesized)
agaagcaatgggaggtccaggcaggaggatcacttgggcccaggaggtcaagcctgcagcgagctgagatcacaccactgc

SEQ ID NO: 416860 - DNA, 120 bp, Artificial Sequence
  ENSG00000149485_31 (sequence is synthesized)
agaccctgtctcaaaaaaaaaaaaaacaacaaaaacttagaattgaggagttgtacctccattggcttcctcactccaaaataggtgctgatccttcctattcctattctttgccacctt

SEQ ID NO: 416861 - DNA, 120 bp, Artificial Sequence
  ENSG00000149485_32 (sequence is synthesized)
ccttttgggtgtggtgtcaccagcctgtttagccaagtagctttgggcataggctgcccaatctgagcaaacaccagtgaggctctattgagccaagaccaagtcctcaaagcacctgaa

SEQ ID NO: 416862 - DNA, 120 bp, Artificial Sequence
  ENSG00000149485_33 (sequence is synthesized)
ccactgtggccttctcagcctacagcagtgtggtctcttacatggccacaaagggacacacagtgacaaaaggctcggaatgttacaatggtaaaatgagtgatctcaaatccactgaca

SEQ ID NO: 416863 - DNA, 120 bp, Artificial Sequence
  ENSG00000149485_34 (sequence is synthesized)
gatataaaataggcttagagaggaaaagctgcctctggtcaagtagatcatggcagcatgaattccaactcacttttttacaactccaacttctatgtttatctttgttactttcacttt

SEQ ID NO: 416864 - DNA, 120 bp, Artificial Sequence
  ENSG00000149485_35 (sequence is synthesized)
tttacaacctggccagaggcattttttaaatcaggcccaatatcagtattctttttgtgtgtgccaattttgttatcacatccctatgaagttgaaaaataaagttaattttgaccaaaa

SEQ ID NO: 416865 - DNA, 120 bp, Artificial Sequence
  ENSG00000149485_36 (sequence is synthesized)
gtctcgatggctaggagaggcagcgcagccgcgtctggacctaggtgccggtctccactcgccagcaggagcggagagggagcaggaaaggagcccattctcgaggatggggctgaaacg

SEQ ID NO: 416866 - DNA, 120 bp, Artificial Sequence
  ENSG00000149485_37 (sequence is synthesized)
ggaagcttggggagaccgctgccttggggacccctgcgtcgtgtgaagactggaggacgcggaagggacagcgctggccggggagggcaagcggccgctggcgtacataagggattggga

SEQ ID NO: 416867 - DNA, 120 bp, Artificial Sequence
  ENSG00000149485_38 (sequence is synthesized)
gagcggaccgctgtttacgctctggggcgctagctaaagagcacggattggtgcattttacaaacctctagctacagaaaagttctccaagtctgcactcgacccaggaagtccatctgg

SEQ ID NO: 416868 - DNA, 120 bp, Artificial Sequence
  ENSG00000149485_39 (sequence is synthesized)
cttcacctctcacttcaacttgggatccctttgtggccttccacatcaacaagggccttgtgaagaagtatatgaactctctcctgattggagaactgtctccagagcagcccagctttg

SEQ ID NO: 416869 - DNA, 120 bp, Artificial Sequence
  ENSG00000149485_40 (sequence is synthesized)
aatcttatcgccatggaccttaccttgcacaacccaaagtagctgccttggggcagggggtggccagagtgcttagggaaatgtggagccctacccagaacaacggtggagggaaaggga

SEQ ID NO: 416870 - DNA, 120 bp, Artificial Sequence
  ENSG00000149485_41 (sequence is synthesized)
agaaacgcagaagtgccccagttcggacgtagggaagtcttcctcttcgtggtttttggagaaccctagctaagagaggaaagggacttattgaaagacccgcaagaagggacggaagtc

SEQ ID NO: 416871 - DNA, 120 bp, Artificial Sequence
  ENSG00000149485_42 (sequence is synthesized)
aaatccaccggctcaaggcctcactcgacctgggctttgcaaaccccaggccgttctccttccaccaatcccggacgccggtccccaagaaggccggctcgagcttggggacgtcccaag

SEQ ID NO: 416872 - DNA, 120 bp, Artificial Sequence
  ENSG00000149485_43 (sequence is synthesized)
ctccattcagcgccggaggtctgtttggcccacggggagccagggatcctgactccgcctgcagcagagaagggtggctggggcgcccccagacccttaccgttgcatcttctccagcgt

SEQ ID NO: 416873 - DNA, 86 bp, Artificial Sequence
  ENSG00000149485_44 (sequence is synthesized)
aaatacaccagtaccttgggaggccaagatgggcagatcatttgaggcccaggctggctggctgcagcatgactttgggcacctgt

SEQ ID NO: 416874 - DNA, 120 bp, Artificial Sequence
  ENSG00000149485_45 (sequence is synthesized)
tcctgcggccaccccgcagccctggcccctcagtccattcactcctgcagcgcggccccgcacccagggcctgcactagaaccgctgttcctaccgcggcgccccctgggagccaacgcc

SEQ ID NO: 416875 - DNA, 120 bp, Artificial Sequence
  ENSG00000149485_46 (sequence is synthesized)
aattcggaggaaagcccggaggcgcctgatcatacctgttgcccgctagctaaagagcacggattggtgcattttacaaacctctagctacagaaaagttctccaagtctgcactcgacc

SEQ ID NO: 416876 - DNA, 120 bp, Artificial Sequence
  ENSG00000149485_47 (sequence is synthesized)
caggaagtccatctggcttcacctctcacttcaacttgggtacagccttctggcgggcaggaggatggcctttggtgcgaacactgccggagtccagggggctggctccctcacctttca

SEQ ID NO: 416877 - DNA, 120 bp, Artificial Sequence
  ENSG00000149485_48 (sequence is synthesized)
gtatccatggcccaagaagcccacatccttgtctccagcacccagagtgggggataggggttccccaggggaaacttgagactgactctaggcctaatttagaacaaaataatagaacca

SEQ ID NO: 416878 - DNA, 120 bp, Artificial Sequence
  ENSG00000149485_49 (sequence is synthesized)
gacacagatcctccttatctctaagtgggacgaaatgatttgagcttagcaggcagcctgattcccaatgtgtaatttcatgcggtcagtgtctccagaggttcttgtactgggcataat

SEQ ID NO: 416879 - DNA, 120 bp, Artificial Sequence
  ENSG00000149485_50 (sequence is synthesized)
gccagggggctgagttgggaatggggaagatgaatgagagacaatacctactttcaaggaaacttctgatgaagcagaatgtggttattaatcagaaaagaggtacaggcaataggttct

SEQ ID NO: 416880 - DNA, 120 bp, Artificial Sequence
  ENSG00000149485_51 (sequence is synthesized)
ggggactccaaaaggggcctgactgcacctggctttgtgaagtcacttttctagctggccttgaggctgggcagggtttctgacaggcagaggtggagcaggggggatgaactctgagca

SEQ ID NO: 416881 - DNA, 120 bp, Artificial Sequence
  ENSG00000149485_52 (sequence is synthesized)
gagaagctggaaatgaggggtaagtttgaccaccagacatattgtggaggactagtgtcaggggaagagtatggtgcttggttcagtgatgagagatttgatcagggcactggcatggac

SEQ ID NO: 416882 - DNA, 120 bp, Artificial Sequence
  ENSG00000149485_53 (sequence is synthesized)
tgagccatggtcctggcagattcatttggcggcatgctgaaggatttagattggctaggaagagctagaggcaaagagaccttgtaggccttggtacttttgaaggggacatgcaagaag

SEQ ID NO: 416883 - DNA, 120 bp, Artificial Sequence
  ENSG00000149485_54 (sequence is synthesized)
gcaacccgctccagttcccttacaggctgtggaagcattgttcttttgctcgtcacactaaaccttgctgctgctcattctttgggtctgcaaagagtgttattcctttaagagctataa

SEQ ID NO: 416884 - DNA, 120 bp, Artificial Sequence
  ENSG00000149485_55 (sequence is synthesized)
cagcgggaaggtccacggctccattcttgaagtcagtgagaccatacccgccggaaggaaccaacgcccgacacagccccacccatctctcctgtttctcacctatactgaaattcttgg

SEQ ID NO: 416885 - DNA, 120 bp, Artificial Sequence
  ENSG00000149485_56 (sequence is synthesized)
gcatccttctaactagagcagatactcggtgatcttaaactgtggacacctgggagcaccctcaaaaggcagctgggcctagggagatggcctgtgcttctgtgtcaggagttggttcct

SEQ ID NO: 416886 - DNA, 120 bp, Artificial Sequence
  ENSG00000149485_57 (sequence is synthesized)
tcaggtgggctcgtggtctcgctgacgtcaagaatgaagccatgaaccttcgcgctagctaaagagcacggattggtgcattttacaaacctctagctacagaaaagttctccaagtctg

SEQ ID NO: 416887 - DNA, 120 bp, Artificial Sequence
  ENSG00000149485_58 (sequence is synthesized)
attcggaggaaagcccggaggcgcctgatcatacctgttgcccggtgattgggtgtcctgcggatgcgggatgaaaaggcgggagagaggcctggagaagtggagtctggggagtgggga

SEQ ID NO: 416888 - DNA, 120 bp, Artificial Sequence
  ENSG00000149485_59 (sequence is synthesized)
attccgcggagcggaccgctgtttacgctctggggcggtaggcccttcgcggggtcctgtcccttcttcccttggtctcactgcggggtcggcgcgcgccccagccccaggcctgctgct

SEQ ID NO: 416889 - DNA, 120 bp, Artificial Sequence
  ENSG00000149485_60 (sequence is synthesized)
tccctttctagaccacagccctcagagctaaggccccggcgcctctctgctgggttggagtcctggggactcagtcctagggactcgaaagtcggggcgttcccttcaccgcgtttcccc

SEQ ID NO: 416890 - DNA, 120 bp, Artificial Sequence
  ENSG00000149485_61 (sequence is synthesized)
cttggcggccagaatggcgtcccctccccttgcatccccctctgatcccgtgccctgcagcgtgatgccctccactgtccctatccactaccctggcgtcccagagtgtgccgcgggtca

SEQ ID NO: 416891 - DNA, 120 bp, Artificial Sequence
  ENSG00000149485_62 (sequence is synthesized)
ccaggttcccataacgtcgcagcagagcttagacgctgcggggcgaagacccgccccaccctctgacgcgaccagcctagtgggcgaggccagagcttgcgcgggtcaaccagagtgacc

SEQ ID NO: 416892 - DNA, 120 bp, Artificial Sequence
  ENSG00000149485_63 (sequence is synthesized)
cgcatgcgcagacgaaacaggcaccaacgctggagcttcccgcagtgtgatttggggccgggaatgccgcggcggggacggcgattggtccgtatgtgtggtgccaccggccgccggctc

SEQ ID NO: 416893 - DNA, 120 bp, Artificial Sequence
  ENSG00000149485_64 (sequence is synthesized)
atcagtgctctgtaaaaacgcaccaattggcgctctgtagctagctagaggtttgtaaaatgagccaatcagcaggacgtgggcagggacaactaagacaataaaagctggccaccccag

SEQ ID NO: 416894 - DNA, 120 bp, Artificial Sequence
  ENSG00000149485_65 (sequence is synthesized)
tactccctgcatgacagcagtttgccatctcagctgagcgaagtgaagttaggctgatgattggttgaaggcaaactagttcttcccatccaaccccagtttccactgggaagctgggtg

SEQ ID NO: 416895 - DNA, 79 bp, Artificial Sequence
  ENSG00000149485_66 (sequence is synthesized)
tcttcccatccaaccccagtttccactgggaagctgggtgtttggggtgtagaggggcctcttgctttatcctcaacct

SEQ ID NO: 416896 - DNA, 120 bp, Artificial Sequence
  ENSG00000149485_67 (sequence is synthesized)
atcttaaactttgtcaagatgggccaaggtaacctggtagagcccagtccaacccccagaggaacaaaggtacagatagttctggaaggatgggtcctgaggagagaatggaagagctgt

SEQ ID NO: 416897 - DNA, 120 bp, Artificial Sequence
  ENSG00000149485_68 (sequence is synthesized)
tagaacgaagaagatctttctgatgactgccacatattcccagctttaaaagtctgtcccagctactaaggaaactgaggtgggaccatcctttgagcccaggaatttggggctgcagta

SEQ ID NO: 416898 - DNA, 120 bp, Artificial Sequence
  ENSG00000149485_69 (sequence is synthesized)
cagcctgggcaacagagtgagatcttgtttcttaaaacaacaacaactctgctccataatgcctaaaatgagctttaaacgcctttaaattttcaaattttttaaagaaggaagggaagg

SEQ ID NO: 416899 - DNA, 120 bp, Artificial Sequence
  ENSG00000149485_70 (sequence is synthesized)
attttttaaagaaggaagggaaggagtccactgatcttattttagtttgaaggaattcatcctaactgcctatcaccaactatcacgaatagagaaaggcgatggggcagaagggtagag

SEQ ID NO: 416900 - DNA, 120 bp, Artificial Sequence
  ENSG00000149485_71 (sequence is synthesized)
cagagacctctggaagaaatagttttagaatccatggcacatcaagatggaggagccatgggtgagcattgtcatgctaggagttatgggtagcatcaggtgccacagagaagggctaca

SEQ ID NO: 416901 - DNA, 120 bp, Artificial Sequence
  ENSG00000149485_72 (sequence is synthesized)
gaaaaggaaatgaggaagcatgtagaatgcaacacttcttcaactcccagttttctttcaagagaggcccctctgttccgtcccacagctgacctccagggcttcagattggggtggcac

SEQ ID NO: 416902 - DNA, 120 bp, Artificial Sequence
  ENSG00000149485_73 (sequence is synthesized)
aagcccatctccctagtttaaggaagtgagcttcacagcctgtgaaggatccacagggtccctcccaacacacacacactttcctgctcctgccccttcacctgcatggtggagctgcca

SEQ ID NO: 416903 - DNA, 120 bp, Artificial Sequence
  ENSG00000149485_74 (sequence is synthesized)
gcacccttttaaaagtgtgggatccttggagtgtgtatgtagaaaagagaagaaaaatgaaaaataataaaggtgtgggagcagagcaagtcccatgcgtggggcctgagttcccaagca

SEQ ID NO: 416904 - DNA, 120 bp, Artificial Sequence
  ENSG00000149485_75 (sequence is synthesized)
cctgtcactgaagagtgccactcgcacccctcaccttccctggcatcctcttgggagtttttgccttccccagacttggatttatgcccaccttcagtgcctgctggttccagtggattg

SEQ ID NO: 416905 - DNA, 120 bp, Artificial Sequence
  ENSG00000149485_76 (sequence is synthesized)
cagagcactcaagcacctggaggggagacagaagggatggttggaagaggcagccccctgctagaggccatctctcccaacatcaactggccctttcatgaccttcctgtgctcatgcct

SEQ ID NO: 416906 - DNA, 120 bp, Artificial Sequence
  ENSG00000149485_77 (sequence is synthesized)
agtgctgctaaatccaccggctcaaggcctcactcgacctgggctttgcaaaccccaggccgttctccttccaccaatcccggacgccggtccccaagaaggccggctcgagcttgggga

SEQ ID NO: 416907 - DNA, 120 bp, Artificial Sequence
  ENSG00000149488_0 (sequence is synthesized)
gcagtgctgctgaccatgagccaccaggtaaagggcctgaaagaggaagcacgaggcggagtgaaagggcgggtgaagagcggctctccacacacaggtgacaggctgggaaggagatcc

SEQ ID NO: 416908 - DNA, 120 bp, Artificial Sequence
  ENSG00000149488_1 (sequence is synthesized)
tcaagcaagcgggctctcaaagccgaggggaccccaggcaggcgcggagctcagcgaagccagaaggagcgcgccgggggcagcccaagcccggggtctccccggaggaagcaaacaggg

SEQ ID NO: 416909 - DNA, 120 bp, Artificial Sequence
  ENSG00000149488_2 (sequence is synthesized)
cgcaggagacacagagaagagctgggggagcaggagcggggcgaggcagagaggacctgcgagggcaggagaaagcgcgacgagagggcctccttccaggagcggacagcagccccaaag

SEQ ID NO: 416910 - DNA, 120 bp, Artificial Sequence
  ENSG00000149488_3 (sequence is synthesized)
agggaaaaggagattccgaggagggaggagaagtcgaagcggcagaagaaacccaggtcatcctccttggcctccagtgcctctggtggggagtccctgtccgaggaggaactggcccag

SEQ ID NO: 416911 - DNA, 120 bp, Artificial Sequence
  ENSG00000149488_4 (sequence is synthesized)
atcctggagcaggtggaagaaaaaaagaagctcattgccaccatgcggagcaagccctggcccatggcgaagaagctgacagagctcagggaggcccaggaatttgtggagaagtatgaa

SEQ ID NO: 416912 - DNA, 120 bp, Artificial Sequence
  ENSG00000149488_5 (sequence is synthesized)
ggtgccttgggaaaggggaaaggcaagcaactatatgcctacaagatgctgatggccaagaaatgggtcaaatttaagagagactttgataatttcaagactcaatgtatcccctgggaa

SEQ ID NO: 416913 - DNA, 120 bp, Artificial Sequence
  ENSG00000149488_6 (sequence is synthesized)
atgaagatcaaggacattgaaagtcactttggttcttcagtggcatcgtatttcatctttctccgatggatgtatggagttaaccttgtcctttttggcttaatatttggtctagtcata

SEQ ID NO: 416914 - DNA, 120 bp, Artificial Sequence
  ENSG00000149488_7 (sequence is synthesized)
atcccagaggtactgatgggcatgccctatgggagtattcccagaaagacagtgcctcgggctgaggaagaaaaggccatggatttttctgtcctttgggattttgagggctatatcaag

SEQ ID NO: 416915 - DNA, 120 bp, Artificial Sequence
  ENSG00000149488_8 (sequence is synthesized)
tactctgcactcttctatggctactacaacaaccagaggaccatcgggtggctgaggtaccggctgcctatggcttactttatggtgggggtcagcgtgttcggctacagcctgattatt

SEQ ID NO: 416916 - DNA, 120 bp, Artificial Sequence
  ENSG00000149488_9 (sequence is synthesized)
gtcattcgatcgatggccagcaatacccaaggaagcacaggcgaaggggagagtgacaacttcacattcagcttcaagatgttcaccagctgggactacctgatcgggaattcagagaca

SEQ ID NO: 416917 - DNA, 120 bp, Artificial Sequence
  ENSG00000149488_10 (sequence is synthesized)
gctgataacaaatatgcatccatcaccaccagcttcaaggaatcaatagtggatgaacaagagagtaacaaagaagaaaatatccatctgacaagatttcttcgtgtcctggccaacttt

SEQ ID NO: 416918 - DNA, 120 bp, Artificial Sequence
  ENSG00000149488_11 (sequence is synthesized)
ctcatcatctgctgtttgtgtggaagtgggtacctcatttactttgtggttaagcgatctcagcaattctccaaaatgcagaatgtcagctggtatgaaaggaatgaggtagagatcgtg

SEQ ID NO: 416919 - DNA, 120 bp, Artificial Sequence
  ENSG00000149488_12 (sequence is synthesized)
atgtccctgcttggaatgttttgtccccctctgtttgaaaccatcgctgccctggagaattaccacccacgcactggactgaagtggcagctgggacgcatctttgcactcttcctgggg

SEQ ID NO: 416920 - DNA, 120 bp, Artificial Sequence
  ENSG00000149488_13 (sequence is synthesized)
ttgctaatgaagagacaataaagaacatcactcactggactctgtttaactattacaactcttctggttggaacgagagtgtcccccgaccacccctgcaccctgcagatgtgccccggg

SEQ ID NO: 416921 - DNA, 120 bp, Artificial Sequence
  ENSG00000149488_14 (sequence is synthesized)
gttcttgctgggagacagctgtgggcattgaattcatgaggctgacggtgtctgacatgctggtaacgtacatcaccatcctgctgggggacttcctacgggcttgttttgtgcggttca

SEQ ID NO: 416922 - DNA, 120 bp, Artificial Sequence
  ENSG00000149488_15 (sequence is synthesized)
tgaactactgctggtgctgggacttggaggctggatttccttcatatgctgagtttgatattagtggaaatgtgctgggtttgatcttcaaccaaggaatgatctggatgggctccttct

SEQ ID NO: 416923 - DNA, 120 bp, Artificial Sequence
  ENSG00000149488_16 (sequence is synthesized)
atgctccaggcctggtgggcattaatgtgctgcgcctgctgacctccatgtacttccagtgctgggcggtgatgagcagcaacgtaccccatgaacgcgtgttcaaagcctcccgatcca

SEQ ID NO: 416924 - DNA, 120 bp, Artificial Sequence
  ENSG00000149488_17 (sequence is synthesized)
acaacttctacatgggcctcctgctgctggtgctcttcctcagcctcctgccggtggcctacaccatcatgtccctcccaccctcctttgactgcgggccgttcagtgggaaaaacagaa

SEQ ID NO: 416925 - DNA, 120 bp, Artificial Sequence
  ENSG00000149488_18 (sequence is synthesized)
tgtacgatgtcctccaagagaccattgaaaacgatttcccaaccttcctgggcaagatctttgctttcctcgccaatccaggcctgatcatcccagccatcctgctgatgttcttggcca

SEQ ID NO: 416926 - DNA, 120 bp, Artificial Sequence
  ENSG00000149488_19 (sequence is synthesized)
tttactacctgaactcagtttccaaaagcctttcccgagctaatgcccagctgaggaagaaaatccaagtgctccgtgaagttgagaagagtcacaaatctgtaaaaggcaaagccacag

SEQ ID NO: 416927 - DNA, 120 bp, Artificial Sequence
  ENSG00000149488_20 (sequence is synthesized)
ccagagattcagaggacacacctaaaagcagctccaaaaatgccacccagctccaactcaccaaggaagagaccactcctccctctgccagccaaagccaggccatggacaagaaggcgc

SEQ ID NO: 416928 - DNA, 120 bp, Artificial Sequence
  ENSG00000149488_21 (sequence is synthesized)
agggccctgggacctccaattctgccagcaggaccacactgcctgcctctggacaccttcctatatctcggccccctggaatcggaccagattctggccacgccccatctcagactcatc

SEQ ID NO: 416929 - DNA, 120 bp, Artificial Sequence
  ENSG00000149488_22 (sequence is synthesized)
cgtggaggtcagcctctggaaagagtgctcagagacctccccactgatggctaggactccagggagcctcgaccctagggctgatcctcaagtaccccagtttcacacataccaaaccaa

SEQ ID NO: 416930 - DNA, 120 bp, Artificial Sequence
  ENSG00000149488_23 (sequence is synthesized)
ggttctctcccctctttcctctcacatacatgctctgtctcctctcttggaatgcatgaactttgattccttcaggcccttgtcagctaccgaaggaggaagacagtggcttcacctgtc

SEQ ID NO: 416931 - DNA, 120 bp, Artificial Sequence
  ENSG00000149488_24 (sequence is synthesized)
ctttagggaagctggagccatctctgcactaactgccctcccaaatatcttggttcagacagctctgaaccccacgctcacagtggtcgaccttgcctcccgattttcggagttggggaa

SEQ ID NO: 416932 - DNA, 120 bp, Artificial Sequence
  ENSG00000149488_25 (sequence is synthesized)
gggccatgaccaccctcgtagactttttccatgggatacagtttaggacacgggtttctgccagcttccctaaccaggagggggatggagaagggcctacatttctcaatccagaggaag

SEQ ID NO: 416933 - DNA, 120 bp, Artificial Sequence
  ENSG00000149488_26 (sequence is synthesized)
tcaccacttcatggacattccgcacaaaggaatttcaactatcttctttgatacttatagccagatgcattcttgggcatttcatttctttggaagcttaatgacggtctctgctctgta

SEQ ID NO: 416934 - DNA, 120 bp, Artificial Sequence
  ENSG00000149488_27 (sequence is synthesized)
gagtagtaaagtgtttaatttgtatttcctttaagggtcctatttgccttcataagggaaactgctttttcccagtgtaatgaacaatgtgaccttctattctaggaaatggaggcattt

SEQ ID NO: 416935 - DNA, 120 bp, Artificial Sequence
  ENSG00000149488_28 (sequence is synthesized)
ggcctaggggaaagtggaccacacactccagtactgagccaatggttgatagggaattgcatctgagcagcctcaactctcattatgggggctgaaatctgacagtggaggcgaatattt

SEQ ID NO: 416936 - DNA, 120 bp, Artificial Sequence
  ENSG00000149488_29 (sequence is synthesized)
caggaagtcctggaacacaccaagaacacaataaccattggtcctgtcttctggatgatgctttgagaaacctcctttgacttgtattcccttatagccctcttccccacctacctggta

SEQ ID NO: 416937 - DNA, 120 bp, Artificial Sequence
  ENSG00000149488_30 (sequence is synthesized)
aatgtgtgtcatttcctctctgtagtgtccttctatgctctggcagaatctctggctcaggcacctgtgctgtacatgtctcttccacaacacctcactggcccagcctgcagtcactgg

SEQ ID NO: 416938 - DNA, 120 bp, Artificial Sequence
  ENSG00000149488_31 (sequence is synthesized)
tgtgcatgtaaggtacctacctcttacctgagctcctggtgaaaggctccgtaggatgttgacctatgtatccctcatcctggcctggcccagccttcatatgctgagtttgatattagt

SEQ ID NO: 416939 - DNA, 120 bp, Artificial Sequence
  ENSG00000149488_32 (sequence is synthesized)
cgggccgttcaggtgcagagtctcagttgcccgggagcacctcccctcccgaggcagtctgctcagagggcctcggcccagaattccagttctggtttcatgccagcctgtaaaaggcca

SEQ ID NO: 416940 - DNA, 120 bp, Artificial Sequence
  ENSG00000149488_33 (sequence is synthesized)
tggaactttgggtgaatcaccgatgccatttaagagggttttctgccaggatggaaatgttaggtcgttctgtgtctgcgctgttcatttcagtagccaccagccacctgtggccgttga

SEQ ID NO: 416941 - DNA, 120 bp, Artificial Sequence
  ENSG00000149488_34 (sequence is synthesized)
gtgcttgaaatgaggaactgagaaaattaatttctcatgtatttttctcatttatttattaatttttaactgatagttgtacatatttgggggtacatgtgatatttggatacatgtata

SEQ ID NO: 416942 - DNA, 120 bp, Artificial Sequence
  ENSG00000149488_35 (sequence is synthesized)
gtacatgtgatatttggatacatgtatacaatatataatgatcaaatcagggtaactgggatatccatcacatcaaacatttattttttattctttttagacagagtctcactctgtcac

SEQ ID NO: 416943 - DNA, 87 bp, Artificial Sequence
  ENSG00000149488_36 (sequence is synthesized)
aggctggccttgaactcctggcctcaaacaatccacttgcctcggcctcccaaagtgttatacatttatcttttctttgtgttggga

SEQ ID NO: 416944 - DNA, 120 bp, Artificial Sequence
  ENSG00000149488_37 (sequence is synthesized)
atcttttctttgtgttgggaactttgaaattatacaatgaattattgttaactgtcatctccctgctgtgctatggaacactgggacttcttccctctatctaactgtatatttgtacca

SEQ ID NO: 416945 - DNA, 120 bp, Artificial Sequence
  ENSG00000149488_38 (sequence is synthesized)
gttaaccaaccgtacttcatccccactcctctctatccttcccaacctctgatcacctcattctactctctacctccatgagatccacttttttagctcccacatgtgagtaagaaaatg

SEQ ID NO: 416946 - DNA, 65 bp, Artificial Sequence
  ENSG00000149488_39 (sequence is synthesized)
agatccacttttttagctcccacatgtgagtaagaatgttccatccatgttgctgcaaatgacag

SEQ ID NO: 416947 - DNA, 120 bp, Artificial Sequence
  ENSG00000149488_40 (sequence is synthesized)
aagggagacgggagggagaaggccagagagtgaccttcctgcttctgcagttttcttagtttccttcagcttaaaatactcaacatgccaaggtgccatactttggggtgtcctgttctg

SEQ ID NO: 416948 - DNA, 120 bp, Artificial Sequence
  ENSG00000149488_41 (sequence is synthesized)
agccccgcagagctcacaagctctcggaatcatcttggacgtctgatttctcacggccggggacattttcctgggcctgaggccgttggaaccagaactgtccattttcccgccccggca

SEQ ID NO: 416949 - DNA, 80 bp, Artificial Sequence
  ENSG00000149489_0 (sequence is synthesized)
acaaacaggcgccggacgcggagccgccaggaagcgcgggagggggggcgggcccgagggggggccgggccgcttggtaa

SEQ ID NO: 416950 - DNA, 120 bp, Artificial Sequence
  ENSG00000149489_1 (sequence is synthesized)
ggctagccggctgaccccctggcctactcccggcctccggctccaggcccttcccggatccccgcccccggattcccaggggacggggaagggagcgcccgccccgatatctccgccccc

SEQ ID NO: 416951 - DNA, 120 bp, Artificial Sequence
  ENSG00000149489_2 (sequence is synthesized)
cagcccctaacccctcagggttgagcggaccaaccccaccacttccgcgaggggcaggggcggggtcacaaaacgggccctcggcctaggggcggagtttctcgtaaggggcaaggccaa

SEQ ID NO: 416952 - DNA, 120 bp, Artificial Sequence
  ENSG00000149489_3 (sequence is synthesized)
ggcatcttgtattggggctgacaggggggcgggttattagggctgaggatgggaggatgctcagggtattggggtcagggtggcattagcccagctcaagccgggccgggctgactcagc

SEQ ID NO: 416953 - DNA, 120 bp, Artificial Sequence
  ENSG00000149489_4 (sequence is synthesized)
atcctgccccagccagcttccatccctgacacctctgcattcccttgggcagagatgggagatggcgccggtgttgcccctggtgctgcccctgcagccccgcatccgcctggcacaagg

SEQ ID NO: 416954 - DNA, 120 bp, Artificial Sequence
  ENSG00000149489_5 (sequence is synthesized)
gctctggctcctctcctggctgctggcgctggctggtggcgtcatcctcctctgtagtgggcacctcctggtccagctaaggcaccttggcaccttcctggctccctcctgtcagttccc

SEQ ID NO: 416955 - DNA, 120 bp, Artificial Sequence
  ENSG00000149489_6 (sequence is synthesized)
tgtcctgccccaggctgccctggcagcgggcgcggtggctctgggcacaggactagtgggtgtaggagccagccgggcaagtctgaatgcagctctataccctccctggcgaggggtcct

SEQ ID NO: 416956 - DNA, 120 bp, Artificial Sequence
  ENSG00000149489_7 (sequence is synthesized)
tgggagtctggatgaggcgctggaggagggcctggtgactgccttggctcactacaaggacacagaggtgcctgggcactgtcaggccaaaaggctggtggatgagctgcaactgaggta

SEQ ID NO: 416957 - DNA, 120 bp, Artificial Sequence
  ENSG00000149489_8 (sequence is synthesized)
ccactgctgcgggcgccacgggtacaaggattggtttggggtccagtgggtcagcagccgttacctggatcccggtgaccgggatgtggctgaccggatccagagcaatgtagaaggcct

SEQ ID NO: 416958 - DNA, 120 bp, Artificial Sequence
  ENSG00000149489_9 (sequence is synthesized)
atacctgactgatggggtccctttctcctgttgcaacccccactcaccccggccttgcctgcaaaaccgtctttcagactcctacgcccaccccctgttcgatccccgacaacccaacca

SEQ ID NO: 416959 - DNA, 120 bp, Artificial Sequence
  ENSG00000149489_10 (sequence is synthesized)
aaacctctgggcccaagggtgccatgaggtgctgctggagcacttgcaggacttggcaggcacactgggtagcatgctggctgtcaccttcctactgcaggctctggtgctccttggcct

SEQ ID NO: 416960 - DNA, 120 bp, Artificial Sequence
  ENSG00000149489_11 (sequence is synthesized)
gcggtacctgcaaacagcactggaggggcttggaggggtcattgatgcgggaggagagacccagggctatctctttcccagtgggctgaaagatatgctgaaaacagcatggctacaggg

SEQ ID NO: 416961 - DNA, 120 bp, Artificial Sequence
  ENSG00000149489_12 (sequence is synthesized)
aggggttgcctgcaggccagcacctgaggaggccccaccaggagaagcacctcccaaggaggatctatctgaggcctagaggcctggagcttggggtgaggaagagggagggatggacaa

SEQ ID NO: 416962 - DNA, 120 bp, Artificial Sequence
  ENSG00000149489_13 (sequence is synthesized)
gtctgaaaacctcacaactccttaccaaggctccaggttggggggatcgtaggattagaggggctaaggatagtcagcgagctggactggggtaagaaagaaaaccagatgtcctagggc

SEQ ID NO: 416963 - DNA, 120 bp, Artificial Sequence
  ENSG00000149489_14 (sequence is synthesized)
ctagcccttgtagtcagaaccaccagggaacagcaaagaacagagtgatgggaaagtgacatgagaaggcctggaggctgattctgatatagactcaataaagtttttggatggaagcaa

SEQ ID NO: 416964 - DNA, 120 bp, Artificial Sequence
  ENSG00000149489_15 (sequence is synthesized)
gcgagaaacctggcaaagctcccttcctgctgccgtctcagcctccgcaaagactgggagtaccatggagtaccgggggggaaatatggagtactgccgaggaacgtgggagccacagag

SEQ ID NO: 416965 - DNA, 80 bp, Artificial Sequence
  ENSG00000149489_16 (sequence is synthesized)
gtccatccggcccccgggttgctccgagcggcggcggcggaggaggcgtctaagccgcgggggccacggccggggagagg

SEQ ID NO: 416966 - DNA, 80 bp, Artificial Sequence
  ENSG00000149489_17 (sequence is synthesized)
ccgagggggcgctgtcgggcgcggggaaggggcctggagggggcgctgtggggccgtccggtgccacagcgccgcagcac

SEQ ID NO: 416967 - DNA, 80 bp, Artificial Sequence
  ENSG00000149499_0 (sequence is synthesized)
ggctccgcgtccggcgcctgtttgtgctgcggcgctgtggcaccggacggccctgccaccccacccccgggagccgagag

SEQ ID NO: 416968 - DNA, 80 bp, Artificial Sequence
  ENSG00000149499_1 (sequence is synthesized)
cccgcgcccgacagcgccccctcggggtggtggtacggcgcccttcgcgcgcgccccggggtgcttccccttcccctctc

SEQ ID NO: 416969 - DNA, 120 bp, Artificial Sequence
  ENSG00000149499_2 (sequence is synthesized)
cttagacgcctcctccgccgccgccgctcggagcaacccgggggccggatggacggggccgcggggcccggtgacggccctgctcgggaggccctccagtctctgagccagcggcttcgg

SEQ ID NO: 416970 - DNA, 120 bp, Artificial Sequence
  ENSG00000149499_3 (sequence is synthesized)
ctctgagccagcggcttcgggtgcaggagcaggagatggaactggtaaaggcagccctggcagaagcccttcgcctgctgcggctgcaggtgcccccttcctccctgcagggctctggca

SEQ ID NO: 416971 - DNA, 120 bp, Artificial Sequence
  ENSG00000149499_4 (sequence is synthesized)
caccagctcctccgggggacagtcttgcagcccccccaggactgccacccacgtgcaccccttccttggtgagccgaggcacccagacggagacagaggtggagctcaagtcatcccctg

SEQ ID NO: 416972 - DNA, 120 bp, Artificial Sequence
  ENSG00000149499_5 (sequence is synthesized)
gaccccctggcctgagcaatggacccccagcccctcagggggccagcgaagagcctagcgggacccaatctgaaggagggggcagcagcagcagtggtgctggctcccctggccccccgg

SEQ ID NO: 416973 - DNA, 120 bp, Artificial Sequence
  ENSG00000149499_6 (sequence is synthesized)
ggatcctcaggcccttgcagcccccacagcgtgctgacacgccgcgaagaaattcttcctcctcctcatccccctcagagcggcctcggcagaagctctccaggaaggcaatctcctccg

SEQ ID NO: 416974 - DNA, 120 bp, Artificial Sequence
  ENSG00000149499_7 (sequence is synthesized)
ccaacctgttagtgcggtccgggagcacagagagccgtgggggaaaagaccccctctccagccctgggggccctggatctcggaggagcaattacaatttggaaggcatctcagtgaaga

SEQ ID NO: 416975 - DNA, 120 bp, Artificial Sequence
  ENSG00000149499_8 (sequence is synthesized)
tgttccttcgagggcgccccattaccatgtacatcccgtctggcatccgcagccttgaggagctgccgagtggcccaccgccagagaccctcagccttgactgggtttatgggtacaggg

SEQ ID NO: 416976 - DNA, 120 bp, Artificial Sequence
  ENSG00000149499_9 (sequence is synthesized)
gtcgtgactcccgctctaatctgtttgtgttgcgctctggggaggtggtctactttatcgcctgtgtggtggtgctgtaccggcctggaggaggcccagggggtcctggaggtggcggcc

SEQ ID NO: 416977 - DNA, 120 bp, Artificial Sequence
  ENSG00000149499_10 (sequence is synthesized)
agagacattaccgggggcacacagactgcgttcgatgccttgctgttcaccctgatggtgttcgggtagcctcgggacagacagctggagtggataaggatggaaagcccctgcagcctg

SEQ ID NO: 416978 - DNA, 120 bp, Artificial Sequence
  ENSG00000149499_11 (sequence is synthesized)
tggttcacatctgggactcagagacgctgttgaaactgcaggagattggactgggggccttcgagcggggtgttggggccctggccttttcagctgcggatcagggtgcctttctttgtg

SEQ ID NO: 416979 - DNA, 120 bp, Artificial Sequence
  ENSG00000149499_12 (sequence is synthesized)
tggtggatgattccaatgagcacatgctgtcggtgtgggactgcagccggggaatgaagctggctgagatcaagagtacaaatgactcagtcctggccgttggcttcaaccctcgtgaca

SEQ ID NO: 416980 - DNA, 120 bp, Artificial Sequence
  ENSG00000149499_13 (sequence is synthesized)
cagtgggaaatctcacgtccacttctggaattggagtggtggagtaggggttcctgggaatgggacccttacccggaaacagggtgtctttgggaaatacaagaaacccaagtttatccc

SEQ ID NO: 416981 - DNA, 120 bp, Artificial Sequence
  ENSG00000149499_14 (sequence is synthesized)
ttgctttgtgttccttccggatggagacattctcactggagactcagaggggaacattctcacctgggggcggagcccttcagattccaagaccccaggcaggggtggcgccaaagagac

SEQ ID NO: 416982 - DNA, 120 bp, Artificial Sequence
  ENSG00000149499_15 (sequence is synthesized)
ctatgggattgtggcccaggctcacgctcatgaaggttctatcttcgccttgtgtctccggagggacgggacagtgctgagtggtggcgggcgggaccgccggctggtacagtgggggcc

SEQ ID NO: 416983 - DNA, 120 bp, Artificial Sequence
  ENSG00000149499_16 (sequence is synthesized)
cgggttggtggccctccaggaggctgagattcccgagcacttcggggccgtgcgagccattgctgaagggcttggctctgagctgctggtgggaaccacgaagaatgcattgctgagggg

SEQ ID NO: 416984 - DNA, 120 bp, Artificial Sequence
  ENSG00000149499_17 (sequence is synthesized)
agacctggcccagggcttctcccctgtaatccagggccacactgatgagctctgggggctctgcacacacccctcccagaaccgcttcctcacctgcggccacgaccggcagctctgcct

SEQ ID NO: 416985 - DNA, 120 bp, Artificial Sequence
  ENSG00000149499_18 (sequence is synthesized)
gtgggatggggagagccatgcactggcctggagcatcgacctcaaggagactggtctctgtgctgacttccacccgagtggggcagttgtggccgtaggactgaacacggggaggtggtt

SEQ ID NO: 416986 - DNA, 120 bp, Artificial Sequence
  ENSG00000149499_19 (sequence is synthesized)
ggttttggacacagagaccagagagatcgtgtctgatgtcattgatggcaatgagcagctctcagtggtccggtacagcccagatgggttgtacctggccattggttcccatgacaacgt

SEQ ID NO: 416987 - DNA, 120 bp, Artificial Sequence
  ENSG00000149499_20 (sequence is synthesized)
gatctacatctatagtgtttccagtgatggtgccaaatccagccgctttggccgctgtatgggtcactccagcttcatcactcatcttgactggtccaaggatgggaatttcatcatgtc

SEQ ID NO: 416988 - DNA, 120 bp, Artificial Sequence
  ENSG00000149499_21 (sequence is synthesized)
caattctggggactatgagattctttactgggacgtggctggaggctgcaagcagctgaagaatcgctatgagagccgagaccgggaatgggctacctacacctgtgtgctgggctttca

SEQ ID NO: 416989 - DNA, 120 bp, Artificial Sequence
  ENSG00000149499_22 (sequence is synthesized)
cgtctacggcgtctggccggacggctccgatgggaccgacatcaactccctgtgccgctcccacaacgagcgcgtggtggcggtggccgacgacttctgcaaagtgcatctcttccagta

SEQ ID NO: 416990 - DNA, 120 bp, Artificial Sequence
  ENSG00000149499_23 (sequence is synthesized)
cccgtgcgctcgtgccaaggcgccgagccgcatgtacgggggccacggcagccacgtgaccagcgtccgattcacgcacgacgactcgcacctcgtctcgctgggcggcaaggacgccag

SEQ ID NO: 416991 - DNA, 120 bp, Artificial Sequence
  ENSG00000149499_24 (sequence is synthesized)
catcttccagtggcgagtgctgggcgctgggggcgcggggccggcgcccgccacgccctctcgaaccccctccctgtcccccgcctcctccctcgacgtttgatcgctgcctggcgggac

SEQ ID NO: 416992 - DNA, 120 bp, Artificial Sequence
  ENSG00000149499_25 (sequence is synthesized)
cgactggcccggcggcgtggccccgccccgccctgcccttccctggcccaatcccccacgactaggggccgactctttcctggactgacttcgagacattcccgatcgcgcattttcctg

SEQ ID NO: 416993 - DNA, 120 bp, Artificial Sequence
  ENSG00000149499_26 (sequence is synthesized)
gagggcgcgaacggcgcccctgcacacactgtttagacccgctggctgagccgggcagccccagcctaggccttgactcccgctgcctgctgaggggcaataaaccagaaccaaagtcgc

SEQ ID NO: 416994 - DNA, 120 bp, Artificial Sequence
  ENSG00000149499_27 (sequence is synthesized)
gggttatgccagagctggacggctgtctggaggcgtccccgcgtgctcctccgccccaggggctccgagcatcctccacagttcctccggtcgccctccctagttgcttgggtcttgctg

SEQ ID NO: 416995 - DNA, 120 bp, Artificial Sequence
  ENSG00000149499_28 (sequence is synthesized)
tcacttcgggcttccccagcgtcattctacgccccacgtaactccgggcccctcgatgtttccctgccccctgcgttactccgggcctcttctcgtggtatttcaggtctttttccttct

SEQ ID NO: 416996 - DNA, 120 bp, Artificial Sequence
  ENSG00000149499_29 (sequence is synthesized)
gatccccactgccccctgagaccttcactgtgactctgctcaccactcacactctctcctgtcactctggatctcttttcttgtactctgggtcctcagtatgactccattcccgcaccc

SEQ ID NO: 416997 - DNA, 120 bp, Artificial Sequence
  ENSG00000149499_30 (sequence is synthesized)
cgttctctctcctggtgttcccccggctcagttactcagctttcgctggagacctgagcttgctgggggcgcgtggggagggctgcggtccctgccctcaccagtgcggcgcctctctct

SEQ ID NO: 416998 - DNA, 120 bp, Artificial Sequence
  ENSG00000149499_31 (sequence is synthesized)
gtggctcccacgttcctcggcagtactccatatttcccccccggtactccatggtactcccagtctttgcggaggctgagacggcagcaggaagggagctttgccaggtttctcgcctgc

SEQ ID NO: 416999 - DNA, 120 bp, Artificial Sequence
  ENSG00000149499_32 (sequence is synthesized)
cctgccagaaggaggcccttgatcctttaccaccgtctcctcccctctggacgagcattcaagcctggggctgcctgaaaggggcagtcctaccggacacatgtaaagttgtggggagac

SEQ ID NO: 417000 - DNA, 120 bp, Artificial Sequence
  ENSG00000149499_33 (sequence is synthesized)
atggggagagccatgcactggcctggagcatcgacctcaaggagactggtctctgtgctgacttccacccgagtggggcagttgtggccgtaggactgaacacggggaggtgagagagag

SEQ ID NO: 417001 - DNA, 120 bp, Artificial Sequence
  ENSG00000149499_34 (sequence is synthesized)
ccaggactcccaggagggaaagcagggaggactgggaagggttcctggtactgggggagtgggcgagagtgaccacctctacccaggagccacctgcgccttggcactcctctgtgcctc

SEQ ID NO: 417002 - DNA, 120 bp, Artificial Sequence
  ENSG00000149499_35 (sequence is synthesized)
cttctgtggtaactgtttctccccctcccccaacccagtgtctcctccaagcctgggagtggaggaggcagcagcccaggatagagaaacagtgggaatgggaggggcatagacaaacac

SEQ ID NO: 417003 - DNA, 120 bp, Artificial Sequence
  ENSG00000149499_36 (sequence is synthesized)
agggaagtgacaggcttccagcttgcacagtgcctttgtagtcggcccctggtctgtagtttcagattactttttcagacgacatcagaagcccctcagcctttatccacacttagctcc

SEQ ID NO: 417004 - DNA, 120 bp, Artificial Sequence
  ENSG00000149499_37 (sequence is synthesized)
agttgcttgggtcttgctgtcacttcgggcttccccagcgtcattctacgccccacgtaactccgggcccctcgatgtttccctgccccctgcgttactccgggcctcttctcgtggtga

SEQ ID NO: 417005 - DNA, 89 bp, Artificial Sequence
  ENSG00000149499_38 (sequence is synthesized)
ttgtatttttaatagagatacggtttcatcatgttggccatcatgcccgttttttttttgttttttttgtttttgagacagtgccggga

SEQ ID NO: 417006 - DNA, 120 bp, Artificial Sequence
  ENSG00000149499_39 (sequence is synthesized)
ggcgtggaaacctgctggaagggtgggggacaaggtggagcccagtttgggcttggaacgctgggcgtgtgtcgttgggtgagagtccagaaacctgaagatccagcccaggaggcccct

SEQ ID NO: 417007 - DNA, 120 bp, Artificial Sequence
  ENSG00000149499_40 (sequence is synthesized)
cgggaccgggaaggcttgcctggaacgcggcagtgggtggccgcggctgccggagcgcctgaaatggtgtagctctgggccgtgggtggcggtgggtaggaggtcgggctgaggccggcc

SEQ ID NO: 417008 - DNA, 120 bp, Artificial Sequence
  ENSG00000149499_41 (sequence is synthesized)
aattatgattgacaggaaatagtgctcttaggggaccagggttttgaaagaagggttgtcctggggtttctggacctctgccagccagctgtcatgatgcaaattgaggagagtcaagta

SEQ ID NO: 417009 - DNA, 120 bp, Artificial Sequence
  ENSG00000149499_42 (sequence is synthesized)
tccaggaggctgaggtgagggctgggctggggtcaagggagtgagggagaagagcaatagtcagtgggctcttgacattctgctaccactctgcagattcccgagcacttcggggccgtg

SEQ ID NO: 417010 - DNA, 120 bp, Artificial Sequence
  ENSG00000149503_0 (sequence is synthesized)
agttttgaaaatcatagttttcgcccgcgctgcgccgcctggttgctcctcccgtgcggtgagtcccgaaggcccggagccaagtgggtctgggcaagcggggccttacctagggatacc

SEQ ID NO: 417011 - DNA, 120 bp, Artificial Sequence
  ENSG00000149503_1 (sequence is synthesized)
accggacttggatcggagcagccttcaggggacgtggcgcagtcgaacagagccaccatggggacgacggccccagggcccattcacctgctggagctatgtgaccagaagctcatggag

SEQ ID NO: 417012 - DNA, 120 bp, Artificial Sequence
  ENSG00000149503_2 (sequence is synthesized)
tttctctgcaacatggataataaggacttggtgtggcttgaggaaatccaagaggaggccgagcgcatgttcaccagagaattcagcaaagagccagagctgatgcccaaaacaccttct

SEQ ID NO: 417013 - DNA, 120 bp, Artificial Sequence
  ENSG00000149503_3 (sequence is synthesized)
cagaagaaccgacggaagaagagacggatttcttatgttcaggatgaaaacagagatcccatcaggagaaggttatcccgcagaaagtctcggagcagccagctgagctcccgacgcctc

SEQ ID NO: 417014 - DNA, 120 bp, Artificial Sequence
  ENSG00000149503_4 (sequence is synthesized)
cgcagcaaggacagtgtagagaagctggctacagtggtcggggagaacggctccgtcctgcggcgtgtgacccgtgctgcggctgcagctgccgcggctaccatggcattggctgcacct

SEQ ID NO: 417015 - DNA, 120 bp, Artificial Sequence
  ENSG00000149503_5 (sequence is synthesized)
tcttcacccacccctgagtctcccacgatgctgactaagaagcccgaggataaccacacccagtgccagctggtgcctgtggtggagatcggcatcagtgagcgccagaatgctgagcag

SEQ ID NO: 417016 - DNA, 120 bp, Artificial Sequence
  ENSG00000149503_6 (sequence is synthesized)
catgtcacccagctcatgtccaccgagcctctgccccgcactctgtccccgactccagcttcagccacagctccaacctcccagggcatcccgacatcagatgaggaatcaacacctaag

SEQ ID NO: 417017 - DNA, 120 bp, Artificial Sequence
  ENSG00000149503_7 (sequence is synthesized)
aagtcgaaggccaggatactggagtccatcacagtgagctccctgatggctacaccccaggaccccaagggtcaaggggtcgggacggggcggtctgcgtctaagctcaggattgcgcag

SEQ ID NO: 417018 - DNA, 120 bp, Artificial Sequence
  ENSG00000149503_8 (sequence is synthesized)
gtctcccctggcccacgggactcgccagcctttccagattctccatggcgggagcgggtgctggctcccatcctgccggataacttctccacgcccacgggctctcgcacggactctcaa

SEQ ID NO: 417019 - DNA, 120 bp, Artificial Sequence
  ENSG00000149503_9 (sequence is synthesized)
tcggtgcggcacagcccgatcgccccgtcttccccgagtccccaagtcttagcccagaagtactctctggtggccaaacaggaaagtgttgtccgcagggcgagcagaaggcttgccaag

SEQ ID NO: 417020 - DNA, 120 bp, Artificial Sequence
  ENSG00000149503_10 (sequence is synthesized)
aagactgccgaagagccagctgcctctggccgcatcatctgtcacagttacctggagaggctcctgaatgttgaggtgccccagaaagttggttctgagcagaaggaaccccccgaggag

SEQ ID NO: 417021 - DNA, 120 bp, Artificial Sequence
  ENSG00000149503_11 (sequence is synthesized)
gctgagcctgtggcggcagctgagccagaggtccctgagaacaatggaaataactcgtggccccacaatgacacggagattgccaacagcacacccaacccgaagcctgcagccagcagc

SEQ ID NO: 417022 - DNA, 120 bp, Artificial Sequence
  ENSG00000149503_12 (sequence is synthesized)
ccggaaacaccctctgcagggcagcaagaggccaagacggaccaagcagatggacccagagagccaccgcagagtgccaggaggaagcgcagctacaagcaggccgtgagtgagctggac

SEQ ID NO: 417023 - DNA, 120 bp, Artificial Sequence
  ENSG00000149503_13 (sequence is synthesized)
gaggagcagcacctggaggatgaggagctgcagccccccaggagcaagaccccttcctcaccctgcccagccagcaaggtggtacggcccctccggacctttctgcacacagtgcagagg

SEQ ID NO: 417024 - DNA, 120 bp, Artificial Sequence
  ENSG00000149503_14 (sequence is synthesized)
aaccagatgctcatgaccccgacctcagccccacgcagcgtcatgaagtcctttattaagcgcaacactcccctgcgcatggaccccaaggagaaggagcggcagcgcctggagaatctg

SEQ ID NO: 417025 - DNA, 120 bp, Artificial Sequence
  ENSG00000149503_15 (sequence is synthesized)
ccgcaaggtgctgcaggcccgcgagcgggtggagcagatgaaggaggagaagaagaagcagattgagcagaagtttgctcagatcgacgagaagactgagaaggccaaggaggagcggct

SEQ ID NO: 417026 - DNA, 120 bp, Artificial Sequence
  ENSG00000149503_16 (sequence is synthesized)
ggcagaggagaaggccaagaaaaaggcggcggccaagaagatggaggaggtggaagcacgcaggaagcaggaagaggaggcacgtaggctcaggtggctgcagcaggaggaggaagagcg

SEQ ID NO: 417027 - DNA, 120 bp, Artificial Sequence
  ENSG00000149503_17 (sequence is synthesized)
gcggcaccaagagctgctgcagaagaagaaggaagaggagcaggagcggctgcggaaggcggccgaggctaagcggctggcagagcagcgggagcaggagcggcgggagcaggagcggcg

SEQ ID NO: 417028 - DNA, 120 bp, Artificial Sequence
  ENSG00000149503_18 (sequence is synthesized)
cgagcaggagcggcgcgagcaggagcggcgggagcaggagcggcgcgagcaggagcgacagctggcagagcaggagcgtcggcgggagcaggagcggctccaggccgagagggagctgca

SEQ ID NO: 417029 - DNA, 120 bp, Artificial Sequence
  ENSG00000149503_19 (sequence is synthesized)
ggagcgggagaaggccctgcggctgcagaaggagcagctgcagagggaactggaggagaagaagaagaaggaagagcagcagcgtctggctgagcggcagctgcaggaggagcaagagaa

SEQ ID NO: 417030 - DNA, 120 bp, Artificial Sequence
  ENSG00000149503_20 (sequence is synthesized)
gaaagccaaggaggcagcaggggccagcaaggccctgaatgtgactgtggacgtgcagtctccagcttgtacctcatatcagatgactccgcaagggcacagggcccctcccaagatcaa

SEQ ID NO: 417031 - DNA, 120 bp, Artificial Sequence
  ENSG00000149503_21 (sequence is synthesized)
cccagataactacgggatggatctgaatagcgacgactccaccgatgatgaggcccatccccggaagcccatccccacctgggcccgaggcaccccgctcagccaggctatcattcacca

SEQ ID NO: 417032 - DNA, 120 bp, Artificial Sequence
  ENSG00000149503_22 (sequence is synthesized)
gtactaccacccaccgaaccttctggagctctttggaaccattctcccactggacttggaggatatcttcaagaagagcaagccccgctatcacaagcgcaccagctctgctgtctggaa

SEQ ID NO: 417033 - DNA, 120 bp, Artificial Sequence
  ENSG00000149503_23 (sequence is synthesized)
ctcaccgcccctgcagggcgccagggtccccagcagcctggcctacagcctgaagaagcactgaggctggcctgcggccttcttggcagcctcgcctcctgtccatgtctatctgtctgt

SEQ ID NO: 417034 - DNA, 120 bp, Artificial Sequence
  ENSG00000149503_24 (sequence is synthesized)
ctgtcggtctctgtcttggtctgttgccctccttcttggcatgccattgtggagggcttggccaggtgtatataaacgtcctctgtgctgggtgtttctgctgcaggtggcaggtggccc

SEQ ID NO: 417035 - DNA, 120 bp, Artificial Sequence
  ENSG00000149503_25 (sequence is synthesized)
caggcctgtttggaggatgggctgggtgggtgggtggggaagaaatgggcccagccccacatggcctgcagacagtgctctgtaaatagttgttttaatttagctgaatgttagcatttt

SEQ ID NO: 417036 - DNA, 120 bp, Artificial Sequence
  ENSG00000149503_26 (sequence is synthesized)
agtctttggcattttagcgtttgggaggtagattaataaagtatattccttcaagcctgctgttgataccatgaagactgggcgcctcagtcccagccctgtagctgtgtgtcttgggcc

SEQ ID NO: 417037 - DNA, 120 bp, Artificial Sequence
  ENSG00000149503_27 (sequence is synthesized)
accagtggcctgcaggacgaaggtactgttccatcacctgcggtgtgcctcaggatcaccaggtgcaggcccccaccctcggagatgctgctgcagtgagtggttccactgcctggataa

SEQ ID NO: 417038 - DNA, 120 bp, Artificial Sequence
  ENSG00000149503_28 (sequence is synthesized)
cccttgaggaacacgtcagttactgtcacgatggggcaggtggagctccttcctattttttggggtgctccctgtttgtaaaggggagtttgttcattgggaaagacctgggtcttgaca

SEQ ID NO: 417039 - DNA, 120 bp, Artificial Sequence
  ENSG00000149503_29 (sequence is synthesized)
cggccctgccacttagtcccctaccctctccattccccaggctccacccgtgctgctcaggtgcaaatggacttgagagcatctatgtgctggtgaagcatgaggtctgagtagaaaagg

SEQ ID NO: 417040 - DNA, 120 bp, Artificial Sequence
  ENSG00000149503_30 (sequence is synthesized)
gcaaaaccaggcagctgctaattaaatgcttagaaccaatgaaagctggctgtggtcctgcctgtgagctgcctactgctgccttctgaatgcatatatctgctactgtagccccgggtt

SEQ ID NO: 417041 - DNA, 120 bp, Artificial Sequence
  ENSG00000149503_31 (sequence is synthesized)
gtcaaactatggcctgtgggccaaatccagccacagtcggttctttaaagttttatcgaaacacaagcaatggaaatgcccatttccattgttgtctccagttgctctgctccgagggca

SEQ ID NO: 417042 - DNA, 120 bp, Artificial Sequence
  ENSG00000149503_32 (sequence is synthesized)
gtgttaagttgtgcagcagaggcccctccatgcaaagctgaatatgtttactatttgaactttttcagaagttctgcttaaggacaaaataaagcctaaatccaagaacacttttaaaaa

SEQ ID NO: 417043 - DNA, 120 bp, Artificial Sequence
  ENSG00000149503_33 (sequence is synthesized)
gaatgttgaggtgccccagaaagttgggtgagttcagttccagggcttcggaggtaggcagggcataccaggacagggagccaaggtgagcaccagggctggaagcaattcctgggctga

SEQ ID NO: 417044 - DNA, 120 bp, Artificial Sequence
  ENSG00000149503_34 (sequence is synthesized)
ttcgtcgtaagtaaagccttttcctgtcggtaacctcgccccacctagcactcacccgctgtagccccttccctgcgtagctgacagcacctgtagatgcactaacattgtaagcgggag

SEQ ID NO: 417045 - DNA, 120 bp, Artificial Sequence
  ENSG00000149503_35 (sequence is synthesized)
gggagccttaggaagagagtgggacggtgaggggtgcactggctggaggcgcccagcagttctgggccccagcgtccttctctgccctccctgcccttgactctgctcttaggaggaagc

SEQ ID NO: 417046 - DNA, 120 bp, Artificial Sequence
  ENSG00000149506_0 (sequence is synthesized)
atggcaggaggctcagccacgacctggggttaccctgtggccctgctactgctggttgccaccctggggctgggtaggtggctccagcccgaccctggcctcccaggcctccggcacagc

SEQ ID NO: 417047 - DNA, 120 bp, Artificial Sequence
  ENSG00000149506_1 (sequence is synthesized)
tacgactgtgggatcaagggaatgcagctgctggtgttccccaggccaggccagactctccgcttcaaggtggtggatgaatttgggaaccgatttgatgtcaacaactgctccatctgc

SEQ ID NO: 417048 - DNA, 120 bp, Artificial Sequence
  ENSG00000149506_2 (sequence is synthesized)
taccactgggtcacctccaggccgcaggagcctgcagtcttctcggccgattacagaggctgccacgtgctggagaaggatgggcgtttccacctgagggtgttcatggaggctgtgctg

SEQ ID NO: 417049 - DNA, 120 bp, Artificial Sequence
  ENSG00000149506_3 (sequence is synthesized)
cccaatggtcgtgtggatgtggcacaagacgctactctgatctgtcccaaacctgacccctcccggactctggactcccagctggcaccacccgccatgttctctgtctcaaccccacaa

SEQ ID NO: 417050 - DNA, 120 bp, Artificial Sequence
  ENSG00000149506_4 (sequence is synthesized)
accctttccttcctccccacctctggccatacctcccaaggctctggccatgcctttcccagcccactggacccagggcacagctctgtccacccaacccctgctttaccatcccctgga

SEQ ID NO: 417051 - DNA, 120 bp, Artificial Sequence
  ENSG00000149506_5 (sequence is synthesized)
cctggacctaccctcgccaccctggctcaaccccactggggcaccttggaacactgggatgtgaacaaacgagattacataggtacccacctgagccaggagcagtgccaggtggcctca

SEQ ID NO: 417052 - DNA, 120 bp, Artificial Sequence
  ENSG00000149506_6 (sequence is synthesized)
gggcacctcccctgcatcgtgagaagaacttcaaaagaagcctgtcagcaggctggctgctgctatgacaacaccagagaggttccctgttactatggcaacacagctactgtccagtgc

SEQ ID NO: 417053 - DNA, 120 bp, Artificial Sequence
  ENSG00000149506_7 (sequence is synthesized)
ttcagagatggctacttcgtcctcgtggtgtcccaagaaatggccttgacacacaggatcacactggccaacatccacctggcctatgcccccaccagctgctccccaacacagcacacg

SEQ ID NO: 417054 - DNA, 120 bp, Artificial Sequence
  ENSG00000149506_8 (sequence is synthesized)
actgtggaaccacaatgcaggtggctggcgaccagctcatctatgagaactggctggtgtctggcatccacatccaaaaggggccacagggttccatcacgcgggacagcaccttccagc

SEQ ID NO: 417055 - DNA, 120 bp, Artificial Sequence
  ENSG00000149506_9 (sequence is synthesized)
ttcatgtgcgctgtgtcttcaacgccagtgacttcctgcccattcaggcatccattttcccacccccatcgcctgctcctatgacccagcccggccccctgcggcttgagctgcggattg

SEQ ID NO: 417056 - DNA, 120 bp, Artificial Sequence
  ENSG00000149506_10 (sequence is synthesized)
ccaaagacgagaccttcagctcgtactatggggaggatgactatcccatcgtgaggctgctccgagaaccagtccatgtggaggtccggcttctgcagaggacagaccccaacctggtcc

SEQ ID NO: 417057 - DNA, 120 bp, Artificial Sequence
  ENSG00000149506_11 (sequence is synthesized)
tgctgctgcaccagtgctggggcgctcccagtgccaaccccttccagcagccccagtggcccatcctgtcagacggatgccctttcaagggcgacagctacagaacccaaatggtagcct

SEQ ID NO: 417058 - DNA, 120 bp, Artificial Sequence
  ENSG00000149506_12 (sequence is synthesized)
tggacggggccacacctttccagtcgcactaccagcgattcactgttgctaccttcgccctcctggactcaggctcccagagagccctcagaggactggtttacttgttctgcagcacct

SEQ ID NO: 417059 - DNA, 120 bp, Artificial Sequence
  ENSG00000149506_13 (sequence is synthesized)
ctgcctgccacacctcagggctggagacttgctccactgcatgtagcactggcactacaagacagcgacgatcctcaggtcaccgtaatgacactgccaggccccaggacatcgtgagct

SEQ ID NO: 417060 - DNA, 120 bp, Artificial Sequence
  ENSG00000149506_14 (sequence is synthesized)
ctccggggccagtgggctttgaggattcttatgggcaggagcccacacttgggcccacagactccaatgggaactccagcctgagacctctcctttgggcggtccttttgctgccagctg

SEQ ID NO: 417061 - DNA, 120 bp, Artificial Sequence
  ENSG00000149506_15 (sequence is synthesized)
ttgccctggtccttgggtttggtgtctttgtgggcctgagccagacctgggcccagaagctctgggaaagcaacagacagtgaatgggcccaataaacaatcatttcaaacctactgaaa

SEQ ID NO: 417062 - DNA, 120 bp, Artificial Sequence
  ENSG00000149506_16 (sequence is synthesized)
accgatttgatgtcaacaactgctccatctgctaccactgggtcacctccaggccgcaggagcctgcagtcttctcggccgattacagaggctgccacgtgctggagaaggtacccacct

SEQ ID NO: 417063 - DNA, 120 bp, Artificial Sequence
  ENSG00000149506_17 (sequence is synthesized)
ggattctgaagcggaaggagagctgtctcctccagctggtggaaactgcttcctatcctcctcctggagagcccaactcccagagcagatggcagaggagacctttagatggggcggtca

SEQ ID NO: 417064 - DNA, 120 bp, Artificial Sequence
  ENSG00000149506_18 (sequence is synthesized)
catgtcccagctggccttataacaactgtcccagggaactattaatagatctaccttacacacatctggactttcagatctgaaacgccctggtttggatgacagattatatggtgaacc

SEQ ID NO: 417065 - DNA, 120 bp, Artificial Sequence
  ENSG00000149506_19 (sequence is synthesized)
tacttttagagtgtagttcaactcatttgtcacatggatgagaaaatcagtccataaagggtttgctggggccaacaccagcctaagtggagagtaagcgtccattctcctagaccggca

SEQ ID NO: 417066 - DNA, 120 bp, Artificial Sequence
  ENSG00000149507_0 (sequence is synthesized)
cttgtttcctgagttgtcctgtgctggaggtctgctcagacgaaggtctccatggcgttagaagtcttgatgctcctcgctgtcttgatttggaccggtgctgagaacctccatgtgaaa

SEQ ID NO: 417067 - DNA, 120 bp, Artificial Sequence
  ENSG00000149507_1 (sequence is synthesized)
ataagttgctctctggactggttgatggtctcagttatcccagttgcagaaagcagaaatctgtatatatttgcggatgaattacatctgggaatgggctgccctgcaaatcggatacat

SEQ ID NO: 417068 - DNA, 120 bp, Artificial Sequence
  ENSG00000149507_2 (sequence is synthesized)
acatatgtatatgagtttatatatcttgttcgtgattgtggcatcaggacaagggtagtttctgaggaaactctcctttttcaaaccgagctgtactttaccccaaggaatatagatcat

SEQ ID NO: 417069 - DNA, 120 bp, Artificial Sequence
  ENSG00000149507_3 (sequence is synthesized)
gaccctcaggaaatccatttggagtgttccacctctaggaaatcagtgtggcttacaccagtttctactgagaatgaaataaaattggatcctagtccttttattgctgactttcagaca

SEQ ID NO: 417070 - DNA, 120 bp, Artificial Sequence
  ENSG00000149507_4 (sequence is synthesized)
acagcagaagagttaggattattatcttctagtccaaacttgctctgagctaaaggagaaatggaaacttgaagctggtgttatgtattttgcaggaaaacagtttcattttttcatagc

SEQ ID NO: 417071 - DNA, 120 bp, Artificial Sequence
  ENSG00000149507_5 (sequence is synthesized)
aaaaatatagttggtgtatatctctccttaagtctctggtttctaaaaaccctacttcagtaaaggtcctgattagttgattagtgaatgtgtatttctaaatatttgtattcagtaggg

SEQ ID NO: 417072 - DNA, 120 bp, Artificial Sequence
  ENSG00000149507_6 (sequence is synthesized)
ttctgttctgtgtagaagattcagaaatatgtcttcaaagacaatgacttgatctaattgataagaacctccaataaatatgttctaatatttttcaggaagaataaagaatagagagag

SEQ ID NO: 417073 - DNA, 120 bp, Artificial Sequence
  ENSG00000149507_7 (sequence is synthesized)
acatataaatgtgcaagaggcaaaactttgagcatagtgtaaaatttaacatattaactctcacgaaaggcaaaatccttttatgtgcagatactttaattcatgtagattttcctatta

SEQ ID NO: 417074 - DNA, 120 bp, Artificial Sequence
  ENSG00000149507_8 (sequence is synthesized)
atcagtaaagttgaatcctaacaataatgccatgtgacaacctatttagattattccagaattaaattcaatttattttctagagctcaagtaaccactaccttaactgaaatttgatgt

SEQ ID NO: 417075 - DNA, 120 bp, Artificial Sequence
  ENSG00000149507_9 (sequence is synthesized)
taggtttcccttgttcctccgaatggttcttccacactcaaaataattgaatggttgagttggttaagcaaagagttatcctgccacctaagagcattcattaaatgattatttattacc

SEQ ID NO: 417076 - DNA, 120 bp, Artificial Sequence
  ENSG00000149507_10 (sequence is synthesized)
acctactttatactatcttcctttctttaaacatggagtctaaatatgtaatatatcaaaaaatacttctgatttggtagatttcttatatcaagggtgagaattgaactgtgccattgg

SEQ ID NO: 417077 - DNA, 120 bp, Artificial Sequence
  ENSG00000149507_11 (sequence is synthesized)
ctattcaatagcttattgaatgtatgttttggatgccacatcctcctggaagcaaattttgccaagatactgtttattattatttttaattaaagtgatactattccattttcaattaaa

SEQ ID NO: 417078 - DNA, 120 bp, Artificial Sequence
  ENSG00000149507_12 (sequence is synthesized)
tgctcaaatcctgtaccaagagtccacgaggatctagaaggcatagtatgctggctctatgccatactcctgaatgactattctgtatatgatcatgatattaaacagtggtaaaactga

SEQ ID NO: 417079 - DNA, 120 bp, Artificial Sequence
  ENSG00000149507_13 (sequence is synthesized)
atatcttgttcgtgattgtggcatcaggacaagggtaagaacagtgattgtttgtaaaaaatactgcatgttttgtcagacttttatgcctagtattaaaattgtcttttaaaaaaataa

SEQ ID NO: 417080 - DNA, 120 bp, Artificial Sequence
  ENSG00000149516_0 (sequence is synthesized)
cttttctgagtgtctcctacttgcgacaaggtggacttgggaggaaagccgtctgccaaagcctgaagcctccaagccataaacaaccccaatggcctcccacgaagttgataatgcaga

SEQ ID NO: 417081 - DNA, 120 bp, Artificial Sequence
  ENSG00000149516_1 (sequence is synthesized)
gctggggtcagcctctgcccatggtaccccaggcagtgaggcgggaccagaagagctgaatacttctgtctaccagcccatagatggatcaccagattatcagaaagcaaaattacaagt

SEQ ID NO: 417082 - DNA, 120 bp, Artificial Sequence
  ENSG00000149516_2 (sequence is synthesized)
tcttggggccatccagatcctgaatgcagcaatgattctggctttgggtgtctttctgggttccttgcaatacccataccacttccaaaagcacttctttttcttcaccttctacacagg

SEQ ID NO: 417083 - DNA, 120 bp, Artificial Sequence
  ENSG00000149516_3 (sequence is synthesized)
ctacccgatttggggtgctgtgtttttctgtagttcaggaaccttgtctgttgtagcagggataaaacccacaagaacatggatacagaacagttttggaatgaacattgccagtgctac

SEQ ID NO: 417084 - DNA, 120 bp, Artificial Sequence
  ENSG00000149516_4 (sequence is synthesized)
aattgcactagtggggactgcttttctctcactaaatatagcagttaatatccagtcattaaggagttgtcactcttcatcagagtcaccggacctatgcaattacatgggctccatatc

SEQ ID NO: 417085 - DNA, 120 bp, Artificial Sequence
  ENSG00000149516_5 (sequence is synthesized)
aaatggcatggtgtctctactgctgattctcaccttgctggaattatgcgtaaccatctctaccatagccatgtggtgcaatgcaaactgctgtaattcaagagaggaaatttcctcacc

SEQ ID NO: 417086 - DNA, 120 bp, Artificial Sequence
  ENSG00000149516_6 (sequence is synthesized)
ttaaatctccagtgactcagagcttcacccacaaactcaggagaacataagcctgctcgtaaagctcaatccttctatcatggcaccaatcacaagaaccttggacgtttgactgactct

SEQ ID NO: 417087 - DNA, 120 bp, Artificial Sequence
  ENSG00000149516_7 (sequence is synthesized)
atcctttctctcctaactataaatcctatttgtgtgtcgtgggtatggaaggacagatatatttctttaggcattcttggatatctgtaacttctatgatcattactccaaagttgtttc

SEQ ID NO: 417088 - DNA, 120 bp, Artificial Sequence
  ENSG00000149516_8 (sequence is synthesized)
cagaaattggttctatttcttcttatccacctactccattgctttatgaggtttaaggaaggaaggcggtataatccctattcaatatattttttctaaaatccaacttctgaccgccca

SEQ ID NO: 417089 - DNA, 120 bp, Artificial Sequence
  ENSG00000149516_9 (sequence is synthesized)
gtaggaagaaaaatgagacattttttccattacagagaaatgcttcttgactttaacatcagcattataaaaagtgtcaaataaaaaattaccatcattatcattaaaataaattttcac

SEQ ID NO: 417090 - DNA, 120 bp, Artificial Sequence
  ENSG00000149516_10 (sequence is synthesized)
tgtatttgagatgggagggttaaggctcagggattttatttcagtgaactgctggaactcacacatgccctgatatgtaaatgatgatttatgttggcgagtctgagagcaagcccaaat

SEQ ID NO: 417091 - DNA, 120 bp, Artificial Sequence
  ENSG00000149516_11 (sequence is synthesized)
gtgttcttcaaaggacaatgggaaactgtaaagtagagaactaaagaataaggcctttagaatctgacacatctgggttcaaattctgaaactgtcacttattacctgtatgaacatggg

SEQ ID NO: 417092 - DNA, 120 bp, Artificial Sequence
  ENSG00000149516_12 (sequence is synthesized)
caaattatctaatctctctgatctatttttcctcatctgtaaaataggtgtaataataacaactactttgtcggttgctctgagggttaaatgaaaataaaaagaaaatgtgaaacagca

SEQ ID NO: 417093 - DNA, 120 bp, Artificial Sequence
  ENSG00000149516_13 (sequence is synthesized)
ctctaaagtgttgcataaggcaaagataacgttaagtctgtggaggcttccgttatcgggaaaagatgctgtagtgatcttttctgagtgtctcctacttgcgacaaggtggacttggga

SEQ ID NO: 417094 - DNA, 120 bp, Artificial Sequence
  ENSG00000149516_14 (sequence is synthesized)
ccaaggcctactacaatgacccgatgatgtctactactccaaggcaagacagaattgaatattgtacaaactctgttactctgccctggtgtcccatttgtggagagtcattgtaatgta

SEQ ID NO: 417095 - DNA, 120 bp, Artificial Sequence
  ENSG00000149527_0 (sequence is synthesized)
gtcctttgctcccccagccttgggaggcggctgcgtcagggattccttggtggccctggagggtggataggctggcctgggggccatcaggacagcaggtgacggtcaggccaatgccag

SEQ ID NO: 417096 - DNA, 120 bp, Artificial Sequence
  ENSG00000149527_1 (sequence is synthesized)
ccgggcctgggcacagccctgtgggggcttcggagggccctgaggaggaggaggaagaggcagaggagagaaggccccacggaggtcctgtcgccagcgctgccactgcctgacctccgc

SEQ ID NO: 417097 - DNA, 120 bp, Artificial Sequence
  ENSG00000149527_2 (sequence is synthesized)
tgcccgaaggccggtgggcctctgtggcctccgtgaagcaggcccggctgtcgtcaggccatgtctggtccatggccctcccccgacagccggaccaagggaacggtggcctggctggcg

SEQ ID NO: 417098 - DNA, 120 bp, Artificial Sequence
  ENSG00000149527_3 (sequence is synthesized)
gaggtactcctctgggttggagggagtgtggtgctgtcttcagagtggcagctcggccccctggtggagcggtgcatgggtgccatgcaagaggggatgcagatggtgaagctgcgtggc

SEQ ID NO: 417099 - DNA, 120 bp, Artificial Sequence
  ENSG00000149527_4 (sequence is synthesized)
ggctccaagggcctggtccgcttctactacctggacgagcaccgctcctgcatccgctggaggccctcacgcaagaacgagaaggccaagatctccatcgactccatccaggaggtgagt

SEQ ID NO: 417100 - DNA, 120 bp, Artificial Sequence
  ENSG00000149527_5 (sequence is synthesized)
gaggggcggcagtcggaggtcttccagcgctaccctgacggcagcttcgaccccaactgctgcttcagcatctaccacggcagccaccgcgagtcgctggacctggtctccaccagcagc

SEQ ID NO: 417101 - DNA, 120 bp, Artificial Sequence
  ENSG00000149527_6 (sequence is synthesized)
gaggtggcgcgcacctgggtcactggcctgcgctacctcatggccggcatcagcgacgaggacagcctggctcgccgccagcgcaccagggaccagtggctgaagcagacgtttgacgag

SEQ ID NO: 417102 - DNA, 120 bp, Artificial Sequence
  ENSG00000149527_7 (sequence is synthesized)
gccgacaagaacggggatggcagcctgagcattggcgaggtcctgcagctgctgcacaagctcaacgtgaacctgccccggcagagggtgaagcagatgttcagggaagcggacacggat

SEQ ID NO: 417103 - DNA, 120 bp, Artificial Sequence
  ENSG00000149527_8 (sequence is synthesized)
gaccaccaagggacgctgggttttgaagagttctgtgccttctacaagatgatgtccacccgccgggacctctacctgctcatgctgacctacagcaaccacaaggaccacctggatgcc

SEQ ID NO: 417104 - DNA, 120 bp, Artificial Sequence
  ENSG00000149527_9 (sequence is synthesized)
gccagcctgcagcgcttcctgcaggtggagcagaagatggcgggtgtgaccctcgagagctgccaggacatcatcgagcagtttgagccatgcccagaaaacaagagtaaggggctgctg

SEQ ID NO: 417105 - DNA, 120 bp, Artificial Sequence
  ENSG00000149527_10 (sequence is synthesized)
ggcattgatggcttcaccaactacaccaggagccctgctggtgacatcttcaaccctgagcaccaccatgtgcaccaggacatgacgcagccgctgagccactacttcatcacctcgtcc

SEQ ID NO: 417106 - DNA, 120 bp, Artificial Sequence
  ENSG00000149527_11 (sequence is synthesized)
cacaacacctacctcgtgggtgaccagctcatgtcccagtcacgggtggacatgtatgcttgggtcctgcaggctggctgccgctgcgtggaggtggactgctgggatgggcccgacggg

SEQ ID NO: 417107 - DNA, 120 bp, Artificial Sequence
  ENSG00000149527_12 (sequence is synthesized)
gagcccattgtgcaccatggctacactctgacttccaagatcctcttcaaagacgtcattgaaaccatcaacaaatatgccttcatcaagaatgagtacccagtgatcctgtccatcgaa

SEQ ID NO: 417108 - DNA, 120 bp, Artificial Sequence
  ENSG00000149527_13 (sequence is synthesized)
aaccactgcagtgtcatccagcagaagaaaatggcccagtatctgactgacatccttggggacaagctggacctgtcatcagtgagcagtgaagatgccaccacactcccctctccacag

SEQ ID NO: 417109 - DNA, 120 bp, Artificial Sequence
  ENSG00000149527_14 (sequence is synthesized)
atgctcaagggcaagatcctcgtgaaggggaagaagctcccagccaacatcagcgaggatgcggaggaaggcgaggtgtctgatgaggacagtgctgatgagattgacgatgactgcaag

SEQ ID NO: 417110 - DNA, 120 bp, Artificial Sequence
  ENSG00000149527_15 (sequence is synthesized)
ctcctcaatggggatgcatccaccaatcgaaagcgtgtagaaaacactgctaagaggaaactggattccctcatcaaagagtcgaagattcgggactgtgaggaccccaacaacttctcc

SEQ ID NO: 417111 - DNA, 120 bp, Artificial Sequence
  ENSG00000149527_16 (sequence is synthesized)
gtctccacactgtccccatctggaaagctcggacgcaagagcaaggctgaagaggacgtggagtctggggaggatgccggggccagcagacgcaatggccgcctcgtcgtgggaagcttc

SEQ ID NO: 417112 - DNA, 120 bp, Artificial Sequence
  ENSG00000149527_17 (sequence is synthesized)
tccaggcgcaagaagaagggcagcaagctgaagaaggcggccagcgtggaggagggagatgagggtcaggactccccgggaggccagagccgaggggcgacccggcagaagaagaccatg

SEQ ID NO: 417113 - DNA, 120 bp, Artificial Sequence
  ENSG00000149527_18 (sequence is synthesized)
aagctgtcccgggccctctctgacctggtgaagtacaccaagtccgtggccacccacgacatagagatggaggcggcgtccagctggcaggtgtcgtccttcagcgagaccaaggcccac

SEQ ID NO: 417114 - DNA, 120 bp, Artificial Sequence
  ENSG00000149527_19 (sequence is synthesized)
cagattctgcagcagaagccggcgcagtacctacgcttcaaccagcagcagctctcccgcatctacccctcctcctaccgtgtggactccagcaactacaacccgcagcccttctggaac

SEQ ID NO: 417115 - DNA, 120 bp, Artificial Sequence
  ENSG00000149527_20 (sequence is synthesized)
tcagcgccaacggtggctgcggctacgtactcaagcctgggtgcatgtgccagggcgtgttcaaccccaactcggaggaccccctgcccgggcagctcaagaagcagctggtgctccgga

SEQ ID NO: 417116 - DNA, 120 bp, Artificial Sequence
  ENSG00000149527_21 (sequence is synthesized)
tcatcagtggccagcagcttcccaagccgcgcgactccatgctgggggaccgtggggagatcatcgacccctttgtggaggtggagatcattgggctccctgtggactgcagcagggagc

SEQ ID NO: 417117 - DNA, 120 bp, Artificial Sequence
  ENSG00000149527_22 (sequence is synthesized)
agacccgcgtggtggacgacaacgggttcaaccccacctgggaggagaccctggttttcatggtgcacatgccggagatcgcgctggtccgcttcctcgtctgggaccacgatcccatcg

SEQ ID NO: 417118 - DNA, 120 bp, Artificial Sequence
  ENSG00000149527_23 (sequence is synthesized)
ggcgtgacttcattggccagaggacgctggccttcagcagcatgatgccaggctacagacacgtgtacctagaagggatggaagaggcctccatcttcgtgcatgtggctgtcagtgaca

SEQ ID NO: 417119 - DNA, 120 bp, Artificial Sequence
  ENSG00000149527_24 (sequence is synthesized)
tcagcggtaaggtcaagcaggctctgggcctaaaaggcctcttcctccgaggcccaaagcccggctcgctggacagtcatgctgctgggcggcccccggcccggccctccgttagccagc

SEQ ID NO: 417120 - DNA, 120 bp, Artificial Sequence
  ENSG00000149527_25 (sequence is synthesized)
ggatcctgcggcgcacggccagcgccccgaccaagagccagaagccgggccgcaggggcttcccggagctggtcctgggtacacgggacacaggctccaagggggtggcagacgatgtgg

SEQ ID NO: 417121 - DNA, 120 bp, Artificial Sequence
  ENSG00000149527_26 (sequence is synthesized)
gggcccggacctgctccggaagccccagcccaggaggggcccggcagcggcagcccccgagacacccgccccctctccacgcagcggccactccccccactgtgcagcctggaaaccatc

SEQ ID NO: 417122 - DNA, 120 bp, Artificial Sequence
  ENSG00000149527_27 (sequence is synthesized)
aaaccatcgctgaggagcccgccccaggccctggtcccccgccaccagcggctgtccccaccagctcttctcagggacggcccccataccccacaggacccggagccaatgtggcaagcc

SEQ ID NO: 417123 - DNA, 120 bp, Artificial Sequence
  ENSG00000149527_28 (sequence is synthesized)
ccctagaggacactgaggagccccgagacagcaggcctcggccgtgcaacggcgagggcgccggcggggcatacgagagggcccccggcagccagacggacggcaggagccagccccgga

SEQ ID NO: 417124 - DNA, 120 bp, Artificial Sequence
  ENSG00000149527_29 (sequence is synthesized)
ccctgggccacctgcccgtgattagaagggtgaagagtgaggggcaggtgcccacggagcccctgggagggtggcggcccctggccgctccctttccagctcctgccgtgtactccgatg

SEQ ID NO: 417125 - DNA, 120 bp, Artificial Sequence
  ENSG00000149527_30 (sequence is synthesized)
ccacgggcagtgacccgctgtggcagcggctggagccatgtggccaccgagacagcgtttcctcctcctccagcatgtcatccagcgacactgtcattgacctctccctgcccagcctgg

SEQ ID NO: 417126 - DNA, 120 bp, Artificial Sequence
  ENSG00000149527_31 (sequence is synthesized)
gcctgggccgcagccgtgagaacctcgctggagcccacatgggacgcctgccccccaggccccactcggcttcggctgcccgcccagacctgccacctgtgaccaagagcaaatccaacc

SEQ ID NO: 417127 - DNA, 120 bp, Artificial Sequence
  ENSG00000149527_32 (sequence is synthesized)
ccaaccttcgggctacaggccagcggcctcccatacctgacgaactgcagcccaggtccctggccccaaggatggctggcctccccttccggcctccctggggctgcctttccctggtgg

SEQ ID NO: 417128 - DNA, 120 bp, Artificial Sequence
  ENSG00000149527_33 (sequence is synthesized)
gcgtgcaggactgccccgtggctgccaagtccaagagcctgggcgacctcactgctgatgactttgcccctagctttgagggcggctcccgcagactgagccacagcctgggcctcccgg

SEQ ID NO: 417129 - DNA, 120 bp, Artificial Sequence
  ENSG00000149527_34 (sequence is synthesized)
gagggacacggcgggtgtcggggccaggggtgagacgggacaccctgacagagcagctgcgctggctcactgtcttccagcaggcaggagacatcacgtcacccaccagcctgggcccgg

SEQ ID NO: 417130 - DNA, 120 bp, Artificial Sequence
  ENSG00000149527_35 (sequence is synthesized)
ctggggagggggtggcagggggccctggttttgtgcggcgctcctcctcccgcagccacagccgcgtgcgtgccattgccagccgggcccgccaggcccaggagcggcagcagagactgc

SEQ ID NO: 417131 - DNA, 120 bp, Artificial Sequence
  ENSG00000149527_36 (sequence is synthesized)
agggcctgggccggcagggacccccagaagaggagcggggcacccccgagggcgcctgctccgtgggccacgagggcagtgtggatgcaccagcaccctccaagggagccctcgggccag

SEQ ID NO: 417132 - DNA, 120 bp, Artificial Sequence
  ENSG00000149527_37 (sequence is synthesized)
catccgcggctgctgaaaacctggtcctgctccgcctctgaccgtcagtggtgggaacctgggcggctctggaggcccagggcaggggtgggcgtgttgtttgctcaggaaacagggcag

SEQ ID NO: 417133 - DNA, 120 bp, Artificial Sequence
  ENSG00000149527_38 (sequence is synthesized)
ccaggcccccaaaactgtgtccccctggctgccctgtgtcccctccacccctgcctccctcctgcccctgctcccggggaggaaaggctaaagctgctggcccggggcccacaggagggg

SEQ ID NO: 417134 - DNA, 120 bp, Artificial Sequence
  ENSG00000149527_39 (sequence is synthesized)
cttcgaggctggccctgccaggcagttttcccggcgttttaggatctgtacatagagaaatatttaaatttttagaagcaaaacttatacaacattaaaatgataccaagtccctttcca

SEQ ID NO: 417135 - DNA, 120 bp, Artificial Sequence
  ENSG00000149527_40 (sequence is synthesized)
ggggctgcgatcggcatgggctctgcgcgcggggtgcccctgctcgggctggggctcaggggacgccgggggccagcacagggcccggtgtccctcgggccgtgccggtaactgggattg

SEQ ID NO: 417136 - DNA, 120 bp, Artificial Sequence
  ENSG00000149527_41 (sequence is synthesized)
cctcgggccgtgccggtaactgggattggcacccgccggccatggaagagcctgggcccccaggtgggctcagccaagaccaagtggagcggtgcatgggtgccatgcaagaggggatgc

SEQ ID NO: 417137 - DNA, 120 bp, Artificial Sequence
  ENSG00000149527_42 (sequence is synthesized)
gctgcggtggcagagaagagccctgtgcgagtgcggcccccgcgtgtcctggacggccccgggcctgctgggatggccgccacatgcatgaagtgtgtggtgggatcctgcgccggcgtg

SEQ ID NO: 417138 - DNA, 120 bp, Artificial Sequence
  ENSG00000149527_43 (sequence is synthesized)
cgtgaacaccgggggcctgcagagggagcggccacccagcccggggcctgcaagcaggcaggcagccattcgccagcagccccgggcccgggctgactcactgggggccccctgctgtgg

SEQ ID NO: 417139 - DNA, 120 bp, Artificial Sequence
  ENSG00000149527_44 (sequence is synthesized)
gaccctcacgctatcccggggagaagcagagaggcccccaagggtcctggggcctggaggcagggtccaggcggtagcggctccatgtcctcggactccagcagcccagacagcccgggc

SEQ ID NO: 417140 - DNA, 120 bp, Artificial Sequence
  ENSG00000149527_45 (sequence is synthesized)
atccccgaaaggtccccccgctggcctgagggtgcctgcaggcaaccgggggccctgcagggagagatgagtgccttgtttgctcaaaagctggaggagatcaggagtaaatcccccatg

SEQ ID NO: 417141 - DNA, 120 bp, Artificial Sequence
  ENSG00000149527_46 (sequence is synthesized)
ttctccgccgttaggaactgagagcggcgagtgacaggtaacggggcccagccccggtgtcccgtgctgtcccagcccaaggagggccccgtgtgcggcacagggcgtggactgggcccc

SEQ ID NO: 417142 - DNA, 120 bp, Artificial Sequence
  ENSG00000149527_47 (sequence is synthesized)
agcagcagcagggtggggacaccgagtgtgccgcgcccgggggatgcctcggggtgggagctgggcctggcgaccctcggcacagggcaccggggacaccaccctgatccgactcctctc

SEQ ID NO: 417143 - DNA, 120 bp, Artificial Sequence
  ENSG00000149527_48 (sequence is synthesized)
cgcctctctccctgcctccctctctctcttctgcttctccctctggctctctctcactcccccacctccccacagacacccgccccctctccacgcagcggccactccccccactgtgca

SEQ ID NO: 417144 - DNA, 120 bp, Artificial Sequence
  ENSG00000149527_49 (sequence is synthesized)
ggtgggggccagccccacacaggcgggaggggtgggagttgggggcgggccgggcatcgcgatgggccctgatgccacccccactcctgtgtcccagatcatcgacccctttgtggaggt

SEQ ID NO: 417145 - DNA, 120 bp, Artificial Sequence
  ENSG00000149527_50 (sequence is synthesized)
gtgggggaaccctccttgctagcgttgcaaagaagggcccagctccgtcaggaatccagggatggagaactggggagcctgggccccacatgagattcatggcaggacttgtctgagggg

SEQ ID NO: 417146 - DNA, 120 bp, Artificial Sequence
  ENSG00000149527_51 (sequence is synthesized)
ccccagtgccagcgacccagccccctgtgcctggcccctctgtgggtctcaggacctgggtctgggctgggtgtttggaggaacctcctcccggctctcagacacctctgttttgtctgc

SEQ ID NO: 417147 - DNA, 120 bp, Artificial Sequence
  ENSG00000149527_52 (sequence is synthesized)
tgtggatgacttccagcttggtccccctgtggccctggcaggagtatcaccatgggagagggcaggacaggggctgggcgagcaggcctcccactagaccaggctactcctgctgtggac

SEQ ID NO: 417148 - DNA, 120 bp, Artificial Sequence
  ENSG00000149527_53 (sequence is synthesized)
cagctacttccacctctgcccttggcttgccctcctcagagttctcagcctgagtgggccctggggacactgtcaccagagaccccacccctcatacccccagggacccagacccacccc

SEQ ID NO: 417149 - DNA, 120 bp, Artificial Sequence
  ENSG00000149527_54 (sequence is synthesized)
cagaagccatgtgacctcctcggctcagctgtgggaggcatgggctctgtcccacatgctgcggtagccacaaaggtgatccatactgggccaggtgcaccccgaggtgcccccctggac

SEQ ID NO: 417150 - DNA, 120 bp, Artificial Sequence
  ENSG00000149527_55 (sequence is synthesized)
cactgcctccctccctccccctggcaccggctccagtctcctatgtgggggctggggagggggctgttggcagccatgccccagcaagcagggggcttgctgagggctgggccactgacc

SEQ ID NO: 417151 - DNA, 120 bp, Artificial Sequence
  ENSG00000149527_56 (sequence is synthesized)
agccatcatggggaggggccacaccagccccttgtcccatgcccccccatgtgtccccagtgctgggtcctgaactcaggcagtgaggcctagggtcccctccccgggcctctgctcctc

SEQ ID NO: 417152 - DNA, 120 bp, Artificial Sequence
  ENSG00000149527_57 (sequence is synthesized)
tatctcaagaggggctgctgtgggggcctggctcctgagccaccagtgcccacctctgatctcagggctggctttgggcatctcgggcaggacaggtcctgagtgctccgggccttgccc

SEQ ID NO: 417153 - DNA, 120 bp, Artificial Sequence
  ENSG00000149527_58 (sequence is synthesized)
cgccctgtgtcacccatgcctgtctcagactcttgggggccttgcagcctccacccctacagtgctgccatctggcttctcagcagggaccgagtgatgcccctctcccctctactaccc

SEQ ID NO: 417154 - DNA, 120 bp, Artificial Sequence
  ENSG00000149527_59 (sequence is synthesized)
cccacccctctacttcctggtgtcacgtggaaggcagctgcccgggtttgcctgtgactccacacccagcatgtctgtcccctgccccaggtcagggtggggcctcggcttccgcaggaa

SEQ ID NO: 417155 - DNA, 120 bp, Artificial Sequence
  ENSG00000149527_60 (sequence is synthesized)
gtggtcttggtgccagccctgctgccctggctttgagctggggcccagtgccctctgggtcctgctggctgcagctggccctcggggaacccgcacacacagcaggaggggcctgcccag

SEQ ID NO: 417156 - DNA, 120 bp, Artificial Sequence
  ENSG00000149527_61 (sequence is synthesized)
gcccagtgctgactctctcctgccatgctctcgggcccagaggtgccatccagcccctgccgtctatccacccatctgttcctcgtcccccaggctgcagggctccccacgccactgctg

SEQ ID NO: 417157 - DNA, 120 bp, Artificial Sequence
  ENSG00000149527_62 (sequence is synthesized)
tggccgcctcacctgctccccctgtctctttggtcttgcagtcggcttctctatggccacagcctacttttagaagtgcagctctgttaggagccttgaaggtacccggtgcgcgggaca

SEQ ID NO: 417158 - DNA, 120 bp, Artificial Sequence
  ENSG00000149527_63 (sequence is synthesized)
gtgcggcccgccgcccctgcatgcccaggccgcaccccattagcatccatgattcctggtagcatttggagactgtcgctcatgtgacgtggatcatgacatggctccgggggccctggc

SEQ ID NO: 417159 - DNA, 120 bp, Artificial Sequence
  ENSG00000149527_64 (sequence is synthesized)
catccccagccatagtggcatttacgaggcagatccagggttcagctgggtggccgccttctcactggcctctcctcccctcccctccctcagtcctccctcccctccctcagtcctccc

SEQ ID NO: 417160 - DNA, 120 bp, Artificial Sequence
  ENSG00000149527_65 (sequence is synthesized)
tcccctccctcagtcctccctcccctccctcagtcctccctcccctccctcagccccttccctggcgggcagcccgctggagcccccactgtgcccctcctatccccctccttctctctc

SEQ ID NO: 417161 - DNA, 120 bp, Artificial Sequence
  ENSG00000149527_66 (sequence is synthesized)
ctgcccccatctcggaccctcaggctgttggttctgagttcgcctcccactccctccctgtccttgccaaccatgccagtgcatgggatgagggcacccctgaggccggcgctccgagcc

SEQ ID NO: 417162 - DNA, 120 bp, Artificial Sequence
  ENSG00000149527_67 (sequence is synthesized)
agaatcccggatctgcttctaaatggcttcccagccactgtgaccaaatgcgtagatttgggatcttgaatcaggaagctgattcaagtgctggccatctgaacgcatctgcccagaggc

SEQ ID NO: 417163 - DNA, 120 bp, Artificial Sequence
  ENSG00000149527_68 (sequence is synthesized)
gcccctgcaggggggtgacccacctgccgggcctgggccgctctgtgcacgagcacggctcgtcatgggggcgcggtgggtgctgtctcgggggcatctggcatgtgagggcccctctgg

SEQ ID NO: 417164 - DNA, 120 bp, Artificial Sequence
  ENSG00000149527_69 (sequence is synthesized)
cctctgcgccctggagatgcggctgcctccctctcagcagctgttctgcccaggcagggacctcctgggcccagctgtccaggaagattggctgtggccaggtgctggtgggctgggagt

SEQ ID NO: 417165 - DNA, 120 bp, Artificial Sequence
  ENSG00000149527_70 (sequence is synthesized)
ctgagcccatcttggcagggctcagggggcagcaagccagctgcgggccttgggggctcacatgagtggagggcagggcaagaccagaaaaggctgcctgggggaattcaggaaggcttc

SEQ ID NO: 417166 - DNA, 120 bp, Artificial Sequence
  ENSG00000149527_71 (sequence is synthesized)
ctggaagaggtggtacttcctagggcacgagtatcaccatgggagtgggcaggacacgggccgggcaagtgggcctcccgctgcacctggctactcctgctgtggaccagctactcctgc

SEQ ID NO: 417167 - DNA, 120 bp, Artificial Sequence
  ENSG00000149527_72 (sequence is synthesized)
ctgagggtggggcacacacaaccagggagtgccacgccagtgtcccctgctagcgccgggggctgcgggcctctgagcaggtgcaggctgtggtgggccaggctggggctcgaggtctct

SEQ ID NO: 417168 - DNA, 120 bp, Artificial Sequence
  ENSG00000149527_73 (sequence is synthesized)
cctccggagggaaagaccttctctccatgcccctcaagggccccacatgccctggacaggtcaggcgagggcagtttctgccggaagggtggggtgggccatgtgtacttagatctgtag

SEQ ID NO: 417169 - DNA, 120 bp, Artificial Sequence
  ENSG00000149527_74 (sequence is synthesized)
cagctactgtcccaggcagagctgccctagggaccctgctcctgaaggccctggtgtgtccacacacccccagcctgaggtggcccagcccctcggaccgagacacgcatggcacgtctg

SEQ ID NO: 417170 - DNA, 120 bp, Artificial Sequence
  ENSG00000149527_75 (sequence is synthesized)
gtgctcgtgctcgtggctctgtatccgtggcactgtctccgtggcactctgctcccttggcttgcctgtggcccatagccccagccctcctgtctgagcttgaggccctgggacttgggt

SEQ ID NO: 417171 - DNA, 120 bp, Artificial Sequence
  ENSG00000149527_76 (sequence is synthesized)
ggagctggtttgaggcccgacaggctgggaagaaccagctgctcttgctgagggtctggggccgggactgtggcctgacatgctgggcccctccggctgggcgcttccccaaactcacct

SEQ ID NO: 417172 - DNA, 120 bp, Artificial Sequence
  ENSG00000149527_77 (sequence is synthesized)
cctgggcggctggcgacctgcatggcccctgatgcctttcctgggactgggggccacgtaccatcccattcccacctccctctagggcaggctccaggggtccctactgggaagtctgat

SEQ ID NO: 417173 - DNA, 120 bp, Artificial Sequence
  ENSG00000149527_78 (sequence is synthesized)
gtgggcaggtagtgcagctgctgggcgtctcctgcgcccctgggacgcctggagcctgctgagtgctgcgtggagtagattccctgggccccagggcttcgctgctttgggctgaagcac

SEQ ID NO: 417174 - DNA, 120 bp, Artificial Sequence
  ENSG00000149527_79 (sequence is synthesized)
cccactagaagggtgtctccttagcctggagggagggacatacacggagcccgccccacaccaccctgcccctccagacccccctgaccaagctttcctttctgcccccacccacgctgc

SEQ ID NO: 417175 - DNA, 120 bp, Artificial Sequence
  ENSG00000149527_80 (sequence is synthesized)
cacagggaacgggtagggtcccacggtttggggagagacatggcagtcctcaagggctgggatcagggcgcagccagggtttctgatggctttgctgatggtcaggacccaggcatgcca

SEQ ID NO: 417176 - DNA, 120 bp, Artificial Sequence
  ENSG00000149527_81 (sequence is synthesized)
ggcaaggcctcagcccagcagttgccaagcgtgtagccactttgggcccgtggagagagtcgcgctgcggagcccccagggggacctgaggtcacaagagcctcgatgcacctgagcgcg

SEQ ID NO: 417177 - DNA, 120 bp, Artificial Sequence
  ENSG00000149527_82 (sequence is synthesized)
gagctgggggtccctggagccgctgtccccacctgcggcgctggagccctggaggtgtccaggggcttccttggaacgtggagacgtgctggttaaacgtggagccccgggccagccggg

SEQ ID NO: 417178 - DNA, 120 bp, Artificial Sequence
  ENSG00000149527_83 (sequence is synthesized)
cactgggggctgcaggtggagggaggtggatgctctccctcgtgggggcgtgtcttttccacaggaaagggaaagggggagggacacgggtcagcagtggggggctgtgcagtctcgcag

SEQ ID NO: 417179 - DNA, 120 bp, Artificial Sequence
  ENSG00000149527_84 (sequence is synthesized)
atcttcacccttggttcttgaactctggaccctgagccctgccgagggtcccgcaaaggtgggcaaggagctcccggctgcttggtctccgcagtgttggggctgccagcagggggacgc

SEQ ID NO: 417180 - DNA, 120 bp, Artificial Sequence
  ENSG00000149527_85 (sequence is synthesized)
gccctttgctgcggcagctttctgttctccctggctccctgcacggaactgagctttggtgtgtgatgcgctgctggcccaggctacaccccgacaagggacaccgggggccccgggagc

SEQ ID NO: 417181 - DNA, 120 bp, Artificial Sequence
  ENSG00000149527_86 (sequence is synthesized)
agagagacctcagagcagcctcctcctgcctcctgtggacggccggccccagctggtgatcccagccagtcccagctttcagttgctgcccccaccgacagtcctcagtccctccatgat

SEQ ID NO: 417182 - DNA, 120 bp, Artificial Sequence
  ENSG00000149532_0 (sequence is synthesized)
gcgtgtgacgccggcggcggggggggcgggacctggggcggagagcggttcgcgcgcttcgggcctagtccggactcgccgccgccgccgccatattcccgtggcatcttccttactttg

SEQ ID NO: 417183 - DNA, 120 bp, Artificial Sequence
  ENSG00000149532_1 (sequence is synthesized)
tccatcctccggactcgcgatcttccttccggagccatgtcagaaggagtggacttgattgatatatatgctgacgaggagttcaaccaggacccagagttcaacaatacagatcagatt

SEQ ID NO: 417184 - DNA, 120 bp, Artificial Sequence
  ENSG00000149532_2 (sequence is synthesized)
gacctgtatgatgatgtgctgacagccacctcacagccctcagatgacagaagcagcagcactgaaccacctcctcctgttcgccaggagccatctcccaagcccaacaacaagacccct

SEQ ID NO: 417185 - DNA, 120 bp, Artificial Sequence
  ENSG00000149532_3 (sequence is synthesized)
gcaattctgtatacctacagtggcctgcgtaatagacgagctgccgtttatgtgggcagcttctcctggtggaccacagaccagcagctgatccaggttattcgctctataggagtctat

SEQ ID NO: 417186 - DNA, 120 bp, Artificial Sequence
  ENSG00000149532_4 (sequence is synthesized)
gatgtggtggagttgaaatttgcagagaatcgagcaaatggccagtccaaagggtatgctgaggtggtggtagcctctgaaaactctgtccacaaattgttggaactcctaccagggaaa

SEQ ID NO: 417187 - DNA, 120 bp, Artificial Sequence
  ENSG00000149532_5 (sequence is synthesized)
gttcttaatggagaaaaagtggacgtgaggccggccacccggcagaacctgtcacagtttgaggcacaggctcggaaacgaatacctccacgggcccattcccgagattctagtgattct

SEQ ID NO: 417188 - DNA, 120 bp, Artificial Sequence
  ENSG00000149532_6 (sequence is synthesized)
gctgatggacgggccacaccctctgagaaccttgtaccctcatctgctcgtgtggataagccccccagtgtgctgccctacttcaatcgtcctccttcggcccttcccctgatgggtctg

SEQ ID NO: 417189 - DNA, 120 bp, Artificial Sequence
  ENSG00000149532_7 (sequence is synthesized)
cccccaccaccaattccacccccaccacctctctcctcaagctttggggtccctcctcctcctcctggtatccactaccagcatctcatgcccccacctcctcgattacctcctcatctt

SEQ ID NO: 417190 - DNA, 120 bp, Artificial Sequence
  ENSG00000149532_8 (sequence is synthesized)
gctgtacctccccctggggccatcccacctgcccttcacctcaatccagccttcttccccccaccaaacgctacagtggggcctccaccagatacttacatgaaggcctctgccccctat

SEQ ID NO: 417191 - DNA, 120 bp, Artificial Sequence
  ENSG00000149532_9 (sequence is synthesized)
aaccaccatggcagccgagattcgggccctccaccctctacagtgagtgaagccgaatttgaagatatcatgaagcgaaacagagcaatttccagcagtgccatttccaaagcagtatct

SEQ ID NO: 417192 - DNA, 120 bp, Artificial Sequence
  ENSG00000149532_10 (sequence is synthesized)
ggagccagtgcaggggattacagtgacgcaattgagacgctgctcacagccattgcggttatcaaacagtcccgggttgccaatgatgagcgttgccgtgtcctcatctcctctcttaag

SEQ ID NO: 417193 - DNA, 120 bp, Artificial Sequence
  ENSG00000149532_11 (sequence is synthesized)
gactgtcttcatggcatcgaagccaagtcctacagtgtgggtgccagtgggagctcttccaggaaaagacatcgctcccgggaaaggtcacctagccggtcccgggagagcagcaggagg

SEQ ID NO: 417194 - DNA, 120 bp, Artificial Sequence
  ENSG00000149532_12 (sequence is synthesized)
caccgggatctgcttcataatgaagatcggcatgatgattatttccaagaaaggaaccgggagcatgagagacaccgggatagagaacgggaccggcaccactgagaaaggagtctggtt

SEQ ID NO: 417195 - DNA, 120 bp, Artificial Sequence
  ENSG00000149532_13 (sequence is synthesized)
ggaagcaaatgtttttttaatggacttgcatctcctcaccttgatcaggactaaaggacggaggccgccccacccccttccctttcctccaaacccctaactccctccagacacccaggg

SEQ ID NO: 417196 - DNA, 120 bp, Artificial Sequence
  ENSG00000149532_14 (sequence is synthesized)
ccaatcccacacctcctgtttgccaggggaaagaacctaaagacttcgtgtgattgggaggggtggcagacaggaagaaaacatgtccaggcccctggtctccatagagaatggtgcttt

SEQ ID NO: 417197 - DNA, 120 bp, Artificial Sequence
  ENSG00000149532_15 (sequence is synthesized)
gtccaagaaaacgtatgagtttctgattctccgggagccgttcaatggtgaggttgatgggaagacttccttcccaaagaaaatagatcctccatgcaggatctaggagagtgactgggt

SEQ ID NO: 417198 - DNA, 120 bp, Artificial Sequence
  ENSG00000149532_16 (sequence is synthesized)
gtgccaaaatatgcccagggtcctgccctcagcactagatttaatggggccaagagggtccaaaccccttgctaacataccacttctttgtttaactcctttacctttccagccctttga

SEQ ID NO: 417199 - DNA, 120 bp, Artificial Sequence
  ENSG00000149532_17 (sequence is synthesized)
ggagggaccatgagaacagaaattaccttatgaaaagctacttctgttcctgctttccctctcacgtattgacggtttatttctttgacctcccagagggctgaactctttcaactctgc

SEQ ID NO: 417200 - DNA, 120 bp, Artificial Sequence
  ENSG00000149532_18 (sequence is synthesized)
gctgcccagccttctcagtggacttgcccctcctaagcagagaaggcctatgaggttgcttgctgctgggaagcctggcagagccaattaccaccctctgctgcttagtgcttgggtacc

SEQ ID NO: 417201 - DNA, 120 bp, Artificial Sequence
  ENSG00000149532_19 (sequence is synthesized)
tcttgcaataaccagctcttagttgttccctttccctggggcttttccatttaacacatggagcccttcccccagaaggctacttccttgttttagaggaaggtactgcccattgggaga

SEQ ID NO: 417202 - DNA, 120 bp, Artificial Sequence
  ENSG00000149532_20 (sequence is synthesized)
tggggacattgggacctcagcaatgaagaacccttgtgaagtaaccaggaggaatggggaaagaagcaagttgggcaggatatggcctacttccataggcttttcttttttcaggtttga

SEQ ID NO: 417203 - DNA, 120 bp, Artificial Sequence
  ENSG00000149532_21 (sequence is synthesized)
tgtaagcatgggcttacatcccccaggtacatacttttacttattgtgggataacctggcactagtaggcaggtaaagtcacaaatttggtgtcttttcaccttttgactgttgacttaa

SEQ ID NO: 417204 - DNA, 120 bp, Artificial Sequence
  ENSG00000149532_22 (sequence is synthesized)
tagctcctctcactctgcctggagatacttcctgcctcagatgaggagccagaagaaacagagcccgacttgaatgaactcagctcagagttctaaggaccagcattctgggggccattt

SEQ ID NO: 417205 - DNA, 120 bp, Artificial Sequence
  ENSG00000149532_23 (sequence is synthesized)
tctctacaggcaaatggaattgcttttccataacatccaaattgtaatgtggttgctgctgaaggaggaggcagcagcgaggtcctgcggtacccatggggtgatgctacttctgcatgc

SEQ ID NO: 417206 - DNA, 120 bp, Artificial Sequence
  ENSG00000149532_24 (sequence is synthesized)
atctacagggcatctgacacctaacatgagacgtggcatgtgagatgagacttggcatgtgagacatagggtcactagagacccttctgggtcagaggagagagactgaattggactaaa

SEQ ID NO: 417207 - DNA, 120 bp, Artificial Sequence
  ENSG00000149532_25 (sequence is synthesized)
cccgtcctctgttcccagcacgtttctcatatagccctcagtcactgagggagtcccccgcaggattggagaggcacattcccttgggacagaggctacaggttggagctttttttcccc

SEQ ID NO: 417208 - DNA, 120 bp, Artificial Sequence
  ENSG00000149532_26 (sequence is synthesized)
tgtcccccaaccccatccccacctccacttcagaacatggcaccccacccaactggccaagtgttaagtgatgtgcttattgagagcaactccgggtgtcttttaaaatgtagagaaaag

SEQ ID NO: 417209 - DNA, 120 bp, Artificial Sequence
  ENSG00000149532_27 (sequence is synthesized)
gtgacagtttaaggaaaaatatatatagaataccagaaatgccgtttacccggagaatttttttctccccatttgttttgtttttactcaatgacaccatttttagttttatttcctgat

SEQ ID NO: 417210 - DNA, 120 bp, Artificial Sequence
  ENSG00000149532_28 (sequence is synthesized)
agcaaaaggaaaaaaaacacccatccctcaaaaaggccaaggtcccgtccccctgttgtcggtgatttgtttgtctttctgataggttgaaaattgtgtaataaacttgatgacgctgtc

SEQ ID NO: 417211 - DNA, 120 bp, Artificial Sequence
  ENSG00000149532_29 (sequence is synthesized)
ttatgtgggcagcttctcctggcagggtcatctgagggacgagatttcagagtgaacaccttgaactcttggtggtcattagatggtcctgtgataatgtggaccacagaccagcagctg

SEQ ID NO: 417212 - DNA, 120 bp, Artificial Sequence
  ENSG00000149532_30 (sequence is synthesized)
gacttttccgtcgcgccataggcagctgcggcgcagacgcggcgctacccgggtcgggcccgagggtgatgggcagcgacccccggcggcctgggagagcgtggcatcttccttactttg

SEQ ID NO: 417213 - DNA, 120 bp, Artificial Sequence
  ENSG00000149532_31 (sequence is synthesized)
agccatggagatttaagaattcagtgctatggcttgcttctcttggtgtacaagttatcctctgcaacctgtgtcttcaactttttgtagttctcaactatgtcagttatctcattattt

SEQ ID NO: 417214 - DNA, 120 bp, Artificial Sequence
  ENSG00000149532_32 (sequence is synthesized)
taggacattatcctacttgaaatatagtcattctcacgtcattcctgtcctcgttatccattgaaaactgagctttctcttcaatttggatcgaattcaaagattcagaagccctaatgg

SEQ ID NO: 417215 - DNA, 120 bp, Artificial Sequence
  ENSG00000149532_33 (sequence is synthesized)
acgaggagttcaaccaggtgaggtgtcatcaggagctttgggattttccttgatcatctgaggaatcattttcagcaaactggcagtggtttcaagctgtaccagtcctaggcttgaaca

SEQ ID NO: 417216 - DNA, 120 bp, Artificial Sequence
  ENSG00000149532_34 (sequence is synthesized)
aactttaaagactacactccattcctctttatgttaatttgaagctccaggcttaattttaaaggctttgatttaagagcaaataaaaagcaggtgtaatagaatggtgaatcaacctgt

SEQ ID NO: 417217 - DNA, 120 bp, Artificial Sequence
  ENSG00000149532_35 (sequence is synthesized)
aacgggggcgcgcggtcgggggcaggttgggccggaagaggggtccgggccggcactgaggcgggaagggggtcggttgagatgggacggccggagtctgcgggcggagggagtcgcggg

SEQ ID NO: 417218 - DNA, 120 bp, Artificial Sequence
  ENSG00000149532_36 (sequence is synthesized)
tgcgtaatagacgagctgccgtttatgtgggcagcttctcctgggtgagtgtgggtaaccaaaaatgcttaggggtgggctggagggagagcactgggaggtgatggcattttcagaaac

SEQ ID NO: 417219 - DNA, 120 bp, Artificial Sequence
  ENSG00000149532_37 (sequence is synthesized)
tcctgggttggattgatctctgaaagagaactatcctgaggacgtactggtgccgaagaaagcaatgattaatggaccacagaccagcagctgatccaggttattcgctctataggagtc

SEQ ID NO: 417220 - DNA, 120 bp, Artificial Sequence
  ENSG00000149532_38 (sequence is synthesized)
tcctttcagatttgagccagggtaaataagtgtattaagcattttattctccctgagaaagtgagcactgaatccttgttctttcccttatagacattctgttatcatagcattgactcc

SEQ ID NO: 417221 - DNA, 120 bp, Artificial Sequence
  ENSG00000149532_39 (sequence is synthesized)
tgggaagtagtaccatgtcctttatacccctttttaaggtgcttaattaaatgcgggagcaggtgttatgaatgctacagatgtctagcattgttctgtgttatgccaaaattaccaaag

SEQ ID NO: 417222 - DNA, 120 bp, Artificial Sequence
  ENSG00000149532_40 (sequence is synthesized)
agaagccccgttcctggctgctgggggattttttattaaaaaaagatttatagtgaagaattctctctctttaaagcaaaagtaaatgcagcaagggtagggggaacttctgatttacat

SEQ ID NO: 417223 - DNA, 120 bp, Artificial Sequence
  ENSG00000149532_41 (sequence is synthesized)
aactggaatttcagggcagattttctgcacatttatggggagtcttaccctgagattcagctgtttctgcttgtttcttgactgccttaacctggtatctgagtgagagtatggtgtctg

SEQ ID NO: 417224 - DNA, 120 bp, Artificial Sequence
  ENSG00000149532_42 (sequence is synthesized)
cattcaggtaccaatttgaatcccagtttctccactaataattggccatattactttctgttccacagtttcatttgtaaatgaagataataaaagcaactgtcccagtgacttgctaag

SEQ ID NO: 417225 - DNA, 120 bp, Artificial Sequence
  ENSG00000149532_43 (sequence is synthesized)
ctttttcctgggatcaggttggattgatctctgaaagagaactatcctgaggacgtactggtgccgaagaaagcaatgattaagtgggtagttgctttttctgccatcttgttactgccc

SEQ ID NO: 417226 - DNA, 120 bp, Artificial Sequence
  ENSG00000149532_44 (sequence is synthesized)
gaccttgataactctagtatacttggggtaggtggtgactgttgttctgcaagttattttgtgatgttttggggctggtggtgggggtggtttttccaaattaggaagtatatttactgt

SEQ ID NO: 417227 - DNA, 120 bp, Artificial Sequence
  ENSG00000149532_45 (sequence is synthesized)
gggggaagttctggcaatggtcaactctagcctgacagatctataattaaaaaattgctagctgtcaatgtttgaactgatgaccagccagcccaaacggcagtcaaagttacaataagt

SEQ ID NO: 417228 - DNA, 120 bp, Artificial Sequence
  ENSG00000149532_46 (sequence is synthesized)
tttaatcttcgtaatctctaaagatggagattgggggtgagtgggtttggaattctgtatgggtgaggacaataagaaaagtctgcactaattgaaatattgccaggcttttgagtttcc

SEQ ID NO: 417229 - DNA, 120 bp, Artificial Sequence
  ENSG00000149532_47 (sequence is synthesized)
tctggggggacttagttgtgactagaatcctgggtttgggacattggcgggcgggggtgtagctcttgacatctcttccttttccatcttgccggccccagtggaccacagaccagcagc

SEQ ID NO: 417230 - DNA, 120 bp, Artificial Sequence
  ENSG00000149534_0 (sequence is synthesized)
aacccatttcaactgcctattcagagcatgcagtaagaggaaatccaccaagtctcaatataataatattctttattcctggacagctcggttaatgaaaaaatggacacagaaagtaat

SEQ ID NO: 417231 - DNA, 120 bp, Artificial Sequence
  ENSG00000149534_1 (sequence is synthesized)
aggagagcaaatcttgctctcccacaggagccttccagtgtgcctgcatttgaagtcttggaaatatctccccaggaagtatcttcaggcagactattgaagtcggcctcatccccacca

SEQ ID NO: 417232 - DNA, 120 bp, Artificial Sequence
  ENSG00000149534_2 (sequence is synthesized)
ctgcatacatggctgacagttttgaaaaaagagcaggagttcctgggggtaacacaaattctgactgctatgatatgcctttgttttggaacagttgtctgctctgtacttgatatttca

SEQ ID NO: 417233 - DNA, 120 bp, Artificial Sequence
  ENSG00000149534_3 (sequence is synthesized)
cacattgagggagacattttttcatcatttaaagcaggttatccattctggggagccatatttttttctatttctggaatgttgtcaattatatctgaaaggagaaatgcaacatatctg

SEQ ID NO: 417234 - DNA, 120 bp, Artificial Sequence
  ENSG00000149534_4 (sequence is synthesized)
gtgagaggaagcctgggagcaaacactgccagcagcatagctgggggaacgggaattaccatcctgatcatcaacctgaagaagagcttggcctatatccacatccacagttgccagaaa

SEQ ID NO: 417235 - DNA, 120 bp, Artificial Sequence
  ENSG00000149534_5 (sequence is synthesized)
ttttttgagaccaagtgctttatggcttccttttccactgaaattgtagtgatgatgctgtttctcaccattctgggacttggtagtgctgtgtcactcacaatctgtggagctggggaa

SEQ ID NO: 417236 - DNA, 120 bp, Artificial Sequence
  ENSG00000149534_6 (sequence is synthesized)
gaactcaaaggaaacaaggttccagaggatcgtgtttatgaagaattaaacatatattcagctacttacagtgagttggaagacccaggggaaatgtctcctcccattgatttataagaa

SEQ ID NO: 417237 - DNA, 120 bp, Artificial Sequence
  ENSG00000149534_7 (sequence is synthesized)
tcacgtgtccagaacactctgattcacagccaaggatccagaaggccaaggtcttgttaaggggctactggaaaaatttctattctctccacagcctgctggttttacattagatttatt

SEQ ID NO: 417238 - DNA, 120 bp, Artificial Sequence
  ENSG00000149534_8 (sequence is synthesized)
cgcctgataagaatattttgtttctgctgcttctgtccaccttaatattctccttctatttgtagatatgatagactcctatttttcttgttttatattatgaccacacacatctctgct

SEQ ID NO: 417239 - DNA, 120 bp, Artificial Sequence
  ENSG00000149534_9 (sequence is synthesized)
ggaaagtcaacatgtagtaagcaagatttaactgtttgattataactgtgcaaatacagaaaaaaagaaggctggctgaaagttgagttaaactttgacagtttgataatatttggttct

SEQ ID NO: 417240 - DNA, 120 bp, Artificial Sequence
  ENSG00000149534_10 (sequence is synthesized)
tagggtttttttttttttttagcattcttaatagttacagttgggcatgatttgtaccatccacccatacccacacagtcacagtcacacacacatatgtattacttacactatatataa

SEQ ID NO: 417241 - DNA, 120 bp, Artificial Sequence
  ENSG00000149534_11 (sequence is synthesized)
cttcctatgcaaatattttaccaccagtcaataatacatttttgccaagacatgaagttttataaagatctgtataattgcctgaatcaccagcacattcactgacatgatattatttgc

SEQ ID NO: 417242 - DNA, 120 bp, Artificial Sequence
  ENSG00000149534_12 (sequence is synthesized)
agattgacaagtaggaagtggggaattttattaagttactcgttgtctggggaggtaaataggttaaaaacagggaaattataagtgcagagattaacatttcacaaatgtttagtgaaa

SEQ ID NO: 417243 - DNA, 120 bp, Artificial Sequence
  ENSG00000149534_13 (sequence is synthesized)
catttgtgaaaaaagaagactaaattaagacctgagctgaaataaagtgagtggaaatggaaataatggttatatctaaaacatgtagaaaaagagtaactggtagattttgttaacaaa

SEQ ID NO: 417244 - DNA, 120 bp, Artificial Sequence
  ENSG00000149534_14 (sequence is synthesized)
ttaaagaataaagttagacaagcaactggttgactaatacattaagcgtttgagtctaagatgaaaggagaacactggttatgttgatagaatgataaaaagggtcgggcgcggaggctc

SEQ ID NO: 417245 - DNA, 120 bp, Artificial Sequence
  ENSG00000149534_15 (sequence is synthesized)
aaagataaaaagtcagaaatctgaaaagtggaggaagagtacaaatagacctaaattaagctcatttttaggctttgattttggggagacaaagggaaatgcagccatagagggcctgat

SEQ ID NO: 417246 - DNA, 120 bp, Artificial Sequence
  ENSG00000149534_16 (sequence is synthesized)
gacatccaatacagagttctggtaaagataaaatttgatacaggtttggtgtcattataagagaaatcattattaaatgaagcaagttaacactctaagagaattattttgagatagaag

SEQ ID NO: 417247 - DNA, 120 bp, Artificial Sequence
  ENSG00000149534_17 (sequence is synthesized)
tgaagctaagctaaacttcacatgcctataattggagggaaaaactaaggataaaatctagcctagaagatacaataattagtcataaacatgcattgtgaaactgtagagagcaggtag

SEQ ID NO: 417248 - DNA, 120 bp, Artificial Sequence
  ENSG00000149534_18 (sequence is synthesized)
cccaaaatagagaaagattagataaagagaaaataagtatccatcagagacagtatctctaggcttgggcaagagaaaagtccacagtgataagcaactccacctaaggcatgaatatgc

SEQ ID NO: 417249 - DNA, 120 bp, Artificial Sequence
  ENSG00000149534_19 (sequence is synthesized)
ggcagagaaaacagcaatagtgaatgaatgcaaaaggtgctgagaaattccacacatgagtattgtgatgagtaaatgaataaaacatttgcaaagacctttagagaaagagaatgggag

SEQ ID NO: 417250 - DNA, 120 bp, Artificial Sequence
  ENSG00000149534_20 (sequence is synthesized)
catatgtgagaaataagatagttgattatgaatagaaggtagtgaagaaaagcaagctaagaaaaaattctgtttataaaagaaggaaaagatagtttatgtttttagcctaagtataag

SEQ ID NO: 417251 - DNA, 120 bp, Artificial Sequence
  ENSG00000149534_21 (sequence is synthesized)
agtcctacagatggactgaaaaaaatcagtctgagagtattagtcacaattaatgaaataattacattttatgtattgaggatgccaagattaaaaggtgacaggtagatgttaatttcc

SEQ ID NO: 417252 - DNA, 120 bp, Artificial Sequence
  ENSG00000149534_22 (sequence is synthesized)
ctagattgtgaaagtgatcacgacaatcacacaacaaataattaagtgacttggtatgctttatttaattgtagggcctgaggttttccattctcatttttctaaaatacaattttgttt

SEQ ID NO: 417253 - DNA, 120 bp, Artificial Sequence
  ENSG00000149534_23 (sequence is synthesized)
ctccaaatttgacagcagaataaaaaccctaccctttcactgtgtatcatgctaagctgcatctctactcttgatcatctgtaggtattaatcacatcacttccatggcatggatgttca

SEQ ID NO: 417254 - DNA, 120 bp, Artificial Sequence
  ENSG00000149534_24 (sequence is synthesized)
catacagactcttaaccctggtttaccaggacctctaggagtggatccaatctatatctttacagttgtatagtatatgatatctcttttatttcactcaatttatattttcatcattga

SEQ ID NO: 417255 - DNA, 120 bp, Artificial Sequence
  ENSG00000149534_25 (sequence is synthesized)
ctacatatttcttatacacaacacacaatttatgaattttttctcaagatcattctgagagttgccccaccctacctgccttttatagtatgcccacctcaggcagacacagagcacaat

SEQ ID NO: 417256 - DNA, 120 bp, Artificial Sequence
  ENSG00000149534_26 (sequence is synthesized)
gctggggttctcttcacactatcactgccccaaattgtctttctaaatttcaacttcaatgtcatcttctccatgaagaccactgaatgaacaccttttcatccagccttaatttcttgc

SEQ ID NO: 417257 - DNA, 120 bp, Artificial Sequence
  ENSG00000149534_27 (sequence is synthesized)
tccataactactctatcccacgatgcagtattgtatcattaattattagtgtgcttgtgacctccttatgtattctcaattacctgtatttgtgcaataaattggaataatgtaacttga

SEQ ID NO: 417258 - DNA, 120 bp, Artificial Sequence
  ENSG00000149534_28 (sequence is synthesized)
ttcagttttgggtctatgtgtgaaaccaagcatgccttaaacaaggaagacaagcttttcaaaggtgcaattggataacttctgccatagaaatggctgaattgggacacaagtggggac

SEQ ID NO: 417259 - DNA, 120 bp, Artificial Sequence
  ENSG00000149534_29 (sequence is synthesized)
aattccagaagaagggcacatctctttcttttctgcagttctttctcaccttctcaactcctactaaaatgtctcattttcaggttctgtaaatcctgctagtctcaggcaaaattatgc

SEQ ID NO: 417260 - DNA, 120 bp, Artificial Sequence
  ENSG00000149534_30 (sequence is synthesized)
tctattcatcacaagtaaaagcctgttgatcttaatcagccaagaaacttatctgtctggcaaatgacttatgtataaagagaatcatcaatgtcatgagctcggttaatgaaaaaatgg

SEQ ID NO: 417261 - DNA, 120 bp, Artificial Sequence
  ENSG00000149534_31 (sequence is synthesized)
ttccactgtatgtatttttttttgtgtgggaagactaagattctgggtcctaatgtaagtaagaagccctcttctcctgttccatgaacaccatccttttctgtaacttctattacacag

SEQ ID NO: 417262 - DNA, 120 bp, Artificial Sequence
  ENSG00000149534_32 (sequence is synthesized)
tatagtggttctgtaagttcacacagcccagggagatgctggctgcccactcccctcaacccaggcaaattcctcggggttaaagttatctactgcaagtgacgatctctgggtttttct

SEQ ID NO: 417263 - DNA, 120 bp, Artificial Sequence
  ENSG00000149534_33 (sequence is synthesized)
gtgtgtgtgtgtgtgtgtgtgtatgtgtcactttaaaaggactggtcagatggtagggagatgaaaacaggagatgctataagaaaataaacttttggggcgaataccatgtgactcttt

SEQ ID NO: 417264 - DNA, 120 bp, Artificial Sequence
  ENSG00000149534_34 (sequence is synthesized)
ggggcgaataccatgtgactctttttgtttgtcatttgttgctgttcaataggaaattgtagtgatgatgctgtttctcaccattctgggacttggtagtgctgtgtcactcacaatctg

SEQ ID NO: 417265 - DNA, 120 bp, Artificial Sequence
  ENSG00000149541_0 (sequence is synthesized)
gcagaccccgcctgctcgggcgcgggcggcggcgcggccatgaagctgaagctgaagaacgtgtttctcgcctacttcctggtgtcgatcgccggcctcctctacgcgctggtacagctc

SEQ ID NO: 417266 - DNA, 120 bp, Artificial Sequence
  ENSG00000149541_1 (sequence is synthesized)
ggccagccatgtgactgccttcctcccctgcgggcagcagccgagcagctacggcagaaggatctgaggatttcccagctgcaagcggaactccgacggccaccccctgcccctgcccag

SEQ ID NO: 417267 - DNA, 120 bp, Artificial Sequence
  ENSG00000149541_2 (sequence is synthesized)
ccccctgaacccgaggccctgcctactatctatgttgttacccccacctatgccaggctggtacagaaggcagagctggtacgactgtcccagacactgagcctggtgccccggctgcat

SEQ ID NO: 417268 - DNA, 120 bp, Artificial Sequence
  ENSG00000149541_3 (sequence is synthesized)
tggctgctggtggaggatgctgagggtcccaccccgctggtctcagggctgctggctgcctctggcctcctcttcacacacctggtggtcctcacgcccaaagcccagcggcttcgggag

SEQ ID NO: 417269 - DNA, 120 bp, Artificial Sequence
  ENSG00000149541_4 (sequence is synthesized)
ggcgagcctggctgggttcatccccgtggtgtcgagcagcggaacaaggccctggactggctccggggcagagggggtgctgtgggtggggagaaggacccaccaccaccagggacccaa

SEQ ID NO: 417270 - DNA, 120 bp, Artificial Sequence
  ENSG00000149541_5 (sequence is synthesized)
ggagtcgtctactttgctgacgatgacaacacctacagccgggagctgtttgaggagatgcgctggacccgtggtgtctcagtgtggcctgtggggctggtgggcggcctgcgattcgag

SEQ ID NO: 417271 - DNA, 120 bp, Artificial Sequence
  ENSG00000149541_6 (sequence is synthesized)
caggacggccgggtagtgggcttccacacagcatgggagcccagcaggcccttccctgtggatatggctggatttgccgtggccctgcccttgctgttagataagcccaatgcccaattt

SEQ ID NO: 417272 - DNA, 120 bp, Artificial Sequence
  ENSG00000149541_7 (sequence is synthesized)
gattccaccgctccccggggccacctggagagcagtcttctgagccaccttgtggatcccaaggacctggagccacgggctgccaactgcactcgggtactggtgtggcatactcggaca

SEQ ID NO: 417273 - DNA, 120 bp, Artificial Sequence
  ENSG00000149541_8 (sequence is synthesized)
gagaagcccaagatgaagcaggaggagcagctgcagcggcagggccggggctcagacccagcaattgaggtgtgatggcggccccaccccaactaccacctcttttcaggcacagacctt

SEQ ID NO: 417274 - DNA, 120 bp, Artificial Sequence
  ENSG00000149541_9 (sequence is synthesized)
gtgggactgggccccaggcctgcccaggatgtggttttccaagtcctgacccttggagccagaagtggcccctctgcccctccaggcccagggcatggtcctgctgcttcacccctcccc

SEQ ID NO: 417275 - DNA, 120 bp, Artificial Sequence
  ENSG00000149541_10 (sequence is synthesized)
tagcctgccgtgtggcactgcccacaggctggggacaagcagcccttgtgttgagtcaggttggccctgtctagggtggaacagaaggacagatggacccaggagggagggcagctgagt

SEQ ID NO: 417276 - DNA, 120 bp, Artificial Sequence
  ENSG00000149541_11 (sequence is synthesized)
aactgggtaacttattggggctgggcatgcactggggggctggaggagctgggctggacccttcccacctgagcatgctgacccccttcctacctccagaataaagaatctcaacctgga

SEQ ID NO: 417277 - DNA, 120 bp, Artificial Sequence
  ENSG00000149541_12 (sequence is synthesized)
aaggcgggggggtgcacagatgaccggaagcgtgccctggcggcgctgccagccccagctgggagctggtaggggagtgcgaggaaggcgggacgcagggcggagccgctgcaggggcgg

SEQ ID NO: 417278 - DNA, 69 bp, Artificial Sequence
  ENSG00000149541_13 (sequence is synthesized)
cttctgagccaccttgtggatcccaaggacctggagccacgggctgccaactgcacttagcgcaagctc

SEQ ID NO: 417279 - DNA, 120 bp, Artificial Sequence
  ENSG00000149541_14 (sequence is synthesized)
aagtgctggggttacaggcgtgagccacgcgcccggccaaggcccggttttagaggcactaagtcttcctccaccctgccctttacactttgaagcctatactgtatatgtcgatagggt

SEQ ID NO: 417280 - DNA, 120 bp, Artificial Sequence
  ENSG00000149541_15 (sequence is synthesized)
tatatgtcgatagggttagagaatccattccaggctcggggacccagaggcctggctgcagctgggcctggctctcactgcatccctcctggcacaggtactggtgtggcatactcggac

SEQ ID NO: 417281 - DNA, 120 bp, Artificial Sequence
  ENSG00000149541_16 (sequence is synthesized)
agggccacaggagacgcaggcagtggcccaggagaagctgtctgccctggctggagcaggcaaatggtgcctgccccttttccttgtgctgcatctctcccctgcaggctggtacagaag

SEQ ID NO: 417282 - DNA, 120 bp, Artificial Sequence
  ENSG00000149541_17 (sequence is synthesized)
agaccccgcctgctcgggcgcgggcggcggcgcggccatgaagctgaagctgaagaacgtgtttctcgcctacttcctggtgtcgatcgccggcctcctctacgcgctggtacagctcgt

SEQ ID NO: 417283 - DNA, 120 bp, Artificial Sequence
  ENSG00000149541_18 (sequence is synthesized)
gtctgcttcctccactaaacagaaagctcgatgagggcagggactgtgtctgttttgttccctgctgtatccccagcacctaaggcagtgcctcctaggaagagtattcaataaatattt

SEQ ID NO: 417284 - DNA, 120 bp, Artificial Sequence
  ENSG00000149547_0 (sequence is synthesized)
agtgcgggcgcagcggccccggccctggaagcgccccggcggagctggcctgcggtgggctaggggcagggccggagccgcggcggcggagctgtggatccttcatgatgagagatttgg

SEQ ID NO: 417285 - DNA, 120 bp, Artificial Sequence
  ENSG00000149547_1 (sequence is synthesized)
ggacacttctctctcctgtgtgtagttgatagtttggtggtgaagagatggctgacagtgtcaaaacctttctccaggaccttgccagaggaatcaaagactccatctggggtatttgta

SEQ ID NO: 417286 - DNA, 120 bp, Artificial Sequence
  ENSG00000149547_2 (sequence is synthesized)
ccatctcaaagctagatgctcgaatccagcaaaagagagaggagcagcgtcgaagaagggcaagtagtgtcttggcacagagaagagcccagagtatagagcggaagcaagagagtgagc

SEQ ID NO: 417287 - DNA, 120 bp, Artificial Sequence
  ENSG00000149547_3 (sequence is synthesized)
cacgtattgttagtagaattttccagtgttgtgcttggaatggtggagtgttctggttcagtctcctcttgttttatcgagtatttattcctgtgcttcagtcggtaacagcccgaatta

SEQ ID NO: 417288 - DNA, 120 bp, Artificial Sequence
  ENSG00000149547_4 (sequence is synthesized)
tcggtgacccatcactacatggagatgtttggtcgtggctggaattcttcctcacgtcaattttcagtgctctttgggtgctccccttgtttgtgcttagcaaagtggtgaatgccattt

SEQ ID NO: 417289 - DNA, 120 bp, Artificial Sequence
  ENSG00000149547_5 (sequence is synthesized)
ggtttcaggatatagctgacctggcatttgaggtatcagggaggaagcctcacccattccctagtgtcagcaaaataattgctgacatgctcttcaaccttttgctgcaggctcttttcc

SEQ ID NO: 417290 - DNA, 120 bp, Artificial Sequence
  ENSG00000149547_6 (sequence is synthesized)
tcattcagggaatgtttgtgagtctctttcccatccatcttgtcggtcagctggttagtctcctgcatatgtcccttctctactcactgtactgctttgaatatcgttggttcaataaag

SEQ ID NO: 417291 - DNA, 120 bp, Artificial Sequence
  ENSG00000149547_7 (sequence is synthesized)
gaattgaaatgcaccagcggttgtctaacatagaaaggaattggccttactactttgggtttggtttgcccttggcttttctcacagcaatgcagtcctcatatattatcagtggctgcc

SEQ ID NO: 417292 - DNA, 120 bp, Artificial Sequence
  ENSG00000149547_8 (sequence is synthesized)
ttttctctatcctctttcctttattcattatcagcgccaatgaagcaaagacccctggcaaagcatatctcttccagttgcgcctcttctccttggtggtcttcttaagcaacagactct

SEQ ID NO: 417293 - DNA, 120 bp, Artificial Sequence
  ENSG00000149547_9 (sequence is synthesized)
gagcagctctacttctgcagagaagttcccttcaccgcatccgtcgcctgccaaactgaaggctactgcaggtcactgagttgcctgccatccaaaggggatgggcgggattggaagaag

SEQ ID NO: 417294 - DNA, 120 bp, Artificial Sequence
  ENSG00000149547_10 (sequence is synthesized)
ctgtggcagctcttttccctgttcacctcccgcctgccagggaaggcaggacccgctctgccaagggccctctgcgtattcccttctctctgaggaattgaaatttttgtctctggtgca

SEQ ID NO: 417295 - DNA, 120 bp, Artificial Sequence
  ENSG00000149547_11 (sequence is synthesized)
cgtaaggcagaatgttccctgacaccagtgtgtggatttttaacatcaccgtgagtctgaaaggaccacaggtttttctgcagctattttctagcatttgccagtccctgtgcctggact

SEQ ID NO: 417296 - DNA, 120 bp, Artificial Sequence
  ENSG00000149547_12 (sequence is synthesized)
gattggaacactttgtttttctccctgtgccatttacccttccacctttccatcctgccttctaccacccttggatgaatggattttgtaattctagctgttgtattttgtgaatttgtt

SEQ ID NO: 417297 - DNA, 120 bp, Artificial Sequence
  ENSG00000149547_13 (sequence is synthesized)
aattttgttgtttttctgtgaaacacatacattggatatgggaggtaaaggagtgtcccagttgctcctggtcactccctttatagccattactgtcttgtttcttgtaactcaggttag

SEQ ID NO: 417298 - DNA, 120 bp, Artificial Sequence
  ENSG00000149547_14 (sequence is synthesized)
aaaaaaaaaaaaaaaaaaaaaagcctgaagagatgagataggaggaaagacctcacagccagatctgctgggttttgaggagtgattttctttcttccccttgaaggggaaaaagctatt

SEQ ID NO: 417299 - DNA, 120 bp, Artificial Sequence
  ENSG00000149547_15 (sequence is synthesized)
attttctttcttccccttgaaggggaaaaagctattttcattggtacatttaaagtcccccaactatggggaggtaccaattctggacaagtgccactacaacaacactaaacctgaact

SEQ ID NO: 417300 - DNA, 120 bp, Artificial Sequence
  ENSG00000149547_16 (sequence is synthesized)
tttcaactccgttggtggtgggaggcagcgggcagaaatttactgttggccactgccaggtctatttcatatttcaaaggaatattgggtgctgcatataggaactgaaggggtcaatgt

SEQ ID NO: 417301 - DNA, 120 bp, Artificial Sequence
  ENSG00000149547_17 (sequence is synthesized)
attaaacctgtgattggttgttttcctgtcattttgagagactaaatgtggggggcagatgtcaaaatacctgtacaattttaaaatgtcacaattaaacatgagctggtttcccacaaa

SEQ ID NO: 417302 - DNA, 120 bp, Artificial Sequence
  ENSG00000149547_18 (sequence is synthesized)
agtgcgggcgcagcggccccggccctggaagcgccccggcggagctggcctgcggtgggctaggggcagggccggagccgcggcggcggagctgtgggtttgagaggttatttgtccatg

SEQ ID NO: 417303 - DNA, 120 bp, Artificial Sequence
  ENSG00000149547_19 (sequence is synthesized)
tttcctgtgtaccaggagctttcactgtttattttcttttttgttgttttattctttttaaaaatttatatttcgttattctcctagaggccctttaagaatgggtactgttgttctatc

SEQ ID NO: 417304 - DNA, 120 bp, Artificial Sequence
  ENSG00000149547_20 (sequence is synthesized)
cattttatgaatgaggaaatgcaagttaccaaggttaaaccattagtaagaggcaaagctgagatttaaacccagatggtatcctgcagatagcgtactggtaatcactgtggcatctcg

SEQ ID NO: 417305 - DNA, 120 bp, Artificial Sequence
  ENSG00000149547_21 (sequence is synthesized)
agttgtgcctagggagaccagttttctgccgaattgcctaggagctgtggggagatgggcctgaatggacccgtggactcagaggcagcccgtggagccccgtgggaaatccttcatgat

SEQ ID NO: 417306 - DNA, 120 bp, Artificial Sequence
  ENSG00000149547_22 (sequence is synthesized)
ctctccgccgccaggcggagttgggagccggacgatcccgcacgcagcgcgaggcgggaccccggactgactacatttcccagtctccgtcgctccgcgcggcccaccccttcggctctg

SEQ ID NO: 417307 - DNA, 120 bp, Artificial Sequence
  ENSG00000149548_0 (sequence is synthesized)
agactgagtctgtggcgagctgcgggccgattcctggccagtgccatctcagccggagcaggcctcggggcctcagaagcaggcttttatctggcccgaggctcccagccgttcagcgcg

SEQ ID NO: 417308 - DNA, 120 bp, Artificial Sequence
  ENSG00000149548_1 (sequence is synthesized)
tcttcccataacctataccgattattgggactctcggctgcagacacaggagtcacagatgctgggaagtatggcccgaaagaaacctcgaaatacctcaaggttgcccctggctttaaa

SEQ ID NO: 417309 - DNA, 120 bp, Artificial Sequence
  ENSG00000149548_2 (sequence is synthesized)
ccccctgaagagcaaggacgtgttggcagtgctggctgagaggaacgaggctatagtaccagttggggcatgggtggaacctgcctcaccaggtagttcggaaatcccagcatatacatc

SEQ ID NO: 417310 - DNA, 120 bp, Artificial Sequence
  ENSG00000149548_3 (sequence is synthesized)
agcatatttaattgaagaagaactaaaggaacagctaagaaaaaaacaagaagctttgaaacattttcagaaacaagttaaataccgagtaaatcaacaaattaggttgagaaaaaagca

SEQ ID NO: 417311 - DNA, 120 bp, Artificial Sequence
  ENSG00000149548_4 (sequence is synthesized)
acagcttcagaagtcttatgaaagagcacaaaaagaaggctccatagccatgcagtcttcagcaacacacttaacttccaaaaggacaagtgtttttccaaacaatttgaatgttgctat

SEQ ID NO: 417312 - DNA, 120 bp, Artificial Sequence
  ENSG00000149548_5 (sequence is synthesized)
tggaagttctaggttacctccttccctgatgcctggggatggaatagaggatgaagagaatcagaacgaattattccaacaacaagcccaggctcttagtgaaactatgaaacaggcacg

SEQ ID NO: 417313 - DNA, 120 bp, Artificial Sequence
  ENSG00000149548_6 (sequence is synthesized)
tcaccggctagcatcctttaaaaccgtgattaaaaaaaagggatcagtgtttccagatgatggaaggaaaagctttcttaccagagaggaagtgctttccaggaaaccagcatccactgg

SEQ ID NO: 417314 - DNA, 120 bp, Artificial Sequence
  ENSG00000149548_7 (sequence is synthesized)
gataaatacaggaataagaggagagttgcccattaaggtccatcaaggtcttttagctgctgtaccttaccagaattatatggaaaatcaggaacttgactatgaggaacctgactatga

SEQ ID NO: 417315 - DNA, 120 bp, Artificial Sequence
  ENSG00000149548_8 (sequence is synthesized)
ggaatcttcatctcttgtaactgatgagaaagggaaagaagatttgtttgggagaggccagcaggaccagcaggctatccattctgaagataagaacaaacctttcagcagagttcagaa

SEQ ID NO: 417316 - DNA, 120 bp, Artificial Sequence
  ENSG00000149548_9 (sequence is synthesized)
agtaaaattcaaaaatccattatttgttctgatggaagaggaagaacaaaagcagttacattttgagggccttcaggatattctgccagaagcccaggattattttctagaagcccaagg

SEQ ID NO: 417317 - DNA, 120 bp, Artificial Sequence
  ENSG00000149548_10 (sequence is synthesized)
tgatttgctggaaacccagggtgatttgacaggaatccagagtgttaagccagatacccaggctgttgaaatgaaggttcaggttactgagccagaaggccaggccattgagccagaagg

SEQ ID NO: 417318 - DNA, 120 bp, Artificial Sequence
  ENSG00000149548_11 (sequence is synthesized)
ccagcctattaagacagaaactcagggtattatgctgaaagcccagagtattgagctagaagaagggagtattgtgttgaaaacccaggattttctacccacaaatcaggctcttctaac

SEQ ID NO: 417319 - DNA, 120 bp, Artificial Sequence
  ENSG00000149548_12 (sequence is synthesized)
gaaaaaccaggatgttttactcaaagaccactgtgttctccctaaagaccagagtattctactcaaatatcaggaccaggacttcctacccagagaccagcatgttctccacaaagacca

SEQ ID NO: 417320 - DNA, 120 bp, Artificial Sequence
  ENSG00000149548_13 (sequence is synthesized)
agatattctgccaaaatatcaggaccagaattttctacctaaggaccagaattttttatctagagaccagcatgttctccccaaagaccaagatattctgccaaaatatcaggaccagaa

SEQ ID NO: 417321 - DNA, 120 bp, Artificial Sequence
  ENSG00000149548_14 (sequence is synthesized)
ttttctacctaaggaccagaattttttgtctagagaccagcatgttctccccaaagaccagaatattctacctaaatatcaaggccaggattttctacctaaagaccaggactttttatc

SEQ ID NO: 417322 - DNA, 120 bp, Artificial Sequence
  ENSG00000149548_15 (sequence is synthesized)
aagaccaaaatattctacccatatgtcaggaccaggattttctacccagagaccaaggttatcttcctaaagaccaaaatattctacccatatgtcaggaccgggattttctacccagag

SEQ ID NO: 417323 - DNA, 120 bp, Artificial Sequence
  ENSG00000149548_16 (sequence is synthesized)
acctgcatgttctctccaacgaccagaatattctacccaaatgtcaggaccaagattttctaccaaaatatcagaaagtacactttaaggagccatactctgatatgacagatgagaaag

SEQ ID NO: 417324 - DNA, 120 bp, Artificial Sequence
  ENSG00000149548_17 (sequence is synthesized)
ggagagaagacttttctctggcagactatcagtgtttgcctcccaaatcccaggaccaggatgacatcaaaaatcagcaacctgcatcttttatgagagaagaaagagtgagagaagaat

SEQ ID NO: 417325 - DNA, 120 bp, Artificial Sequence
  ENSG00000149548_18 (sequence is synthesized)
tgcctctggactatcatcaatatgttgtacctaaaatccaggaccaagactcccctagagaacagaacaagcatatcaaactaccctcatcttttgagaaatgggagattgcaagaggaa

SEQ ID NO: 417326 - DNA, 120 bp, Artificial Sequence
  ENSG00000149548_19 (sequence is synthesized)
atactcctggagtgcccttggcttatgataggtatcaatcaggattgagcactgaattccaagctccactggcatttcagtctgacgtggataaagaagaagataagaaagagcgtcaaa

SEQ ID NO: 417327 - DNA, 120 bp, Artificial Sequence
  ENSG00000149548_20 (sequence is synthesized)
agcagtacctgagacatagacgacttttcatggatattgagagagaacaagttaaagaacaacaaaggcaaaaagaacaaaagaagaaaattgaaaaaattaagaaaaagagagagcaag

SEQ ID NO: 417328 - DNA, 120 bp, Artificial Sequence
  ENSG00000149548_21 (sequence is synthesized)
aatgttatgctgcagagcagaggatcctaagaatgaactttcatgaagatccatattcaggagagaagttgagtgagatattagcccagttacaacttcaagaaataaaaggaaccagag

SEQ ID NO: 417329 - DNA, 120 bp, Artificial Sequence
  ENSG00000149548_22 (sequence is synthesized)
aaaaacaacagagagaaaaagaatacctgagatatgtagaagctttacgagcccaaatccaggagaaaatgcagctgtataatattactttacctccactatgctgttgtggtcctgatt

SEQ ID NO: 417330 - DNA, 120 bp, Artificial Sequence
  ENSG00000149548_23 (sequence is synthesized)
tttgggatgctcatcctgatacctgtgccaacaactgtattttctataaaaaccacagagcatatactcgggcactacattcattcatcaattcctgtgatgtccctgggggtaattcaa

SEQ ID NO: 417331 - DNA, 120 bp, Artificial Sequence
  ENSG00000149548_24 (sequence is synthesized)
ctcttcgagtcgcaattcataattttgcttctgcacacaggcggactttgaaaaatctataataagaatctgaaattaactggtagtattttggcttttacttaaaatcatccctgagag

SEQ ID NO: 417332 - DNA, 120 bp, Artificial Sequence
  ENSG00000149548_25 (sequence is synthesized)
agtatttaagaaaagctgttcaagttataaaatatataatctgggaagaaatactgtctcatataataattagattgtaatcattgttttaatctctgtctgggaaccaagattgaaagc

SEQ ID NO: 417333 - DNA, 120 bp, Artificial Sequence
  ENSG00000149548_26 (sequence is synthesized)
tgacttacttctctcttctgtcttgtgaaccatacggagcctattattttaaaatatgatcagacaagtaaggcttctcttactttgctctgctctgatcagaagagctcatgtgaagtc

SEQ ID NO: 417334 - DNA, 120 bp, Artificial Sequence
  ENSG00000149548_27 (sequence is synthesized)
tttgagattctcttatttatcatctttctaaaactgtgtttttgagcttgacagtactgaaaatgtctggatgaagcagaaaagaaagtgatgaaatgtgtttctgagcatcagagacca

SEQ ID NO: 417335 - DNA, 120 bp, Artificial Sequence
  ENSG00000149548_28 (sequence is synthesized)
tctatattgccattaccttttctagttgtatataagaattcaagattagaagaatttagatttgttgcacatttttttcctcagcattttttcctcttgttttttaaaatgtattgcctc

SEQ ID NO: 417336 - DNA, 120 bp, Artificial Sequence
  ENSG00000149548_29 (sequence is synthesized)
tttccccattcagtgacactggacataggaatttttaattgtgtaattttctgttgcaaaaagggtaaataaatcctttgtcttttgaatatcttctatgtgaaataattgtgagtgaca

SEQ ID NO: 417337 - DNA, 120 bp, Artificial Sequence
  ENSG00000149548_30 (sequence is synthesized)
tttgaaaaagtgaatctgaagtcaaagtgagtaaattccttatttccctattttttaaaaacctggtatatgacatggctacagggcaaatgaaataaaaattgccatagttggtatgaa

SEQ ID NO: 417338 - DNA, 68 bp, Artificial Sequence
  ENSG00000149548_31 (sequence is synthesized)
tttcaccatgttggccaggctgatctgaaactcctggcctcatatgatccatctgcggaagaactctt

SEQ ID NO: 417339 - DNA, 120 bp, Artificial Sequence
  ENSG00000149548_32 (sequence is synthesized)
tacaggcatgagccaccgcacctagccaggaagaactcttttaatagtagccattgctcatttctctttgggaggagataaagcagccagcagaaatttttgaggatattcttgggatat

SEQ ID NO: 417340 - DNA, 120 bp, Artificial Sequence
  ENSG00000149548_33 (sequence is synthesized)
taaactgatttcctgactccttagtttctgggaatttctgggagttatttggataaagaagctaattttaaataataattttatgaaattcctaaccatgttatgattttattttcagaa

SEQ ID NO: 417341 - DNA, 120 bp, Artificial Sequence
  ENSG00000149548_34 (sequence is synthesized)
gtaagtttcttgaaggaatagtcagggcctaatggcaacaagaaaaataaataagagtagtggtaatagtaatttaccatttattgagtgcttactatgtatcagagactgttataaacc

SEQ ID NO: 417342 - DNA, 120 bp, Artificial Sequence
  ENSG00000149548_35 (sequence is synthesized)
ctttacaaaataactatatgaggcagtgaaaaaattataatgagttatatttctctttgagatctgttatcttcttgtctccatttatgctggggaaatattttcagctcattctactgt

SEQ ID NO: 417343 - DNA, 120 bp, Artificial Sequence
  ENSG00000149548_36 (sequence is synthesized)
aggaggtcttgagtttcaggtcctttaactgaagactattagaatttgccttttatgtaagttaggactctatccagttgaattccctattactcaaatactttaatggtatgtaacatg

SEQ ID NO: 417344 - DNA, 120 bp, Artificial Sequence
  ENSG00000149548_37 (sequence is synthesized)
gacgtattaccatatatatccacattagattgctagttctgccaggaggcactgagaaaaataagaaacagtataaactctatcaggagtcccagctagagaaaacttagtccttcatat

SEQ ID NO: 417345 - DNA, 120 bp, Artificial Sequence
  ENSG00000149554_0 (sequence is synthesized)
gcatttggattcctgcagtggtgggcaaaggacagtccgccgaggtgctcggtggagtcatggcagtgccctttgtggaagactgggacttggtgcaaaccctgggagaaggtgcctatg

SEQ ID NO: 417346 - DNA, 120 bp, Artificial Sequence
  ENSG00000149554_1 (sequence is synthesized)
gagaagttcaacttgctgtgaatagagtaactgaagaagcagtcgcagtgaagattgtagatatgaagcgtgccgtagactgtccagaaaatattaagaaagagatctgtatcaataaaa

SEQ ID NO: 417347 - DNA, 120 bp, Artificial Sequence
  ENSG00000149554_2 (sequence is synthesized)
tgctaaatcatgaaaatgtagtaaaattctatggtcacaggagagaaggcaatatccaatatttatttctggagtactgtagtggaggagagctttttgacagaatagagccagacatag

SEQ ID NO: 417348 - DNA, 120 bp, Artificial Sequence
  ENSG00000149554_3 (sequence is synthesized)
gcatgcctgaaccagatgctcagagattcttccatcaactcatggcaggggtggtttatctgcatggtattggaataactcacagggatattaaaccagaaaatcttctgttggatgaaa

SEQ ID NO: 417349 - DNA, 120 bp, Artificial Sequence
  ENSG00000149554_4 (sequence is synthesized)
gggataacctcaaaatctcagactttggcttggcaacagtatttcggtataataatcgtgagcgtttgttgaacaagatgtgtggtactttaccatatgttgctccagaacttctgaaga

SEQ ID NO: 417350 - DNA, 120 bp, Artificial Sequence
  ENSG00000149554_5 (sequence is synthesized)
gaagagaatttcatgcagaaccagttgatgtttggtcctgtggaatagtacttactgcaatgctcgctggagaattgccatgggaccaacccagtgacagctgtcaggagtattctgact

SEQ ID NO: 417351 - DNA, 120 bp, Artificial Sequence
  ENSG00000149554_6 (sequence is synthesized)
ggaaagaaaaaaaaacatacctcaacccttggaaaaaaatcgattctgctcctctagctctgctgcataaaatcttagttgagaatccatcagcaagaattaccattccagacatcaaaa

SEQ ID NO: 417352 - DNA, 120 bp, Artificial Sequence
  ENSG00000149554_7 (sequence is synthesized)
cccgagtcacttcaggtggtgtgtcagagtctcccagtggattttctaagcacattcaatccaatttggacttctctccagtaaacagtgcttctagtgaagaaaatgtgaagtactcca

SEQ ID NO: 417353 - DNA, 120 bp, Artificial Sequence
  ENSG00000149554_8 (sequence is synthesized)
gttctcagccagaaccccgcacaggtctttccttatgggataccagcccctcatacattgataaattggtacaagggatcagcttttcccagcccacatgtcctgatcatatgcttttga

SEQ ID NO: 417354 - DNA, 120 bp, Artificial Sequence
  ENSG00000149554_9 (sequence is synthesized)
atagtcagttacttggcaccccaggatcctcacagaacccctggcagcggttggtcaaaagaatgacacgattctttaccaaattggatgcagacaaatcttatcaatgcctgaaagaga

SEQ ID NO: 417355 - DNA, 120 bp, Artificial Sequence
  ENSG00000149554_10 (sequence is synthesized)
cttgtgagaagttgggctatcaatggaagaaaagttgtatgaatcaggttactatatcaacaactgataggagaaacaataaactcattttcaaagtgaatttgttagaaatggatgata

SEQ ID NO: 417356 - DNA, 120 bp, Artificial Sequence
  ENSG00000149554_11 (sequence is synthesized)
aaatattggttgacttccggctttctaagggtgatggattggagttcaagagacacttcctgaagattaaagggaagctgattgatattgtgagcagccagaagatttggcttcctgcca

SEQ ID NO: 417357 - DNA, 86 bp, Artificial Sequence
  ENSG00000149554_12 (sequence is synthesized)
attgatattgtgagcagccagaagatttggcttcctgccacatgatcggaccatcggctctggggaatcctacaatggcatgatct

SEQ ID NO: 417358 - DNA, 73 bp, Artificial Sequence
  ENSG00000149554_13 (sequence is synthesized)
taggtgtgagccacctcgcctggcaagggattctgttcttagtccttgaaaaaataaagttctgaatcttcaa

SEQ ID NO: 417359 - DNA, 120 bp, Artificial Sequence
  ENSG00000149554_14 (sequence is synthesized)
tattttgtttgttcggcatacaaataatacctatatcttaattgtaagcaaaactttggggaaaggatgaatagaattcatttgattatttcttcatgtgtgtttagtatctgaatttga

SEQ ID NO: 417360 - DNA, 120 bp, Artificial Sequence
  ENSG00000149554_15 (sequence is synthesized)
aactcatctggtggaaaccaagtttcaggggacatgagttttccagcttttatacacacgtatctcatttttatcaaaacattttgtttaattcaaaaagtacatattccatgttgattt

SEQ ID NO: 417361 - DNA, 120 bp, Artificial Sequence
  ENSG00000149554_16 (sequence is synthesized)
aattctaagatgaaccaataaagacataattcttgtgacttttggacagtagatttatcagtctgtgaagcgaagccagcttcaaaacatatccccaagatttgtacttatattttcaaa

SEQ ID NO: 417362 - DNA, 120 bp, Artificial Sequence
  ENSG00000149554_17 (sequence is synthesized)
agggcctggccagttatataaacctgtttttgaattataatgattaattaaaattgcaagtaggtgttttttccagtgtagttagtaaaatacttgtattttacagtgttgcataaactc

SEQ ID NO: 417363 - DNA, 120 bp, Artificial Sequence
  ENSG00000149554_18 (sequence is synthesized)
tagtgcttaactaactttactctaaaaattactgttgaacatcttaaatatttttctatattttctactttcatagccatattttaaccttttcaacttactggtgaccaagcttttagg

SEQ ID NO: 417364 - DNA, 120 bp, Artificial Sequence
  ENSG00000149554_19 (sequence is synthesized)
tgataaagaataaaagagggaagggaagagtaaggaagctataagaaaaatagatctgattctttgttcctttacctgttagacttacaaaaagtttgtttttctaataaaatttgtatc

SEQ ID NO: 417365 - DNA, 120 bp, Artificial Sequence
  ENSG00000149554_20 (sequence is synthesized)
gtagtcccagctacttaggaggctgagagaggaggatcgcgtgaacctggaagtttgaggctgtagtgagctatgattgcaccagtgcactccagcttggatgacagagtaagaccctac

SEQ ID NO: 417366 - DNA, 120 bp, Artificial Sequence
  ENSG00000149554_21 (sequence is synthesized)
accagtgcactccagcttggatgacagagtaagaccctacctctaataaaaatttttaaaattgtaaaacattataaaattaatcagttattttaatctgaagccaagaacatgtagaat

SEQ ID NO: 417367 - DNA, 120 bp, Artificial Sequence
  ENSG00000149554_22 (sequence is synthesized)
gttatgattagagtttatcacatattaatgtatactggcaaattgtgttactggagtatacccataggaggaataaattcaaacctgttttatttatttgaacctatttacggtatgctt

SEQ ID NO: 417368 - DNA, 120 bp, Artificial Sequence
  ENSG00000149554_23 (sequence is synthesized)
aagaattgaatcagtataaattctcaaatatgggagaaattttgttcttgagaattatctgagtcattaatatttttcaaaaacagctctcactgacttgaacctcttctgtaagctcta

SEQ ID NO: 417369 - DNA, 120 bp, Artificial Sequence
  ENSG00000149554_24 (sequence is synthesized)
accttttacctgctttacatttccacttgaatgtctagtaggcatctcttgaccaaaaacagcttttgattcctgttctccaacctgttcctctcctagttttctccatctcagaaatgt

SEQ ID NO: 417370 - DNA, 120 bp, Artificial Sequence
  ENSG00000149554_25 (sequence is synthesized)
tacttcctctgcaaagtctttccctgacttatctaaaataataacctcctctgtttgctgtgggaatttgtatagaatggtgggaaaatttcaagtttcatatttggattagctctgaca

SEQ ID NO: 417371 - DNA, 120 bp, Artificial Sequence
  ENSG00000149554_26 (sequence is synthesized)
tttatttatctgaacactggtaattgcctcagtaaagacactgataataagtaccttttagagttattttaatctttaatgctttaatgtgtaggaagagtatagtgtcctgttttgcac

SEQ ID NO: 417372 - DNA, 120 bp, Artificial Sequence
  ENSG00000149554_27 (sequence is synthesized)
agaaaggcattctgtaaataataagttgccttaattttcctgtaatgttcattatattgttgtgggaaggtatttactcctattattaaaaataaaaatgtgtaaaatttactacctgaa

SEQ ID NO: 417373 - DNA, 120 bp, Artificial Sequence
  ENSG00000149554_28 (sequence is synthesized)
gatttacacgacaaaatggtcaggtttagaatagttgttcgtggttgaaagacttggataaatgtggatgagatagaaggggaaggcaagagctgttaattttcgtgggcaatcctgggg

SEQ ID NO: 417374 - DNA, 120 bp, Artificial Sequence
  ENSG00000149554_29 (sequence is synthesized)
gcaattgggaggaggcgctgccgcaggcgttttctgccccataccgctccctatatcctcttcctctcttccccagacccccacctctccctcctccttccccagtcgttcgccggaaag

SEQ ID NO: 417375 - DNA, 120 bp, Artificial Sequence
  ENSG00000149554_30 (sequence is synthesized)
gtgaatatagtgctgctatgttgacattattcttcctagagaagattatcctgtcctgcaaactgcaaatagtagttcctgaagtgttcacttccctgtttatccaaacatcttccaatt

SEQ ID NO: 417376 - DNA, 120 bp, Artificial Sequence
  ENSG00000149554_31 (sequence is synthesized)
aactgaattatcttgagtgaaagagtaccgatttcttggatatgaagtcttgtgctatttgaattttttcttacttttttttttgttttaaacttacaaataattcatgttcgttgtaga

SEQ ID NO: 417377 - DNA, 120 bp, Artificial Sequence
  ENSG00000149554_32 (sequence is synthesized)
taaaatagtaactataagtaaaaaattaaggaaaaaataactctttagtcccagaactctgcaatagatttttaaaaatattttggggagtgtatattcagagcaacttgaatctgctct

SEQ ID NO: 417378 - DNA, 120 bp, Artificial Sequence
  ENSG00000149554_33 (sequence is synthesized)
tagatggctttttacttaaagttttcatatgtgctatactttgttgcaaatacactcgtttgttgcttaattatagggatgcactctaacaaatgtttcattaggtggtttcatcattgt

SEQ ID NO: 417379 - DNA, 120 bp, Artificial Sequence
  ENSG00000149554_34 (sequence is synthesized)
gtgaacatcatagagtatatttacataaatctagatagtatagcttactataaatctaggctatttggtataccctattgatctcaggctgcaaacctgtacagcatgttactatactga

SEQ ID NO: 417380 - DNA, 120 bp, Artificial Sequence
  ENSG00000149554_35 (sequence is synthesized)
gcactgtaaggaattgtaacataatggtatttgtgtatctaagtatagaaaaagtatagtaaaaatacagtattataatctaatgggactgtctgttatacgtgtggtccattcctgact

SEQ ID NO: 417381 - DNA, 120 bp, Artificial Sequence
  ENSG00000149554_36 (sequence is synthesized)
aggcctgggcttcccccagcagcgctcgagcaccgcccagtcgagcctcacaccggatgccacttcatatttgggcccagagctcaattcgcgccgatgcggtccgccgtccttaaatct

SEQ ID NO: 417382 - DNA, 120 bp, Artificial Sequence
  ENSG00000149554_37 (sequence is synthesized)
cttcagccaggatctctccccgactgcaaagcagccctgggcgggagcggcaacatctccacgtcacccttttggagccgccgacattcagaggggcaggacacgggaacgcgcgctgtc

SEQ ID NO: 417383 - DNA, 120 bp, Artificial Sequence
  ENSG00000149557_0 (sequence is synthesized)
ggctggctggctggctctccgctgcgctgcgctgcgctccggccgctcccgcggcccgtggatgggggtgtccggctgagccccgggatccgcctccctccgccaggacccgcacagata

SEQ ID NO: 417384 - DNA, 120 bp, Artificial Sequence
  ENSG00000149557_1 (sequence is synthesized)
cctccctccgccaggacccgcacagataaactcatcctgaaagtcgctgttgttctcctgctgagcaagaatggaggccccactggtgagtctggatgaagagtttgaggaccttcgacc

SEQ ID NO: 417385 - DNA, 120 bp, Artificial Sequence
  ENSG00000149557_2 (sequence is synthesized)
ctcctgctcggaggacccggaggagaagccccagtgtttctatggttcatctccccaccatctcgaggacccctccctctccgagcttgagaatttttcttccgaaataatcagcttcaa

SEQ ID NO: 417386 - DNA, 120 bp, Artificial Sequence
  ENSG00000149557_3 (sequence is synthesized)
gtccatggaggacctcgtaaatgaatttgatgagaagctcaatgtctgctttcggaactacaacgccaagaccgagaacctagctcccgtgaagaaccagttacagatccaagaggagga

SEQ ID NO: 417387 - DNA, 120 bp, Artificial Sequence
  ENSG00000149557_4 (sequence is synthesized)
ggagacccttcaggacgaggaggtttgggatgctctgacagacaattacatcccttcactctcagaagactggagggatccaaacatcgaggctctgaatggcaactgctctgacactga

SEQ ID NO: 417388 - DNA, 120 bp, Artificial Sequence
  ENSG00000149557_5 (sequence is synthesized)
gatccatgagaaagaagaggaagagttcaatgagaagagtgaaaatgattccggtatcaacgaggagcctctgctcacagcagatcaggtaattgaggagattgaggaaatgatgcagaa

SEQ ID NO: 417389 - DNA, 120 bp, Artificial Sequence
  ENSG00000149557_6 (sequence is synthesized)
ctccccagaccctgaggaagaagaggaggttctggaagaagaggatggaggagaaacttcctcccaggcagactcggtcctcctgcaggagatgcaggcattgacacagaccttcaacaa

SEQ ID NO: 417390 - DNA, 120 bp, Artificial Sequence
  ENSG00000149557_7 (sequence is synthesized)
caactggtcctatgaagggctgaggcacatgtctgggtctgagctgaccgagctgctggaccaggtggagggtgccatccgtgacttctcggaggagctggtgcagcagctggcccgccg

SEQ ID NO: 417391 - DNA, 120 bp, Artificial Sequence
  ENSG00000149557_8 (sequence is synthesized)
ggacgagctggagtttgagaaggaagtgaagaactcctttatcacggtgcttattgaggttcagaacaagcagaaggagcagcgagaactgatgaaaaagaggcggaaagagaaagggct

SEQ ID NO: 417392 - DNA, 120 bp, Artificial Sequence
  ENSG00000149557_9 (sequence is synthesized)
gagcctgcagagcagccggatagagaagggaaaccagatgcctctcaagcgcttcagcatggaaggcatctccaacattctgcagagtggcatccgccagacctttggctcctcaggaac

SEQ ID NO: 417393 - DNA, 120 bp, Artificial Sequence
  ENSG00000149557_10 (sequence is synthesized)
tgacaaacagtatctgaacacagtcattccttacgagaagaaagcctctcctccctcagtggaagacctgcagatgctgacaaacattctctttgccatgaaggaggataatgagaaggt

SEQ ID NO: 417394 - DNA, 120 bp, Artificial Sequence
  ENSG00000149557_11 (sequence is synthesized)
gcctactttgctaacggactacattttaaaagtgctctgccctacctaaccttgccctttggagcagcctcgctgcaggaggtcactgagcaagagtcattccatcacagggactgcatg

SEQ ID NO: 417395 - DNA, 120 bp, Artificial Sequence
  ENSG00000149557_12 (sequence is synthesized)
agaccatgtaacctccgacatgtatttaaacgtgtatagcttaacctggattaaacacgagcaagcgcgcggggtcctttgccgttggcttctagtgctagtaatcattggatgcatgat

SEQ ID NO: 417396 - DNA, 120 bp, Artificial Sequence
  ENSG00000149557_13 (sequence is synthesized)
ggggcagggccggtgatggtgcctcccccttgctggtgtcaggagaggggaaggcagccgctttcaccgctcattatgtagtctggctacagccctcaaaaacagcttatactcttaaga

SEQ ID NO: 417397 - DNA, 120 bp, Artificial Sequence
  ENSG00000149557_14 (sequence is synthesized)
ctaattttgaaataaaaccttcatttaattaatattcttcatgtgctttggagtgtgatgtccattagccctctgctccagactccagagacgggctgtatagcattctttgcacgccgg

SEQ ID NO: 417398 - DNA, 120 bp, Artificial Sequence
  ENSG00000149557_15 (sequence is synthesized)
cctgtggcctgtggcagccagtgctgtgtttagggaccgggcgcatgtcctgttgtgggtcgtggtgggatcatgggacacagtggggctgcatacagcataggcagaaggagaccctct

SEQ ID NO: 417399 - DNA, 120 bp, Artificial Sequence
  ENSG00000149557_16 (sequence is synthesized)
gcaacctcagtttttgctgctcagccacatgcaagggagctgcaccaggggctgcagaaaggagctggtcagagtgggtgagacgggggtgagagtgtgcaattagcagatagaaagtgg

SEQ ID NO: 417400 - DNA, 120 bp, Artificial Sequence
  ENSG00000149557_17 (sequence is synthesized)
gcctcatggaggagccacacagctgcagatctcctggtgggatggccaggctggccctggagaccctccccaggctgtccacggggacctggaggctcagggcctgcgggaagtcagctc

SEQ ID NO: 417401 - DNA, 120 bp, Artificial Sequence
  ENSG00000149557_18 (sequence is synthesized)
tgctgagctttcccaacgtaggggactgcaacttgtttcctgtacttgacgaaaccaccactccctgtttgtccccaacgacccctggcaacagtgtcctttgactttgcagtgctgtcc

SEQ ID NO: 417402 - DNA, 120 bp, Artificial Sequence
  ENSG00000149557_19 (sequence is synthesized)
gaacagcagctctgactcctcgcactgtctccagcattgatggcaggcagctgccagccttgaccaaccagcaggcgaaggtctcctcgtatcccggatgctggctcgatctcaccacag

SEQ ID NO: 417403 - DNA, 120 bp, Artificial Sequence
  ENSG00000149557_20 (sequence is synthesized)
tctgaattctgttggcttccgtcttctggcttgaaagacattgagcctgccaattcccatatcctcctctgaaagcaaaaacttgtactgggcacttgctgtagcctgcactggcttcat

SEQ ID NO: 417404 - DNA, 120 bp, Artificial Sequence
  ENSG00000149557_21 (sequence is synthesized)
cgtgcattagcacacatcacagcatcaccacgtgtaaacaggtgctagtatgatcccgattttgcagaggaggaaaccaagcagcagagatgttcagtagctcgcccaaggctgtgtagg

SEQ ID NO: 417405 - DNA, 120 bp, Artificial Sequence
  ENSG00000149557_22 (sequence is synthesized)
aagtggtagagtcaggctggcatttaggtttcttatccagtgagacttccattgattcccaggagtttagtgtctgcttgaactaagcatgccacagagaaagccatactttatcacatc

SEQ ID NO: 417406 - DNA, 120 bp, Artificial Sequence
  ENSG00000149557_23 (sequence is synthesized)
agcagctccacagaaggccacagaatccatctaggggacacagaaggcactcccagtgccctgcctcccttcctgggcctctgctttttttttttcagacggagtttgactcttgttgct

SEQ ID NO: 417407 - DNA, 79 bp, Artificial Sequence
  ENSG00000149557_24 (sequence is synthesized)
ctgctttttttttttcagacggagtttgactcttgttgctcaggctggagtacaatggcgctatctcagctcgccgcaa

SEQ ID NO: 417408 - DNA, 120 bp, Artificial Sequence
  ENSG00000149557_25 (sequence is synthesized)
agtcaccgcgcctagctcggcttctgcttttccagaagcagaacactagcaatcttagctaggggtggcggagacttatccccccaggaaaactgctgcaatgcctaaagctctagtcca

SEQ ID NO: 417409 - DNA, 120 bp, Artificial Sequence
  ENSG00000149557_26 (sequence is synthesized)
ggcatctgcccagagcagagcttctccatagatagagccccggctgccacaggagcatggaagtgacaactcgtcctgtgataaaagggcatggattcagttcggcagttcactggtgct

SEQ ID NO: 417410 - DNA, 120 bp, Artificial Sequence
  ENSG00000149557_27 (sequence is synthesized)
aaggctgaacatgcccagggtcattagtggtgtgaggtcattagcatgtttagcactctgccggcgacggggtttttcaccagcctcagcaaaggggaagcagtgaattcctgagagctt

SEQ ID NO: 417411 - DNA, 120 bp, Artificial Sequence
  ENSG00000149557_28 (sequence is synthesized)
ttcttcctgccttggatttgtcagatctgggtcagccactcctttcccccaatttatcctgccagcaggtgtctgaagcggcagagacaagctaatcaaagctgctgggagttaaaaata

SEQ ID NO: 417412 - DNA, 120 bp, Artificial Sequence
  ENSG00000149557_29 (sequence is synthesized)
aatctcgagtgttggggatacactctggctaggaggaggtgagcagggcaggctgaaaacagtggctcctcctttctctcttgtttgtccgtctatcaggagtttaaggggaatatgaaa

SEQ ID NO: 417413 - DNA, 120 bp, Artificial Sequence
  ENSG00000149557_30 (sequence is synthesized)
tcaattcctcatggttttgcattgcccttccctgtgttcttcctattcaaagtgtgctttccaggccagcagcactgaccgcacttagaagcttgttagaaatgcaaaatctcaggcccc

SEQ ID NO: 417414 - DNA, 120 bp, Artificial Sequence
  ENSG00000149557_31 (sequence is synthesized)
acatcaggcctactaagtcagaatttgcattttaacaaggtctccctttaaaagggaggcagctcttctcttaaaaggagcctgggttttgtgccttgagttcaaatgcagctctactac

SEQ ID NO: 417415 - DNA, 120 bp, Artificial Sequence
  ENSG00000149557_32 (sequence is synthesized)
gtattaagctaaatctccctgcaacttgtatttgcatcaaggattagagaaactctgccctaggttttcagagttgctgaatccttgactcttcaatgctgaacctagggaatttgtggc

SEQ ID NO: 417416 - DNA, 120 bp, Artificial Sequence
  ENSG00000149557_33 (sequence is synthesized)
tagtgtgattatcaggtgaacccaattgtcttccctcagcttttccctcttctggtctttctggattgtagaaacctcacagaagagtcccaagaattaactgattttcaggcctgagtc

SEQ ID NO: 417417 - DNA, 120 bp, Artificial Sequence
  ENSG00000149557_34 (sequence is synthesized)
aatcctgattgcaaaactcaagtcctgtctaggatgtccgcactccgcaaagtgtgccagagagccacggtctgcagggagccctcctaggtaggtcagaggtctgtctggcaaatacag

SEQ ID NO: 417418 - DNA, 120 bp, Artificial Sequence
  ENSG00000149557_35 (sequence is synthesized)
aaatacagcctataaatgaggtatgtttccatcaattaaaggattttgctaggcctagtctggtcaagttctggtaagaaaactccaccacagggccgggcgtggtggctcatgcctgta

SEQ ID NO: 417419 - DNA, 120 bp, Artificial Sequence
  ENSG00000149557_36 (sequence is synthesized)
gtgacaagaagcggaaactacgctgaaataggcccttgctccaagtcccagtaactcggaatgcggagccgctcgtctcccgtcttttttaagtgcactggtaccatcatagttcactac

SEQ ID NO: 417420 - DNA, 90 bp, Artificial Sequence
  ENSG00000149557_37 (sequence is synthesized)
cgtcttttttaagtgcactggtaccatcatagttcactactgcttcatactcccagactcaagcaatcctgcctctgtgagccacctccc

SEQ ID NO: 417421 - DNA, 120 bp, Artificial Sequence
  ENSG00000149557_38 (sequence is synthesized)
gttctggagggaaggggccagtgcggggctactggatacccaaggagaggggaagttgagcttctgttcagctgaggaggatggatacctgctggggcctggtgctgaagttctctttgc

SEQ ID NO: 417422 - DNA, 120 bp, Artificial Sequence
  ENSG00000149557_39 (sequence is synthesized)
gtctctgtaagccagtgtcttacacttactgtctagtcacagaaccctggggcgttatctgggacagcctggtagctgagaggtccctgggtgtggtgacagtgtagcaagaagcatttg

SEQ ID NO: 417423 - DNA, 120 bp, Artificial Sequence
  ENSG00000149557_40 (sequence is synthesized)
gtccagtcaccgtaaacgccccaagatcatctttgtccctaaaaacttacccccgaccccgctcgtgcccctccccagagtgcggagccttccccagaccgcgcattcctgcagtgtcag

SEQ ID NO: 417424 - DNA, 120 bp, Artificial Sequence
  ENSG00000149557_41 (sequence is synthesized)
aaccgctggcagcggccgcagacgccgggagagcgattgttttactacagacgggcgggagaagggaccggggcggctgcgcggtggcggggcgcgctgccgtcgggtgggccccgggct

SEQ ID NO: 417425 - DNA, 120 bp, Artificial Sequence
  ENSG00000149557_42 (sequence is synthesized)
aggagtaagaagtcttaattgccctctcctgcttcagtcgagagccctgtagtccttgtctccttgacatagtgctggtttctgtctataggtttatgggctattactttcattttcgtg

SEQ ID NO: 417426 - DNA, 120 bp, Artificial Sequence
  ENSG00000149557_43 (sequence is synthesized)
caggcccccgccttcctggcgtgctcgtaaattgtgaaggtctttcttggatctttaaggagttggaagggatctcctctgaggggcagtcccatcttgattggtggtggccccaggagc

SEQ ID NO: 417427 - DNA, 120 bp, Artificial Sequence
  ENSG00000149557_44 (sequence is synthesized)
ctgacatcagagaccctgggcggggttgaggttctcttgcatatcttttttgacaaaagacaaacaattccttctcaaattgcactgcaaagaataagaaaatataatccccttggattt

SEQ ID NO: 417428 - DNA, 120 bp, Artificial Sequence
  ENSG00000149557_45 (sequence is synthesized)
cccaggattcctaaataacagagaagtttgtagtgtaggaagaatctagaagttgggatggagagaaatgtgggaaagtcttacttttaaagagacattccctaaagaggggtaagaagt

SEQ ID NO: 417429 - DNA, 120 bp, Artificial Sequence
  ENSG00000149557_46 (sequence is synthesized)
tctgaaacagtgacgtaccagtgaccatgaatgtttcagagaagtatctgaacacagtcattccttacgagaagaaagcctctcctccctcagtggaagacctgcagatgctgacaaaca

SEQ ID NO: 417430 - DNA, 120 bp, Artificial Sequence
  ENSG00000149557_47 (sequence is synthesized)
gagctctagtgttctaggacatgggcaagacttaaaactcaacactgcttgtaggtctaagaattaagttgttttaaggatgaaatgcattaagagggagtccatttgatgatagatccc

SEQ ID NO: 417431 - DNA, 120 bp, Artificial Sequence
  ENSG00000149557_48 (sequence is synthesized)
atcctagagtttagttaactttccaccacactggatcacctgccaagccattcccactaagactgcctctgcagcttcccagctctggttggaacccatgctgtggctttttgttggctc

SEQ ID NO: 417432 - DNA, 120 bp, Artificial Sequence
  ENSG00000149557_49 (sequence is synthesized)
agtaatttccctgtgacatagcttgcatttctggttattaagacagcattcacaacttttatcaagcgcctgctatgtgctaagctctgttgttaagccctcaggtgcaaaggtgaaaag

SEQ ID NO: 417433 - DNA, 120 bp, Artificial Sequence
  ENSG00000149557_50 (sequence is synthesized)
tcctgacccctgtcctcatggagtgtataatctaatagacatggctggcacgtgaacagaaagtttgagatggtggaatgagtgtacatgaaagtgtatatgttttaaacatatttgtag

SEQ ID NO: 417434 - DNA, 120 bp, Artificial Sequence
  ENSG00000149557_51 (sequence is synthesized)
ctgaattctaagtgctagaattctagaactctagaattctagagagtctagagaaggggaagagattttagcagcatcgatcccagtcctcttgttttatggcagtgagaactatggcct

SEQ ID NO: 417435 - DNA, 120 bp, Artificial Sequence
  ENSG00000149557_52 (sequence is synthesized)
tgttttatggcagtgagaactatggcctggagattcaaggcatttttccaaagccacacacactgtcagtggcaaagccaagactaaaatgtgagcttctggccgggcgcggtggctcac

SEQ ID NO: 417436 - DNA, 120 bp, Artificial Sequence
  ENSG00000149557_53 (sequence is synthesized)
aaagtgagcttcttagctttgatctagagctctggcactcaccacctcaggcttccttgagactcctttgacagcccactaggccctgatgctggttttgttgtaggagcacctgacatc

SEQ ID NO: 417437 - DNA, 120 bp, Artificial Sequence
  ENSG00000149557_54 (sequence is synthesized)
tgggctggccgaggaggaagcacctgctcggggccaggctctgggctgtgtgctttgtacatggctaatagaaccctgactgcctcagagcagagccttgcagatctaggtggtcagcaa

SEQ ID NO: 417438 - DNA, 120 bp, Artificial Sequence
  ENSG00000149557_55 (sequence is synthesized)
tacctttcttactcggcatcaggagagaagtttgcatttttgagaaaagaacaaggtagtcgagcaaaatttaaatgttaaaactaaccaaagaacaagactaaggcagaataagcagaa

SEQ ID NO: 417439 - DNA, 120 bp, Artificial Sequence
  ENSG00000149557_56 (sequence is synthesized)
gatcaggtataagtatctctccaggttatcgggaccttttgttcttttgatggagaaaaagtccaagagaacacacttgccacatccatttaaggcagaagaaagatatgtggtcatgtg

SEQ ID NO: 417440 - DNA, 120 bp, Artificial Sequence
  ENSG00000149557_57 (sequence is synthesized)
tccatttaaggcagaagaaagatatgtggtcatgtggtgcctgtgctcatgactcagagtattttttgtttcttttttttctttatatatatatacttttgagacagagtcttgctctgt

SEQ ID NO: 417441 - DNA, 120 bp, Artificial Sequence
  ENSG00000149557_58 (sequence is synthesized)
aaggcagatgatctcagcctggcacacacagaagcctctctcctctcccggcccagctcttccttcctccaggcggggccaggccacagatgtgtgttaatgagagcttctctttgttta

SEQ ID NO: 417442 - DNA, 120 bp, Artificial Sequence
  ENSG00000149557_59 (sequence is synthesized)
ggtttgggatgctctgacagacaattacatcccttcactctcagaagactggagggatccaaacatcgaggctctgaatggcaactgctctgacactgagacttatagcatccatagaga

SEQ ID NO: 417443 - DNA, 120 bp, Artificial Sequence
  ENSG00000149557_60 (sequence is synthesized)
ctgaggagaactttcttaaattgaaaccttagaggaatgaaggttttcctagatacaaaatggaatttcaggagcacagtaaatttcagggtctgtctatcttaagctttctttatatca

SEQ ID NO: 417444 - DNA, 120 bp, Artificial Sequence
  ENSG00000149557_61 (sequence is synthesized)
gtggaaatccagcgagatattagaaataaaggccagaaaaaattaattaaccatgatggatgaatctatgttattggactaatttgcttcaagaaacaccagaattttgaaaatcccgaa

SEQ ID NO: 417445 - DNA, 120 bp, Artificial Sequence
  ENSG00000149557_62 (sequence is synthesized)
tttttgacagcccctcaggcctggagagttatctacagatgttaggatatgtccacataagaaagcatctaaactgaactgagagcacagcgggctaccctggacaaagtaaaggtggaa

SEQ ID NO: 417446 - DNA, 120 bp, Artificial Sequence
  ENSG00000149557_63 (sequence is synthesized)
tgggtgcctccaacctccaaccctgcccgtttcagtgccctaccaaccctgcaggggactcatcaacgtttaccgagcagtggtggtgagcagcacactgtgacagacagggggtcagaa

SEQ ID NO: 417447 - DNA, 120 bp, Artificial Sequence
  ENSG00000149557_64 (sequence is synthesized)
agggagaagatatcacctatctcctccactcccccaaagggctcacagtctaacccaggaagacagtgtgtacattaggaaataattgaatttggcttgtgttctctgtaggcaagacct

SEQ ID NO: 417448 - DNA, 120 bp, Artificial Sequence
  ENSG00000149557_65 (sequence is synthesized)
taaagaaagtggagtgagggtatttcgtgttgggagtcttgagatgggcctcagaattctgggtccaaatccctccttgtgtcccaggttccagtcctgactggtctctttagggcgtgc

SEQ ID NO: 417449 - DNA, 120 bp, Artificial Sequence
  ENSG00000149557_66 (sequence is synthesized)
gcatggggaaaaataacctgccacaatttgagaacacacacacagactgaatgacacagggggaatcctacagctgagctagacagatgaagatgcatctggctcatttaacaggtgaga

SEQ ID NO: 417450 - DNA, 120 bp, Artificial Sequence
  ENSG00000149557_67 (sequence is synthesized)
aggtgccgtcgcgggggttgactttagttaggacccgactcactgctgggggtggggtctggtgggggtggtaaggaggccccgggattctctgacaggacggtctggggtcgccgcagc

SEQ ID NO: 417451 - DNA, 120 bp, Artificial Sequence
  ENSG00000149557_68 (sequence is synthesized)
tcccctcacctggtcccattctgggattagaaaggaacaacgggaggccgtcgccttcctgcccagcccttcagggagcgcagctgggacgccgcgccaggccctggagatgtgggatga

SEQ ID NO: 417452 - DNA, 120 bp, Artificial Sequence
  ENSG00000149564_0 (sequence is synthesized)
agacttgggctggagccgccctgggtgtcagcggctcggctcccgcgcacgctccggccgtcgcgcagcctcggcacctgcaggtccgtgcgtcccgcggctggcgcccctgactccgtc

SEQ ID NO: 417453 - DNA, 120 bp, Artificial Sequence
  ENSG00000149564_1 (sequence is synthesized)
ccggccagggagggccatgatttccctcccggggcccctggtgaccaacttgctgcggtttttgttcctggggctgagtgccctcgcgcccccctcgcgggcccagctgcaactgcactt

SEQ ID NO: 417454 - DNA, 120 bp, Artificial Sequence
  ENSG00000149564_2 (sequence is synthesized)
gcccgccaaccggttgcaggcggtggagggaggggaagtggtgcttccagcgtggtacaccttgcacggggaggtgtcttcatcccagccatgggaggtgccctttgtgatgtggttctt

SEQ ID NO: 417455 - DNA, 120 bp, Artificial Sequence
  ENSG00000149564_3 (sequence is synthesized)
caaacagaaagaaaaggaggatcaggtgttgtcctacatcaatggggtcacaacaagcaaacctggagtatccttggtctactccatgccctcccggaacctgtccctgcggctggaggg

SEQ ID NO: 417456 - DNA, 120 bp, Artificial Sequence
  ENSG00000149564_4 (sequence is synthesized)
tctccaggagaaagactctggcccctacagctgctccgtgaatgtgcaagacaaacaaggcaaatctaggggccacagcatcaaaaccttagaactcaatgtactggttcctccagctcc

SEQ ID NO: 417457 - DNA, 120 bp, Artificial Sequence
  ENSG00000149564_5 (sequence is synthesized)
tccatcctgccgtctccagggtgtgccccatgtgggggcaaacgtgaccctgagctgccagtctccaaggagtaagcccgctgtccaataccagtgggatcggcagcttccatccttcca

SEQ ID NO: 417458 - DNA, 120 bp, Artificial Sequence
  ENSG00000149564_6 (sequence is synthesized)
gactttctttgcaccagcattagatgtcatccgtgggtctttaagcctcaccaacctttcgtcttccatggctggagtctatgtctgcaaggcccacaatgaggtgggcactgcccaatg

SEQ ID NO: 417459 - DNA, 120 bp, Artificial Sequence
  ENSG00000149564_7 (sequence is synthesized)
ctggagctgcagtggttgctggagctgttgtgggtaccctggttggactggggttgctggctgggctggtcctcttgtaccaccgccggggcaaggccctggaggagccagccaatgata

SEQ ID NO: 417460 - DNA, 120 bp, Artificial Sequence
  ENSG00000149564_8 (sequence is synthesized)
tcaaggaggatgccattgctccccggaccctgccctggcccaagagctcagacacaatctccaagaatgggaccctttcctctgtcacctccgcacgagccctccggccaccccatggcc

SEQ ID NO: 417461 - DNA, 120 bp, Artificial Sequence
  ENSG00000149564_9 (sequence is synthesized)
ctcccaggcctggtgcattgacccccacgcccagtctctccagccaggccctgccctcaccaagactgcccacgacagatggggcccaccctcaaccaatatcccccatccctggtgggg

SEQ ID NO: 417462 - DNA, 120 bp, Artificial Sequence
  ENSG00000149564_10 (sequence is synthesized)
tttcttcctctggcttgagccgcatgggtgctgtgcctgtgatggtgcctgcccagagtcaagctggctctctggtatgatgaccccaccactcattggctaaaggatttggggtctctc

SEQ ID NO: 417463 - DNA, 120 bp, Artificial Sequence
  ENSG00000149564_11 (sequence is synthesized)
cttcctataagggtcacctctagcacagaggcctgagtcatgggaaagagtcacactcctgacccttagtactctgcccccacctctctttactgtgggaaaaccatctcagtaagacct

SEQ ID NO: 417464 - DNA, 120 bp, Artificial Sequence
  ENSG00000149564_12 (sequence is synthesized)
aagtgtccaggagacagaaggagaagaggaagtggatctggaattgggaggagcctccacccacccctgactcctccttatgaagccagctgctgaaattagctactcaccaagagtgag

SEQ ID NO: 417465 - DNA, 120 bp, Artificial Sequence
  ENSG00000149564_13 (sequence is synthesized)
gggcagagacttccagtcactgagtctcccaggcccccttgatctgtaccccacccctatctaacaccacccttggctcccactccagctccctgtattgatataacctgtcaggctggc

SEQ ID NO: 417466 - DNA, 120 bp, Artificial Sequence
  ENSG00000149564_14 (sequence is synthesized)
ttggttaggttttactggggcagaggatagggaatctcttattaaaactaacatgaaatatgtgttgttttcatttgcaaatttaaataaagatacataatgtttgtatgagataagaaa

SEQ ID NO: 417467 - DNA, 120 bp, Artificial Sequence
  ENSG00000149564_15 (sequence is synthesized)
tttgacaccgggcttacatccaaatacagatttaccccagaagagaatgaaacaatgttcagaacccctgaaaactgtgttcaaggaagtcagctggatttttttgagacaggggtctta

SEQ ID NO: 417468 - DNA, 88 bp, Artificial Sequence
  ENSG00000149564_16 (sequence is synthesized)
tgttgcccaggctggaatgcaatggtgcagtcttcgctcactacagcctctaccgctcctgctcaagtaatccttagcacacgccacc

SEQ ID NO: 417469 - DNA, 120 bp, Artificial Sequence
  ENSG00000149564_17 (sequence is synthesized)
aggcatgaggcaacgtgcccagcctcatttgatacttttaaaatacatttttaatatttttttcctccaagatgccttccccattgtgtaagtttcaggtcttacaaacctggatccacc

SEQ ID NO: 417470 - DNA, 120 bp, Artificial Sequence
  ENSG00000149564_18 (sequence is synthesized)
ccagcagtctgagttgcatatatacatacctcctatttacatgtccctcctcccactattatgtcacctttctaaacaccgcaattgggagatgagacaatgcgcaggaacgaagaactg

SEQ ID NO: 417471 - DNA, 120 bp, Artificial Sequence
  ENSG00000149564_19 (sequence is synthesized)
ttctggtgaagaggacccaggggcagtgagagggggctagggacaaaaggtgaatggggagctggttcaggttagaagaatgggtgcatgtgaggggcatttggagaatgcgagctgggg

SEQ ID NO: 417472 - DNA, 120 bp, Artificial Sequence
  ENSG00000149571_0 (sequence is synthesized)
agagaatggatcttctccgagtggggacattgctgacaatcccggcttcccgaggcggctaagaacaggcagtttgtgtcggctggctgcagatacccagaggcacaaagagaccgaagc

SEQ ID NO: 417473 - DNA, 120 bp, Artificial Sequence
  ENSG00000149571_1 (sequence is synthesized)
cacccggagggacccacggacggacagatggtaggcgcgaacccgagaggaccggcggaggctgagcaccgagagccgccaaggaagagaaactaaccacagccaagttaccccgccggc

SEQ ID NO: 417474 - DNA, 120 bp, Artificial Sequence
  ENSG00000149571_2 (sequence is synthesized)
tttccttcgctgcgctaaggaatgaaacccttccagctcgatctgctcttcgtctgcttcttcctcttcagtcaagagctgggcctccagaagagaggatgctgtctggtgctgggctac

SEQ ID NO: 417475 - DNA, 120 bp, Artificial Sequence
  ENSG00000149571_3 (sequence is synthesized)
atggccaaggacaagtttcggagaatgaatgaaggccaagtctattccttcagccagcagccccaggaccaggtggtggtgtcgggacagccagtgacgctactttgcgccatccccgaa

SEQ ID NO: 417476 - DNA, 120 bp, Artificial Sequence
  ENSG00000149571_4 (sequence is synthesized)
tacgatggcttcgttctgtggatcaaggacggcttggctctgggtgtgggcagggacctctcaagttacccacagtacctggtggtagggaaccacctgtcaggggagcaccacctgaag

SEQ ID NO: 417477 - DNA, 120 bp, Artificial Sequence
  ENSG00000149571_5 (sequence is synthesized)
atcctgagggcagagctgcaagacgatgcggtgtacgagtgccaggccatccaggccgccatccgctcccgccccgcacgcctcacagtcctggtgccgcctgatgaccccgtcatcctg

SEQ ID NO: 417478 - DNA, 120 bp, Artificial Sequence
  ENSG00000149571_6 (sequence is synthesized)
gggggccctgtgatcagcctgcgtgcgggggaccctctcaacctcacctgccacgcagacaatgccaagcctgcagcctccatcatctggttgcgaaagggagaggtcatcaatggggcc

SEQ ID NO: 417479 - DNA, 120 bp, Artificial Sequence
  ENSG00000149571_7 (sequence is synthesized)
acctactccaagaccctgcttcgggacggcaagcgggagagcatcgtcagcaccctcttcatctcccctggtgacgtggagaatggccagagcatcgtgtgtcgtgccaccaacaaagcc

SEQ ID NO: 417480 - DNA, 120 bp, Artificial Sequence
  ENSG00000149571_8 (sequence is synthesized)
atccccggaggaaaggagacgtcggtcaccattgacatccagcaccctccactggtcaacctctcggtggagccacagccagtgctggaggacaacgtcgtcactttccactgctctgca

SEQ ID NO: 417481 - DNA, 120 bp, Artificial Sequence
  ENSG00000149571_9 (sequence is synthesized)
aaggccaacccagctgtcacccagtacaggtgggccaagcggggccagatcatcaaggaggcatctggagaggtgtacaggaccacagtggactacacgtacttctcagagcccgtctcc

SEQ ID NO: 417482 - DNA, 120 bp, Artificial Sequence
  ENSG00000149571_10 (sequence is synthesized)
tgtgaggtgaccaacgccctgggcagcaccaacctcagccgcacggttgacgtctactttgggccccggatgaccacagaaccccaatccttgctcgtggatctgggctctgatgccatc

SEQ ID NO: 417483 - DNA, 120 bp, Artificial Sequence
  ENSG00000149571_11 (sequence is synthesized)
ttcagctgcgcctggaccggcaacccatccctgaccatcgtctggatgaagcggggctccggagtggtcctgagcaatgagaagaccctgaccctcaaatccgtgcgccaggaggacgcg

SEQ ID NO: 417484 - DNA, 120 bp, Artificial Sequence
  ENSG00000149571_12 (sequence is synthesized)
ggcaagtacgtgtgccgggctgtggtgccccgtgtgggagccggggagagagaggtgaccctgaccgtcaatggaccccccatcatctccagcacccagacccagcacgccctccacggc

SEQ ID NO: 417485 - DNA, 120 bp, Artificial Sequence
  ENSG00000149571_13 (sequence is synthesized)
gagaagggccagatcaagtgcttcatccggagcacgccgccgccggaccgcatcgcctggtcctggaaggagaacgttctggagtcgggcacatcggggcgctatacggtggagaccatc

SEQ ID NO: 417486 - DNA, 120 bp, Artificial Sequence
  ENSG00000149571_14 (sequence is synthesized)
agcaccgaggagggcgtcatctccaccctgaccatcagcaacatcgtgcgggccgacttccagaccatctacaactgcacggcctggaacagcttcggctccgacactgagatcatccgg

SEQ ID NO: 417487 - DNA, 120 bp, Artificial Sequence
  ENSG00000149571_15 (sequence is synthesized)
ccttcctcgtccttatggcaaccatcgtggcgttctgctgtgcccgttcccagagaaatctcaaaggtgttgtgtcagccaaaaatgatatccgagtggaaattgtccacaaggaaccag

SEQ ID NO: 417488 - DNA, 120 bp, Artificial Sequence
  ENSG00000149571_16 (sequence is synthesized)
cctctggtcgggagggtgaggagcactccaccatcaagcagctgatgatggaccggggtgaattccagcaagactcagtcctgaaacagctggaggtcctcaaagaagaggagaaagagt

SEQ ID NO: 417489 - DNA, 120 bp, Artificial Sequence
  ENSG00000149571_17 (sequence is synthesized)
ttcagaacctgaaggaccccaccaatggctactacagcgtcaacaccttcaaagagcaccactcaaccccgaccatctccctctccagctgccagcccgacctgcgtcctgcgggcaagc

SEQ ID NO: 417490 - DNA, 120 bp, Artificial Sequence
  ENSG00000149571_18 (sequence is synthesized)
agcgtgtgcccacaggcatgtccttcaccaacatctacagcaccctgagcggccagggccgcctctacgactacgggcagcggtttgtgctgggcatgggcagctcgtccatcgagcttt

SEQ ID NO: 417491 - DNA, 120 bp, Artificial Sequence
  ENSG00000149571_19 (sequence is synthesized)
gtgagcgggagttccagagaggctccctcagcgacagcagctccttcctggacacgcagtgtgacagcagcgtcagcagcagcggcaagcaggatggctatgtgcagttcgacaaggcca

SEQ ID NO: 417492 - DNA, 120 bp, Artificial Sequence
  ENSG00000149571_20 (sequence is synthesized)
gcaaggcttctgcttcctcctcccaccactcccagtcctcgtcccagaactctgaccccagtcgacccctgcagcggcggatgcagactcacgtctaaggatcacacaccgcgggtgggg

SEQ ID NO: 417493 - DNA, 120 bp, Artificial Sequence
  ENSG00000149571_21 (sequence is synthesized)
acgggccagggaagaggtcagggcacgttctggttgtccagggacgaggggtactttgcagaggacaccagaattggccacttccaggacagcctcccagcgcctctgccactgccttcc

SEQ ID NO: 417494 - DNA, 120 bp, Artificial Sequence
  ENSG00000149571_22 (sequence is synthesized)
ttcgaagctctgatcaagcacaaatctgggtccccaggtgctgtgtgccagaggtgggcgggtggggagacagacagaggctgcggctgagtgcgctgtgcttagtgctggacacccgtg

SEQ ID NO: 417495 - DNA, 120 bp, Artificial Sequence
  ENSG00000149571_23 (sequence is synthesized)
tccccggccctttcctggaggcccctctaccacctgctctgcccacaggcacaagtggcagctataactctgctttcatgaaactgcggtccactctctggtctctctgtgggctctacc

SEQ ID NO: 417496 - DNA, 120 bp, Artificial Sequence
  ENSG00000149571_24 (sequence is synthesized)
cctcgctgaccagaagctctacctacccctgtgcctgtgctcccatacagccctggggagaaggggatgacgtcttcccagcactgagctgccccagaaaccccggctccccactgctgc

SEQ ID NO: 417497 - DNA, 120 bp, Artificial Sequence
  ENSG00000149571_25 (sequence is synthesized)
tcatagcccataccctggaggctgacaagccagaaatggccttggctaaaggagcctctctctcaccaggctggccgggagcccacccccaatttgtttggtgttttgtgtccatactct

SEQ ID NO: 417498 - DNA, 120 bp, Artificial Sequence
  ENSG00000149571_26 (sequence is synthesized)
tgcagttctgtccttggacttgatgccgctgaactctgcggtgggaccggtccggtcagagcctggtgtactggggggagggagggaggagggagcctgtgctgacggagcacctcgccg

SEQ ID NO: 417499 - DNA, 120 bp, Artificial Sequence
  ENSG00000149571_27 (sequence is synthesized)
ggtgtgcccctcctgggctgtgtgaccccagcctccccacccacctcctgctttgtgtactcctcccctccccctcagcacaatcggagttcatataagaagtgcgggagcttctctggt

SEQ ID NO: 417500 - DNA, 120 bp, Artificial Sequence
  ENSG00000149571_28 (sequence is synthesized)
cagggttctctgaacacttatggagagagtgcttcctgggaagtgtggcgtttgaaggggctggagggcaggtctttaagatggcgagactgcccttctcagctgataaacacaagaacg

SEQ ID NO: 417501 - DNA, 120 bp, Artificial Sequence
  ENSG00000149571_29 (sequence is synthesized)
gcgatcctgtcttcagtaaggctccacgagaagagaggaagtatatctacacctcaaccctcctagtcaccacctgaaataaatgttagggacactactccaacatgtttgttctgttct

SEQ ID NO: 417502 - DNA, 120 bp, Artificial Sequence
  ENSG00000149571_30 (sequence is synthesized)
tttgttcctacaaagccacaggaagaacccaagagctcatagaatgcgttgggaacccaaggttctctgccctcctttgattcaatcttcctagacaataaaggcagttgatagctctga

SEQ ID NO: 417503 - DNA, 76 bp, Artificial Sequence
  ENSG00000149571_31 (sequence is synthesized)
gggcctccagaagagaggatgctgtctggtgctgggctacatggccaaggacaagtttcggagaatgaatgaagac

SEQ ID NO: 417504 - DNA, 61 bp, Artificial Sequence
  ENSG00000149571_32 (sequence is synthesized)
tcacttggctgattttttgtatgtttagtagaaacagggtttcgccatgttgggcaggctg

SEQ ID NO: 417505 - DNA, 120 bp, Artificial Sequence
  ENSG00000149571_33 (sequence is synthesized)
caaagtgctgggattacaggcgtgcgactaatattcttaacgtaaccctgtggcttaggagtaggagaaatctagattcaaatcccgggtgtagtcagggcaggcttagacccctatcat

SEQ ID NO: 417506 - DNA, 120 bp, Artificial Sequence
  ENSG00000149571_34 (sequence is synthesized)
aaaggtcatctggttccatatccctgccaagtaccagtgtgtgtaaagactgtgaacacggcggaatgctcatttattcaccaaccatgtgtccagtacccgctctgtgcctggcgctgt

SEQ ID NO: 417507 - DNA, 120 bp, Artificial Sequence
  ENSG00000149571_35 (sequence is synthesized)
gcatgtaaaaacacagtccctgcccccaaggataccactgtcttgcggggagagacaaacacgtcagcaactacaatacaatgtcgcagttgcggtaaccgggtatgaataagtagctat

SEQ ID NO: 417508 - DNA, 120 bp, Artificial Sequence
  ENSG00000149571_36 (sequence is synthesized)
tggaaacagagaaggagaatccaatcacactgtaggccaggagaggagtgtccagcatggcttctggagaaataagccctgtgagatgttttattctaagaggctgttgcaacctatgct

SEQ ID NO: 417509 - DNA, 120 bp, Artificial Sequence
  ENSG00000149571_37 (sequence is synthesized)
tgaatccctccaaagacaagaaacttgcagcctgccgaggcggtgggcagctcctcagccaggctctccaaacgccacaccgcttccaccccaggaggctgcagttttcgcattctagct

SEQ ID NO: 417510 - DNA, 120 bp, Artificial Sequence
  ENSG00000149571_38 (sequence is synthesized)
ttactgatgacgaggggacccagtgacttggacagcagccactggcaagatcctggggtctccactatgtcaactgcaccggggaggcctcctttcttctctctgcttcttccttccatc

SEQ ID NO: 417511 - DNA, 120 bp, Artificial Sequence
  ENSG00000149571_39 (sequence is synthesized)
cccagccagcctcaaaggcttcatcacagaattctttgagtgctgagaccctcccccagccctctccccagggtctgaagaaagccccagagaagttggaataaacgaaggcgcttaatg

SEQ ID NO: 417512 - DNA, 120 bp, Artificial Sequence
  ENSG00000149571_40 (sequence is synthesized)
gaagtacgggagggagatccgggatctcagggagggggacagagaaaaaggccaggcttaggctgccccggagagcaagtaagcaggagtgcaatgaacaggggtcctaacagtgctgtg

SEQ ID NO: 417513 - DNA, 120 bp, Artificial Sequence
  ENSG00000149571_41 (sequence is synthesized)
agctcctggggcagggagtgggtctgatgcatcggtgtatgtgagcctgggcaacatggcgcctggcagagtgggcgctaggctgaggttgacctggactagactgaacttcatctgcag

SEQ ID NO: 417514 - DNA, 120 bp, Artificial Sequence
  ENSG00000149571_42 (sequence is synthesized)
ggcagccagcattttggattgaacacatagctctttcagtcaggaactgtacagaaagatagggggaaaagcggtttgtggtttgatccttgctctacaagagctgttagtctagagaga

SEQ ID NO: 417515 - DNA, 120 bp, Artificial Sequence
  ENSG00000149571_43 (sequence is synthesized)
ccccatctctacaacaaaataaaaataaagagctgctagtctcaccagaaaagcaggtcactcacacagctgtgggggagtgggtggggaagcaataaaggaattgctttgagaaaactt

SEQ ID NO: 417516 - DNA, 120 bp, Artificial Sequence
  ENSG00000149571_44 (sequence is synthesized)
ctaacactcaccaccttttattacagttatttgtatcttctgggggttctgacttagaagcattcgctcatgatcccttgagaggtttatgactgaatgcctaatttatctctgagtcct

SEQ ID NO: 417517 - DNA, 120 bp, Artificial Sequence
  ENSG00000149571_45 (sequence is synthesized)
ctaccttgcactttaccttgcacatacaggccttcggcaaatgtttgctgaatgcttggattaatgaatacacttctgaacccacccaagagggcgccagcagggacgtgcccttcccgg

SEQ ID NO: 417518 - DNA, 120 bp, Artificial Sequence
  ENSG00000149571_46 (sequence is synthesized)
agtttccagttcctttgcaaaggcagggcgtgcatgtttttgtgcacatgcatgtggatagtcatccttaacttcactgttaaacaggacatcgtgtggacaaaaagtcacagctccact

SEQ ID NO: 417519 - DNA, 120 bp, Artificial Sequence
  ENSG00000149571_47 (sequence is synthesized)
ccaagctcaagatgccttttggtcaataatggtgacaaaagctgaatttttccctatttagggaaaagaaagaacacagccttttcccccactgtccgttttgcatagatctcctttttc

SEQ ID NO: 417520 - DNA, 120 bp, Artificial Sequence
  ENSG00000149571_48 (sequence is synthesized)
cgagtgtttcctctttaattatgacctgtctcccctccctctcccctcgcctcagcttcagtgaaaggagtccttctgtcactcgtcactagctcgctcgctcactgtgggaggagcccg

SEQ ID NO: 417521 - DNA, 120 bp, Artificial Sequence
  ENSG00000149571_49 (sequence is synthesized)
cttgcggtgccataaagtttttagagccgtgcgctggaatgagcaggttcaggctgagatgaattatccagggcttttatcaaagggagtcaataaaaacctgaaggagcttgccccacc

SEQ ID NO: 417522 - DNA, 120 bp, Artificial Sequence
  ENSG00000149571_50 (sequence is synthesized)
cgcgcttctccatcaggtggagccgtcggctcctcgccgcctccctcctcctccctcccccggagcgaaccgcgcgcaggcagccttgcagcgccaggaggctaaccgagcccccggagg

SEQ ID NO: 417523 - DNA, 120 bp, Artificial Sequence
  ENSG00000149571_51 (sequence is synthesized)
aggtgaggccgcgggcagccgggcggagatggcggggccgccgtcgaggctggcgccagagcccgaccggctgtgggtcctgcagcttcagtgaaaggagtccttctgtcactcgtcact

SEQ ID NO: 417524 - DNA, 120 bp, Artificial Sequence
  ENSG00000149571_52 (sequence is synthesized)
atgtcacagtgccgggccctgtgctctggaagtaggaaccagggggccgcgttttccccctaactccatctgctttcttccctgtgccttcctttctgaaatgtattcgtttctatggaa

SEQ ID NO: 417525 - DNA, 120 bp, Artificial Sequence
  ENSG00000149573_0 (sequence is synthesized)
gtcacaggcacaggtgaggaactcaactcaaactcctctctctgggaaaacgcggtgcttgctcctcccggagtggccttggcagggtgttggagccctcggtctgccccgtccggtctc

SEQ ID NO: 417526 - DNA, 120 bp, Artificial Sequence
  ENSG00000149573_1 (sequence is synthesized)
tggggccaaggctgggtttccctcatgtatggcaagagctctactcgtgcggtgcttcttctccttggcatacagctcacagctctttggcctatagcagctgtggaaatttatacctcc

SEQ ID NO: 417527 - DNA, 120 bp, Artificial Sequence
  ENSG00000149573_2 (sequence is synthesized)
cgggtgctggaggctgttaatgggacagatgctcggttaaaatgcactttctccagctttgcccctgtgggtgatgctctaacagtgacctggaattttcgtcctctagacgggggacct

SEQ ID NO: 417528 - DNA, 120 bp, Artificial Sequence
  ENSG00000149573_3 (sequence is synthesized)
gagcagtttgtattctactaccacatagatcccttccaacccatgagtgggcggtttaaggaccgggtgtcttgggatgggaatcctgagcggtacgatgcctccatccttctctggaaa

SEQ ID NO: 417529 - DNA, 120 bp, Artificial Sequence
  ENSG00000149573_4 (sequence is synthesized)
ctgcagttcgacgacaatgggacatacacctgccaggtgaagaacccacctgatgttgatggggtgataggggagatccggctcagcgtcgtgcacactgtacgcttctctgagatccac

SEQ ID NO: 417530 - DNA, 120 bp, Artificial Sequence
  ENSG00000149573_5 (sequence is synthesized)
ttcctggctctggccattggctctgcctgtgcactgatgatcataatagtaattgtagtggtcctcttccagcattaccggaaaaagcgatgggccgaaagagctcataaagtggtggag

SEQ ID NO: 417531 - DNA, 120 bp, Artificial Sequence
  ENSG00000149573_6 (sequence is synthesized)
ataaaatcaaaagaagaggaaaggctcaaccaagagaaaaaggtctctgtttatttagaagacacagactaacaattttagatggaagctgagatgatttccaagaacaagaaccctagt

SEQ ID NO: 417532 - DNA, 120 bp, Artificial Sequence
  ENSG00000149573_7 (sequence is synthesized)
atttcttgaagttaatggaaacttttctttggcttttccagttgtgacccgttttccaaccagttctgcagcatattagattctagacaagcaacacccctctggagccagcacagtgct

SEQ ID NO: 417533 - DNA, 120 bp, Artificial Sequence
  ENSG00000149573_8 (sequence is synthesized)
cctccatatcaccagtcatacacagcctcattattaaggtcttatttaatttcagagtgtaaattttttcaagtgctcattaggttttataaacaagaagctacatttttgcccttaaga

SEQ ID NO: 417534 - DNA, 120 bp, Artificial Sequence
  ENSG00000149573_9 (sequence is synthesized)
cactacttacagtgttatgacttgtatacacatatattggtatcaaaagggataaaagccaatttgtctgttacatttcctttcacgtatttcttttagcagcacttctgctactaaagt

SEQ ID NO: 417535 - DNA, 120 bp, Artificial Sequence
  ENSG00000149573_10 (sequence is synthesized)
atgacatttttatttttatgtctctccttaactatgagacacatcttgttttactgaatttctttcaatattccaggtgatagatttttgttgttttgttaattaatccaagatttacaa

SEQ ID NO: 417536 - DNA, 120 bp, Artificial Sequence
  ENSG00000149573_11 (sequence is synthesized)
tagcacaacgctaaatcacacagtaactacaaaaggttacatagatatgaaaagattggcagaggccattgcaggatgaatcacttgtcacttttcttctgtgctgggaaaaataatcaa

SEQ ID NO: 417537 - DNA, 120 bp, Artificial Sequence
  ENSG00000149573_12 (sequence is synthesized)
caatgtgggtctttcatgagcagtgacggatagtttagcttactatgtttcccccccaattcaatgatctataacaacagagcaaagtctatgctcatttgcagactggaatcattaagt

SEQ ID NO: 417538 - DNA, 120 bp, Artificial Sequence
  ENSG00000149573_13 (sequence is synthesized)
aatttaataaaaaaattgtgaaacagcatattacaagtttgaaaattcagggctggtgaaaaaaatcaactctaaatgatgataattttgtacagttttatataaaactctgagaactag

SEQ ID NO: 417539 - DNA, 120 bp, Artificial Sequence
  ENSG00000149573_14 (sequence is synthesized)
aagaaattattaactttttttcttttttaattctaattcacttgtttattttgggggaggaagactttggtatggagcaaagaaataccaaaactactttaaatggaataaaaccaactt

SEQ ID NO: 417540 - DNA, 120 bp, Artificial Sequence
  ENSG00000149573_15 (sequence is synthesized)
tattctttttttcccccatactggtagataaagcaaactttataagtgggctattgaaagaaaagttacaagcttaagatacagaagcatttgttcaaaggatagaaagcatctaaaagt

SEQ ID NO: 417541 - DNA, 120 bp, Artificial Sequence
  ENSG00000149573_16 (sequence is synthesized)
ttaggctcaagatcaatctttacagattgatattttcagtttttaatcgactggactgcagatgttttttcttttaacaaactggaattttcaaacagattatctgtatttaaatgtata

SEQ ID NO: 417542 - DNA, 120 bp, Artificial Sequence
  ENSG00000149573_17 (sequence is synthesized)
gaccttgatatttttccaatactattttttaaaaaattgtatgatttacatatgaacctcagttctgaaattcattacatatctgtctcattctgccttttatactgtctaaaaaagcaa

SEQ ID NO: 417543 - DNA, 120 bp, Artificial Sequence
  ENSG00000149573_18 (sequence is synthesized)
agttttaaagtgcaattttaaaactgtaaattacatctgaaggctatatatcctttaatcacattttatattttttcttcacaattctaacctttgaaaatattataactggatatttct

SEQ ID NO: 417544 - DNA, 120 bp, Artificial Sequence
  ENSG00000149573_19 (sequence is synthesized)
tcaaacagatgtcctggatgatggtccataagaataatgaagaagtagttaaaaatgtatggacagtttttccggcaaaatttgtagcttatgtcttggctaaatagtcaaggggtaata

SEQ ID NO: 417545 - DNA, 120 bp, Artificial Sequence
  ENSG00000149573_20 (sequence is synthesized)
tgggcctgttgtttagtgtctccttcctaaagagcacttttgtattgtaatttattttttattatgctttaaacactatgtaaataaacctttagtaataaagaattatcagttatataa

SEQ ID NO: 417546 - DNA, 120 bp, Artificial Sequence
  ENSG00000149573_21 (sequence is synthesized)
aacagtctgggacatttcagactggcaccacctcctctggctgtttccgaggccatctagaggccagagcccagtcagattaactgaaagtaaagagaggactgcgggagtttgggacct

SEQ ID NO: 417547 - DNA, 120 bp, Artificial Sequence
  ENSG00000149573_22 (sequence is synthesized)
tatttagaagacacagactaacaattttagatggtaaggttcacaaataggttgatttctttcttcagctttctgacatgtccagcccatctctaatgaggactcccagatcatcacttt

SEQ ID NO: 417548 - DNA, 120 bp, Artificial Sequence
  ENSG00000149573_23 (sequence is synthesized)
atggctgttaggtgtttcccatatgaaattagaggagctgggtcagggagacaaaagtcttctattagtcttatggatagctcctccttgagtgtattttgtgcaaaagattaagaagct

SEQ ID NO: 417549 - DNA, 120 bp, Artificial Sequence
  ENSG00000149573_24 (sequence is synthesized)
ggactctactgccattaaagctgagagaatcctaaggttatttgtggcttcggggttatatttattactactactactaataaatattcaacaagtaaataaatcttttttaaatcaaaa

SEQ ID NO: 417550 - DNA, 120 bp, Artificial Sequence
  ENSG00000149573_25 (sequence is synthesized)
gatgacttaggtcaacacaaaactttttattttttttttgaataacaaatataaattagaggtgggatactaatggtaaaataaggtgtctgctttaaaactctggagttcccgaatcag

SEQ ID NO: 417551 - DNA, 120 bp, Artificial Sequence
  ENSG00000149573_26 (sequence is synthesized)
aacccaaactgtattcccttacattctgaaaagtctctaagttcagaggtgtgaatattattaattagatggcaccagtttagctctgtgtaaacttcaatctactcccaagtgcatgta

SEQ ID NO: 417552 - DNA, 120 bp, Artificial Sequence
  ENSG00000149573_27 (sequence is synthesized)
ttaagtaaatcctatataaaagaattcacatttgcaggacagataaatcaggtatgaactagtaactttacaaaagctttcttaattttacaaaatatttccttatgggatttctttact

SEQ ID NO: 417553 - DNA, 120 bp, Artificial Sequence
  ENSG00000149573_28 (sequence is synthesized)
atgtgggggggttgattttacaaaaatgtgctatgtaaagcttttctaaaaaatcccttatgtttaaagtgaagcatacatttgtaaaaaccactgggctaggcagtcagcagggccact

SEQ ID NO: 417554 - DNA, 120 bp, Artificial Sequence
  ENSG00000149573_29 (sequence is synthesized)
atgagtcagggcttaggaaagtctgttgtgctgatagcaggtgttcattaaatgtattttaaaattgagataaaatttacccaccataaaatttacctttttcattttcacaaagttgtg

SEQ ID NO: 417555 - DNA, 120 bp, Artificial Sequence
  ENSG00000149573_30 (sequence is synthesized)
cagcaatcatcactaattgcagaacgtttttaagctccctcccgtaaagaaaccccatatccctagctatcactccctattatcccctcctaccagcccccgacaactactcatctactt

SEQ ID NO: 417556 - DNA, 120 bp, Artificial Sequence
  ENSG00000149573_31 (sequence is synthesized)
tctgtctctatggatttgcttattctggacatttcatttaaatagaatcatacaatatgtggtcttttatgcccagcttctttcacttagcataatgctttcaaggctcatccttgttga

SEQ ID NO: 417557 - DNA, 120 bp, Artificial Sequence
  ENSG00000149573_32 (sequence is synthesized)
tgtattagtatttctttcctttttatgactgcataatattccattgtatgaatataccacatattgtttgtccattcaattgatgggcatttaggttttttctgcttgttggctgttgtg

SEQ ID NO: 417558 - DNA, 120 bp, Artificial Sequence
  ENSG00000149573_33 (sequence is synthesized)
gcagcaagcacaaggttaagctcggaaacaattcttgggacagagactgagaggccgttgaaggggaaagcaagtgacagagctgcagacaggacagttgggtttgctggtgtttcactt

SEQ ID NO: 417559 - DNA, 120 bp, Artificial Sequence
  ENSG00000149573_34 (sequence is synthesized)
actttactttaagtcctactcagatatttattttggaagtgtcagcagaagttctcacaatactacatcccctgttaacccttctttttcttctttttcattgcagctctttggcctata

SEQ ID NO: 417560 - DNA, 120 bp, Artificial Sequence
  ENSG00000149575_0 (sequence is synthesized)
acacactccctctctctctctttttagcagcaacatacaagccggccatattagagagatggaaataaagcttccttaatgttgtatatgtctttgaagtacatccgtgcattttttttt

SEQ ID NO: 417561 - DNA, 120 bp, Artificial Sequence
  ENSG00000149575_1 (sequence is synthesized)
agcatccaaccattcctcccttgtagttctcgccccctcaaatcaccctctcccgtagcccacccgactaacatctcagtctctgaaaatgcacagagatgcctggctacctcgccctgc

SEQ ID NO: 417562 - DNA, 120 bp, Artificial Sequence
  ENSG00000149575_2 (sequence is synthesized)
cttcagcctcacggggctcagtctctttttctctttggtgccaccaggacggagcatggaggtcacagtacctgccaccctcaacgtcctcaatggctctgacgcccgcctgccctgcac

SEQ ID NO: 417563 - DNA, 120 bp, Artificial Sequence
  ENSG00000149575_3 (sequence is synthesized)
cttcaactcctgctacacagtgaaccacaaacagttctccctgaactggacttaccaggagtgcaacaactgctctgaggagatgttcctccagttccgcatgaagatcattaacctgaa

SEQ ID NO: 417564 - DNA, 120 bp, Artificial Sequence
  ENSG00000149575_4 (sequence is synthesized)
gctggagcggtttcaagaccgcgtggagttctcagggaaccccagcaagtacgatgtgtcggtgatgctgagaaacgtgcagccggaggatgaggggatttacaactgctacatcatgaa

SEQ ID NO: 417565 - DNA, 120 bp, Artificial Sequence
  ENSG00000149575_5 (sequence is synthesized)
cccccctgaccgccaccgtggccatggcaagatccatctgcaggtcctcatggaagagccccctgagcgggactccacggtggccgtgattgtgggtgcctccgtcgggggcttcctggc

SEQ ID NO: 417566 - DNA, 120 bp, Artificial Sequence
  ENSG00000149575_6 (sequence is synthesized)
tgtggtcatcttggtgctgatggtggtcaagtgtgtgaggagaaaaaaagagcagaagctgagcacagatgacctgaagaccgaggaggagggcaagacggacggtgaaggcaacccgga

SEQ ID NO: 417567 - DNA, 120 bp, Artificial Sequence
  ENSG00000149575_7 (sequence is synthesized)
tgatggcgccaagtagtgggtggccggccctgcagcctcccgtgtcccgtctcctcccctctccgccctgtacagtgaccctgcctgctcgctcttggtgtgcttcccgtgacctaggac

SEQ ID NO: 417568 - DNA, 120 bp, Artificial Sequence
  ENSG00000149575_8 (sequence is synthesized)
cccagggcccacctggggcctcctgaacccccgacttcgtatctcccaccctgcaccaagagtgacccactctcttccatccgagaaacctgccatgctctgggacgtgtgggccctggg

SEQ ID NO: 417569 - DNA, 120 bp, Artificial Sequence
  ENSG00000149575_9 (sequence is synthesized)
gagaggagagaaagggctcccacctgccagtccctggggggaggcaggaggcacatgtgagggtccccagagagaagggagtgggtgggcaggggtagaggagggggccgctgtccacct

SEQ ID NO: 417570 - DNA, 120 bp, Artificial Sequence
  ENSG00000149575_10 (sequence is synthesized)
gcccagtgcttggcctggcagtggcttcagagaggacctggtggggagggagggctttcctgtgctgacagcgctccctcaggagggccttggcctggcacggctgtgctcctcccctgc

SEQ ID NO: 417571 - DNA, 120 bp, Artificial Sequence
  ENSG00000149575_11 (sequence is synthesized)
tcccagcccagagcagccatcaggctggaggtgacgatgagttcctgaaacttggaggggcatgttaaagggatgactgtgcattccagggcactgacggaaagccagggctgcaggcaa

SEQ ID NO: 417572 - DNA, 120 bp, Artificial Sequence
  ENSG00000149575_12 (sequence is synthesized)
agctggacatgtgccctggcccaggaggccatgttgggccctcgtttccattgctagtggcctccttggggctcccgttggctcctaatcccttaggactgtggatgaggccagactgga

SEQ ID NO: 417573 - DNA, 120 bp, Artificial Sequence
  ENSG00000149575_13 (sequence is synthesized)
agagcagctccaggtagggggccatgtttcccagcggggacccaccaacagaggccagtttcaaagtcagctgaggggctgaggggtggggctccatggtgaatgcaggttgctgcaggc

SEQ ID NO: 417574 - DNA, 120 bp, Artificial Sequence
  ENSG00000149575_14 (sequence is synthesized)
tctgccttctccatggggtaaccaccctcgcctgggcaggggcagccaaggctgggaaatgaggaggccatgcacagggtggggcagctttctttggggcttcagtgagaactctcccag

SEQ ID NO: 417575 - DNA, 120 bp, Artificial Sequence
  ENSG00000149575_15 (sequence is synthesized)
ttgcccttggtggggtttccacctggcttttggctacagagagggaagggaaagcctgaggccggcataaggggaggccttggaacctgagctgccaatgccagccctgtcccatctgca

SEQ ID NO: 417576 - DNA, 120 bp, Artificial Sequence
  ENSG00000149575_16 (sequence is synthesized)
acctgagctgccaatgccagccctgtcccatctgcagccacactactcgctcctctcccaacaactcccttcgtggggacaaaagtgacaattgtaggccaggcacagtggctcacgcct

SEQ ID NO: 417577 - DNA, 90 bp, Artificial Sequence
  ENSG00000149575_17 (sequence is synthesized)
tgaggcaggagaatcgcttgagcccgggaagcagaggttgcagtgaactgagatagtgatagtgccactgcaattcagcctgggtgacat

SEQ ID NO: 417578 - DNA, 120 bp, Artificial Sequence
  ENSG00000149575_18 (sequence is synthesized)
gcaattgtgcggagccaaccatcactgccattacactcacattcaatggaaattgattaggcctgagagaaggagcaagaggcagaaacactgactctgagaccatgaccttggaagatc

SEQ ID NO: 417579 - DNA, 120 bp, Artificial Sequence
  ENSG00000149575_19 (sequence is synthesized)
caagtcactcacttaaaatggggaaactgaggttccaactgacagaaactgagggtcctgccctcttctctggctcctcagtctccagtttgaagcaacagagccatcattttcccagtg

SEQ ID NO: 417580 - DNA, 120 bp, Artificial Sequence
  ENSG00000149575_20 (sequence is synthesized)
ggaggggcctctgtgtcctggtctatgatggggcgagttggaggggtgggcttctctagccctgccccctcccaggagcccagcccctctggccaggactgaggaggagtggagggaagc

SEQ ID NO: 417581 - DNA, 120 bp, Artificial Sequence
  ENSG00000149575_21 (sequence is synthesized)
agggagggagggagcaagtgtgaagggcacagctgctggcaaatgccccattccctgccccagcacttcccagcctttccaggagctctgccccacccctactcaaggagtcaggtgccc

SEQ ID NO: 417582 - DNA, 120 bp, Artificial Sequence
  ENSG00000149575_22 (sequence is synthesized)
agggtagggaataagtctaggaaagggggtggagacaggaccgtgacagtctcagggaccaatccctgcctctgcccatcagattgccaatttggggagacagcaatatcatctgggaga

SEQ ID NO: 417583 - DNA, 120 bp, Artificial Sequence
  ENSG00000149575_23 (sequence is synthesized)
ttcagcttaatttgcttcaattcagcaaccatttattgagcatctattatgtgccaggcactgtgccgggcactggggatatacacaaagccataagcactggggactgccaggttggca

SEQ ID NO: 417584 - DNA, 120 bp, Artificial Sequence
  ENSG00000149575_24 (sequence is synthesized)
ctgtagggaccaagattaactttttggtgcatctaattccacctctgcaagacactgcttccaaggctacagttggggaagatgaagagattctagaatctgtgccctgggaagggagaa

SEQ ID NO: 417585 - DNA, 120 bp, Artificial Sequence
  ENSG00000149575_25 (sequence is synthesized)
acagcagggaagaggggcaatacaacagggtcaagggtgcagaggccaggcagagtgggtgcagagtgggggatgggcaaccagcctggtaacacctgggtgaggtgagcgagtcaagcc

SEQ ID NO: 417586 - DNA, 120 bp, Artificial Sequence
  ENSG00000149575_26 (sequence is synthesized)
catctggaaatgctaaactcatcagctcagtacctaactgccaatcaacacactgccaatgcgggtgggctaagccgccaggatgcctgcagcagatggacgctgcccatccttgagcca

SEQ ID NO: 417587 - DNA, 120 bp, Artificial Sequence
  ENSG00000149575_27 (sequence is synthesized)
gccagctgggggcagagaggtgggtggcgggcacctcatgccagctgagaccaagagtggttgtatacatttctgcagcttgcagatttcatttttttggtcaccctttaagtgtccttc

SEQ ID NO: 417588 - DNA, 120 bp, Artificial Sequence
  ENSG00000149575_28 (sequence is synthesized)
tctcccaggatgagtgaggagctgtgctgatgttgggaacttatctttttccaggatccataacatttaggggaattatttgcgggctttcctagtgtattctaagaagttctaactctc

SEQ ID NO: 417589 - DNA, 120 bp, Artificial Sequence
  ENSG00000149575_29 (sequence is synthesized)
catcaagaagcccaagattcctggagtctttttttcctctgccctgatcaactggggcccaggaaaagcaatgtctcttcacgggcctcagggccccagcagatggggctgggtcaggaa

SEQ ID NO: 417590 - DNA, 120 bp, Artificial Sequence
  ENSG00000149575_30 (sequence is synthesized)
ccatctctgtcccaggtgctcagccctcatatgcattttcttctggagcctcttagaatctcctccagaggactcatagagctgcctcccccaggatggtgaagttgggagcaaaatggg

SEQ ID NO: 417591 - DNA, 120 bp, Artificial Sequence
  ENSG00000149575_31 (sequence is synthesized)
gcttctgtaagtagaggtggaaaaccagagagatgtttccacagcagccatttccctaccctgtttcctaacttatgctgacaagttcttcctcttcctaccgtggggttcgagccccac

SEQ ID NO: 417592 - DNA, 120 bp, Artificial Sequence
  ENSG00000149575_32 (sequence is synthesized)
ttctggttgcatgttcccaccaccacgctctgctggttttagtcggctgactttctcaactgccccagcctctcctgctctctcagaacctccctctgcccccaccccccatctgtctct

SEQ ID NO: 417593 - DNA, 120 bp, Artificial Sequence
  ENSG00000149575_33 (sequence is synthesized)
tcctcctaattaagggccactgcaaagagagacgggctggctaacccatgggatttagcttataagaacaaagcacaattattcaggactgaactgctttgaggtgccttggaactggct

SEQ ID NO: 417594 - DNA, 120 bp, Artificial Sequence
  ENSG00000149575_34 (sequence is synthesized)
ttggaaatagctatctgccccctagctatggactcttcacagttatttccagtttataaaaaggaaaagctgatcggatccatgtttctctctgcgagtctccttggggaggttgggctg

SEQ ID NO: 417595 - DNA, 120 bp, Artificial Sequence
  ENSG00000149575_35 (sequence is synthesized)
gtaaatatttgcaaggtcaggttaagcagacagacaattgaaaatactgggcaggtccaaaaggatagttccaggccataggaatggcttggtgcagttaacgggtgatgaagcaagaaa

SEQ ID NO: 417596 - DNA, 120 bp, Artificial Sequence
  ENSG00000149575_36 (sequence is synthesized)
tcttccttcctacttatgtcttaaagatggacagcctgtgtctcttgctgtgcctcttgctggcgtcttcctttattgaagcttgctgatgcactgtacatagtctctctctctaggtat

SEQ ID NO: 417597 - DNA, 120 bp, Artificial Sequence
  ENSG00000149575_37 (sequence is synthesized)
agatatattatatatacaaatatcaaacatctcaccacacccaccccaaaagttacactgtgtgtgtgtggggaggtgtaataacttctcagtgttttgagttgattcaccaaaggcaaa

SEQ ID NO: 417598 - DNA, 120 bp, Artificial Sequence
  ENSG00000149575_38 (sequence is synthesized)
ttttggaatgttcttgcgctttgtgcacttggaggggaaaacccaactacatatgcactttcttggttgtgtgtgctatagagaggttggaaggggtggttggaaggggagagaaactga

SEQ ID NO: 417599 - DNA, 120 bp, Artificial Sequence
  ENSG00000149575_39 (sequence is synthesized)
gatggccctctgtgactcgactgctgggatgtatctgcttttgggagcagactgagtttcttttgcaatttgtcttattgtttgggtctactggcaacaataaactatctcccctgaaaa

SEQ ID NO: 417600 - DNA, 120 bp, Artificial Sequence
  ENSG00000149575_40 (sequence is synthesized)
tttggggatgaagacaaccccggaagctcccaaggctgactgtcatgcggatgttgcctgtcctttgcatgggcagacaggccatccttcctgctctgttccccaaaggtgttggattag

SEQ ID NO: 417601 - DNA, 120 bp, Artificial Sequence
  ENSG00000149575_41 (sequence is synthesized)
acatttcttttgcctcctctggactcagaaagaatagatgacagctggtcagagtctgccctcatgcagttcatggagaagggtggctgtgggaaggttcaggtggctcatgtcccatct

SEQ ID NO: 417602 - DNA, 120 bp, Artificial Sequence
  ENSG00000149575_42 (sequence is synthesized)
acatactgctggatcctatatatatgtgccaaagcagccctaagaagtttaggaccaagggcaacctcctggctaggggctccactgtcccagacaggcctttttttctcccttgctctt

SEQ ID NO: 417603 - DNA, 83 bp, Artificial Sequence
  ENSG00000149575_43 (sequence is synthesized)
tccactgtcccagacaggcctttttttctcccttgctcttcattcttccgtctctttgcatttctccctctctcccttgcacc

SEQ ID NO: 417604 - DNA, 120 bp, Artificial Sequence
  ENSG00000149575_44 (sequence is synthesized)
ttcctcttcctactctggggttcgagccccacttctggctgcatgctccggccaccacgctctggtggtttcagtctgctgactttctcaactgctccagcctctcctgctctctcagaa

SEQ ID NO: 417605 - DNA, 120 bp, Artificial Sequence
  ENSG00000149575_45 (sequence is synthesized)
cctcaccctgccaccacccccatctgtgtcttcctcctaactaaggaccactgcaaagagagacgggctggctaacccttttcagcaagaaaaacctcaacttgctgaatggcaaggaca

SEQ ID NO: 417606 - DNA, 120 bp, Artificial Sequence
  ENSG00000149575_46 (sequence is synthesized)
tacttaggtagttggttcctacttttctcttggtttctgtctcattcctgtctgctccctggagacccagagaccctcaccagtggttagtagttaggaatacgccaagaggaccttgat

SEQ ID NO: 417607 - DNA, 120 bp, Artificial Sequence
  ENSG00000149575_47 (sequence is synthesized)
atttgtggttctaatggcttaaaggatgacagctgccacttgggagagaagtcagactggaggtggcagtgttaaacaaaggtggctggtattcaacagagccaaagttcccttggttta

SEQ ID NO: 417608 - DNA, 120 bp, Artificial Sequence
  ENSG00000149575_48 (sequence is synthesized)
aaaggatgtctatccctggagcctgagtcctgccaagaatggggtattgcggggggatgcttctctacttaacagataggaacatttgggcgagggacacggactgagcagcagaaggca

SEQ ID NO: 417609 - DNA, 120 bp, Artificial Sequence
  ENSG00000149575_49 (sequence is synthesized)
ccagggattctggctggttccttccaggatggacacaggcccctgatattcagccaggccagcagcatcttcctcactgggcttctcccccaaacacttggttttggggaccaggtggca

SEQ ID NO: 417610 - DNA, 120 bp, Artificial Sequence
  ENSG00000149575_50 (sequence is synthesized)
aagggattaaggaacagtttgccccaacagattgagagttcttcctacggtcaaagaaaagggagcaaggccctggggaagagggtcttggtagtcacgaactgggcctggtttctggga

SEQ ID NO: 417611 - DNA, 120 bp, Artificial Sequence
  ENSG00000149575_51 (sequence is synthesized)
aggctggatttggttcaggcatctcccctaaatttgggttctatggcccagcctgcctggggcggggtggatgaatttcgattgcagaacaagctgccttggtgggggaagggatagttg

SEQ ID NO: 417612 - DNA, 120 bp, Artificial Sequence
  ENSG00000149575_52 (sequence is synthesized)
ccaccctggtgctcaaaattattggtctcctgtgcccctcaattgaggtggaggtacctgtacaagagcttcccagttcccactggacaccccatgcatggggtatcccagtgggatagc

SEQ ID NO: 417613 - DNA, 120 bp, Artificial Sequence
  ENSG00000149575_53 (sequence is synthesized)
catcggcctgcccatggatggttgctagggaataggaatctgggccaaaaggattaggggtgacggagtagacctttacaacagcagagatgggagggcccccaggaatacctgtcaagg

SEQ ID NO: 417614 - DNA, 120 bp, Artificial Sequence
  ENSG00000149575_54 (sequence is synthesized)
cccctcgttgttctaaaggggaaactgaagaccagaacagagaagtgacatgcttaaggcgacatgatgagtcaagtacagacagagtctggcaggctccaagtccgctattcttcctgc

SEQ ID NO: 417615 - DNA, 120 bp, Artificial Sequence
  ENSG00000149575_55 (sequence is synthesized)
agtccacaggtgctgggtctagtgcttgacacagcagcatgcaccagcccagacccctccccttccctccccagcttggcctgagttggtgcagaagaggcactcatgcttccttaaggg

SEQ ID NO: 417616 - DNA, 120 bp, Artificial Sequence
  ENSG00000149575_56 (sequence is synthesized)
cccagttttcaaagctgaggttcagagagggaacgtgatttgcccaaagtcatacagttggctaatgacagagcctgggatagaacccaagtctctcttcccccagtcaaggccttccct

SEQ ID NO: 417617 - DNA, 120 bp, Artificial Sequence
  ENSG00000149575_57 (sequence is synthesized)
aggctgagctgatgtccctgggcaaataggctcatgtcctttggcactagttcccagagtcctgttcccaccccccatcagcatgatgtgactcatgtcagtttgcatatgggcccctct

SEQ ID NO: 417618 - DNA, 120 bp, Artificial Sequence
  ENSG00000149575_58 (sequence is synthesized)
taggctacttatctccctcccatcttgcaagggtggaacgtagtatcaaatcatcttcaggtgacagcagcctgggatagtgtctgatgggtgcaggctgggcaactggacacagaactg

SEQ ID NO: 417619 - DNA, 120 bp, Artificial Sequence
  ENSG00000149575_59 (sequence is synthesized)
agtcctggtagcactgctgcccccgactcttcctacagaatcacaccccaaaacccaccatgttttagtcactcctggctgcctgctaccaagctgatgtccagagtgccagctactcct

SEQ ID NO: 417620 - DNA, 120 bp, Artificial Sequence
  ENSG00000149575_60 (sequence is synthesized)
taggacaggctccagcagcccagtggatgagggctccggagggcctggggaaggaagccccgctgagaaccacatcctggcatcctgacacggcacatggatgtcgtggggggcggtcag

SEQ ID NO: 417621 - DNA, 120 bp, Artificial Sequence
  ENSG00000149575_61 (sequence is synthesized)
tggagcctagcctaggagaaaagggagcaaggccctggggaagaggtgatgggaatagatgagttgggatgggggagtcggtggcctggtatggcaactttgtcttttctctggcaataa

SEQ ID NO: 417622 - DNA, 120 bp, Artificial Sequence
  ENSG00000149575_62 (sequence is synthesized)
tgaccttcaggtctaggaggtgctggggaaggaagggcaagtgggtgccaggcattcagcttggctactttggatcccatgggaggggctttcccctatggccctggcaaagtcacctct

SEQ ID NO: 417623 - DNA, 120 bp, Artificial Sequence
  ENSG00000149575_63 (sequence is synthesized)
atcccaaccacagttgcctctgcttctcaagtgggacacattcccagtaaacacgtggcaaagggactaggaacggttagccccaacagattcagagttcttcctgtgggcaaatgggca

SEQ ID NO: 417624 - DNA, 120 bp, Artificial Sequence
  ENSG00000149575_64 (sequence is synthesized)
gaagagtagggtgtgttcagccaggaggggaagttgaccgatagcgtggctgttgaccgatagagtggcccaggctgtagcctcagggacagggattagacttgtcccattctgtcccaa

SEQ ID NO: 417625 - DNA, 120 bp, Artificial Sequence
  ENSG00000149575_65 (sequence is synthesized)
ggcaagacattaggactggcagggagagacagatattcatccagtgtaaatcagagctgtgcagagggtcgagtttttgaggtaatgaaatccccatcccagaaggtatttaagcataac

SEQ ID NO: 417626 - DNA, 120 bp, Artificial Sequence
  ENSG00000149575_66 (sequence is synthesized)
ttaggggtgttgttgagaaagttcctatatcagggcatacttttagatagcctttaagtctactgataatggccctctgcagtcttctttttaggactcaaatcatagaagtgggataaa

SEQ ID NO: 417627 - DNA, 120 bp, Artificial Sequence
  ENSG00000149575_67 (sequence is synthesized)
agtcttgcttgcctgaagataagtataacacatacaccggcaaacatgcacacgtgtctggccctctgctttcttactcagttgtggtcttccccaggtcccctctatacccctgtaccg

SEQ ID NO: 417628 - DNA, 120 bp, Artificial Sequence
  ENSG00000149575_68 (sequence is synthesized)
ctttacctggttcttctgtatctgatctatcagtggtggggacgtggggggtgtgggtgaacctctatgtacagtgagaaatacgctgggagagggtgggaaatttgaagacaggtgacc

SEQ ID NO: 417629 - DNA, 120 bp, Artificial Sequence
  ENSG00000149575_69 (sequence is synthesized)
ttggggagcttctttccaaagatgaggccaagtctagcttgccttcctaggcccaccagccaggtcagaaactcctgtctttccagtcaagactgtagatggaagatacaagtcctccct

SEQ ID NO: 417630 - DNA, 120 bp, Artificial Sequence
  ENSG00000149575_70 (sequence is synthesized)
gcctccctatccctgagtgctcccagctttgccaaatctgtcaacatctccctcaactccccccatagcttgctcatacccgtgcaggctgtccactggagctgagcctgctggaagggc

SEQ ID NO: 417631 - DNA, 120 bp, Artificial Sequence
  ENSG00000149575_71 (sequence is synthesized)
taaggggtggatttcatggccatcttgaacttgaagggcattgaaggaggaaggtatgggactcttggctagatcaataagaagagccactgtttactgagtacctactctgtgcctggt

SEQ ID NO: 417632 - DNA, 120 bp, Artificial Sequence
  ENSG00000149575_72 (sequence is synthesized)
gctgatctaggtatttgatgtatatcagcttacttcatccttagggcaaggccccgtccaaatgcattcttttctcatttttacacatgaggaaacaaagttctgcagtattataagtat

SEQ ID NO: 417633 - DNA, 120 bp, Artificial Sequence
  ENSG00000149575_73 (sequence is synthesized)
gtgtacaaacaaggtggcacagctaggaaacagcagagccaaattcacactcaaggcctgatgaaccaaagccattacatgacaccaggagaaaggacagtgaactgggctctcgcagac

SEQ ID NO: 417634 - DNA, 120 bp, Artificial Sequence
  ENSG00000149575_74 (sequence is synthesized)
cgaacacttgtgggtgagggaagggtggcttggaaccaaccctaaaatgaccatggacaacagcataagggcaaaagtgtgagcagaggccacgctttcccggcgggcccctcctgccca

SEQ ID NO: 417635 - DNA, 120 bp, Artificial Sequence
  ENSG00000149575_75 (sequence is synthesized)
cccctacatggcctggcccttggccccacagctctgtgcaaacagctgcagcatctgctggccaccttctcctcccctggcttctcgctccactcccttcctgccaaaagcctgtgtatc

SEQ ID NO: 417636 - DNA, 120 bp, Artificial Sequence
  ENSG00000149575_76 (sequence is synthesized)
ctctgcttcacctactaaacaattgtctccctgtccccacccgtccccttcagcctgagccacattccaactttaagttgccctcgactcaggaagactctcctctgctcccaggcctcc

SEQ ID NO: 417637 - DNA, 120 bp, Artificial Sequence
  ENSG00000149575_77 (sequence is synthesized)
tctcttcctctcctctgccccccaccttctctgccgcatttcctctccaggtccacatcctccctctcccctcactttgcaagacccactgctcccacattaaaatgctcctaatgcatg

SEQ ID NO: 417638 - DNA, 120 bp, Artificial Sequence
  ENSG00000149575_78 (sequence is synthesized)
ggccccgctgcagggtggggagggggagcccgcattgcacctctccggctgcccccgtcctgccggccagaaaaggcgcccccgcactcctctctaccctgccctcccccacggcagggt

SEQ ID NO: 417639 - DNA, 120 bp, Artificial Sequence
  ENSG00000149575_79 (sequence is synthesized)
gctagctccttcgagatggtgaggttcaagttctaatctggagcactgccttgggcttggtggggggcagaggcccgcacagagtccgccgggcttcgcagaacgcagactttttggtct

SEQ ID NO: 417640 - DNA, 120 bp, Artificial Sequence
  ENSG00000149575_80 (sequence is synthesized)
cacacgaaactccttccagccactgggacttggcccctgggagtacacttgcctgggaactcgactcgctcaaaacttcaacgggctcactctctcacttcagtgccaccaggacggagc

SEQ ID NO: 417641 - DNA, 120 bp, Artificial Sequence
  ENSG00000149577_0 (sequence is synthesized)
agtgttcgtgcgtcgggacggcgcgtccgcccgcccttaaagggcccgcacctcggaaaactcgcagcccagcacggcgtcgggtagctaccacctatcacgcccctcactctgcgactc

SEQ ID NO: 417642 - DNA, 120 bp, Artificial Sequence
  ENSG00000149577_1 (sequence is synthesized)
gccttcctccgcggccagcccccgccgccggctcttcctccctcccctttcccggcgtctccaggctcccggcaaccagccgccctccttctcacggccctggcccggggctccagggtc

SEQ ID NO: 417643 - DNA, 120 bp, Artificial Sequence
  ENSG00000149577_2 (sequence is synthesized)
tcaggtcgtactcagcccctcgcgagctgggaccccttcccgtagccagcatcccctccctccccgccccctcccggccgccccctcccctgcggggaccctgggagcctcttcggggct

SEQ ID NO: 417644 - DNA, 120 bp, Artificial Sequence
  ENSG00000149577_3 (sequence is synthesized)
cttgggaggggacatttcctaatctcaggccggggttaaagttctggtcctggtgagatgctggaagctgcggccgcagccgcaacccgtcccggaggtgtcctgtctcctgtcgccgcc

SEQ ID NO: 417645 - DNA, 120 bp, Artificial Sequence
  ENSG00000149577_4 (sequence is synthesized)
gccgccgccaccaccgctgccactgccgccctgccggggccatgttcgctctgggcttgcccttcttggtgctcttggtggcctcggtcgagagccatctgggggttctggggcccaaga

SEQ ID NO: 417646 - DNA, 120 bp, Artificial Sequence
  ENSG00000149577_5 (sequence is synthesized)
acgtctcgcagaaagacgccgagtttgagcgcacctacgtggacgaggtcaacagcgagctggtcaacatctacaccttcaaccatactgtgacccgcaacaggacagagggcgtgcgtg

SEQ ID NO: 417647 - DNA, 120 bp, Artificial Sequence
  ENSG00000149577_6 (sequence is synthesized)
tgtctgtgaacgtcctgaacaagcagaagggggcgccgttgctgtttgtggtccgccagaaggaggctgtggtgtccttccaggtgcccctaatcctgcgagggatgtttcagcgcaagt

SEQ ID NO: 417648 - DNA, 120 bp, Artificial Sequence
  ENSG00000149577_7 (sequence is synthesized)
acctctaccaaaaagtggaacgaaccctgtgtcagccccccaccaagaatgagtcggagattcagttcttctacgtggatgtgtccaccctgtcaccagtcaacaccacataccagctcc

SEQ ID NO: 417649 - DNA, 120 bp, Artificial Sequence
  ENSG00000149577_8 (sequence is synthesized)
gggtcagccgcatggacgattttgtgctcaggactggggagcagttcagcttcaataccacagcagcacagccccagtacttcaagtatgagttccctgaaggcgtggactcggtaattg

SEQ ID NO: 417650 - DNA, 120 bp, Artificial Sequence
  ENSG00000149577_9 (sequence is synthesized)
tcaaggtgacctccaacaaggccttcccctgctcagtcatctccattcaggatgtgctgtgtcctgtctatgacctggacaacaacgtagccttcatcggcatgtaccagacgatgacca

SEQ ID NO: 417651 - DNA, 120 bp, Artificial Sequence
  ENSG00000149577_10 (sequence is synthesized)
agaaggcggccatcaccgtacagcgcaaagacttccccagcaacagcttttatgtggtggtggtggtgaagaccgaagaccaagcctgcgggggctccctgcctttctaccccttcgcag

SEQ ID NO: 417652 - DNA, 120 bp, Artificial Sequence
  ENSG00000149577_11 (sequence is synthesized)
aagatgaaccggtcgatcaagggcaccgccagaaaaccctgtcagtgctggtgtctcaagcagtcacgtctgaggcatacgtcagtgggatgctcttttgcctgggtatatttctctcct

SEQ ID NO: 417653 - DNA, 120 bp, Artificial Sequence
  ENSG00000149577_12 (sequence is synthesized)
tttacctgctgaccgtcctcctggcctgctgggagaactggaggcagaagaagaagaccctgctggtggccattgaccgagcctgcccagaaagcggtcaccctcgagtcctggctgatt

SEQ ID NO: 417654 - DNA, 120 bp, Artificial Sequence
  ENSG00000149577_13 (sequence is synthesized)
cttttcctggcagttccccttatgagggttacaactatggctcctttgagaatgtttctggatctaccgatggtctggttgacagcgctggcactggggacctctcttacggttaccagg

SEQ ID NO: 417655 - DNA, 120 bp, Artificial Sequence
  ENSG00000149577_14 (sequence is synthesized)
gccgctcctttgaacctgtaggtactcggccccgagtggactccatgagctctgtggaggaggatgactacgacacattgaccgacatcgattccgacaagaatgtcattcgcaccaagc

SEQ ID NO: 417656 - DNA, 120 bp, Artificial Sequence
  ENSG00000149577_15 (sequence is synthesized)
aatacctctatgtggctgacctggcacggaaggacaagcgtgttctgcggaaaaagtaccagatctacttctggaacattgccaccattgctgtcttctatgcccttcctgtggtgcagc

SEQ ID NO: 417657 - DNA, 120 bp, Artificial Sequence
  ENSG00000149577_16 (sequence is synthesized)
tggtgatcacctaccagacggtggtgaatgtcacagggaatcaggacatctgctactacaacttcctctgcgcccacccactgggcaatctcagcgccttcaacaacatcctcagcaacc

SEQ ID NO: 417658 - DNA, 120 bp, Artificial Sequence
  ENSG00000149577_17 (sequence is synthesized)
tggggtacatcctgctggggctgcttttcctgctcatcatcctgcaacgggagatcaaccacaaccgggccctgctgcgcaatgacctctgtgccctggaatgtgggatccccaaacact

SEQ ID NO: 417659 - DNA, 120 bp, Artificial Sequence
  ENSG00000149577_18 (sequence is synthesized)
ctataccaatttccagtttgacacatcgttcatgtacatgatcgccggactctgcatgctgaagctctaccagaagcggcacccggacatcaacgccagcgcctacagtgcctacgcctg

SEQ ID NO: 417660 - DNA, 120 bp, Artificial Sequence
  ENSG00000149577_19 (sequence is synthesized)
cctggccattgtcatcttcttctctgtgctgggcgtggtctttggcaaagggaacacggcgttctggatcgtcttctccatcattcacatcatcgccaccctgctcctcagcacgcagct

SEQ ID NO: 417661 - DNA, 120 bp, Artificial Sequence
  ENSG00000149577_20 (sequence is synthesized)
ctattacatgggccggtggaaactggactcggggatcttccgccgcatcctccacgtgctctacacagactgcatccggcagtgcagcgggccgctctacgtggaccgcatggtgctgct

SEQ ID NO: 417662 - DNA, 120 bp, Artificial Sequence
  ENSG00000149577_21 (sequence is synthesized)
ggtcatgggcaacgtcatcaactggtcgctggctgcctatgggcttatcatgcgccccaatgatttcgcttcctacttgttggccattggcatctgcaacctgctcctttacttcgcctt

SEQ ID NO: 417663 - DNA, 120 bp, Artificial Sequence
  ENSG00000149577_22 (sequence is synthesized)
ctacatcatcatgaagctccggagtggggagaggatcaagctcatccccctgctctgcatcgtttgcacctccgtggtctggggcttcgcgctcttcttcttcttccagggactcagcac

SEQ ID NO: 417664 - DNA, 120 bp, Artificial Sequence
  ENSG00000149577_23 (sequence is synthesized)
ctggcagaaaacccctgcagagtcgagggagcacaaccgggactgcatcctcctcgacttctttgacgaccacgacatctggcacttcctctcctccatcgccatgttcgggtccttcct

SEQ ID NO: 417665 - DNA, 120 bp, Artificial Sequence
  ENSG00000149577_24 (sequence is synthesized)
ggtgttgctgacactggatgacgacctggatactgtgcagcgggacaagatctatgtcttctagcaggagctgggcccttcgcttcacctcaaggggccctgagctcctttgtgtcatag

SEQ ID NO: 417666 - DNA, 120 bp, Artificial Sequence
  ENSG00000149577_25 (sequence is synthesized)
accggtcactctgtcgtgctgtggggatgagtcccagcaccgctgcccagcactggatggcagcaggacagccaggtctagcttaggcttggcctgggacagccatggggtggcatggaa

SEQ ID NO: 417667 - DNA, 120 bp, Artificial Sequence
  ENSG00000149577_26 (sequence is synthesized)
ccttgcagctgccctctgccgaggagcaggcctgctcccctggaacccccagatgttggccaaattgctgctttcttctcagtgttggggccttccatgggcccctgtcctttggctctc

SEQ ID NO: 417668 - DNA, 120 bp, Artificial Sequence
  ENSG00000149577_27 (sequence is synthesized)
catttgtccctttgcaagaggaaggatggaagggacaccctccccatttcatgccttgcattttgcccgtcctcctccccacaatgccccagcctgggacctaaggcctctttttcctcc

SEQ ID NO: 417669 - DNA, 120 bp, Artificial Sequence
  ENSG00000149577_28 (sequence is synthesized)
catactcccactccagggcctagtctggggcctgaatctctgtcctgtatcagggccccagttctctttgggctgtccctggctgccatcactgcccattccagtcagccaggatggatg

SEQ ID NO: 417670 - DNA, 120 bp, Artificial Sequence
  ENSG00000149577_29 (sequence is synthesized)
ggggtatgagattttgggggttggccagctggtgccagacttttggtgctaaggcctgcaaggggcctggggcagtgcgtattctcttccctctgacctgtgctcagggctggctcttta

SEQ ID NO: 417671 - DNA, 120 bp, Artificial Sequence
  ENSG00000149577_30 (sequence is synthesized)
gcaatgcgctcagcccaatttgagaaccgccttctgattcaagaggctgaattcagaggtcacctcttcatcccatcagctcccagactgatgccagcaccaggactggagggagaagcg

SEQ ID NO: 417672 - DNA, 120 bp, Artificial Sequence
  ENSG00000149577_31 (sequence is synthesized)
cctcaccccttcccttccttctttccaggcccttagtcttgccaaaccccagctggtggcctttcagtgccattgacactgcccaagaatgtccaggggcaaaggagggatgatacagag

SEQ ID NO: 417673 - DNA, 120 bp, Artificial Sequence
  ENSG00000149577_32 (sequence is synthesized)
ttcagcccgttctgcctccacagctgtgggcaccccagtgcctaccttagaaaggggcttcaggaagggatgtgctgtttccctctacgtgcccagtcctagcctcgctctaggacccag

SEQ ID NO: 417674 - DNA, 120 bp, Artificial Sequence
  ENSG00000149577_33 (sequence is synthesized)
ggctggcttctaagtttccgtccagtcttcaggcaagttctgtgttagtcatgcacacacatacctatgaaaccttggagtttacaaagaattgccccagctctgggcaccctggccacc

SEQ ID NO: 417675 - DNA, 120 bp, Artificial Sequence
  ENSG00000149577_34 (sequence is synthesized)
ctggtccttggatccccttcgtcccacctggtccaccccagatgctgaggatgggggagctcaggcggggcctctgctttggggatgggaatgtgtttttctcccaaacttgtttttata

SEQ ID NO: 417676 - DNA, 120 bp, Artificial Sequence
  ENSG00000149577_35 (sequence is synthesized)
gctctgcttgaagggctgggagatgaggtgggtctggatcttttctcagagcgtctccatgctatggttgcatttccgttttctatgaatgaatttgcattcaataaacaaccagactca

SEQ ID NO: 417677 - DNA, 120 bp, Artificial Sequence
  ENSG00000149577_36 (sequence is synthesized)
agagtttggtgtattagaggaactgccagttgttcatactggctaggcagggccttacatttgaggggagaagggtgagagattgagctgggtggaggaggacatgaaggcctttgggtg

SEQ ID NO: 417678 - DNA, 120 bp, Artificial Sequence
  ENSG00000149577_37 (sequence is synthesized)
agagtggggaccagctggctgggccttcttccaccaccctccctgcccctgccctcagtccctgtgtccctgcttccctccaggaccgcatggtgctgctggtcatgggcaacgtcatca

SEQ ID NO: 417679 - DNA, 120 bp, Artificial Sequence
  ENSG00000149577_38 (sequence is synthesized)
actggtcgctgtgagtatggtcagcagtagtggcctggttgggtggacagctggggactcggtcagccactggctgccttgggggctaaggacaacttccaaatgttgggcataagacat

SEQ ID NO: 417680 - DNA, 120 bp, Artificial Sequence
  ENSG00000149577_39 (sequence is synthesized)
gggggctaagagagatcttggcctctcttctctctcttggcatctgggcttctagaatcttctgtgggcttctgaacacagcccaacatcataataaaacatgcctaggcagggcaggaa

SEQ ID NO: 417681 - DNA, 120 bp, Artificial Sequence
  ENSG00000149577_40 (sequence is synthesized)
tccggcctgattggccaaaccctcttggtctaagcggccgcagcagtgggatgtccttgaaccctgcccccctgaattcggccctgtgtgagggaggcccctcttgtccacctctaacct

SEQ ID NO: 417682 - DNA, 120 bp, Artificial Sequence
  ENSG00000149577_41 (sequence is synthesized)
gactccgtctccaaaaaaataaaagggagtccctgatctcagggtgctcacagactaagacacagaccaagttgtccctgttttcaggagatgtcagactctgggtgacagccagtgggg

SEQ ID NO: 417683 - DNA, 120 bp, Artificial Sequence
  ENSG00000149577_42 (sequence is synthesized)
agccccaggtaacatctccctgttgattgctcgagaggagaaatgggggagcttgaatatgagaatgggagtggccagcggtctttgcttggccttttgaattggctgttttctccatgg

SEQ ID NO: 417684 - DNA, 120 bp, Artificial Sequence
  ENSG00000149577_43 (sequence is synthesized)
agggctctctggaaacaggagctctggccctgacatggtgagggacagacagcatgggactgtacagagacatggagtctggttgcctctctggcattctgctgagtgccctgctgaggt

SEQ ID NO: 417685 - DNA, 120 bp, Artificial Sequence
  ENSG00000149577_44 (sequence is synthesized)
tgaagggaatggtatacagagaaaggggctgctgtgatcaaggcctgtctcctcggagagcctccactgcccacccctcagaggattctgggtcctcgcttataggggactattcccttc

SEQ ID NO: 417686 - DNA, 68 bp, Artificial Sequence
  ENSG00000149577_45 (sequence is synthesized)
gagcctgggatgttcaagaccagcctgggcaatatagtaagaacccgtctctacaaaaaataaaaaaa

SEQ ID NO: 417687 - DNA, 120 bp, Artificial Sequence
  ENSG00000149577_46 (sequence is synthesized)
gagaatgtttctggatctaccgatggtctggttgacagcgctggcactggggacctctcttacggttaccagggtgagtgggccaggctgggaggggcggtgtggtgcaggacggtgttg

SEQ ID NO: 417688 - DNA, 120 bp, Artificial Sequence
  ENSG00000149577_47 (sequence is synthesized)
tctgggtaaaatgtcacggtgggcggttgcctcttctgccagatgctggaacctgggaagggcctgctgtcttcctaacccctctcttccctcatcccctcctccttggccccagttccc

SEQ ID NO: 417689 - DNA, 120 bp, Artificial Sequence
  ENSG00000149577_48 (sequence is synthesized)
tggtaactttccctttcctttgaagggcacgaccagttcaagcggcgcctcccctctggccagatgcggcagctgtgcattgccatgggtagacctggggtgggggtagggctgttttgc

SEQ ID NO: 417690 - DNA, 120 bp, Artificial Sequence
  ENSG00000149577_49 (sequence is synthesized)
caatcagtgcctgccggctccggttgactgccggctgtggggccagaaagattctatgtgcatggcttccccatgtaattccagtaattgcccgctcttgtgtcttctgagatagcagca

SEQ ID NO: 417691 - DNA, 120 bp, Artificial Sequence
  ENSG00000149577_50 (sequence is synthesized)
gagcacaggctcctttggctggcgggctggcgcctccgctctctccaggctggacaatctagtttatcgtctgcgttgccagcgccctcactccctggcctgcttggggagggctcacag

SEQ ID NO: 417692 - DNA, 120 bp, Artificial Sequence
  ENSG00000149577_51 (sequence is synthesized)
gcatgggggtcacattctggcctctggataaaggagaaatgctctttctgcaccccaggcccactgggtctttaacccagtggcagccaaggcagtgtcttctcagaacccacagggctg

SEQ ID NO: 417693 - DNA, 120 bp, Artificial Sequence
  ENSG00000149577_52 (sequence is synthesized)
ggcacccttgaatcagcatgacttgccgagttcaatcctgttgtttgtgtctgctgcctggggtctgccttgtgtcctggcctgggaagccctagcccatgaggggtgccaggaacagag

SEQ ID NO: 417694 - DNA, 120 bp, Artificial Sequence
  ENSG00000149577_53 (sequence is synthesized)
caaagctagagcggcccctgtgtggtggcctcttctagagtctaccatcatcccccaggacttaggagcacctgatgtctcctcccagctcctgagcccacttccaccccaactctgagg

SEQ ID NO: 417695 - DNA, 120 bp, Artificial Sequence
  ENSG00000149577_54 (sequence is synthesized)
cccagcccacaatttgcctcttccctactgcctaataattgttacaattgcctcagatgggcgagggccactgtgggttttgtgtccaccggtgcaacccctccctccctgccctttcca

SEQ ID NO: 417696 - DNA, 120 bp, Artificial Sequence
  ENSG00000149577_55 (sequence is synthesized)
ctggtgttccatcacaggacctgggttcagatcccagctctgccttcccagccgagtgacccagggcaaatcacataacccccccaaccctgagtgtcagtttcttcatctgcaaaatgg

SEQ ID NO: 417697 - DNA, 120 bp, Artificial Sequence
  ENSG00000149577_56 (sequence is synthesized)
gagcagcccgcactaaagatagcccctccctggtttcttgtgcggattatgaaaccaaagtcctggggctttgtaagcatcagtttcccttcccttttctctgtcccgtggggcaagaac

SEQ ID NO: 417698 - DNA, 120 bp, Artificial Sequence
  ENSG00000149577_57 (sequence is synthesized)
ttccatcacggtcatgcctcagggttttcagccacgcctaatgagaggggacagcgactgtgctgcatggcatccatgttctcagaaggaacacgtgcctgcggtgctgtgtattcccac

SEQ ID NO: 417699 - DNA, 120 bp, Artificial Sequence
  ENSG00000149577_58 (sequence is synthesized)
ctgctagctgtggtggcacttgctgttttttgccaaaggggcccggatggcggggcgtgggctgagttgggcgtgacgacagacccactccctgtccctgctcctgctacaggtggtgaa

SEQ ID NO: 417700 - DNA, 120 bp, Artificial Sequence
  ENSG00000149577_59 (sequence is synthesized)
attcttccatcagttgtggtctgagcacacatggcttgctctctaccctaaaccccagaatctgacagctctgtggggtctcggtgggagaggaaacaggcttattactgggcttgccca

SEQ ID NO: 417701 - DNA, 120 bp, Artificial Sequence
  ENSG00000149577_60 (sequence is synthesized)
aatttccagtttggtgagtggggcgtccttcttttctggctcaacctacagcagggacctgcctgagtccttcactatccccaagtcacccacagggatcgctaagacacccctgtagga

SEQ ID NO: 417702 - DNA, 120 bp, Artificial Sequence
  ENSG00000149577_61 (sequence is synthesized)
aactccaaggctggcgtgcctgggtgtgcacacatcctagcctatggaacatgggcacctagatgctgcttcattcatctgtcaagctattcctatgtaaaggcatgtgccgcagtgaag

SEQ ID NO: 417703 - DNA, 64 bp, Artificial Sequence
  ENSG00000149577_62 (sequence is synthesized)
gtcaagctattcctatgtaaaggcatgtgccgcagtgaagaaaacagtataattaagaaggggt

SEQ ID NO: 417704 - DNA, 68 bp, Artificial Sequence
  ENSG00000149577_63 (sequence is synthesized)
ggagaatggcatgaatccgggaggcagagtttgcaatgagccaagatcacgccctgcgggggccctgg

SEQ ID NO: 417705 - DNA, 73 bp, Artificial Sequence
  ENSG00000149577_64 (sequence is synthesized)
cactttgggaggctgaggcggggggatcgcccaaggtggggagtttgagagattagctgggtgtggtggtgca

SEQ ID NO: 417706 - DNA, 120 bp, Artificial Sequence
  ENSG00000149577_65 (sequence is synthesized)
aactaaggaactgaagttcaagtgccaccctgccaccagctcacaccatggccgtggtggggcaccagggctctctcttcctctgggattgttggggccaggagttctctgctggggctt

SEQ ID NO: 417707 - DNA, 120 bp, Artificial Sequence
  ENSG00000149577_66 (sequence is synthesized)
acttttcagtgttcgtgcgtcgggacggcgcgtccgcccgcccttaaagggcccgcacctcggaaaactcgcagcccagcacggcgtcggttctggtcctggtgagatgctggaagctgc

SEQ ID NO: 417708 - DNA, 120 bp, Artificial Sequence
  ENSG00000149577_67 (sequence is synthesized)
tcctgaacaagcagaagggggcgccgttgctgtttgtggtccgccagaaggaggctgtggtgtccttccaggtgcccctaatcctgcgagggatgtgagtaggatctgggcatcagggaa

SEQ ID NO: 417709 - DNA, 120 bp, Artificial Sequence
  ENSG00000149577_68 (sequence is synthesized)
gcggggcagcctaggccagtccttggctggagcctcaaccaggagcccccccatttctcctcccctttccctgggctgggaggctggtcaacagcacaagggccgagtcccaccagccgg

SEQ ID NO: 417710 - DNA, 120 bp, Artificial Sequence
  ENSG00000149582_0 (sequence is synthesized)
agacctgagcagttgctccggcggcgctcggggagggagccagcagcctagggcctaggcccgggccaccatggcgctgcctccaggcccagccgccctccggcacacactgctgctcct

SEQ ID NO: 417711 - DNA, 120 bp, Artificial Sequence
  ENSG00000149582_1 (sequence is synthesized)
gccagcccttctgagctcaggttggggggagttggagccacaaatagatggtcagacctgggctgagcgggcacttcgggagaatgaacgccacgccttcacctgccgggtggcaggggg

SEQ ID NO: 417712 - DNA, 120 bp, Artificial Sequence
  ENSG00000149582_2 (sequence is synthesized)
gcctggcacccccagattggcctggtatctggatggacagctgcaggaggccagcacctcaagactgctgagcgtgggaggggaggccttctctggaggcaccagcaccttcactgtcac

SEQ ID NO: 417713 - DNA, 120 bp, Artificial Sequence
  ENSG00000149582_3 (sequence is synthesized)
tgcccatcgggcccagcatgagctcaactgctctctgcaggaccccagaagtggccgatcagccaacgcctctgtcatccttaatgtgcaattcaagccagagattgcccaagtcggcgc

SEQ ID NO: 417714 - DNA, 120 bp, Artificial Sequence
  ENSG00000149582_4 (sequence is synthesized)
caagtaccaggaagctcagggcccaggcctcctggttgtcctgtttgccctggtgcgtgccaacccgccggccaatgtcacctggatcgaccaggatgggccagtgactgtcaacacctc

SEQ ID NO: 417715 - DNA, 120 bp, Artificial Sequence
  ENSG00000149582_5 (sequence is synthesized)
tgacttcctggtgctggatgcgcagaactacccctggctcaccaaccacacggtgcagctgcagctccgcagcctggcacacaacctctcggtggtggccaccaatgacgtgggtgtcac

SEQ ID NO: 417716 - DNA, 120 bp, Artificial Sequence
  ENSG00000149582_6 (sequence is synthesized)
cagtgcgtcgcttccagccccagggcttctggctacccgggtggaagtgccactgctgggcattgttgtggctgctgggcttgcactgggcaccctcgtggggttcagcaccttggtggc

SEQ ID NO: 417717 - DNA, 120 bp, Artificial Sequence
  ENSG00000149582_7 (sequence is synthesized)
ctgcctggtctgcagaaaagagaagaaaaccaaaggcccctcccggcacccatctctgatatcaagtgactccaacaacctaaaactcaacaacgtgcgcctgccacgggagaacatgtc

SEQ ID NO: 417718 - DNA, 120 bp, Artificial Sequence
  ENSG00000149582_8 (sequence is synthesized)
cctcccgtccaaccttcagctcaatgacctcactccagattccagagcagtgaaaccagcagaccggcagatggctcagaacaacagccggccagagcttctggacccggagcccggcgg

SEQ ID NO: 417719 - DNA, 120 bp, Artificial Sequence
  ENSG00000149582_9 (sequence is synthesized)
cctcctcaccagccaaggtttcatccgcctcccagtgctgggctatatctatcgagtgtccagcgtgagcagtgatgagatctggctctgagccgagggcgagacaggagtattctcttg

SEQ ID NO: 417720 - DNA, 120 bp, Artificial Sequence
  ENSG00000149582_10 (sequence is synthesized)
tcctccaaggcatcctctacctagctaggtcaccaacgtgaagaagttatgccactgccacttttgcttgccctcctggctggggtgccctccatgtcatgcacgtgatgcatttcactg

SEQ ID NO: 417721 - DNA, 120 bp, Artificial Sequence
  ENSG00000149582_11 (sequence is synthesized)
ggctgtaacccgcaggggcacaggtatctttggcaaggctaccagttggacgtaagcccctcatgctgactcagggtgggccctgcatgtgatgactgggcccttccagagggagctctt

SEQ ID NO: 417722 - DNA, 120 bp, Artificial Sequence
  ENSG00000149582_12 (sequence is synthesized)
tggccaggggtgttcagatgtcatccagcatccaagtgtggcatggcctgctgtataccccaccccagtactccacagcaccttgtacagtaggcatgggggcgtgcctgtgtgggggac

SEQ ID NO: 417723 - DNA, 120 bp, Artificial Sequence
  ENSG00000149582_13 (sequence is synthesized)
agggagggccctgcatggattttcctccttcctatgctatgtagccttgttccctcaggtaaaatttaggaccctgctagctgtgcagaacccaattgccctttgcacagaaaccaaccc

SEQ ID NO: 417724 - DNA, 120 bp, Artificial Sequence
  ENSG00000149582_14 (sequence is synthesized)
ctgacccagcggtaccggccaagcacaaacgtcctttttgctgcacacgtctctgcccttcacttcttctcttctgtccccacctcctcttgggaattctaggttacacgttggaccttc

SEQ ID NO: 417725 - DNA, 120 bp, Artificial Sequence
  ENSG00000149582_15 (sequence is synthesized)
tctactacttcactgggcactagacttttctattggcctgtgccatcgcccagtattagcacaagttagggaggaagaggcaggcgatgagtctagtagcacccaggacggcttgtagct

SEQ ID NO: 417726 - DNA, 120 bp, Artificial Sequence
  ENSG00000149582_16 (sequence is synthesized)
atgcatcattttcctacggcgttagcactttaagcacatcccctaggggagggggtgagtgaggggcccagagccctctttgtggcttccccacgtttggccttctgggattcactgtga

SEQ ID NO: 417727 - DNA, 120 bp, Artificial Sequence
  ENSG00000149582_17 (sequence is synthesized)
gtgtcctgagctctcggggttgatggtttttctctcagcatgtctcctccaccacgggaccccagccctgaccaacccatggttgcctcatcagcaggaaggtgcccttcctggaggatg

SEQ ID NO: 417728 - DNA, 120 bp, Artificial Sequence
  ENSG00000149582_18 (sequence is synthesized)
gtcgccacaggcacataattcaacagtgtggaagctttaggggaacatggagaaagaaggagaccacataccccaaagtgacctaagaacactttaaaaagcaacatgtaaatgattgga

SEQ ID NO: 417729 - DNA, 120 bp, Artificial Sequence
  ENSG00000149582_19 (sequence is synthesized)
aattaatatagtacagaatatatttttcccttgttgagatcttcttttgtaatgtttttcatgttactgcctagggcggtgctgagcacacagcaagtttaataaacttgactgaattca

SEQ ID NO: 417730 - DNA, 120 bp, Artificial Sequence
  ENSG00000149582_20 (sequence is synthesized)
ctgagctcaggtacacccctgttcagtcgttgaccaagtccttctgggttccaaagccccctctctcccctgtctgcacttctgtttgggtacccactccaggccccaagccctggagtc

SEQ ID NO: 417731 - DNA, 120 bp, Artificial Sequence
  ENSG00000149582_21 (sequence is synthesized)
atggtcagacctgggctgagcgggccttctctggaggcaccagcaccttcactgtcactgcccatcgggcccagcatgagctcaactgctctctgcaggaccccagaagtggccgatcag

SEQ ID NO: 417732 - DNA, 120 bp, Artificial Sequence
  ENSG00000149582_22 (sequence is synthesized)
taactacccctggctcaccaaccacacggtgcagctgcagctccgcagcctggcacacaacctctcggtggtggccaccaatgacgtgggtgtcaccagtgcgtcgcttccagccccagg

SEQ ID NO: 417733 - DNA, 120 bp, Artificial Sequence
  ENSG00000149582_23 (sequence is synthesized)
atgacctcactccagattccagagcagtgaaaccagcagaccggcagatggctcagaacaacagccggccagagcttctggacccggagcccggcggcctcctcaccagccaaggaagaa

SEQ ID NO: 417734 - DNA, 120 bp, Artificial Sequence
  ENSG00000149582_24 (sequence is synthesized)
gaaatcaggacaaagacgcataacagagggaagaccatgggaagacacagaagatggccaagaagagacccctcagaagaaatcaatcttggtggggcgtggtggcttcacgcctgtaat

SEQ ID NO: 417735 - DNA, 77 bp, Artificial Sequence
  ENSG00000149582_25 (sequence is synthesized)
aatcaatcttggtggggcgtggtggcttcacgcctgtaataccagcactgtgggaggttgaggtgggcagatcgcct

SEQ ID NO: 417736 - DNA, 82 bp, Artificial Sequence
  ENSG00000149582_26 (sequence is synthesized)
tctgcttgagtccagcaggttgaggctgcagtgagctgagattgagctactgcactccagcctgggcatagagtaataccct

SEQ ID NO: 417737 - DNA, 120 bp, Artificial Sequence
  ENSG00000149582_27 (sequence is synthesized)
gtggccctgaggtgggcagggagataggttctttgcccagggacccccagcacccaccaggcaggtggtccgcaggacatttagcagacacttaagcactttgcaaatatgaactcattt

SEQ ID NO: 417738 - DNA, 120 bp, Artificial Sequence
  ENSG00000149582_28 (sequence is synthesized)
gatcctctgagtaaccccatgaggtcattactattgtcgtcaccattttacaaataagaaaactgaggcagaaagaggtaagcaatctgcccagggtgatgatcccgctggtaagaagca

SEQ ID NO: 417739 - DNA, 120 bp, Artificial Sequence
  ENSG00000149582_29 (sequence is synthesized)
tatttacactcataatcactccgaaatgctgcctctctggcagacccagccatcctgttcctcagcatcccctctgaggagaggcccaggcccctggctcccatctgggtttgggaagaa

SEQ ID NO: 417740 - DNA, 120 bp, Artificial Sequence
  ENSG00000149582_30 (sequence is synthesized)
gggaacagggcaggagagagaataggattaggagaaaggcgatccctttgggggaggggcgcgtggagtatgtgtgtgagtgtgcgtgtgtgcaaggtgtggttgcacggatgctcgttg

SEQ ID NO: 417741 - DNA, 120 bp, Artificial Sequence
  ENSG00000149582_31 (sequence is synthesized)
cttctgcgtatctgcgggtgtgtgcctctttgtattgtagcctggagtcagtgctcgcttctgcgcctgcaggatgtccatgtgtctgctgggtgggtctgtgcctttgggctttgccgt

SEQ ID NO: 417742 - DNA, 120 bp, Artificial Sequence
  ENSG00000149582_32 (sequence is synthesized)
tcgtgtccgtgccttcgccactgggggctggtctacatttgcgtttccgtacatggttctttttgtttctggagagtaaattcctggagcaattgctaggcctgcctgctgtcacctggc

SEQ ID NO: 417743 - DNA, 120 bp, Artificial Sequence
  ENSG00000149582_33 (sequence is synthesized)
agttgctccggcggcgctcggggagggagccaggtgagccgccccggtggcggggggcgggggcgggatgctcggcgaccccaccctccgaccctctcctcttccgccgacatccaccgg

SEQ ID NO: 417744 - DNA, 120 bp, Artificial Sequence
  ENSG00000149582_34 (sequence is synthesized)
ggtgccctttcctttggcctgctgctcttctcactgggccaattcctggtcacagcacagtaccaaccgtgcctgagcccttcccagaggcctcctgctgtgttccaggttggggggagt

SEQ ID NO: 417745 - DNA, 120 bp, Artificial Sequence
  ENSG00000149582_35 (sequence is synthesized)
gtggtgagccgcggccgcccacctgccgggtaagggcccctcgggcccgtggtcgggcatcgattggccccgcctggcgcagcccccgcccctgcagcggactgcggtgctcatcagacc

SEQ ID NO: 417746 - DNA, 120 bp, Artificial Sequence
  ENSG00000149582_36 (sequence is synthesized)
agcctccagaactatgaaataatacatttctgatgtctaagccactcagtctatggtactttgttatggcagcctagcaaaataatacaacatgctattttttcccccgatcagtatgga

SEQ ID NO: 417747 - DNA, 120 bp, Artificial Sequence
  ENSG00000149582_37 (sequence is synthesized)
attggtcatatgttttataggtaaaatacactgccatactcttttcctgtgggaatctgtgaaaaagaaactgataccaagttatgggcaagtattaacagttatatatgcattacttgg

SEQ ID NO: 417748 - DNA, 120 bp, Artificial Sequence
  ENSG00000149582_38 (sequence is synthesized)
tgttataatgcctaatgattccaggacaccatatgaacagagaaaatgggcatgacatctaactcaggtaacaggctctggatctaaacaagtcacagtgtgaagtttttaaactactgg

SEQ ID NO: 417749 - DNA, 120 bp, Artificial Sequence
  ENSG00000149582_39 (sequence is synthesized)
tttcttaaaacttttctctttttacaaaaaacagagtacatatagttctgcaacttgctgcaatttgcttttttcatttaacaacatatcactgatatttcttcatattagagcaaaata

SEQ ID NO: 417750 - DNA, 120 bp, Artificial Sequence
  ENSG00000149582_40 (sequence is synthesized)
aggccaaataatattccattgcatagtatttcactgaatggatgtactgcaacctagctattcaatcccctaatcagacaccttcccctcaactacagcttcaaaatgctctgaggaaag

SEQ ID NO: 417751 - DNA, 120 bp, Artificial Sequence
  ENSG00000149582_41 (sequence is synthesized)
agactgtttccaaattctgtgtgtttacaatcaattcttcatatacaaaaaaaatctgtctttgtagagcttacattttagtagggaagaacaaaataagtaaataaagtctatggtatg

SEQ ID NO: 417752 - DNA, 120 bp, Artificial Sequence
  ENSG00000149582_42 (sequence is synthesized)
acggatgctcgttgcttctgcgtatctgcgggtgtgtgcctctttgtattgtagcctggagtcagtgctcgcttctgcgcctgcaggatgtccatgtgtctgctggcagcctagggccta

SEQ ID NO: 417753 - DNA, 120 bp, Artificial Sequence
  ENSG00000149582_43 (sequence is synthesized)
ttcaggtgggctcaggggtcccgtccccatacagaaatgggaatacttgttgccctgtggttgggtcttgtggatgaactgtccccagccaccctgggcaaggagggcagagtagtacct

SEQ ID NO: 417754 - DNA, 120 bp, Artificial Sequence
  ENSG00000149582_44 (sequence is synthesized)
cagccaagacagcaagtgcagctgggcagaaccagtcatctctgacggtggcagagcacttccagggggtggccatgggtacggtgacatgcatcccaggtagcagggtcaagcactggg

SEQ ID NO: 417755 - DNA, 120 bp, Artificial Sequence
  ENSG00000149582_45 (sequence is synthesized)
acccagtctctggccccagggccaggcctgggcatttgagagaccccttgcctgagggtcctgggtctgaaagggtaggacagcccagcgtgggagggcacactgagaattagggacatg

SEQ ID NO: 417756 - DNA, 120 bp, Artificial Sequence
  ENSG00000149591_0 (sequence is synthesized)
caagtcttcactccttcctgcgagccctgaggaagccttgtgagtgcattggctggggcttggagggaagttgggctggagctggacaggagcagtgggtgcatttcaggcaggctctcc

SEQ ID NO: 417757 - DNA, 120 bp, Artificial Sequence
  ENSG00000149591_1 (sequence is synthesized)
tgaggtcccaggcgccagctccagctccctggctagggaaacccaccctctcagtcagcatgggggcccaagctccaggcagggtgggctggatcactagcgtcctggatctctctcaga

SEQ ID NO: 417758 - DNA, 120 bp, Artificial Sequence
  ENSG00000149591_2 (sequence is synthesized)
ctgggcagccccgggctcattgaaatgccccggatgacttggctagtgcagaggaattgatggaaaccaccggggtgagagggaggctccccatctcagccagccacatccacaaggtgt

SEQ ID NO: 417759 - DNA, 120 bp, Artificial Sequence
  ENSG00000149591_3 (sequence is synthesized)
gtgtaagggtgcaggcgccggccggttaggccaaggctctactgtctgttgcccctccaggagaacttccaaggagctttccccagacatggccaacaagggtccttcctatggcatgag

SEQ ID NO: 417760 - DNA, 120 bp, Artificial Sequence
  ENSG00000149591_4 (sequence is synthesized)
ccgcgaagtgcagtccaaaatcgagaagaagtatgacgaggagctggaggagcggctggtggagtggatcatagtgcagtgtggccctgatgtgggccgcccagaccgtgggcgcttggg

SEQ ID NO: 417761 - DNA, 120 bp, Artificial Sequence
  ENSG00000149591_5 (sequence is synthesized)
cttccaggtctggctgaagaatggcgtgattctgagcaagctggtgaacagcctgtaccctgatggctccaagccggtgaaggtgcccgagaacccaccctccatggtcttcaagcagat

SEQ ID NO: 417762 - DNA, 120 bp, Artificial Sequence
  ENSG00000149591_6 (sequence is synthesized)
tatggggtcatcaagactgacatgttccagactgttgacctctttgaaggcaaagacatggcagcagtgcagaggaccctgatggctttgggcagcttggcagtgaccaagaatgatggg

SEQ ID NO: 417763 - DNA, 120 bp, Artificial Sequence
  ENSG00000149591_7 (sequence is synthesized)
cactaccgtggagatcccaactggtttatgaagaaagcgcaggagcataagagggaattcacagagagccagctgcaggagggaaagcatgtcattggccttcagatgggcagcaacaga

SEQ ID NO: 417764 - DNA, 120 bp, Artificial Sequence
  ENSG00000149591_8 (sequence is synthesized)
ggggcctcccaggccggcatgacaggctacggacgacctcggcagatcatcagttagagcggagagggctagccctgagcccggccctcccccagctccttggctgcagccatcccgctt

SEQ ID NO: 417765 - DNA, 120 bp, Artificial Sequence
  ENSG00000149591_9 (sequence is synthesized)
agcctgcctcacccacacccgtgtggtaccttcagccctggccaagctttgaggctctgtcactgagcaatggtaactgcacctgggcagctcctccctgtgcccccagcctcagcccaa

SEQ ID NO: 417766 - DNA, 120 bp, Artificial Sequence
  ENSG00000149591_10 (sequence is synthesized)
cttcttacccgaaagcatcactgccttggcccctccctcccggctgcccccatcacctctactgtctcctccctgggctaagcaggggagaagcgggctgggggtagcctggatgtgggc

SEQ ID NO: 417767 - DNA, 120 bp, Artificial Sequence
  ENSG00000149591_11 (sequence is synthesized)
caagtccactgtcctccttggcggcaaaagcccattgaagaagaaccagcccagcctgccccctatcttgtcctggaatatttttggggttggaactcaaaaaaaaaaaaaaaaaatcaa

SEQ ID NO: 417768 - DNA, 120 bp, Artificial Sequence
  ENSG00000149591_12 (sequence is synthesized)
gtatgtgttcctggctgccgtcctctgaaggacccttcatgtgccaagattccaggacagtcagattctttcagaggaaacaggccatagaacaggagagtgaatcttggggaccgaagg

SEQ ID NO: 417769 - DNA, 120 bp, Artificial Sequence
  ENSG00000149591_13 (sequence is synthesized)
gaaaaaggagccactcagcagcatgcagtggctttggggagacagaggaaaggagagattgcgagtggcagaattgtttggaaggtttttattttggaaaagctgtgcagaaaaaaattc

SEQ ID NO: 417770 - DNA, 120 bp, Artificial Sequence
  ENSG00000149591_14 (sequence is synthesized)
aagaaaatgttgctgtgaaaagagaaaaacaaatcttaagcattaaaaaaaattcaaccaactagctcagaagaggggagaaggccaaggttgagagaagagtcacagcctgtcaggcag

SEQ ID NO: 417771 - DNA, 120 bp, Artificial Sequence
  ENSG00000149591_15 (sequence is synthesized)
atagctggcctccggcgggaaggccatttccctgagcacttgcagaggaagacagggtggtggcaggactggagtggcagtggctcccaaggctctctcctccaacatgtgcatctgcca

SEQ ID NO: 417772 - DNA, 120 bp, Artificial Sequence
  ENSG00000149591_16 (sequence is synthesized)
tctgctctgcagtcctgccgcaggattccctagtgaagcagctcaggcctgggggagccgtgtgtatcccagctgtgccggcagcatcataccaatcgtgggggtggtgaaggagccagg

SEQ ID NO: 417773 - DNA, 120 bp, Artificial Sequence
  ENSG00000149591_17 (sequence is synthesized)
gacaggcatgtccaggggctcctcccagcctctaccccgaagtcctcttcccaagtgaccccagtgatgtttccattgagatgcgctcctggctatggcaggcaccttctcaacttatat

SEQ ID NO: 417774 - DNA, 120 bp, Artificial Sequence
  ENSG00000149591_18 (sequence is synthesized)
gtgggaaggggtcccccatgcttgggggacctaggcagctggcttggcccaagagagatgaggatggaggccaaaccaaaggggggcgccaatcccctgtccaacaccttctcaccaaaa

SEQ ID NO: 417775 - DNA, 120 bp, Artificial Sequence
  ENSG00000149591_19 (sequence is synthesized)
gctcccgtttggctggaggcagaccctgtggctctgaccagacttctctggcagcaatcctccaccatttgtatcttaagaaggccctcaccctctttgagtggagtcagaggatgcctc

SEQ ID NO: 417776 - DNA, 120 bp, Artificial Sequence
  ENSG00000149591_20 (sequence is synthesized)
agattccagatgtaagcatcagaactgctttctgtcaagagctccctaattttgggaaagaagagcctgtcccacactgtcaggccctgaggtcagcagatctgctcctccttcccgtgc

SEQ ID NO: 417777 - DNA, 120 bp, Artificial Sequence
  ENSG00000149591_21 (sequence is synthesized)
ggtacgtctaggtgctgatgagggcagtccagggcgctcttgttctgggacaggctccagtccccttgctccagcaggtctggggcaaggaggtcagaggtggtgggagggcccctgctc

SEQ ID NO: 417778 - DNA, 120 bp, Artificial Sequence
  ENSG00000149591_22 (sequence is synthesized)
tctgtttccacttcgtctggatccttgctgctgcaaagtggcactgattctagctctgtcccttcctccttggctttccggctccgatggggccagtggcagggtccactcctacaaact

SEQ ID NO: 417779 - DNA, 120 bp, Artificial Sequence
  ENSG00000149591_23 (sequence is synthesized)
tgattggaagccacattcctctggctcaaatatacttccagcatgtagtaaacagtccagaagacggtgaaacagcctaccagcaccagggtctggggccgaggcaagcacctacgtgag

SEQ ID NO: 417780 - DNA, 120 bp, Artificial Sequence
  ENSG00000149591_24 (sequence is synthesized)
gcactgtttcccgaagcctacagcctttctcagcccaggacaatgagctcagaaagtctttttccttctagggactgcctttttcacccaaactgttccctctgccccctcccccgacaa

SEQ ID NO: 417781 - DNA, 120 bp, Artificial Sequence
  ENSG00000149591_25 (sequence is synthesized)
ggcctgtcctgtaagagttaggctagcagggtaggagcaatgctatgaaaccactgctgggacccaggtcttcccagtccttcaccccgcaggtcaccctgagaaacacactaagaactc

SEQ ID NO: 417782 - DNA, 120 bp, Artificial Sequence
  ENSG00000149591_26 (sequence is synthesized)
catcccccagacaggacagtcccatctacccgcagcttgagtcttggccctagtaccttgagggtgttgggggtgatggtgtaaccatcttcctcaggaattttcagccccggtgggcag

SEQ ID NO: 417783 - DNA, 120 bp, Artificial Sequence
  ENSG00000149591_27 (sequence is synthesized)
ggcagggcgaagtcatcgtgcaggtattttccactcatggcactctctaacagcctgtggagaagaaaagaggtgaggatgccccactgactatggttcctataccatctgccctcaccc

SEQ ID NO: 417784 - DNA, 120 bp, Artificial Sequence
  ENSG00000149591_28 (sequence is synthesized)
attttcctgccttacaggtgaagacagggaagccccacagcaaaaaggagaggcccagactgtgagttcccagcccggggctccatctaccggcttgacgctggaactgggaagcacagc

SEQ ID NO: 417785 - DNA, 120 bp, Artificial Sequence
  ENSG00000149591_29 (sequence is synthesized)
tggggttcagagggcgatgggctccctaggcggcccttcccctgtgactggccttccctctgacacatgcggctttacccacctttgtctgtccctgatgtctactgcactccacacaga

SEQ ID NO: 417786 - DNA, 120 bp, Artificial Sequence
  ENSG00000149591_30 (sequence is synthesized)
gccatatagggtcagctgccattgccggaggatgccgacctggaatgactcatcccctagggcagcaaggggcagctcgtgagccacgcccctctgtcagccatgccagacagcagaggc

SEQ ID NO: 417787 - DNA, 120 bp, Artificial Sequence
  ENSG00000149591_31 (sequence is synthesized)
cctgcccgccctgccacccaaaggggctcaggccacatggtctgctccaggagctgcctcactgtgtcccactgaccccaggttctgcagaagggcctcactgggtgcccttagggatgg

SEQ ID NO: 417788 - DNA, 120 bp, Artificial Sequence
  ENSG00000149591_32 (sequence is synthesized)
aaagggttgaaaggctgtactccaaagcagagtcttgcttttctctcccgtattttgggggttcagctgggattagaaaaaaatgtctttccaccaaattaaagaaagctttgaaaacca

SEQ ID NO: 417789 - DNA, 120 bp, Artificial Sequence
  ENSG00000149591_33 (sequence is synthesized)
aggggtctcaccagagagggagccgggggagtgcgctcctgcgtccatcctcagaccagcgtgtccctcccaacctctgacccctctgaggccaggggatgggttcggcttcctttggta

SEQ ID NO: 417790 - DNA, 120 bp, Artificial Sequence
  ENSG00000149591_34 (sequence is synthesized)
cttttggaagtctcttcagacaaacactggagagaaggcacagcaccctagggtgacatcagtggacaggtcagtttcctgttcctgttcccagccacccctgtctgtctgcccagggac

SEQ ID NO: 417791 - DNA, 120 bp, Artificial Sequence
  ENSG00000149591_35 (sequence is synthesized)
ctacctgcctggcccactcctgctgccacccctctccatgagtgggactcctgagcagtgccaggcccaggccctcagggtggcagttgctggatggggccaggcttcccattccctggc

SEQ ID NO: 417792 - DNA, 120 bp, Artificial Sequence
  ENSG00000149591_36 (sequence is synthesized)
aggcagactcttggctctggaagatccctgggggactctgacttcttggttactcaggctactccgtaagggtagccttacgagagcgtaagggcatgaggggaagtcgatgggtagacc

SEQ ID NO: 417793 - DNA, 120 bp, Artificial Sequence
  ENSG00000149591_37 (sequence is synthesized)
aggtgtctctgatttctctgaggaaatgcagcttctttgccaagaactcttgggctttggtggcttcgtcgcccttgcctggggtgggcgagttttagtctcttcagctgcagaccagaa

SEQ ID NO: 417794 - DNA, 120 bp, Artificial Sequence
  ENSG00000149591_38 (sequence is synthesized)
gctgagctgacctgaaaagagctggagttctggagttcgggcttccaggccagggcctgcttctgggtgagagtgggaggtaatggttgcttgaggcagaggcagtaaaccctcacaccc

SEQ ID NO: 417795 - DNA, 120 bp, Artificial Sequence
  ENSG00000149591_39 (sequence is synthesized)
gcagctggacaaaggcaccagctggctgtattctgtgggggcaatgtggcttctggaaggtctctccagtggctctgtagctggtcttggcaaagaatgttctagaccaagggttgtcaa

SEQ ID NO: 417796 - DNA, 120 bp, Artificial Sequence
  ENSG00000149591_40 (sequence is synthesized)
actacagctcatgggccaaatccagcctgctgtctgcttttgtaagtaaagttttattggaacaaagccatgttcatttgttacatattgtctatggctgctttcacactgcaacagcag

SEQ ID NO: 417797 - DNA, 120 bp, Artificial Sequence
  ENSG00000149591_41 (sequence is synthesized)
agaccatgtgtcctgcaaagcctaaaatatgttctgtcttatcctttacaaaaacagtttactgacccctgctctagacctccaaagacctggtatcctctttcctggtgttcaagttca

SEQ ID NO: 417798 - DNA, 120 bp, Artificial Sequence
  ENSG00000149591_42 (sequence is synthesized)
gagaggtgtctggagtaggggctgagcctggcctggatgggcagtgctgtgacaagtgtctaggatggccgggtatcctgcacagagctagaaggctgcctggcacgggtgaaagcagag

SEQ ID NO: 417799 - DNA, 120 bp, Artificial Sequence
  ENSG00000149591_43 (sequence is synthesized)
ctggcatcactggcagggagaggggtggctgggccaggagcccacctcatccccagtgctcagagaactgggtcctcagaagtggtcctgcccccactttacacataaggaaacagacgc

SEQ ID NO: 417800 - DNA, 120 bp, Artificial Sequence
  ENSG00000149591_44 (sequence is synthesized)
aaggaggagagggatgcccaatgacgggcacttcgatgagtccgtgtgaactctgttccgtgtgagctgctgcgcgctcagggaatgattgtgagaagcgggtggaggctggagtgggca

SEQ ID NO: 417801 - DNA, 120 bp, Artificial Sequence
  ENSG00000149591_45 (sequence is synthesized)
gcaaagaactgacattttgaggtcagtttttcactccttggtcaagggcaggctctctccctggtcattaccaggagcctggctccgggcagcaaagaactgacatttcgaggagctctg

SEQ ID NO: 417802 - DNA, 120 bp, Artificial Sequence
  ENSG00000149591_46 (sequence is synthesized)
ctaagggccaggcagtatgtgagggagttcacagacaccgtcccattttcacagccctctgaggttggtaacataacccccacttcacagatgaggaactccagcccagaaagcctgtca

SEQ ID NO: 417803 - DNA, 120 bp, Artificial Sequence
  ENSG00000149591_47 (sequence is synthesized)
ggtgggaggtggcttgttctaaggagcttgcgggaaggattaggggaagcagatagccaagaaaggataaagtgagggtctgggatggggaataatgggtccttaatactccttgacccc

SEQ ID NO: 417804 - DNA, 120 bp, Artificial Sequence
  ENSG00000149591_48 (sequence is synthesized)
tccctttccaccctcctgcgctcagtctccctagcctatgaggcaagctagattagggaaaaaaagtgcaacaggaaggcaatgggattgggctaggacgtaacagagggatcagaaaac

SEQ ID NO: 417805 - DNA, 120 bp, Artificial Sequence
  ENSG00000149591_49 (sequence is synthesized)
gtgtgctcactcctatttgggaagagagaaggggcacagcagccctgcaggggcccctggctctgctcgtgtttctgggcttctgctgctttccccagacatggccaacaagggtccttc

SEQ ID NO: 417806 - DNA, 120 bp, Artificial Sequence
  ENSG00000149596_0 (sequence is synthesized)
ggattttcagtgttccaggactgggtgttctgctggtctccctctcccctcccttccccgattccccggtgccctccctgcgcgcagacccaggggactctgagaatggaagggagctct

SEQ ID NO: 417807 - DNA, 120 bp, Artificial Sequence
  ENSG00000149596_1 (sequence is synthesized)
cattcccgggaggaaaagacaccaggttccctgggctgcctgcactcagttctcagcctccttcctcatgcctccagccactgcccgggtctgcggcacgggcgcgatttgaaatacccc

SEQ ID NO: 417808 - DNA, 120 bp, Artificial Sequence
  ENSG00000149596_2 (sequence is synthesized)
tccttcccgctttgaagaaggctgggctggctgggggttattttgggagcagcttctgagatccaatggccttgttagggcaacactgacctttccgtcccagaaggagggcaggattgg

SEQ ID NO: 417809 - DNA, 120 bp, Artificial Sequence
  ENSG00000149596_3 (sequence is synthesized)
agaagggggcggggcagcggcggggagaccgacagccccgcacacccactggggtggagaagggggccagcgggctgcgggaattcagcctccggcgggggctgccaccgaggggaattt

SEQ ID NO: 417810 - DNA, 120 bp, Artificial Sequence
  ENSG00000149596_4 (sequence is synthesized)
cccctctttgaaaaggctggggacccctccaccccaccctttcactgggcttcttaaagagatcacaccgttttcccttggacttcttggaaggcagacttgggacgctttgtggggact

SEQ ID NO: 417811 - DNA, 120 bp, Artificial Sequence
  ENSG00000149596_5 (sequence is synthesized)
ttgaacctttccttcctgctttctttccagcaggcagccttgctctggctggtggagtcggggctcccgggcatggcactgactagccgacccggtgctgacttggcgccggggctcttt

SEQ ID NO: 417812 - DNA, 120 bp, Artificial Sequence
  ENSG00000149596_6 (sequence is synthesized)
cagcctctgctggcatcctgcttcccccctcctggggtgcagtggtgagtctgggggcctgcccccgagggcactggaggagtgttgcaggcatcacccacgccctctgcacccacgctg

SEQ ID NO: 417813 - DNA, 120 bp, Artificial Sequence
  ENSG00000149596_7 (sequence is synthesized)
gaggacggggaggttgtcaggggctatgatgagatgagtgggggccgcttcgactttgatgatggaggggcgtactgcgggggctgggaggggggaaaggcccatgggcatggactgtgc

SEQ ID NO: 417814 - DNA, 120 bp, Artificial Sequence
  ENSG00000149596_8 (sequence is synthesized)
acaggccccaagggccagggcgaatactctggctcctggaactttggctttgaggtggcaggtgtctacacctggcccagcggaaacacctttgagggatactggagccagggcaaacgg

SEQ ID NO: 417815 - DNA, 120 bp, Artificial Sequence
  ENSG00000149596_9 (sequence is synthesized)
catgggctgggcatagagaccaaggggcgctggctctacaagggcgagtggacacatggcttcaagggacgctacggaatccggcagagctcaagcagcggtgccaagtatgagggcacc

SEQ ID NO: 417816 - DNA, 120 bp, Artificial Sequence
  ENSG00000149596_10 (sequence is synthesized)
tggaacaatggcctgcaagacggctatggcaccgagacctatgctgatggagggacgtaccaaggccagttcaccaacggcatgcgccatggctacggagtacgccagagcgtgccctac

SEQ ID NO: 417817 - DNA, 120 bp, Artificial Sequence
  ENSG00000149596_11 (sequence is synthesized)
gggatggccgtggtggtgcgctcgccgctgcgcacgtcgctgtcgtccctgcgcagcgagcacagcaacggcacggtggccccggactctcccgcctcgccggcctccgacggccccgcg

SEQ ID NO: 417818 - DNA, 120 bp, Artificial Sequence
  ENSG00000149596_12 (sequence is synthesized)
ctcagcctcctggccaatgccgaggcggccgcgcgggcgcccaagggcggcggcctcttccagcggggcgcgctgctgggcaagctgcggcgcgcagagtcgcgcacgtccgtgggtagc

SEQ ID NO: 417819 - DNA, 120 bp, Artificial Sequence
  ENSG00000149596_13 (sequence is synthesized)
ctgcggcgcgcagagtcgcgcacgtccgtgggtagccagcgcagccgtgtcagcttccttaagagcgacctcagctcgggcgccagcgacgccgcgtccaccgccagcctgggagaggcc

SEQ ID NO: 417820 - DNA, 120 bp, Artificial Sequence
  ENSG00000149596_14 (sequence is synthesized)
gccgagggcgccgacgaggccgcacccttcgaggccgatatcgacgccaccaccaccgagacctacatgggcgagtggaagaacgacaaacgctcgggcttcggcgtgagcgaacgctcc

SEQ ID NO: 417821 - DNA, 120 bp, Artificial Sequence
  ENSG00000149596_15 (sequence is synthesized)
agtggcctccgctacgagggcgagtggctggacaacctgcgccacggctatggctgcaccacgctgcccgacggccaccgcgaggagggcaagtaccgccacaacgtgctggtcaaggac

SEQ ID NO: 417822 - DNA, 120 bp, Artificial Sequence
  ENSG00000149596_16 (sequence is synthesized)
accaagcgccgcatgctgcagctcaagagcaacaaggtccgccagaaagtggagcacagtgtggagggtgcccagcgcgccgctgctatcgcgcgccagaaggccgagattgccgcctcc

SEQ ID NO: 417823 - DNA, 120 bp, Artificial Sequence
  ENSG00000149596_17 (sequence is synthesized)
aggacaagccacgccaaggccaaagctgaggcagcggaacaggccgccctggctgccaaccaggagtccaacattgctcgcactttggccagggagctggctccggacttctaccagcca

SEQ ID NO: 417824 - DNA, 120 bp, Artificial Sequence
  ENSG00000149596_18 (sequence is synthesized)
ggtccggaatatcagaagcgccggctgctgcaggagatcctggagaactcggagagcctgctggagccccccgaccggggcgccggcgcagcgggcctcccacagccgccccgcgagagc

SEQ ID NO: 417825 - DNA, 120 bp, Artificial Sequence
  ENSG00000149596_19 (sequence is synthesized)
cctgctgagcccaggcgcctggaacggcgagcccagcggtgagggcagccggtcagtcactccgtccgagggcgcgggccgccgcagccccgcgcgtccagccaccgagcgcatggccat

SEQ ID NO: 417826 - DNA, 120 bp, Artificial Sequence
  ENSG00000149596_20 (sequence is synthesized)
cgaggctctgcaggcaccgcctgcgccgtcgcgggagccggaggtggcgctttaccagggctaccacagctatgctgtgcgcaccacgccgcccgagcccccaccctttgaggaccagcc

SEQ ID NO: 417827 - DNA, 120 bp, Artificial Sequence
  ENSG00000149596_21 (sequence is synthesized)
aggtctccgggtccgagtccgcgccctcgtccccggccaccgccccgctgcaggcccccacgctccgaggccccgagcctgcacgcgagacccccgccaagctggagcccaagcccatca

SEQ ID NO: 417828 - DNA, 120 bp, Artificial Sequence
  ENSG00000149596_22 (sequence is synthesized)
gcccatcatccccaaagccgagcccagggccaaggcccgcaagactgaggctcgagggctgaccaaggcgggggccaagaagaaggcgcggaaggaggccgcactggcggcagaggcgga

SEQ ID NO: 417829 - DNA, 120 bp, Artificial Sequence
  ENSG00000149596_23 (sequence is synthesized)
ggtggaggtggaagaggtccccaacaccatcctcatctgcatggtgatcctgctgaacatcggcctggccatcctctttgttcacctcctgacctgaccgtcgcttaccagagccagaag

SEQ ID NO: 417830 - DNA, 120 bp, Artificial Sequence
  ENSG00000149596_24 (sequence is synthesized)
ttcctgctgaggacatgaggacccgtctttttgcagtgccaggcagggtggccaaagaggactggactctggacctggagccccgtggtccagttcacattcaccccacaagagtttcag

SEQ ID NO: 417831 - DNA, 120 bp, Artificial Sequence
  ENSG00000149596_25 (sequence is synthesized)
gaggcctcccacggtgcctgtgctgggtggcggtggtggtgccaagaggaatggaatgtcctgggctccttcaggagctctctacccaggggcaaggagagcccagagagaagcgccctg

SEQ ID NO: 417832 - DNA, 120 bp, Artificial Sequence
  ENSG00000149596_26 (sequence is synthesized)
gtctcttgagcttcctgatctgctcctgtcccccgctctcctccactcccttgcctttccctaggttgtcccctccctgggcttttgtgtgttttgggagatgtcacctaaccaggacat

SEQ ID NO: 417833 - DNA, 120 bp, Artificial Sequence
  ENSG00000149596_27 (sequence is synthesized)
tgatattcaatcccatcccccttcctcccaccctgccccactttgatttaatcctttggctgtgggctgaggcctcccagggaagctgggtggggtgggtgttgagaccccctcagacca

SEQ ID NO: 417834 - DNA, 120 bp, Artificial Sequence
  ENSG00000149596_28 (sequence is synthesized)
gcacagagacctgtccttgtgcagtctgcaccctgcactccctcccttgcctgtagatgttctggatgacagtagaggaaatggacaaggtcagtttgaatatcccagaacacagtgctc

SEQ ID NO: 417835 - DNA, 120 bp, Artificial Sequence
  ENSG00000149596_29 (sequence is synthesized)
tgtctcctcccaccagtccagttagcttcccttctggaccaatagacgaggggagaccccatggatcctctggctgggaagccactgaccaggtggccagggggcagggtgggaagaggg

SEQ ID NO: 417836 - DNA, 120 bp, Artificial Sequence
  ENSG00000149596_30 (sequence is synthesized)
gttaaggtgcagtgatgatggcctgttttggagtgtgtctgagactgggattgcatttggggtttcccgtgtgcttgggatgctagagggtcacctgcaggaggcctggggccggcgaga

SEQ ID NO: 417837 - DNA, 120 bp, Artificial Sequence
  ENSG00000149596_31 (sequence is synthesized)
aatctcctgtgatgccctgtgaaatggcttgtctcctcccccatcagggcccaccgaaagctcaggggagcacagaagcccatggaagcccagggagatgtccctggggcagacactaag

SEQ ID NO: 417838 - DNA, 120 bp, Artificial Sequence
  ENSG00000149596_32 (sequence is synthesized)
gcaggtgttgaagacaagctgcttgtcaagaagcatttcccggcaagagaggggcaagtctggggctccaactgggtacagcctgggtgcagttataagcccctttggcttacttggtag

SEQ ID NO: 417839 - DNA, 120 bp, Artificial Sequence
  ENSG00000149596_33 (sequence is synthesized)
aagatggctacttggatgtacctcacttaaagatgttttgtaccacactaggtctctgggcccttgtgcttcctgtgggtggggtgagggccaaaggctatggtttcctgcctccaggag

SEQ ID NO: 417840 - DNA, 120 bp, Artificial Sequence
  ENSG00000149596_34 (sequence is synthesized)
aatggagagaaagggcttccaggcccctccaagcctggggaaggacgtggcatccaagctgagccagagggaactgctgctgtcctcccttcatttctgtggaccttggaggctttggct

SEQ ID NO: 417841 - DNA, 120 bp, Artificial Sequence
  ENSG00000149596_35 (sequence is synthesized)
ttgtggcagggcctccccaggcagctctgggacctaggagtttgcttctgatagggtcagctttcccatttcccttcaatgcttgggaaccttctcccttagcttcacacttgccgtttc

SEQ ID NO: 417842 - DNA, 120 bp, Artificial Sequence
  ENSG00000149596_36 (sequence is synthesized)
aagccctgctgggaccttgtggcttggctggaatccaggactgtattttcatggagaagaacctgcagattcttccatcctcagctggccatggcccacagctctgcatctgcatctgag

SEQ ID NO: 417843 - DNA, 120 bp, Artificial Sequence
  ENSG00000149596_37 (sequence is synthesized)
cttctcaagactcctggagcatgaggggaatggggcggggccactgctctgtgctgacgggctccgtctcggagattcttgtcctgttttttttctgttgtttttttttggctggtgctg

SEQ ID NO: 417844 - DNA, 120 bp, Artificial Sequence
  ENSG00000149596_38 (sequence is synthesized)
gggacaagcctgtgcctgccaaagctcccaggccaagtttgggggctggtgtttggggttgggtttggggttcaggatgctgcagtctgtgcaataataaacccgcatctgctcacgggc

SEQ ID NO: 417845 - DNA, 120 bp, Artificial Sequence
  ENSG00000149596_39 (sequence is synthesized)
caatggcctgcaagacggctatggcaccgagacctatgctgatggagggatgtgttaaaatcgccctcagaatatggtcgagacaatgaaacaagacaatgaagcactgagcatcatgcc

SEQ ID NO: 417846 - DNA, 120 bp, Artificial Sequence
  ENSG00000149596_40 (sequence is synthesized)
tggcacataggaaatgccaaaatatatattcccgtatttccttcacattccaaagggtgaattaattcaggatggcctgaaccatagctgtcactgtcttcgggaggatatttgaggaca

SEQ ID NO: 417847 - DNA, 120 bp, Artificial Sequence
  ENSG00000149596_41 (sequence is synthesized)
acgagtttttgactttggaacagtaaataagacaagactttgattcgcttagttctgccttgagtcctgccagtgtagatggaatccatgccagacatgattccatttcgaatgtagaat

SEQ ID NO: 417848 - DNA, 120 bp, Artificial Sequence
  ENSG00000149596_42 (sequence is synthesized)
cagcataatttaacctcatcttggaaatctcatgtcccagttcacagccaggcatcagcgtgacagtcagctgagctgctgtcttggcagcttctgggcattctatggagaccccaggag

SEQ ID NO: 417849 - DNA, 120 bp, Artificial Sequence
  ENSG00000149596_43 (sequence is synthesized)
agcacagcagacccttagcagaacagaaaagcggaccgtattagtctttcctgtccacggccttgttttcagtgattcatgtgcccgattggccaaatctctgcagacgtgcccctgtcc

SEQ ID NO: 417850 - DNA, 120 bp, Artificial Sequence
  ENSG00000149596_44 (sequence is synthesized)
gaggccaggcttctgggattcatcgagcttgcttgtttccgggacctgctaattccgtgcccagcagctgttccccggagcaggccctgccctccacaccctcatgaggaatgccgagtc

SEQ ID NO: 417851 - DNA, 120 bp, Artificial Sequence
  ENSG00000149596_45 (sequence is synthesized)
tcattttctgagggccctggttgagggtggggtgtggggcgagggggacagggttgcttcctgccatagacttcctgccttggagggttatccttgttctcacctatcccttcccgagct

SEQ ID NO: 417852 - DNA, 120 bp, Artificial Sequence
  ENSG00000149596_46 (sequence is synthesized)
gaagccacagagtaggagagaagttagggctggcacacctccctcccgtgtaactttcactccctgcttaaagggaactgatgagagttgcctggcacagatctgtgcctggcagaatcc

SEQ ID NO: 417853 - DNA, 120 bp, Artificial Sequence
  ENSG00000149596_47 (sequence is synthesized)
acagagcagcccaggtgtgctaggaactccagagtgacccctgctccaggccaggaatgagcaccttgtgcctggaggtcttcctgccactgctggctgcccattgctgtggatggggta

SEQ ID NO: 417854 - DNA, 120 bp, Artificial Sequence
  ENSG00000149596_48 (sequence is synthesized)
gagctggagtcacacatggaggctggacagctgcatgcagcctgcaggggacactctggatggcatgtaccatgtttttattatttctatttttaattaaattggaatcctttatggata

SEQ ID NO: 417855 - DNA, 80 bp, Artificial Sequence
  ENSG00000149599_0 (sequence is synthesized)
cgcgcctgccggtgccagggtggggtaaggcccccgcccccacctccggaggtggcggccccacgcggccccaacaaact

SEQ ID NO: 417856 - DNA, 120 bp, Artificial Sequence
  ENSG00000149599_1 (sequence is synthesized)
ctggggctttgtccggccccccgccgcgacccgaggcgggggccccacatgaccgaaggggtaggaggagcctgcggcggcggcggtggcagcggcggctccaccaccatttccctcccg

SEQ ID NO: 417857 - DNA, 80 bp, Artificial Sequence
  ENSG00000149599_2 (sequence is synthesized)
gccgcggacgccaggccccccgttccccgccaggctgcaggcgtcgggcctgggccgtcagggcagctgtgaccggatcg

SEQ ID NO: 417858 - DNA, 120 bp, Artificial Sequence
  ENSG00000149599_3 (sequence is synthesized)
cttcccgggcggcgagctgggggtgcacccggaccgccgcccccgggatcatgggcaatggcatgaccaaggtacttcctggactctacctcggaaacttcattgatgccaaagacctgg

SEQ ID NO: 417859 - DNA, 120 bp, Artificial Sequence
  ENSG00000149599_4 (sequence is synthesized)
atcagctgggccgaaataagatcacacacatcatctctatccatgagtcaccccagcctctgctgcaggatatcacctaccttcgcatcccggtcgctgatacccctgaggtacccatca

SEQ ID NO: 417860 - DNA, 120 bp, Artificial Sequence
  ENSG00000149599_5 (sequence is synthesized)
aaaagcacttcaaagaatgtatcaacttcatccactgctgccgccttaatggggggaactgccttgtgcactgctttgcaggcatctctcgcagcaccacgattgtgacagcgtatgtga

SEQ ID NO: 417861 - DNA, 120 bp, Artificial Sequence
  ENSG00000149599_6 (sequence is synthesized)
ctaggctggcgggacgtgcttgaagccatcaaggccaccaggcccatcgccaaccccaacccaggctttaggcagcagcttgaagagtttggctgggccagttcccagaagcttcgccgg

SEQ ID NO: 417862 - DNA, 120 bp, Artificial Sequence
  ENSG00000149599_7 (sequence is synthesized)
cagctggaggagcgcttcggcgagagccccttccgcgacgaggaggagttgcgcgcgctgctgccgctgtgcaagcgctgccggcagggctccgcgacctcggcctcctccgccgggccg

SEQ ID NO: 417863 - DNA, 120 bp, Artificial Sequence
  ENSG00000149599_8 (sequence is synthesized)
cactcagcagcctccgagggaaccgtgcagcgcctggtgccgcgcacgccccgggaagcccaccggccgctgccgctgctggcgcgcgtcaagcagactttctcttgcctcccccggtgt

SEQ ID NO: 417864 - DNA, 120 bp, Artificial Sequence
  ENSG00000149599_9 (sequence is synthesized)
ctgtcccgcaagggcggcaagtgaggatgcagtccagccgtggctccccacttccgactggctcccttcgggggctgtctgcgccttccacgccccccaggacgggcccagaggctgggg

SEQ ID NO: 417865 - DNA, 120 bp, Artificial Sequence
  ENSG00000149599_10 (sequence is synthesized)
gagccccgcggcggcctgaaccctgcctcccgcgcccgccctgctcgtccgcgtctgcagtcagcgtccccaacctgtgcgtctctgtgtccgggccggcctgctgcagccacctggtgc

SEQ ID NO: 417866 - DNA, 120 bp, Artificial Sequence
  ENSG00000149599_11 (sequence is synthesized)
cttagtccttgggctgggggagggggcccacccttaaaggcggcgggaggggagggagggagagtggagggtttgacgggcctggagggtattaaagagacacagaagaagctgcctgtc

SEQ ID NO: 417867 - DNA, 120 bp, Artificial Sequence
  ENSG00000149599_12 (sequence is synthesized)
cctcggctctctccggggctgtttctccatcctgtcccgcctctgcctgtcattgcctttctgcctccccagccccagaatttccatccctgcaccctgcaagtctacctctctcctctc

SEQ ID NO: 417868 - DNA, 120 bp, Artificial Sequence
  ENSG00000149599_13 (sequence is synthesized)
gccccggccgccgcggcccggcgctgaccagctcggtccgcccgcctctgaccttctgttctcgccggtctccgtgcggcggcatctccgtgtccctgtgactcgagaccgcggctgtcg

SEQ ID NO: 417869 - DNA, 120 bp, Artificial Sequence
  ENSG00000149599_14 (sequence is synthesized)
ggtctccccctctctgaccctgcgtctctgtccccgctgtgtccgccctctctccgtgactctgtgtgtctctcgctgtcttgctgtggctgtcactcccaggctgtctcccagtacttc

SEQ ID NO: 417870 - DNA, 120 bp, Artificial Sequence
  ENSG00000149599_15 (sequence is synthesized)
acctgccttcctcctctcccctctcatacccaagctggcctcccttggttccctcggttggttaactggccccctagcctaccctccccagagccccagacccctctcacagaggactca

SEQ ID NO: 417871 - DNA, 120 bp, Artificial Sequence
  ENSG00000149599_16 (sequence is synthesized)
gggcccacaaaagggaagagagtgctccctgagccctgaggtccatacccttcatgggacagagaggggctgtgggccccccagctgccctgggggtggaagggggtgcagcccctgccc

SEQ ID NO: 417872 - DNA, 120 bp, Artificial Sequence
  ENSG00000149599_17 (sequence is synthesized)
acacgcggcttcctccaggcggatggtcaccggacccaaagtaccagatctgtctgtgcttcggtgaggaggacccgggccccacacagcaccccaaggagcagctcatcatggcggacg

SEQ ID NO: 417873 - DNA, 120 bp, Artificial Sequence
  ENSG00000149599_18 (sequence is synthesized)
tgcaggtgcagcttcggcctgggagctcgtcctgcactctaagtgcctcaaccgagcgcccagatgggtcctcaacccctggcaaccccgatggcatcactcaccttcaatgcagctgcc

SEQ ID NO: 417874 - DNA, 120 bp, Artificial Sequence
  ENSG00000149599_19 (sequence is synthesized)
tccatcctaagcgagccgcttcctcttcttgtacccgctgaaggcagcccccaacaggggggctccctactcccacccaaccctgcccacactaagcccatagacttggggcctcccccg

SEQ ID NO: 417875 - DNA, 120 bp, Artificial Sequence
  ENSG00000149599_20 (sequence is synthesized)
gcacatcacccaggtctgccggacggcagaggtggatcgcggccttccactcctctgtcacggggccccggaactcgagagtaggccacaccgccccccagctgggcatggggcttcggc

SEQ ID NO: 417876 - DNA, 120 bp, Artificial Sequence
  ENSG00000149599_21 (sequence is synthesized)
aatagcgctttcctcagagccagccttaacctgctgttgagtccattaaaacgtttgcttaaagtttttaccaataattagatcatcagggttgtttagtgtgggatcaagccataacaa

SEQ ID NO: 417877 - DNA, 120 bp, Artificial Sequence
  ENSG00000149599_22 (sequence is synthesized)
aactgcctagcctctcaggggcctagaatttacagaaccttcctcctccctgcagctagtctctcttctttattctgggggctgggaaggatcccaaaacagggaacttggccgaaccct

SEQ ID NO: 417878 - DNA, 120 bp, Artificial Sequence
  ENSG00000149599_23 (sequence is synthesized)
gggctttggatgctaaccactgaagtaccagcacctgtaggatgctgtctttgaagaaactgaggcggacctccaaatgcagccctaaggcagaggtcaacgtggaagaccagcccttct

SEQ ID NO: 417879 - DNA, 120 bp, Artificial Sequence
  ENSG00000149599_24 (sequence is synthesized)
ccaagccccactggtctttgcaagctgtacgttgtaggcaatctgagaactggaaagggggactacaaccagaaagttggttaccctgccatgggaataaagtagctgttttccacccca

SEQ ID NO: 417880 - DNA, 120 bp, Artificial Sequence
  ENSG00000149599_25 (sequence is synthesized)
agatgcaaaaagcacttcaaagaatgtatcaacttcatccactgctgccgccttaatggggggaactgccttgtgcactggtgagttaagcggagggggataaggtgggggaggaaggaa

SEQ ID NO: 417881 - DNA, 120 bp, Artificial Sequence
  ENSG00000149599_26 (sequence is synthesized)
gtggctgtgccctctgctgaacacacactccccctgtgggaaggttggacctgtgagggatcttctccagcctgtcacagtgcctgagggcccaccattcactggagagaggccaacccg

SEQ ID NO: 417882 - DNA, 120 bp, Artificial Sequence
  ENSG00000149599_27 (sequence is synthesized)
ggactctattccttatgagctgtgtggccatagccaagtagctgtttctctctgagactcaatgtcctcatctgtaaaatgcggaaaagaaagctgacctgatgggactgttgggaggga

SEQ ID NO: 417883 - DNA, 120 bp, Artificial Sequence
  ENSG00000149599_28 (sequence is synthesized)
gttgtcccgcgggccgtgggcccggcacactggggctttgtccggccccccgccgcgacccgaggcgggggccccacatgaccgaaggggtacttcctggactctacctcggaaacttca

SEQ ID NO: 417884 - DNA, 120 bp, Artificial Sequence
  ENSG00000149599_29 (sequence is synthesized)
cagcgctggtgcgcgaagccaccgggcgcacagcccagcgctgtcgtctgagtccgcgggcggccgccgagcgcctgctggggccgccacctcacgttgcagcaggatggtcaccggacc

SEQ ID NO: 417885 - DNA, 120 bp, Artificial Sequence
  ENSG00000149600_0 (sequence is synthesized)
gtgatgctggggtgatgctgatgcccttccaaggttgagacctagtctctactctgatgtcagctctccgagagacactctggcctgctttgttcccttccctgtccccagtgtctggca

SEQ ID NO: 417886 - DNA, 120 bp, Artificial Sequence
  ENSG00000149600_1 (sequence is synthesized)
tcgagtaggctgccataaatatctctggagtgcatagtaacagtgatgatgataatagcagctagccattgattgaagacctcttgtgtgccggtctctgcgttaaacatttctggaggc

SEQ ID NO: 417887 - DNA, 120 bp, Artificial Sequence
  ENSG00000149600_2 (sequence is synthesized)
ttaactcatttaaggagctaccccagccatcattttctcagatggtgaaactgaggttcagagaggccaagcgccgtacccaaaggtcactcagcgggagagctggcaggaaacctcgcg

SEQ ID NO: 417888 - DNA, 80 bp, Artificial Sequence
  ENSG00000149600_3 (sequence is synthesized)
gtgtccgcggccctgcgagggctccccggctccggacagcccagggcggccgggggaggagtgcgctgcgacggccgtgg

SEQ ID NO: 417889 - DNA, 120 bp, Artificial Sequence
  ENSG00000149600_4 (sequence is synthesized)
cgacggccgtggcgaaagtgcggttgtggatgcgcggagaggccggcagcggtggcagcggcagcggaggaggaagctgagcagggcggcggcggcggtggaacctgcggggctggggcg

SEQ ID NO: 417890 - DNA, 120 bp, Artificial Sequence
  ENSG00000149600_5 (sequence is synthesized)
cgcgccatgggccgcctgcactgcactgaggacccggtgccggaggccgtgggcggcgacatgcagcagctgaaccagctgggcgcgcagcagttctcagccctgacagaggtgcttttc

SEQ ID NO: 417891 - DNA, 120 bp, Artificial Sequence
  ENSG00000149600_6 (sequence is synthesized)
cacttcctaactgagccaaaagaggtggaaagatttctggctcagctctctgaatttgccaccaccaatcagatcagtcttggctccctcagaagcatcgtgaaaagcctccttctggtt

SEQ ID NO: 417892 - DNA, 120 bp, Artificial Sequence
  ENSG00000149600_7 (sequence is synthesized)
agtggaagcagaatgctcccacccttgctcgatgggccataggtcagactctgatgattaaccagctcatagatatggagtggaaatttggagtgacatctgggagcagcgaattggaga

SEQ ID NO: 417893 - DNA, 120 bp, Artificial Sequence
  ENSG00000149600_8 (sequence is synthesized)
aagtgggaagtatatttttacaactaaagttggtggttaagaaaggaaatcaaaccgaaaatgtgtatatagaattaaccttgcctcagttctacagcttcctgcacgagatggagcgag

SEQ ID NO: 417894 - DNA, 120 bp, Artificial Sequence
  ENSG00000149600_9 (sequence is synthesized)
tcagaaccagcatggagtgtttctgctgatttctgtccctgcatctcccctggccccgttccctgccctcctcccttccctgggtgactgctctgagaggcacttcactcacaggcctgt

SEQ ID NO: 417895 - DNA, 120 bp, Artificial Sequence
  ENSG00000149600_10 (sequence is synthesized)
gggatgctccatggggccctgctggctccatggggcccaggtgcaaagggtttctgaaaaacagcaggattaagtactgaaagagcccaacacaattaccctgtaaactctctgttaggg

SEQ ID NO: 417896 - DNA, 120 bp, Artificial Sequence
  ENSG00000149600_11 (sequence is synthesized)
caaccaccaccacctgtcttccaggacacatttttagatactctgacaggccactgcatctcagattcaggggagaaaataagttgtcacctccccttcaaagttccagagtaaacaaat

SEQ ID NO: 417897 - DNA, 120 bp, Artificial Sequence
  ENSG00000149600_12 (sequence is synthesized)
ggtgccatcattcaagataacatgctgatcaccctcctcccaaaaagcaagagcttgtttatggctgaggaatcggcggattgtctgaatgacacatatacagagcccccacggatttct

SEQ ID NO: 417898 - DNA, 120 bp, Artificial Sequence
  ENSG00000149600_13 (sequence is synthesized)
gcacactctgggtctgtgctggtggaacattgccaatcagttcttaatgaggcacctgtgtgtaaatacatgcttggtcttctctgcagagaactgaggctaaactctgtccctacttct

SEQ ID NO: 417899 - DNA, 120 bp, Artificial Sequence
  ENSG00000149600_14 (sequence is synthesized)
ggttttgccctgtcatgtcgtaacgaggtgggccttttgaggccattttagtttgagttcgagccaaccacctctgttggttagatgatgaataaaaaggttctgaagaaaaggtctgga

SEQ ID NO: 417900 - DNA, 120 bp, Artificial Sequence
  ENSG00000149600_15 (sequence is synthesized)
aaccagctgggcgcgcaggctgcaggtgccaaccaaggcagtcttggaggcatcctgcttctgtgctggttgggatgccttttcataccaccaaggctgctgaaatagttctcagccctg

SEQ ID NO: 417901 - DNA, 120 bp, Artificial Sequence
  ENSG00000149600_16 (sequence is synthesized)
caggggctggtgacgctcaccacaaatcatgtcttctataaaaacagtcattgccagctgtggagtagctgttccactgcctttcctctcctgaaagatggcacaaggagtgttagaaag

SEQ ID NO: 417902 - DNA, 120 bp, Artificial Sequence
  ENSG00000149600_17 (sequence is synthesized)
ccactggcaggttggagcccccacagttgaagagccgttttgaaaaagggaaagggtgggaacggaatggctgggattgaagaagaaggttgacgagcaagaagctcttgccatagaagt

SEQ ID NO: 417903 - DNA, 120 bp, Artificial Sequence
  ENSG00000149600_18 (sequence is synthesized)
cactccccttttttttcctttggagcagagaaccttctgcattcaagtctctcagttctttattatgatcagttacccatcaagagctgcttagatgtattaagccaaaaaagaaaaaaa

SEQ ID NO: 417904 - DNA, 120 bp, Artificial Sequence
  ENSG00000149600_19 (sequence is synthesized)
aaatcctccgggtggaaattaattttcttggatgattctgtggagttggaaacatttatctgaagctgaattttctctccccagaattaaccttgcctcagttctacagcttcctgcacg

SEQ ID NO: 417905 - DNA, 120 bp, Artificial Sequence
  ENSG00000149609_0 (sequence is synthesized)
agtggtgaccagccctgccatgggaaactatagttcccacaaaaggaccaaagcacccaagcaggcccgcaaggagaggccggctgacatggacaaggcctggtggaaatcgttcctcaa

SEQ ID NO: 417906 - DNA, 120 bp, Artificial Sequence
  ENSG00000149609_1 (sequence is synthesized)
ccacctcactcggaagaagccggctaccaggatcgtgctgattctccccctggacaagcggcagccgctggccaacgctgggcaacggattgactacgcgtccggcgctgggctgggctc

SEQ ID NO: 417907 - DNA, 120 bp, Artificial Sequence
  ENSG00000149609_2 (sequence is synthesized)
gcgcgagccgaggatgccggtactgctgctgctgcggcggcaagaggcgcggcggccggaagagggcggggccagggcagctctgagctggccgcggctgctctcgcgcttccggtcccc

SEQ ID NO: 417908 - DNA, 120 bp, Artificial Sequence
  ENSG00000149609_3 (sequence is synthesized)
ggggaaggctccccgcgaagccggccccgccgaggagcagccgcgcaaacggtgccgctgccctcgcccgcagctttaaacgcttggcccggaccccgcccaataaagagtgcgtggcaa

SEQ ID NO: 417909 - DNA, 120 bp, Artificial Sequence
  ENSG00000149609_4 (sequence is synthesized)
aattggacaggggtcccctccagccctgtgcacgagaggatgacaggacccgggtggacgacaggacccgggtggacgagggtcccaggagaagcgcggagcggccccgggtcgtgggct

SEQ ID NO: 417910 - DNA, 120 bp, Artificial Sequence
  ENSG00000149609_5 (sequence is synthesized)
gctcagcctaggagccgcagaggggtgaacggggcgtgatgaaggcagagccatcgccacggtctggagccagggctgtcttttgctttctccttccttgtgccaagggtcagaacagaa

SEQ ID NO: 417911 - DNA, 120 bp, Artificial Sequence
  ENSG00000149609_6 (sequence is synthesized)
ccccaaaccttgctacagtggcgggaggcagtttccttcccccaacactccaaatccaggtcacatcctgcccagtctgcaggctcaagggaggtgggcttgggcaaacccaggcttggc

SEQ ID NO: 417912 - DNA, 120 bp, Artificial Sequence
  ENSG00000149609_7 (sequence is synthesized)
cacgctagtgagagggacctgcttccggtaaagcctgacatccccccagcatccagaaatccctcttaggcatgagggagggttcccggccaacaggcaccatcctgggtaagaacagcc

SEQ ID NO: 417913 - DNA, 120 bp, Artificial Sequence
  ENSG00000149609_8 (sequence is synthesized)
aggatggcagtcagctggggcaaggcctgagacgtggattctgcctggggacgcacccaggagaagctggaagccctgggcctctctctggcccctcactcctacacattgtgcttggta

SEQ ID NO: 417914 - DNA, 120 bp, Artificial Sequence
  ENSG00000149609_9 (sequence is synthesized)
ccaaaccacttacctgtctagggcagctcactcccctgctcataagctttcaacaggtctccattaccaacagggaaaaagcccacagcttcagtctcactccccaaatcacttagaaga

SEQ ID NO: 417915 - DNA, 120 bp, Artificial Sequence
  ENSG00000149609_10 (sequence is synthesized)
agccctgccacactttctgtgggcgggatcctgctgctgcttctcctcactctcccgggtcccaaatccagctccacacccaatgccacccctggcctgccaaacctgcagcccgccttc

SEQ ID NO: 417916 - DNA, 120 bp, Artificial Sequence
  ENSG00000149609_11 (sequence is synthesized)
ctgccacactctggtgaccaacctcaggatgccctcttttgggggcagatgcagcaggactgaagtcccagctcactacagccatcagcccagcttctgctgaagatgcacttttgtcac

SEQ ID NO: 417917 - DNA, 120 bp, Artificial Sequence
  ENSG00000149609_12 (sequence is synthesized)
cgccaccaggatgaacatctcctccaccttgcctgcaccaggctggaggctgcaagagctataacatcactcctgctaattgtgagaactgactcttccctaccatccacatggttacaa

SEQ ID NO: 417918 - DNA, 120 bp, Artificial Sequence
  ENSG00000149609_13 (sequence is synthesized)
tcagggtaaccatgttcttccatggggctgcacctcctgcccatacagtgattggcccaagctggtcctgtcagcccctccccctaggactgtgattcaggagctgtaagagaccatgtt

SEQ ID NO: 417919 - DNA, 120 bp, Artificial Sequence
  ENSG00000149609_14 (sequence is synthesized)
tcaggagctgtaagagaccatgttctctacttgaacatgcacaggctaagccagccttcagaataaaaacacaatgcaggccaagcgcagtggatcacgcctgtaaacccagcactttgg

SEQ ID NO: 417920 - DNA, 120 bp, Artificial Sequence
  ENSG00000149609_15 (sequence is synthesized)
tcctgggttccccacagccccgcagtcagattctgttcctgaaacctgatttcacccttgctcttgatatccataacatgtaagatcctttcaataaagtccttattttgggttacattc

SEQ ID NO: 417921 - DNA, 120 bp, Artificial Sequence
  ENSG00000149633_0 (sequence is synthesized)
atgtctctcgccgtctccagcctcagtccctctctgtctctctctcagtctctctccctgtcctccccggccgctcctccgagatgacgccggggtcggtgccccgggcctgccctatcc

SEQ ID NO: 417922 - DNA, 120 bp, Artificial Sequence
  ENSG00000149633_1 (sequence is synthesized)
cctggctccagggctaggcgggaccgagggctgccccagacagacggacccgcggacccacagaccccgcgcccaggagaggagccgcgccgcccgccgctggcagcccgtcaccatgga

SEQ ID NO: 417923 - DNA, 120 bp, Artificial Sequence
  ENSG00000149633_2 (sequence is synthesized)
ccctccatccctcgacacagccatccagcatgccctggcgggcctctatcctcctttcgaggccacagcacccaccgtcctgggtcaggtgttccgtctcctggactctggcttccaggg

SEQ ID NO: 417924 - DNA, 120 bp, Artificial Sequence
  ENSG00000149633_3 (sequence is synthesized)
ggatgggctgagcttccttctggatttcctgatccctgccaagcgcctgtgtgagcaagtgcgagaagcagcctgtgctccctactcacactgcctcttcttacacgagggctggccact

SEQ ID NO: 417925 - DNA, 120 bp, Artificial Sequence
  ENSG00000149633_4 (sequence is synthesized)
ctgtctgagggatgaagttgtggtccacttggcacccctcaaccctctcttattgcgccagggtgacttctacctccaagtggagccccaggaggagcagtctgtctgcatcatgatcaa

SEQ ID NO: 417926 - DNA, 120 bp, Artificial Sequence
  ENSG00000149633_5 (sequence is synthesized)
atgcctctccctggacctctgcacagtggacaagaagcctgttccagagccagcctaccctatacttttcacccaagaatggctggaggccatcaacagtgactttgagggaaatcccct

SEQ ID NO: 417927 - DNA, 120 bp, Artificial Sequence
  ENSG00000149633_6 (sequence is synthesized)
acacaactgcttggtagcatcagaaaatgggattgcccctgtgccttggaccaagataaccagcccagagtttgtggatgacagaccccaagtagtgaatgccctctgccaagcctgggg

SEQ ID NO: 417928 - DNA, 120 bp, Artificial Sequence
  ENSG00000149633_7 (sequence is synthesized)
gccccttccattagaggcactggatttgagcagccctcaagagttgcaccaggccagctccccagacaaccaggtgcttcctgcccagagtttggccaagggtaagggcaggacatatgg

SEQ ID NO: 417929 - DNA, 120 bp, Artificial Sequence
  ENSG00000149633_8 (sequence is synthesized)
gagcaagtatccaggactcatcaaggtggagcaagcccggtgtggggaggtggctttcaggatggacgaggtggtcagccaggacttcgagggagactatgtggctctcctaggcttttc

SEQ ID NO: 417930 - DNA, 120 bp, Artificial Sequence
  ENSG00000149633_9 (sequence is synthesized)
ccaagagagcagaggagagtctcccagtagggaggcaggcacatccagtgggtgtacttctggggcactagaggagatagctggaactaaggaaactcccttatttcaaaagatactgcc

SEQ ID NO: 417931 - DNA, 120 bp, Artificial Sequence
  ENSG00000149633_10 (sequence is synthesized)
tctctcagaggccaatgaaggaccttccttgggaaatcgggcttgcacaaagccagaaagctctgaggagaggccctataatttgggcttcaggagaaaggtcaatcttaaagcacccac

SEQ ID NO: 417932 - DNA, 120 bp, Artificial Sequence
  ENSG00000149633_11 (sequence is synthesized)
ccacaactcagaaaggccgccccaaggctcctacatgaatgtccttgaggacgcactggactgtgcctctggtctcagggcaggtgtctcacaagagccagctgcctccaagatgcaggg

SEQ ID NO: 417933 - DNA, 120 bp, Artificial Sequence
  ENSG00000149633_12 (sequence is synthesized)
acctctaggaaacccagagaatatggtgcagctcaggcctggaccaagacaagcctcctctccccgcctgtccccagcttctcctgcagctgcagcctctgaaacaaagatagaggtgaa

SEQ ID NO: 417934 - DNA, 120 bp, Artificial Sequence
  ENSG00000149633_13 (sequence is synthesized)
gaccaaagagagaaatgggagacttcccaagcccatgccctgccctagcagaaacacctcctcccctgagccccccactcctgggctcaaattctcattcttgagagggcagaggcaacc

SEQ ID NO: 417935 - DNA, 120 bp, Artificial Sequence
  ENSG00000149633_14 (sequence is synthesized)
ctctgtgaccccggagaaagcctcactccagcacaatgggccctggaaagtcctgtgttccctctactctcctaaacccaaccgagccaaatctttggggaaagctggaacaactcagac

SEQ ID NO: 417936 - DNA, 120 bp, Artificial Sequence
  ENSG00000149633_15 (sequence is synthesized)
caaaacatctggcccagccactgcccccagcccactgactgaggaaaaggctgccttgccagaagcttctgcaggctccccagaaagaggccccaccctggaggaggagcccccagggcc

SEQ ID NO: 417937 - DNA, 120 bp, Artificial Sequence
  ENSG00000149633_16 (sequence is synthesized)
tgagcccaggattggggctctaggtgtcaaggttttccgctccaggatagcatgcctgccaggtggccgggacagggccgggcggcccctgcttctggtgtcaactacagagggggcctg

SEQ ID NO: 417938 - DNA, 120 bp, Artificial Sequence
  ENSG00000149633_17 (sequence is synthesized)
ggaggcaccatggtgcacagtttcagaggtcaccaagctactgtcctacctgtgtaccatccccaggcctgaagataaagccaaggggctggcggtcctgattgacgccaggagacagcc

SEQ ID NO: 417939 - DNA, 120 bp, Artificial Sequence
  ENSG00000149633_18 (sequence is synthesized)
cccacagcccggtctggtcagcgccctgcaggccacccaggctcaggtcccagcctctatccgggctattctcttcctgggggagaaggaggcggctctccagctgcagacattacctga

SEQ ID NO: 417940 - DNA, 120 bp, Artificial Sequence
  ENSG00000149633_19 (sequence is synthesized)
cgtccaggtggaggtgctgacctcattgaaggccctcagccaccatgtggaccccagccagctgcccgcagtcctggaaggccccttcccctactgccacaccgagtgggttcatttctt

SEQ ID NO: 417941 - DNA, 120 bp, Artificial Sequence
  ENSG00000149633_20 (sequence is synthesized)
ccagaagctggaccctttccttgctgacctccaccaggcctcttccctgctacaagcttccatcgaggaattcgagaaggccgacccccctggggggatgcaggaggctaccaggtgcct

SEQ ID NO: 417942 - DNA, 120 bp, Artificial Sequence
  ENSG00000149633_21 (sequence is synthesized)
gagcaagtccaaggagctgatggaggctgtgctgagggaccccggcctactgggcctccagcgggaaggtggagccaccctggccaggctgcagcatgatgccagcaggctggacttcag

SEQ ID NO: 417943 - DNA, 120 bp, Artificial Sequence
  ENSG00000149633_22 (sequence is synthesized)
ccctgatgtcaggagccatctggctgcagccactgccttgtacagccttgtggacgagcagcttcatgttctggtcaccgcttccaacagcctcctggggaagctggagctccgtgtccg

SEQ ID NO: 417944 - DNA, 120 bp, Artificial Sequence
  ENSG00000149633_23 (sequence is synthesized)
cctgggccgcctggaagctgccattcaccaggtcagcgactggatggagcaggaaggaaggcggtgcctgcaatcactgacccccaaggatggaagtttggagacagtggagaaagccca

SEQ ID NO: 417945 - DNA, 120 bp, Artificial Sequence
  ENSG00000149633_24 (sequence is synthesized)
cgcagaatttgagaacttcttcctccaggctgcagcccagtaccgccgaggcctggagctgtccaagcaggccgctcagctgggagctacagccagaggggctggggaggcagaacgtgc

SEQ ID NO: 417946 - DNA, 120 bp, Artificial Sequence
  ENSG00000149633_25 (sequence is synthesized)
agagttcccagagctggcagcctttgcctctacccagcgggccttccaggctgagctgacccacttttacatggcggccgagcggcaacgcacggacctcgagacgctgctccacctgca

SEQ ID NO: 417947 - DNA, 120 bp, Artificial Sequence
  ENSG00000149633_26 (sequence is synthesized)
tgacctggttccacatggactgtcaggacctgatggcccagctcaggctggacaagacctcaagggtcagtcctggggaccagcgccgcctccaccgctacctgcagcgactggcatctg

SEQ ID NO: 417948 - DNA, 120 bp, Artificial Sequence
  ENSG00000149633_27 (sequence is synthesized)
agttccctgctgagaagctcgcagccgtggggctgcaggtggcctccctgagccgggcaggcctgggccaggagctatgggaggaggcccggatcaggcatgaggagatccggatgctcc

SEQ ID NO: 417949 - DNA, 120 bp, Artificial Sequence
  ENSG00000149633_28 (sequence is synthesized)
tggagaaggcactgacccacagctcttgcccagaggctccagctgctcactcagcgcgcccagaacgaagaggggtggcagccaagggccagggtgtgagtgtagaggtcacttccaagg

SEQ ID NO: 417950 - DNA, 120 bp, Artificial Sequence
  ENSG00000149633_29 (sequence is synthesized)
ggaggtgggatcagcctccactagactcactgggcatggaccatttgccaaagtcctattggcctcctgggccccccagaggggaacagaacagaactttccaggcaggctctccacccc

SEQ ID NO: 417951 - DNA, 120 bp, Artificial Sequence
  ENSG00000149633_30 (sequence is synthesized)
aggaagctggccaggctgcagaggctgaagacggcaaaggctcccacaagctgcctgaccctgcccgcgagcatttgcttgccaccaccttcttccggcagcagccccccaggcagagcc

SEQ ID NO: 417952 - DNA, 120 bp, Artificial Sequence
  ENSG00000149633_31 (sequence is synthesized)
aggtccctcgcctcactgggggcagcttctcctcagaggggacagactcacagacatcccttgaggactcaccccagacaagtccccttgcctccctctagctgagaggccccttcagtc

SEQ ID NO: 417953 - DNA, 120 bp, Artificial Sequence
  ENSG00000149633_32 (sequence is synthesized)
gcaccagcctccaggagcactgggccagggcccagctggaggggtagctgggagctctggtcagtcccagtgagacgtcaccatggagcactggttttacattctgcctctgctgggagg

SEQ ID NO: 417954 - DNA, 120 bp, Artificial Sequence
  ENSG00000149633_33 (sequence is synthesized)
atgagaactgtcgacctgcccctggctccagaaaactcctggaagacccgatcttcacccatgcagaatagcaagagtgggcgtcagaaccagggcacaataaatggtgtgattggctcc

SEQ ID NO: 417955 - DNA, 120 bp, Artificial Sequence
  ENSG00000149633_34 (sequence is synthesized)
atccctccaggctctcattgtggaaagacctgtcggcacagacccctccagaggtctcgctcgcaggcaggcagacacccacctgcagctcaggaacatacacagctctcccctcgggta

SEQ ID NO: 417956 - DNA, 120 bp, Artificial Sequence
  ENSG00000149633_35 (sequence is synthesized)
cgagggccagtgttgcccttaggcagaatcctcggggagattcgggagtgcttccttgtcttggattccaggaaaatggaccctgagatgaggatttaaggatcagtgtgtttggtgctg

SEQ ID NO: 417957 - DNA, 120 bp, Artificial Sequence
  ENSG00000149633_36 (sequence is synthesized)
atccaggaacctctgctgggggagtaggaggcgaatctgcaaagggaataaagagtatgttgtcaagcaaattttcttttttttaatttttaaaacttcattgtattttatgtttagaga

SEQ ID NO: 417958 - DNA, 120 bp, Artificial Sequence
  ENSG00000149633_37 (sequence is synthesized)
gggctcaagtgatcctcttgccttggcctgccaaagtgctgggattgccttttccgcccaccccccccgaccccaccagagacagggtctcactctggtgtccaggctggagtgcagtgg

SEQ ID NO: 417959 - DNA, 86 bp, Artificial Sequence
  ENSG00000149633_38 (sequence is synthesized)
gggattgccttttccgcccaccccccccgaccccaccagagacagggtctcactctggcttaaattcctgggttcaaccaatcctc

SEQ ID NO: 417960 - DNA, 120 bp, Artificial Sequence
  ENSG00000149633_39 (sequence is synthesized)
ccaccatgctcagcttattatttatttattttttgtagacatggggtcttgctatgttgcccaggcaggctgatctcaagctcaagtgatcctctggactcagcctcccaaagtgctggg

SEQ ID NO: 417961 - DNA, 120 bp, Artificial Sequence
  ENSG00000149633_40 (sequence is synthesized)
attatacgtatgagccactgtgccccaccctcatacaaatttccatgttggcaactgtagctggatctttctggagatctctgaaagacagcatggaatccttgaacaccccctgaggcg

SEQ ID NO: 417962 - DNA, 120 bp, Artificial Sequence
  ENSG00000149633_41 (sequence is synthesized)
tgaggcatccagagcatttatctgccaaccctcaggagctggcactcgtagacagcacgcacagccagctccattggtcttggcaaagagaattgcctcctggagccagaggccggttcc

SEQ ID NO: 417963 - DNA, 120 bp, Artificial Sequence
  ENSG00000149633_42 (sequence is synthesized)
tgtgcttagaaaggaaggacatgtcttctgtgctccctgtctcacaaggcctcttcagcaggcatgggaccttcattctcaagttcaaggaaccctgtggaaccttgtccttgtcctcca

SEQ ID NO: 417964 - DNA, 120 bp, Artificial Sequence
  ENSG00000149633_43 (sequence is synthesized)
gagagaatcctctccgccttagaggtccctcctctctctcacctccccaccaagcctccctgaactcaatgtcttctgtccccttccctgcccaacttccacttctctatgcccagcctc

SEQ ID NO: 417965 - DNA, 120 bp, Artificial Sequence
  ENSG00000149633_44 (sequence is synthesized)
tgtggcccagtaccattggggttctgtgggcagctgggtcctggtggttggggaccgtgggaaggggcctatctgtcggatcttagatggagcatccagaagccccacccttcatactgg

SEQ ID NO: 417966 - DNA, 120 bp, Artificial Sequence
  ENSG00000149633_45 (sequence is synthesized)
ccagagtggcccctgccagcgcctctctggagtgtcattaagctgaaagtgtttgccttacctctgcagtaggatgcattactgaagtggcctcttggtcacctagctctgaattttcct

SEQ ID NO: 417967 - DNA, 120 bp, Artificial Sequence
  ENSG00000149633_46 (sequence is synthesized)
ggctccagaaagaggctgtggggcacaggtcccccacaatgaggctgtgaaggggagagaggcaggcctgggccaggcacaggaggacaactagggcttctcaggagctgtctcagccaa

SEQ ID NO: 417968 - DNA, 120 bp, Artificial Sequence
  ENSG00000149633_47 (sequence is synthesized)
gagtcacacacttgatacctaaaatggcttcaggaatcttccaagactgaagacttccccaggtgtggtctagggcctgcctgcctcagagccatgagcagagccggtcaaaaggcttcc

SEQ ID NO: 417969 - DNA, 120 bp, Artificial Sequence
  ENSG00000149633_48 (sequence is synthesized)
tagggaatcctaccccagacattaaaatagactcttggtgctggcaggtggctggaatctgcgtttgtagccaagtgctcttcctgtgtgactcagcaaagtgggggtgcatttggggaa

SEQ ID NO: 417970 - DNA, 120 bp, Artificial Sequence
  ENSG00000149633_49 (sequence is synthesized)
cacccggggctggggcctgagtcctccacccaaagccaggtttgattcttgcattcccctccctgccttccatccagacaggcccaaagatgcaagaggcgttgatcagcccatctccat

SEQ ID NO: 417971 - DNA, 120 bp, Artificial Sequence
  ENSG00000149633_50 (sequence is synthesized)
ccatgcctgttgcctcagagagggccgacggcttttaaaatgctgttgccatagcaacagcatccagccagtgggtaccacaggcagggagccacagaaactggggtgctgggatggaaa

SEQ ID NO: 417972 - DNA, 120 bp, Artificial Sequence
  ENSG00000149633_51 (sequence is synthesized)
ctgacttgtgagagaccacagctactgctagaaggaaggggggcaaagcgggcacaggtaatctaagaatacttgggcgggaggagtccccaaggttaccttgtgcatccctctgtcccc

SEQ ID NO: 417973 - DNA, 120 bp, Artificial Sequence
  ENSG00000149633_52 (sequence is synthesized)
agaaagaactgtaccccaacaatctctcccctcactgcatcccctggggaagaagggaatgcagaaatgaaatgtcataatgagtaacaatgtataaaaatatcgaataataacagctaa

SEQ ID NO: 417974 - DNA, 120 bp, Artificial Sequence
  ENSG00000149633_53 (sequence is synthesized)
ccaggtgtttaccgtcacagcctttagcccctgacccccactccttctcttcttctcttcactcttctgtcccatggatccatcaaccctgctatgctaaaaaataaacggtcactcaac

SEQ ID NO: 417975 - DNA, 120 bp, Artificial Sequence
  ENSG00000149633_54 (sequence is synthesized)
gcagagttcagctgagatgttatctcccccagagattcttaccagatggccaagcccaaagaatattctgaatcccccagagggtttcttaaaatgcagtttccagggccccatcctaga

SEQ ID NO: 417976 - DNA, 120 bp, Artificial Sequence
  ENSG00000149633_55 (sequence is synthesized)
cctaataactcagcctcacagagccgggggttggagggcagggaagctgcatcaacgtgatgcgatgtgacaaggctctggaccacagggtgattcagccccgtatcagcgctcaggaat

SEQ ID NO: 417977 - DNA, 120 bp, Artificial Sequence
  ENSG00000149633_56 (sequence is synthesized)
tctcaggccagtggggagcgggggcgggggcggggacaaacagggaagcgcacagtaagggagaatgtggggactcagagcaggagcctttggagtcagagaagttttccagaaggaaca

SEQ ID NO: 417978 - DNA, 120 bp, Artificial Sequence
  ENSG00000149633_57 (sequence is synthesized)
tctaagcagagcccggctaggcaaagtgaactgccatggcgagggcctggagacttccagaagcgtgataactgctcttaattgttcaaccctcaccaggagctaagccctgtgaggtgg

SEQ ID NO: 417979 - DNA, 120 bp, Artificial Sequence
  ENSG00000149633_58 (sequence is synthesized)
gtgctattagggtccccattctacagatgaggaaactgaagctcaggaagtctcctggctcgccagcaaggcagctggaggttgctgacctccgagggaggccccagccaaggtgggtgc

SEQ ID NO: 417980 - DNA, 120 bp, Artificial Sequence
  ENSG00000149633_59 (sequence is synthesized)
tggctctgggccattcccatcaggatgagaacacgctgcaatattgcccagcttgaaatgagctattctaggcccccgtgttcccaccctcacccttttacattaaaactccacaaagca

SEQ ID NO: 417981 - DNA, 120 bp, Artificial Sequence
  ENSG00000149633_60 (sequence is synthesized)
ggggggctgtgctccaggcagggggcaaacacatgtgaaggccctgaggtgggattatacctggggtgttcaggagtagcaaggaggccagtgtggagcagaatgagtgggaaagaagca

SEQ ID NO: 417982 - DNA, 120 bp, Artificial Sequence
  ENSG00000149633_61 (sequence is synthesized)
tgagtggagcttctagatgcagcaggagctggaccaaggaagagttgggctgggattcagttcgaagcctgcagggaaagccactggagagttttaaaccaggggttatcagatttgcac

SEQ ID NO: 417983 - DNA, 120 bp, Artificial Sequence
  ENSG00000149633_62 (sequence is synthesized)
tttgagatccgttcaactgccatgtggagaacagactgtagggggagccagagggcagcagggagatcagcgaagaggctggaatgggtgtcccagcaagagatgctggagggtggacca

SEQ ID NO: 417984 - DNA, 120 bp, Artificial Sequence
  ENSG00000149633_63 (sequence is synthesized)
atgaggttgccgtggtgacgagaggggacatggctagaggggatgttttagagacagaaatgacagactttctggaggaccttgaatgccaaactgggagttggacttgatctgggtgtg

SEQ ID NO: 417985 - DNA, 120 bp, Artificial Sequence
  ENSG00000149634_0 (sequence is synthesized)
gcggcagatcactattccctcacaaaccggggctttggggaagccatgtcctacttcaggactccacaaactcatccaggtcctctgccttccggccaaggtggggctgcttctccaggc

SEQ ID NO: 417986 - DNA, 120 bp, Artificial Sequence
  ENSG00000149634_1 (sequence is synthesized)
ttgtcccttggcctctgtagtcctgtagagccagtggtggtggcctctggtggaacaggcccactgagccagaaagctgagcaggtggcacctgctgcccaggcctggggcccagccctg

SEQ ID NO: 417987 - DNA, 120 bp, Artificial Sequence
  ENSG00000149634_2 (sequence is synthesized)
gcaatgccacaagccaggggctgccctggggggactagctgggagacactacggaaggaatacagccgaaactgccacaaattcccgcatgtgaggcagctggagagcttgggctgggac

SEQ ID NO: 417988 - DNA, 120 bp, Artificial Sequence
  ENSG00000149634_3 (sequence is synthesized)
gccccagcaggcctaggcccctgatgctgtgtgggctgtcaccacgggttctaccggtaccctctgaggcagtggggaaggaggccagctcccagcctgatatctgcatcctcaccctcg

SEQ ID NO: 417989 - DNA, 120 bp, Artificial Sequence
  ENSG00000149634_4 (sequence is synthesized)
ccatgatgatcgctggcatccccaccgtgcccgtcccaggagttcgggaagaggacctgatctgggccgctcaagctttcatgatggcccatccggagccagagggtgctgtggaggggg

SEQ ID NO: 417990 - DNA, 120 bp, Artificial Sequence
  ENSG00000149634_5 (sequence is synthesized)
cgcggtgggagcaggcacatgcccacacagcctctgggaagatgcccctagtgagatctaaaaggggccagcctcctggctcctgcttgtagatggatgaaatagcaccagatatgtagg

SEQ ID NO: 417991 - DNA, 120 bp, Artificial Sequence
  ENSG00000149635_0 (sequence is synthesized)
agggattcccaagtcccagcgattcccccacttcctctccacctgccacagctgccagcgaccgcccgcctgaaaccactgccatttggacagcatgccaggccacccaggagcagctga

SEQ ID NO: 417992 - DNA, 120 bp, Artificial Sequence
  ENSG00000149635_1 (sequence is synthesized)
gcaacttgtcaagaccgggtggaggtcctggcacttggggttctggaaggcccttgccccactgcaggctgcctgggacgccttctcccagcctgttccagccagctgtggccagctgct

SEQ ID NO: 417993 - DNA, 120 bp, Artificial Sequence
  ENSG00000149635_2 (sequence is synthesized)
gacccagctcctcctgtgtgcctccctggctgctgctgctgcaggtctggtttatcactggctggcatccttgctgctttatcctcctggaccttcagccatggttgccactgtctgtgg

SEQ ID NO: 417994 - DNA, 120 bp, Artificial Sequence
  ENSG00000149635_3 (sequence is synthesized)
cctcctggtcttcctgagcctgggcctggtacccccagtccgctgcctgtttgcactcagcgtgcccaccctgggtatggagcagggccgccggctgctcctgtcctacagcactgccac

SEQ ID NO: 417995 - DNA, 120 bp, Artificial Sequence
  ENSG00000149635_4 (sequence is synthesized)
cctggccattgctgtggtgcccaacgtcctggccaacgtgggtgcggccgggcaggtgctgaggtgtgtcaccgagggctccctggagagtctcctcaataccactcaccagctgcatgc

SEQ ID NO: 417996 - DNA, 120 bp, Artificial Sequence
  ENSG00000149635_5 (sequence is synthesized)
agcatccagggctctgggccccacaggccaggcaggcagccggggcctgacatttgaggcccaggacaatggctctgccttctaccttcacatgctcagggtcactcagcaggtcctgga

SEQ ID NO: 417997 - DNA, 120 bp, Artificial Sequence
  ENSG00000149635_6 (sequence is synthesized)
ggatttctctggcctggagtccctggcccgggcagcagcgctagggacccagcgagtggtcacagggctgtttatgttgggcctcctggtggagtcggcatggtacctccattgctacct

SEQ ID NO: 417998 - DNA, 120 bp, Artificial Sequence
  ENSG00000149635_7 (sequence is synthesized)
gacagacctgcggtttgacaatatctacgccactcaacagctgacccagcggttggcacaggcccaggctacacacctcctggcccctccacccacctggctgctccaggcggctcagct

SEQ ID NO: 417999 - DNA, 120 bp, Artificial Sequence
  ENSG00000149635_8 (sequence is synthesized)
tggccacagaccatgtagccttcctcctggcacaggctactgtggactgggctcagaagttgccaactgtgcccatcacgctcacggtcaagtatgatgtggcatacactgtcctgggct

SEQ ID NO: 418000 - DNA, 120 bp, Artificial Sequence
  ENSG00000149635_9 (sequence is synthesized)
tcatccctttcctcttcaaccagctggctccggagagccccttcctctccgtccacagctcctaccaatgggagctccgcctcacctccgcccgctgcccactgctacccgcccggcgtc

SEQ ID NO: 418001 - DNA, 120 bp, Artificial Sequence
  ENSG00000149635_10 (sequence is synthesized)
cccgcgcagctgccccgctggccgcgggggccctgcagctcctggcgggctccacggtgctcctggaggcctacgcccgccgcctgcggcatgccatcgccgcttccttcttcacagccc

SEQ ID NO: 418002 - DNA, 120 bp, Artificial Sequence
  ENSG00000149635_11 (sequence is synthesized)
aggaggcgaggagggtccgccacctgcacgcccggctccagcgaagacacgacaggcaccaaggccagcagctgcccctaggggatccttcttgcgtccccacacccagacctgcctgca

SEQ ID NO: 418003 - DNA, 120 bp, Artificial Sequence
  ENSG00000149635_12 (sequence is synthesized)
agcctccggcatggatagactacaggctggatgccttaagaaccgagagcagtgagggagaagggaaagagctttggagttgcagagacctgagttgtaaccttggtcctgtgccgcctc

SEQ ID NO: 418004 - DNA, 120 bp, Artificial Sequence
  ENSG00000149635_13 (sequence is synthesized)
cctgtgtgaccttgggtaagtcacttcacctctctgagcctcggtttctacatctgcataacgacagcatatttaccattgatgtgacctacttcccacgcagggatgtggtcaggatgg

SEQ ID NO: 418005 - DNA, 120 bp, Artificial Sequence
  ENSG00000149635_14 (sequence is synthesized)
aaggaaatactgggcatgataggcctggataaccggtaaagaaccatgcaaaggcgaagacaaggagtgcagagagagctcatggttcctccaggctggttggcgatcaggctcatctca

SEQ ID NO: 418006 - DNA, 120 bp, Artificial Sequence
  ENSG00000149635_15 (sequence is synthesized)
tctgcaccaactgctctacttgttagatggagaccttgcatcatgaatttctcgaaatgctcctggaacttatttatatgcctcaaaatcctctaaactcatttatagtaacccatagtt

SEQ ID NO: 418007 - DNA, 120 bp, Artificial Sequence
  ENSG00000149635_16 (sequence is synthesized)
ttaattttataaataaacgtatttattaaatcttagattacgttattcctctgcctcaaattccttcagggcctttccattgccaggattagattttgccaaattaaaatataggacact

SEQ ID NO: 418008 - DNA, 120 bp, Artificial Sequence
  ENSG00000149636_0 (sequence is synthesized)
tgcgcccttggttggcgggagtttcggaggcggtgaccgtgacgtagaaggtggagaccgcttcaccctgatcagggagtatcggctgcgggtgcgcaaggcgtccaggagtgacctggg

SEQ ID NO: 418009 - DNA, 120 bp, Artificial Sequence
  ENSG00000149636_1 (sequence is synthesized)
gctgtggagagcgacccgtggccttgtgtttcagagtttaccacctaggatgacttcagtgactagatcagagatcatagatgaaaaaggaccagtgatgtctaagactcatgatcatca

SEQ ID NO: 418010 - DNA, 120 bp, Artificial Sequence
  ENSG00000149636_2 (sequence is synthesized)
attggaatcaagtctcagtcctgtggaagtgtttgctaaaacatctgcctccctggagatgaatcaaggcgtttcagaggaaagaattcaccttggctctagccctaaaaaagggggaaa

SEQ ID NO: 418011 - DNA, 120 bp, Artificial Sequence
  ENSG00000149636_3 (sequence is synthesized)
ttgtgatctcagccaccaggaaagacttcagtcgaagtcccttcatttgtctcctcaagaacaatctgccagttatcaagacaggaggcaatcctggcggcgagcaagtatgaaagaaac

SEQ ID NO: 418012 - DNA, 120 bp, Artificial Sequence
  ENSG00000149636_4 (sequence is synthesized)
gaaccggcggaagtcgctgcatcccattcaccagggcatcacagagctcagccggtctatcagtgtcgatttagcagaaagcaaacggcttggctgtctcctgctttccagtttccagtt

SEQ ID NO: 418013 - DNA, 120 bp, Artificial Sequence
  ENSG00000149636_5 (sequence is synthesized)
ctctattcagaaacttgaacctttcctaagggacactaagggcttcagtcttgaaagttttagagccaaagcatcttctctttctgaagaattgaaacattttgcagacggactggaaac

SEQ ID NO: 418014 - DNA, 120 bp, Artificial Sequence
  ENSG00000149636_6 (sequence is synthesized)
tgatggaactctacaaaaatgttttgaagattcaaatggaaaagcatcagatttttctttggaagcatctgtggctgagatgaaggaatacataacaaagttttctttagaacgtcagac

SEQ ID NO: 418015 - DNA, 120 bp, Artificial Sequence
  ENSG00000149636_7 (sequence is synthesized)
ttgggatcagctcttgcttcactaccagcaggaggctaaagagatattgtccagaggatcaactgaggccaaaattactgaggtcaaagtggaacctatgacatatcttgggtcttctca

SEQ ID NO: 418016 - DNA, 120 bp, Artificial Sequence
  ENSG00000149636_8 (sequence is synthesized)
gaatgaagttcttaatacaaaacctgactaccagaaaatattacagaaccagagcaaagtctttgactgtatggagttggtgatggatgaactgcaaggatcagtgaaacagctgcaggc

SEQ ID NO: 418017 - DNA, 120 bp, Artificial Sequence
  ENSG00000149636_9 (sequence is synthesized)
gatccctcaccagctcgaaaactgttgaagcttcagctacagaacccacctgccatacatggatctggatctggatcttgtcagtgactttatgagagtttctgccacaaggtgcccaag

SEQ ID NO: 418018 - DNA, 120 bp, Artificial Sequence
  ENSG00000149636_10 (sequence is synthesized)
aggagaggaatgggaagagtgccccagcacgtggtgactgcgtgatttctgctcgttgcctttgaagataactggcaggactgactgtagaacactttgacttttttcaaaaagtgatgg

SEQ ID NO: 418019 - DNA, 120 bp, Artificial Sequence
  ENSG00000149636_11 (sequence is synthesized)
aatttgtacatccaaatgaatattgtatagacaattttcccaggaatgtgcaaaatgcttgaaagttcaaacttcttttttgaaatgatcttcagatccagtggcccattcttttatctt

SEQ ID NO: 418020 - DNA, 120 bp, Artificial Sequence
  ENSG00000149636_12 (sequence is synthesized)
tatcctgtgaaggtgtttttcaggttttgaaacaatccaaaaatcatttaggaccaagtctaaggaaacattttagtggccaagttggattccgattgtaaaggaatgatactaattttc

SEQ ID NO: 418021 - DNA, 120 bp, Artificial Sequence
  ENSG00000149636_13 (sequence is synthesized)
caagttggattccgattgtaaaggaatgatactaattttctagcatggctctgaaggtgattttaggtagaagagttttgaggctgggcgcaatggctcacgcctgtaatcctagcattt

SEQ ID NO: 418022 - DNA, 89 bp, Artificial Sequence
  ENSG00000149636_14 (sequence is synthesized)
tgggtgactgaggcgggtggattgcttgagcccagaagttgaagaccagcctgagaaataaggtgaaaccctgtctacacgtgtgcctg

SEQ ID NO: 418023 - DNA, 86 bp, Artificial Sequence
  ENSG00000149636_15 (sequence is synthesized)
actgtcttaaaaaaaattaaaaattgtaaaaaaatgaaaaaaaaagttttgagcattatttgcatcattgggatacatatgtcact

SEQ ID NO: 418024 - DNA, 120 bp, Artificial Sequence
  ENSG00000149636_16 (sequence is synthesized)
ttttgagcattatttgcatcattgggatacatatgtcacttcacaagatgttcaatttgaaggaaataccactcattctctatgtcctgttgtctgtagtgtgcttcagtttttcatatt

SEQ ID NO: 418025 - DNA, 120 bp, Artificial Sequence
  ENSG00000149636_17 (sequence is synthesized)
gagttgacctaaatcctggattcatgacaagaaaggagtaagtactactattcattgttctatttgtttataatctgtattataaaattgcacataattaaaagctttcccttgtcttca

SEQ ID NO: 418026 - DNA, 120 bp, Artificial Sequence
  ENSG00000149636_18 (sequence is synthesized)
ggaagtcacagacttgtcctctgatgtggccccgcccgccgccgcactaatctcttcggcgtcgtacccgtcggcccagctcgacccgccgcagccccggccccgaccgtggacactggg

SEQ ID NO: 418027 - DNA, 120 bp, Artificial Sequence
  ENSG00000149636_19 (sequence is synthesized)
ggtccccgagggcgctgcgacctcctcccgggtgaaatgaaacccgagggcagtcccccttaccgaccccattagagacgtatctgccgtgccaggggtctaggctccagaaacagggag

SEQ ID NO: 418028 - DNA, 120 bp, Artificial Sequence
  ENSG00000149636_20 (sequence is synthesized)
gcaaggcgtccaggagtgacctggggctgtggagagcgacccgtggccttgtgtttcagagtttaccacctaggatgacttcagtgactagatcagagatcatagatgaacaatctgcca

SEQ ID NO: 418029 - DNA, 120 bp, Artificial Sequence
  ENSG00000149636_21 (sequence is synthesized)
gaccgcttcaccctgatcagggagtatcggctgcgggtgcgcaaggcgtccaggagtgacctggggctgtggagagcgacccgtggccttgtgtttcagaaaaaggaccagtgatgtcta

SEQ ID NO: 418030 - DNA, 120 bp, Artificial Sequence
  ENSG00000149636_22 (sequence is synthesized)
tatacccaaatctttcctggctcctggtagatttggaatcacatactcattatttgcagagatgctttctttatgtttccacgatctaggggcatacatttactttttccacttttttgc

SEQ ID NO: 418031 - DNA, 120 bp, Artificial Sequence
  ENSG00000149639_0 (sequence is synthesized)
gatgtgttttctgcctttctggactactttgcctctaagatgcagaaactgagtacaagggaaaggactccaaatccccagtatgtcccctgcaggagcagagttgaaggaggtcccacc

SEQ ID NO: 418032 - DNA, 120 bp, Artificial Sequence
  ENSG00000149639_1 (sequence is synthesized)
aggtctggtgggtggccctgctcaggcttacctcccccttgtaggggtcactgggaactgtcaactgcgaaggactgtgatctccagtctggtatggtctgctctggggtccaagtgagg

SEQ ID NO: 418033 - DNA, 120 bp, Artificial Sequence
  ENSG00000149639_2 (sequence is synthesized)
aaagcataaatcgggcaactctctcccagtgagaagatagaaggagcttctacagagaaggacgagattgaggagctgcgggccgagatgctggagatgcgggacgtctatatggaggag

SEQ ID NO: 418034 - DNA, 120 bp, Artificial Sequence
  ENSG00000149639_3 (sequence is synthesized)
gacgtgtatcagctgcaggagctgcgacagcagctggaccaggccagcaagacctgccgcatcctgcagtaccggctgcgcaaagccgagcgccgcagtctccgtgccgcccagaccggc

SEQ ID NO: 418035 - DNA, 120 bp, Artificial Sequence
  ENSG00000149639_4 (sequence is synthesized)
caggtggacggcgagcttatccgtggtctggagcaggatgtcaaggtctctaaggacatctccatgcggctgcataaggagctcgaggtggtggagaagaaacgggcgcggctggaggag

SEQ ID NO: 418036 - DNA, 120 bp, Artificial Sequence
  ENSG00000149639_5 (sequence is synthesized)
gagaacgaagagcttcgtcagcggctcatcgagactgagctggctaagcaggtgctgcagacggagctggagcgaccgagagagcattccttgaagaaaagaggaacccgctccctgggg

SEQ ID NO: 418037 - DNA, 120 bp, Artificial Sequence
  ENSG00000149639_6 (sequence is synthesized)
aaggccgataagaagactttggtgcaggaggacagtgcagacctgaagtgccagttgcactttgcaaaggaggagtcagccctcatgtgcaagaagctcactaagcttgccaaggagaat

SEQ ID NO: 418038 - DNA, 120 bp, Artificial Sequence
  ENSG00000149639_7 (sequence is synthesized)
gacagcatgaaggaggagctgctgaagtaccgctcgctctatggggacctggacagcgcgctgtcagccgaggagctggccgatgccccccactcgcgggagaccgagctgaaggtgcac

SEQ ID NO: 418039 - DNA, 120 bp, Artificial Sequence
  ENSG00000149639_8 (sequence is synthesized)
ctgaagctggtggaggaggaagccaacctgctgagccgccgcatcgtggagctggaggtggagaaccgaggcctgcgggctgagatggacgacatgaaggatcatggaggtggctgtggg

SEQ ID NO: 418040 - DNA, 120 bp, Artificial Sequence
  ENSG00000149639_9 (sequence is synthesized)
ggtcctgaggcacgcctggccttctccgcgctgggtggcggagagtgcggggagagcttggcagagctgcggcgacacctgcagtttgtcgaagaggaggccgagctgctgcggcgctcc

SEQ ID NO: 418041 - DNA, 120 bp, Artificial Sequence
  ENSG00000149639_10 (sequence is synthesized)
tctgccgagctcgaggaccagaacaagctgctgctgaacgagctggccaagttccgctcggagcacgagctggacgtggcgctgtcggaggacagttgttctgtgctcagcgaaccttca

SEQ ID NO: 418042 - DNA, 120 bp, Artificial Sequence
  ENSG00000149639_11 (sequence is synthesized)
caggaggagctggcggccgccaagctgcagatcggcgagctcagcggcaaggtcaagaagctgcagtacgagaaccgcgtgctcctctccaacctccagcgctgtgacctcgcctcctgc

SEQ ID NO: 418043 - DNA, 120 bp, Artificial Sequence
  ENSG00000149639_12 (sequence is synthesized)
cagagtacgcggcccatgctggagacggacgccgaggccggggactctgcccagtgtgtgcctgctcccctgggcgagacacacgagtcccatgcggtccgactctgcagagccagggag

SEQ ID NO: 418044 - DNA, 120 bp, Artificial Sequence
  ENSG00000149639_13 (sequence is synthesized)
gccgaggtgctgcctgggctgagagagcaggccgccctggtcagtaaggccatcgatgtcctggtggctgatgccaatggcttcacggctggcctccggctgtgtctggacaacgagtgt

SEQ ID NO: 418045 - DNA, 120 bp, Artificial Sequence
  ENSG00000149639_14 (sequence is synthesized)
gctgacttccggctgcatgaggcccccgacaacagcgagggccccagggacaccaagctcatccatgccatcctggtgcgcctgagcgtgctgcagcaggagctgaatgccttcacgcgg

SEQ ID NO: 418046 - DNA, 120 bp, Artificial Sequence
  ENSG00000149639_15 (sequence is synthesized)
caaaagaccttggctcagactttcagccacctgacttcagggacctgccggaatgggagcccaggatccgagaggctttccgcactggtgacttggactctaagcccgaccccagccgga

SEQ ID NO: 418047 - DNA, 120 bp, Artificial Sequence
  ENSG00000149639_16 (sequence is synthesized)
gcttcaggccttaccgagctgaagacaatgattcctatgcctctgagatcaaggagctgcagctggtgctggctgaggcccacgacagcctccggggcttgcaagagcagctctcccagg

SEQ ID NO: 418048 - DNA, 120 bp, Artificial Sequence
  ENSG00000149639_17 (sequence is synthesized)
agcggcagctacgaaaggaggaggccgacaatttcaaccagaaaatggtccagctgaaggaggaccagcagagggcgctcctgaggcgggagtttgagctgcagagtctgagcctccagc

SEQ ID NO: 418049 - DNA, 120 bp, Artificial Sequence
  ENSG00000149639_18 (sequence is synthesized)
ggaggctggagcagaaattctggagccaggagaagaacatgctggtgcaggagtcccagcaattcaagcacaacttcctgctgctcttcatgaagctcaggtggttcctcaagcgctggc

SEQ ID NO: 418050 - DNA, 120 bp, Artificial Sequence
  ENSG00000149639_19 (sequence is synthesized)
ggcagggcaaggttttgcccagcgaaggggatgacttcctcgaggtgaacagcatgaaggagctgtacttgctgatggaggaagaggagataaacgctcagcattctgataacaaggcct

SEQ ID NO: 418051 - DNA, 120 bp, Artificial Sequence
  ENSG00000149639_20 (sequence is synthesized)
gcacgggggacagctggacccagaacacgcccaatgagtacatcaagacactggccgacatgaaggtgacgctgaaggagctgtgctggctgctccgggatgaacgccgtggtctgacgg

SEQ ID NO: 418052 - DNA, 120 bp, Artificial Sequence
  ENSG00000149639_21 (sequence is synthesized)
agcttcagcaacagtttgccaaggccaaggctacctgggagacagagcgggcagagctcaagggccatacctcccagatggagctgaagacagggaagggggccggggagcgggcagggc

SEQ ID NO: 418053 - DNA, 120 bp, Artificial Sequence
  ENSG00000149639_22 (sequence is synthesized)
ccgactggaaggcagccctacagcgggagcgtgaggagcagcagcacctcctagctgagtcctacagcgctgtcatggagctgactcggcagctgcagatcagtgagcgcaactggagcc

SEQ ID NO: 418054 - DNA, 120 bp, Artificial Sequence
  ENSG00000149639_23 (sequence is synthesized)
aggaaaagctgcagctggtggagcggctgcagggtgagaagcagcaggtggagcagcaggtgaaggagctgcagaaccgcctaagccagctgcagaaggctgccgacccctgggtcctga

SEQ ID NO: 418055 - DNA, 120 bp, Artificial Sequence
  ENSG00000149639_24 (sequence is synthesized)
agcactcggagctggagaagcaggacaacagctggaaggagacacgcagtgagaagatccacgacaaggaggctgtttccgaagttgagcttggaggaaatggtttaaagagaaccaaat

SEQ ID NO: 418056 - DNA, 120 bp, Artificial Sequence
  ENSG00000149639_25 (sequence is synthesized)
ctgtttcttccatgtctgagtttgaaagtttgctcgactgttccccttaccttgctggcggagatgcccggggcaagaagctgcctaacaaccctgcctttggctttgtgagctccgagc

SEQ ID NO: 418057 - DNA, 120 bp, Artificial Sequence
  ENSG00000149639_26 (sequence is synthesized)
caggggatccagagaaagacaccaaggagaagcctgggctctcgtcgagggactgcaaccacctgggtgccctggcctgccaggaccccccagggagccagaagctgcccttcctcctca

SEQ ID NO: 418058 - DNA, 120 bp, Artificial Sequence
  ENSG00000149639_27 (sequence is synthesized)
tcctggcccctccccagcccccgccaatactgtgaacccccttcccactcagcctggtttcctggtgagggtcctgcagtcatgggccctgggggacccccagggcaaggcccatgggag

SEQ ID NO: 418059 - DNA, 120 bp, Artificial Sequence
  ENSG00000149639_28 (sequence is synthesized)
ggaagggaccaagggcatccttgggccaactgtccacctctcttgtccactattctctcctttccacttctgtcttcaaaaggctccttcctaggatggatcgggtgctaggacaactgc

SEQ ID NO: 418060 - DNA, 120 bp, Artificial Sequence
  ENSG00000149639_29 (sequence is synthesized)
agtccaatccaccagctctccctgcccctgtgtcttatttcagacatgagaataactgtacagtgtaaacttataaagcgtttttaatggttgtagattggaaataaagtatgtcatatg

SEQ ID NO: 418061 - DNA, 80 bp, Artificial Sequence
  ENSG00000149639_30 (sequence is synthesized)
gcactctccgagcccagagcagcggagagaccgcgcggcggggcttgggacggggacgcggtgtcggggccgaggtgggc

SEQ ID NO: 418062 - DNA, 80 bp, Artificial Sequence
  ENSG00000149639_31 (sequence is synthesized)
tccctccccagggacgtcgaggccgggcgggcctgggccatgcgcgcagctcgctgaggccgagggaggccgcgatggag

SEQ ID NO: 418063 - DNA, 120 bp, Artificial Sequence
  ENSG00000149639_32 (sequence is synthesized)
cacccgcgcctgccccggagaggaaaaagagccaccgcgcgccgtcgccggcccggcccaaagacgtggccggctggtcgctggctaagggccgccgcggcccaggcccgggctcagcag

SEQ ID NO: 418064 - DNA, 120 bp, Artificial Sequence
  ENSG00000149639_33 (sequence is synthesized)
ctcagcagtcgcctgcagcgccgcgttctcctcacggccggacaagaaggggcgcgcagtggctcccggggcgcgcggtgcgggtgtgcgggtggccggggtccgcaccggggtccgtgc

SEQ ID NO: 418065 - DNA, 120 bp, Artificial Sequence
  ENSG00000149639_34 (sequence is synthesized)
gtgccaagggccgtccgcgctcgggtgcggggccgcgaccgccaccgccgccccccagcctcacggatagcagctcggaggtgtcggactgcgcgtcggaggaggcgcgcctgctgggcc

SEQ ID NO: 418066 - DNA, 80 bp, Artificial Sequence
  ENSG00000149639_35 (sequence is synthesized)
gcctgctgggcctggagctggcgctgagcagcgacgccgagtccgcggccgggggcccggcgggggtccgtacggggcag

SEQ ID NO: 418067 - DNA, 120 bp, Artificial Sequence
  ENSG00000149639_36 (sequence is synthesized)
cggacgagccgtcggtggccgcgtcgtcggtgggcagcagccgcttgccgctcagcgcctcgcttgccttctccgacctcaccgaggagatgctggactgcgggcccagcggcttggtgc

SEQ ID NO: 418068 - DNA, 120 bp, Artificial Sequence
  ENSG00000149639_37 (sequence is synthesized)
ccccggtggcccggcgcctcggagtccctgtggttcatgacaaagagggcaagatcattatcgagcccggcttcctcttcaccacagccaagcccaaagagtcggccgaggctgatgggc

SEQ ID NO: 418069 - DNA, 120 bp, Artificial Sequence
  ENSG00000149639_38 (sequence is synthesized)
tggctgagagctcctatggtcggtggctctgcaacttctcacggcagcgcctggacggaggctcagcgggcagcccctcggcggccgggcctggcttcccagcggccctgcatgactttg

SEQ ID NO: 418070 - DNA, 120 bp, Artificial Sequence
  ENSG00000149639_39 (sequence is synthesized)
agatgtcaggcaacatgagtgatgacatgaaggagatcaccaactgtgtgcgccaggccatgcgctccggctcactggagaggaaagtgaagagcacatccagccagacggtgggcctgg

SEQ ID NO: 418071 - DNA, 120 bp, Artificial Sequence
  ENSG00000149639_40 (sequence is synthesized)
ccagtgtgggcacacagaccatccgcacggtcagcgtgggcctgcagaccgacccaccccgcagcagcctccatggcaaggcctggtcaccccgcagctcttcgctcgtgtctgtgcgca

SEQ ID NO: 418072 - DNA, 120 bp, Artificial Sequence
  ENSG00000149639_41 (sequence is synthesized)
gcaagcagatctcctcctccctggacaaggtccattcgcgcatcgagcggccctgctgctcccccaagtatggctcaccaaagctccagaggcggtctgtgtccaagctggacagcagca

SEQ ID NO: 418073 - DNA, 120 bp, Artificial Sequence
  ENSG00000149639_42 (sequence is synthesized)
aggaccgcagcctgtggaacctgcaccagggcaagcagaacggctcggcctgggcccgctccaccaccacgcgggacagccctgtattgagaaacatcaacgatggactctccagcctct

SEQ ID NO: 418074 - DNA, 120 bp, Artificial Sequence
  ENSG00000149639_43 (sequence is synthesized)
tcagtgtggtggagcactcagggagcacggagtctgtctggaaactaggcatgtctgagacgcgggccaagcccgagcctcccaagtacggcattgtgcaggaattcttccgtaatgtgt

SEQ ID NO: 418075 - DNA, 120 bp, Artificial Sequence
  ENSG00000149639_44 (sequence is synthesized)
gtggccgggcaccgagccccacctcatcagcaggagaggagggcaccaagaagccagagcccctctccccagccagctaccatcagccagagggtgtggccaggatcctgaacaagaagg

SEQ ID NO: 418076 - DNA, 120 bp, Artificial Sequence
  ENSG00000149639_45 (sequence is synthesized)
cagccaagttgggcagcagtgaggaggtcagactcaccatgctcccccaggtggggaaggatggtgtcctccgggacggagatggagccgtggtccttcccaatgaggacgctgtttgtg

SEQ ID NO: 418077 - DNA, 120 bp, Artificial Sequence
  ENSG00000149639_46 (sequence is synthesized)
actgtagtacccagtctctcacctcctgcttcgcccgatcgtcccgctctgccatccgccactctccttccaagtgcaggctgcacccttcagagtccagctggggtggggaggagaggg

SEQ ID NO: 418078 - DNA, 120 bp, Artificial Sequence
  ENSG00000149639_47 (sequence is synthesized)
cactcccccccagcgagtgacagagcagccaagctccccgcctcaaccagcccagcccctggatagcagaagggaaccagcagagacgagacgaggtgaggcgaggggctgtgtcctcag

SEQ ID NO: 418079 - DNA, 120 bp, Artificial Sequence
  ENSG00000149639_48 (sequence is synthesized)
cattgcctggccctggagggacagcagtgatgccactgccagaatgcagctttcacatcaaggtaaagccgggtctcctgctggcccctgggtggtgagcttcgacttcccaggggaagg

SEQ ID NO: 418080 - DNA, 120 bp, Artificial Sequence
  ENSG00000149639_49 (sequence is synthesized)
cagtgagtgggagagagaccaaacctgggcttcccaagcatccactgagagatctgtcaagagccgatccctgggtcctaagagagagccttgcctggttctgcccatgccaccctcttg

SEQ ID NO: 418081 - DNA, 120 bp, Artificial Sequence
  ENSG00000149639_50 (sequence is synthesized)
gaagagcccaagaaggatacatgtctggccatgcctttggggaaaaggagtcggagagatgtttcctgctgaccatccaccccttcatttgggaggagacactgctgagaagaacaggct

SEQ ID NO: 418082 - DNA, 120 bp, Artificial Sequence
  ENSG00000149639_51 (sequence is synthesized)
ttgctctagggctccatgtttggttcctggtggagccctgttgggcatcatcaccatcacctccttctctccaccacctcctcctcccagccccactgctctagattgctgggacactag

SEQ ID NO: 418083 - DNA, 120 bp, Artificial Sequence
  ENSG00000149639_52 (sequence is synthesized)
ggagtatgatagggcagtagccagggccattgcttagtgtcctggagccctggatctccctgcccatagcctggatgcagcaagagctgggaggcgaagtggaaacatgcagggctcagg

SEQ ID NO: 418084 - DNA, 120 bp, Artificial Sequence
  ENSG00000149639_53 (sequence is synthesized)
gttggggagtgattgcaattgccttccttgccaaagtgacttggggccccaacgttcccagcagaccccttgaggacagaaataggtagagtcagtctcaagacctggtgcatagataaa

SEQ ID NO: 418085 - DNA, 120 bp, Artificial Sequence
  ENSG00000149639_54 (sequence is synthesized)
tgcctaaatacactgccttgatctcaagtgatctcagaggcctctttccctggcaccctgagaggcagcaggcactacatctccactgtgtttacatcctgcagctggtcggggggcaaa

SEQ ID NO: 418086 - DNA, 120 bp, Artificial Sequence
  ENSG00000149639_55 (sequence is synthesized)
gatattcccagtaagagattcttggttggccaggtcaggcccaggagaacaccaagaggccagagcccaggacacagcagtagactggggcctggaaacacgtatcttgcctagattgtt

SEQ ID NO: 418087 - DNA, 120 bp, Artificial Sequence
  ENSG00000149639_56 (sequence is synthesized)
tatttgaatttttcctactataaatatttaaggtggtttactttattttaataatttaatttaccccaaagtccctaaggtaatttattggaggttgaaacatgcattcttgccactggg

SEQ ID NO: 418088 - DNA, 120 bp, Artificial Sequence
  ENSG00000149639_57 (sequence is synthesized)
acaacatgaggcctctaacagcacgggcaggcatggggtcccctgggtggacgaggccgcttggcagccaggtttggagacctggcctcctggtcagctttggagggcccctcaacagag

SEQ ID NO: 418089 - DNA, 120 bp, Artificial Sequence
  ENSG00000149639_58 (sequence is synthesized)
ctggagccctgcaccccaacacggctggccatgtggcctcagaacactacttattactcaatgcctggtacttggccagccccagcggtcagtctataaatactcactgacaaggtggag

SEQ ID NO: 418090 - DNA, 120 bp, Artificial Sequence
  ENSG00000149639_59 (sequence is synthesized)
ggctggacggccatcaccactccccagacgttctccattgcctgtctcatttccctccctccctctgacacctttcttcatgagtcgaacgtggattactaaagctctattaagagtgtg

SEQ ID NO: 418091 - DNA, 120 bp, Artificial Sequence
  ENSG00000149639_60 (sequence is synthesized)
gagatccctccaagtttcccaaatgagaactcacaggaaaacaggactgaactttgagaatgttgtttatcgcagctttgcacataaacctgagtgtctcccagcctgcctcggttctca

SEQ ID NO: 418092 - DNA, 120 bp, Artificial Sequence
  ENSG00000149639_61 (sequence is synthesized)
ccagcctgccagccttttcaccagcctctctccttagccttatggcctttcacggctcttctccctgccccagctctgctgcccgcccttcctcacgtcccctgtgagctgcctgagcca

SEQ ID NO: 418093 - DNA, 120 bp, Artificial Sequence
  ENSG00000149639_62 (sequence is synthesized)
ttggttggatttcgatgtggctcattgcagcatgtggggcagcgcctcccatggcctcgccttggtgccggtgaaccccttttggttgcacacatgctccccacacacacatagacatca

SEQ ID NO: 418094 - DNA, 120 bp, Artificial Sequence
  ENSG00000149639_63 (sequence is synthesized)
tgcagaattgcccatcaggaagaccaaaagccagtagctttgctgatctgcccccaggactctggaggcgcccctgcactcccacctcccacctgccagttcccagacccacccattcgg

SEQ ID NO: 418095 - DNA, 120 bp, Artificial Sequence
  ENSG00000149639_64 (sequence is synthesized)
gatcacctggaccagttaccccaagtcctgcatctcccttccctgcaggctgaacaccagggtcatgccagtcccgccagccgcctcctccatgccccagtgactggtgtgggcagagca

SEQ ID NO: 418096 - DNA, 120 bp, Artificial Sequence
  ENSG00000149639_65 (sequence is synthesized)
ggcagccagtggagctgtgggccagttccgctcttggatgctgctgctctcacccatgaggtcaggggggccctccaaggttatctccaggtgaggggattcacatcaggccacaagcca

SEQ ID NO: 418097 - DNA, 120 bp, Artificial Sequence
  ENSG00000149639_66 (sequence is synthesized)
ccagaggccttctgccacctcccagagcgacagccagggaggctgcgtactcagcctcggggagaaatccccgtgggacctgagccccaagacctacggaccactcagccttaccatcgt

SEQ ID NO: 418098 - DNA, 120 bp, Artificial Sequence
  ENSG00000149639_67 (sequence is synthesized)
accgtccaggattgtccttgccatctttgttgtctcagccagaccttggttttcagtaaagccccagtttctacttcctgcatgccactgtgcaaggccactcatcactgttcctgcaga

SEQ ID NO: 418099 - DNA, 120 bp, Artificial Sequence
  ENSG00000149639_68 (sequence is synthesized)
agcctctggacgtggggctggatggggttgaaaatgttacatgtaaatattggtttggttcggtttttagcattttacttggtaactggttgttttcttttttggggtggggggattggt

SEQ ID NO: 418100 - DNA, 120 bp, Artificial Sequence
  ENSG00000149639_69 (sequence is synthesized)
ttgtaaaaattctctactcttttggaatgtgatttctaagtttgttggtttcttcaaatgccttttaagtcttggtaacattcccaaagcagaaaactgcctgacccacagtggggattc

SEQ ID NO: 418101 - DNA, 120 bp, Artificial Sequence
  ENSG00000149639_70 (sequence is synthesized)
cctggagaattggggtcccaagaaggaatgctgcccttctcgaacccgttctcccccttcctcctgcctctctgccttttactgctattcccttcttctcctcctttatccttctttctg

SEQ ID NO: 418102 - DNA, 120 bp, Artificial Sequence
  ENSG00000149639_71 (sequence is synthesized)
ttttccccatctccactctctcttcaaccaaagtcccaaggaaccctcggggctcaatcccccatagaccacttggcttgggtccatggggttggcatcagttggttggcggaaatgggg

SEQ ID NO: 418103 - DNA, 120 bp, Artificial Sequence
  ENSG00000149639_72 (sequence is synthesized)
gaccagttggcatgatggccctaaactgggaaacctcatgtttcttatgtctcacctctttccagagccaaatcagccccttttggaatgatgacttcattggaatgcaaatcaagtcat

SEQ ID NO: 418104 - DNA, 120 bp, Artificial Sequence
  ENSG00000149639_73 (sequence is synthesized)
tttggtgcatcagtggctcttaggcctgcacacacgagacatcagaatccaatcctctgaccctgtgccagccctttcccccagtttatttcccaccaaaggctgacctctaagaggtct

SEQ ID NO: 418105 - DNA, 120 bp, Artificial Sequence
  ENSG00000149639_74 (sequence is synthesized)
tgctttctatgaactcaagatgggtcccacctctaggtgtccccaggtgcactcttctaccggttggcttccgatgtgacaaggccaagggcccaaagacttgaccctcttacacccttg

SEQ ID NO: 418106 - DNA, 120 bp, Artificial Sequence
  ENSG00000149639_75 (sequence is synthesized)
ctgacatggttccatcatgtccacccgcatgcacttttatggtttcatcacccagcctcttctcctctggcccacccagcgtccaggctctttctccctctcccctcctatctagaatgt

SEQ ID NO: 418107 - DNA, 120 bp, Artificial Sequence
  ENSG00000149639_76 (sequence is synthesized)
cccctgcttctagcctcaccagaccccccaagctcccactacttcttccataataatagtaataacaatggttatcatcatcccctgcacatcccgcctaaagcactttactatatagaa

SEQ ID NO: 418108 - DNA, 120 bp, Artificial Sequence
  ENSG00000149639_77 (sequence is synthesized)
atggtggctcacgcctgaaatcccagctctttgggaggctgaggcgagcggatcagttgaggtcaggagttcaacgccagcctggccaacgtggtgaatccctgtctgtactaaaagtac

SEQ ID NO: 418109 - DNA, 60 bp, Artificial Sequence
  ENSG00000149639_78 (sequence is synthesized)
ggtcaggagttcaacgccagcctggccaacgtggtgaatccctgtctgtactaaaagtac

SEQ ID NO: 418110 - DNA, 120 bp, Artificial Sequence
  ENSG00000149639_79 (sequence is synthesized)
ctccagcctggatgacagagtgagacccaatctcaaaaaagaaatcgtttcccaccccacatctccttcagacctctcagggacaactctgggaggcagccttggcaggacatgggttag

SEQ ID NO: 418111 - DNA, 120 bp, Artificial Sequence
  ENSG00000149639_80 (sequence is synthesized)
cttggcaggacatgggttagtgcgcccattttgctgtgaggaaactgaggtacaggtctcatcccagagcatgagaagtcactgagtttagatgagaacttgggtccaactctgtcctgt

SEQ ID NO: 418112 - DNA, 120 bp, Artificial Sequence
  ENSG00000149639_81 (sequence is synthesized)
ttgctgtgcaaatccgctgccctgctgggggcttttggtgggtccagaatacccagaatatgctgctggccaacccaggcataaaacaagtccattctagatcactgagccttgtgtatt

SEQ ID NO: 418113 - DNA, 120 bp, Artificial Sequence
  ENSG00000149639_82 (sequence is synthesized)
ccagagggtgatctgaggtccccattcagcagaattctctgagggcatgttcagaatgtagattcctgggccccaccttgaatttgcatgtttaacaaactctcctggggttgaggggtg

SEQ ID NO: 418114 - DNA, 120 bp, Artificial Sequence
  ENSG00000149639_83 (sequence is synthesized)
ctctagcctgggcaacggaatgagacttgtctcaaaaaaaataaaaaataaaaccagccctccccgggggatcttaggcactattggccacaccattggtgttcgtggccctgattatta

SEQ ID NO: 418115 - DNA, 80 bp, Artificial Sequence
  ENSG00000149639_84 (sequence is synthesized)
ccattggtgttcgtggccctgattattaggctatctttctttttttaagtttttttagatttattttttattttatttat

SEQ ID NO: 418116 - DNA, 86 bp, Artificial Sequence
  ENSG00000149639_85 (sequence is synthesized)
gcctcccaaagtgctggggttacaggcaggcatcagccaccgtgccaggtcatcttcctttttctcaggctggagtacagtggcgc

SEQ ID NO: 418117 - DNA, 67 bp, Artificial Sequence
  ENSG00000149639_86 (sequence is synthesized)
ttggagacagagtcttgctctgtcattcaggctggagtacagtggcgccatttcagctcaccactgg

SEQ ID NO: 418118 - DNA, 120 bp, Artificial Sequence
  ENSG00000149639_87 (sequence is synthesized)
tgggattataggcgtgagccacggcatccagcctcatctttcttttaaccaataaacatgatgctgtatcttaaaaagagcactgagcagggacttaagggatcgagtcctcaaccaaac

SEQ ID NO: 418119 - DNA, 120 bp, Artificial Sequence
  ENSG00000149639_88 (sequence is synthesized)
tgatttaattactcaggattttcaaaaagcatcagaggctatttacaatcttaatcataggggttcagtaaaataaaaataagaagtaaaaaagcaagagaaattattctgtaaatctaa

SEQ ID NO: 418120 - DNA, 120 bp, Artificial Sequence
  ENSG00000149639_89 (sequence is synthesized)
ctggtgtaattcccataatcatgcaattaagttttactcttgagtttcctgacagccattggtaaaaagagaaacacatcaggatttataatttttatcatccaattatgggaagcaagc

SEQ ID NO: 418121 - DNA, 120 bp, Artificial Sequence
  ENSG00000149639_90 (sequence is synthesized)
atgttggccccaggagacgaactcttctactaatttatagcatgtatcctttcatcaagggccactgagccagttggtgagtcaacgggtgaacctaagatgcaaggatgttttccaggt

SEQ ID NO: 418122 - DNA, 120 bp, Artificial Sequence
  ENSG00000149639_91 (sequence is synthesized)
gactatttaaaaaaataaataatccaccaacgtgattgaccttggcgagatcatgtttctagtctatacctcagtttccccatctgtaaagtgaggataatgtcccaccccatgtaactg

SEQ ID NO: 418123 - DNA, 120 bp, Artificial Sequence
  ENSG00000149639_92 (sequence is synthesized)
tggtgaggaccaactgcaacactgtgcctgcgagtctccttggaaaagtgtaaggttctacacaaatggaaagtgatctgatcacactcagtgtccccagcccagcctttcagtgccctg

SEQ ID NO: 418124 - DNA, 120 bp, Artificial Sequence
  ENSG00000149639_93 (sequence is synthesized)
gccctggggtgggggacaatactctcctcacccccttcactagtcttcatgaatagcaaggaggccataacataatttggtctaaaccccttcctttttaaaagaatgatggcaaaatgt

SEQ ID NO: 418125 - DNA, 120 bp, Artificial Sequence
  ENSG00000149639_94 (sequence is synthesized)
gcataacattaaatttaccattttaaagatttctaagtgtctcgaagtacatttgcaatgtgtaactgccacctccagaactttttcatcatcctaaactgaaactctgtacccactaaa

SEQ ID NO: 418126 - DNA, 120 bp, Artificial Sequence
  ENSG00000149639_95 (sequence is synthesized)
cagtaactccccactccccctgtccccagtccctggtaacctctattctactttttttttttctctgtggattggcctattctaggtatctcttttaagtagaatcatatagtatttgtc

SEQ ID NO: 418127 - DNA, 120 bp, Artificial Sequence
  ENSG00000149639_96 (sequence is synthesized)
cttttgtgtccagccccctcattttttgagatgaggaatcaggcccagagaaggcagtggctcacccaaggtcacatcgcaaaccagaggcagagccaagaccagaacccaggtttcctg

SEQ ID NO: 418128 - DNA, 120 bp, Artificial Sequence
  ENSG00000149639_97 (sequence is synthesized)
actcctaacaggtcttgcatccccagtagtgaatgagacactgctttgactttctgtaatcttggtttagccccttcctttctctgggctcagtctgcttcccaccactcacccattctt

SEQ ID NO: 418129 - DNA, 120 bp, Artificial Sequence
  ENSG00000149639_98 (sequence is synthesized)
tctttatcatctccctccaaagcctcttgtcctcctgcctcctcttctccttggctggttcctgccagcaaatggagtggccctggtccatgccaggttttcctcttctgggtccggagc

SEQ ID NO: 418130 - DNA, 120 bp, Artificial Sequence
  ENSG00000149639_99 (sequence is synthesized)
tcactatagtattcagccctcagtcctcccaggatgttcttcccagcactgctgcctcgtgcggattttcccgtaacctcagtaactggcttcttgtccccctgcttcctaccagggaag

SEQ ID NO: 418131 - DNA, 120 bp, Artificial Sequence
  ENSG00000149639_100 (sequence is synthesized)
ccttcctgtccgcgtctgtggtttcccaactctgatatttgctctcaaatgtggtggtgtcctggttctgtgtttatttattttgtgttttctcacacacacaaaaaaaagcctcttcct

SEQ ID NO: 418132 - DNA, 120 bp, Artificial Sequence
  ENSG00000149639_101 (sequence is synthesized)
ccaatgcatcaggaggcaccagccctgccagcccttctcactgggctcaccctgccccagcaaccccccggtgccacccttaagccacactgtcttctctgtaagcagcctgccagcagc

SEQ ID NO: 418133 - DNA, 120 bp, Artificial Sequence
  ENSG00000149639_102 (sequence is synthesized)
agccccagcactttgcaatgggcgtgtgtgtggtggtgggtggggggggcttggatccctcctttttcctcccctgccctgcccaggcccagatggccttgactgtaaagcaggtgctgc

SEQ ID NO: 418134 - DNA, 120 bp, Artificial Sequence
  ENSG00000149639_103 (sequence is synthesized)
ctgacaggttcttctctccctgtctctggtcattgatccatctctttgtccattcagtatccaaccatcctctccattctcctctggacctcaccactctcagagctgcttgtcctggca

SEQ ID NO: 418135 - DNA, 120 bp, Artificial Sequence
  ENSG00000149639_104 (sequence is synthesized)
gaatctacagttcaccccaactctatgccttacccctcccaacccaacagcatttgcagtttgcaaaatatacagacccaagtcctgaggggactgaggacatgatgctgggcccaagtc

SEQ ID NO: 418136 - DNA, 120 bp, Artificial Sequence
  ENSG00000149639_105 (sequence is synthesized)
tcctgctcagggcttctctccaatgccagccctgccactccttcctcaccctccttggagcctcctctgctgcttgtctatcccaacggccctgctcccctcccttcctgcccttcacca

SEQ ID NO: 418137 - DNA, 120 bp, Artificial Sequence
  ENSG00000149639_106 (sequence is synthesized)
gctttctggacaccatgccctgaggaagggacctttggttttctctaaacatctttgaagggctgaggcagtcagggctggctgccttgtcactctttatttggaagccactcaaaccat

SEQ ID NO: 418138 - DNA, 120 bp, Artificial Sequence
  ENSG00000149639_107 (sequence is synthesized)
tcccaagaagagggacctcagctggcaatctggaaacctggcccaggtctgggcagatgtcttcacttctcctaccttcccagtcttgtgatcctgtgatgagcaccaggatggccctgt

SEQ ID NO: 418139 - DNA, 120 bp, Artificial Sequence
  ENSG00000149639_108 (sequence is synthesized)
ggtccctagagcacccctcatgctgtagggtcctgcagccccatcctttctctactgggccctggtatcctggctcctctctcagctctgccactgatctctgtgccttagtttacttct

SEQ ID NO: 418140 - DNA, 120 bp, Artificial Sequence
  ENSG00000149639_109 (sequence is synthesized)
ctgcacgggggactcaccccaagaccatttccagcagcttcccaggtgatgtggtgccccaaggctgggctttgccagctgtggcccagctccttagtgctgcccaggagacaccaggct

SEQ ID NO: 418141 - DNA, 120 bp, Artificial Sequence
  ENSG00000149639_110 (sequence is synthesized)
gctcagaatgaggtgactgcgggcaccattctcagccagtggttcttgtattgcattccagcagcaggaatatcacctgggaacttgatagaagtgcagattagcagccccacccaagac

SEQ ID NO: 418142 - DNA, 120 bp, Artificial Sequence
  ENSG00000149639_111 (sequence is synthesized)
ccactgaattagagcttgtggagtggggccctacaagctggggttttaaggagccctccaaatgattctgacgcataagaatatgccaactgctgatctgggctagccattagtagagcc

SEQ ID NO: 418143 - DNA, 120 bp, Artificial Sequence
  ENSG00000149639_112 (sequence is synthesized)
tggggagggactgggactggctaggccaagaacaggtggaaaacaccagccttatctggactcctgagattgggaaccaccaccaacaaaaaccaaccctatagtcgctcctcttggaag

SEQ ID NO: 418144 - DNA, 120 bp, Artificial Sequence
  ENSG00000149639_113 (sequence is synthesized)
aggaagagaagttgaagggcctggagaaagcacacattgtttgtttccctgctcctgctcacctctctcacttgtcttggttttacaaaaggctgtgtggatggtgccagccagggaggg

SEQ ID NO: 418145 - DNA, 120 bp, Artificial Sequence
  ENSG00000149639_114 (sequence is synthesized)
ggtgggagtcctggggaggcaggaggcagaagaccctgactgtttctcccttgggaacctcaccataggccagatagcgcctcttcaaactgaaagaaatcttaactccacaaagaaagc

SEQ ID NO: 418146 - DNA, 120 bp, Artificial Sequence
  ENSG00000149639_115 (sequence is synthesized)
atgggcagcttatgcctccctggcaaggttgtttattcattcattcctccaacatgcatttcctgagcacctactgtgtaaattgtgtgctggacactaaggttacaatggtgaacaaaa

SEQ ID NO: 418147 - DNA, 120 bp, Artificial Sequence
  ENSG00000149639_116 (sequence is synthesized)
cacacccagttcctgtcctcagggagctcacggggtaatgagagagagagtcattcatcaaagaaccacagccgctgtgggaggattaactgagaaaacatgcaacaatgtcaggcatgg

SEQ ID NO: 418148 - DNA, 120 bp, Artificial Sequence
  ENSG00000149639_117 (sequence is synthesized)
ggctcagccctctgtgcctcagtttccttacctatacaatggggcagtggtgccctgagtcattgtgaggaccaacaggaataacgcatgtggagtggctgcaagagactgcgagatcct

SEQ ID NO: 418149 - DNA, 120 bp, Artificial Sequence
  ENSG00000149646_0 (sequence is synthesized)
agctgatggtatggtaggaggagtggagtggagctcttgccttgttactgaggaaatctatttgtttctagtattactggatttttggggaaaaatttgtagtcctccccttgaaaggca

SEQ ID NO: 418150 - DNA, 120 bp, Artificial Sequence
  ENSG00000149646_1 (sequence is synthesized)
aaggggctagttgtgccatttgcctgcacaggaaccatgaggagacatatggtaacttatgcctggcagctcctgaagaaggaactgggactgtaccagctcgccatggatatcatcata

SEQ ID NO: 418151 - DNA, 120 bp, Artificial Sequence
  ENSG00000149646_2 (sequence is synthesized)
atgatccgagtgtgtaaaatgttccgccaaggcctcaggggattccgggaatatcaaatcattgagactgctcactggaagcaccctatcttctccttctgggataaaaagatgcaaagc

SEQ ID NO: 418152 - DNA, 120 bp, Artificial Sequence
  ENSG00000149646_3 (sequence is synthesized)
cgagtcacatttgataccatggacttcattgcagaggagggtcactttcctccaaaggccattcagatcatgcagaagaagccttcctggagaacagaggatgagatccaggccgtctgt

SEQ ID NO: 418153 - DNA, 120 bp, Artificial Sequence
  ENSG00000149646_4 (sequence is synthesized)
aacatcttgcaggttctggatagctatcggaactacgcagagcccctgcagctgctcctggccaaagtcatgcgctttgaacggtttggtcgcaggcgtgtgatcatcaagaaggggcag

SEQ ID NO: 418154 - DNA, 120 bp, Artificial Sequence
  ENSG00000149646_5 (sequence is synthesized)
aagggcaacagcttttatttcatctacctgggcacagttgcaataaccaaggacgaggatggcagcagtgccttcctagatccccacccgaaattgctgcacaagggtagctgttttggg

SEQ ID NO: 418155 - DNA, 120 bp, Artificial Sequence
  ENSG00000149646_6 (sequence is synthesized)
gaaatggacgttctgcatgcttcagtgaggaggtccaccatcgtctgtatggaagaaacggagttcctggttgttgaccgggaggacttctttgctaataagctggaccaggaagttcag

SEQ ID NO: 418156 - DNA, 120 bp, Artificial Sequence
  ENSG00000149646_7 (sequence is synthesized)
aaggatgctcagtatcggtttgaattttttaggaagatggagctgtttgcatcatggtctgatgagaagctctggcagctggtagccatggcgaagatagagaggttctcgtatgggcag

SEQ ID NO: 418157 - DNA, 120 bp, Artificial Sequence
  ENSG00000149646_8 (sequence is synthesized)
caaaagattttggagagtcacccttcatcatgtttatcagcaagggcagctgtgaagtcctgcggctgttggaccttggggcctccccttcctaccgtagatggatctggcagcacctgg

SEQ ID NO: 418158 - DNA, 120 bp, Artificial Sequence
  ENSG00000149646_9 (sequence is synthesized)
agctgatagatggcagacctctgaagacccacctgagtgaatactctcctatggaaagatttaaggaattccagatcaaatcatatcctctgcaagactttagctccttgaaacttccac

SEQ ID NO: 418159 - DNA, 120 bp, Artificial Sequence
  ENSG00000149646_10 (sequence is synthesized)
atctcaaaaaagcctgggggctacaggggacaagcttcagcaggaagatcagaacctcaggagacactctccccaagatgctgggcccgaagatccaatccaggcctgctcagtcgatca

SEQ ID NO: 418160 - DNA, 120 bp, Artificial Sequence
  ENSG00000149646_11 (sequence is synthesized)
aatgtgccatgatcaatatcaagcctggtgagctccccaaggaggctgcagtgggggcctacgtgaaggtgcacactgtggagcagggagaaattttggccttccttccagagggtgaat

SEQ ID NO: 418161 - DNA, 120 bp, Artificial Sequence
  ENSG00000149646_12 (sequence is synthesized)
gcgacacacgacccttgatcctgatgagcctgggaaatgagttgatacggataaggaaggaaatattttatgaactgattgacaatgatgacgagatgataaaaaagttgttaaagctca

SEQ ID NO: 418162 - DNA, 120 bp, Artificial Sequence
  ENSG00000149646_13 (sequence is synthesized)
atattgcattccccagtgatgaagatatgtgccagaagttcctccagcagaacagctggaatatctttcggaaggacctgttgcagctgctcgtggagccttgccaaagtcaactgttca

SEQ ID NO: 418163 - DNA, 120 bp, Artificial Sequence
  ENSG00000149646_14 (sequence is synthesized)
ctccaaaccggcccaagaagagagagatctacaaccctaagtctgtggtcctggatttgtgcagcatcaacaagacgactaaacctcgttatcctatttttatggcaccccagaaatacc

SEQ ID NO: 418164 - DNA, 120 bp, Artificial Sequence
  ENSG00000149646_15 (sequence is synthesized)
tccccccattgaggattgtccaagccatcaaagcacctcggtacaaaatccgagaactcttggcttagtgtaagagcacaggggtccttatttaggacaaataaaggatggtggattggg

SEQ ID NO: 418165 - DNA, 120 bp, Artificial Sequence
  ENSG00000149646_16 (sequence is synthesized)
tagacttcaagtcccggaccttatccgtgcgccgcttcggtttgcaggtgacctttgcgtgcgggcgccccttctgattgaccctgatgagctgtagctctgatggcccctccttcggga

SEQ ID NO: 418166 - DNA, 120 bp, Artificial Sequence
  ENSG00000149646_17 (sequence is synthesized)
atgattagggtgacggctggccggggctcgttcgagtggcgcccggccggtggtgacccgaacaggagagcgggacggcgaccattctctcgggaggggcccatctggagaaagtcctct

SEQ ID NO: 418167 - DNA, 120 bp, Artificial Sequence
  ENSG00000149646_18 (sequence is synthesized)
caccgtctggcgcgaaggagatgctcgagaaccctttgctgttgttatttttcgcgtgtcctccgaaaccaagggaaatgcggctctgtgggttctgttaacgtcagcatttaataagtg

SEQ ID NO: 418168 - DNA, 120 bp, Artificial Sequence
  ENSG00000149646_19 (sequence is synthesized)
aactctaaatgcattgccccttatggtggccgctggcctcctgagttgactcagctcttgcaacgtagctagttgataaccctcgaaatatagcgaattgagatgtgctatattgtaaaa

SEQ ID NO: 418169 - DNA, 120 bp, Artificial Sequence
  ENSG00000149646_20 (sequence is synthesized)
tacgggacttagtacgaaaaaactgatgtaaaaattatctcaatactttttaatactgattacatgttggaatataatgttttgcatatattgggtcaaataaaaatgttattaatttca

SEQ ID NO: 418170 - DNA, 120 bp, Artificial Sequence
  ENSG00000149646_21 (sequence is synthesized)
aggattatgagggctcaaagaagcccaataaattgcatcccacttcctggcctaagctcagaactgagaaagaagacaaaaggaaaagcagatgagagacccaatggtcacttttattaa

SEQ ID NO: 418171 - DNA, 120 bp, Artificial Sequence
  ENSG00000149646_22 (sequence is synthesized)
tggccatacttctgttggagagggtgacttacatcatcaaccaagaggtttacctaatactgaaccccagatttagacagccttacatgcctagccacaggcaacgctggaccaaggcag

SEQ ID NO: 418172 - DNA, 120 bp, Artificial Sequence
  ENSG00000149646_23 (sequence is synthesized)
gctccactgcaacagcaggcctgctgccaaaactcatggcagggaaaggtggagcaaaatatgggctgagagggaaggagacaatcatgcctagtttttctctttccaaattcatcaaag

SEQ ID NO: 418173 - DNA, 120 bp, Artificial Sequence
  ENSG00000149646_24 (sequence is synthesized)
agtttaagtcactcctcaatgtaaaaggagagaggccagtagtgttctactaatacacctccctccatgtggaaagaaaccttgggagtagagaggtggtctccatttcaatggtgatca

SEQ ID NO: 418174 - DNA, 120 bp, Artificial Sequence
  ENSG00000149646_25 (sequence is synthesized)
aaagagccagaagcaatccaggaatcacaataaccagggttttctaaatgcccacacgctctctctattcgcgtctctactttctttcctacacccctacttcggtgcaggggcattttc

SEQ ID NO: 418175 - DNA, 70 bp, Artificial Sequence
  ENSG00000149646_26 (sequence is synthesized)
tttctttcctacacccctacttcggtgcaggggcattttcagggctttgttcactgcggtgaccatgttt

SEQ ID NO: 418176 - DNA, 85 bp, Artificial Sequence
  ENSG00000149646_27 (sequence is synthesized)
tgaccaggtttctagatttcctagaaggtcccaatttaaaatattttatcccagtggtagatcatgtgcccttctttagctcaga

SEQ ID NO: 418177 - DNA, 120 bp, Artificial Sequence
  ENSG00000149646_28 (sequence is synthesized)
ttatcccagtggtagatcatgtgcccttctttagctcagaaaagttggtcacccttctgctaacttgttctagttccccagaggtatcttcattgctactgggtgtgttgctcagggctt

SEQ ID NO: 418178 - DNA, 120 bp, Artificial Sequence
  ENSG00000149646_29 (sequence is synthesized)
caaagtttccccagcaatcacctggacaaatcctgcccatttttctgttgtttcaggaatgactagagccagtccccactcctctgcatctagtgattcactccaagaaatttccctaaa

SEQ ID NO: 418179 - DNA, 120 bp, Artificial Sequence
  ENSG00000149646_30 (sequence is synthesized)
gggcttctgacagatagtggccaaagaaagggggatacggggctggtgatgggggaaggaaaggcagccttaaactggtttctgaggggccagcaggtaatataactagtgtgtatgtag

SEQ ID NO: 418180 - DNA, 120 bp, Artificial Sequence
  ENSG00000149646_31 (sequence is synthesized)
ctgagtttaagatacagcaggccagctggagaggaaagatacacctcatctaaagacattcagatacaaatattatattttaagaccctgtgctggccaaaccaaacaaggctgcagccc

SEQ ID NO: 418181 - DNA, 120 bp, Artificial Sequence
  ENSG00000149646_32 (sequence is synthesized)
tgtggttgggctgagatgaaaaacgaatggagtagaagaactgtaaccaaaagactcaggttagctctcaggaaggacctcctgactctcagggtggcatgtaatggtgatgcaatgggc

SEQ ID NO: 418182 - DNA, 120 bp, Artificial Sequence
  ENSG00000149646_33 (sequence is synthesized)
cctggagatcagagggctttggttaccagaagacgtggcctgatgcatggggcagttggaagctaagatgcagagtcacttgttgtcaggggaatgtgaggctaagcctaaccacattgg

SEQ ID NO: 418183 - DNA, 120 bp, Artificial Sequence
  ENSG00000149646_34 (sequence is synthesized)
ccagccagagtggcttgagcagagcagaagcctctcaagggcagcctataagggtcatagggttgtcaggcggagcactgggcggctggagtgcaggatcaggtggggagccctagactg

SEQ ID NO: 418184 - DNA, 120 bp, Artificial Sequence
  ENSG00000149646_35 (sequence is synthesized)
cttcagtagatgtgtgaatctggatgtttctgagcactgcctctttccttcagtagtctccctgagaagcaccacatggctatgcaaaggataaacacgttgtgggggcgagacgggtct

SEQ ID NO: 418185 - DNA, 120 bp, Artificial Sequence
  ENSG00000149646_36 (sequence is synthesized)
gagtctaaggaacaaatgacatgtggcttgaggccacactccagacacggaattgggtttgctgaaagccttgagttggggtctcagctagaccactgacttgctgtgtgatccttgggc

SEQ ID NO: 418186 - DNA, 120 bp, Artificial Sequence
  ENSG00000149646_37 (sequence is synthesized)
aagttccttcaccatctcagtcctacatggagcttaataaaacctgctttgtcctgatgactaaatggagtaaggcagggaggatacactgtgcttggctcattaaagacatttaacaaa

SEQ ID NO: 418187 - DNA, 120 bp, Artificial Sequence
  ENSG00000149646_38 (sequence is synthesized)
agcgttctcgagtcgcatgaggcggctgctgccctcgcggtgcgggagggcgagctgcgcgtggcctgggctccttccgaatggtggcgcctctgagcgccagttcgaggaggagtcgga

SEQ ID NO: 418188 - DNA, 120 bp, Artificial Sequence
  ENSG00000149646_39 (sequence is synthesized)
ggaggagcctgaatgtttggagatagacttcaagtcccggaccttatccgtgcgccgcttcggtttgcagattgagaaaccaagatgtcagaagatgaaggattggtccaaaataagaaa

SEQ ID NO: 418189 - DNA, 120 bp, Artificial Sequence
  ENSG00000149651_0 (sequence is synthesized)
ctgcctgctgcttgctgcaccatgaagtctgccaagctgggatttcttctaagattcttcatcttctgctcattgaataccctgttattgggtggtgttaataaaattgcggagaagata

SEQ ID NO: 418190 - DNA, 120 bp, Artificial Sequence
  ENSG00000149651_1 (sequence is synthesized)
tgtggagacctcaaagatccctgcaaattggacatgaattttggaagctgctatgaagttcactttagatatttctacaacagaacctccaaaagatgtgaaacttttgtcttctccggc

SEQ ID NO: 418191 - DNA, 120 bp, Artificial Sequence
  ENSG00000149651_2 (sequence is synthesized)
gaacgtgaagtagcctgtgttgcaaaatacaaaccaccgaggtgagaggatgtgaactcatgaagttgtctgctgcaccatccgaaataaagacacaagaaaattcagactgattttgaa

SEQ ID NO: 418192 - DNA, 120 bp, Artificial Sequence
  ENSG00000149651_3 (sequence is synthesized)
atctttgtaatatttccataatgctttaagcttccatatgtttgctattttcctgaccctagttttgtctttcctggaaattaactgtatgatcattagaatgaaagagtctttctgtca

SEQ ID NO: 418193 - DNA, 120 bp, Artificial Sequence
  ENSG00000149654_0 (sequence is synthesized)
agacacgcacactccctcgctcccgctcgctcgctcactccctcgctctctcgctctctcgctctctcgctcacacacacgcgcgcacacgccgccgcggctccccctctcgctcccgct

SEQ ID NO: 418194 - DNA, 120 bp, Artificial Sequence
  ENSG00000149654_1 (sequence is synthesized)
tccggactcgcccgctgcccgcgccggggctcccgccccacgcagcgtcccgaggcggcaggactagggggagccccgggccgctccccgaggctcctgatggaaagggaaggcccctag

SEQ ID NO: 418195 - DNA, 120 bp, Artificial Sequence
  ENSG00000149654_2 (sequence is synthesized)
cgaggctcctgatggaaagggaaggcccctagtcctggcaggatctgccggccccaacccgcatcctttctgcgcaggaaccatggcgcttccccgactctggagctgtccaggtgctgc

SEQ ID NO: 418196 - DNA, 120 bp, Artificial Sequence
  ENSG00000149654_3 (sequence is synthesized)
ccatggcgcttccccgactctggagctgtccaggtgctgcctggtgatccgcacgcgacgcggcgacgggggcgcgggcgggcaccccgggggctgtccatgccccggatgcggccgcgc

SEQ ID NO: 418197 - DNA, 120 bp, Artificial Sequence
  ENSG00000149654_4 (sequence is synthesized)
gttcagggccgcgggcccgtccgggtgccccgtcgggggcgacatcccggcggccgcgctgaggccaccatgtgacacggcgccgcatcgttgtgcgaccaagcagcggcgccctggtgc

SEQ ID NO: 418198 - DNA, 120 bp, Artificial Sequence
  ENSG00000149654_5 (sequence is synthesized)
ctctcgtccatgctcctgggccccagccccgcgcaggccaaggatgaggccgaggcccgaaggtagggggctccgggcgggagtcgcgctgtcccccgcgctactgctgctgctgctgct

SEQ ID NO: 418199 - DNA, 120 bp, Artificial Sequence
  ENSG00000149654_6 (sequence is synthesized)
gacgctgctggggcgcctgtgggcagcgggcacaccctcgccgtcggcgcccggagctcggcaggacggcgcgctgggagccggccgcgtcaaacgcggctgggtgtggaaccagttctt

SEQ ID NO: 418200 - DNA, 120 bp, Artificial Sequence
  ENSG00000149654_7 (sequence is synthesized)
gaaccagttcttcgtggtagaggagtacacgggcacggagcccctgtatgtgggcaagatccactccgactcagacgagggtgacggggccatcaagtacaccatctcaggcgagggtgc

SEQ ID NO: 418201 - DNA, 120 bp, Artificial Sequence
  ENSG00000149654_8 (sequence is synthesized)
tgggaccatcttcctgatcgacgagctgacaggcgacattcatgccatggagcgcctggaccgcgagcagaaaaccttctacacgctgcgggcccaggctcgggatcgcgccaccaaccg

SEQ ID NO: 418202 - DNA, 120 bp, Artificial Sequence
  ENSG00000149654_9 (sequence is synthesized)
cctactggagcccgagtcggagttcatcatcaaggtgcaggacatcaatgacagtgagccccgcttcctgcacggcccctatattggcagcgtggccgagctctcacctacaggcacgtc

SEQ ID NO: 418203 - DNA, 120 bp, Artificial Sequence
  ENSG00000149654_10 (sequence is synthesized)
ggtgatgcaggtgatggcctcggatgcggatgaccccacgtacggcagcagcgctcggctggtgtacagcgtgctggacggcgagcaccacttcaccgtggaccccaagaccggcgtaat

SEQ ID NO: 418204 - DNA, 120 bp, Artificial Sequence
  ENSG00000149654_11 (sequence is synthesized)
ccggacggctgtgcctgaccttgaccgcgagagccaggagcgctacgaggtggtgatccaggccacagacatggcgggtcagctgggtggcctctcgggctccactaccgtcaccatcgt

SEQ ID NO: 418205 - DNA, 120 bp, Artificial Sequence
  ENSG00000149654_12 (sequence is synthesized)
agtcaccgacgtcaatgacaacccgccccgtttcccgcagaagatgtaccagttcagcatccaggagtcagcccccattggaacggctgtgggacgtgtgaaggctgaggactcagacgt

SEQ ID NO: 418206 - DNA, 120 bp, Artificial Sequence
  ENSG00000149654_13 (sequence is synthesized)
gggagagaacacagacatgacttaccaccttaaggacgagagcagcagcggcggcgatgtgttcaaggtcaccacagacagcgacactcaggaggccatcatcgtagtgcagaagcgcct

SEQ ID NO: 418207 - DNA, 120 bp, Artificial Sequence
  ENSG00000149654_14 (sequence is synthesized)
ggacttcgaatcccagcccgtgcacaccgtgatcctggaggccctcaacaagttcgtggacccccgcttcgccgacctgggcacgttccgcgaccaggcgatcgtgcgcgtggccgtgac

SEQ ID NO: 418208 - DNA, 120 bp, Artificial Sequence
  ENSG00000149654_15 (sequence is synthesized)
cgacgtggacgagccccccgagttccggccgccctccggcctcctggaggtgcaggaggacgcgcaggtgggctccctggtcggcgtggtgacggcgcgggaccccgacgccgccaaccg

SEQ ID NO: 418209 - DNA, 120 bp, Artificial Sequence
  ENSG00000149654_16 (sequence is synthesized)
tgcggacacaggcgccatcgtgactggcaaggggctggaccgcgagacggccggctggcacaacatcacagtgctggccatggaggcggacaatcatgcacagctatcccgggcatccct

SEQ ID NO: 418210 - DNA, 120 bp, Artificial Sequence
  ENSG00000149654_17 (sequence is synthesized)
aaggatccgaatcctggatgtgaacgacaatcccccagaactggccacaccctacgaggcagctgtatgcgaggatgccaagccaggccagctcatccagaccatcagcgtggtggacag

SEQ ID NO: 418211 - DNA, 120 bp, Artificial Sequence
  ENSG00000149654_18 (sequence is synthesized)
agacgagccccaaggcgggcaccgcttctatttccgcctggtgcctgaagctcccagcaaccctcatttctctctgcttgacatccaagacaacaccgctgcagtgcacacgcagcacgt

SEQ ID NO: 418212 - DNA, 120 bp, Artificial Sequence
  ENSG00000149654_19 (sequence is synthesized)
gggcttcaaccggcaggagcaggacgtgttcttcctgcccatcctggtggtagacagtgggccgcccacactgagcagcacaggcacgctcaccatccgcatctgtggctgcgacagctc

SEQ ID NO: 418213 - DNA, 120 bp, Artificial Sequence
  ENSG00000149654_20 (sequence is synthesized)
cggcaccatccagtcctgcaacaccacggcctttgtcatggccgcctccctcagccccggcgccctcatcgccctcttggtctgcgttctcatcctggttgtgctggtgctgctgatcct

SEQ ID NO: 418214 - DNA, 120 bp, Artificial Sequence
  ENSG00000149654_21 (sequence is synthesized)
caccctcaggcgccaccacaagagccacctgagctcggacgaggatgaagacatgcgggacaacgtcatcaaatacaacgacgaaggcggcggcgagcaggacaccgaagcctacgacat

SEQ ID NO: 418215 - DNA, 120 bp, Artificial Sequence
  ENSG00000149654_22 (sequence is synthesized)
gacaccgaagcctacgacatgtcggcgctgcggagcctctacgacttcggcgagctcaagggcggcgacgggggcggcagcgcgggcgggggagcgggcgggggctcgggcgggggcgcg

SEQ ID NO: 418216 - DNA, 120 bp, Artificial Sequence
  ENSG00000149654_23 (sequence is synthesized)
cctgccctccgagcgccactcgctgccgcaggggccgccgagccccgagccagacttctcagtgttcagggacttcatcagccgcaaggtggcactggcggacggggacctgtcggtgcc

SEQ ID NO: 418217 - DNA, 120 bp, Artificial Sequence
  ENSG00000149654_24 (sequence is synthesized)
gccctacgacgccttccagacctacgccttcgagggcgcggactcgccggccgcctcgctcagctccctgcacagcggctcgtcgggctccgagcaggacttcgcctatctcagcagctg

SEQ ID NO: 418218 - DNA, 120 bp, Artificial Sequence
  ENSG00000149654_25 (sequence is synthesized)
cctatctcagcagctggggtccgcgcttccggcccctggccgcgctctacgccggccaccgcggggacgacgaggcccaggcctcctagcccctcgccctgccgtcggggcgcggctgct

SEQ ID NO: 418219 - DNA, 120 bp, Artificial Sequence
  ENSG00000149654_26 (sequence is synthesized)
gccggggccccaggacaacgcgtttcccccgcggaccccctttcctgccctcccccaaccctcccttggcggctggacggaggggggacttgctaggagcggactcttccattcctcctc

SEQ ID NO: 418220 - DNA, 120 bp, Artificial Sequence
  ENSG00000149654_27 (sequence is synthesized)
ctctaggggtgcagctttggagcccagaggtgcgggattctgaccaacggcattaaaactgaggcgagaccgggcacggtgtggctctggggttagaatgggagatgggggtggcgttgc

SEQ ID NO: 418221 - DNA, 120 bp, Artificial Sequence
  ENSG00000149654_28 (sequence is synthesized)
agagtcgggaaggggcgggtcactcaatcctggcctgggggagaatgctggagggagcacgccgctgagatgcccccaccccaggtttcccccatcagagttaagaggaaagaaggctgt

SEQ ID NO: 418222 - DNA, 120 bp, Artificial Sequence
  ENSG00000149654_29 (sequence is synthesized)
tcacttactaagcacctactgtgtgctgggacgctgtacagagaccagctcagtcgtcagagaaaccatgaggtggtgtcctgcacggaatagaaggggaaaggaccccagagaagtggc

SEQ ID NO: 418223 - DNA, 120 bp, Artificial Sequence
  ENSG00000149654_30 (sequence is synthesized)
tgtgacccgtccaagggcacctggccagtgaatggcagagcctctggcactgaccagctgcctggcctcgggcaagtcacttcacttctctggtcctcagtttcctcatctgtcaaatgg

SEQ ID NO: 418224 - DNA, 120 bp, Artificial Sequence
  ENSG00000149654_31 (sequence is synthesized)
ggttaataacagaacctacctcgaagagttgtgaggctaaaaagggttcatatgtgtcaagtggttaggacagtgcctggcacatagtaggtgttcaataaatgctagcctttgttacta

SEQ ID NO: 418225 - DNA, 120 bp, Artificial Sequence
  ENSG00000149654_32 (sequence is synthesized)
gagaacaaggcccagggggcccaactcacacacacccagagatggcacctgaatcctacacaccacaaggcttcaggaccagtttccaagtgagaagagtgtcgtgtccccagttcctca

SEQ ID NO: 418226 - DNA, 120 bp, Artificial Sequence
  ENSG00000149654_33 (sequence is synthesized)
ggagctggaagtgacagggacagcaaagaaggcagccacgtggagcctctctcactcacagaggtggagccaggcccctgctccagcccccactcagagctgggacactgagcctttggt

SEQ ID NO: 418227 - DNA, 120 bp, Artificial Sequence
  ENSG00000149654_34 (sequence is synthesized)
gcccaagcccatagatacacagtgactccacatcctaccacgaatcctgtacattcactgaggtcctggatggcaagtgaccagcacaaagcttagcacacagcaagtgctcggctaaag

SEQ ID NO: 418228 - DNA, 120 bp, Artificial Sequence
  ENSG00000149654_35 (sequence is synthesized)
tcactccctctccacctttccacctgggatcccctgctccctggcctggtggctgctgcactcccctgctgtccagggctgcaaagcctcagcgtcctggctatgcactttctacacgtg

SEQ ID NO: 418229 - DNA, 120 bp, Artificial Sequence
  ENSG00000149654_36 (sequence is synthesized)
gagacccccgcccggggccgacgcctgctgcctgctatcccgccatcacccccgcggacagactgcgggcagaggggaggagggctggggcgggcagggccgaaggaaggggctgcgtgg

SEQ ID NO: 418230 - DNA, 120 bp, Artificial Sequence
  ENSG00000149654_37 (sequence is synthesized)
gggaggcgcggagagaggcgcacgggtggagagaaacaggcacggagccaaagagccaaggaagcagatgtgagaacagtcaatgagacaggcaggcgagccaggccaataagggagaga

SEQ ID NO: 418231 - DNA, 120 bp, Artificial Sequence
  ENSG00000149654_38 (sequence is synthesized)
accaggagggacagacacagaggcgggcactgcactggcggggtctccgcgctgctggctgcagccacactggctccctgatctctcgactgggccatccctgtgcccaggactccccca

SEQ ID NO: 418232 - DNA, 120 bp, Artificial Sequence
  ENSG00000149654_39 (sequence is synthesized)
gtcttctccctgcacccccttccctctcatcatctcccttggtgttccgctagacacctcaaacttaagttcagaactgggttcctggtctctccatcaaaagaaaaaaaaaacccacca

SEQ ID NO: 418233 - DNA, 80 bp, Artificial Sequence
  ENSG00000149657_0 (sequence is synthesized)
agtcgcgcgccccttcttggttcgctcggtgcccgcgcaggcccctcgggcggtggcgaggaggcgcccaggcggaggcg

SEQ ID NO: 418234 - DNA, 120 bp, Artificial Sequence
  ENSG00000149657_1 (sequence is synthesized)
cggcggcggagcgggccgcggcccggcgctccttccccaccgcggcccgacgcaccccggccgccgccatgagcggctcctcaggcaccccgtatctgggcagcaagatcagcctcatct

SEQ ID NO: 418235 - DNA, 120 bp, Artificial Sequence
  ENSG00000149657_2 (sequence is synthesized)
atctccaaggcgcagatccgctacgagggcattctctacaccatcgacaccgacaactccaccgtggcgctcgccaaagtgaggtcctttggcactgaagaccgtcccacagataggcct

SEQ ID NO: 418236 - DNA, 120 bp, Artificial Sequence
  ENSG00000149657_3 (sequence is synthesized)
gcgccccccagagaggagatttatgagtacatcattttccgaggaagtgacatcaaggatatcactgtgtgtgaacctccgaaagctcagcacacactcccgcaggatcccgccattgtt

SEQ ID NO: 418237 - DNA, 120 bp, Artificial Sequence
  ENSG00000149657_4 (sequence is synthesized)
cagtcttccctgggttctgcctccgcctcgcccttccagccgcacgtgccttacagccctttccgagggatggcgccctacggcccgctggcggccagctccctgctcagccagcagtat

SEQ ID NO: 418238 - DNA, 120 bp, Artificial Sequence
  ENSG00000149657_5 (sequence is synthesized)
gccgcctccctgggtctaggagctggttttccatccatcccagtcggcaagagccccatggtggagcaggctgtgcagactggttctgctgacaacctgaatgctaaaaagctgttacct

SEQ ID NO: 418239 - DNA, 120 bp, Artificial Sequence
  ENSG00000149657_6 (sequence is synthesized)
ggcaagggcaccacagggacgcagctcaacggtcgtcaggcccagccgagcagcaagacggccagcgatgtagtccagccggcagctgtgcaagctcaagggcaggtgaatgacgagaac

SEQ ID NO: 418240 - DNA, 120 bp, Artificial Sequence
  ENSG00000149657_7 (sequence is synthesized)
agaagacctcagaggaggcgatcaggaaacaggcgaacaaggaatcgctccagagggcaaaaccgtccaactaacgttaaggaaaacacaatcaaatttgagggtgactttgatttcgag

SEQ ID NO: 418241 - DNA, 120 bp, Artificial Sequence
  ENSG00000149657_8 (sequence is synthesized)
agtgcaaatgcccagttcaaccgagaggagcttgacaaagaatttaagaagaaactgaattttaaagatgacaaggctgagaagggggaagagaaggacctggctgtggtgacccagagt

SEQ ID NO: 418242 - DNA, 120 bp, Artificial Sequence
  ENSG00000149657_9 (sequence is synthesized)
gccgaagcgcccgctgaggaagaccttctggggcccaactgctactatgacaaatccaagtcgttcttcgacaacatctcttctgaactcaagaccagctccaggcggacgacgtgggcc

SEQ ID NO: 418243 - DNA, 120 bp, Artificial Sequence
  ENSG00000149657_10 (sequence is synthesized)
ccgcagttctcggggcggattccgaggaggcaggggcaatgggaccacccgtcgcaaccccacttcccacagggccgggactggcagggtgtgagggtgcagccaaaggctcctactgaa

SEQ ID NO: 418244 - DNA, 120 bp, Artificial Sequence
  ENSG00000149657_11 (sequence is synthesized)
gtggcgcataactgacgctgtgtgtgtcaggacgcgaggaaaacgctgcacttacagggagaggtggtcactttgtttacggagtttggaagagacccatactgctacttgtgttttgga

SEQ ID NO: 418245 - DNA, 120 bp, Artificial Sequence
  ENSG00000149657_12 (sequence is synthesized)
cttaactgaacttggacatggtctgagttagaaccacttgttttggggaagtattcatgggtaacctctttgaggtctctttatctgtgtttcctttttagttgcgcatagcctaattct

SEQ ID NO: 418246 - DNA, 120 bp, Artificial Sequence
  ENSG00000149657_13 (sequence is synthesized)
aaggttttggtattttgcaaaaaggtttctatagtgaaagctgaatccttactttgtgacttttttttttttttttaatgacaagctttgacttttaaaagtggaaccaaatctgttggc

SEQ ID NO: 418247 - DNA, 120 bp, Artificial Sequence
  ENSG00000149657_14 (sequence is synthesized)
agaggtggcagccaagtacatctctgtaacccagctggcccctggtgctgttggcctggcaccccactgccaagggtggggtctcaggagtcaggcagggccagcacagggtggcgtggg

SEQ ID NO: 418248 - DNA, 120 bp, Artificial Sequence
  ENSG00000149657_15 (sequence is synthesized)
gggcaggggtgggtgggtggagggcacggaaggggttttcccatggatcatgttgtataagtgaaccagaccaccctgatggcatccacagtgatgtcaaggttggggctggccaggggt

SEQ ID NO: 418249 - DNA, 120 bp, Artificial Sequence
  ENSG00000149657_16 (sequence is synthesized)
gggtggactagaagcatttgggagtagtggccaggggccctggacgctagccacggagctgctgcacagagcctggtgtccacaagcttccaggttggggttggagcctgggatgagccc

SEQ ID NO: 418250 - DNA, 120 bp, Artificial Sequence
  ENSG00000149657_17 (sequence is synthesized)
cggcagcgccttggcccttctgtggtccctgccagcctctgacctgggccggtcagtcattgctggactctggccacacactggcgttctcatccacttggaaacaagccagtcttttct

SEQ ID NO: 418251 - DNA, 120 bp, Artificial Sequence
  ENSG00000149657_18 (sequence is synthesized)
gcaaggtcagttgaccaagagcatatttcccctctgttgtacatcgttgttttgtgtttgtgttgtaacagtgggtggagggagggtggggtctacatttgttgcatgagtcgatgggtc

SEQ ID NO: 418252 - DNA, 120 bp, Artificial Sequence
  ENSG00000149657_19 (sequence is synthesized)
agaactttagtatacgcatgcgtcctctgagtgacagggcattttgtcgaaaataagcaccttggtaactaaacccctctaatagctataaaggctttagttctgtattgattaagttac

SEQ ID NO: 418253 - DNA, 120 bp, Artificial Sequence
  ENSG00000149657_20 (sequence is synthesized)
tgtaaaagcttgggtttatttttgtaggacttaatggctaagaattagaacatagcaagggggctcctctgttggagtaatgtaaattgtaattataaataaacatgcaaacctttaaaa

SEQ ID NO: 418254 - DNA, 120 bp, Artificial Sequence
  ENSG00000149657_21 (sequence is synthesized)
ctcccgtcagcgggcctcctccccgccagcctggggggatccctgcgggggagcctcgaggtcgggtggcggggccagtgtcccggcgtctcccgaaggctgggggtggggtcacaacac

SEQ ID NO: 418255 - DNA, 120 bp, Artificial Sequence
  ENSG00000149657_22 (sequence is synthesized)
gggtcacaacacgcgaatcctgcaagcctttctggaacttattagacagctggggccttgatcctgaacaaataccgcgtcctaatgcggcctcctgccaaggcagaagcatccgttggc

SEQ ID NO: 418256 - DNA, 120 bp, Artificial Sequence
  ENSG00000149657_23 (sequence is synthesized)
tcctcagagccacagcagctcactgccaagggtaacagcagtttgggagaactgcatgctgtcttgcaaaccattctgagagcgaggggtaaagcagcagacagaatgacagtagctgta

SEQ ID NO: 418257 - DNA, 120 bp, Artificial Sequence
  ENSG00000149657_24 (sequence is synthesized)
gcagatcatttgccaagcccatgcagccgctgagctgcttgttttgcttcagcatgtagtcctgattgatgaactctcagtgttaaagaagggattacgaagaatcagcggagtagtttg

SEQ ID NO: 418258 - DNA, 120 bp, Artificial Sequence
  ENSG00000149657_25 (sequence is synthesized)
ttctctctccctgggtccaggttctctgttgacctgtaccatgactaccacatacgggaaacttcactgttcacagaaagtcatttccctggggtttttgctgggtcctaaatgtgttcc

SEQ ID NO: 418259 - DNA, 120 bp, Artificial Sequence
  ENSG00000149657_26 (sequence is synthesized)
gctcaacggtcgtcaggcccagccgagcagcaagacggccagcggaaacaggcgaacaaggaatcgctccagagggcaaaaccgtccaactaacgttaaggaaaacacaatcaaatttga

SEQ ID NO: 418260 - DNA, 80 bp, Artificial Sequence
  ENSG00000149658_0 (sequence is synthesized)
gtcgccgccgccgccgccattggagtcgacgcctcctcagtgcgtccgcgtcccgggctcaccgccgctgccgcctcgcc

SEQ ID NO: 418261 - DNA, 120 bp, Artificial Sequence
  ENSG00000149658_1 (sequence is synthesized)
cccggggaattggcggcggggcccggggccgcgcgagctagggtgacaggcccggcctctaggggaggcccgagccggcgggcgccccggccccgcgtctagttgttcatgaagcatgtc

SEQ ID NO: 418262 - DNA, 120 bp, Artificial Sequence
  ENSG00000149658_2 (sequence is synthesized)
tgtcggccaccagcgtggacacccagagaacaaaaggacaagataataaagtacaaaatggttcgttacatcagaaggatacagttcatgacaatgactttgagccctaccttactggac

SEQ ID NO: 418263 - DNA, 120 bp, Artificial Sequence
  ENSG00000149658_3 (sequence is synthesized)
agtcaaatcagagtaacagttacccctcaatgagcgacccctacctgtccagctattacccgccgtccattggatttccttactccctcaatgaggctccgtggtctactgcaggggacc

SEQ ID NO: 418264 - DNA, 120 bp, Artificial Sequence
  ENSG00000149658_4 (sequence is synthesized)
ctccgattccatacctcaccacctacggacagctcagtaacggagaccatcattttatgcacgatgctgtttttgggcagcctgggggcctggggaacaacatctatcagcacaggttca

SEQ ID NO: 418265 - DNA, 120 bp, Artificial Sequence
  ENSG00000149658_5 (sequence is synthesized)
attttttccctgaaaaccctgcgttctcagcatgggggacaagtgggtctcaaggtcagcagacccagagctccgcgtatgggagcagctacacctaccccccgagctccctgggtggca

SEQ ID NO: 418266 - DNA, 120 bp, Artificial Sequence
  ENSG00000149658_6 (sequence is synthesized)
cggtggttgatgggcagccaggctttcacagcgacaccctcagcaaggcccccgggatgaacagcctggagcagggcatggttggcctgaagattggggacgtcagctcctccgccgtca

SEQ ID NO: 418267 - DNA, 120 bp, Artificial Sequence
  ENSG00000149658_7 (sequence is synthesized)
agacggtgggctctgtcgtcagcagcgtggcactgactggtgtcctttctggcaacggtgggacaaatgtgaacatgccagtttcaaagccgacctcgtgggctgccattgccagcaagc

SEQ ID NO: 418268 - DNA, 120 bp, Artificial Sequence
  ENSG00000149658_8 (sequence is synthesized)
ctgcaaaaccacagcctaaaatgaaaacaaagagcgggcctgtcatggggggtgggctgccccctccacccataaagcataacatggacattggcacctgggataacaaggggcctgtgc

SEQ ID NO: 418269 - DNA, 120 bp, Artificial Sequence
  ENSG00000149658_9 (sequence is synthesized)
cgaaggccccagtcccccagcaggcaccctctccacaggctgccccacagccccagcaggtggctcagcctctcccagcacagcccccagctttggctcaaccgcagtatcagagccctc

SEQ ID NO: 418270 - DNA, 120 bp, Artificial Sequence
  ENSG00000149658_10 (sequence is synthesized)
agcagccaccccagacccgctgggttgccccacgcaacagaaacgcggcgtttgggcagagcggaggggctggcagcgatagcaactctcctggaaacgtccagcctaattctgccccca

SEQ ID NO: 418271 - DNA, 120 bp, Artificial Sequence
  ENSG00000149658_11 (sequence is synthesized)
gcgtcgaatcccaccccgtccttgaaaaactgaaggctgctcacagctacaacccgaaagagtttgagtggaatctgaaaagcgggcgtgtgttcatcatcaagagctactctgaggacg

SEQ ID NO: 418272 - DNA, 120 bp, Artificial Sequence
  ENSG00000149658_12 (sequence is synthesized)
acatccaccgctccattaagtactccatctggtgtagcacagagcacggcaacaagcgcctggacagcgccttccgctgcatgagcagcaaggggcccgtctacctgctcttcagcgtca

SEQ ID NO: 418273 - DNA, 120 bp, Artificial Sequence
  ENSG00000149658_13 (sequence is synthesized)
aggacaagtggaaggggaagtttgatgtccagtggatttttgttaaggatgtacccaataaccagctccggcacatcaggctggagaataacgacaacaaaccggtcacaaactcccggg

SEQ ID NO: 418274 - DNA, 120 bp, Artificial Sequence
  ENSG00000149658_14 (sequence is synthesized)
acacccaggaggtgcccttagaaaaagccaagcaagtgctgaaaattatcagttcctacaagcacacaacctccatcttcgacgactttgctcactacgagaagcgccaggaggaggagg

SEQ ID NO: 418275 - DNA, 120 bp, Artificial Sequence
  ENSG00000149658_15 (sequence is synthesized)
aggtggtgcgcaaggaacggcagagtcgaaacaaacaatgagggcgaaccagtttcttacatgttctaacgtttgactttgaaaacagtttaaaacacgtgtgcttggtcagctccagtg

SEQ ID NO: 418276 - DNA, 120 bp, Artificial Sequence
  ENSG00000149658_16 (sequence is synthesized)
tgtcgtcccgtgcgggggttgagtgttgcatctttgcctttcttgtcgttgatttttgcccagatggatctgcatttatttgtactttttctatgtattataatcctgtagaagtcacta

SEQ ID NO: 418277 - DNA, 120 bp, Artificial Sequence
  ENSG00000149658_17 (sequence is synthesized)
ataaaggagtattttttttgtcagcttatcaatcagactgatctaatgtgaaatgtaagtatccttaaaaacaaagcatctattttggcagaaattgtgttcttaaattcagtcatttga

SEQ ID NO: 418278 - DNA, 120 bp, Artificial Sequence
  ENSG00000149658_18 (sequence is synthesized)
tattctgtgagacttcatatttctcatccctttattgctttttagcaaacataagaaaccatgagtcattttgtcatttagagtattctgataaaatctcttgaaaatactgaaatcaaa

SEQ ID NO: 418279 - DNA, 120 bp, Artificial Sequence
  ENSG00000149658_19 (sequence is synthesized)
aggttaatgattttttgttcattctgatttgtcattttattatctgttatcggtctaaagtgctaatttacccatttgatttttctgctagacagataacttttaatttttcaaatttgg

SEQ ID NO: 418280 - DNA, 120 bp, Artificial Sequence
  ENSG00000149658_20 (sequence is synthesized)
cagacactttttttttttttttgaaaatctttccttccagatctgttgcccactgaacagccacccgtccctcactgtcctggtgtccgattgggctggatggtgttggggcatgatgtg

SEQ ID NO: 418281 - DNA, 120 bp, Artificial Sequence
  ENSG00000149658_21 (sequence is synthesized)
tggaggaactggaaggtgctttaggtctggttcagggtcgggcattctttgttgtttgcacatctttttaaattttacaccttttcttaagaattctaatgccgtcttaagtttttatac

SEQ ID NO: 418282 - DNA, 120 bp, Artificial Sequence
  ENSG00000149658_22 (sequence is synthesized)
caataatgctgagctttaagtgtaggatctggtagtacagacagtgtgatggatgatgctgctggttgtaaatttcatcgtgtgtgtctaattttttttcctgttgaatgggtaaaaaca

SEQ ID NO: 418283 - DNA, 120 bp, Artificial Sequence
  ENSG00000149658_23 (sequence is synthesized)
aaacaaaactttttttagaagatgaatttgctgtcatgttttgtggaatgagggaccgttgagctcactaccacctggagtttgagttgaagcatgaaaatggtgcccatgcctgacgct

SEQ ID NO: 418284 - DNA, 120 bp, Artificial Sequence
  ENSG00000149658_24 (sequence is synthesized)
ccagcgcctggatctgcacgtgcccttgtagaggatccttaccgtcctagagagcagacgctttctgaaaactacttgctccaaaagaccctctgagttaacgtttcagctgtatcatta

SEQ ID NO: 418285 - DNA, 120 bp, Artificial Sequence
  ENSG00000149658_25 (sequence is synthesized)
gacttgtatttagagcgtgtcacttcctctgaactgttactgcctgaatggagtcctggacgacattgggtttttcctctaggagaatacaagccttaataaacaatactatttagcaaa

SEQ ID NO: 418286 - DNA, 120 bp, Artificial Sequence
  ENSG00000149679_0 (sequence is synthesized)
cgctgcggaggcgcggggactcgcggcgccgccaggccgcgcttttcttcctcaacaacatctccctggacgggcggcccccgagcctgggcccgggcggagagaagcccccgccgccgc

SEQ ID NO: 418287 - DNA, 80 bp, Artificial Sequence
  ENSG00000149679_1 (sequence is synthesized)
gctgcccgccaggacccccgcgccccagggcctgctcagccccacgcaggtgcccaccggcctcggcctggatgggcagc

SEQ ID NO: 418288 - DNA, 120 bp, Artificial Sequence
  ENSG00000149679_2 (sequence is synthesized)
cagcgccagaggaagcgagtcacgtcccagcgctgctccctggagtttctggaagatgccgtgggatgcgctccagcacagagaaccaaacacacatctggatcaccgagacataaaggc

SEQ ID NO: 418289 - DNA, 120 bp, Artificial Sequence
  ENSG00000149679_3 (sequence is synthesized)
ctgaagaagacccacttcatcaagaacatgaggcagtacgacaccaggaacagcaggatcgtgctcatctgtgccaagcggtccctgtgcgcggccttctcggtcctgccctatggggaa

SEQ ID NO: 418290 - DNA, 120 bp, Artificial Sequence
  ENSG00000149679_4 (sequence is synthesized)
ggcctgcggatcagtgacctgagggtggacagccagaagcagaggcacccgtccggcggcgtctctgtgtcttccgagatggtctttgagctagaaggtgtggagctaggagcagacggg

SEQ ID NO: 418291 - DNA, 120 bp, Artificial Sequence
  ENSG00000149679_5 (sequence is synthesized)
aaggtcgtgtcttatgcgaagttcctgtatcccaccaacgccctggtcacacacaagagtgacagccatggcctgctgcccacacctcggcccagtgtcccccggactctgccagggtca

SEQ ID NO: 418292 - DNA, 120 bp, Artificial Sequence
  ENSG00000149679_6 (sequence is synthesized)
agacataaacctgcccccaccaagtcggcaccagccagcacagaactagggagtgacgtgggggacaccctggagtacaaccccaacctcctggatgacccgcagtggccctgcggcaag

SEQ ID NO: 418293 - DNA, 120 bp, Artificial Sequence
  ENSG00000149679_7 (sequence is synthesized)
cacaaacgtgtcctcatctttgcgtcgtacatgaccacagtgatagaatacgtgaagccctcagacctcaaaaaggacatgaacgagaccttcagggagaagttcccccatgtcaaactg

SEQ ID NO: 418294 - DNA, 120 bp, Artificial Sequence
  ENSG00000149679_8 (sequence is synthesized)
acgctgagcaaaatcaggagcttaaagcgggagatgcggagcctgtcggaggagtgcagcctggagcccgtgacggtggccatggcctacgtgtactttgagaagctggtcctgcagggc

SEQ ID NO: 418295 - DNA, 120 bp, Artificial Sequence
  ENSG00000149679_9 (sequence is synthesized)
aagctcagcaaacagaaccgcaagctgtgcgctggcgcctgcgtgctgctggctgccaagatcagcagtgacctgcgcaagagcggcgtgacgcagctcatcgataagttagaagaaagg

SEQ ID NO: 418296 - DNA, 120 bp, Artificial Sequence
  ENSG00000149679_10 (sequence is synthesized)
tttcgattcaacaggcgcgacctgatagggtttgagttcacagtgctcgtggccttggagctggccctgtatcttcccgagaaccaagtgttacctcattacaggcgcctcacccagcag

SEQ ID NO: 418297 - DNA, 120 bp, Artificial Sequence
  ENSG00000149679_11 (sequence is synthesized)
ttctagcagaggccccacagaaggctcagggcaccgaggtgcacttgccggcctgggaggtgtcccactgaagccccgcgcctcctcctgccagcacccccagcacctgctagcaggagg

SEQ ID NO: 418298 - DNA, 120 bp, Artificial Sequence
  ENSG00000149679_12 (sequence is synthesized)
cacctggcctccgctggtgcagctttcctttttgcctctttgccatttccttggaaagagacgtcgctttcatccccaagtgcaccgtccctccgaggggatttctgagaattctcctgc

SEQ ID NO: 418299 - DNA, 120 bp, Artificial Sequence
  ENSG00000149679_13 (sequence is synthesized)
atttttacataaactaaatgtgaggtttgttactggtatttttttcacgtgcctgagaccagcctggtaccaggaccttttgttcacagcgtgcagcagcgagccggctgcagtgtgtct

SEQ ID NO: 418300 - DNA, 120 bp, Artificial Sequence
  ENSG00000149679_14 (sequence is synthesized)
tagacctcactgaacacactggaatggctgagtttaacttatttaggcattcatcttggagatgtggtttttcgggttccccagcagcatctcccgacaccaactgtgccgctggctccc

SEQ ID NO: 418301 - DNA, 120 bp, Artificial Sequence
  ENSG00000149679_15 (sequence is synthesized)
tgccacctgaagccgagctcctccagagctttctccgcccacctcactgcatcccaagtggagcttttggtgtccagttaggccagcgggagcagtctcctgatttattttgatctcatt

SEQ ID NO: 418302 - DNA, 120 bp, Artificial Sequence
  ENSG00000149679_16 (sequence is synthesized)
cttggactcttggacctctctgttcttcaagcatcgtgtcactgtgaaatcctaacgcccctgtgtcctacagaccgacggcacaacagacagctgcccatcccatgccatgctctaccc

SEQ ID NO: 418303 - DNA, 120 bp, Artificial Sequence
  ENSG00000149679_17 (sequence is synthesized)
tctgcctctcaccaggagacactctgggcctccaggacaattgctgcttgccggctcttatttttctaagcaatattgtgatggagaaaaataacatatttattgggatttggttttttg

SEQ ID NO: 418304 - DNA, 120 bp, Artificial Sequence
  ENSG00000149679_18 (sequence is synthesized)
ggtcttttttttttaagggaacaaaaaatggttaaatgaggtctgctgaagttgacttgaaaacacacttgaccctcaggcaggagggcactgaccacaccccacacaacctcaaagggt

SEQ ID NO: 418305 - DNA, 120 bp, Artificial Sequence
  ENSG00000149679_19 (sequence is synthesized)
cagtgcgtcagtgccttttcttctgaggcaggaaacaggtgccatcttggccacctcggccagggcagcccaccatgctaaaaggaccccaaatggtggtcgttgtcccttctgtgcagg

SEQ ID NO: 418306 - DNA, 120 bp, Artificial Sequence
  ENSG00000149679_20 (sequence is synthesized)
ccagcagggccccatctctagtttttccacgtctgtctgaagttcttgcaacaaattctgcatggtccagcgctccagctagctgcctcatcaaaaacactgaataaccaaggactgctg

SEQ ID NO: 418307 - DNA, 120 bp, Artificial Sequence
  ENSG00000149679_21 (sequence is synthesized)
agtttttcttcatggggggtcagctggtctcaaaactggccactgcctcagccaccaagctttttcctaccactaccttataaacctgcctggccctggaggggctctgggacgactttg

SEQ ID NO: 418308 - DNA, 120 bp, Artificial Sequence
  ENSG00000149679_22 (sequence is synthesized)
tctctagcccattaatacaatacatcctatgctttctgtgcagactggtgcttccgcagaaaggagatgccaattctgctatcacagaactccaccagcaactccacccgaccccagcag

SEQ ID NO: 418309 - DNA, 120 bp, Artificial Sequence
  ENSG00000149679_23 (sequence is synthesized)
tggtgcaggacagctgccagcacccacctggccctcctccttttccacagccactcactggggccaccaaaacccagagatggcaggtgtgtgggacagactggaggatgaggacaaacc

SEQ ID NO: 418310 - DNA, 120 bp, Artificial Sequence
  ENSG00000149679_24 (sequence is synthesized)
aaagcctttgttctttcttattgtggagcgtccccttccatcaagcagcctgccctcaagccaaggatcatcccctggaacccagtatgcacccagaggggactcagcttcaaagctgct

SEQ ID NO: 418311 - DNA, 120 bp, Artificial Sequence
  ENSG00000149679_25 (sequence is synthesized)
ccaccatgctgggtcccaggcagctttcctctgaaaagcaacctctcctgccacccagatcccatctcaagagctcgcccatgttacgagcatgtaaaggactgacttcctagtaactgt

SEQ ID NO: 418312 - DNA, 120 bp, Artificial Sequence
  ENSG00000149679_26 (sequence is synthesized)
tgcagtttacaacctgccctccagggacacgtctccatggtttttcctacacatgaatgcgagaaatggctgataagcacagtaatttaagattgcgtattcatgtagtgagatttagtc

SEQ ID NO: 418313 - DNA, 120 bp, Artificial Sequence
  ENSG00000149679_27 (sequence is synthesized)
attaaccaacccggtctttgtgatgtgtgaagccttcccttcagttatgtcccatttttatgatgccaaaagctgccactgtgtggtattcgaggattattgcaacaaagccagtagtta

SEQ ID NO: 418314 - DNA, 120 bp, Artificial Sequence
  ENSG00000149679_28 (sequence is synthesized)
aaccaaactacagtctcagcctgtcattctctagaacacatccaggtgtcggagctaaggtgttcagctcggctgtgactatacagaaccaggcctggcgttgcttccgcaccggtagca

SEQ ID NO: 418315 - DNA, 120 bp, Artificial Sequence
  ENSG00000149679_29 (sequence is synthesized)
gttgtggatgtcagtgtgcataagcaagtatcagacctcagaatgtttgagttattttgtcttagatatctgtttttaaatggataatgtatttgtcctttaaacctcagttttgcaata

SEQ ID NO: 418316 - DNA, 120 bp, Artificial Sequence
  ENSG00000149716_0 (sequence is synthesized)
gggtctcgtctcctcccaagcggagcatttgtgcctgaagctgccgggtctgctacggcaccgcggggctgcagaaacccgggggccaagggcgggctgcttgccgctatggctggcagt

SEQ ID NO: 418317 - DNA, 120 bp, Artificial Sequence
  ENSG00000149716_1 (sequence is synthesized)
caggacatattcgatgccatcgtgatggcggatgagaggtttcatggggaagggtatcgggaaggctatgaagaaggcagtagtttgggtgtgatggagggaaggcagcatggcacgctg

SEQ ID NO: 418318 - DNA, 120 bp, Artificial Sequence
  ENSG00000149716_2 (sequence is synthesized)
catggagccaaaatcgggtctgagatcgggtgctaccaaggttttgcttttgcatggaaatgtctactgcacagttgcaccactgagaaggacagcagaaagatgaaggtcttagaatca

SEQ ID NO: 418319 - DNA, 120 bp, Artificial Sequence
  ENSG00000149716_3 (sequence is synthesized)
ttgattggaatgatccagaaattcccttatgatgaccctacttacgataaactccatgaagacttagacaagatcagaggaaaatttaaacagttttgttcgttactcaatgttcagcca

SEQ ID NO: 418320 - DNA, 120 bp, Artificial Sequence
  ENSG00000149716_4 (sequence is synthesized)
gactttaaaattagtgcagaaggttccggactttcattttgaggaggatggatgaacagagaccgaacgtcgaggaacagatgtgtgtgtgacgtgtttagaaatgcggtgaagggccag

SEQ ID NO: 418321 - DNA, 120 bp, Artificial Sequence
  ENSG00000149716_5 (sequence is synthesized)
acggtgctgggaaggcagttgttcattgggagggtgagggttccggttcggccgtgggagggcttccttccctggggttttctgcctgtgtcaccttggtgcccgtcttggggcctcgcc

SEQ ID NO: 418322 - DNA, 120 bp, Artificial Sequence
  ENSG00000149716_6 (sequence is synthesized)
acacatgccctttgttgggctgaagccgtccctggcagagccctcgtgcattgacttgacagcctctccggcagcacaggcctagctggttctgggttggagttggctctggatagggtc

SEQ ID NO: 418323 - DNA, 120 bp, Artificial Sequence
  ENSG00000149716_7 (sequence is synthesized)
agtcaccaggcctggactgaaggcagttatttttattattattattatttgcaatgagagagatggttggccccgaatgaggctcatgggaggtttggacgggtgctgtgccgcatgtcg

SEQ ID NO: 418324 - DNA, 120 bp, Artificial Sequence
  ENSG00000149716_8 (sequence is synthesized)
aggccgattgtgtgccaggcggtgcgggacgtgcctcccgtgtgttatttaatcccttcaggagcccacaagatgggtgttattctcattttacagaggagggaggggagacgcgaaggg

SEQ ID NO: 418325 - DNA, 120 bp, Artificial Sequence
  ENSG00000149716_9 (sequence is synthesized)
attgcctggtctaagggcacccagcagcagagctaggacttccgccctaaggctgtgcctcactgccaccaggcacagccgcctccggaatgcacaggcgagtccctgccctccctccca

SEQ ID NO: 418326 - DNA, 120 bp, Artificial Sequence
  ENSG00000149716_10 (sequence is synthesized)
ggaagaaaggccaacctgatcctgaggggacccagacatatcctttgcactgtccctagaggggcgatgagctttgcagcattaaaaaatggtgaaggggggaaatattttgaaccaaag

SEQ ID NO: 418327 - DNA, 120 bp, Artificial Sequence
  ENSG00000149716_11 (sequence is synthesized)
accaaatgttaggccgccgttatatttgcagaagctttgagaaccatgcgtatagcctcctgcattctcccctctcctaggagctcttttgtctctgtccttacgaggcgtcatacagag

SEQ ID NO: 418328 - DNA, 120 bp, Artificial Sequence
  ENSG00000149716_12 (sequence is synthesized)
gcagtggggtgggcacagatgagcagagtggatggttcggtgggtccccacgaggcgagtggtggtcatatgtgatggcacgtgttcacacaccctcctgtgtacccccccagggtcacc

SEQ ID NO: 418329 - DNA, 120 bp, Artificial Sequence
  ENSG00000149716_13 (sequence is synthesized)
gaagtccccacacgctggctctccacacccctcctgttccagaaagcatgtccgaaagcagtccaggagattattaaggggtcgccatgaatccactttggttttaaaaccattcccgaa

SEQ ID NO: 418330 - DNA, 120 bp, Artificial Sequence
  ENSG00000149716_14 (sequence is synthesized)
tgtcctagtggattgtgttgtgctgcctaagctgccggctgcaggagccagagaagtgacccccgcgggagcagcggcaggtggatctccacggtggctcgctttgtttttgttttgttt

SEQ ID NO: 418331 - DNA, 89 bp, Artificial Sequence
  ENSG00000149716_15 (sequence is synthesized)
gtggatctccacggtggctcgctttgtttttgttttgttttttcttttaagacggagtctcactctgtcgccgagtttggagtgtatct

SEQ ID NO: 418332 - DNA, 120 bp, Artificial Sequence
  ENSG00000149716_16 (sequence is synthesized)
agtgctggaattgcaggcatgagccaccactcccggcctgctttttgtttttgaagacaggacttaggtctcctcctcccgaactctaaacctgcgtgtgtggctgtgcaccgctcgttt

SEQ ID NO: 418333 - DNA, 120 bp, Artificial Sequence
  ENSG00000149716_17 (sequence is synthesized)
caccgctcgtttgtagcgtcacctcaggtctggggaagtctgtgctggcatctcctcattgtgccttcatcagagctggtgccttcgggccagaaagactctcgttctttctagatggtg

SEQ ID NO: 418334 - DNA, 120 bp, Artificial Sequence
  ENSG00000149716_18 (sequence is synthesized)
ggatcaggggcctttgctgtgtttcccttggtggatttttgtgttttgtaagttgtctattttgataatgtattatttttataactgtaaaaaaagtaaatagcatattttaaagtgaaa

SEQ ID NO: 418335 - DNA, 84 bp, Artificial Sequence
  ENSG00000149716_19 (sequence is synthesized)
ctcttcatttacaatttataatttatttcgatattcagtgtgatggagtaagaattgtcaggccttttaaaatcacagtgccgg

SEQ ID NO: 418336 - DNA, 120 bp, Artificial Sequence
  ENSG00000149716_20 (sequence is synthesized)
aacctgggaggcagaggttgtggtaagccgggaccgtgccattgcactgcagcctgggcgacaggatgaaactccatctccaaaaaataaacaaaaaaaatcacagtgcctttgcatggg

SEQ ID NO: 418337 - DNA, 120 bp, Artificial Sequence
  ENSG00000149716_21 (sequence is synthesized)
tgggagttaatggactagatggactgttgctggagaaatattcttagtacagaaccaagagtgcattttgctgtaggtagatacaattaaattatgcatgctggataaaagaaaacaagt

SEQ ID NO: 418338 - DNA, 120 bp, Artificial Sequence
  ENSG00000149716_22 (sequence is synthesized)
ccctggtctccttagtttacttgggagtgtcatggtgctggctcatgtactaagccaaagaatgggtgccctctgtcatgtgaacatattccatttatgtttacgttgaaatttcattaa

SEQ ID NO: 418339 - DNA, 120 bp, Artificial Sequence
  ENSG00000149716_23 (sequence is synthesized)
ctttatgatttttttttttctcttcttgccctttgtcctagattggcccttacagataagtggcccttagtggcaaagtctgagttgaggcagttatgactatattggatgttcgatgct

SEQ ID NO: 418340 - DNA, 120 bp, Artificial Sequence
  ENSG00000149716_24 (sequence is synthesized)
gtgaaacagatcaccacaaaattcatgggcttaacacagcaaatatggatgatctcacatgtttctgagggttgggaactcaggagcagctttgctgggtggtcctggctcagggtgtca

SEQ ID NO: 418341 - DNA, 120 bp, Artificial Sequence
  ENSG00000149716_25 (sequence is synthesized)
gccagagccgtgtcacctgaaggcttgactgggcttggaggatctgcctccaaggtggtgctgtcacctgactgtgggcatggacgtctccatggggctgcttgtgtgtcctcgtgacat

SEQ ID NO: 418342 - DNA, 120 bp, Artificial Sequence
  ENSG00000149716_26 (sequence is synthesized)
tcaagagcgagtggtccaagagagctggtgaggcaagtgacactggcttttatccctagactcaggagctttgtgctgttcctccacattctgttggttacgaaagccaccctggtggag

SEQ ID NO: 418343 - DNA, 120 bp, Artificial Sequence
  ENSG00000149716_27 (sequence is synthesized)
tgtcgagggacctgcacagggcatgggtaccaggagatgaggactggggcatctgggaggctggctgccccaccgatgacctaatttcctaatttccattgcctaatgctcaacaggtgc

SEQ ID NO: 418344 - DNA, 120 bp, Artificial Sequence
  ENSG00000149716_28 (sequence is synthesized)
ttccagaacaatagtgtgagaagcaccgctgccttctgcccccaccttttgttttgagatcttggtaatgaaagtgtagctagttgcttattaatttcactcttaaatatttttcacatt

SEQ ID NO: 418345 - DNA, 120 bp, Artificial Sequence
  ENSG00000149716_29 (sequence is synthesized)
gctgggaagcgccgcggtgcaaccagaaatgcacagacccagccgcccgccgcccagaccctcagacttgcgcgtcacaggacagactccgctgtgccccgtgcacttgccaccagcctt

SEQ ID NO: 418346 - DNA, 120 bp, Artificial Sequence
  ENSG00000149716_30 (sequence is synthesized)
tggcctctcgatacacacaacatccaggacttgtgcccttgccccatcacgacagacaaagcgtccctcaaggcccccgcgtggttcagacagacgccgcagccaggatggttgagcagc

SEQ ID NO: 418347 - DNA, 120 bp, Artificial Sequence
  ENSG00000149716_31 (sequence is synthesized)
aaacaatgtgaaagagatacacagaagcgatgtgaatatttccaaaccgtgcctggaagtcaacggtagcagcgcaataagaaaatggagctgcggcctgtccccggtgtgggcaccgcc

SEQ ID NO: 418348 - DNA, 120 bp, Artificial Sequence
  ENSG00000149716_32 (sequence is synthesized)
ccttcccctcgggagcctcctcctcacacctcctcccgcctgtcctccctcacacgtcagcctccacactcttgccacctcccttcaacacttcctaaataaaaattacaagaattacat

SEQ ID NO: 418349 - DNA, 120 bp, Artificial Sequence
  ENSG00000149716_33 (sequence is synthesized)
ggagcacctgattgcgcctttcccaggcggggcagcgcactcccggggccgctgcggcaatggcctggggctgcgtgcgccgcggaactgtccgtagaggcgcctcatccttgagtcgca

SEQ ID NO: 418350 - DNA, 120 bp, Artificial Sequence
  ENSG00000149716_34 (sequence is synthesized)
gtgcaggaaaactgaagacagtccagagaaaaggagttagaactcatttatgggctggccacatagacaggaaaagctatagctagagatagagttatcttctcatttttcagtaaaaat

SEQ ID NO: 418351 - DNA, 120 bp, Artificial Sequence
  ENSG00000149716_35 (sequence is synthesized)
gcacaagattaaaaataccatctcttttgtgttttcagttttgttcgttactcaatgttcagccagactttaaaattagtgcagaaggttccggactttcattttgaggaggatggatga

SEQ ID NO: 418352 - DNA, 120 bp, Artificial Sequence
  ENSG00000149716_36 (sequence is synthesized)
ctacggcaccgcggggctgcagaaacccgggggccaagggcgggctgcttgccgctatggctggcagtcaggacatattcgatgccatcgtgatggcggatgagaggtgggtggtgaggc

SEQ ID NO: 418353 - DNA, 120 bp, Artificial Sequence
  ENSG00000149716_37 (sequence is synthesized)
caccccgccctgtctggtcgtctcccagcggcttcgccgccggctgcggcccagggcggctgctggagcctggcgtcccttgggcgtgcgcattggggagcgcctggtggccgtggacgc

SEQ ID NO: 418354 - DNA, 120 bp, Artificial Sequence
  ENSG00000149716_38 (sequence is synthesized)
gtggacgcagggacaagtgtgggcctgatgctctggtcctcttctcctggcccgctccggcggggcacgtgcccagctgctcttccagacccgccttccctgtcagggctgccccaaaca

SEQ ID NO: 418355 - DNA, 120 bp, Artificial Sequence
  ENSG00000149716_39 (sequence is synthesized)
tcagcctggtggttcccctcctccgaggccgcctcgtcctctgggaggacagacctttgccatctgggagctgcctttttttctggttccttaatcataggacatacggcagtattcatg

SEQ ID NO: 418356 - DNA, 120 bp, Artificial Sequence
  ENSG00000149716_40 (sequence is synthesized)
gatgtgctgatagatgtacccgaccacaccccttttccctccagagcccctggggagcccctcgtgctgcgacagtgggggagctgtgagttgcctcctggctgacttccagtgcccggc

SEQ ID NO: 418357 - DNA, 120 bp, Artificial Sequence
  ENSG00000149716_41 (sequence is synthesized)
ccagaggacgcgtccatagatgttagttaagaaagcggccgaacatttagcagtcaggcgctgacgtttatttagctcgcgctgtgagtcagacactgagctaaacgttccaccctggtt

SEQ ID NO: 418358 - DNA, 120 bp, Artificial Sequence
  ENSG00000149716_42 (sequence is synthesized)
gccgggtctgctacggcaccgcggggctgcagaaacccgggggccaagggcgggctgcttgccgctatggctggcagtcaggacatattcgatgccatcgtgatggcggatgagagagcc

SEQ ID NO: 418359 - DNA, 120 bp, Artificial Sequence
  ENSG00000149716_43 (sequence is synthesized)
ctcttccccagccctccttgtgtgccctcgtgagtggcggtgacaatgctcccggatgtgggccccaaggccagcggccccagagctgcccgcccacccgtccgcctgctattgtctgct

SEQ ID NO: 418360 - DNA, 120 bp, Artificial Sequence
  ENSG00000149716_44 (sequence is synthesized)
caggcctggcggtgtggcgctgggcttgtggggccctggcgggcaggggactgtgggaacggattagaggtcctgggcttgctttcctcgtcttgcataaactcttgatcaaagacattc

SEQ ID NO: 418361 - DNA, 120 bp, Artificial Sequence
  ENSG00000149716_45 (sequence is synthesized)
ctgggatgacagagccctgtgagctgcgaggctggcccagagtgcgggacgcacaccccacgctgcagcccctgcacaggcctgcccttgctggccctcgctggccctggctgcagtgct

SEQ ID NO: 418362 - DNA, 120 bp, Artificial Sequence
  ENSG00000149716_46 (sequence is synthesized)
gactttggggactagccttatggtgggactggtgatagagcgggtgccagcaggcaacacagccttccccaccagattcagaggccaggcccccaatgctgggcagagcgaggctgtgac

SEQ ID NO: 418363 - DNA, 120 bp, Artificial Sequence
  ENSG00000149716_47 (sequence is synthesized)
tgcttcctggggtgcttcaaggagggtcacgctgcatgcagggtagccggagggattgccggatgcatgccactgccactggacctggcttctctggactcccatgggcagtgcaccacc

SEQ ID NO: 418364 - DNA, 120 bp, Artificial Sequence
  ENSG00000149716_48 (sequence is synthesized)
ctctgcacagccctagccactgttatcccacaagcgcggtccgaagtccacgtgcccactctgcccagcctccttcctctgtcccctcagggcctttcactccttgtgacaactctaggt

SEQ ID NO: 418365 - DNA, 120 bp, Artificial Sequence
  ENSG00000149716_49 (sequence is synthesized)
gctgtctgggctcctggggaacccccgacccttccagccatggaatcagctcccggcatgcgggtcaggctggacccatggctctgcacctcagcccagcagcttggggctgccctgtag

SEQ ID NO: 418366 - DNA, 120 bp, Artificial Sequence
  ENSG00000149716_50 (sequence is synthesized)
gagccgacacgacctcccttccattcggcccccttcctaggacccactgtatgccagggtggggagacggaggcagagagaaatctgggagatttccgtcctggaggggctcagccagag

SEQ ID NO: 418367 - DNA, 120 bp, Artificial Sequence
  ENSG00000149716_51 (sequence is synthesized)
caggaaggtgcccaggcatgacaatcccagactcccagaaccacctgcctgctgtggggtggggaagccctcagagagcccatccttacagtcagagcagagatgaaggttcctgtggac

SEQ ID NO: 418368 - DNA, 120 bp, Artificial Sequence
  ENSG00000149716_52 (sequence is synthesized)
cagaacaggaagctggatgcagtctggtgtgtcaggagctcctgggcaaagacatcgagcttattggggtcaaggctggggagagatggggctgagtcccagggaccttggacggagctg

SEQ ID NO: 418369 - DNA, 120 bp, Artificial Sequence
  ENSG00000149716_53 (sequence is synthesized)
aagggagataggaaggctgggggttgggggcagaggatgaagaatggatgaggactgtctggctgcagggagatgggccaggaggcagggcaggtaggggtggcgggcgtgtgaggacag

SEQ ID NO: 418370 - DNA, 120 bp, Artificial Sequence
  ENSG00000149716_54 (sequence is synthesized)
gcttctgcgaaggggctgcagggagagctgactgcggaaggctttgtctctgaagttcctcaaaggtcagtttttaccatcaccctctgggtagcgcagatactccaacaagggacgagg

SEQ ID NO: 418371 - DNA, 120 bp, Artificial Sequence
  ENSG00000149716_55 (sequence is synthesized)
tctccactgaatcccaggaggggttgcaggcacagaggtgatgtcagtggagtttgagagttgggaacaagggcctagagtggccagacgatgcctttgatatggtttggctgtgtcccc

SEQ ID NO: 418372 - DNA, 120 bp, Artificial Sequence
  ENSG00000149716_56 (sequence is synthesized)
cgtgttgtgggagggacccggtgggaggtgattgaatcatggggcagtttcccctatactgttcccatggtggtgaacaagtctcagcagatctgatggttttataggggtttccccttt

SEQ ID NO: 418373 - DNA, 120 bp, Artificial Sequence
  ENSG00000149716_57 (sequence is synthesized)
gtctcagcagatctgatggttttataggggtttcccctttcacttgagtctcattctctcttgcctgctgccatggaagacgggcctttcgccttccgccgtgatggtgaggcctcccag

SEQ ID NO: 418374 - DNA, 120 bp, Artificial Sequence
  ENSG00000149716_58 (sequence is synthesized)
ccagatcctggaaaatccccagacccagagcaggcctgctcgtgcccagccccagtccctcttgcccagttctgtctgtttctgcatgtgtgacctcgagagtcagcagggcttctggct

SEQ ID NO: 418375 - DNA, 120 bp, Artificial Sequence
  ENSG00000149716_59 (sequence is synthesized)
gcctcagccccttggccccgtggtcggaatggaggcgtgtctgtaagctaggcacacacttgctgtcgaggcactgggtatgggcctaagctcgttgctagcagaaagatgaaggtctta

SEQ ID NO: 418376 - DNA, 120 bp, Artificial Sequence
  ENSG00000149716_60 (sequence is synthesized)
gatgtctttctttctcagcgtaggaaccaggagttctagttccatgggttaccagcatgcccttgagtaatcaatctgtctgttcctcatctgtaaaatggagaaaattatcagtgtcaa

SEQ ID NO: 418377 - DNA, 120 bp, Artificial Sequence
  ENSG00000149716_61 (sequence is synthesized)
gcttgagtgttgttaggagatttaacggaaatactaaatagaaagtgccaggcacattttaggtgtttggtgaacactggctgttgttgcttctcaagagttctatgctcctgcctttta

SEQ ID NO: 418378 - DNA, 120 bp, Artificial Sequence
  ENSG00000149716_62 (sequence is synthesized)
cctggagtcattagtgcaccatgtggcttttagataccctaccaataaaataatgttgacattgattgtattttctcattcacctttcccctgagcttctaataaacaaattataacagt

SEQ ID NO: 418379 - DNA, 120 bp, Artificial Sequence
  ENSG00000149735_0 (sequence is synthesized)
ggagaccagcaggaggcacaggaaaactgcaagccgctctgttcctgggcctcggaagtgatgcctatggcgtcccctcaaaccctggtcctctatctgctggtcctggcagtcactgaa

SEQ ID NO: 418380 - DNA, 120 bp, Artificial Sequence
  ENSG00000149735_1 (sequence is synthesized)
gcctggggccaggaggcagtcatcccaggctgccacttgcaccccttcaatgtgacagtgcgaagtgaccgccaaggcacctgccagggctcccacgtggcacaggcctgtgtgggccac

SEQ ID NO: 418381 - DNA, 120 bp, Artificial Sequence
  ENSG00000149735_2 (sequence is synthesized)
tgtgagtccagcgccttcccttctcggtactctgtgctggtggccagtggttaccgacacaacatcacctccgtctctcagtgctgcaccatcagtggcctgaagaaggtcaaagtacag

SEQ ID NO: 418382 - DNA, 120 bp, Artificial Sequence
  ENSG00000149735_3 (sequence is synthesized)
cgagatcttcacggccagggcctgccagtgtgacatgtgtcgcctctctcgctactagcccatcctctcccctccttcctcccctgggtcacagggcttgacgttctggtgggggaaacc

SEQ ID NO: 418383 - DNA, 120 bp, Artificial Sequence
  ENSG00000149735_4 (sequence is synthesized)
tgtgttcaagattcaaaaactggaaggagctccagccctgatggttacttgctatggaatttttttaaataaggggagggttgttccagctttgatcctttgtaagattttgtgactgtc

SEQ ID NO: 418384 - DNA, 120 bp, Artificial Sequence
  ENSG00000149735_5 (sequence is synthesized)
acctgagaagaggggagtttctgcttcttccctgcctctgcctggcccttctaaaccaatctttcatcattttacttccctctttgcccttacccctaaataaagcaagcagttcttgaa

SEQ ID NO: 418385 - DNA, 120 bp, Artificial Sequence
  ENSG00000149735_6 (sequence is synthesized)
atttaaagaactcgccatcccacctgcacacccacgtagagacatctccccactgtgtttcagatgcctatggcgtcccctcaaaccctggtcctctatctgctggtcctggcagtcact

SEQ ID NO: 418386 - DNA, 120 bp, Artificial Sequence
  ENSG00000149735_7 (sequence is synthesized)
gcccgggcccggtggatggacgctggggtcgcgggaagaccagagagatggagatcctagacagccctgagaaaggggactgcagcacggactcccctctcccgcaggtcaaagtacagc

SEQ ID NO: 418387 - DNA, 120 bp, Artificial Sequence
  ENSG00000149742_0 (sequence is synthesized)
aaacacatttcattgtaaacgactgggagtatctgagcaaattatttcttacgtgactttagagaaaacggctacctatctgaccccaaaacgacttgaggaaactgtttccacggtcct

SEQ ID NO: 418388 - DNA, 120 bp, Artificial Sequence
  ENSG00000149742_1 (sequence is synthesized)
gctgcagaggggaagcacagtcgtcaagaagagagtggggtcaggatcaaaacacatttagtgtgacttagggaaagaaaacattttccctctttgaacctctctggatacagtcatttt

SEQ ID NO: 418389 - DNA, 120 bp, Artificial Sequence
  ENSG00000149742_2 (sequence is synthesized)
gcctctacttgaggatcaactgttcaacctcaatggcctttcaggacctcctgggtcacgctggtgacctgtggagattccagatccttcagactgtttttctctcaatctttgctgttg

SEQ ID NO: 418390 - DNA, 120 bp, Artificial Sequence
  ENSG00000149742_3 (sequence is synthesized)
ctacataccttcattttatgctggagaacttcactgcattcatacctggccatcgctgctgggtccacatcctggacaatgacactgtctctgacaatgacactggggccctcagccaag

SEQ ID NO: 418391 - DNA, 120 bp, Artificial Sequence
  ENSG00000149742_4 (sequence is synthesized)
atgcactcttgagaatctccatcccactggactcaaacatgaggccagagaagtgtcgtcgctttgttcatcctcagtggcagctccttcacctgaatgggaccttccccaacacaagtg

SEQ ID NO: 418392 - DNA, 120 bp, Artificial Sequence
  ENSG00000149742_5 (sequence is synthesized)
acgcagacatggagccctgtgtggatggctgggtgtatgacagaatctccttctcatccaccatcgtgactgagtgggatctggtatgtgactctcaatcactgacttcagtggctaaat

SEQ ID NO: 418393 - DNA, 120 bp, Artificial Sequence
  ENSG00000149742_6 (sequence is synthesized)
ttgtattcatggctggaatgatggtgggaggcatcctaggcggtcatttatcagacaggtttgggagaaggttcgtgctcagatggtgttacctccaggttgccattgttggcacctgtg

SEQ ID NO: 418394 - DNA, 120 bp, Artificial Sequence
  ENSG00000149742_7 (sequence is synthesized)
cagccttggctcccaccttcctcatttactgctcactacgcttcttgtctgggattgctgcaatgagcctcataacaaatactattatgttaatagccgagtgggcaacacacagattcc

SEQ ID NO: 418395 - DNA, 120 bp, Artificial Sequence
  ENSG00000149742_8 (sequence is synthesized)
aggccatgggaattacattgggaatgtgcccttctggtattgcatttatgaccctggcaggcctggcttttgccattcgagactggcatatcctccagctggtggtgtctgtaccatact

SEQ ID NO: 418396 - DNA, 120 bp, Artificial Sequence
  ENSG00000149742_9 (sequence is synthesized)
cttagaaaagctgcacacaggagtggaatgaagaatgccagagacaccctaaccctggagattttgaaatccaccatgaaaaaagaactggaggcagcacaaaaaaaaaaaccttctctg

SEQ ID NO: 418397 - DNA, 120 bp, Artificial Sequence
  ENSG00000149742_10 (sequence is synthesized)
tgtgaaatgctccacatgcccaacatatgtaaaaggatctccctcctgtcctttacgagatttgcaaactttatggcctattttggccttaatctccatgtccagcatctggggaacaat

SEQ ID NO: 418398 - DNA, 120 bp, Artificial Sequence
  ENSG00000149742_11 (sequence is synthesized)
gttttcctgttgcagactctctttggtgcagtcatcctcctggccaactgtgttgcaccttgggcactgaaatacatgaaccgtcgagcaagccagatgcttctcatgttcctactggca

SEQ ID NO: 418399 - DNA, 120 bp, Artificial Sequence
  ENSG00000149742_12 (sequence is synthesized)
atctgccttctggccatcatatttgtgccacaagaaatgcagacgctgcgtgaggttttggcaacactgggcttaggagcgtctgctcttgccaatacccttgcttttgcccatggaaat

SEQ ID NO: 418400 - DNA, 120 bp, Artificial Sequence
  ENSG00000149742_13 (sequence is synthesized)
gaagtaattcccaccataatcagggcaagagctatggggatcaatgcaacctttgctaatatagcaggagccctggctcccctcatgatgatcctaagtgtgtattctccacccctgccc

SEQ ID NO: 418401 - DNA, 120 bp, Artificial Sequence
  ENSG00000149742_14 (sequence is synthesized)
tggatcatctatggagtcttccccttcatctctggctttgctttcctcctccttcctgaaaccaggaacaagcctctgtttgacaccatccaggatgagaaaaatgagagaaaagacccc

SEQ ID NO: 418402 - DNA, 120 bp, Artificial Sequence
  ENSG00000149742_15 (sequence is synthesized)
agagaaccaaagcaagaggatccgagagtggaagtgacgcagttttaaggaattccaggagctgactgccgatcaatgagccagatgaagggaacaatcaggactattcctagacactag

SEQ ID NO: 418403 - DNA, 60 bp, Artificial Sequence
  ENSG00000149742_16 (sequence is synthesized)
ccagatgaagggaacaatcaggactattcctagacactagcaaaatctagaaaataaata

SEQ ID NO: 418404 - DNA, 71 bp, Artificial Sequence
  ENSG00000149742_17 (sequence is synthesized)
tcagaagattacaaaacttcgctgggcacagtggcacaggcctttaattccagctacttgggaggctgagg

SEQ ID NO: 418405 - DNA, 120 bp, Artificial Sequence
  ENSG00000149743_0 (sequence is synthesized)
cgccccgacgcttccgcccggtccgtcggcacgtcggccctgcctcccggaccaccctgcggggcgcaccagcgatctggggtgcggggctcggcctccctgcgctcctggctgaccgtg

SEQ ID NO: 418406 - DNA, 120 bp, Artificial Sequence
  ENSG00000149743_1 (sequence is synthesized)
tgaccgtgtgaccttgggtcttaaccatgaacttctctggaggagggaggcaggaagcagcagggtccaggggtagaagggctcccagaccccgagaacaggaccgagacgtgcagctgt

SEQ ID NO: 418407 - DNA, 120 bp, Artificial Sequence
  ENSG00000149743_2 (sequence is synthesized)
ccaaggctctgtcctatgccctgcgccatggggccttgaagctggggcttcccatgggagctgatggcttcgtgcccctgggcaccctcctgcagttgccccagttccgcggcttctctg

SEQ ID NO: 418408 - DNA, 120 bp, Artificial Sequence
  ENSG00000149743_3 (sequence is synthesized)
ctgaagatgtgcagcgcgtggtggacaccaataggaagcagcggttcgccctgcagctgggggatcccagcactggccttctcatccgggccaaccagggccattccctgcaggtaccta

SEQ ID NO: 418409 - DNA, 120 bp, Artificial Sequence
  ENSG00000149743_4 (sequence is synthesized)
ctgatgcccctggagacaccgcaggccctgcccccgatgctagtccatggtacattctggaagcactggccatccatcctactcaaaggcctgtcctgccagggaaggacgcacattcac

SEQ ID NO: 418410 - DNA, 120 bp, Artificial Sequence
  ENSG00000149743_5 (sequence is synthesized)
ctggccccaggactgcctggagaccccggtatcatcagtggcatgcggtcccattgtgaaatagctgtgttcatcgatggacccctggctctggcagatggaatacccttcttccgctct

SEQ ID NO: 418411 - DNA, 120 bp, Artificial Sequence
  ENSG00000149743_6 (sequence is synthesized)
gccaatggggtgattctgactccagggaatactgatggcttcctccttcccaagtacttcaaggaggccctgcagctacgccctacccgaaagcccctttccttggctggtgatgaagag

SEQ ID NO: 418412 - DNA, 120 bp, Artificial Sequence
  ENSG00000149743_7 (sequence is synthesized)
acagagtgtcagagtagccccaagcacagctccagagaaaggaggaggatccaacaataaaatattaatttataaaaaagaaattttaaaaagtaacaagaaagaactcgtttgaaacca

SEQ ID NO: 418413 - DNA, 120 bp, Artificial Sequence
  ENSG00000149743_8 (sequence is synthesized)
gcccagagagaaacgtgagcctgtctgcgactcctccctgatggctgcctccaccgctccctgaggaaggcacagagtgcacttcctccccatgcacagaggagagcaaggcctagagcc

SEQ ID NO: 418414 - DNA, 120 bp, Artificial Sequence
  ENSG00000149743_9 (sequence is synthesized)
cctgtcatgtccacagcagactgaggagagttcttgtctgggccaggcctggtgaccgccccctccagccaagcagccagatcagcacttaccccgagggcgagccctggaggatacggt

SEQ ID NO: 418415 - DNA, 120 bp, Artificial Sequence
  ENSG00000149743_10 (sequence is synthesized)
gcagctggtggtgtgagtgtgcactccgggccagcgctatgctgggcactcacctccctgcccctccgtgaggcagatcctctttttatgtaagttgaaaaaactgcggcccagaaaggg

SEQ ID NO: 418416 - DNA, 120 bp, Artificial Sequence
  ENSG00000149743_11 (sequence is synthesized)
gagactttctaaaggtcccacagaggatgcccaagcgatctccaagcccagactttgtttcggttgcctgtggctccctgttaaccctggcccagtccagagcaaggttagctcctgagc

SEQ ID NO: 418417 - DNA, 120 bp, Artificial Sequence
  ENSG00000149743_12 (sequence is synthesized)
tacaacacttgtctggggccaccccatgtccggcatggagcagcacccctgcatcccccagcccaggaccccagtctgcctaggttgctgactgcactccaggtgcccaggcctcagctc

SEQ ID NO: 418418 - DNA, 120 bp, Artificial Sequence
  ENSG00000149743_13 (sequence is synthesized)
gcagctacgccctacccgtgagaaccaccaccccagcccctattccttgttcctgaaagctgtgcccttctgccctcacctctctcctagcttccaaccctagactgacttaggtgtccc

SEQ ID NO: 418419 - DNA, 120 bp, Artificial Sequence
  ENSG00000149743_14 (sequence is synthesized)
cgcccggtccgtcggcacgtcggccctgcctcccggaccaccctgcggggcgcaccagcgatctggggtgcggggctcggcctccctgcgctcctggctgaccgtgtgaccttgggaccg

SEQ ID NO: 418420 - DNA, 120 bp, Artificial Sequence
  ENSG00000149743_15 (sequence is synthesized)
gtccgtcggcacgtcggccctgcctcccggaccaccctgcggggcgcaccagcgatctggggtgcggggctcggcctccctgcgctcctggctgaccgtgtgaccttgggcaagtctggc

SEQ ID NO: 418421 - DNA, 120 bp, Artificial Sequence
  ENSG00000149743_16 (sequence is synthesized)
ctgctgggccttagtttccctctctgcagcagggacttgggggtggtgaacttaatgagccgtatactcccacccagcgctcacttcctgaggctttgtgactttctgggagggatgggg

SEQ ID NO: 418422 - DNA, 120 bp, Artificial Sequence
  ENSG00000149761_0 (sequence is synthesized)
ggagcctgagggacccggcggctggtgagcgcccgctggaggctggagcttccgggccctggaaaggggtccccgcgcgccccgggtcggaggcagacccctgggtttgggggacatggg

SEQ ID NO: 418423 - DNA, 120 bp, Artificial Sequence
  ENSG00000149761_1 (sequence is synthesized)
catttggggcgcctgaacccaagacctctggatgagctgccccgttcagaccatggatcctgaggtgaccttgctgctgcagtgccctggcgggggcctgccccaggagcagatacaggc

SEQ ID NO: 418424 - DNA, 120 bp, Artificial Sequence
  ENSG00000149761_2 (sequence is synthesized)
cgagctgagccccgcccatgaccgtcgcccactgccaggtggggacgaggccatcactgccatctgggagacccggctaaaggcccaaccctggctcttcgacgcccccaagttccgcct

SEQ ID NO: 418425 - DNA, 120 bp, Artificial Sequence
  ENSG00000149761_3 (sequence is synthesized)
gcactcagccaccctggcgcctattggctctcgggggccacagctgctcctgcgcctgggccttacttcctaccgagacttcctgggcaccaactggtccagctcagctgcctggctgcg

SEQ ID NO: 418426 - DNA, 120 bp, Artificial Sequence
  ENSG00000149761_4 (sequence is synthesized)
gcaggcctatctggcggacccactgggggtgggcgctgcactagccacagccgatgacttccttgtcttcctgcgccgctcccggcaggtggctgaggcccctgggctggtggacgtacc

SEQ ID NO: 418427 - DNA, 120 bp, Artificial Sequence
  ENSG00000149761_5 (sequence is synthesized)
tggtgggcaccctgagcctcaggccctgtgccctggtggcagcccccagcaccaggacctcgctgggcagctggtggtacatgaactcttttccagtgtccttcaggagatctgtgatga

SEQ ID NO: 418428 - DNA, 120 bp, Artificial Sequence
  ENSG00000149761_6 (sequence is synthesized)
ggtgaacctgccgctgctcaccctgagccagcccctgctgttgggcatcgcccgaaatgagaccagtgctggccgagccagtgccgagttctatgtccagtgcagcctgacttctgagca

SEQ ID NO: 418429 - DNA, 120 bp, Artificial Sequence
  ENSG00000149761_7 (sequence is synthesized)
ggtgaggaagcactacctgagtgggggacccgaggcccacgagtctacaggaatcttctttgtggagacacagaacgtgcagagattgctcgagacggagatgtgggctgaactctgccc

SEQ ID NO: 418430 - DNA, 120 bp, Artificial Sequence
  ENSG00000149761_8 (sequence is synthesized)
ctcggccaaaggcgccatcatcctctacaaccgggttcagggaagtcccactggagcggccctagggtccccagccctactcccgccgctctgaaaataataaacgactttattcttgga

SEQ ID NO: 418431 - DNA, 120 bp, Artificial Sequence
  ENSG00000149761_9 (sequence is synthesized)
tcaccctgagccagcccctgctgttgggcatcgcccgaaatgagaccagtgctggccgagccagtgccgagttctatgtccagtgagtaggctcgggtacatgatcctgggtcttgggaa

SEQ ID NO: 418432 - DNA, 120 bp, Artificial Sequence
  ENSG00000149761_10 (sequence is synthesized)
caaagcctcaggaagtgagcgctgggtgggagtatacggctcattaagttcaccacccccaagtccctgctgcagagagggaaactaaggcccagcaggccagacttgcccaaggtcaca

SEQ ID NO: 418433 - DNA, 120 bp, Artificial Sequence
  ENSG00000149761_11 (sequence is synthesized)
cacacggtcagccaggagcgcagggaggccgagccccgcaccccagatcgctggtgcgccccgcagggtggtccgggaggcagggccgacgtgccgacggaccgggcggaagcgtcgggg

SEQ ID NO: 418434 - DNA, 120 bp, Artificial Sequence
  ENSG00000149761_12 (sequence is synthesized)
ggggacaaacctccaggatcctcgaccgcggcggacccgccaatgaaaagccgcgtggaaagggggcgggcacttccgcttcggggaaggggcggagcctgagggacccggcggctgagc

SEQ ID NO: 418435 - DNA, 120 bp, Artificial Sequence
  ENSG00000149761_13 (sequence is synthesized)
tctttgtggagacacaggtgcagagtgacaaaccatcttgcttggaggccagggctggggcctgcagaggcctggcaatgcatatcttgtaggggaggtgttggctgggtcacaattccc

SEQ ID NO: 418436 - DNA, 120 bp, Artificial Sequence
  ENSG00000149761_14 (sequence is synthesized)
tcaggaattctgggcacagccctggcaggagaagtggcaagcttgaatgcctgggtctcgttgtctccccacagaacgtgcagagattgctcgagacggagatgtgggctgaactctgcc

SEQ ID NO: 418437 - DNA, 120 bp, Artificial Sequence
  ENSG00000149761_15 (sequence is synthesized)
tatacctcgctgcagaggggagcaacagcggaacggagacacggtggccgggccgaaaacgtcacaaagccgcagagagcgggctctgtcccgcccgctccccaggtggacgtggtcttg

SEQ ID NO: 418438 - DNA, 120 bp, Artificial Sequence
  ENSG00000149761_16 (sequence is synthesized)
gcatccacgccaatgagaatgtgagggcggggcctgaatagacgcaggaaatggcgacggccgcgggtctgtgagcagcgggggcggggcctggttgtggcccctccttctcccgtcccc

SEQ ID NO: 418439 - DNA, 120 bp, Artificial Sequence
  ENSG00000149761_17 (sequence is synthesized)
aagttccctgggtgggaacggggtcttggggtccctggctgggtggccagaccccgaagccagcgctgggaagggctgcggatgcccgggtcagaggaaggggcaggtccaaggacacgc

SEQ ID NO: 418440 - DNA, 120 bp, Artificial Sequence
  ENSG00000149761_18 (sequence is synthesized)
acccaagacctctggatggtagggatgcccgggcgtcctggataccctgcgggactcggggctcctgcggggaagatggcacgttttactgcccaaggagtggtcaggggggtggagaag

SEQ ID NO: 418441 - DNA, 120 bp, Artificial Sequence
  ENSG00000149761_19 (sequence is synthesized)
cgctgcggataccctcaggaggtctgcgacagagggggctagctgcgcagcccaggagtggtagtggcccccctggatgacaggcctggccgtatcctcccccagagctgccccgttcag

SEQ ID NO: 418442 - DNA, 120 bp, Artificial Sequence
  ENSG00000149761_20 (sequence is synthesized)
gtgagattccaggctgggcacaaagacccagacagctcaagggagctgcagctctccaccctcccaatcctcccagctttggtttcctcattccttaaagggaaaattggcctggtattt

SEQ ID NO: 418443 - DNA, 120 bp, Artificial Sequence
  ENSG00000149761_21 (sequence is synthesized)
ctctggaagtttgctcagggcagtccacctgcctccccactgacccctgccccagtcctgtgagaaactagaaaacacgggaggaaagattgggcacaggaagaagatgccctactccac

SEQ ID NO: 418444 - DNA, 120 bp, Artificial Sequence
  ENSG00000149761_22 (sequence is synthesized)
ccctgccccctgtgtatctcctttgaagctggacctctggttgtctgtcagggaaaggacaccagactcaggatcactaactctcttacactgtgccacatcagaccctcaaggccagca

SEQ ID NO: 418445 - DNA, 120 bp, Artificial Sequence
  ENSG00000149761_23 (sequence is synthesized)
gggcagctggtggtacatgaactcttttccagtgtccttcaggagatctgtgatgaggtgagtgaggttgacctggacagggtggtagacatgaagggagggggtaggacttgccagaat

SEQ ID NO: 418446 - DNA, 120 bp, Artificial Sequence
  ENSG00000149761_24 (sequence is synthesized)
tctacaggtctgggctggcaggaggcctgcaggcatctggccagcaatgagggaagaagttggctttgcagctatacatacttggagtggaattctagccctcagtaccctctgccttgg

SEQ ID NO: 418447 - DNA, 120 bp, Artificial Sequence
  ENSG00000149781_0 (sequence is synthesized)
gagaaaggagggcaggaagcccacggcccacaggggtgtagcccgagacccacctgcagcccccagcccttgccaggaaagcagcagccgcagccatggcggggatgaagacagcctccg

SEQ ID NO: 418448 - DNA, 120 bp, Artificial Sequence
  ENSG00000149781_1 (sequence is synthesized)
gggactacatcgactcgtcatgggagctgcgggtgtttgtgggagaggaggacccagaggccgagtcggtcaccctgcgggtcactggggagtcgcacatcggcggggtgctcctgaaga

SEQ ID NO: 418449 - DNA, 120 bp, Artificial Sequence
  ENSG00000149781_2 (sequence is synthesized)
ttgtggagcagatcaatcgcaagcaggactggtcagaccatgctatttggtgggaacagaagaggcagtggctgctgcagacccactggacactggacaagtacgggatcctggccgacg

SEQ ID NO: 418450 - DNA, 120 bp, Artificial Sequence
  ENSG00000149781_3 (sequence is synthesized)
cacgcctcttctttgggccccagcaccggcccgtcatccttcggttgcccaaccgccgcgcactgcgcctccgtgccagcttctcccagcccctcttccaggctgtggctgccatctgcc

SEQ ID NO: 418451 - DNA, 120 bp, Artificial Sequence
  ENSG00000149781_4 (sequence is synthesized)
gcctcctcagcatccggcaccccgaggagctgtccctgctccgggctcctgagaagaaggagaagaagaagaaagagaaggagccagaggaagagctctatgacttgagcaaggttgtct

SEQ ID NO: 418452 - DNA, 120 bp, Artificial Sequence
  ENSG00000149781_5 (sequence is synthesized)
tggctgggggcgtggcacctgcactgttccgggggatgccagctcacttctcggacagcgcccagactgaggcctgctaccacatgctgagccggccccagccgccacccgaccccctcc

SEQ ID NO: 418453 - DNA, 120 bp, Artificial Sequence
  ENSG00000149781_6 (sequence is synthesized)
tgctccagcgtctgccacggcccagctccctgtcagacaagacccagctccacagcaggtggctggactcgtcgcggtgtctcatgcagcagggcatcaaggccggggacgcactctggc

SEQ ID NO: 418454 - DNA, 120 bp, Artificial Sequence
  ENSG00000149781_7 (sequence is synthesized)
tgcgcttcaagtactacagcttcttcgatttggatcccaagacagaccccgtgcggctgacacagctgtatgagcaggcccggtgggacctgctgctggaggagattgactgcaccgagg

SEQ ID NO: 418455 - DNA, 120 bp, Artificial Sequence
  ENSG00000149781_8 (sequence is synthesized)
aggagatgatggtgtttgccgccctgcagtaccacatcaacaagctgtcccagagcggggaggtgggggagccggctggcacagacccagggctggacgacctggatgtggccctgagca

SEQ ID NO: 418456 - DNA, 120 bp, Artificial Sequence
  ENSG00000149781_9 (sequence is synthesized)
acctggaggtgaagctggaggggtcggcgcccacagatgtgctggacagcctcaccaccatcccagagctcaaggaccatctccgaatctttcggccccggaagctgaccctgaagggct

SEQ ID NO: 418457 - DNA, 120 bp, Artificial Sequence
  ENSG00000149781_10 (sequence is synthesized)
agcagctcaacctcaagggctgtgaggtggttcccgatgttaacgtctccggccagaagttctgcattaaactcctagtgccctcccctgagggcatgagtgagatctacctgcggtgcc

SEQ ID NO: 418458 - DNA, 120 bp, Artificial Sequence
  ENSG00000149781_11 (sequence is synthesized)
aggatgagcagcagtatgcccgctggatggctggctgccgcctggcctccaaaggccgcaccatggccgacagcagctacaccagcgaggtgcaggccatcctggccttcctcagcctgc

SEQ ID NO: 418459 - DNA, 120 bp, Artificial Sequence
  ENSG00000149781_12 (sequence is synthesized)
agcgcacgggcagtgggggcccgggcaaccacccccacggccctgatgcctctgccgagggcctcaacccctacggcctcgttgccccccgtttccagcgaaagttcaaggccaagcagc

SEQ ID NO: 418460 - DNA, 120 bp, Artificial Sequence
  ENSG00000149781_13 (sequence is synthesized)
tcaccccacggatcctggaagcccaccagaatgtggcccagttgtcgctggcagaggcccagctgcgcttcatccaggcctggcagtccctgcccgacttcggcatctcctatgtcatgg

SEQ ID NO: 418461 - DNA, 120 bp, Artificial Sequence
  ENSG00000149781_14 (sequence is synthesized)
tcaggttcaagggcagcaggaaagacgagatcctgggcatcgccaacaaccgactgatccgcatcgacttggccgtgggcgacgtggtcaagacctggcgtttcagcaacatgcgccagt

SEQ ID NO: 418462 - DNA, 120 bp, Artificial Sequence
  ENSG00000149781_15 (sequence is synthesized)
ggaatgtcaactgggacatccggcaggtggccatcgagtttgatgaacacatcaatgtggccttcagctgcgtgtctgccagctgccgaattgtacacgagtatatcgggggctacattt

SEQ ID NO: 418463 - DNA, 120 bp, Artificial Sequence
  ENSG00000149781_16 (sequence is synthesized)
tcctgtcgacgcgggagcgggcccgtggggaggagctggatgaagacctcttcctgcagctcaccgggggccatgaggccttctgagggctgtctgattgcccctgccctgctcaccacc

SEQ ID NO: 418464 - DNA, 120 bp, Artificial Sequence
  ENSG00000149781_17 (sequence is synthesized)
ctgtcacagccactcccaagcccacacccacaggggctcactgccccacacccgctccaggcaggcacccagctgggcatttcacctgctgtcactgactttgtgcaggccaaggacctg

SEQ ID NO: 418465 - DNA, 120 bp, Artificial Sequence
  ENSG00000149781_18 (sequence is synthesized)
gcagggccagacgctgtaccatcacccaggccagggatgggggtgggggtccctgagctcatgtggtgccccctttccttgtctgagtggctgaggctgatacccctgacctatctgcag

SEQ ID NO: 418466 - DNA, 120 bp, Artificial Sequence
  ENSG00000149781_19 (sequence is synthesized)
tcccccagcacacaaggaagaccagatgtagctacaggatgatgaaacatggtttcaaacgagttctttcttgttactttttaaaatttcttttttataaattaatattttattgttgga

SEQ ID NO: 418467 - DNA, 120 bp, Artificial Sequence
  ENSG00000149781_20 (sequence is synthesized)
tccgaatctttcggtgagttgggggccagagtaggcagccctgctggaggggttggtctgcatatggagggagggggtgaggcggcctttcacaaaccccagcatcccacgaaggccccg

SEQ ID NO: 418468 - DNA, 120 bp, Artificial Sequence
  ENSG00000149781_21 (sequence is synthesized)
acccgccctgctcgtgataaggcacaagcaagggctgccctgaaggaagctccaaagagaaaggagggcaggaagcccacggcccacaggggtgtagcccgagacccacctgcagccccc

SEQ ID NO: 418469 - DNA, 120 bp, Artificial Sequence
  ENSG00000149781_22 (sequence is synthesized)
gtccaggtgcccatgtccaccttgcagcctggcgcagtgcagatctgcaccttggcggccccacgtgggcactgccccttcccaggctcacatgctgtcaccctgatggggaggtggggg

SEQ ID NO: 418470 - DNA, 80 bp, Artificial Sequence
  ENSG00000149782_0 (sequence is synthesized)
ggcactgacgccgcggggccggagcgggccgcgcggtgggagcagcggcgccgtcggtccccgtcagggctccgtgggtc

SEQ ID NO: 418471 - DNA, 120 bp, Artificial Sequence
  ENSG00000149782_1 (sequence is synthesized)
ccgggccatggcgggcgcccagcccggcgtccacgcgctgcagttggagccgcccaccgtggtggagaccctgcggcgcgggagtaagttcatcaaatgggacgaggagacctccagtcg

SEQ ID NO: 418472 - DNA, 120 bp, Artificial Sequence
  ENSG00000149782_2 (sequence is synthesized)
gaacctggtgaccctgcgtgtggaccccaatggcttcttcttgtactggacgggccccaacatggaggtggacacactggacatcagttccatcagggacacacggacaggccggtacgc

SEQ ID NO: 418473 - DNA, 120 bp, Artificial Sequence
  ENSG00000149782_3 (sequence is synthesized)
ccgcctgcccaaggaccccaagatccgggaagttctgggctttgggggtcccgatgcccggctggaggagaagctgatgacggtggtgtctgggccagacccagtgaacacagtgttctt

SEQ ID NO: 418474 - DNA, 120 bp, Artificial Sequence
  ENSG00000149782_4 (sequence is synthesized)
gaacttcatggccgtgcaggatgacacagccaaggtctggtctgaggagctattcaagctggctatgaacatcctggctcagaacgcctcccggaacaccttcctgcgcaaagcatacac

SEQ ID NO: 418475 - DNA, 120 bp, Artificial Sequence
  ENSG00000149782_5 (sequence is synthesized)
gaagctgaagctgcaggtgaaccaggatggtcggatccccgtcaagaacatcctgaagatgttctcagcagacaagaagcgggtggagactgcgctggaatcctgtggcctcaaattcaa

SEQ ID NO: 418476 - DNA, 120 bp, Artificial Sequence
  ENSG00000149782_6 (sequence is synthesized)
ccggagtgagtccatccggcctgatgagttttccttggaaatctttgagcggttcctgaacaagctgtgtctgcggccggacattgacaagatcctgctggagataggcgccaagggcaa

SEQ ID NO: 418477 - DNA, 120 bp, Artificial Sequence
  ENSG00000149782_7 (sequence is synthesized)
gccatacctgacgctggagcagctcatggacttcatcaaccagaagcaacgcgacccgagactcaacgaagtgctgtacccgcccctgcggccctcccaggcccggctgctcatcgaaaa

SEQ ID NO: 418478 - DNA, 120 bp, Artificial Sequence
  ENSG00000149782_8 (sequence is synthesized)
gtatgagcccaaccagcagtttctggagcgagaccagatgtccatggagggctttagccgctacctgggaggcgaggagaatggcatcctgcccctggaagccctggatctgagcacgga

SEQ ID NO: 418479 - DNA, 120 bp, Artificial Sequence
  ENSG00000149782_9 (sequence is synthesized)
catgacccagccactgagtgcctacttcatcaactcctcgcataacacctatctcactgcggggcagctggctgggacctcgtcggtggagatgtaccgccaggcactactatggggctg

SEQ ID NO: 418480 - DNA, 120 bp, Artificial Sequence
  ENSG00000149782_10 (sequence is synthesized)
ccgctgcgtggagctggacgtgtggaagggacggccgcctgaggaggaacccttcattacccacggcttcaccatgaccacagaggtgcctctgcgcgacgtgctggaggccattgccga

SEQ ID NO: 418481 - DNA, 120 bp, Artificial Sequence
  ENSG00000149782_11 (sequence is synthesized)
gactgccttcaagacctcgccctaccccgtcatcctctccttcgagaaccatgtggactcggcaaagcaacaggcaaagatggctgagtactgccgctccatctttggagacgcgctact

SEQ ID NO: 418482 - DNA, 120 bp, Artificial Sequence
  ENSG00000149782_12 (sequence is synthesized)
catcgagcctctggacaagtacccgctggccccaggcgttcccctgcccagcccccaggacctgatgggccgtatcctggtgaagaacaagaagcggcaccgacccagcgcaggtggccc

SEQ ID NO: 418483 - DNA, 120 bp, Artificial Sequence
  ENSG00000149782_13 (sequence is synthesized)
agacagcgccgggcgcaagcggcccctggagcagagcaattctgccctgagcgagagctccgcggccaccgagccctcctccccgcagctggggtctcccagctctgacagctgcccagg

SEQ ID NO: 418484 - DNA, 120 bp, Artificial Sequence
  ENSG00000149782_14 (sequence is synthesized)
cctgagcaatggggaggaggtagggcttgagaagcccagcctggagcctcagaagtctctgggtgacgagggcctgaaccgaggcccctatgttcttggacctgctgaccgtgaggatga

SEQ ID NO: 418485 - DNA, 120 bp, Artificial Sequence
  ENSG00000149782_15 (sequence is synthesized)
ggaggaagatgaggaagaggaggaacagacagaccccaaaaagccaactacagatgagggcacagccagcagcgaggtgaatgccactgaggagatgtccacgcttgtcaactacatcga

SEQ ID NO: 418486 - DNA, 120 bp, Artificial Sequence
  ENSG00000149782_16 (sequence is synthesized)
acctgtcaagttcaagtcctttgaggctgctcgaaagaggaacaaatgcttcgagatgtcgtcctttgtggagaccaaggccatggagcaactgaccaagagccccatggagtttgtgga

SEQ ID NO: 418487 - DNA, 120 bp, Artificial Sequence
  ENSG00000149782_17 (sequence is synthesized)
gaccctcgatgtggcgatgcagctcaacgcgggcgtttttgagtacaacgggcgcagcgggtacctgctcaagccggagttcatgcggcggccggacaagtccttcgaccccttcactga

SEQ ID NO: 418488 - DNA, 120 bp, Artificial Sequence
  ENSG00000149782_18 (sequence is synthesized)
ggtcatcgtggatggcatcgtggccaatgccttgcgggtcaaggtgatctcagggcagttcctgtccgacaggaaggtgggcatctacgtggaggtggacatgtttggcctccctgttga

SEQ ID NO: 418489 - DNA, 120 bp, Artificial Sequence
  ENSG00000149782_19 (sequence is synthesized)
tacgcggcgcaagtaccgcacccggacctctcaggggaactcgttcaaccccgtgtgggacgaagagcccttcgacttccccaaggtggtgctgcccacgctggcttcacttcgcattgc

SEQ ID NO: 418490 - DNA, 120 bp, Artificial Sequence
  ENSG00000149782_20 (sequence is synthesized)
agcctttgaggaggggggtaaattcgtagggcaccggatcctgcctgtctctgccatccgctccggataccactacgtctgcctgcggaacgaggccaaccaaccgctgtgcctgccggc

SEQ ID NO: 418491 - DNA, 120 bp, Artificial Sequence
  ENSG00000149782_21 (sequence is synthesized)
cctgctcatctacaccgaagcctcggactacattcctgacgaccaccaggactatgcggaggccctgatcaaccccattaagcacgtcagcctgatggaccagagggcccggcagctggc

SEQ ID NO: 418492 - DNA, 120 bp, Artificial Sequence
  ENSG00000149782_22 (sequence is synthesized)
cgccctcattggggagagtgaggctcaggctggccaagagacgtgccaggacacccagtctcagcagctggggtctcagccgtcctcaaaccccacccccagcccactggatgcctcccc

SEQ ID NO: 418493 - DNA, 120 bp, Artificial Sequence
  ENSG00000149782_23 (sequence is synthesized)
ccgccggccccctggccccaccacctcccctgccagcacctccctcagcagcccagggcagcgtgatgatctcatcgccagcatcctctcagaggtggcccccaccccgctggatgagct

SEQ ID NO: 418494 - DNA, 120 bp, Artificial Sequence
  ENSG00000149782_24 (sequence is synthesized)
ccgaggtcacaaggctctggtcaagctccggagccggcaagagcgagacctgcgggagctgcgcaagaagcatcagcggaaggcagtcaccctcacccgccgcctgctggatggcctggc

SEQ ID NO: 418495 - DNA, 120 bp, Artificial Sequence
  ENSG00000149782_25 (sequence is synthesized)
tcaggcacaggctgagggcaggtgccggctgcggccaggtgccctaggtggggccgctgatgtggaggacacgaaggagggggaggacgaggcaaagcggtatcaggagttccagaacag

SEQ ID NO: 418496 - DNA, 120 bp, Artificial Sequence
  ENSG00000149782_26 (sequence is synthesized)
acaggtgcagagcctgctggagctgcgggaggcccaggtggacgcagaggcccagcggaggctggaacacctgagacaggctctgcagcggctcagggaggtcgtccttgatgcaaacac

SEQ ID NO: 418497 - DNA, 120 bp, Artificial Sequence
  ENSG00000149782_27 (sequence is synthesized)
aactcagttcaagaggctgaaagagatgaacgagagggagaagaaggagctgcagaagatcctggacagaaagcgccataacagcatctcggaggccaagatgagggacaagcataagaa

SEQ ID NO: 418498 - DNA, 120 bp, Artificial Sequence
  ENSG00000149782_28 (sequence is synthesized)
ggaggcggaactgacggagattaaccgtcggcacatcactgagtcagtcaactccatccgtcggctggaggaggcccagaagcagcggcatgaccgtcttgtggctgggcagcagcaggt

SEQ ID NO: 418499 - DNA, 120 bp, Artificial Sequence
  ENSG00000149782_29 (sequence is synthesized)
cctgcaacagctggcagaagaggagcccaagctgctggcccagctggcccaggagtgtcaggagcagcgggcgaggctcccccaggagatccgccggagcctgctgggcgagatgccgga

SEQ ID NO: 418500 - DNA, 120 bp, Artificial Sequence
  ENSG00000149782_30 (sequence is synthesized)
ggggctgggggacgggcctctggtggcctgtgccagcaacggtcacgcacccgggagcagcgggcacctgtcgggcgctgactcggagagccaggaggagaacacgcagctctgaactgg

SEQ ID NO: 418501 - DNA, 120 bp, Artificial Sequence
  ENSG00000149782_31 (sequence is synthesized)
ctgagcgaggtggccacagggccagggcgggcgctgggtggagggcaggaggcaatgacactaatgctttttttttttttttttaactttttatctagaaattttatttttttaaacccg

SEQ ID NO: 418502 - DNA, 120 bp, Artificial Sequence
  ENSG00000149782_32 (sequence is synthesized)
gggcaagtacctcagctaactcccttcatcctcctggggcccctccttcctgccctcagtcttaggttagggccttggtcagggctttgctccctgtgacacccacaccctcgagctagc

SEQ ID NO: 418503 - DNA, 120 bp, Artificial Sequence
  ENSG00000149782_33 (sequence is synthesized)
agcgtctcctcccttccccgggagagctggctggagacttggagctccgggaagtaggagtcacatttttttctctattctttggggattttttttacatgaataaaagtggatttcagg

SEQ ID NO: 418504 - DNA, 120 bp, Artificial Sequence
  ENSG00000149782_34 (sequence is synthesized)
ctaagtcaagacgtcctgacctggaggcagggcaggcctggaccctccgtggtggactgtcttcagccagcctggacctgtcccatgcctcaagaccagcgaaaagtggcagagagccca

SEQ ID NO: 418505 - DNA, 120 bp, Artificial Sequence
  ENSG00000149782_35 (sequence is synthesized)
cagtgcgggctccagggcggggctgggctcgcagcagggtcggcttggcacctcttcaaggcctctcccagcttcctggctcttcccaggctgcccgcctgcatccctcctccaggggaa

SEQ ID NO: 418506 - DNA, 120 bp, Artificial Sequence
  ENSG00000149782_36 (sequence is synthesized)
ggcggcctcttatctgggcttatctcctgccaattgagtatcttctttgctttgtttttgctgcagcctcaggcaaacagatggggtggggaggccagggaaacaggctccggagtaggg

SEQ ID NO: 418507 - DNA, 120 bp, Artificial Sequence
  ENSG00000149782_37 (sequence is synthesized)
ccctcctccctcagggtcaatgcaatggccccagacttcctcacttcttctgtgggacgctgccctatcccccagttctgctcactccagtgtattccgtatctaggctcctcagcagcc

SEQ ID NO: 418508 - DNA, 120 bp, Artificial Sequence
  ENSG00000149782_38 (sequence is synthesized)
aactcccaccttcctgactctagctggtgtccactgagggacacactccaagtcagttcccaggtcctcaaataccagctgaatgtctaacttctgggtgtgacattccagcccctagaa

SEQ ID NO: 418509 - DNA, 120 bp, Artificial Sequence
  ENSG00000149782_39 (sequence is synthesized)
taggtcagctcgtctgaaggtctgctttgttaagctttgatggctgtggttagctgtggcctggtagccacagtggcccagggtcagccctgtggctcagctccagtctggcccacaggt

SEQ ID NO: 418510 - DNA, 120 bp, Artificial Sequence
  ENSG00000149792_0 (sequence is synthesized)
acagaaggctggcgtagcaggtaaagatggcagctaccatgttccgggctacgctgcggggatggagaaccggtgtccagcggggctgcgggctacggctgttgagccagacccagggcc

SEQ ID NO: 418511 - DNA, 120 bp, Artificial Sequence
  ENSG00000149792_1 (sequence is synthesized)
ctccagattaccccaggtttgtggagtctgtggatgaatatcagtttgtggagcgcctgttaccggctaccaggatcccagatcccccaaagcatgaacattatcctacccctagtggct

SEQ ID NO: 418512 - DNA, 120 bp, Artificial Sequence
  ENSG00000149792_2 (sequence is synthesized)
ggcagcctcccagagaccccccacccaacctgccttactttgtacgacgctctcggatgcacaacatccccgtctacaaggacatcacgcatggcaaccggcagatgactgtgatccgga

SEQ ID NO: 418513 - DNA, 120 bp, Artificial Sequence
  ENSG00000149792_3 (sequence is synthesized)
aagtggaaggggacatctgggccctgcagaaagacgtggaagattttctgagcccgctgctggggaagacacctgtcacccaggtcaatgaggtgacaggtaccctacggatcaagggct

SEQ ID NO: 418514 - DNA, 120 bp, Artificial Sequence
  ENSG00000149792_4 (sequence is synthesized)
actttgaccaggagcttaaagcctggctcttggagaaaggcttctgaggcccagccgagcagcctgcttgtcagcatgccctgtggatcaagtctagggggcctcaggaggagggaggtg

SEQ ID NO: 418515 - DNA, 120 bp, Artificial Sequence
  ENSG00000149792_5 (sequence is synthesized)
ggtgttggagcccctgagacaggggatacagaaactagggctaaaggactttggggtcaggccttgcttgcataaaggagaaaacaactctatgtacatgctgggggagagtgcctaatg

SEQ ID NO: 418516 - DNA, 120 bp, Artificial Sequence
  ENSG00000149792_6 (sequence is synthesized)
gggagagtgcctaatgtgggagaccaaatagggatcaccaggctaatggggggcgtcagcagctttctctccctcctatcttggcctgttcttttttgttttttgagacggagtctcact

SEQ ID NO: 418517 - DNA, 120 bp, Artificial Sequence
  ENSG00000149792_7 (sequence is synthesized)
ggcatgagccatgtgcctggtccaccttggcctgttttgtttttctttccttgggctcagcaattcaaattctagttgttatttggtggaagcagtagcccaaccccagtttaggggaag

SEQ ID NO: 418518 - DNA, 120 bp, Artificial Sequence
  ENSG00000149792_8 (sequence is synthesized)
gtagcacagggcagagccactgggcactttgtttccttggccctccgaagctcactgttgcaaatacccccaagcctttgctctaggccagatcttgtttggtgcaggtgatggagaaca

SEQ ID NO: 418519 - DNA, 120 bp, Artificial Sequence
  ENSG00000149792_9 (sequence is synthesized)
cagatgactcgggcatgggtcttggagatcttctgttcaaagtacagtgctggcactggggcacagagtgcccacgttagccccgggctctgatagagaggtaggaggcacgttcttggt

SEQ ID NO: 418520 - DNA, 120 bp, Artificial Sequence
  ENSG00000149792_10 (sequence is synthesized)
cactgttccattgcagaccagacttgctggcctgaccacaagggagtggctgggaactcacagccagcatagggacatccccctgcagccttctgacctgcaatcaaggctggggagggg

SEQ ID NO: 418521 - DNA, 120 bp, Artificial Sequence
  ENSG00000149792_11 (sequence is synthesized)
tttgcaggcaggaatatgctgacctttcaccctgccatcccatcccaaccccagctcactagccttcatatatgccttatacttggagtcacaggggccaaaggcctgagaccccaccct

SEQ ID NO: 418522 - DNA, 120 bp, Artificial Sequence
  ENSG00000149792_12 (sequence is synthesized)
gcccccaaactggctaagacagctttcagttcctgactccccaacttggtctctgccctgaagcagggcactgaactctgggctgcttctctgtgtgtaaaatgggcacatcttcctaat

SEQ ID NO: 418523 - DNA, 120 bp, Artificial Sequence
  ENSG00000149792_13 (sequence is synthesized)
ctgttaatggtcagtggtgtccccaaggatagtgctggcttccatggaaaccctcactcctggagattccattccattttcaagtgtacagccacagcaaggagcccgacactgatttga

SEQ ID NO: 418524 - DNA, 120 bp, Artificial Sequence
  ENSG00000149792_14 (sequence is synthesized)
tcgattctgtgacacaaaccccaccaattgttaatgcaagtttttatttggctgtatatacaatttaagctattaaaatttgtacaatatttacaaattaaataatcatctgaaactgtc

SEQ ID NO: 418525 - DNA, 120 bp, Artificial Sequence
  ENSG00000149792_15 (sequence is synthesized)
catgaggctctggactctccagtgggttcaggactcattttgcaatccctctgggttacatctgtctcatgcccaaggaagagccgaggagtggagccttctgttgttcactggtactca

SEQ ID NO: 418526 - DNA, 120 bp, Artificial Sequence
  ENSG00000149792_16 (sequence is synthesized)
tccatccacactattgagatcaggtcttccccatatgggggaaagtaaacaacagagagaaaacccaagagcttggaccttctttccccccagcagactatgtactgtaattaagaacac

SEQ ID NO: 418527 - DNA, 120 bp, Artificial Sequence
  ENSG00000149792_17 (sequence is synthesized)
agcttggagtcaggcagttctgggtttgaatttggctttatttactgttgatgttatcttgaattagtcacttagcttgacccaacctgttttagcaaaatggagataatctgctcagta

SEQ ID NO: 418528 - DNA, 120 bp, Artificial Sequence
  ENSG00000149792_18 (sequence is synthesized)
catagagcccttagtgcagagcccagcatatggtaggtgctcagtgcttgcaaatcccaatctctttgttccagagattgatttcggcctccctgacccagtggaggagggcaagggttg

SEQ ID NO: 418529 - DNA, 120 bp, Artificial Sequence
  ENSG00000149792_19 (sequence is synthesized)
gcctagagggggacccaaagatccagggaggcatgtccctgatttcattttttcttgagcacctacttagtgccaggccctgtgtggggccttagggtaccagggtgaacaatttggtcc

SEQ ID NO: 418530 - DNA, 120 bp, Artificial Sequence
  ENSG00000149792_20 (sequence is synthesized)
tgactccaagctgaaggaaagaggagaccccctgacctaaagtctggaggtggcttggtccagctgggtgcactggccctctgcagactgagagcaagggccttggctgaggtgggatgg

SEQ ID NO: 418531 - DNA, 120 bp, Artificial Sequence
  ENSG00000149792_21 (sequence is synthesized)
actgctgagcgaccgcgcggttccctgctatttgtaccgcccaaggcagtcctagctccgcccctttacgctcgcaccggcgaacctgcctgggcaggcagctcgcgcaggacggggcgg

SEQ ID NO: 418532 - DNA, 120 bp, Artificial Sequence
  ENSG00000149792_22 (sequence is synthesized)
taccatgttccgggctacgctgcggggatggagaaccggtgtccagcggggctgcgggctacggctgttggtgagagcgctgagcgaggagctgagggcatcgcgtgggtaccccccacc

SEQ ID NO: 418533 - DNA, 120 bp, Artificial Sequence
  ENSG00000149792_23 (sequence is synthesized)
taagtgggtgggtgggtctgggactgggcctgaccctttcagggctgaagggacaggagtctttttaagggaagggactcttggcctgacctgatttgtcatctttccccaggccctgca

SEQ ID NO: 418534 - DNA, 120 bp, Artificial Sequence
  ENSG00000149792_24 (sequence is synthesized)
agttgcgcgcacagaaggctggcgtagcaggtaaagatggcagctaccatgttccgggctacgctgcggggatggagaaccggtgtccagcggggctgcgggctacggctgttgaccccc

SEQ ID NO: 418535 - DNA, 120 bp, Artificial Sequence
  ENSG00000149798_0 (sequence is synthesized)
gtaagttcaccgccggtcgggtccggccgccgcgctgtccagctcctgagaccttgctgtccgccggtctgccgtctgcgcgcctcacgctcctcagccctggaccggggacaagtaacc

SEQ ID NO: 418536 - DNA, 120 bp, Artificial Sequence
  ENSG00000149798_1 (sequence is synthesized)
ctcggtgacaagaccaaagtgcactgctgcccacacagttcctacctttctggcttcaattcttcagaagagtttgccgtcctttggggagaacgtgatttttgttatctcagcccactg

SEQ ID NO: 418537 - DNA, 120 bp, Artificial Sequence
  ENSG00000149798_2 (sequence is synthesized)
acttcattgatctctaatcttttttaattccttgggccaactttgttcgtgcccccacactgtagccagaagcccgttggcgagctctggcacctgcaaaccaccccgtggaacgagtgt

SEQ ID NO: 418538 - DNA, 120 bp, Artificial Sequence
  ENSG00000149798_3 (sequence is synthesized)
ttcctctggctgagggttggagaggaggtgtggtctcagcaggcggcccgtagcctcacagccaggcctggtggtgaggtcaccatgtccaccaaggtgcccatctatctgaagcgtggc

SEQ ID NO: 418539 - DNA, 120 bp, Artificial Sequence
  ENSG00000149798_4 (sequence is synthesized)
agtcgcaagggcaagaaggagaagcttcgggacctgctgtcctcggacatgatcagcccaccgctgggggacttccgccacaccattcatattggcagtggcggcggcagtgacatgttt

SEQ ID NO: 418540 - DNA, 120 bp, Artificial Sequence
  ENSG00000149798_5 (sequence is synthesized)
ggcgacatctccttcctgcagggcaagttccacctcctgccggggaccatggtggaggggcctgaagaagatggcaccttcgacctccccttccagttcacccgcaccgccaccgtgtgt

SEQ ID NO: 418541 - DNA, 120 bp, Artificial Sequence
  ENSG00000149798_6 (sequence is synthesized)
gggcgggagctcccggacggcccatcccctctgctcaagaacgccatctccctcccggttatcggtggaccccaggctctcaccctgcccacagcccaggctccacccaagccccctcgc

SEQ ID NO: 418542 - DNA, 120 bp, Artificial Sequence
  ENSG00000149798_7 (sequence is synthesized)
ctgcacctggagacccctcagccttccccacaggagggagggagtgtggacatctggaggattccagagactggctcccccaacagtggactgaccccggagtcaggggccgaggagccc

SEQ ID NO: 418543 - DNA, 120 bp, Artificial Sequence
  ENSG00000149798_8 (sequence is synthesized)
tggggccttccatcctggatgatgtcctgcagatcatggatcaggacctggacagcatgcagatccccacataggacacgaggctgcctaggctggggtcccaggtggggcccagccagg

SEQ ID NO: 418544 - DNA, 120 bp, Artificial Sequence
  ENSG00000149798_9 (sequence is synthesized)
aggtggggtgtggacccggccctggcggcggagtcagggtcccaagatcccacctgtatggtcgctggccagtgattctccttctgagccgtgtttcccctctccctccctctccacgtg

SEQ ID NO: 418545 - DNA, 120 bp, Artificial Sequence
  ENSG00000149798_10 (sequence is synthesized)
ggcagggcaggccccatcgctttcctctgataaccacatggacacatcctgaagtcagcccaggcgccctgagcatcttggggcacctggaccccatcacaatactccttcttccttcag

SEQ ID NO: 418546 - DNA, 120 bp, Artificial Sequence
  ENSG00000149798_11 (sequence is synthesized)
gtccctgggtgaaggctttgctgaaaccgaccccccttttcacgtcccttctgcctctgccccgttggatgccctgactgggggcaggggaagagacagggcacagctggccacagggct

SEQ ID NO: 418547 - DNA, 120 bp, Artificial Sequence
  ENSG00000149798_12 (sequence is synthesized)
cagccactgagcaggctgttccgggcctttggctttgcatcctggacggggagtgtcctgtcagggaccagatgtgtcctgcctcatccctagctccaatcccttccccacgtgaccggg

SEQ ID NO: 418548 - DNA, 120 bp, Artificial Sequence
  ENSG00000149798_13 (sequence is synthesized)
gattctggttgcaataaaacatgctgctgctggtggcggagctccctgtccctttgccccaggtttcctcccggaggcagacagtctcccagagctgagggcttgcctctggagacccca

SEQ ID NO: 418549 - DNA, 120 bp, Artificial Sequence
  ENSG00000149798_14 (sequence is synthesized)
gccccagagggctttgtggaggacaggccttgccctcaagaacgtcgtacctgacgctgagcctgtcatgagaatgcaacaggagcaaaccaagtgttgctgtgacattgattcagatgt

SEQ ID NO: 418550 - DNA, 120 bp, Artificial Sequence
  ENSG00000149798_15 (sequence is synthesized)
ttggcaagaggtggctgagcactggggtgggcttggcactgtgccaagcctggggccaatccctgcccagtcagctggggtctggtgggggacacccaagaataaaagaataaccacaaa

SEQ ID NO: 418551 - DNA, 120 bp, Artificial Sequence
  ENSG00000149798_16 (sequence is synthesized)
cgagcgacaaattgcatgtttgtcagcatggcccccaggcctggcatggttgacacaggatgaatgcgtgacgggattccaagacctcagggtgcccatgcgtccccacccttcccccag

SEQ ID NO: 418552 - DNA, 120 bp, Artificial Sequence
  ENSG00000149806_0 (sequence is synthesized)
gcggtagctgggaccgccgttcaggtaagaatggggccttggctggatccgaagggcttgtagcaggttggctgcgggtcgccaatatgcagctctttgtccgcgcccaggagctacaca

SEQ ID NO: 418553 - DNA, 120 bp, Artificial Sequence
  ENSG00000149806_1 (sequence is synthesized)
ccttcgaggtgaccggccaggaaacggtcgcccagatcaaggctcatgtagcctcactggagggcattgccccggaagatcaagtcgtgctcctggcaggcgcgcccctggaggatgagg

SEQ ID NO: 418554 - DNA, 120 bp, Artificial Sequence
  ENSG00000149806_2 (sequence is synthesized)
gcttggaggtaaagtccatggttccctggcccgtgctggaaaagtgagaggtcagactcctaaggtggccaaacaggagaagaagaagaagaagacaggtcgggctaagcggcggatgca

SEQ ID NO: 418555 - DNA, 120 bp, Artificial Sequence
  ENSG00000149806_3 (sequence is synthesized)
gtacaaccggcgctttgtcaacgttgtgcccacctttggcaagaagaagggccccaatgccaactcttaagtcttttgtaattctggctttctctaataaaaaagccacttagttcagtc

SEQ ID NO: 418556 - DNA, 120 bp, Artificial Sequence
  ENSG00000149806_4 (sequence is synthesized)
cttgtagcaggttggctgcggggtcagaaggcgcggggggaaccgaagaacggggcctgctccgtggccctgctccagtccctatccgaactccttgggaggcctggccttccccacgtg

SEQ ID NO: 418557 - DNA, 120 bp, Artificial Sequence
  ENSG00000149806_5 (sequence is synthesized)
agccgccgcgaccaccatcccgtcgcgatcgtttctggaccgctttccactcccaaatctcctttatcccagagcatttcttggcttctcttacaagccgtcttttctttactcagtcgc

SEQ ID NO: 418558 - DNA, 120 bp, Artificial Sequence
  ENSG00000149806_6 (sequence is synthesized)
cgtctagtgagtgtggggtgcatagtcctgacagctgagtgtcacacctatggtaatagagtacttctcactgtcttcagttcagagtgattcttcctgtttacatccctcatgttgaac

SEQ ID NO: 418559 - DNA, 120 bp, Artificial Sequence
  ENSG00000149806_7 (sequence is synthesized)
tcacatcacgagatcctagtctggttatcagcttccacactaaaattaggtcagaccagggcccccaaagtgctctataaaattagaagctggaagatcctgaaatgaaacttaagattt

SEQ ID NO: 418560 - DNA, 120 bp, Artificial Sequence
  ENSG00000149806_8 (sequence is synthesized)
caaggtcaaatatctgcaactttgttctcattacctattgggcgcagcttctctttaaaggcttgaattgagaaaagaggggttctgctgggtggcaccttcttgctcttacctgctggt

SEQ ID NO: 418561 - DNA, 120 bp, Artificial Sequence
  ENSG00000149806_9 (sequence is synthesized)
gccttcctttcccactacaggtaaagtccatggttccctggcccgtgctggaaaagtgagaggtcagactcctaaggtgagtgagagtattagtggtcatggtgttaggactttttttcc

SEQ ID NO: 418562 - DNA, 120 bp, Artificial Sequence
  ENSG00000149806_10 (sequence is synthesized)
tttcacagctaaaccaagtccctgggctcttactcggtttgccttctccctccctggagatgagcctgagggaagggatgctaggtgtggaagacaggaaccagggcctgattaaccttc

SEQ ID NO: 418563 - DNA, 120 bp, Artificial Sequence
  ENSG00000149806_11 (sequence is synthesized)
aacggtcgcccagatcaaggtaaggctgcttggtgcgccctgggttccattttcttgtgctcttcactctcgcggcccgagggaacgcttacgagccttatctttccctgtaggctcatg

SEQ ID NO: 418564 - DNA, 120 bp, Artificial Sequence
  ENSG00000149806_12 (sequence is synthesized)
gacacgcagcccacggtctgtactgacgcgccctcgcttcttcctctttctcgactccatcttcgcggtagctgggaccgccgttcagtcgccaatatgcagctctttgtccgcgcccag

SEQ ID NO: 418565 - DNA, 120 bp, Artificial Sequence
  ENSG00000149809_0 (sequence is synthesized)
gtctgcgttccgtgtccaggcaggtgcaggcgccgcggggccggatcctccgcgcggccgagtccatctcctgggaaatggggcggacagtgtttccttgactgactattgtgagcgccc

SEQ ID NO: 418566 - DNA, 120 bp, Artificial Sequence
  ENSG00000149809_1 (sequence is synthesized)
tctctctccggcggagcggagaccatggcccccactcagggcccccgggccccgctggaattcggagggcccctgggcgccgcggctctgctactgctgctgcccgccaccatgttccac

SEQ ID NO: 418567 - DNA, 120 bp, Artificial Sequence
  ENSG00000149809_2 (sequence is synthesized)
accatgttccacctgctcctggcggcccgttcgggccccgcgcgcctgctgggtccacccgcgtccctgccggggctggaggtgctgtggagcccacgggcgctgctgctgtggctcgcc

SEQ ID NO: 418568 - DNA, 120 bp, Artificial Sequence
  ENSG00000149809_3 (sequence is synthesized)
caggcggcgctctacctactgccggcgcgcaaggtggccgaggggcaggaattgaaggacaagagtcgcctgcgctatcctattaacggcttccaggccctggtgctgacagccctgttg

SEQ ID NO: 418569 - DNA, 120 bp, Artificial Sequence
  ENSG00000149809_4 (sequence is synthesized)
gtggggctggggatgtcagcggggctgcctctgggggcgctcccggaaatgctcctgcccttggcgtttgtcgccaccctcaccgctttcatcttcagcctctttctctacatgaaggcg

SEQ ID NO: 418570 - DNA, 120 bp, Artificial Sequence
  ENSG00000149809_5 (sequence is synthesized)
caggtagccccagtttcggccctggcacctggggggaactcaggcaatccgatttacgacttttttctgggacgagagctcaaccctcgtatctgtttcttcgacttcaaatatttctgt

SEQ ID NO: 418571 - DNA, 120 bp, Artificial Sequence
  ENSG00000149809_6 (sequence is synthesized)
gaactgcgacccggcctcatcggctgggtcctcatcaacctggccctgttgatgaaggaggcagagcttcgaggcagtccctcactggccatgtggctggtcaatggcttccagttgctc

SEQ ID NO: 418572 - DNA, 120 bp, Artificial Sequence
  ENSG00000149809_7 (sequence is synthesized)
ggtttggcttcatgctggcgtttggggacatggcctgggtgcccttcacctacagcctgcaggcccagttcctgctgcaccacccgcagcccctggggttgcccatggcctctgtcatct

SEQ ID NO: 418573 - DNA, 120 bp, Artificial Sequence
  ENSG00000149809_8 (sequence is synthesized)
gcctcatcaatgctactggttactacatcttccgtggggcgaattcccagaaaaacactttccgaaagaatccttctgaccccagagtggctgggcttgagaccatctctacagccacag

SEQ ID NO: 418574 - DNA, 120 bp, Artificial Sequence
  ENSG00000149809_9 (sequence is synthesized)
ggcggaaactgctggtgtctgggtggtggggtatggtccgccatcccaactatcttggagacctcatcatggctctggcttggtccttgccctgcggggtgtcacacctgctgccctact

SEQ ID NO: 418575 - DNA, 120 bp, Artificial Sequence
  ENSG00000149809_10 (sequence is synthesized)
tctacctcctctacttcaccgcgctgctggtgcaccgtgaggcccgggatgagcggcagtgcctgcagaagtacggcctggcctggcaggagtactgccggcgtgtgccttaccgcatca

SEQ ID NO: 418576 - DNA, 120 bp, Artificial Sequence
  ENSG00000149809_11 (sequence is synthesized)
tgccctacatctactgaagcggctccaccaccccaggtgggggcatgtgcccactcatccaccagcacacccaggaccaggagcctcgacacacttgggactcaagggcttgcaccccac

SEQ ID NO: 418577 - DNA, 120 bp, Artificial Sequence
  ENSG00000149809_12 (sequence is synthesized)
ccagccctgaggatgaacaacctcagagaagaggtggtttagagcaaggaaaaaaatgaaaccagtgaccaaaatcggagatgctcttcctcctttggataaacactgggaacccttggt

SEQ ID NO: 418578 - DNA, 120 bp, Artificial Sequence
  ENSG00000149809_13 (sequence is synthesized)
gcacttctctcccctaggactggctgggtcagcactgatcagggagaagctgagcagtggcttgtgggcccaggaatctggggtctggtgggacaatagctatccctcagaaacaagcaa

SEQ ID NO: 418579 - DNA, 120 bp, Artificial Sequence
  ENSG00000149809_14 (sequence is synthesized)
tccaggcaggtgcaggcgccgcggggccggatcctccgcgcggccgagtccatctcctgggaaatggggcggacagtgtttccttgactgactattgcgccgcggctctgctactgctgc

SEQ ID NO: 418580 - DNA, 120 bp, Artificial Sequence
  ENSG00000149809_15 (sequence is synthesized)
gcgcaaggtgcgggccccgctcgcggacgctcgggggagggaagcgaatgggctcggcgagggaaaggacgccccgggccttatcagagcccccttggacccgcaggtggccgaggggca

SEQ ID NO: 418581 - DNA, 120 bp, Artificial Sequence
  ENSG00000149809_16 (sequence is synthesized)
ggcccatcttccccctatccctttgattcatgctctgtttacacgcaccaccacataggtgctaacccccagggttctctaaagccagggcagggtcctgggggtccaggcagagtctgg

SEQ ID NO: 418582 - DNA, 120 bp, Artificial Sequence
  ENSG00000149809_17 (sequence is synthesized)
aagcggccgggggtggagctccaggcctagcggggaggtccacggagattggcccccaccccaggctcctttgtgtgcctctgttacgcccaggacagacgccgggggctctccctatgc

SEQ ID NO: 418583 - DNA, 120 bp, Artificial Sequence
  ENSG00000149809_18 (sequence is synthesized)
ccctcgtccccacagccttaccccatttactgctactccgtgcaccacagcagtggctggggtgatcctctgaaggccagggtggcagcctaatgcttggggcagggtctgtggcccccc

SEQ ID NO: 418584 - DNA, 120 bp, Artificial Sequence
  ENSG00000149809_19 (sequence is synthesized)
ccctgcgaccctggcgcttttgctgctgagccccgatgcccacatgagccatgaggggtgtcacacctgctgccctacttctacctcctctacttcaccgcgctgctggtgcaccgtgag

SEQ ID NO: 418585 - DNA, 120 bp, Artificial Sequence
  ENSG00000149809_20 (sequence is synthesized)
atggtgtcgactgggagcaggaggagggtcttcgaggggcctgggggcgggggactaagatggacgcctgggaagggaactgggaggcagcggggtgcctgggggccgagggctgaggac

SEQ ID NO: 418586 - DNA, 120 bp, Artificial Sequence
  ENSG00000149809_21 (sequence is synthesized)
ggggtgcggaggcgcactctgggaatgccgagagggtcccgcagagacgtcagggcgcccgtgcgggccggcggggagctggggggctaggggcggacgcccgacgtgatggcccttccc

SEQ ID NO: 418587 - DNA, 120 bp, Artificial Sequence
  ENSG00000149809_22 (sequence is synthesized)
gggcgagatctgaggatggaaggctttgggggtgtcggaggcagagggacccgggggtttgcagcgaagggtgtctggagagggagagctgaggaggggccggttctgggggctgcagaa

SEQ ID NO: 418588 - DNA, 120 bp, Artificial Sequence
  ENSG00000149809_23 (sequence is synthesized)
cagggcagggccaaaactgtgcagatgcgagtcattaaccattcatattccacaaacatttgttcaatccacctgtgcctaggtactgggagacaaaaataaagttagaggcaaaaaagc

SEQ ID NO: 418589 - DNA, 120 bp, Artificial Sequence
  ENSG00000149823_0 (sequence is synthesized)
ctttccagcctcacgcccgtgggctgcagttggaacgatggcggcggcagctgccgccgggcctagcccggggtctggacctggggactccccagaagggcccgagggggaggctccgga

SEQ ID NO: 418590 - DNA, 120 bp, Artificial Sequence
  ENSG00000149823_1 (sequence is synthesized)
gcgtcggcggaaggcgcacgggatgctgaagctttactacggcctctcggaaggggaggcggcgggacgccccgcggggcccgaccccctggacccgactgatctgaacggggcgcactt

SEQ ID NO: 418591 - DNA, 120 bp, Artificial Sequence
  ENSG00000149823_2 (sequence is synthesized)
cgacccggaagtttacctagacaagctgcgtagagagtgccctctggcccagttgatggacagtgagacggacatggtgcggcagatccgggctctagacagcgacatgcagaccctggt

SEQ ID NO: 418592 - DNA, 120 bp, Artificial Sequence
  ENSG00000149823_3 (sequence is synthesized)
ctatgagaactacaacaagttcatctcagccacagacaccatccggaagatgaagaacgatttccggaagatggaggatgagatggaccggctggccaccaacatggcagtgatcaccga

SEQ ID NO: 418593 - DNA, 120 bp, Artificial Sequence
  ENSG00000149823_4 (sequence is synthesized)
cttcagcgctcgcatcagcgccacgctgcaggaccgccacgagcgcatcaccaagctggcaggggtccacgcgctgctgcggaagctgcagttcctctttgagctgccctcgcgcctcac

SEQ ID NO: 418594 - DNA, 120 bp, Artificial Sequence
  ENSG00000149823_5 (sequence is synthesized)
caagtgcgtggaactgggcgcctatgggcaggcggtgcgctaccagggccgcgcgcaggccgtgctgcagcagtaccaacacctgccctcgttccgcgccatccaggacgactgccaggt

SEQ ID NO: 418595 - DNA, 120 bp, Artificial Sequence
  ENSG00000149823_6 (sequence is synthesized)
catcacggcccgcctggcccagcagctgcggcagcgctttagggagggcggctcaggcgccccggagcaggcagagtgcgtggagctgctgctggccctgggcgagcctgcggaggagct

SEQ ID NO: 418596 - DNA, 120 bp, Artificial Sequence
  ENSG00000149823_7 (sequence is synthesized)
gtgcgaggagttcctggcgcacgcccgcggccggctggagaaggagctgagaaacctggaggccgagctggggccctcacctccggctcccgacgtgttagagttcaccgaccatggagg

SEQ ID NO: 418597 - DNA, 120 bp, Artificial Sequence
  ENSG00000149823_8 (sequence is synthesized)
cagtggcttcgtgggcggcctctgccaggtggcggcggcctaccaggagctgtttgcggcccagggcccagcaggtgccgagaagctggcggccttcgcccggcagctgggcagccgcta

SEQ ID NO: 418598 - DNA, 120 bp, Artificial Sequence
  ENSG00000149823_9 (sequence is synthesized)
ttttgcgctggtggagcggcggctggcgcaggagcagggtggtggtgacaactcactgctggtgcgggcgctggaccgcttccaccggcgcttgcgggctcccggggccctgctggccgc

SEQ ID NO: 418599 - DNA, 120 bp, Artificial Sequence
  ENSG00000149823_10 (sequence is synthesized)
tgccgggctcgcagacgctgccacggagatcgtggaacgagtggcccgcgagcgcctgggccaccacctgcagggtctccgggcggccttcctgggctgcctgacagacgtccgccaggc

SEQ ID NO: 418600 - DNA, 120 bp, Artificial Sequence
  ENSG00000149823_11 (sequence is synthesized)
tgggaaggagggccctggcctggccgagttgctggccaatgtggccagctccatcctgagccacattaaggcctctctggcagcagtgcaccttttcaccgccaaagaggtgtccttctc

SEQ ID NO: 418601 - DNA, 120 bp, Artificial Sequence
  ENSG00000149823_12 (sequence is synthesized)
caacaagccctacttccggggtgagttctgcagtcagggtgtccgtgagggcctcatcgtgggcttcgtccactctatgtgccagacggctcagagcttctgcgacagccctggggagaa

SEQ ID NO: 418602 - DNA, 120 bp, Artificial Sequence
  ENSG00000149823_13 (sequence is synthesized)
ggggggtgccacaccacctgccctgctcctgctgctctcccgcctctgcctggactacgagacggccaccatctcctacatcctcactctcactgatgaacagtttctggtgcaggatca

SEQ ID NO: 418603 - DNA, 120 bp, Artificial Sequence
  ENSG00000149823_14 (sequence is synthesized)
gttcccagtgacgcccgtgagcacgctgtgtgcagaggccagggaaacggcgcggcggctgctgacccactacgtgaaggtgcagggcctggtcatatcacagatgctgcgcaagagcgt

SEQ ID NO: 418604 - DNA, 120 bp, Artificial Sequence
  ENSG00000149823_15 (sequence is synthesized)
ggagactcgcgactggctcagcactctggagccccggaatgtgcgggccgtcatgaagcgggtggtggaggataccaccgccatcgacgtgcaggtggggctcctgtacgaagagggtgt

SEQ ID NO: 418605 - DNA, 120 bp, Artificial Sequence
  ENSG00000149823_16 (sequence is synthesized)
tcgcaaggcccagagcagcgactccagcaagaggactttctccgtgtacagcagctctcggcagcagggccgctacgcccccagctatacccccagtgccccgatggacaccaacctctt

SEQ ID NO: 418606 - DNA, 120 bp, Artificial Sequence
  ENSG00000149823_17 (sequence is synthesized)
gagcaatatccagaagctattctctgaacgtattgatgtgttcagccctgtggagttcaacaaggtgtcggtgctgaccggcatcatcaagatcagcctgaagacgctgctggagtgtgt

SEQ ID NO: 418607 - DNA, 120 bp, Artificial Sequence
  ENSG00000149823_18 (sequence is synthesized)
gcggctgcgcacctttgggcgcttcgggctgcagcaggtgcaagtggactgccactttctgcagctctacctgtggcgttttgtggccgacgaagaactcgtgcacttgctgctggacga

SEQ ID NO: 418608 - DNA, 120 bp, Artificial Sequence
  ENSG00000149823_19 (sequence is synthesized)
agtggtggcctctgctgccctgcgctgcccagaccctgtgcccatggagcccagtgtggttgaggtcatctgcgagcgcggctaggcgcagccgctgccatgcaccggtctgtccctgca

SEQ ID NO: 418609 - DNA, 120 bp, Artificial Sequence
  ENSG00000149823_20 (sequence is synthesized)
ccccatggcacccaggatctggtctcggtggtccttccccgcaggcaggtgtcaggaccggcctaataaacatgtgtggcctcctcctctcgcttgctgggcgggcctttccgggggcgg

SEQ ID NO: 418610 - DNA, 120 bp, Artificial Sequence
  ENSG00000149823_21 (sequence is synthesized)
ggttttgaagctgaggcttctgaggcgcccgcgtcgggtccgcccccgagcgccgattggctggtgtgctgggcccagcatgggcagggggcggttccacttaaaaaccctgggacgaga

SEQ ID NO: 418611 - DNA, 120 bp, Artificial Sequence
  ENSG00000149823_22 (sequence is synthesized)
gtctgatggagcagttgaggcacagtggtggcagctggctaagcacctgcggcctgcttcggatctggactaattctgagggccggctctcctgggcaccagggttagggggttacgggg

SEQ ID NO: 418612 - DNA, 120 bp, Artificial Sequence
  ENSG00000149823_23 (sequence is synthesized)
agtatgtgagtaacgcctgctttgggaacataaaccccctcccccgcccccatgtgcgctgtgacccacgccctcgcagtcctttctctggaatcatccatgcgcccctggagcaagctg

SEQ ID NO: 418613 - DNA, 120 bp, Artificial Sequence
  ENSG00000149823_24 (sequence is synthesized)
gggcgtctgtgaaggggtgggtgagaaggagctgaggttgcgcccgccctgcagtcacctgctctccccttttccccgcccctgccctcctagacaccatccggaagatgaagaacgatt

SEQ ID NO: 418614 - DNA, 120 bp, Artificial Sequence
  ENSG00000149823_25 (sequence is synthesized)
ctggcagtccctgcctggaggaggggacatgtgtatctgggcttctcacggggccagttctgtagccagggcgtccgtgagggaaccccaggggaacaagtctccaaggatgaagaccaa

SEQ ID NO: 418615 - DNA, 120 bp, Artificial Sequence
  ENSG00000149823_26 (sequence is synthesized)
acgggctggggagtgcctatgtccacggtcttgttccttctcagcccaggattatgacatcttcgcccctattttacctgtggagaagcagaggctcagggttacccaggaagtcagggc

SEQ ID NO: 418616 - DNA, 120 bp, Artificial Sequence
  ENSG00000149823_27 (sequence is synthesized)
ctccactggttctataaatagcgaccatgtacctactaaatagcgggccccgcggtgattaccctgtgatccttgtgatgcttgagtagctgacttagggcatcctcagcaccgatgggc

SEQ ID NO: 418617 - DNA, 120 bp, Artificial Sequence
  ENSG00000149823_28 (sequence is synthesized)
gttcaacaaggtccgacttccaacgtgactcagacttccagggatcccggggagggttggctggagcagccccacacctgcccaaggagccccaggactctgtgaccaactgggggtgac

SEQ ID NO: 418618 - DNA, 120 bp, Artificial Sequence
  ENSG00000149823_29 (sequence is synthesized)
atgcatgtctcaagtttcccaaaacggaggcagtgtgaacacagtctacagatgaagaactggggctcagaaaagttgaggggcgtggtctagatttacagcaagtcttaggcagatgag

SEQ ID NO: 418619 - DNA, 81 bp, Artificial Sequence
  ENSG00000149823_30 (sequence is synthesized)
gggcgtggtctagatttacagcaagtcttaggcagatgagagatgaggacccagctgcatagctggaaggcattcccggac

SEQ ID NO: 418620 - DNA, 120 bp, Artificial Sequence
  ENSG00000149823_31 (sequence is synthesized)
gtgtgtgcgcacggggagtgggggggtgcggggaggggggaagggaaccaggcccctgctatattgctcccccagatcatgcctccgactttttgtgaggttcaggagagcaggtgttca

SEQ ID NO: 418621 - DNA, 120 bp, Artificial Sequence
  ENSG00000149823_32 (sequence is synthesized)
aggctcagggcatctgcagctgggctgagaagcagggcatggtggggtccccagtgttggctttctctgcccccactcagggaagctgctccggggtacttagaatgtaggatgatgctg

SEQ ID NO: 418622 - DNA, 120 bp, Artificial Sequence
  ENSG00000149823_33 (sequence is synthesized)
tcccttgcagagggggctggggcacttagagccccagcagagggtcattaacagccttacctggaagaggggacctgctgtggacctgggcaccttctcttgcagggtgagttctgcagt

SEQ ID NO: 418623 - DNA, 120 bp, Artificial Sequence
  ENSG00000149922_0 (sequence is synthesized)
tctcgcagcaccgggggccctaagcagcgagacctgaggccagacggaactacaacatgtaccatccacgagaattgtacccgtccctgggggccggctaccgcctggggcccgcccaac

SEQ ID NO: 418624 - DNA, 120 bp, Artificial Sequence
  ENSG00000149922_1 (sequence is synthesized)
ctggggccgactccagcttcccacccgccctagcggagggctaccgctaccccgaactggacacccctaaactggattgcttcctctccgggatggaggctgctccccgcaccctggccg

SEQ ID NO: 418625 - DNA, 120 bp, Artificial Sequence
  ENSG00000149922_2 (sequence is synthesized)
cgcacccacctctgccccttctgccccctgccatgggcactgagccggccccatcagctccagaggccctccattccctcccgggggtcagcctgagcctggagaaccgggagctatgga

SEQ ID NO: 418626 - DNA, 120 bp, Artificial Sequence
  ENSG00000149922_3 (sequence is synthesized)
aggagttcagctctgtgggaacagaaatgatcatcaccaaagctgggaggcgcatgttccctgcctgccgagtgtcagtcactggcctggaccccgaggcccgctacttgtttcttctgg

SEQ ID NO: 418627 - DNA, 120 bp, Artificial Sequence
  ENSG00000149922_4 (sequence is synthesized)
atgtgattccggtggatggggctcgctaccgctggcagggccggcgctgggagcccagcggcaaggcagagccccgcctgcctgaccgtgtctacattcaccccgactctcctgccactg

SEQ ID NO: 418628 - DNA, 120 bp, Artificial Sequence
  ENSG00000149922_5 (sequence is synthesized)
gtgcacattggatgcggcagcctgtgtctttccatcgtgtcaagctcaccaacagcacgctggacccccacggccacctgatcctgcactccatgcacaagtaccaaccccgcatacacc

SEQ ID NO: 418629 - DNA, 120 bp, Artificial Sequence
  ENSG00000149922_6 (sequence is synthesized)
tagttcgggcagcccagctctgcagccagcactgggggggcatggcctccttccgcttccccgagaccacattcatctccgtgacagcctaccagaacccacagatcacacaactgaaga

SEQ ID NO: 418630 - DNA, 120 bp, Artificial Sequence
  ENSG00000149922_7 (sequence is synthesized)
tatgggagcggagacacaccaggtggtccctgcgactccaccctgggtggagacattcgtgaatcagatccagaacaggccccagcccccggggaagccaccgctgccccggcacctctg

SEQ ID NO: 418631 - DNA, 120 bp, Artificial Sequence
  ENSG00000149922_8 (sequence is synthesized)
tgtggtggccccagtgctgaggcctacctcctgcaccctgcggctttccatggggcccccagtcaccttcccaccaggagccccagcttcccggaggctccagactccgggcgctcagcc

SEQ ID NO: 418632 - DNA, 120 bp, Artificial Sequence
  ENSG00000149922_9 (sequence is synthesized)
ccctactcggctgcatttctggagctgccgcacgggtcagggggctccgggtacccagcggctccaccggcggtaccctttgccccgcactttctccaagggggccccttccctctacca

SEQ ID NO: 418633 - DNA, 120 bp, Artificial Sequence
  ENSG00000149922_10 (sequence is synthesized)
tacaccgcgcctgggggctatctggatgtgggctccaaacccatgtactgaaccactgctgggcccctctgcctccatcacaaacctcccgctcccttcccccagccctggagccccctc

SEQ ID NO: 418634 - DNA, 120 bp, Artificial Sequence
  ENSG00000149922_11 (sequence is synthesized)
acctccaccggccccatcccccacaccaaatggccgccttgggcctgcccacccaccccctcaacttcacaccttgatttcactcccacccccctctggcttcaaagcctaaccaaggct

SEQ ID NO: 418635 - DNA, 120 bp, Artificial Sequence
  ENSG00000149922_12 (sequence is synthesized)
gctgggagtccagctggggccggcttccccttcccggctctcacctccgtgtgaatggaaggggctctgcctggccaaatggggccacagaccagcatccccacttaccaggcctcccca

SEQ ID NO: 418636 - DNA, 120 bp, Artificial Sequence
  ENSG00000149922_13 (sequence is synthesized)
tgggctctggaggggctcaatccccacccccccacacacactggtgcaggccacaccagtctgttgttctgggaccagagtatttttgttaataaaactcaaaagccatccatgctcagg

SEQ ID NO: 418637 - DNA, 120 bp, Artificial Sequence
  ENSG00000149922_14 (sequence is synthesized)
agaagctgtcggactgtgagcgccttcgaactttggaggcttggctcgggatggaggtttttttagcatggggaccagggaggactacggtgctcgggactgggctgcggcctcctcgcg

SEQ ID NO: 418638 - DNA, 120 bp, Artificial Sequence
  ENSG00000149922_15 (sequence is synthesized)
gccccgagtgccctgtgaaatcagctcaggccgcgtccctctagcctgcactttccctctgttcacgctgcttccctccagggcccggcctccaagtgaaggggggcggagggcggtcac

SEQ ID NO: 418639 - DNA, 120 bp, Artificial Sequence
  ENSG00000149922_16 (sequence is synthesized)
ctgccagaaggtctggggcgccaaggtgtgtcccgggactcttggctccgtccaggttccaggccccgccccccagcttatccctagccggggctccccaccgtgggaacggggaccagc

SEQ ID NO: 418640 - DNA, 120 bp, Artificial Sequence
  ENSG00000149922_17 (sequence is synthesized)
tggccggaagcgccaaactgcgtccctgtccgagccctggggatcaatcaagccgaggagttaattatgtaatgagggggcagggggtcgaggctaatgaagcctcccggggtggggagg

SEQ ID NO: 418641 - DNA, 120 bp, Artificial Sequence
  ENSG00000149922_18 (sequence is synthesized)
gaggggaggaggggaccgtacccaggtatccgaccccctctcggaccccttcgaggccccaggggtctccaccccagcccaactccagggccccaaagaggggaggggctgtgatcctgg

SEQ ID NO: 418642 - DNA, 120 bp, Artificial Sequence
  ENSG00000149922_19 (sequence is synthesized)
attcaacaaatgtttattaatcactcactgtgtgccaggcaccgtgctggacatcagaaatgcagtggtaagtgaaaacattcattcactgactcagcaaatacttatatagtacctgct

SEQ ID NO: 418643 - DNA, 120 bp, Artificial Sequence
  ENSG00000149922_20 (sequence is synthesized)
atgtgccagggacagttccaggcactggagataaaacaaacaaagcaaaccaaagccccggccctcatgcagctgatttctagtggggagagtagacaagcagacaagagaaataaataa

SEQ ID NO: 418644 - DNA, 86 bp, Artificial Sequence
  ENSG00000149922_21 (sequence is synthesized)
tagtggggagagtagacaagcagacaagagaaataaataaaatgtcatctgttaggaagccattctaaagagaagagagaccctgg

SEQ ID NO: 418645 - DNA, 120 bp, Artificial Sequence
  ENSG00000149923_0 (sequence is synthesized)
gccggaagtaggagcggcggcggcggcggcggcggcggtcgaaagcggagtgaaagagggaggcagggagccggagagccggaaccggagtcgcagcggcggagacccctgtgcggtgcg

SEQ ID NO: 418646 - DNA, 120 bp, Artificial Sequence
  ENSG00000149923_1 (sequence is synthesized)
gagggggcggcggccccgactctgacccgcgccgggggtgggccatggcggagatcagcgacctggaccggcagatcgagcagctgcgtcgctgcgagctcatcaaggagagcgaagtca

SEQ ID NO: 418647 - DNA, 120 bp, Artificial Sequence
  ENSG00000149923_2 (sequence is synthesized)
aggccctgtgcgctaaggccagagagatcttggtagaggagagcaacgtgcagagggtggactcgccagtcacagtgtgcggcgacatccatggacaattctatgacctcaaagagctgt

SEQ ID NO: 418648 - DNA, 120 bp, Artificial Sequence
  ENSG00000149923_3 (sequence is synthesized)
tcagagtaggtggcgacgtccctgagaccaactacctcttcatgggggactttgtggaccgtggcttctatagcgtcgaaacgttcctcctgctgctggcacttaaggttcgctatcctg

SEQ ID NO: 418649 - DNA, 120 bp, Artificial Sequence
  ENSG00000149923_4 (sequence is synthesized)
atcgcatcacactgatccggggcaaccatgagagtcgccagatcacgcaggtctatggcttctacgatgagtgcctgcgcaagtacggctcggtgactgtgtggcgctactgcactgaga

SEQ ID NO: 418650 - DNA, 120 bp, Artificial Sequence
  ENSG00000149923_5 (sequence is synthesized)
cctggatcagattcggacaatcgaccgaaagcaagaggtgcctcatgatgggcccatgtgtgacctcctctggtctgacccagaagacaccacaggctggggcgtgagcccccgaggagc

SEQ ID NO: 418651 - DNA, 120 bp, Artificial Sequence
  ENSG00000149923_6 (sequence is synthesized)
cggctacctatttggcagtgacgtggtggcccagttcaacgcagccaatgacattgacatgatctgccgtgcccaccaactggtgatggaaggttacaagtggcacttcaatgagacggt

SEQ ID NO: 418652 - DNA, 120 bp, Artificial Sequence
  ENSG00000149923_7 (sequence is synthesized)
gctcactgtgtggtcggcacccaactactgctaccgctgtgggaatgtggcagccatcttggagctggacgagcatctccagaaagatttcatcatctttgaggctgctccccaagagac

SEQ ID NO: 418653 - DNA, 120 bp, Artificial Sequence
  ENSG00000149923_8 (sequence is synthesized)
acggggcatcccctccaagaagcccgtggccgactacttcctgtgaccccgcccggcccctgccccctccaacccttctggccctcgcaccactgtgactctgccatcttcctcagacgg

SEQ ID NO: 418654 - DNA, 120 bp, Artificial Sequence
  ENSG00000149923_9 (sequence is synthesized)
aggctgggcgtggggggggctgtcctggctctgctgtcccccaagagggtgcttcgagggtgaggacttctctggagaggcctggagacctagctccatgttcctcctcctctctcccca

SEQ ID NO: 418655 - DNA, 90 bp, Artificial Sequence
  ENSG00000149923_10 (sequence is synthesized)
cctggagacctagctccatgttcctcctcctctctccccacttgaaccatgaagtttccaataagtttgtttttagataaaaattttgag

SEQ ID NO: 418656 - DNA, 120 bp, Artificial Sequence
  ENSG00000149923_11 (sequence is synthesized)
ggcggcggtcgaaagcggagtgaaagagggaggcagggagccggagagccggaaccggagtcgcagcggcggtaatagtgcgagactcctctaagtcaccgtccttagcgcgggaccgcg

SEQ ID NO: 418657 - DNA, 120 bp, Artificial Sequence
  ENSG00000149923_12 (sequence is synthesized)
gggttcgacgggagttagcgggggtgcggccaggccgttggacgccggggggtcctggggccgatgtgaggggaggcgggggtgggggagccgggccggctctagaatcgagttgtccgc

SEQ ID NO: 418658 - DNA, 120 bp, Artificial Sequence
  ENSG00000149923_13 (sequence is synthesized)
ctgcacccccaacctgggcgacctcgggccgggcctgtcttagtccgttccgccctcatctcctatcgtgaccagccccaccttggagctgtgtcactggtgatggaccgattctgcttt

SEQ ID NO: 418659 - DNA, 120 bp, Artificial Sequence
  ENSG00000149923_14 (sequence is synthesized)
gcagagccaggcctggtctttcaggcacatgaagtttcctcttcatcttgggggctctataagcccaaccctaagctcttttatctgtcctttccctcaccttcaacggagcactgctaa

SEQ ID NO: 418660 - DNA, 120 bp, Artificial Sequence
  ENSG00000149923_15 (sequence is synthesized)
cttcaacggagcactgctaaaagaagtgggggttgctgtgcacgttggctcacacctgtgatcccagcattttgggagggcaaggtgggcacatcacttgaggttaggagttcgagacca

SEQ ID NO: 418661 - DNA, 120 bp, Artificial Sequence
  ENSG00000149923_16 (sequence is synthesized)
cagcctgtcagccatcatcgatggcaaggtaagccagcccagggctccatgggacagggagaggaggggggcttcaggcctcagccccgtcctctttccctgctctcccctgtagatctt

SEQ ID NO: 418662 - DNA, 120 bp, Artificial Sequence
  ENSG00000149923_17 (sequence is synthesized)
gtgggagaggcagtgtggggccagatgacaaagggcctgggtgccttgctagggacccggtctgtgtctggtaggtgaaagaagagccattaggttcatagttgagggaatgggtcagct

SEQ ID NO: 418663 - DNA, 120 bp, Artificial Sequence
  ENSG00000149923_18 (sequence is synthesized)
ttacattctctggaggggtcgtgtgggcctgggaggtggctgatgccacacgattcaggcaagaggtgccaggagtgtgctgggcagtggttgtgaggatggcaggctggcgggcacgag

SEQ ID NO: 418664 - DNA, 120 bp, Artificial Sequence
  ENSG00000149923_19 (sequence is synthesized)
agtaggagcggcggcggcggcggcggcggcggtcgaaagcggagtgaaagagggaggcagggagccggagagccggaaccggagtcgcagcggcggtaatagagacccctgtgcggtgcg

SEQ ID NO: 418665 - DNA, 120 bp, Artificial Sequence
  ENSG00000149925_0 (sequence is synthesized)
gaagcaccggtgagtgggcaggggctccctccccatcaatagggccgacccaagtcttcctcccccttcccccatgccgggccccacgatagtgtgaatgtcaggggcttcaggtttccc

SEQ ID NO: 418666 - DNA, 120 bp, Artificial Sequence
  ENSG00000149925_1 (sequence is synthesized)
taaatataggtccctgccagaggatccgtggcgggaaaagggcaggggtcattagagaagatcggggacacatgtggggcgggcaggagctgccttataaccagcccgggaacccctagc

SEQ ID NO: 418667 - DNA, 120 bp, Artificial Sequence
  ENSG00000149925_2 (sequence is synthesized)
tcactcgctgctgaccaggctctgccggctccttcggcctcgccgcaggaacttgctactaccagcaccatgccctaccaatatccagcactgaccccggagcagaagaaggagctgtct

SEQ ID NO: 418668 - DNA, 120 bp, Artificial Sequence
  ENSG00000149925_3 (sequence is synthesized)
gacatcgctcaccgcatcgtggcacctggcaagggcatcctggctgcagatgagtccactgggagcattgccaagcggctgcagtccattggcaccgagaacaccgaggagaaccggcgc

SEQ ID NO: 418669 - DNA, 120 bp, Artificial Sequence
  ENSG00000149925_4 (sequence is synthesized)
ttctaccgccagctgctgctgacagctgacgaccgcgtgaacccctgcattgggggtgtcatcctcttccatgagacactctaccagaaggcggatgatgggcgtcccttcccccaagtt

SEQ ID NO: 418670 - DNA, 120 bp, Artificial Sequence
  ENSG00000149925_5 (sequence is synthesized)
atcaaatccaagggcggtgttgtgggcatcaaggtagacaagggcgtggtccccctggcagggacaaatggcgagactaccacccaagggttggatgggctgtctgagcgctgtgcccag

SEQ ID NO: 418671 - DNA, 120 bp, Artificial Sequence
  ENSG00000149925_6 (sequence is synthesized)
tgaagattggggaacacaccccctcagccctcgccatcatggaaaatgccaatgttctggcccgttatgccagtatctgccagcagaatggcattgtgcccatcgtggagcctgagatcc

SEQ ID NO: 418672 - DNA, 120 bp, Artificial Sequence
  ENSG00000149925_7 (sequence is synthesized)
tccctgatggggaccatgacttgaagcgctgccagtatgtgaccgagaaggtgctggctgctgtctacaaggctctgagtgaccaccacatctacctggaaggcaccttgctgaagccca

SEQ ID NO: 418673 - DNA, 120 bp, Artificial Sequence
  ENSG00000149925_8 (sequence is synthesized)
acatggtcaccccaggccatgcttgcactcagaagttttctcatgaggagattgccatggcgaccgtcacagcgctgcgccgcacagtgccccccgctgtcactgggatcaccttcctgt

SEQ ID NO: 418674 - DNA, 120 bp, Artificial Sequence
  ENSG00000149925_9 (sequence is synthesized)
ctggaggccagagtgaggaggaggcgtccatcaacctcaatgccattaacaagtgccccctgctgaagccctgggccctgaccttctcctacggccgagccctgcaggcctctgccctga

SEQ ID NO: 418675 - DNA, 120 bp, Artificial Sequence
  ENSG00000149925_10 (sequence is synthesized)
aggcctggggcgggaagaaggagaacctgaaggctgcgcaggaggagtatgtcaagcgagccctggccaacagccttgcctgtcaaggaaagtacactccgagcggtcaggctggggctg

SEQ ID NO: 418676 - DNA, 120 bp, Artificial Sequence
  ENSG00000149925_11 (sequence is synthesized)
ctgccagcgagtccctcttcgtctctaaccacgcctattaagcggaggtgttcccaggctgcccccaacactccaggccctgccccctcccactcttgaagaggaggccgcctcctcggg

SEQ ID NO: 418677 - DNA, 120 bp, Artificial Sequence
  ENSG00000149925_12 (sequence is synthesized)
gctccaggctggcttgcccgcgctctttcttccctcgtgacagtggtgtgtggtgtcgtctgtgaatgctaagtccatcaccctttccggcacactgccaaataaacagctatttaaggg

SEQ ID NO: 418678 - DNA, 120 bp, Artificial Sequence
  ENSG00000149925_13 (sequence is synthesized)
tccttcttaaaaaaaaccagggctccagagaatcagaacagccaccatcaccgcagggagtcaagggaggagggagattagagaaggagccagggagggtggcagggaggccacgtgatc

SEQ ID NO: 418679 - DNA, 120 bp, Artificial Sequence
  ENSG00000149925_14 (sequence is synthesized)
cgagtcccctcacccctttccttcccacaggtccctggccaaagatttatttctcttgacaaccaagggcctccgtctggatttccaaggaagaatttcctctgaagcaccggaacttgc

SEQ ID NO: 418680 - DNA, 120 bp, Artificial Sequence
  ENSG00000149925_15 (sequence is synthesized)
aaggaagaatttcctctgaagcaccgcccgccgccctctgccgccgcaccctgcacacccgcccctctcctgtgccaggaacttgctactaccagcaccatgccctaccaatatccagca

SEQ ID NO: 418681 - DNA, 120 bp, Artificial Sequence
  ENSG00000149925_16 (sequence is synthesized)
gcccgcctcctgcgccgccccttccgaggctaaatcggctgcgttcctctcggaacgcgccgcagaaggggtcctggtgacgagtcccgcgttctctccttgaatccactcgccagcccg

SEQ ID NO: 418682 - DNA, 120 bp, Artificial Sequence
  ENSG00000149925_17 (sequence is synthesized)
ccgccctctgccgccgcaccctgcacacccgcccctctcctgtgccaggcaaggtgaccccatggcaaggcgcaagccagaagggtccagcttcaacatgacccacctgtccatggctat

SEQ ID NO: 418683 - DNA, 120 bp, Artificial Sequence
  ENSG00000149925_18 (sequence is synthesized)
ggccttttcctttcccccagttgccagtgggcaactccaccctcagctgggcaacacccagcaccagacagagttaggaaaggaacttgctactaccagcaccatgccctaccaatatcc

SEQ ID NO: 418684 - DNA, 120 bp, Artificial Sequence
  ENSG00000149925_19 (sequence is synthesized)
accagtgcaaggtggctggccggggaccctggggctaacccctatcctctcctccaccccactacccaccgtgcgcctgctctgctccaggtgctggctgctgtctacaaggctctgagt

SEQ ID NO: 418685 - DNA, 120 bp, Artificial Sequence
  ENSG00000149925_20 (sequence is synthesized)
agaatgggtggagggtgcagggttgggagtggcaggctgatcccctaattcccatgtgacactcccagggagcattgccaagcggctgcagtccattggcaccgagaacaccgaggagaa

SEQ ID NO: 418686 - DNA, 120 bp, Artificial Sequence
  ENSG00000149925_21 (sequence is synthesized)
tgaggcagggaatgaatgctggattggtggcctagagacttgcatggagcctgcttcaggcttagggcatttactcgacatttttaatcctcacaattctgagagaacagtatcattccc

SEQ ID NO: 418687 - DNA, 120 bp, Artificial Sequence
  ENSG00000149925_22 (sequence is synthesized)
actttacacatgaaaatctcagaagctcagggaagtgaagtgttttgctcagagtaagtggcagagccccagtctgacacccaattcactcaacatttctgttgtcaaataacatcccag

SEQ ID NO: 418688 - DNA, 120 bp, Artificial Sequence
  ENSG00000149925_23 (sequence is synthesized)
tgtatcctgtctcagaggattgttactaagtgaactaagtgaaaatattttaatttaattgtaactaagtatttgagtaactaaacattttaagtaaattttttttttttttttttttga

SEQ ID NO: 418689 - DNA, 120 bp, Artificial Sequence
  ENSG00000149925_24 (sequence is synthesized)
tacaggcgtgagccaccatgcccggcttaagtaactaaatattttaattgtaactaagtgaaaatatttgccagccctgagatgcagtttaagggattaagtaaatgtgggggaagactg

SEQ ID NO: 418690 - DNA, 120 bp, Artificial Sequence
  ENSG00000149925_25 (sequence is synthesized)
gctaaagaagaggaaagaggggcacgcccagctacctaggaggctgaggcgggaggatcacttgagtccaggaagtggaggcttcagtgagctgagattccaccactgtactccagccgg

SEQ ID NO: 418691 - DNA, 120 bp, Artificial Sequence
  ENSG00000149925_26 (sequence is synthesized)
ggcgacagtggaaagggtgctagaggtcatttcctgtgtcttaatgttgttaccctgaccccaacaggtagacaagggcgtggtccccctggcagggacaaatggcgagactaccaccca

SEQ ID NO: 418692 - DNA, 120 bp, Artificial Sequence
  ENSG00000149925_27 (sequence is synthesized)
aggtgagaactgtttgattctctgccctacgaacccaaccagagcaggtttgggtgctgggaggagtggaaaccacatgcccctccccaccgtgctctgaccccttcctcttctcttagg

SEQ ID NO: 418693 - DNA, 120 bp, Artificial Sequence
  ENSG00000149925_28 (sequence is synthesized)
gaaggctgcgcaggaggagtatgtcaagcgagccctggtaaggataggcaggaggtgggcagggtgcctgggtggatgggactcggagaagagcccttctcactccacccctctccctgc

SEQ ID NO: 418694 - DNA, 120 bp, Artificial Sequence
  ENSG00000149926_0 (sequence is synthesized)
ggagacgccgctgcaggtccggtttctcggtgtctggtcggtgccatcattttcctgcccctcccccgtcctccccaagctggccacttcccctccccctccccctccccaccgaggggg

SEQ ID NO: 418695 - DNA, 120 bp, Artificial Sequence
  ENSG00000149926_1 (sequence is synthesized)
cagggggctgggcacggagtctctatgatgatgccatgtgcggtgtctgtgccgggcggcagggactggggcggcagcgagaggaggcagtggagccaggagagcggtggtgaccgctga

SEQ ID NO: 418696 - DNA, 120 bp, Artificial Sequence
  ENSG00000149926_2 (sequence is synthesized)
ccgcttgcccggctgctcctccgctccctcccgcccacctccttcctttggggctggtactcagacccacccccaccccctccccgcctcctcgggccctcccagcctctcacgtaagcc

SEQ ID NO: 418697 - DNA, 120 bp, Artificial Sequence
  ENSG00000149926_3 (sequence is synthesized)
tcccctccccacctgcctggtggctccctcccctcccccatccgcatcctcctcctcctgtcccctcttcctctctgtccctcaccaagccatcccctctttgcctctccccatccctcg

SEQ ID NO: 418698 - DNA, 120 bp, Artificial Sequence
  ENSG00000149926_4 (sequence is synthesized)
ctggcctgctcctgctccccttctcccatcctcccctcccccgtctctgcccagccagccccctcccgactccccagtttcatcggactccctggccccatcccgtccccgccctggccc

SEQ ID NO: 418699 - DNA, 120 bp, Artificial Sequence
  ENSG00000149926_5 (sequence is synthesized)
ctttgtgccccttctcatcgttttctccctccttcccgggcttggcgtcccttctccacccctaactccttccactcggcctccctgccccttcacggcccgcctgcctccctgcccaag

SEQ ID NO: 418700 - DNA, 120 bp, Artificial Sequence
  ENSG00000149926_6 (sequence is synthesized)
tcctgagccaccatgctgaccccgatggtggccgggggggtggtgttccccggactcttcctcctctccaagaacacgctccagcggctgccccagctacgctgggaggaggccgacgca

SEQ ID NO: 418701 - DNA, 120 bp, Artificial Sequence
  ENSG00000149926_7 (sequence is synthesized)
gtcattgtctcagccaggctggtgtcctctgtccaggccatcatggcctccactgccggctacatcgtctccacctcctgcaagcacatcattgatgaccaacactggctgtcctctgcc

SEQ ID NO: 418702 - DNA, 120 bp, Artificial Sequence
  ENSG00000149926_8 (sequence is synthesized)
tacacgcaatttgctgtgccctacttcatctacgacatctacgccatgttcctctgtcactggcacaagcaccaggtcaaagggcatggaggggacgacggagcggccagagccccgggc

SEQ ID NO: 418703 - DNA, 120 bp, Artificial Sequence
  ENSG00000149926_9 (sequence is synthesized)
aaggagttcctcatggtgctccaccatgccgccatggtgctggtgtgcttcccactctcagtggtgtggcgacagggtaagggagacttctttctgggttgcatgttgatggcagaggtc

SEQ ID NO: 418704 - DNA, 120 bp, Artificial Sequence
  ENSG00000149926_10 (sequence is synthesized)
agcacgcccttcgtctgccttggcaagatcctcatccagtacaagcagcagcacacactgctgcacaaggtgaacggggccctgatgctgctcagcttcctctgctgccgggtgctgctc

SEQ ID NO: 418705 - DNA, 120 bp, Artificial Sequence
  ENSG00000149926_11 (sequence is synthesized)
tttccctacctgtactgggcctacgggcgccatgccggcctgcccctgctggccgtgcccctggccatccctgcccacgtcaacctgggcgctgcgctgctcctggcccctcagctctac

SEQ ID NO: 418706 - DNA, 120 bp, Artificial Sequence
  ENSG00000149926_12 (sequence is synthesized)
ctactggttcttcctcatctgccgtggggcctgccgcctcttctggccccgctcccggccgcccccggcctgccaggcccaggactgaggccgggggccgggaccctccccctccccacc

SEQ ID NO: 418707 - DNA, 120 bp, Artificial Sequence
  ENSG00000149926_13 (sequence is synthesized)
cccccgtggagacagggctctggggctgatggctggggttgggagccagggtcctcttgcccggacaaccccaggactgacgatgaccccgaaagggaagaggccccatctctcggggac

SEQ ID NO: 418708 - DNA, 120 bp, Artificial Sequence
  ENSG00000149926_14 (sequence is synthesized)
tgagggggtggagagaggggacctcttccccctactctgcccccttcctgcacacccttgcgctggaggaggggagggggcaccgcctcccacccactgagggcaggagggcttgtgggg

SEQ ID NO: 418709 - DNA, 120 bp, Artificial Sequence
  ENSG00000149926_15 (sequence is synthesized)
agggacaccaacagggtttcaaggggaccaggagtcagaatgtggggagacgcctctgccaaggccatcccagcccctatgctgccatcccccagggctccccatcacccgagaggagag

SEQ ID NO: 418710 - DNA, 120 bp, Artificial Sequence
  ENSG00000149926_16 (sequence is synthesized)
gacgccccaactaacccccgctggccctcgggcctcccgagtggccggctgcaaccacggctcctctccagggtaggccagcttgaggaatcttatttattttatttatttacccaaatt

SEQ ID NO: 418711 - DNA, 120 bp, Artificial Sequence
  ENSG00000149926_17 (sequence is synthesized)
tgaactagtctgttgggttgggggaaggaggtggctgctacccccaagccttcccagtgctgacaaccccgggggcaggcgagggcgcccagtccctcaccatcggctgcacatcgcgcc

SEQ ID NO: 418712 - DNA, 120 bp, Artificial Sequence
  ENSG00000149926_18 (sequence is synthesized)
ctcgggccctgccatgtccctggtgctactgacctctcaaggcttcctccaatctggggtcgggggaccctgggaggtgctttacagaccgctaataaaagacgatctgcgtgaacgcca

SEQ ID NO: 418713 - DNA, 120 bp, Artificial Sequence
  ENSG00000149926_19 (sequence is synthesized)
aggaaggggagggaccttcaaggttgctgccaagggctctagccccttcgtcatccccccctcaccccgtgcattttgagcacctggtgcttgtgtcctggcaaagtgtctggtttggga

SEQ ID NO: 418714 - DNA, 120 bp, Artificial Sequence
  ENSG00000149926_20 (sequence is synthesized)
ggagctgcctgctagggtcgcagggaggcagggagagggccaaggggggccgagcccttctgctgccgtggccactgtgtctgtgtctcctcagtacaagcagcagcacacactgctgca

SEQ ID NO: 418715 - DNA, 120 bp, Artificial Sequence
  ENSG00000149926_21 (sequence is synthesized)
tcatcagatgccggacgttggaggaggcaccgggttctggggcgccacaggaggattgaacccccaggctacacccaccacttggatgtatctccggccaagccactgagcatctgcaaa

SEQ ID NO: 418716 - DNA, 120 bp, Artificial Sequence
  ENSG00000149926_22 (sequence is synthesized)
agggagaaacgcctgccgctcagggatattctttttctggtgtgcagatagagggtgggactggcattgcttgggacagtccctaacctgggacagggcacccggtggagaggatgagtg

SEQ ID NO: 418717 - DNA, 120 bp, Artificial Sequence
  ENSG00000149926_23 (sequence is synthesized)
cctggaagaacagagaacgacaagcctgtgcagccttggactgttttgctctcaacaagaagaaatcgacaaggaaaggaagaaatgtaggagagagtccagattccagtgagactcggg

SEQ ID NO: 418718 - DNA, 120 bp, Artificial Sequence
  ENSG00000149926_24 (sequence is synthesized)
cctgactctaaccagctcatggcctgtaaactttcctcccttccacattttcttgtctagggcaggcatgaccctgctgttcgcagtgggttgcgtcttcttcccgttgtgcttcactgc

SEQ ID NO: 418719 - DNA, 120 bp, Artificial Sequence
  ENSG00000149926_25 (sequence is synthesized)
agtttgacaccttccttttatcccgagaaggtcccttggaagacacttcaggaaggcaggatggcaggacctggttcccttcatcctgcctgtgcctgctccacacctctgctccccaga

SEQ ID NO: 418720 - DNA, 120 bp, Artificial Sequence
  ENSG00000149926_26 (sequence is synthesized)
gtagatgggaggggaggtctttctaaacaaaaatgatatctatgtaaatatatgtagtttcaggcttgcacctgttatttcttttgttttcttttttaatggaacaacaatcgctttggc

SEQ ID NO: 418721 - DNA, 120 bp, Artificial Sequence
  ENSG00000149926_27 (sequence is synthesized)
tttattttgttttttcaacaaatgtcattttaaagttccaaatatcttgacaaccccctcccttcctttttccaagttctgggtgctgaggagaaacatcaacctccctttctgtcttcc

SEQ ID NO: 418722 - DNA, 120 bp, Artificial Sequence
  ENSG00000149926_28 (sequence is synthesized)
cgcagtgggttgcgtcttcttcccgttgtgcttcactgccctgcgctggggcttgcagaaccacaccaacctgcagatggagagacaagaggctgtcctggtagcatccaagtaagagga

SEQ ID NO: 418723 - DNA, 90 bp, Artificial Sequence
  ENSG00000149926_29 (sequence is synthesized)
atcttttactttcagaatgagtttgtggtgaaagcagaagcagagtgtggagtggagctggaatgtggagtcaaaagacaccagcaggct

SEQ ID NO: 418724 - DNA, 120 bp, Artificial Sequence
  ENSG00000149926_30 (sequence is synthesized)
gattacaggcatgagccaccacgcccaacctcttccaattcttgaatactgataagtaactaagaatttatttaagaactactatactgacaactgcatactggccaaacaaaacatgtc

SEQ ID NO: 418725 - DNA, 120 bp, Artificial Sequence
  ENSG00000149926_31 (sequence is synthesized)
caggaggcgtaggaggtacacggaacacagattttactagggtgtctacgtggattccctggcagacaaaaaaagcctgtctctactcatccaaagtgaaaccacagttccatgaccagc

SEQ ID NO: 418726 - DNA, 120 bp, Artificial Sequence
  ENSG00000149926_32 (sequence is synthesized)
cttgtagtcctcaatcgagtagttacggtggccgcccatcacccagcctccccagcctctgtcctttttgcagttttgctcatgagtggctttggggttatgcaactatggttttttggt

SEQ ID NO: 418727 - DNA, 120 bp, Artificial Sequence
  ENSG00000149926_33 (sequence is synthesized)
caaagcgctgggattacaggtgtgagacaccttgcccggctgcaaccatgggtttgaaacccagctttcatccgggcgtggtggctcccacctgtaatatcagcatgttgggaggcagag

SEQ ID NO: 418728 - DNA, 89 bp, Artificial Sequence
  ENSG00000149926_34 (sequence is synthesized)
tggtgtgcgcctgtagtcccagctactggggatactgaggtataaggatcatttcagcccggggaggtttactccagcctgggggacag

SEQ ID NO: 418729 - DNA, 120 bp, Artificial Sequence
  ENSG00000149927_0 (sequence is synthesized)
gcactttctcggcgctccctccctctcggctcgcacagctcgactccgcgctctcctcgccggccgccgccgcccagcctgcgcccgccgtccccccagtgcctgggcacctgttggagg

SEQ ID NO: 418730 - DNA, 120 bp, Artificial Sequence
  ENSG00000149927_1 (sequence is synthesized)
cagagccaggggtgctgcatgaggggccgcaggggcgatcgcatgaccatcaacatccaggagcacatggccatcaacgtgtgccccgggcccatccggcccatccgccagatctctgac

SEQ ID NO: 418731 - DNA, 120 bp, Artificial Sequence
  ENSG00000149927_2 (sequence is synthesized)
cagatctctgactacttcccccggggaccaggacctgaagggggcggcgggggcggcggggaggcccccgcccatctggtccccctggctctggccccccctgcagccctccttggggcc

SEQ ID NO: 418732 - DNA, 120 bp, Artificial Sequence
  ENSG00000149927_3 (sequence is synthesized)
gatggtgcggaggtggacagctatgactcggatgatgccaccgccctaggcacgctggagtttgaccttctctacgaccgggcctcctgcactctgcactgtagcatcctcagggccaag

SEQ ID NO: 418733 - DNA, 120 bp, Artificial Sequence
  ENSG00000149927_4 (sequence is synthesized)
ggcctcaagcccatggatttcaatggcctcgccgacccctacgtcaagctgcacttgctgcctggagcctgtaaggccaataagctaaaaacgaagactcagaggaacacactgaatccc

SEQ ID NO: 418734 - DNA, 120 bp, Artificial Sequence
  ENSG00000149927_5 (sequence is synthesized)
gtgtggaatgaggacctgacttacagcgggatcacagatgacgacatcacgcacaaggtgctcaggatcgccgtctgtgatgaggacaagctgagtcacaatgagtttattggggagatc

SEQ ID NO: 418735 - DNA, 120 bp, Artificial Sequence
  ENSG00000149927_6 (sequence is synthesized)
cgcgtgcccctccgccgcctcaagccttcgcagaagaagcattttaacatctgcctcgagcgccaggtcccgctggcgtccccctcttccatgtcagcggcgctgaggggcatctcctgt

SEQ ID NO: 418736 - DNA, 120 bp, Artificial Sequence
  ENSG00000149927_7 (sequence is synthesized)
tatctgaaggagttggagcaggcggagcaggggcaggggctgctggaggagcgtggccgcatcctgctgagtctcagctacagctcgcggcgccggggactgctggtaggcatcttgcgc

SEQ ID NO: 418737 - DNA, 120 bp, Artificial Sequence
  ENSG00000149927_8 (sequence is synthesized)
aagacgtgtgtgaagaagaagactctcaacccagaatttaacgaggagtttttctacgagatagagctctccactctggccaccaagaccctggaagtcaccgtctgggactatgacatt

SEQ ID NO: 418738 - DNA, 120 bp, Artificial Sequence
  ENSG00000149927_9 (sequence is synthesized)
ggcaaatccaatgacttcattggtggcgtgtccctggggccaggtgcccgaggcgaggctcggaagcactggagtgactgcctgcagcagccggacgcagccctggagcgctggcacacc

SEQ ID NO: 418739 - DNA, 120 bp, Artificial Sequence
  ENSG00000149927_10 (sequence is synthesized)
ctgaccagtgagctgccccctgcggccggggctctgtcctcagcctgagtggacagcagtgtcccggcacaggcccatcgagccgggtccagtacccaaccttcgcacgagtgtgttgca

SEQ ID NO: 418740 - DNA, 120 bp, Artificial Sequence
  ENSG00000149927_11 (sequence is synthesized)
cgtttacacagggtgggctgcccccaccctgcactacctatttttgtgagtctccgtgacccgggtctgtctgctcatgaggggctgcggagttctatattcacatatgcaaacctcctg

SEQ ID NO: 418741 - DNA, 120 bp, Artificial Sequence
  ENSG00000149927_12 (sequence is synthesized)
cctgactcgctagtccctgcaaatatgcaaaccccccatcatctgcacacccgggcagtgctcagagcccggccccaggcccccgcgctcctcactcctgcctctccacgctgccccgtc

SEQ ID NO: 418742 - DNA, 120 bp, Artificial Sequence
  ENSG00000149927_13 (sequence is synthesized)
cctctcccccaacagggaggaggtcggattaggggaggttcagaggaggagaatgtctcaaaaaaaaaggacaaaaaacaaacccagagccactcctttaatacagaaacttcattgaaa

SEQ ID NO: 418743 - DNA, 120 bp, Artificial Sequence
  ENSG00000149927_14 (sequence is synthesized)
aaacctagccctgtacagctgcccttttaaagaggtggccattgcagggtctctgcctccccagcaggtggcagatgctcccggccactcgtttaaataactgtcccctggagggggccg

SEQ ID NO: 418744 - DNA, 120 bp, Artificial Sequence
  ENSG00000149927_15 (sequence is synthesized)
gggtttgaaggcagggcccctgccaccctcctgggggacacccgtgcatgtttacgccttttctggttgtgtcagtggccggagcatggcagctgggcatcaataaacacctccgaggaa

SEQ ID NO: 418745 - DNA, 120 bp, Artificial Sequence
  ENSG00000149927_16 (sequence is synthesized)
gttggggaacacccggcgattctggcggctgcttcctggtggcgcagggagcccgcgtgtttgcgagtgcgtgtgtgtgcgaagttctccggctcgactccgcgctctcctcgccggccg

SEQ ID NO: 418746 - DNA, 120 bp, Artificial Sequence
  ENSG00000149927_17 (sequence is synthesized)
gggaggcactggcgaagcggtgctgagccgagtcctgacggcgctggagctgaggggcagtgcgggatgccccaggaaggctcctaggaagaggggacccacggtgacttcctaaggaag

SEQ ID NO: 418747 - DNA, 120 bp, Artificial Sequence
  ENSG00000149927_18 (sequence is synthesized)
ctcctccctcagatcgtgaggctccccagcctggctcgggagaccccgagatccccggccggtgacagcaggcgaccccctgctcctgtcaacctctcgactccgcgctctcctcgccgg

SEQ ID NO: 418748 - DNA, 120 bp, Artificial Sequence
  ENSG00000149927_19 (sequence is synthesized)
aggtgagggcccccctccccaccacccagcagcagctcggggacagctgacattgtaaccgctggttggttgatctatgtcccattaagcccgtacctctctgatgctcaagaaccatca

SEQ ID NO: 418749 - DNA, 120 bp, Artificial Sequence
  ENSG00000149927_20 (sequence is synthesized)
ctgatgctcaagaaccatcagcggctccctagcccctttggcagcaggccaaaattcttccctgccattcctgcccctcaatatctcctgcctgccaggtgtggtggctcacacctgtaa

SEQ ID NO: 418750 - DNA, 120 bp, Artificial Sequence
  ENSG00000149927_21 (sequence is synthesized)
aacaaaagtatcttctgcccctcaaacagaggactcccttcttccaactggccagttccacaactcctgaacttttcctgttgttttctatctggaaagctccttcctgccagcctaaat

SEQ ID NO: 418751 - DNA, 120 bp, Artificial Sequence
  ENSG00000149927_22 (sequence is synthesized)
tccgctcatctgaggttcagtccaagctctgccccctcccaaaaacgttcctgggttgccgagaccccttctcagagcccttggcttaagccagacctctgcagctttggtctgcccctt

SEQ ID NO: 418752 - DNA, 120 bp, Artificial Sequence
  ENSG00000149927_23 (sequence is synthesized)
ccgtgccttgagttcccctaaaatctcttaaggagtgaagtcttcagggacagggaacttgctccgtcatcctaggagatggagatgtagggagagtactccctcaagtcaggtggcggg

SEQ ID NO: 418753 - DNA, 120 bp, Artificial Sequence
  ENSG00000149927_24 (sequence is synthesized)
cagcgaaacccaggctctggagagacctctgcctttgtgcttggatttgcagctgggaccttccctgatggtcagggctgtgcagcagagaggccaccttggtttcagctattcgggtgg

SEQ ID NO: 418754 - DNA, 120 bp, Artificial Sequence
  ENSG00000149927_25 (sequence is synthesized)
aatggaggggaggccagaggccaaaaccagaatgagaccaaaaaatgagcgctcaccagggcccagcccaggcttagcattttcacatttctttctttcccttgactatctccatttaca

SEQ ID NO: 418755 - DNA, 120 bp, Artificial Sequence
  ENSG00000149927_26 (sequence is synthesized)
tgacttgcccaaggtcacacaggtggctcagaagtggcagggctgggatctgcccatcctccatgccacagatgcccagcctggtagtgggtcactgcggaggcagggcagggactgcag

SEQ ID NO: 418756 - DNA, 120 bp, Artificial Sequence
  ENSG00000149927_27 (sequence is synthesized)
gaggacaggtggctggaaagcaatcatttcttagtgagtccctgcggggctggctctctgctgcatgcaggaaaaggacgggggttcccgaggaggcgtggggtactggtctggctgccc

SEQ ID NO: 418757 - DNA, 120 bp, Artificial Sequence
  ENSG00000149927_28 (sequence is synthesized)
aaggctccaaggcccttctagctctcacggcctgtgtctatggccacatccaccgtggtgttcggctcctgcccccaggccctgaatggaggcagtgagcagcgtgctccaagatttctg

SEQ ID NO: 418758 - DNA, 120 bp, Artificial Sequence
  ENSG00000149927_29 (sequence is synthesized)
agggcttcccacaatggctgagcatgtcctgatggaccagggacagccgggtggctgcagagggagggacagaggaatgggcaaatctgcttgtccttctcaagtgccagcctgtcttcc

SEQ ID NO: 418759 - DNA, 120 bp, Artificial Sequence
  ENSG00000149927_30 (sequence is synthesized)
agatgagacgtagtgtttagggcagagctgggctggtccaaggcccttcctacaccccggaacggggctcaggtaccccaggggccctgacactgcagttcccgaccaggatcgccgtct

SEQ ID NO: 418760 - DNA, 120 bp, Artificial Sequence
  ENSG00000149927_31 (sequence is synthesized)
gtgtgggggctgcaggggcgccaggggagggggccctggggaggccaggcttccagaaccttctctttgccccctcagctggcgtccccctcttccatgtcagcggcgctgaggggcatc

SEQ ID NO: 418761 - DNA, 120 bp, Artificial Sequence
  ENSG00000149927_32 (sequence is synthesized)
ctccgcgctctcctcgccggccgccgccgcccagcctgcgcccgccgtccccccagtgcctgggcacctgttggaggcagaggcaggaagggaggccagtgagggccccacagaccgagg

SEQ ID NO: 418762 - DNA, 120 bp, Artificial Sequence
  ENSG00000149927_33 (sequence is synthesized)
aacgaaggtgcgtgctcagcggactctgcagacccagtgccgcgacttcccctaaagccaggcgtgtatctgcgcgtgtgaggtgctctgccgcaaccctatgcagagagcagggtctca

SEQ ID NO: 418763 - DNA, 82 bp, Artificial Sequence
  ENSG00000149927_34 (sequence is synthesized)
ctctgttacccaggctggagtgcagtggagtgattatagcttactgcagccttgaccttctgggctcaagagatcctcccag

SEQ ID NO: 418764 - DNA, 120 bp, Artificial Sequence
  ENSG00000149927_35 (sequence is synthesized)
acagctcgactccgcgctctcctcgccggccgccgccgcccagcctgcgcccgccgtccccccagtgcctgggcacctgttggaggcagaggaagggaggccagtgagggccccacagac

SEQ ID NO: 418765 - DNA, 120 bp, Artificial Sequence
  ENSG00000149927_36 (sequence is synthesized)
ccttcccaggcctgctccttcgtcctgcccttgccccctccttctgggctcctccagggtccagctctacaagagggatggagagaggtgccgggagcctctagccctctcccctgccct

SEQ ID NO: 418766 - DNA, 120 bp, Artificial Sequence
  ENSG00000149927_37 (sequence is synthesized)
agaagaggagaggagaagagaggttgggaccagtcttcaccccctggaatgtcgctgatgataaaaccataatggtggcagccccagcatttacaaagaggagggatgcggcacggccat

SEQ ID NO: 418767 - DNA, 120 bp, Artificial Sequence
  ENSG00000149927_38 (sequence is synthesized)
cttgctgaaagcccgaactaaaggaagctgtgtttggacaacaggcacaatttggggtggtggcacagggccacacacctccggttaccccttggatcaaccacaggtaacctatgcatg

SEQ ID NO: 418768 - DNA, 120 bp, Artificial Sequence
  ENSG00000149927_39 (sequence is synthesized)
ccctaggaaaggcgcagcggggcggactcccgggcctcctcccgcctcttccacaggttgcatccgcggctgcaggaaaacggatggctgggaatggccgtcgggggttggtcagaggaa

SEQ ID NO: 418769 - DNA, 120 bp, Artificial Sequence
  ENSG00000149927_40 (sequence is synthesized)
gtccctcggccctttccgaggcacatctcttggccatccacgcgtccttcgcagactccgctccctgcacctccgtttcctcttctgtggccggcggctcccccgtggccaccccatctc

SEQ ID NO: 418770 - DNA, 120 bp, Artificial Sequence
  ENSG00000149927_41 (sequence is synthesized)
ccatctctgccacctcccaacagccatttccactcctgcggccccatcccagctaaggagagcgcccttctgattggcaggtgggcctgtctgtcacgggcatgttccatcccacccaag

SEQ ID NO: 418771 - DNA, 120 bp, Artificial Sequence
  ENSG00000149927_42 (sequence is synthesized)
gctaggattacaggcacccgccaccactctcggccccatttctcttatttaaaaaaaaaaaaattgccgtgaaatacgcatatcgaaatgtaccatcttcaccatttttaagggtaagat

SEQ ID NO: 418772 - DNA, 120 bp, Artificial Sequence
  ENSG00000149927_43 (sequence is synthesized)
tttttaagggtaagattaggtggtgttaggtatgttcagttgtcgtgcaaccagattgctgttttaaataacagcacttagagatgccgacttcgtgccaggcccagtttgggacattag

SEQ ID NO: 418773 - DNA, 120 bp, Artificial Sequence
  ENSG00000149927_44 (sequence is synthesized)
ggactcccagatgaatcagccgctccagtggaactccctgctggtgggggaggcactggcgaagcggtgctgagccgagtcctgacggcgctggagctgaggggcagtgcgggatgcccc

SEQ ID NO: 418774 - DNA, 120 bp, Artificial Sequence
  ENSG00000149927_45 (sequence is synthesized)
gagacacagttaccattcttgtgcaggcctccagaaacaacatatgaacaactaagcaaacacggctaagctctttccctctcaaatggcagtattccaagcatgcttctctgcacttgc

SEQ ID NO: 418775 - DNA, 120 bp, Artificial Sequence
  ENSG00000149927_46 (sequence is synthesized)
ggtgagggaggagctggctgcgggtgttgagggcgggcaagtggcagggaggtggccctgaccctgcccacctgctccccaggtggcgtgtccctggggccaggtgcccgaggcgaggct

SEQ ID NO: 418776 - DNA, 120 bp, Artificial Sequence
  ENSG00000149927_47 (sequence is synthesized)
agagccctggaaccacactcaccagttctcaggactccttctccagccaactcagcatggggccttgtcttgctatctatattctctgcctaggtgatctcatccatactcgtggcttta

SEQ ID NO: 418777 - DNA, 120 bp, Artificial Sequence
  ENSG00000149927_48 (sequence is synthesized)
aataccatctatatgccagtgactcacaaatgtatatttccagcccagacctctccttggagctccagactccgagatgtctgtttgtgatgtccaaatacatctccaaggcaatggatc

SEQ ID NO: 418778 - DNA, 120 bp, Artificial Sequence
  ENSG00000149927_49 (sequence is synthesized)
aagatgatacagggacaacctagaagtgggtgggtgaggacggggtggtgcaacctcgacttctgcaaggagtgggttggcagcccagcccctgtggagtcagcttggggtctgcagggc

SEQ ID NO: 418779 - DNA, 120 bp, Artificial Sequence
  ENSG00000149927_50 (sequence is synthesized)
ccaggcctcccacctgccaccggctggcacacaccaccctctccctcgacacctaggaagggaggccagtgagggccccacagaccgaggaggccgtcgcctggccctcagccaggatgg

SEQ ID NO: 418780 - DNA, 120 bp, Artificial Sequence
  ENSG00000149929_0 (sequence is synthesized)
gggttgagcaaaatggcgcgggagaaggagatgcaggagttcacccgtagcttcttccgaggccgcccggacctcagcacgcttacgcattccatcgtgcggcggaggtacttagctcac

SEQ ID NO: 418781 - DNA, 120 bp, Artificial Sequence
  ENSG00000149929_1 (sequence is synthesized)
tcgggccgcagccacctggagcccgaggagaagcaggcactgaagcggctggtggaggaggagctgctgaagatgcaggtggatgaagccgcttccagggaagacaaactggaccttacc

SEQ ID NO: 418782 - DNA, 120 bp, Artificial Sequence
  ENSG00000149929_2 (sequence is synthesized)
aagaagggcaagaggcctcccaccccttgtagcgacccggagagaaaaaggttccgcttcaattcagagtcggagtccggctctgaagcctccagcccagactactttggacccccagca

SEQ ID NO: 418783 - DNA, 120 bp, Artificial Sequence
  ENSG00000149929_3 (sequence is synthesized)
aagaatggggtggcagcagaagtcagcccagccaaagaggagaatccaaggcgagcctcaaaggcagttgaggagagcagtgatgaggaacggcagagggacctgcccgcacagagggga

SEQ ID NO: 418784 - DNA, 120 bp, Artificial Sequence
  ENSG00000149929_4 (sequence is synthesized)
gaggagagcagtgaggaggaggaaaaggggtacaaggggaagactaggaagaaacctgtggtaaagaagcaggcaccaggcaaggcctcagtcagtaggaagcaggccagggaagaaagt

SEQ ID NO: 418785 - DNA, 120 bp, Artificial Sequence
  ENSG00000149929_5 (sequence is synthesized)
gaggagagcgaggcagaacccgttcagaggacagcaaagaaggtggagggaaataaaggaactaaaagcctgaaggaaagtgaacaggagagtgaagaggagatcctagcccagaagaaa

SEQ ID NO: 418786 - DNA, 120 bp, Artificial Sequence
  ENSG00000149929_6 (sequence is synthesized)
gagcagagagaggaggaagtggaggaggaagagaaagaagaggatgaggaaaagggggattggaaacccagaaccaggagcaatggccggagaaagtcagctagggaggagaggagctgt

SEQ ID NO: 418787 - DNA, 120 bp, Artificial Sequence
  ENSG00000149929_7 (sequence is synthesized)
aagcagaaaagccaggcaaagaggctcttgggagactcagacagcgaggaagagcagaaagaggcagccagcagtggggatgacagtgggagagatagagaacccccagtgcagaggaag

SEQ ID NO: 418788 - DNA, 120 bp, Artificial Sequence
  ENSG00000149929_8 (sequence is synthesized)
agtgaggacaggacccagcttaagggtgggaagaggttgagtggaagcagcgaggacgaggaagacagtgggaagggggaacccacagctaaaggctctagaaagatggccagactgggc

SEQ ID NO: 418789 - DNA, 120 bp, Artificial Sequence
  ENSG00000149929_9 (sequence is synthesized)
agcaccagtggtgaggaaagtgacttggagagggaggtaagtgacagcgaggcagggggaggcccccagggggagaggaagaaccgctcttccaagaagagctccaggaaaggcaggaca

SEQ ID NO: 418790 - DNA, 120 bp, Artificial Sequence
  ENSG00000149929_10 (sequence is synthesized)
aaggagggaaggctggctcaggtcgccgtggagaggaccacccggctgtgatgaggctgaagcgctacattcgggcctgtggtgcccatcgaaactacaagaagctgttgggctcctgtt

SEQ ID NO: 418791 - DNA, 120 bp, Artificial Sequence
  ENSG00000149929_11 (sequence is synthesized)
gctcacacaaggagcgcctgagtatcctccgggcagaactggaagcgctaggcatgaagggtaccccttccctagggaagtgtcgggccctgaaggagcagagggaggaggcagctgagg

SEQ ID NO: 418792 - DNA, 120 bp, Artificial Sequence
  ENSG00000149929_12 (sequence is synthesized)
tggcctccttggatgttgcgaacatcatcagtggctcgggccggccacgcagacgtacagcctggaaccctttaggagaagcagcacccccaggggagctgtaccgacggaccctggact

SEQ ID NO: 418793 - DNA, 120 bp, Artificial Sequence
  ENSG00000149929_13 (sequence is synthesized)
cagatgaagagcggccccgtcccgcacccccagactggtcacatatgcgtggcatcatcagcagtgatggcgagagtaactgagctctgccacccccaggagggacccttgatacatgta

SEQ ID NO: 418794 - DNA, 120 bp, Artificial Sequence
  ENSG00000149929_14 (sequence is synthesized)
caaagcatacatagcaccccttgccctgtgtctgtggaacagaagcagcttccttcagagaagactgcagctcccaaggacacaagctgttgggatgctacttctcagcttcacgctgtc

SEQ ID NO: 418795 - DNA, 120 bp, Artificial Sequence
  ENSG00000149929_15 (sequence is synthesized)
cctttaaggtgtttattttttaagactcaataaaggagtgtttttaatcacctcatcaaatttggtcccccattctcacctcctgtattttgggccaggaaactgagcagtagtcactgc

SEQ ID NO: 418796 - DNA, 120 bp, Artificial Sequence
  ENSG00000149929_16 (sequence is synthesized)
ctccacctcctcccctggcctggttccctttaatttcccccgggttcctggaagaagtccctgcctccagaccctgtcatccaacagccaccagacccttttggagaagggtgtgtggct

SEQ ID NO: 418797 - DNA, 120 bp, Artificial Sequence
  ENSG00000149929_17 (sequence is synthesized)
cctgtgctgcccgcctaccccgtggcccctctgcttttagcctagtctgataacctaatgcccacttgggagagggatagaatgacttgagggcagccagtgcttaagccttctccctta

SEQ ID NO: 418798 - DNA, 120 bp, Artificial Sequence
  ENSG00000149929_18 (sequence is synthesized)
tgcaaacagccactttgtccatgggctgttagcctcaaaggggtggggaaaagcccatacctcctgggccagtcctagccctctaggcctctggctacaggcccagcctctgcagtcaca

SEQ ID NO: 418799 - DNA, 120 bp, Artificial Sequence
  ENSG00000149929_19 (sequence is synthesized)
tgaggtctccactgaactctggctgctgaggcttgcgggaagattcgtgagcatggagctgcctggggtctgtgtgggaggcaaacctaagaatctttgaagtcaaagcaaagaaaacga

SEQ ID NO: 418800 - DNA, 120 bp, Artificial Sequence
  ENSG00000149929_20 (sequence is synthesized)
attagaggtcaaggggttgaagaccacctttgagatccgagatctggtcacacctaaagtcattaaaatcactgaaatgtttagatacacagcccaataaattctctttataaaacacaa

SEQ ID NO: 418801 - DNA, 120 bp, Artificial Sequence
  ENSG00000149929_21 (sequence is synthesized)
tggaaagcgccgttcctgactctaatgtacttagacacttgaagccacaaaaggatttatccccgaggttcctcatctgctcgcgaggatgccttttctcttctgccttgcgaaataaca

SEQ ID NO: 418802 - DNA, 120 bp, Artificial Sequence
  ENSG00000149929_22 (sequence is synthesized)
gcagcctagctgttgcccgtgaccagtgagaaaggcagcgtcgcgggctgattaggtttcacccaaagggtgccggcgccgaattggtttctaacgagaacttttaaaatgatccgttcc

SEQ ID NO: 418803 - DNA, 120 bp, Artificial Sequence
  ENSG00000149929_23 (sequence is synthesized)
aaaaaagggtaggagccgcgagaccctccaactgcccagagaaaacaagtctcgtctggcaaagttctcggcccacgcggtccgcggccaagggccaacggtccctcgccccacgttgcc

SEQ ID NO: 418804 - DNA, 120 bp, Artificial Sequence
  ENSG00000149929_24 (sequence is synthesized)
aggagctgctgaagatgcaggtgtgccgggccggagcctgggccgcgggaggcggaggcggggcttgctgctgaggaggaggggcctgacggggcgcggtgagcgcagccttggtgcata

SEQ ID NO: 418805 - DNA, 120 bp, Artificial Sequence
  ENSG00000149929_25 (sequence is synthesized)
cacccgtagcttcttccgaggccgcccggacctcagagtccggctctgaagcctccagcccagactactttggacccccagcaaagaatggggtggcagcagaagtcagcccagccaaag

SEQ ID NO: 418806 - DNA, 120 bp, Artificial Sequence
  ENSG00000149929_26 (sequence is synthesized)
gagagaatcaccagcttcttctgccccaggtaccccttccctagggaagtgtcgggccctgaaggagcagagggaggaggcagctgaggtggcctccttggatgttgcgaacatcatcag

SEQ ID NO: 418807 - DNA, 120 bp, Artificial Sequence
  ENSG00000149929_27 (sequence is synthesized)
gttggttcactcaagaagcattcactgcgcatctcttatgtccccaggcgttagatgagggagcaaggctagtgagtcaggaaccgggaacagcaagtacagatagctgtttcctgctgc

SEQ ID NO: 418808 - DNA, 120 bp, Artificial Sequence
  ENSG00000149929_28 (sequence is synthesized)
ccctccaactgtcagggcagggctcgaggcaacctatccgaagtgaagggagaagggacaggaggagcctgtctcaaccctctctcctctccatattccagagtccggctctgaagcctc

SEQ ID NO: 418809 - DNA, 120 bp, Artificial Sequence
  ENSG00000149930_0 (sequence is synthesized)
agaatttcaaatatcaggttcaggcccctgcgtgcaccagtatccggggttcattccccgggcgttcaaatatcggattcagtctccatcccgttcagatattcggggttcagaccccac

SEQ ID NO: 418810 - DNA, 120 bp, Artificial Sequence
  ENSG00000149930_1 (sequence is synthesized)
aatcagaaatccggaattcggcagctgtcgccctcgacgagggggaggactggaccgcgaggtcagattaggttgtcaccccctcccctccaggggaggcttcccgggcccgcccctcag

SEQ ID NO: 418811 - DNA, 120 bp, Artificial Sequence
  ENSG00000149930_2 (sequence is synthesized)
gaagggcgaaagccgaggaagaggtggcaaggggaaaggtctccttgcccctctccctgcttggcagagccgctggaggaccccaggcggaagcggaggcgctggggcaccatagtgacc

SEQ ID NO: 418812 - DNA, 120 bp, Artificial Sequence
  ENSG00000149930_3 (sequence is synthesized)
cctaccaggccaggccccactctcagggcccccaggggccaccatgccagctgggggccgggccgggagcctgaaggacccagatgtggctgagctcttcttcaaggatgacccagaaaa

SEQ ID NO: 418813 - DNA, 120 bp, Artificial Sequence
  ENSG00000149930_4 (sequence is synthesized)
gctcttctctgacctccgggaaattggccatggcagctttggagccgtatactttgcccgggatgtccggaatagtgaggtggtggccatcaagaagatgtcctacagtgggaagcagtc

SEQ ID NO: 418814 - DNA, 120 bp, Artificial Sequence
  ENSG00000149930_5 (sequence is synthesized)
caatgagaaatggcaagacatcatcaaggaggtgcggttcttacagaagctccggcatcccaacaccattcagtaccggggctgttacctgagggagcacacggcttggctggtaatgga

SEQ ID NO: 418815 - DNA, 120 bp, Artificial Sequence
  ENSG00000149930_6 (sequence is synthesized)
gtattgcctgggctcagcttctgaccttctagaagtgcacaagaaaccccttcaggaggtagagatcgcagctgtgacccacggggcgcttcagggcctggcatatctgcactcccacaa

SEQ ID NO: 418816 - DNA, 120 bp, Artificial Sequence
  ENSG00000149930_7 (sequence is synthesized)
catgatccatagggatgtgaaggctggaaacatcctgctgtcagagccagggttagtgaagctaggggactttggttctgcgtccatcatggcacctgccaactccttcgtgggcacccc

SEQ ID NO: 418817 - DNA, 120 bp, Artificial Sequence
  ENSG00000149930_8 (sequence is synthesized)
atactggatggcacccgaggtgatcctggccatggatgaggggcagtacgatggcaaagtggacgtctggtccttggggataacctgcatcgagctggctgaacggaaaccaccgctctt

SEQ ID NO: 418818 - DNA, 120 bp, Artificial Sequence
  ENSG00000149930_9 (sequence is synthesized)
taacatgaatgcgatgagtgccttataccacattgcacagaacgaatcccccgtgctccagtcaggacactggtctgagtacttccggaattttgtcgactcctgtcttcagaaaatccc

SEQ ID NO: 418819 - DNA, 120 bp, Artificial Sequence
  ENSG00000149930_10 (sequence is synthesized)
tcaagacagaccaacctcagaggttctcctgaagcaccgctttgtgctccgggagcggccacccacagtcatcatggacctgatccagaggaccaaggatgccgtgcgggagctggacaa

SEQ ID NO: 418820 - DNA, 120 bp, Artificial Sequence
  ENSG00000149930_11 (sequence is synthesized)
cctgcagtaccgcaagatgaagaagatcctgttccaagaggcacccaacggccctggtgccgaggccccagaggaggaagaggaggccgagccctacatgcaccgggccgggactctgac

SEQ ID NO: 418821 - DNA, 120 bp, Artificial Sequence
  ENSG00000149930_12 (sequence is synthesized)
cagcctcgagagtagccactcagtgcccagcatgtccatcagcgcctccagccagagcagctccgtcaacagcctagcagatgcctcagacaacgaggaagaggaggaggaggaggagga

SEQ ID NO: 418822 - DNA, 120 bp, Artificial Sequence
  ENSG00000149930_13 (sequence is synthesized)
agaggaggaggaggaagaaggccctgaagcccgggagatggccatgatgcaggagggggagcacacagtcacctctcacagctccattatccaccggctgccgggctctgacaacctata

SEQ ID NO: 418823 - DNA, 120 bp, Artificial Sequence
  ENSG00000149930_14 (sequence is synthesized)
tgatgacccctaccagccagagataacccccagccctctccagccgcctgcagccccagctcccacttccaccacctcttccgcccgccgccgggcctactgccgtaaccgagaccactt

SEQ ID NO: 418824 - DNA, 120 bp, Artificial Sequence
  ENSG00000149930_15 (sequence is synthesized)
tgccaccatccgaaccgcctccctggtcagccgtcagatccaggagcatgagcaggactctgcgctgcgggagcagctgagcggctataagcggatgcgacgacagcaccagaagcagct

SEQ ID NO: 418825 - DNA, 120 bp, Artificial Sequence
  ENSG00000149930_16 (sequence is synthesized)
gctggccctggagtcacggctgaggggtgaacgggaggagcacagtgcacggctgcagcgggagcttgaggcgcagcgggctggctttggggcagaggcagaaaagctggcccggcggca

SEQ ID NO: 418826 - DNA, 120 bp, Artificial Sequence
  ENSG00000149930_17 (sequence is synthesized)
cggaagttccagcagcacatccttgggcagcagaagaaggagctggctgccctgctggaggcacagaagcggacctacaaacttcgcaaggaacagctgaaggaggagctccaggagaac

SEQ ID NO: 418827 - DNA, 120 bp, Artificial Sequence
  ENSG00000149930_18 (sequence is synthesized)
cccagcactcccaagcgggagaaggccgagtggctgctgcggcagaaggagcagctccagcagtgccaggcggaggaggaagcagggctgctgcggcggcagcgccagtactttgagctg

SEQ ID NO: 418828 - DNA, 120 bp, Artificial Sequence
  ENSG00000149930_19 (sequence is synthesized)
cagtgtcgccagtacaagcgcaagatgttgctggctcggcacagcctggaccaggacctgctgcgggaggacctgaacaagaagcagacccagaaggacttggagtgtgcactgctgctt

SEQ ID NO: 418829 - DNA, 120 bp, Artificial Sequence
  ENSG00000149930_20 (sequence is synthesized)
cggcagcacgaggccacgcgggagctggagctgcggcagctccaggccgtgcagcgcacgcgggctgagctcacccgcctgcagcaccagacggagctgggcaaccagctggagtacaac

SEQ ID NO: 418830 - DNA, 120 bp, Artificial Sequence
  ENSG00000149930_21 (sequence is synthesized)
aagcggcgtgagcaagagttgcggcagaagcatgcggcccaggttcgccagcagcccaagagcctcaaatctaaggagctgcagatcaagaagcagttccaggagacgtgtaagatccag

SEQ ID NO: 418831 - DNA, 120 bp, Artificial Sequence
  ENSG00000149930_22 (sequence is synthesized)
actcggcagtacaaggctctgcgagcacacttgctggagaccacgcccaaagctcagcacaagagcctccttaagcggctcaaggaagagcagacccgcaagctggcgatcttggcggag

SEQ ID NO: 418832 - DNA, 120 bp, Artificial Sequence
  ENSG00000149930_23 (sequence is synthesized)
cagtatgaccagtccatctcagagatgctcagctcacaggcgctgcggcttgatgagacccaggaggcagagttccaggcccttcggcagcagcttcaacaggagctggagctgctcaac

SEQ ID NO: 418833 - DNA, 120 bp, Artificial Sequence
  ENSG00000149930_24 (sequence is synthesized)
gcttaccagagcaagatcaagatccgcacagagagccagcacgagagggagctgcgggagctggagcagagggtcgcgctgcggcgggcactgctggagcagcgggtggaagaggagctg

SEQ ID NO: 418834 - DNA, 120 bp, Artificial Sequence
  ENSG00000149930_25 (sequence is synthesized)
ctggccctgcagacaggacgctccgagcgaatccgcagtctgcttgagcggcaggcccgtgagatcgaggccttcgatgcggaaagcatgaggctgggcttctccagcatggctctgggg

SEQ ID NO: 418835 - DNA, 120 bp, Artificial Sequence
  ENSG00000149930_26 (sequence is synthesized)
ggcatcccggctgaagctgctgcccagggctatcctgctccaccccctgccccagcctggccctcccgtcccgttccccgttctggggcacactggagccatggccctcctccaccaggc

SEQ ID NO: 418836 - DNA, 120 bp, Artificial Sequence
  ENSG00000149930_27 (sequence is synthesized)
atgccccctccagcctggcgtcagccgtctctgctggctcccccaggccccccaaactggctggggccccccacacaaagtgggacaccccgtggcggagccctgctgctgctaagaaac

SEQ ID NO: 418837 - DNA, 120 bp, Artificial Sequence
  ENSG00000149930_28 (sequence is synthesized)
agcccccagcccctgcggcgggcagcctcggggggcagtggcagtgagaatgtgggcccccctgctgccgcggtgcccgggcccctgagccgcagcaccagtgtcgcttcccacatcctc

SEQ ID NO: 418838 - DNA, 120 bp, Artificial Sequence
  ENSG00000149930_29 (sequence is synthesized)
aatggttcttcccacttctattcctgaggtgcagcggggaggagcagatgagctgggcagggcaggggtgggtggagcctgaccctggagggcactgagctggaggcccctgcaagggta

SEQ ID NO: 418839 - DNA, 120 bp, Artificial Sequence
  ENSG00000149930_30 (sequence is synthesized)
ggggacaagatgtaggctccagctcccctcagacctcctcatctcatgagcttcttggggctggccagtggcccagggccagcttggcgataggtgcctcaaggctgcctgggagccccg

SEQ ID NO: 418840 - DNA, 120 bp, Artificial Sequence
  ENSG00000149930_31 (sequence is synthesized)
cctccctaccatggtgccaggggtctccctccgccacctaggaaaggagggagatgtgcgtgtcaaatattcatctagtcccctgggggaggggaagggtgggtctagacatactatatt

SEQ ID NO: 418841 - DNA, 120 bp, Artificial Sequence
  ENSG00000149930_32 (sequence is synthesized)
cagagaactatactaccctcacagtgaggccctcagacctgccacagggcagagcaggtctggggcctgaggcagggagaatgagaggccaccttactggcaggaaggatcaggatgggg

SEQ ID NO: 418842 - DNA, 120 bp, Artificial Sequence
  ENSG00000149930_33 (sequence is synthesized)
tcttggggtcaggatgcctgggtctcttcccgtaactgtctgacgtcctgtgccgtcttgtcctttatctttttttttttttttttaattgggatcagggctggggcggggaaacaaggg

SEQ ID NO: 418843 - DNA, 120 bp, Artificial Sequence
  ENSG00000149930_34 (sequence is synthesized)
aaggaccttggaaggggctgctcccaggcctggggggcagtcgtgggagcccctctcagctgtggggctggcacagagccccaggcaagcttttaataaactgttggttattctaacaga

SEQ ID NO: 418844 - DNA, 120 bp, Artificial Sequence
  ENSG00000149930_35 (sequence is synthesized)
gcccacccaacacaggcacccctatagaacagcagccctgctcacctggccaggaggcagtcctggaccaaagaatgcttggcgaggaggaggaagcagttggagagagaaggattctgg

SEQ ID NO: 418845 - DNA, 120 bp, Artificial Sequence
  ENSG00000149930_36 (sequence is synthesized)
ctggttgatgaggaagtttggggtctgcctgaggagatagaggagcttagggtgccctcccttgtaccccaggagaggagcattgttggccaggaggaggctgggacatggagcttgtgg

SEQ ID NO: 418846 - DNA, 120 bp, Artificial Sequence
  ENSG00000149930_37 (sequence is synthesized)
gggaaggaggatgagagtcttctggatgaggagtttgagcttggctgggtccagggcccagcactgactcccgtccctgaggaggaggaagaagaggaagagggggctccgattgggacc

SEQ ID NO: 418847 - DNA, 120 bp, Artificial Sequence
  ENSG00000149930_38 (sequence is synthesized)
cctagggatcctggagatggttgtccttcccccgacatccctcctgaaccccctccaacacacctgaggccctgccctgccagccagctccctggactcctgtcccatggcctcctggcc

SEQ ID NO: 418848 - DNA, 120 bp, Artificial Sequence
  ENSG00000149930_39 (sequence is synthesized)
ggcctctcctttgcagtggggtcctcctctggcctcctgcccctcctgctgctgctgctgcttccattgctggcagcccagggtgggggtggcctgcaggcagcgctgctggcccttgag

SEQ ID NO: 418849 - DNA, 120 bp, Artificial Sequence
  ENSG00000149930_40 (sequence is synthesized)
gtggggctggtgggtctgggggcctcctacctgctcctttgtacagccctgcacctgccctccagtcttttcctactcctggcccagggtaccgcactgggggccgtcctgggcctgagc

SEQ ID NO: 418850 - DNA, 120 bp, Artificial Sequence
  ENSG00000149930_41 (sequence is synthesized)
tggcgccgaggcctcatgggtgttcccctgggccttggagctgcctggctcttagcttggccaggcctagctctacctctggtggctatggcagcggggggcagatgggtgcggcagcag

SEQ ID NO: 418851 - DNA, 120 bp, Artificial Sequence
  ENSG00000149930_42 (sequence is synthesized)
ggcccccgggtgcgccggggcatatctcgactctggttgcgggttctgctgcgcctgtcacccatggccttccgggccctgcagggctgtggggctgtgggggaccggggtctgtttgca

SEQ ID NO: 418852 - DNA, 120 bp, Artificial Sequence
  ENSG00000149930_43 (sequence is synthesized)
ctgtaccccaaaaccaacaaggatggcttccgcagccgcctgcccgtccctgggccccggcggcgtaatccccgcaccacccaacacccattagctctgttggcaagggtctgggtcctg

SEQ ID NO: 418853 - DNA, 120 bp, Artificial Sequence
  ENSG00000149930_44 (sequence is synthesized)
tgcaagggctggaactggcgtctggcacgggccagccagggtttagcatcccacttgcccccgtgggccatccacacactggccagctggggcctgcttcggggtgaacggcccacccga

SEQ ID NO: 418854 - DNA, 120 bp, Artificial Sequence
  ENSG00000149930_45 (sequence is synthesized)
atcccccggctactaccacgcagccagcgccagctagggccccctgcctcccgccagccactgccagggactctagccgggcggaggtcacgcacccgccagtcccgggccctgcccccc

SEQ ID NO: 418855 - DNA, 120 bp, Artificial Sequence
  ENSG00000149930_46 (sequence is synthesized)
ctcccttccagtctgtcttaagtactgatgccagagaggtctgcctaagctcagtgctgtcatttcactccctgtttggagccatgagtggccccctgttgccttcaagactgaagccat

SEQ ID NO: 418856 - DNA, 120 bp, Artificial Sequence
  ENSG00000149930_47 (sequence is synthesized)
ccccatccttcctcccaccaacctagaggctttgcttcgtaaatgctggccctttccttcatgggctccaccctctgagtgtgtcatgaactcttccacttccttgccttggttcgtatt

SEQ ID NO: 418857 - DNA, 120 bp, Artificial Sequence
  ENSG00000149930_48 (sequence is synthesized)
gggtcctctgcccgaggtcagagatttggacgagcccttctcctccatcttcacagtctccatttaccattagatgccaggcccagacagttgatgaaaaatgtaagaaacggacccaag

SEQ ID NO: 418858 - DNA, 120 bp, Artificial Sequence
  ENSG00000149930_49 (sequence is synthesized)
tataagaaaaagctagatctgtccattttatttctagtttttggaagagatgtggatacagagaaatattactctactattgaaaaaaatatatatcagtctgattataaatgtcaactc

SEQ ID NO: 418859 - DNA, 120 bp, Artificial Sequence
  ENSG00000149930_50 (sequence is synthesized)
atactaagtcaatatcagggaagcagtgtggagaaggatgtggcaaactggagattgctgtttccatagaaagagggcagctaatgcttatctccagaccattgttatgcagtaatgtag

SEQ ID NO: 418860 - DNA, 120 bp, Artificial Sequence
  ENSG00000149930_51 (sequence is synthesized)
actccatttcaccagatttaattcttaaggagaaactggaaacttgtattattatttgattattacttttggcagttaattttaaaaatcaccgtttaggccaaaacaacatgacatttg

SEQ ID NO: 418861 - DNA, 120 bp, Artificial Sequence
  ENSG00000149930_52 (sequence is synthesized)
tctgggctacaagggactcttagcgactcttagcttgcacttacctttctaatctcagggctttttacaaagcccttctctgaattccctgaagatatgctagcttgaaggctcactgca

SEQ ID NO: 418862 - DNA, 120 bp, Artificial Sequence
  ENSG00000149930_53 (sequence is synthesized)
tactctcaacttcccagccacttccctgtttccctcttataccagttaatactttgatgttattttttcagtcctatttaatcttttagactggaggttccttgagggtggggcctaatt

SEQ ID NO: 418863 - DNA, 120 bp, Artificial Sequence
  ENSG00000149930_54 (sequence is synthesized)
cttgtttttatcttccccatagcaattatcaagttatctgctccctttggcacctaagaaatattagttggggtgataactgaatggctgtccttctgccttcgttactgcttttgtgga

SEQ ID NO: 418864 - DNA, 120 bp, Artificial Sequence
  ENSG00000149930_55 (sequence is synthesized)
tgttattttctttgacccctattccacccgtgtgcagtggagaggatgggtgttgtattttacagaggaaggaattaactgagacgcaacaggatgatgggaacttctcaaggtcatgtg

SEQ ID NO: 418865 - DNA, 120 bp, Artificial Sequence
  ENSG00000149930_56 (sequence is synthesized)
gcaaggaagtcaaggaattggggtttgaacccaagtcgtctcagttccattccattgtcctctaccccctgccacctctcaccttcttccctttcacctttttctgtagctgaacggaaa

SEQ ID NO: 418866 - DNA, 120 bp, Artificial Sequence
  ENSG00000149930_57 (sequence is synthesized)
cagtgaagtttctccagtccctagtcctctcttttcacccaccttcctcagtttgctcacttaccccaggcccagcccttcggacctctagacaggcagcctcctcagctgtggagtcca

SEQ ID NO: 418867 - DNA, 120 bp, Artificial Sequence
  ENSG00000149930_58 (sequence is synthesized)
gcagtcactctgtgttctcctggcgctcctcccctaagttattgctgttcgcccgctgtgtgtgctcatcctcaccctcattgactcaggcctggggccaggggtggtggagggtgggaa

SEQ ID NO: 418868 - DNA, 120 bp, Artificial Sequence
  ENSG00000149930_59 (sequence is synthesized)
gagtcatgttttttttctcctctttgattttgtttttctgtctcccttccaacctgtccccttccccccaccaaaaaaagaaaaagacaaacacaaataaaatatctgagcggaactgtg

SEQ ID NO: 418869 - DNA, 120 bp, Artificial Sequence
  ENSG00000149930_60 (sequence is synthesized)
ctccatcttggaattgggaggaagagggagagggagaccgggacgagaccggggctgtggtgcggagagaggctgagacggagaagaggagaggcagagagggcgcggggaccgtcagca

SEQ ID NO: 418870 - DNA, 120 bp, Artificial Sequence
  ENSG00000149930_61 (sequence is synthesized)
gcaccttagctacaatcgttcagctattctcggaagagagaagggagagggaggaggccggggcgggagtgggggctgtcaccctcggaccccggcgtgagaggggccgtgcggccggac

SEQ ID NO: 418871 - DNA, 120 bp, Artificial Sequence
  ENSG00000149930_62 (sequence is synthesized)
gtcctcggggtgggcccccagtcggtggccgaagacctacagctcaggcccctgggtcccaaatttccaggctttgcccctcctcctttctcagatacccgggtaacagtcctcatagtc

SEQ ID NO: 418872 - DNA, 120 bp, Artificial Sequence
  ENSG00000149930_63 (sequence is synthesized)
cttgggaaactcacatactctccctctgttcgtgttctccacaatgatttatttcatattctcctcagtggttttattctttctcttagtattttcttaaggtcttgacaaagccatgtg

SEQ ID NO: 418873 - DNA, 120 bp, Artificial Sequence
  ENSG00000149930_64 (sequence is synthesized)
cctattcccaagaaccaccaaggaaaagagtggctattatttttttcctgggcctgagttagtttaatgggtaaacagggtgcagattaaagtgagtgtggccctcaagcccatttactc

SEQ ID NO: 418874 - DNA, 120 bp, Artificial Sequence
  ENSG00000149930_65 (sequence is synthesized)
agacttctggaggattttgaaagttgctgttctaaaaaaatgatcacacctaacactggaatgggccacttaaaatgtgcggagagggtggagagtggaaacgccccacccaaggctgtt

SEQ ID NO: 418875 - DNA, 120 bp, Artificial Sequence
  ENSG00000149930_66 (sequence is synthesized)
ctctcacccagtcccacctctcccaggtaacttgttaataattaactgtattttgtgttttttcagtgcacattttgaaaaattatatgaattttaaacacagatggaatcatactttac

SEQ ID NO: 418876 - DNA, 120 bp, Artificial Sequence
  ENSG00000149930_67 (sequence is synthesized)
atttactttctgtaacttcttttttccacttaatatttcttggacatcttcccctgtcagtacacctgtctcattttttttacagcatagaattttccatggtatggctgtaccataatt

SEQ ID NO: 418877 - DNA, 120 bp, Artificial Sequence
  ENSG00000149930_68 (sequence is synthesized)
tatttaacccatcccttattggtggacatttaggttgtttccagtattttgctatcacaacgcttccgtgaacacctcgagcacatgtgcaagtatacctgggggatagattctgcagtg

SEQ ID NO: 418878 - DNA, 120 bp, Artificial Sequence
  ENSG00000149930_69 (sequence is synthesized)
taattgctgtgccacagggtatgaccatcttccattctgatagatgttgagaccgctgcttcttgaaaccttagggcccaggcctacctggggcaggggaggatagtgggggtgggggag

SEQ ID NO: 418879 - DNA, 120 bp, Artificial Sequence
  ENSG00000149932_0 (sequence is synthesized)
ccccgctcgtgacgtcgcggggggcgccggcctccgcccggccccgagggcaggctctccccggaggctcagccccctctgctccccatgggcaactgccaggcagggcacaacctgcac

SEQ ID NO: 418880 - DNA, 120 bp, Artificial Sequence
  ENSG00000149932_1 (sequence is synthesized)
gcacctgtgtctggcccaccacccacctctggtctgtgccactttgatcctgctgctccttggcctctctggcctgggccttggcagcttcctcctcacccacaggactggcctgcgcag

SEQ ID NO: 418881 - DNA, 120 bp, Artificial Sequence
  ENSG00000149932_2 (sequence is synthesized)
ccctgacatcccccaggactgggtctcttttttgagatcttttggccagctgaccctgtgtcccaggaatgggacagtcacagggaagtggcgagggtctcacgtcgtgggcttgctgac

SEQ ID NO: 418882 - DNA, 120 bp, Artificial Sequence
  ENSG00000149932_3 (sequence is synthesized)
gtccttatcacagccagggtgaccacagaaaggactgcaggaacctgcctatattttagtgctgttccaggaatcctaccctccagccagccacccatatcctgctcagaggagggggct

SEQ ID NO: 418883 - DNA, 120 bp, Artificial Sequence
  ENSG00000149932_4 (sequence is synthesized)
ggaaatgccaccctgagccctagaatgggtgaggaatgtgttagtgtctggagccatgaaggccttgtgctgaccaagctgctcacctcggaggagctggctctgtgtggctccaggctg

SEQ ID NO: 418884 - DNA, 120 bp, Artificial Sequence
  ENSG00000149932_5 (sequence is synthesized)
ctggtcttgggctccttcctgcttctcttctgtggccttctctgctgtgtcactgctatgtgcttccacccgcgccgggagtcccactggtctagaacccggctctgagggcactggcct

SEQ ID NO: 418885 - DNA, 120 bp, Artificial Sequence
  ENSG00000149932_6 (sequence is synthesized)
agttcccgacttgtttctcaggtgtgaatcaacttcttgggccttggctctgagttggaaaaggttttagaaaaagtgaagagctggaatgtgggggaaaataaaaagcttttttgccca

SEQ ID NO: 418886 - DNA, 120 bp, Artificial Sequence
  ENSG00000149932_7 (sequence is synthesized)
agggaacaagcttcaattgaatgaaactggcttgaccacagaggaatctgggggactttctgagcttcgcggacttgtgccgcctcctgactttaagctggctctggaggaggaggaagt

SEQ ID NO: 418887 - DNA, 120 bp, Artificial Sequence
  ENSG00000149932_8 (sequence is synthesized)
agagcagatccttggacttttcctcaaagactgctgcttctgagtccccgagaacctcttcaaccacagctctcccttagggactgggaacaatttgacaccgtcagcattcaatatttt

SEQ ID NO: 418888 - DNA, 120 bp, Artificial Sequence
  ENSG00000149932_9 (sequence is synthesized)
tctaattactttaacttttttattataaaatagttaacacttatgtagaaaagtccaatagtataaaaggacagcttggcaaattattataaagtggatacttataaataccactgagta

SEQ ID NO: 418889 - DNA, 120 bp, Artificial Sequence
  ENSG00000149932_10 (sequence is synthesized)
gaatattaccagctgtccagaaaccccccatggtcccttccttcctgacaatgccctctctctccctagaaattactgtcctgctttataatgtattgccatgtatgtattcctaaataa

SEQ ID NO: 418890 - DNA, 120 bp, Artificial Sequence
  ENSG00000149932_11 (sequence is synthesized)
atggattcttaagctcacagagtcagtgaataacagaaagggattcagatctagccgtttagctgcacagtggagttcttctccagagtcttcccttgtctgggctctggctggaactat

SEQ ID NO: 418891 - DNA, 120 bp, Artificial Sequence
  ENSG00000149932_12 (sequence is synthesized)
tcctcagccaaatcctcgccccagaacagtgcttcctgtttctccagctgagaagtctccctttcagtttccttcttccagcacggagtacactgctctgcctccacttagattacttca

SEQ ID NO: 418892 - DNA, 120 bp, Artificial Sequence
  ENSG00000149932_13 (sequence is synthesized)
gaaatgaaatgcagcaaatatttatccagcagtgcagggagttgaacttttggagtcgggaaccttggattcttgttctggctctgccacttactgtgtggccttgggaagtcctttgtc

SEQ ID NO: 418893 - DNA, 120 bp, Artificial Sequence
  ENSG00000149932_14 (sequence is synthesized)
ttctctgagctttcttttctctttgcgtaaaagcggtgctcttgtcccattctccctccctgtcttccagcaggctctccccggaggctcagccccctctgctccccatgggcaactgcc

SEQ ID NO: 418894 - DNA, 120 bp, Artificial Sequence
  ENSG00000149932_15 (sequence is synthesized)
tgaccaagctgctcacctcggtaagagcctcagatgggtcgccagggttttgtagactgcctgctgactactgtatcttgaaggtccctggaaacaattctaccttgtagaaaaagcaca

SEQ ID NO: 418895 - DNA, 120 bp, Artificial Sequence
  ENSG00000149932_16 (sequence is synthesized)
ggttttataaccctgccttgggggctgtgtgacgtagaacaagtgtctaaacatctctgagtgtcagcatcctcatctgtaaaacagaaaacatgaccctatctcttaattccatcaaat

SEQ ID NO: 418896 - DNA, 120 bp, Artificial Sequence
  ENSG00000149932_17 (sequence is synthesized)
aaggattaaatgagaatgaccgtgaagtgcccagcacattgcctgggacatagagatttgataagtgacagctattgttgtttactattgtctttaaaacattctctctacttcaaagga

SEQ ID NO: 418897 - DNA, 120 bp, Artificial Sequence
  ENSG00000149932_18 (sequence is synthesized)
ccaagcatttgggtaacaatggtgtgaatcaacttcttgggccttggctctgagttggaaaaggttttagaaaaagtgaagagctggaatgtgggggaaaataaaaagcttttttgccca

SEQ ID NO: 418898 - DNA, 120 bp, Artificial Sequence
  ENSG00000149948_0 (sequence is synthesized)
cagcccgggatccccggcctgtccctttaaccccgccgccgggcgggagcacgtgagcggggctccgggtggcacccgggcgccgccgccgccgaggcagttgtatttcgaacgctgcct

SEQ ID NO: 418899 - DNA, 120 bp, Artificial Sequence
  ENSG00000149948_1 (sequence is synthesized)
ctggctagcagccaggcgccttggctcggcggtccgcctggcctccctcctcctcatacttttcttcctgcgcaaccccctcccctttatccgcccacgattagaggtgggcactccccc

SEQ ID NO: 418900 - DNA, 120 bp, Artificial Sequence
  ENSG00000149948_2 (sequence is synthesized)
caccaccaccccctccccaagcgcaagcgcgtgcacgcacacacaccacacacactcacactcacacacactcacacacactcatcccacttgaatcttggggcaggaactcagaaaact

SEQ ID NO: 418901 - DNA, 120 bp, Artificial Sequence
  ENSG00000149948_3 (sequence is synthesized)
tccagcccgggcagcgcgcgcttggtgcaagactcaggagctagcagcccgtccccctccgactctccggtgccgccgctgcctgctcccgccaccctaggaggcgcggtgccacccact

SEQ ID NO: 418902 - DNA, 120 bp, Artificial Sequence
  ENSG00000149948_4 (sequence is synthesized)
actctgtcctctgcctgtgctccgtgcccgaccctatcccggcggagtctccccatcctcctttgctttccgactgcccaaggcactttcaatctcaatctcttctctctctctctctct

SEQ ID NO: 418903 - DNA, 120 bp, Artificial Sequence
  ENSG00000149948_5 (sequence is synthesized)
ctctctctctctctctctctctctctcgcagggtggggggaagaggaggaggaattctttccccgcctaacatttcaagggacacaattcactccaagtctcttccctttccaagccgct

SEQ ID NO: 418904 - DNA, 120 bp, Artificial Sequence
  ENSG00000149948_6 (sequence is synthesized)
ttccaagccgcttccgaagtgctcccggtgcccgcaactcctgatcccaacccgcgagaggagcctctgcgacctcaaagcctctcttccttctccctcgcttccctcctcctcttgcta

SEQ ID NO: 418905 - DNA, 120 bp, Artificial Sequence
  ENSG00000149948_7 (sequence is synthesized)
cctccacctccaccgccacctccacctccggcacccacccaccgccgccgccgccaccggcagcgcctcctcctctcctcctcctcctcccctcttctctttttggcagccgctggacgt

SEQ ID NO: 418906 - DNA, 120 bp, Artificial Sequence
  ENSG00000149948_8 (sequence is synthesized)
ccggtgttgatggtggcagcggcggcagcctaagcaacagcagccctcgcagcccgccagctcgcgctcgccccgccggcgtccccagccctatcacctcatctcccgaaaggtgctggg

SEQ ID NO: 418907 - DNA, 120 bp, Artificial Sequence
  ENSG00000149948_9 (sequence is synthesized)
cagctccggggcggtcgaggcgaagcggctgcagcggcggtagcggcggcgggaggcaggatgagcgcacgcggtgagggcgcggggcagccgtccacttcagcccagggacaacctgcc

SEQ ID NO: 418908 - DNA, 120 bp, Artificial Sequence
  ENSG00000149948_10 (sequence is synthesized)
gccccagcgcctcagaagagaggacgcggccgccccaggaagcagcagcaagaaccaaccggtgagccctctcctaagagacccaggggaagacccaaaggcagcaaaaacaagagtccc

SEQ ID NO: 418909 - DNA, 120 bp, Artificial Sequence
  ENSG00000149948_11 (sequence is synthesized)
tctaaagcagctcaaaagaaagcagaagccactggagaaaaacggccaagaggcagacctaggaaatggccacaacaagttgttcagaagaagcctgctcaggaggaaactgaagagaca

SEQ ID NO: 418910 - DNA, 120 bp, Artificial Sequence
  ENSG00000149948_12 (sequence is synthesized)
tcctcacaagagtctgccgaagaggactagggggcgccaacgttcgatttctacctcagcagcagttggatcttttgaagggagaagacactgcagtgaccacttattctgtattgccat

SEQ ID NO: 418911 - DNA, 120 bp, Artificial Sequence
  ENSG00000149948_13 (sequence is synthesized)
ggtgggggaggggggggtggggtggggagaaatcacataaccttaaaaaggactatattaatcaccttctttgtaatcccttcacagtcccaggtttagtgaaaaactgctgtaaacaca

SEQ ID NO: 418912 - DNA, 120 bp, Artificial Sequence
  ENSG00000149948_14 (sequence is synthesized)
cagtcccaggtttagtgaaaaactgctgtaaacacaggggacacagcttaacaatgcaacttttaattactgttttcttttttcttaacctactaatagtttgttgatctgataagcaag

SEQ ID NO: 418913 - DNA, 120 bp, Artificial Sequence
  ENSG00000149948_15 (sequence is synthesized)
agtgggcgggtgagaaaaaccgaattgggtttagtcaatcactgcactgcatgcaaacaagaaacgtgtcacacttgtgacgtcgggcattcatataggaagaacgcggtgtgtaacact

SEQ ID NO: 418914 - DNA, 120 bp, Artificial Sequence
  ENSG00000149948_16 (sequence is synthesized)
gtgtacacctcaaataccaccccaacccactccctgtagtgaatcctctgtttagaacaccaaagataaggactagatactactttctctttttcgtataatcttgtagacacttacttg

SEQ ID NO: 418915 - DNA, 120 bp, Artificial Sequence
  ENSG00000149948_17 (sequence is synthesized)
atgatttttaactttttatttctaaatgagacgaaatgctgatgtatcctttcattcagctaacaaactagaaaaggttatgttcatttttcaaaaagggaagtaagcaaacaaatattg

SEQ ID NO: 418916 - DNA, 120 bp, Artificial Sequence
  ENSG00000149948_18 (sequence is synthesized)
agcaggagtaataaatttactcacagcacttgttttcaggacaacacttcattttcaggaaatctacttcctacagagccaaaatgccatttagcaataaataacacttgtcagcctcag

SEQ ID NO: 418917 - DNA, 120 bp, Artificial Sequence
  ENSG00000149948_19 (sequence is synthesized)
agcatttaaggaaactagacaagtaaaattatcctctttgtaatttaatgaaaaggtacaacagaataatgcatgatgaactcacctaattatgaggtgggaggagcgaaatctaaattt

SEQ ID NO: 418918 - DNA, 120 bp, Artificial Sequence
  ENSG00000149948_20 (sequence is synthesized)
cttttgctatagttatacatcaatttaaaaagcaaaaaaaaaaaaggggggggcaatctctctctgtgtctttctctctctctcttcctctccctctctcttttcattgtgtatcagttt

SEQ ID NO: 418919 - DNA, 120 bp, Artificial Sequence
  ENSG00000149948_21 (sequence is synthesized)
ccatgaaagacctgaataccacttacctcaaattaagcatatgtgttacttcaagtaatacgttttgacataagatggttgaccaaggtgcttttcttcggcttgagttcaccatctctt

SEQ ID NO: 418920 - DNA, 120 bp, Artificial Sequence
  ENSG00000149948_22 (sequence is synthesized)
cattcaaactgcacttttagccagagatgcaatatatccccactactcaatactacctctgaatgttacaacgaatttacagtctagtacttattacatgctgctatacacaagcaatgc

SEQ ID NO: 418921 - DNA, 120 bp, Artificial Sequence
  ENSG00000149948_23 (sequence is synthesized)
aagaaaaaaacttactgggtaggtgattctaatcatctgcagttctttttgtacacttaattacagttaaagaagcaatctccttactgtgtttcagcatgactatgtatttttctatgt

SEQ ID NO: 418922 - DNA, 120 bp, Artificial Sequence
  ENSG00000149948_24 (sequence is synthesized)
ttttttaattaaaaatttttaaaatacttgtttcagcttctctgctagatttctacattaacttgaaaattttttaaccaagtcgctcctaggttcttaaggataattttcctcaatcac

SEQ ID NO: 418923 - DNA, 120 bp, Artificial Sequence
  ENSG00000149948_25 (sequence is synthesized)
actacacatcacacaagatttgactgtaatatttaaatattaccctccaagtctgtacctcaaatgaattctttaaggagatggactaattgacttgcaaagacctacctccagacttca

SEQ ID NO: 418924 - DNA, 120 bp, Artificial Sequence
  ENSG00000149948_26 (sequence is synthesized)
aaaggaatgaacttgttacttgcagcattcatttgttttttcaatgtttgaaatagttcaaactgcagctaaccctagtcaaaactatttttgtaaaagacatttgatagaaaggaacac

SEQ ID NO: 418925 - DNA, 120 bp, Artificial Sequence
  ENSG00000149948_27 (sequence is synthesized)
gtttttacatacttttgcaaaataagtaaataataaataaaataaaagccaaccttcaaagaaacttgaagctttgtaggtgagatgcaacaagccctgcttttgcataatgcaatcaaa

SEQ ID NO: 418926 - DNA, 120 bp, Artificial Sequence
  ENSG00000149948_28 (sequence is synthesized)
aatatgtgtttttaagattagttgaatataagaaaatgcttgacaaatattttcatgtattttacacaaatgtgatttttgtaatatgtctcaaccagatttattttaaacgcttcttat

SEQ ID NO: 418927 - DNA, 120 bp, Artificial Sequence
  ENSG00000149948_29 (sequence is synthesized)
gtagagtttttatgcctttctctcctagtgagtgtgctgactttttaacatggtattatcaactgggccaggaggtagtttctcatgacggcttttgtcagtatggcttttagtactgaa

SEQ ID NO: 418928 - DNA, 120 bp, Artificial Sequence
  ENSG00000149948_30 (sequence is synthesized)
gccaaatgaaactcaaaaccatctctcttccagctgcttcagggaggtagtttcaaaggccacatacctctctgagactggcagatcgctcactgttgtgaatcaccaaaggagctatgg

SEQ ID NO: 418929 - DNA, 120 bp, Artificial Sequence
  ENSG00000149948_31 (sequence is synthesized)
agagaattaaaactcaacattactgttaactgtgcgttaaataagcaaataaacagtggctcataaaaataaaagtcgcattccatatctttggatgggccttttagaaacctcattggc

SEQ ID NO: 418930 - DNA, 120 bp, Artificial Sequence
  ENSG00000149948_32 (sequence is synthesized)
cagctcataaaatggaagcaattgctcatgttggccaaacatggtgcaccgagtgatttccatctctggtaaagttacacttttatttcctgtatgttgtacaatcaaaacacactacta

SEQ ID NO: 418931 - DNA, 120 bp, Artificial Sequence
  ENSG00000149948_33 (sequence is synthesized)
cctcttaagtcccagtatacctcatttttcatactgaaaaaaaaagcttgtggccaatggaacagtaagaacatcataaaatttttatatatatagtttatttttgtgggagataaattt

SEQ ID NO: 418932 - DNA, 120 bp, Artificial Sequence
  ENSG00000149948_34 (sequence is synthesized)
tataggactgttctttgctgttgttggtcgcagctacataagactggacatttaacttttctaccatttctgcaagttaggtatgtttgcaggagaaaagtatcaagacgtttaactgca

SEQ ID NO: 418933 - DNA, 120 bp, Artificial Sequence
  ENSG00000149948_35 (sequence is synthesized)
gttgactttctccctgttcctttgagtgtcttctaactttattctttgttctttatgtagaattgctgtctatgattgtactttgaatcgcttgcttgttgaaaatatttctctagtgta

SEQ ID NO: 418934 - DNA, 120 bp, Artificial Sequence
  ENSG00000149948_36 (sequence is synthesized)
ttatcactgtctgttctgcacaataaacataacagcctctgtgatccccatgtgttttgattcctgctctttgttacagttccattaaatgagtaataaagtttggtcaaaacagatcaa

SEQ ID NO: 418935 - DNA, 120 bp, Artificial Sequence
  ENSG00000149948_37 (sequence is synthesized)
cggccaagaggcagacctaggaaatgggaggagttttacattgcagcttagaagcctttcttccaatagcagagatttggtgtcatgtggtgttcatcagtttgaaaagaagtatttctg

SEQ ID NO: 418936 - DNA, 120 bp, Artificial Sequence
  ENSG00000149948_38 (sequence is synthesized)
ctgtttgcctcaagatgtacatacagagatgtgctgattctcagaacttctatagaattccattagccagtcctgccaattgaaatttggcatttaattatttgcatttttctattcttg

SEQ ID NO: 418937 - DNA, 120 bp, Artificial Sequence
  ENSG00000149948_39 (sequence is synthesized)
cctaggaaaggagctcgtcacatacctagtttagtgatggaaagtatttggagaaagttttagagagtggggctcaggctcaagaatacaatgaagtaataaagttgttaacctcatgta

SEQ ID NO: 418938 - DNA, 120 bp, Artificial Sequence
  ENSG00000149948_40 (sequence is synthesized)
taaaatcctccatccagatgttgcttagtgatgcagctagtgcttctggaggaaaagaagcaagaaccaaataatgaagactacatcaatgggaacaagtgatacttttaggtgttttgt

SEQ ID NO: 418939 - DNA, 120 bp, Artificial Sequence
  ENSG00000149948_41 (sequence is synthesized)
tctcagaatattttaaaagaaaggaaattaacaacagaagaaaaatatttccctatatgaattaatggtttttataagaaaaatatctttctggagatactaagattgacctagaaattg

SEQ ID NO: 418940 - DNA, 120 bp, Artificial Sequence
  ENSG00000149948_42 (sequence is synthesized)
atccaaggaccagatgcttaaagttcacttcaattggtcactagaaagatcccagcaatccccagctggtttctcaggctgctgattccctttatttggtaatggggtgtgtgcagtacg

SEQ ID NO: 418941 - DNA, 120 bp, Artificial Sequence
  ENSG00000149948_43 (sequence is synthesized)
ttgattaaaaaatatgcatttccattccattgcttttgaaggggggcagttgtctttctcttattaaagagcttgtgatacacaggaaagtgatgtaattttatatattagtcaaacgtg

SEQ ID NO: 418942 - DNA, 120 bp, Artificial Sequence
  ENSG00000149948_44 (sequence is synthesized)
aggattttagataagacagcaagggtttttttcccctagtttgtagaaatctagaaatttaagtgatgatttgaggatcgagaagggagaactgaatcaaaataaaatctactacacaca

SEQ ID NO: 418943 - DNA, 120 bp, Artificial Sequence
  ENSG00000149948_45 (sequence is synthesized)
acctaggaaatggctacagaactaattactgtgaaaagacataaaggaatgagaagaccaaaaccgtatcctcatgatactgacaaatcagttggactgagcacacatgaatcaactgaa

SEQ ID NO: 418944 - DNA, 120 bp, Artificial Sequence
  ENSG00000149948_46 (sequence is synthesized)
gaacacttctgccaagttcaagttgtgtaaaagtggaggatatgagtcttgtggggacacagagttgaggcatgagctattagtcagagccgtaaggctgcctgcaggagaagaactttg

SEQ ID NO: 418945 - DNA, 120 bp, Artificial Sequence
  ENSG00000149948_47 (sequence is synthesized)
gatggagttttgaaggaagtgaggaaaagatctgaattaacgtattaacacataaagcttgtcatctgaacaggactataagcatctcgaggtggttgctaatgaagagcccgtgctggt

SEQ ID NO: 418946 - DNA, 120 bp, Artificial Sequence
  ENSG00000149948_48 (sequence is synthesized)
gaaggaagcctgctgatcccggaactggccttgcgcgcaagtggtgggatgacagacacattcccttccttgaactgcactcttttcccttgcactcagaggtggcccgagagagccccg

SEQ ID NO: 418947 - DNA, 120 bp, Artificial Sequence
  ENSG00000149948_49 (sequence is synthesized)
aaaatgccacttagaagagaattgaaacttccaaacacatgaaaggatccaaggaaagtgtcttcaaacaattacatatgagctttaagtggaataaaaacagagttaccatgaaaaaaa

SEQ ID NO: 418948 - DNA, 120 bp, Artificial Sequence
  ENSG00000149948_50 (sequence is synthesized)
gtccccaaactaaaccttatttcgcattttcttacttttggttatcgtcctgcagtattcctgaaaatgtgttgtagccttcaaagttaggaatatatagtctgcaatcgtaccatgaaa

SEQ ID NO: 418949 - DNA, 120 bp, Artificial Sequence
  ENSG00000149948_51 (sequence is synthesized)
acctcccaaaatgtaaggtcttaagtgtacaaagcaaatataaattcttttaaaaataaaactattttattacattgcctcatatgtaaaacaaatatttaatcttatcctatattttac

SEQ ID NO: 418950 - DNA, 120 bp, Artificial Sequence
  ENSG00000149948_52 (sequence is synthesized)
caattcttaaacatcaaattttgtccttccaactgactgtctatattctgttgacaccagacttatatttaatgattcatgactggaaacatatttcttcattgaacaatttcataatat

SEQ ID NO: 418951 - DNA, 120 bp, Artificial Sequence
  ENSG00000149948_53 (sequence is synthesized)
ttgatgatcccaaaacactccaaagaatgctagaatacttggaaattaagttatactaacgtgcagactgatgcattcttagatcttatttaaataactgaatcacagtctctgaagttt

SEQ ID NO: 418952 - DNA, 120 bp, Artificial Sequence
  ENSG00000149948_54 (sequence is synthesized)
ttggcaacatcaaattggaaaatagctctacgtctcttgccccatattcctggagcaccttgtcctcactataatctgtacatagaaacattaaaaaaacatatttattgaggaagcata

SEQ ID NO: 418953 - DNA, 120 bp, Artificial Sequence
  ENSG00000149948_55 (sequence is synthesized)
tcttgaagaaaacaaaactgaagtataaattaaccaggattgctaataatgtgagccagtattaaagtataagaacgtcctgctgttctcttcccttctgtatgtaaatagtcattggag

SEQ ID NO: 418954 - DNA, 120 bp, Artificial Sequence
  ENSG00000149948_56 (sequence is synthesized)
atccaggtggtatcatgctgaacctgctaaaataagtagtaagcagtgtcatgagctatcaaattaagtagaactctttcatgtaattttaagtatccatgaaatttttttccctagaag

SEQ ID NO: 418955 - DNA, 120 bp, Artificial Sequence
  ENSG00000149948_57 (sequence is synthesized)
ctaaaagctaagagtgggagaggggtgctaaaaaaaacccagtgtttgtgcgtctttaagcaatatttaaaaatatatacatataaacaaaaacttgacattttcattaggagaacccaa

SEQ ID NO: 418956 - DNA, 120 bp, Artificial Sequence
  ENSG00000149948_58 (sequence is synthesized)
atatatttagcctctcatcctttaactgtacaaaaatcaagagaaagtaaattgataattctgtgcatttgagtcaaaggatgaggcagagttcacatttgcatcacaggctgtgaacta

SEQ ID NO: 418957 - DNA, 120 bp, Artificial Sequence
  ENSG00000149948_59 (sequence is synthesized)
tagattaatcactttatgtggtttgttaatattgattcagcccttgtgcttagtgtcatagggaagatgagtcaaacaaagaaaaacagtcactgcatctgagaaatgtatttatatgta

SEQ ID NO: 418958 - DNA, 120 bp, Artificial Sequence
  ENSG00000149948_60 (sequence is synthesized)
tatgcctgtgtcctatccagtggtatgctggaaccagcccttgtgagcaaatagtgaacatctcttctgaattctgtgttcagtgatgtcaagtaggtagcttgaaatccactatggtgg

SEQ ID NO: 418959 - DNA, 120 bp, Artificial Sequence
  ENSG00000149948_61 (sequence is synthesized)
gagtatttacaccatggaaagtgacaaatactacaaatcaggacttttttttttcctgaggagcaagtagttaaacatttacctccccagcatggccccacccttcagcgattctgttta

SEQ ID NO: 418960 - DNA, 120 bp, Artificial Sequence
  ENSG00000149948_62 (sequence is synthesized)
tttggtctggagatccatcatattttttatgaactccctaagtgagtttaatatgcaactagagatgaagacactccatgaaaacacatgagaagatgtctgaacatttgttgagcaaat

SEQ ID NO: 418961 - DNA, 120 bp, Artificial Sequence
  ENSG00000149948_63 (sequence is synthesized)
gaccacagaatgtcaatgtgtatgggacacacgggggatacagatgaatgagtggaatgcctcaggttatcaaggggatgataagactggaattttcttgttttgtttgattttgttgtt

SEQ ID NO: 418962 - DNA, 120 bp, Artificial Sequence
  ENSG00000149948_64 (sequence is synthesized)
gttgagttgcagaagggaaaactgaaacataaattaagggaaagaaattacagatgagatgaatggcatatagaaaggtagagaggcaagaacaaatacatcataggtggagattattaa

SEQ ID NO: 418963 - DNA, 120 bp, Artificial Sequence
  ENSG00000149948_65 (sequence is synthesized)
tatggctagaactgattgcaagttggacattaatacatcaagaaataatataagtgaaatcacagttgtttttcccaagagaattcagaatctcaaagaagccacaagtggattgagttg

SEQ ID NO: 418964 - DNA, 120 bp, Artificial Sequence
  ENSG00000149948_66 (sequence is synthesized)
atcttcaaggatcaatctggctatcttacagaccctgttccagatttgccctttataggagagttcagactcagaattataaaaaagaacatgagctcattgggctacctaatttatatt

SEQ ID NO: 418965 - DNA, 120 bp, Artificial Sequence
  ENSG00000149948_67 (sequence is synthesized)
gtgtaatgacacagtgatgaattatataaacatgaaaactacgtgaaagttcgtggaggataatgtaaattttacactacattcaaaagaatctcttccttttccatctgtttctttcaa

SEQ ID NO: 418966 - DNA, 120 bp, Artificial Sequence
  ENSG00000149948_68 (sequence is synthesized)
aataccctcccagatggctttcccatgaggcaatctggattaactcagcctcatatccttccttcaacagcactttgaggggttacattcagaatcgcttttgaggtggtaaaaatttta

SEQ ID NO: 418967 - DNA, 120 bp, Artificial Sequence
  ENSG00000149948_69 (sequence is synthesized)
gcacaactaaatattttacatctaaagaaaagggctcagcagtgtgtaaacagacctacgtttttctttctggccccatcactgggctaattaatttctctttgctctatttatccatct

SEQ ID NO: 418968 - DNA, 120 bp, Artificial Sequence
  ENSG00000149948_70 (sequence is synthesized)
aggaaatgggataataataatgccttttcccttactcccaagaacattacaagagatgcataattatataaattccaggtagcattattacattctgacttatttttgactgttaagttt

SEQ ID NO: 418969 - DNA, 120 bp, Artificial Sequence
  ENSG00000149948_71 (sequence is synthesized)
ttcatttccagagatttatagtctcaaaaattctagaatcctgatttattccaaagtacttcctctttgacgtcaagtgttttcattgaatgttttttaaggcaggaattttttagctgg

SEQ ID NO: 418970 - DNA, 120 bp, Artificial Sequence
  ENSG00000149948_72 (sequence is synthesized)
aggaaattttctagtaattgctccatcctactgttagggctaaagcattcagaatcatcttcctagcatttatgtcacacgtatacagaattacaaaggctctgtggtgaagtatcctca

SEQ ID NO: 418971 - DNA, 120 bp, Artificial Sequence
  ENSG00000149948_73 (sequence is synthesized)
tactgcccaatgctgaagtctcctcagaacttcaagaatggcccttgttgaacctggggtacaaagcagcagagtttattctgaggagacaaattcagaattatgataaatctcagcacc

SEQ ID NO: 418972 - DNA, 120 bp, Artificial Sequence
  ENSG00000149948_74 (sequence is synthesized)
tgcatacgcacttgtgtttgtgtatacaagtacatgcatctagagagaaatgaaaagtgaaggaccaccctgttgcaggggtttgtgtttgcgaaatccaccaggtgtcatcagctgcaa

SEQ ID NO: 418973 - DNA, 120 bp, Artificial Sequence
  ENSG00000149948_75 (sequence is synthesized)
taaaggggaaaatctgtaatatgtacgttaacttttttctaaaattccaaaaccaatgaaaacagcttacaaaataactctactatatttccacttcaagtgataaacaataaattgaaa

SEQ ID NO: 418974 - DNA, 67 bp, Artificial Sequence
  ENSG00000149948_76 (sequence is synthesized)
ttccacttcaagtgataaacaataaattgaaatcagctaattacaaataaatagaaggagttcgaga

SEQ ID NO: 418975 - DNA, 64 bp, Artificial Sequence
  ENSG00000149948_77 (sequence is synthesized)
acatggtgaagccccatctctactaaatacacaaaaattagccgggcgtggcggcggctggcgg

SEQ ID NO: 418976 - DNA, 120 bp, Artificial Sequence
  ENSG00000149948_78 (sequence is synthesized)
tgggtgacagcgagactccatctcaaaagaaagaaagaaagaaatagaaagcagctcgttttttagcaatttgagcagttgaattctcagtcatatgaattacattcttcagtaggaaat

SEQ ID NO: 418977 - DNA, 120 bp, Artificial Sequence
  ENSG00000149948_79 (sequence is synthesized)
gaattacattcttcagtaggaaatggtggtaggtttttctttttctttttttaaaaaaagaaacaccataaaagtaccagattattattattattagagggtgctttgttactcaagttt

SEQ ID NO: 418978 - DNA, 120 bp, Artificial Sequence
  ENSG00000149948_80 (sequence is synthesized)
ttactttgataaaaataagtgtctctccaactgagatgtctaaaaaagtttcgctagtttatcaggtatttgatcgtttattgctatttcccttttaaggctttaatctgagacttgaag

SEQ ID NO: 418979 - DNA, 120 bp, Artificial Sequence
  ENSG00000149948_81 (sequence is synthesized)
ggactccctaaatgtaattcagacatttttctctcacctttcttctacccaaagggaaaacaggtttttaaaatcctaacagctctccaccctttcaatccactttccccattgttgtac

SEQ ID NO: 418980 - DNA, 120 bp, Artificial Sequence
  ENSG00000149948_82 (sequence is synthesized)
agccctggcaaacgatgcctctggcaattaggacaggtataaacctgctccttttcaatttcccaatgagagaattgcaaagttttcagtttctaaaagactggaaacaaagctttctgt

SEQ ID NO: 418981 - DNA, 120 bp, Artificial Sequence
  ENSG00000149948_83 (sequence is synthesized)
ttcaaaaaaagagtttttacttgcaagtaacatcttctgtgggtggtgtgcacccgggcaaagaaatctcagtaagccttgattatcacgggatttcttccccctcaaaataaaatgttg

SEQ ID NO: 418982 - DNA, 120 bp, Artificial Sequence
  ENSG00000149948_84 (sequence is synthesized)
aatgtttttacagagacttcaagggcagttttaaggatgtttatatttcagacaacctaaacattgtttggagcaaaatgagagatttcattttgggacaagcaagttgatgaattgcag

SEQ ID NO: 418983 - DNA, 120 bp, Artificial Sequence
  ENSG00000149948_85 (sequence is synthesized)
tcagcatctcgttctcaaagaaggcatttttactgggggcttttagtctagacatacaaagagggaaggaggaaaggggaaagcattctcactctaacactcgtcttttacatggtacct

SEQ ID NO: 418984 - DNA, 120 bp, Artificial Sequence
  ENSG00000149948_86 (sequence is synthesized)
tggccagtgcagtaaatagttcataataaatcagacttacaaatactcactcgtctactcactcaaggagcataatgatttatactgcctaagtcacaaagattaccgatgtatttattt

SEQ ID NO: 418985 - DNA, 120 bp, Artificial Sequence
  ENSG00000149948_87 (sequence is synthesized)
tcttgcttatgcactttcaagctagtaaaacatcttgtgggccagtaaatgtttagtaccaactggcaaaacatgaagaatcatatcaaaggttgccctaagttgcacggttttgttgta

SEQ ID NO: 418986 - DNA, 120 bp, Artificial Sequence
  ENSG00000149948_88 (sequence is synthesized)
taggaaatactttttgacttaacctctgacctctgacatcaccaaggtcaagggaaaaggagagagcaaagtagaaaccaaggtttaacccttaataaagtagctcaaggacatagaagc

SEQ ID NO: 418987 - DNA, 120 bp, Artificial Sequence
  ENSG00000149948_89 (sequence is synthesized)
acagggaaattggagggcagaggaagcgtatcaaaatgattattaactgtaaacagatgaagtaattagcttagctaacagttgtaatacaggaatattggcaggatgaagtcagcggtt

SEQ ID NO: 418988 - DNA, 120 bp, Artificial Sequence
  ENSG00000149948_90 (sequence is synthesized)
cttggcaggaaatgttttatagagatgacaacttctaacagaagtgaaagaacatcaatcaatttagggcaacttataaaactccaaaaagcaaaatttagtgtttctggacttgacaaa

SEQ ID NO: 418989 - DNA, 120 bp, Artificial Sequence
  ENSG00000149948_91 (sequence is synthesized)
tttgctgtgagagttttttttttaagtatgactgtttctgtgtggggaagtctgtggattaggctcaaaacaaaatggcagtggctgcctgcatttcctcttcatattgcagaattttcc

SEQ ID NO: 418990 - DNA, 120 bp, Artificial Sequence
  ENSG00000149948_92 (sequence is synthesized)
tctacattttgatgtgtactggataaaaaccaattgtttactcaatatataatctttcttcttactctccaaacttgctgacccaaattaatgtggaacaaatagcaactggctttaaaa

SEQ ID NO: 418991 - DNA, 120 bp, Artificial Sequence
  ENSG00000149948_93 (sequence is synthesized)
cctggtctttctaagaaaatccttaatggttgcatagaaatatgttgcattgcctcagacacttacattcaggaaatgtttgctggacactcagatgtctacagagaaattgttaactta

SEQ ID NO: 418992 - DNA, 120 bp, Artificial Sequence
  ENSG00000149948_94 (sequence is synthesized)
ctgttattgatatttttataatcttactcaaaagtcataactcaggataatgaaaaatgtttggtgcaataatgattaaaatccacaaatattctgttccctggccgcaaatacaacacc

SEQ ID NO: 418993 - DNA, 120 bp, Artificial Sequence
  ENSG00000149948_95 (sequence is synthesized)
tatgcaaaattttacacatctacaaaacaaagggaaaaggtttttcctagtctatgccattaataagcacatctggaatataacccttaagcagtctttaatcataatttaaagctactt

SEQ ID NO: 418994 - DNA, 120 bp, Artificial Sequence
  ENSG00000149948_96 (sequence is synthesized)
ccttaagcagtctttaatcataatttaaagctactttgcataaaaataagaacattccacaacagctgtggaaacattgaaataaattttcttcttctgggccgggcacggtggctcatg

SEQ ID NO: 418995 - DNA, 120 bp, Artificial Sequence
  ENSG00000149948_97 (sequence is synthesized)
ctgagcaacatagtgagaccccatctctatttaaaaaaaaaaaaaattaccttcttttgaatactttgtttatgcaaaaatccttttgctttctttagctatttttttaaatgcagtgtt

SEQ ID NO: 418996 - DNA, 120 bp, Artificial Sequence
  ENSG00000149948_98 (sequence is synthesized)
ctttctttagctatttttttaaatgcagtgttcctgcagtaagaattgaacctggcatggaaaactgatcaaaccggtagtcctcagaaatcatcactcctgaaacttgcaattagttta

SEQ ID NO: 418997 - DNA, 120 bp, Artificial Sequence
  ENSG00000149948_99 (sequence is synthesized)
tacctaaaatgatttccctatttgaaaaatgtgcctaccatttccagattttaaaaaaatggccctttatcccagaaaggagaaattcattgtatcccagagaccagcattacttctgtt

SEQ ID NO: 418998 - DNA, 120 bp, Artificial Sequence
  ENSG00000149948_100 (sequence is synthesized)
gcagtattttcagtgatggaactctgttgaggctacagacaagaaaagcaggagagcattttaggaatctaagattttttattttactttcctctggggaccttctttaatagttttttt

SEQ ID NO: 418999 - DNA, 120 bp, Artificial Sequence
  ENSG00000149948_101 (sequence is synthesized)
ctttcttaagaacctatccttgaatcataggtaaagaaataatcacagaatgagtaactgacattaataatcacagcttcacactatagtcttactggatttttacgtttttcagggttt

SEQ ID NO: 419000 - DNA, 120 bp, Artificial Sequence
  ENSG00000149948_102 (sequence is synthesized)
ccccaagtggtggtcacatttcttacacaactctgcagtgtagatagacatgtatagtcattactgggctgacacggtgggactgagacctgctagtgccgtggttggcatctatgatta

SEQ ID NO: 419001 - DNA, 120 bp, Artificial Sequence
  ENSG00000149948_103 (sequence is synthesized)
gtgaggtccaagatcaaccttctttacattaaacatgccctagcaagaccttcaacccaactttattaagctgatgctaacgcacacaaagaagtcctaacaattctatgtttttatata

SEQ ID NO: 419002 - DNA, 120 bp, Artificial Sequence
  ENSG00000149948_104 (sequence is synthesized)
cataatgcaaaaataaagacaagatcaggtacaattgctgtcaatatctcaacttattgtctccttttgaaaaacataattcccgcctagcatttccaccagaatcccttgctcttgcca

SEQ ID NO: 419003 - DNA, 120 bp, Artificial Sequence
  ENSG00000149948_105 (sequence is synthesized)
ggttatattgtttatatatgttccatttaacatgttttttaaaaatctgctgtagagttttcctagttggaggaaataatcactttccattaagttaaacagtcccgataaattttaaat

SEQ ID NO: 419004 - DNA, 120 bp, Artificial Sequence
  ENSG00000149948_106 (sequence is synthesized)
gaaaatatctgacagagaaatagaaaaactcagccttgtggtcttgccggtcacttagctacagatggaacttgaaaaactggttcctggtcattgctgctgaagagagccctttatttc

SEQ ID NO: 419005 - DNA, 120 bp, Artificial Sequence
  ENSG00000149948_107 (sequence is synthesized)
tgttgtgacaggactgactcaagatactcatgaacgtggaaaactcctaaatgtgtcattctgagttcctgagaagttgaacatacacagatgacaaaaaagaatgccatttagccataa

SEQ ID NO: 419006 - DNA, 120 bp, Artificial Sequence
  ENSG00000149948_108 (sequence is synthesized)
ctaccctttctagattaccaagtatttgtaggtttattggcaagatagcttaaattacgtatgtatttctggcctgcaacatcatgtaatagaagagttgcagaattctttgcagttaag

SEQ ID NO: 419007 - DNA, 120 bp, Artificial Sequence
  ENSG00000149948_109 (sequence is synthesized)
gccaggaatttgtcccaactgggtaacacaagactcatttcttacatttaacattagttagatgcgagttaaccttttttgtaagcagatgctcagcataaaaagtttatgaagatactt

SEQ ID NO: 419008 - DNA, 120 bp, Artificial Sequence
  ENSG00000149948_110 (sequence is synthesized)
aacagtgttgtttttaaacaaacagccaccaaataatttgaaccttaaaacgggtagaagtgaggaaggaaggggttgcggggggggcgggatgaaaatgacacaattaatatttgcacc

SEQ ID NO: 419009 - DNA, 120 bp, Artificial Sequence
  ENSG00000149948_111 (sequence is synthesized)
agttgtaaatagttaaaaacaaatcaaaactatagattttgcctggtggtaaagtttttgcaatttcctctgaaaaatgataaagattgatttactttgtgcttattacatggctactgc

SEQ ID NO: 419010 - DNA, 120 bp, Artificial Sequence
  ENSG00000149948_112 (sequence is synthesized)
aaaccaaatccccctattaaagtactttgccaaatagacgataattagaagtaaatctagttgtgggatagtggaaaaattccatgaattttgcagctttaattgtgataataaagtata

SEQ ID NO: 419011 - DNA, 120 bp, Artificial Sequence
  ENSG00000149948_113 (sequence is synthesized)
ctgtttgttttacaataaacctgcagtatagtatatcataatctcaaaatgccttttcatcaagtgacatagaaatgtctgaattggacaatgagactttttaaaacaagtatttggctc

SEQ ID NO: 419012 - DNA, 120 bp, Artificial Sequence
  ENSG00000149948_114 (sequence is synthesized)
atttaatatctctttttgggcagaatggaacccagttaagtgtaatattcagtgtttatcttaataagtttaaacttgcagtttaagataacttcaggttggctgtgtttaagctagcaa

SEQ ID NO: 419013 - DNA, 120 bp, Artificial Sequence
  ENSG00000149948_115 (sequence is synthesized)
agaggaactatgtcagggttaatgcatgtatagagaagtaccagtcacttttttgactttataaataaattggaaaaaaaagtttctgcgttgtatttgtaggtttgtgtagtaattgag

SEQ ID NO: 419014 - DNA, 120 bp, Artificial Sequence
  ENSG00000149948_116 (sequence is synthesized)
cgctggcatggctctgtggagttttacctcccagttgtctatcaccaaagctgtccaccttgtccggaggggaatgagcgtggaaacccctggcggctgtactgacaaaagcaaccttag

SEQ ID NO: 419015 - DNA, 61 bp, Artificial Sequence
  ENSG00000149948_117 (sequence is synthesized)
atacaggcgtgagccatcgtgcctggtctaaaaaatgtctattagtgttccatcactagat

SEQ ID NO: 419016 - DNA, 120 bp, Artificial Sequence
  ENSG00000149948_118 (sequence is synthesized)
cctggtctaaaaaatgtctattagtgttccatcactagatctcttctgaggtattcatgccatatgccccatcctgatgtcatatccacaggacaatctactaccaagaaccagctccaa

SEQ ID NO: 419017 - DNA, 120 bp, Artificial Sequence
  ENSG00000149948_119 (sequence is synthesized)
gaagaaaacatctctgggaaacagtaccaaaaggagtcactgaattgtcattggaggagtccaggatagctcttcatgttattttcaccttgaggaattgtccattacatctatgagcct

SEQ ID NO: 419018 - DNA, 120 bp, Artificial Sequence
  ENSG00000149948_120 (sequence is synthesized)
tatgtgtggctttctccgatatagaaacctatcaggtgtcttttagatcatttcaaaacactggcttattctttcttatgtttccaactgaagtctgcatcccaagatgtagtttcactg

SEQ ID NO: 419019 - DNA, 120 bp, Artificial Sequence
  ENSG00000149948_121 (sequence is synthesized)
ctaccccatatggcacccttgtacgaatttgaaaaaagtactcactctaggcacatgcagagccatgcctgcggggacagcttagagagtagagggtgggctgaactccagttactctcg

SEQ ID NO: 419020 - DNA, 120 bp, Artificial Sequence
  ENSG00000149948_122 (sequence is synthesized)
aaaaacggccaagaggcagacctaggaaatggttaagagctcaggctctggattcagatggcttgggttcaaattctggtccgtcacttagctaactggagtcttaagaaaatcacatga

SEQ ID NO: 419021 - DNA, 120 bp, Artificial Sequence
  ENSG00000149968_0 (sequence is synthesized)
acaaggaggcaggcaagacagcaaggcatagagacaacatagagctaagtaaagccagtggaaatgaagagtcttccaatcctactgttgctgtgcgtggcagtttgctcagcctatcca

SEQ ID NO: 419022 - DNA, 120 bp, Artificial Sequence
  ENSG00000149968_1 (sequence is synthesized)
ttggatggagctgcaaggggtgaggacaccagcatgaaccttgttcagaaatatctagaaaactactacgacctcaaaaaagatgtgaaacagtttgttaggagaaaggacagtggtcct

SEQ ID NO: 419023 - DNA, 120 bp, Artificial Sequence
  ENSG00000149968_2 (sequence is synthesized)
gttgttaaaaaaatccgagaaatgcagaagttccttggattggaggtgacggggaagctggactccgacactctggaggtgatgcgcaagcccaggtgtggagttcctgatgttggtcac

SEQ ID NO: 419024 - DNA, 120 bp, Artificial Sequence
  ENSG00000149968_3 (sequence is synthesized)
ttcagaacctttcctggcatcccgaagtggaggaaaacccaccttacatacaggattgtgaattatacaccagatttgccaaaagatgctgttgattctgctgttgagaaagctctgaaa

SEQ ID NO: 419025 - DNA, 120 bp, Artificial Sequence
  ENSG00000149968_4 (sequence is synthesized)
gtctgggaagaggtgactccactcacattctccaggctgtatgaaggagaggctgatataatgatctcttttgcagttagagaacatggagacttttacccttttgatggacctggaaat

SEQ ID NO: 419026 - DNA, 120 bp, Artificial Sequence
  ENSG00000149968_5 (sequence is synthesized)
gttttggcccatgcctatgcccctgggccagggattaatggagatgcccactttgatgatgatgaacaatggacaaaggatacaacagggaccaatttatttctcgttgctgctcatgaa

SEQ ID NO: 419027 - DNA, 120 bp, Artificial Sequence
  ENSG00000149968_6 (sequence is synthesized)
attggccactccctgggtctctttcactcagccaacactgaagctttgatgtacccactctatcactcactcacagacctgactcggttccgcctgtctcaagatgatataaatggcatt

SEQ ID NO: 419028 - DNA, 120 bp, Artificial Sequence
  ENSG00000149968_7 (sequence is synthesized)
ctgactcccctgagacccccctggtacccacggaacctgtccctccagaacctgggacgccagccaactgtgatcctgctttgtcctttgatgctgtcagcactctgaggggagaaatcc

SEQ ID NO: 419029 - DNA, 120 bp, Artificial Sequence
  ENSG00000149968_8 (sequence is synthesized)
tgatctttaaagacaggcacttttggcgcaaatccctcaggaagcttgaacctgaattgcatttgatctcttcattttggccatctcttccttcaggcgtggatgccgcatatgaagtta

SEQ ID NO: 419030 - DNA, 120 bp, Artificial Sequence
  ENSG00000149968_9 (sequence is synthesized)
ctagcaaggacctcgttttcatttttaaaggaaatcaattctgggctatcagaggaaatgaggtacgagctggatacccaagaggcatccacaccctaggtttccctccaaccgtgagga

SEQ ID NO: 419031 - DNA, 120 bp, Artificial Sequence
  ENSG00000149968_10 (sequence is synthesized)
aaatcgatgcagccatttctgataaggaaaagaacaaaacatatttctttgtagaggacaaatactggagatttgatgagaagagaaattccatggagccaggctttcccaagcaaatag

SEQ ID NO: 419032 - DNA, 120 bp, Artificial Sequence
  ENSG00000149968_11 (sequence is synthesized)
ctgaagactttccagggattgactcaaagattgatgctgtttttgaagaatttgggttcttttatttctttactggatcttcacagttggagtttgacccaaatgcaaagaaagtgacac

SEQ ID NO: 419033 - DNA, 120 bp, Artificial Sequence
  ENSG00000149968_12 (sequence is synthesized)
acactttgaagagtaacagctggcttaattgttgaaagagatatgtagaaggcacaatatgggcactttaaatgaagctaataattcttcacctaagtctctgtgaattgaaatgttcgt

SEQ ID NO: 419034 - DNA, 120 bp, Artificial Sequence
  ENSG00000149968_13 (sequence is synthesized)
tttctcctgcctgtgctgtgactcgagtcacactcaagggaacttgagcgtgaatctgtatcttgccggtcatttttatgttattacagggcattcaaatgggctgctgcttagcttgca

SEQ ID NO: 419035 - DNA, 120 bp, Artificial Sequence
  ENSG00000149968_14 (sequence is synthesized)
ccttgtcacatagagtgatctttcccaagagaaggggaagcactcgtgtgcaacagacaagtgactgtatctgtgtagactatttgcttatttaataaagacgatttgtcagttatttta

SEQ ID NO: 419036 - DNA, 120 bp, Artificial Sequence
  ENSG00000149970_0 (sequence is synthesized)
gtcatttccgccgggcagctagtcgtgctcggggcttcactcccgcgcgtgaggcgagcgggcaagttggctgagggcgtgcggcagaggctgcttccctcggcgacgcgacccctcagc

SEQ ID NO: 419037 - DNA, 120 bp, Artificial Sequence
  ENSG00000149970_1 (sequence is synthesized)
cagaggctgcttccctcggcgacgcgacccctcagcaactcaagctatgaactgaagctccctagggacggagaccggagcggagcggcggaggcagcagcagcagcagcagcagcagca

SEQ ID NO: 419038 - DNA, 120 bp, Artificial Sequence
  ENSG00000149970_2 (sequence is synthesized)
actgagcagacccggcgcggagccacgactcctgcacgtttacctccctgtcgccgttcctgccggcggttggctaaaagacgttacagccgcgagacccgacacacaaaagccgctttc

SEQ ID NO: 419039 - DNA, 120 bp, Artificial Sequence
  ENSG00000149970_3 (sequence is synthesized)
tccgcgccgcccgcccagggaggctgcggccagcaagggaccccacctgagagcagctcgggctgctgagttcgttttgtgtctgagctctgcgctctgcacggaaccgaccccgtaccc

SEQ ID NO: 419040 - DNA, 120 bp, Artificial Sequence
  ENSG00000149970_4 (sequence is synthesized)
atggctctgataatggaaccggtgagcaaatggtctccgagtcaagtagtggactggatgaaaggtcttgatgactgtttgcagcagtatattaagaactttgagagggagaagatcagt

SEQ ID NO: 419041 - DNA, 120 bp, Artificial Sequence
  ENSG00000149970_5 (sequence is synthesized)
ggggaccagctgctgcgcattacacatcaggagctagaagatctgggggtcagccgcattggccatcaggaactgatcttggaagcagttgaccttctgtgtgcattgaattatggcttg

SEQ ID NO: 419042 - DNA, 120 bp, Artificial Sequence
  ENSG00000149970_6 (sequence is synthesized)
gaaacagaaaatctaaaaaccctttctcacaagttgaatgcatctgccaaaaatctgcagaattttataacaggaaggagaaggagtggccattatgatgggaggaccagccgaaaattg

SEQ ID NO: 419043 - DNA, 120 bp, Artificial Sequence
  ENSG00000149970_7 (sequence is synthesized)
ccaaacgactttctgacctcagttgtggatctgattggagcagccaagagtctgcttgcctggttggacaggtcaccatttgctgctgtgacagactattcagttacaagaaataatgtc

SEQ ID NO: 419044 - DNA, 120 bp, Artificial Sequence
  ENSG00000149970_8 (sequence is synthesized)
atacaactctgcctggagttaacaacaattgtgcaacaggattgtactgtatatgaaacagagaataaaattcttcacgtgtgtaaaactctttctggagtctgtgaccacatcatatcc

SEQ ID NO: 419045 - DNA, 120 bp, Artificial Sequence
  ENSG00000149970_9 (sequence is synthesized)
ctgtcgtcagatcctctggtttcacagtctgctcacctggaagtgattcaactggcaaacattaaaccaagcgaagggctgggtatgtatattaaatctacatatgatggcctccatgta

SEQ ID NO: 419046 - DNA, 120 bp, Artificial Sequence
  ENSG00000149970_10 (sequence is synthesized)
attactggaaccacagaaaattcacctgcagatcggtgcaagaaaatccatgctggcgatgaagtgattcaagttaatcatcagactgtggtggggtggcagttgaaaaatttggtgaat

SEQ ID NO: 419047 - DNA, 120 bp, Artificial Sequence
  ENSG00000149970_11 (sequence is synthesized)
gcactacgagaggacccgagtggtgttatcttaactttgaaaaagcgacctcagagcatgcttacctcagcaccagctttactgaaaaatatgagatggaagccccttgctctgcagcct

SEQ ID NO: 419048 - DNA, 120 bp, Artificial Sequence
  ENSG00000149970_12 (sequence is synthesized)
cttatacctagaagtcccacaagcagcgttgccacgccttccagcaccatcagtacacccaccaaaagagacagttctgccctccaggatctctacattccccctcctcctgcagaacca

SEQ ID NO: 419049 - DNA, 120 bp, Artificial Sequence
  ENSG00000149970_13 (sequence is synthesized)
tatattcccagggatgaaaaaggaaaccttccttgtgaagacctcagaggacatatggtgggcaagccagtgcataagggatctgaatcaccaaattcatttctggatcaggaatatcga

SEQ ID NO: 419050 - DNA, 120 bp, Artificial Sequence
  ENSG00000149970_14 (sequence is synthesized)
aagagatttaatattgtcgaagaagatactgtcttatattgctatgaatatgaaaaaggaagatcaagtagtcaaggaagacgagaaagcaccccaacttatggcaagctacgacctata

SEQ ID NO: 419051 - DNA, 120 bp, Artificial Sequence
  ENSG00000149970_15 (sequence is synthesized)
tctatgccagtggaatataattgggtgggggactatgaagatccaaataagatgaagagagatagtagaagagaaaactctctacttcggtatatgagcaatgaaaagattgctcaagaa

SEQ ID NO: 419052 - DNA, 120 bp, Artificial Sequence
  ENSG00000149970_16 (sequence is synthesized)
gaatacatgtttcagagaaacagcaaaaaggacacagggaagaagtcaaaaaagaagggtgataagagtaatagcccaactcactattcattgctacctagtttacaaatggatgcactg

SEQ ID NO: 419053 - DNA, 120 bp, Artificial Sequence
  ENSG00000149970_17 (sequence is synthesized)
agacaagacatcatgggcactcctgtgccagagaccacactataccatacatttcagcagtcctcactgcagcacaaatcaaagaagaaaaacaaaggtcctatagcaggcaagagcaaa

SEQ ID NO: 419054 - DNA, 120 bp, Artificial Sequence
  ENSG00000149970_18 (sequence is synthesized)
agacgaatttcttgcaaagatcttggccgtggtgactgtgagggctggctttggaaaaagaaagatgcgaagagttacttttcacagaaatggaaaaaatattggtttgtcctaaaggat

SEQ ID NO: 419055 - DNA, 120 bp, Artificial Sequence
  ENSG00000149970_19 (sequence is synthesized)
gcatccctttattggtatattaatgaggaggatgaaaaagcagaaggattcattagcctgcctgaatttaaaattgatagagccagtgaatgccgcaaaaaatatgcattcaaagcctgt

SEQ ID NO: 419056 - DNA, 120 bp, Artificial Sequence
  ENSG00000149970_20 (sequence is synthesized)
catcctaaaatcaaaagcttttattttgctgctgaacatcttgatgatatgaacaggtggcttaacagaattaatatgctgactgcaggatatgcagaaagagagaggattaagcaggaa

SEQ ID NO: 419057 - DNA, 120 bp, Artificial Sequence
  ENSG00000149970_21 (sequence is synthesized)
caagattactggagtgagagtgacaaggaagaagcagatactccatcaacaccaaaacaagatagccctccacccccatatgatacatacccacgacctccctcgatgagttgcgccagt

SEQ ID NO: 419058 - DNA, 120 bp, Artificial Sequence
  ENSG00000149970_22 (sequence is synthesized)
ccttatgtggaagcaaaacatagccgactttcctccacggagacttctcagtctcagtcttctcatgaggagtttcgccaggaagtaactgggagcagtgcagtgtctcccattcgcaag

SEQ ID NO: 419059 - DNA, 120 bp, Artificial Sequence
  ENSG00000149970_23 (sequence is synthesized)
ggccatctccccagagcacaggcggcagtctaccctgccaactcagaaatgccacctgcaggatcactatgggccataccccttagctgagagtgagaggatgcaagtgctaaatggaaa

SEQ ID NO: 419060 - DNA, 120 bp, Artificial Sequence
  ENSG00000149970_24 (sequence is synthesized)
tgggggcaagcctcgaagttttactctgcctcgagatagcgggttcaaccattgctgtctgaatgctccagttagtgcctgtgacccacaggatgacgtgcaacccccagaggtggagga

SEQ ID NO: 419061 - DNA, 120 bp, Artificial Sequence
  ENSG00000149970_25 (sequence is synthesized)
agaggaggaggaggaggaggaggaaggggaggcagcaggggaaaacataggagaaaaaagtgaaagcagagaagaaaagttaggagactcattgcaagatttatacagggcactggagca

SEQ ID NO: 419062 - DNA, 120 bp, Artificial Sequence
  ENSG00000149970_26 (sequence is synthesized)
ggccagtctgtcaccactaggagaacatcgtatttcaaccaagatggaatacaagctatcatttataaaaagatgtaatgatcctgtaatgaatgaaaaactacaccggctgagaattct

SEQ ID NO: 419063 - DNA, 120 bp, Artificial Sequence
  ENSG00000149970_27 (sequence is synthesized)
caaaagcactttaaaggccagagaaggggaagtagccattatcgataaagtcctagacaatccagacttgacatctaaagaattccaacaatggaagcagatgtacctcgaccttttctt

SEQ ID NO: 419064 - DNA, 120 bp, Artificial Sequence
  ENSG00000149970_28 (sequence is synthesized)
ggatatctgtcaaaataccacctcaaatgacccactgagtatttcttctgaagtagatgtaatcacttcctctctagcacacactcattcatacattgaaacgcatgtctaaatgtattc

SEQ ID NO: 419065 - DNA, 120 bp, Artificial Sequence
  ENSG00000149970_29 (sequence is synthesized)
tgccttcagaccatctagtacctgctggtactctgaacaagtatataaggtagtttttatatcaatgtgtggaacacttgacaagctatactttaatgttaccaaactatatgaaacaaa

SEQ ID NO: 419066 - DNA, 120 bp, Artificial Sequence
  ENSG00000149970_30 (sequence is synthesized)
ccatatatggtcacaataccactatctttaatgagcatttgtatattttatatgcaacagtgctcagcttatgtttaccatgtgcaaaatcaactgtctttaatgacttaaaattaactt

SEQ ID NO: 419067 - DNA, 120 bp, Artificial Sequence
  ENSG00000149970_31 (sequence is synthesized)
ttgcaaacaattctaaatacaggtggtcttcaagtagtaaaaccacaaaaggcagttttctatctatggtcatcttttctccctttaagttaattttatataaacaagacttcaaaagta

SEQ ID NO: 419068 - DNA, 120 bp, Artificial Sequence
  ENSG00000149970_32 (sequence is synthesized)
aatcacattttttcaggtgcagacatccttgtgggtgggaaagaatttaaaccttttttatatttattaaaatgttctaagaattttcttaaacattgcacaaagtttaatgctgtagtt

SEQ ID NO: 419069 - DNA, 120 bp, Artificial Sequence
  ENSG00000149970_33 (sequence is synthesized)
ttatttttgtgaaatgtagatgcgcatacaagagctaagcaaaatagaagagcatcgacataagaaaagttcaggtatctaatattcgtcttaatagtctattaacttgtgaaagctaag

SEQ ID NO: 419070 - DNA, 120 bp, Artificial Sequence
  ENSG00000149970_34 (sequence is synthesized)
ttaatggaaatattattccaaatctatgagaacacttggtgtatcagggcaaagctttgtaagatgtttttgtaactaagaccaaaattgaagatagagctgctttattttcttggttta

SEQ ID NO: 419071 - DNA, 120 bp, Artificial Sequence
  ENSG00000149970_35 (sequence is synthesized)
aatcttcctttatttttgtagtgatgagatgctgattgtgtacagaagaatttgagaggggatttttaaaaactgacttaacacacccagaaaggcagctaacagctatatatatatata

SEQ ID NO: 419072 - DNA, 120 bp, Artificial Sequence
  ENSG00000149970_36 (sequence is synthesized)
aatttcagcccaaactcatgtttttaaactccaactcttaaaagacaacaaggtataaactgaaatgaatcaactttccacttagtttccaattttcccctagtccactaattaaactta

SEQ ID NO: 419073 - DNA, 120 bp, Artificial Sequence
  ENSG00000149970_37 (sequence is synthesized)
ggtaattatacttcaggtagggaagtacaatatgtttagtttcaggctgatgtgtgttataaaaaacaacactgaaaaataaaaatgtacttcccttctaaggagcaagcaggtgatggt

SEQ ID NO: 419074 - DNA, 120 bp, Artificial Sequence
  ENSG00000149970_38 (sequence is synthesized)
cattcaaagagatgtcacattgaattatgagagaaacaatttagaggtttttttcctggcttcatgaattgttctatagagtggatgaagtctaaggaaaagtcctcttcatatatttcc

SEQ ID NO: 419075 - DNA, 120 bp, Artificial Sequence
  ENSG00000149970_39 (sequence is synthesized)
atttataagcgtcttgtttttgaaagtgatcacagcatgaaaatgactgtgctgctttttagtgtctggctgcataatgtacaagtcacaatttgctgtttttttcaggaggagaaaggg

SEQ ID NO: 419076 - DNA, 120 bp, Artificial Sequence
  ENSG00000149970_40 (sequence is synthesized)
aacctcctttactattctatatcctaaaatctacttctaatcagctttatactgttgcctgtacagctcagtgaatgtactttcatctttaagagttcagatatatgccagtgaatattt

SEQ ID NO: 419077 - DNA, 120 bp, Artificial Sequence
  ENSG00000149970_41 (sequence is synthesized)
ttgctgtagaggagaaagtaaaaactccacagcggggatctttttctttgcttttgaaaccaccattgaatcactatcgttttgcagactttgcacaactgtacaggagagtggcctttc

SEQ ID NO: 419078 - DNA, 120 bp, Artificial Sequence
  ENSG00000149970_42 (sequence is synthesized)
tacagcacattttcagtaatcctatatttagtcaaaatggatgagaaatcatgtattaatgtttgtatggaattttgggtccagtgtaatatttttatcatttaaaaagaactctatttg

SEQ ID NO: 419079 - DNA, 120 bp, Artificial Sequence
  ENSG00000149970_43 (sequence is synthesized)
tgtaatatttttatcatttaaaaagaactctatttgtaaaaacatttatttactgcatggatattgacgcacattaaatttgtgggattttgtatatgtaaaaaaaaaaaaaaaaaaaaa

SEQ ID NO: 419080 - DNA, 120 bp, Artificial Sequence
  ENSG00000149970_44 (sequence is synthesized)
ttaacaggtgtttagacttattgatgtttactagaccaaatgtgtatgttcacttaaaaatatatgtacctgatggatgtgtcatgtttacagtggccaggttgtggcctgtaaacagca

SEQ ID NO: 419081 - DNA, 120 bp, Artificial Sequence
  ENSG00000149970_45 (sequence is synthesized)
agcagttgacgggaagactagctctgttgctactaagcagcttttacttttgtaaagtcagctctgttgttttaaatggtaaaaattaaactaatgaatttgacaagactcgtggctagc

SEQ ID NO: 419082 - DNA, 120 bp, Artificial Sequence
  ENSG00000149970_46 (sequence is synthesized)
ctagcatgaaagagaccttttaacactatataatatctgtacattttattgcattcgtttcaaatctaggagagaggcagcactgtaaactgaagtcaaataaattcagctcttaatgaa

SEQ ID NO: 419083 - DNA, 120 bp, Artificial Sequence
  ENSG00000149970_47 (sequence is synthesized)
cgtcggccctgggggcgggaccgcgcggcagcgagcgggcggggggctcgtggcgcgcgcgccccgcacccgagggctgcggagagatattttgggtggcaggaggcccctcgtcatttc

SEQ ID NO: 419084 - DNA, 120 bp, Artificial Sequence
  ENSG00000149970_48 (sequence is synthesized)
ctctccatgccaaatcggatccacttctgttggcactcaacccattggactcacagattgataagctaatgtttagagaatttagatcggagagagtcggtacggcgcagactcaacatc

SEQ ID NO: 419085 - DNA, 120 bp, Artificial Sequence
  ENSG00000149970_49 (sequence is synthesized)
aacctcttgcaagcaactaaaatggcctcgtccttgctgtttataacagaaaacagacttgtaaaaagcttagatcatcaagtgttttggattgggggcctcccaaagggatataagagg

SEQ ID NO: 419086 - DNA, 120 bp, Artificial Sequence
  ENSG00000149970_50 (sequence is synthesized)
ggcaggccactcttaagaagaatgcgagctttctacattgggactagcataagatcaaagccaatcaagatggagcacagtaacagaaaactgcggtttctgtgggagaacagaagggga

SEQ ID NO: 419087 - DNA, 120 bp, Artificial Sequence
  ENSG00000149970_51 (sequence is synthesized)
aagggtcttaactgggaaagggctctgtgtggtaacacctcagttgtgttctcctgacaccaggaaaagagagggatcagcttcaataactagaaaattctggctgtttaatggactctt

SEQ ID NO: 419088 - DNA, 120 bp, Artificial Sequence
  ENSG00000149970_52 (sequence is synthesized)
tggtggcctctttaaggcaaagcagagaaagcaaattatgtattaagtgtattttgcatttttaaaacttgacgtgctgtattgtactaaattaagtgtaatctattaaggcaaggtata

SEQ ID NO: 419089 - DNA, 120 bp, Artificial Sequence
  ENSG00000149970_53 (sequence is synthesized)
cacaatttgctttgaaacttactatgtttattctattataaagtgtattcaggtgcaacacagagactgctttcggtgacattaatgaagaaaatttctcatgccaggctttattataga

SEQ ID NO: 419090 - DNA, 120 bp, Artificial Sequence
  ENSG00000149970_54 (sequence is synthesized)
atcttcagctaaaatcctaactttctccttatttcttggcacttgtatacaagtggtgttgcctcttagggcaggcatgagctattcttttctgtaaaatattttgaatctataggctgt

SEQ ID NO: 419091 - DNA, 120 bp, Artificial Sequence
  ENSG00000149970_55 (sequence is synthesized)
gggtttcatttttgaaaagtattttgtctggatgtctttcaaactagcttcagatattatttaatactatgtaactgggtcccctatggctcaatcaatattgcttatttttcttctgta

SEQ ID NO: 419092 - DNA, 120 bp, Artificial Sequence
  ENSG00000149970_56 (sequence is synthesized)
gtggatgtgaaatttcctttagttggataagatacactgtaataattttaatgctaattaatgatatttcatactgtgcaatgaacagataatttaacactgtattttgaaatgtttttt

SEQ ID NO: 419093 - DNA, 120 bp, Artificial Sequence
  ENSG00000149970_57 (sequence is synthesized)
tcttcctgtcaccgcagtgtgtggtattgcataatgtgaatacctgtaaaaatataaattacttaaaaataaaaatatgaccaattggtatcagatcttttcagatagctaaataatttg

SEQ ID NO: 419094 - DNA, 120 bp, Artificial Sequence
  ENSG00000149970_58 (sequence is synthesized)
ctaagtatgcctgatagtaaatatctttctaaaaagaagtaatcagtgcttctttctcacaaatggaatttgtgtctgtgaataaaatcacattgatctgccttacaattgcctctgtgc

SEQ ID NO: 419095 - DNA, 120 bp, Artificial Sequence
  ENSG00000149970_59 (sequence is synthesized)
tctaaccattttaatgtgttttttaaaacatatatatataatgatggttctggtatatagaaatccatcaaaaagcattttattggctttattggtatttaatatttatgggattgtctt

SEQ ID NO: 419096 - DNA, 120 bp, Artificial Sequence
  ENSG00000149970_60 (sequence is synthesized)
gggtcattctccctgtttaagccatagtaaaattttgtgatctagagaatttggtgttttttttttcattaaggaatatagtgactccacattaattttcaaaaataatcatctcttagc

SEQ ID NO: 419097 - DNA, 120 bp, Artificial Sequence
  ENSG00000149970_61 (sequence is synthesized)
tttggttttaaactgtctcctttatgaattcctgcctgagagccagcactttgacttccatattcctagtggttaaattttctaaattctgtgggtaaacctaaactgtcatttatattt

SEQ ID NO: 419098 - DNA, 120 bp, Artificial Sequence
  ENSG00000149970_62 (sequence is synthesized)
ttgattgtccttcaaagaaccttcccttctttggggcaataaatcaatgctaaggacaccaaggttttgccatctgaactacttgtcgtaaatactgtagtgccctgaaaattcaaccac

SEQ ID NO: 419099 - DNA, 120 bp, Artificial Sequence
  ENSG00000149970_63 (sequence is synthesized)
tgtcatgtatttttatcattaaactgcataatttaacagaaattacatgttcagagaaagaagtatagaataaactttagctctatctcttttgtcacatctttatggagcaatatttag

SEQ ID NO: 419100 - DNA, 120 bp, Artificial Sequence
  ENSG00000149970_64 (sequence is synthesized)
tgttgtaaggaaggaattgacagacacaagtacttgatttcagtgaagcacattatcattattacaaggatgggctttacatgttctttaaaaatacagttagcaaatgttggtggagtc

SEQ ID NO: 419101 - DNA, 120 bp, Artificial Sequence
  ENSG00000149970_65 (sequence is synthesized)
tggcttttaagtttttcaaaccaacatacttctgtggctgagaaactgtggctgccagataggaagaagaaaaaatcatgaacatccaagcaaagcagactgagtcttattacatgtctt

SEQ ID NO: 419102 - DNA, 120 bp, Artificial Sequence
  ENSG00000149970_66 (sequence is synthesized)
ccccaccattgaagatccaactcctcaaaggctgctggaatctcccaagattttttccacttcatctgccactacatccctctctctgggagatacctcggcatagtttgatgcagcaac

SEQ ID NO: 419103 - DNA, 120 bp, Artificial Sequence
  ENSG00000149970_67 (sequence is synthesized)
tagctgatgagactacttatagttattaaaattattggggcatatttataatctgttcaatttcatgttaatactgtttttggtgtgcaaagggttctaaagattctatccatactaaaa

SEQ ID NO: 419104 - DNA, 120 bp, Artificial Sequence
  ENSG00000149970_68 (sequence is synthesized)
acagtctcgggaatatcacttgagaagagtggcatatatgatggttgaatctattaacaacatttggaagtttttccttttattttgtattaatattaaaacatattcactgttattttg

SEQ ID NO: 419105 - DNA, 120 bp, Artificial Sequence
  ENSG00000149970_69 (sequence is synthesized)
aaagatattctggaacctgatgactacattatggaaagaaatgtttcaatagatgaggctataaaggatactggaatggaaaataaccaggttgggatagtcaagaagaagatagactgc

SEQ ID NO: 419106 - DNA, 120 bp, Artificial Sequence
  ENSG00000149970_70 (sequence is synthesized)
agcaaataggatgttctacattgattagtgagagatggaagataagtactataagctagtggtttttgttacctccaaaatgataaacattgttgagcaagactaaggatggcagagagt

SEQ ID NO: 419107 - DNA, 120 bp, Artificial Sequence
  ENSG00000149970_71 (sequence is synthesized)
gtgggaggagggaacagattgaaggactatctcaaaacttcctctaacttcatttatgcgtctcccttactctcactgttgtctctcattttggactctgtcctcactctcttgttcctt

SEQ ID NO: 419108 - DNA, 120 bp, Artificial Sequence
  ENSG00000149970_72 (sequence is synthesized)
caaccccagaacaacaggagaatattgttcaaaggagaagccaacataatcagaatggatagagagtgtggtatccccttaatattcatctctccttttccctccctctcaatttacctc

SEQ ID NO: 419109 - DNA, 120 bp, Artificial Sequence
  ENSG00000149970_73 (sequence is synthesized)
cttccctggacttcagcagaaatgaatgagtcattgagtggaatcaataccatgatattgtctaacagcagatgtactttctttctcttttttgatttgctaaattgttgtctttatttt

SEQ ID NO: 419110 - DNA, 120 bp, Artificial Sequence
  ENSG00000149970_74 (sequence is synthesized)
tttggtttttttctaattccattttcttttctttatcattctcatctcttctcactggactatttctcctccactcttcatctcattaagttttctttgttcttccctattttcttctgt

SEQ ID NO: 419111 - DNA, 120 bp, Artificial Sequence
  ENSG00000149970_75 (sequence is synthesized)
tctgctttctcagaggagaaagtatttatcatataattccatatacctaagatactgaaaactgagaccacaagaggcagtgtttctggtgtaccccacatcttattcctgtaaacacac

SEQ ID NO: 419112 - DNA, 120 bp, Artificial Sequence
  ENSG00000149970_76 (sequence is synthesized)
atgttgctggactacagagattaattatgttagcatggtgtttaacatattgcttaataaataatgggttcttataatagcctaaaataactatgttaggattctgtgaaatcagtattc

SEQ ID NO: 419113 - DNA, 120 bp, Artificial Sequence
  ENSG00000149970_77 (sequence is synthesized)
taaaatagaacaagtgaatcattctcttttgggagggggaaaaattatgaagagacatataccaaaaattaaggaaatgatgcatcaatgattttagttactcataataatattttattt

SEQ ID NO: 419114 - DNA, 120 bp, Artificial Sequence
  ENSG00000149970_78 (sequence is synthesized)
cagattctaccttatgtagtggtttatgagagcttcatagattgtttttcttttatttcacattgaacattatggatttgatgagaatgtgtggaaactggttttgaagtgatacgtatt

SEQ ID NO: 419115 - DNA, 120 bp, Artificial Sequence
  ENSG00000149970_79 (sequence is synthesized)
actggttttgaagtgatacgtattgatataaactgtatttttattttgtacagagaaatcaatttattactttatcatccaatataatatttcatgtttctgttatcaaactaaaattta

SEQ ID NO: 419116 - DNA, 120 bp, Artificial Sequence
  ENSG00000149970_80 (sequence is synthesized)
agataaattgtatgatatctcaataatagttacttcctgttaaccaatttattttctctgcagatctctgcatcctgatttgtttctttcttatttgtgcagttcttactagctttacca

SEQ ID NO: 419117 - DNA, 120 bp, Artificial Sequence
  ENSG00000149970_81 (sequence is synthesized)
gactgtgggatgaaaaaggaaaccttccttgtgaagacctcagaggacatatggtgggcaagccagtgcataagggatctgaatcaccaaattcatttctggatcaggaatatcgaaaga

SEQ ID NO: 419118 - DNA, 120 bp, Artificial Sequence
  ENSG00000149970_82 (sequence is synthesized)
tcactaaaatagacttctttactcagagaaattatttcccaatagtaatgtttgtgtattgttactttgcctaaaagaaaataaataacttacccctaaatatgaaactagtagttgatt

SEQ ID NO: 419119 - DNA, 120 bp, Artificial Sequence
  ENSG00000149970_83 (sequence is synthesized)
acagatggaggactaaaagccagcttttaaaatcttatgctttttttttgatataacaaactgccttccccaaacccagttttataatgctaggcatagctgattgacttacataaaagc

SEQ ID NO: 419120 - DNA, 120 bp, Artificial Sequence
  ENSG00000149970_84 (sequence is synthesized)
atgaattaagagagctagtatttaattacaaacattcaaattatagtataaacccctgaatacttaatcatccttatcataaaacctccaaagacattaagtccattaaaagtttgtcac

SEQ ID NO: 419121 - DNA, 120 bp, Artificial Sequence
  ENSG00000149970_85 (sequence is synthesized)
cttacatataaataaattattcattatggcttgctagtaaattcatattcatggaaaatattcgggtgttctcaatgcaaatgttagttgccttttgtgacaagaatagtgtttcacata

SEQ ID NO: 419122 - DNA, 120 bp, Artificial Sequence
  ENSG00000149970_86 (sequence is synthesized)
cttgatatcattagcccggaagccttaaagcactctgcagctgtacaagaatgaatgtctctcaaatctgactatgtccagtcttctctaccatttgtgatttagtctttcccaaccttc

SEQ ID NO: 419123 - DNA, 120 bp, Artificial Sequence
  ENSG00000149970_87 (sequence is synthesized)
tgggctcattacacagctgtattgcagaaggaacaactgtttccacaaggatatcattgtccaattttacaagatcacagatcccttccgaaatatgtaccagaactcgttatccatcat

SEQ ID NO: 419124 - DNA, 120 bp, Artificial Sequence
  ENSG00000149970_88 (sequence is synthesized)
tggcttcattcttcaagagcccaattggtttacttatttgttttgttttcattttttatgctccttcaacattgtcattgcagggatgtgaaaatggggtggatactagagtaaaatttt

SEQ ID NO: 419125 - DNA, 120 bp, Artificial Sequence
  ENSG00000149970_89 (sequence is synthesized)
aggttgccaagtttcatgaacaatatgatacaatagattgtcctaataattacacagtcacctgttagggaaccctttttggagtagttcatatataaagaaaaccatcactctgtttga

SEQ ID NO: 419126 - DNA, 120 bp, Artificial Sequence
  ENSG00000149970_90 (sequence is synthesized)
atgtgttgggttgcatgaggcactgtgccaggtagaagaaggggaaatgcaaatatgagtgggacaaattctactcgtggaaaagtcacagtctaagtctctgaagtagggcacacaagg

SEQ ID NO: 419127 - DNA, 120 bp, Artificial Sequence
  ENSG00000149970_91 (sequence is synthesized)
gtccattaaggtacaggaagaaaaagcattggaatttttccttgggttttatctctcatccttttgaatttctttctgtgtatgttttataacttctatctattactatagagtaataca

SEQ ID NO: 419128 - DNA, 120 bp, Artificial Sequence
  ENSG00000149970_92 (sequence is synthesized)
tgtatataagtttctgttcgataaaacggaagtgttttaactaataagagtgtgcaatcagaaaaagtttggaaaccactgagcctgaatgtaagaaatacgtcaaccaaagactttttg

SEQ ID NO: 419129 - DNA, 120 bp, Artificial Sequence
  ENSG00000149970_93 (sequence is synthesized)
tatttttcattagctattcttttctttgggctttcagttatcacttactacctagaggtcataggcaacctgaaaaagacaaataatgatgctcactacattcctagattcacaatattt

SEQ ID NO: 419130 - DNA, 120 bp, Artificial Sequence
  ENSG00000149970_94 (sequence is synthesized)
catagtggagcagaatatgaaagggacaataaagaggatcttctttcaccccgtcaagtatgacacagccataaatgaccctccctcggcacagaatacaagttaattcatcaataactt

SEQ ID NO: 419131 - DNA, 120 bp, Artificial Sequence
  ENSG00000149970_95 (sequence is synthesized)
aattatgatcctcaaatccatcaatcaatgaaattttatgtaggaaagaaaattttatatgcactctttgcttcaataaaattggaattcaaaagtatgtaatctgacacaggactaatt

SEQ ID NO: 419132 - DNA, 120 bp, Artificial Sequence
  ENSG00000149970_96 (sequence is synthesized)
tacatgttgtaaacgtaaatataatttggggggaaatttatttctgcataggcccaggtttcctgaataaattagatacagattaaaatttcattatagcagtgatacagttcctcatta

SEQ ID NO: 419133 - DNA, 120 bp, Artificial Sequence
  ENSG00000149970_97 (sequence is synthesized)
ggaatcacagaaggttcctatatatgtcctgtgatttgaatgtggtctctacactttgccaactttcagaaaacattcattcaaattgcaaaagagctggttttcagccagtgttccagt

SEQ ID NO: 419134 - DNA, 120 bp, Artificial Sequence
  ENSG00000149970_98 (sequence is synthesized)
ggctgaactggcacattgaaagaaagtcaatcaggaagcagacctcaccaagtgcttgcctcctcttccaaagcaagcctcttctaaaggaagaaaaagcaagggttgaaaaaagagaga

SEQ ID NO: 419135 - DNA, 120 bp, Artificial Sequence
  ENSG00000149970_99 (sequence is synthesized)
tcttcttttatgtttatataagactatatttctggcataggaatctcaatttcctttaataagtttttgggttgtgagagttacttaggcgcttttgaatctttataattgatctgtctc

SEQ ID NO: 419136 - DNA, 120 bp, Artificial Sequence
  ENSG00000149970_100 (sequence is synthesized)
gagctaatgatgtggacaaagcagcctctgaatgtgggaatctatgaatttcaacagacactgaacattttggtatttttttcctggaggagttatggtagtggaagtttgtgatgcatg

SEQ ID NO: 419137 - DNA, 120 bp, Artificial Sequence
  ENSG00000149970_101 (sequence is synthesized)
ataagaagttttatgaagataaatgaaaatgaaggagaattgaaaatggtgacttctgaattaatttaatttggtactcatttagcttcaattacattctttcacctccctccctaccaa

SEQ ID NO: 419138 - DNA, 120 bp, Artificial Sequence
  ENSG00000149970_102 (sequence is synthesized)
agttccttaggtttaaaggaagtttaagagttttataataaacaccacaatgttacctgctcatgaaagttggttttttgtttgtttgttttgtttgttttactttggtttgttctggtt

SEQ ID NO: 419139 - DNA, 120 bp, Artificial Sequence
  ENSG00000149970_103 (sequence is synthesized)
ttaatagttattccttcccctagggtgggttagctaaacaaaactgatattctttataactcgcattcattcttagaagggtaagtaagcacgtggatattgccaacactagatgtctat

SEQ ID NO: 419140 - DNA, 120 bp, Artificial Sequence
  ENSG00000149970_104 (sequence is synthesized)
atgtctatgagttgtatttttttattatgtaataataaatataatcatgtttgatattttgttcacctgattaaaaagtgtattggttctagatttaacccaagagagagattttttaaa

SEQ ID NO: 419141 - DNA, 120 bp, Artificial Sequence
  ENSG00000149970_105 (sequence is synthesized)
atgttagtttggtgctatagtgtttccactttctccctgtatatgaatttaccaattaatgatattttggaaaatagaaatcttgacaactagcattaataattgaattcagataatata

SEQ ID NO: 419142 - DNA, 120 bp, Artificial Sequence
  ENSG00000149970_106 (sequence is synthesized)
ttctttaagatctctaagcaagtttaactttttctgtggcttttctttttcatacatctatataactgttcagaaggcaaagcctttattgactaccactgatttttcagtttgaggcca

SEQ ID NO: 419143 - DNA, 120 bp, Artificial Sequence
  ENSG00000149970_107 (sequence is synthesized)
tctatcctagagagtaagttttctgcagatatgtggcaaattaattctggttatctgtagttcctagtgctgttgtggcttttatgggtgttttcctgggaaggaatatgatgaaaatca

SEQ ID NO: 419144 - DNA, 120 bp, Artificial Sequence
  ENSG00000149970_108 (sequence is synthesized)
gcatatcagacatagcatgccatcattgtgatctgtaagtgctatatctaatgttgattacatttagaacttctgttaagtaattataatctaaaatttttttattccttttagttacat

SEQ ID NO: 419145 - DNA, 120 bp, Artificial Sequence
  ENSG00000149970_109 (sequence is synthesized)
ctacaaagtccagttttatttttaaaacacttcaatctatagcaataaggattggcctttctatgtatccccttttagtagttataagggaaaggaagtcccctaagcatgatttttaga

SEQ ID NO: 419146 - DNA, 120 bp, Artificial Sequence
  ENSG00000149970_110 (sequence is synthesized)
gtgaaaaattatgaactaatacaacattgtattaaactagaagtcagaacacccagatacaaataacttacataaaatataactatgagagtgatcttgaagagatgggagagtaaattt

SEQ ID NO: 419147 - DNA, 120 bp, Artificial Sequence
  ENSG00000149970_111 (sequence is synthesized)
aaccaccttggccttgatctagtcatgtaggtgagggagatgaggagatcatctttaaagctccttctggctcttagtctgtggttctaaaaagaaaaaagcctgactttttttctctaa

SEQ ID NO: 419148 - DNA, 120 bp, Artificial Sequence
  ENSG00000149970_112 (sequence is synthesized)
tttccactgaaatcattgggagaaataaccttgtaaaataagtcaaaacaatgctaattaatgggctttatgaaatcttgattttttaaggaaggtatagccctggacaggtcctttatt

SEQ ID NO: 419149 - DNA, 120 bp, Artificial Sequence
  ENSG00000149970_113 (sequence is synthesized)
gttttcatttgaaagaggtagatctgggaacttaaaatgctaagaaccagattcagttaaacagtttaggagagagctagaagagaaaagaaatgaatgcccatcacttgccaggtattt

SEQ ID NO: 419150 - DNA, 120 bp, Artificial Sequence
  ENSG00000149970_114 (sequence is synthesized)
ttctcacacctctatagagtagatattaattttctcattttgcaaatgagaaaataaaattgcacatattcaccagtttgctctgtatcacatatagacaataaataacagaggcagggt

SEQ ID NO: 419151 - DNA, 120 bp, Artificial Sequence
  ENSG00000149970_115 (sequence is synthesized)
ttaagtccaggtaaatctagatgaagtacatctgaacaaagctttttttactattccacattcaaattttgaattgctaaacaggtatgagaagcttaggaggatgactttaaaactgaa

SEQ ID NO: 419152 - DNA, 120 bp, Artificial Sequence
  ENSG00000149970_116 (sequence is synthesized)
attacttagagaaatttgtttttaaaggacaaggggcagcacttcactgggaattgaaaggaaggaaaagaaaaactcaaaatgttgaatattaatagaaagagttaagtataaaactat

SEQ ID NO: 419153 - DNA, 120 bp, Artificial Sequence
  ENSG00000149970_117 (sequence is synthesized)
tttttgtgattcgtatcaaaggggaagtactaaacagagaatttacatggcttattcaaggtatcgttttaaaactcagtcacgtttaagtaagtttagtcagtcacatttgaaataaac

SEQ ID NO: 419154 - DNA, 120 bp, Artificial Sequence
  ENSG00000149970_118 (sequence is synthesized)
caattttaggattttgatttaggattttggtaattagccatagtaaatgtctaaatgataaatgaaggaaagaaatagaaagcggtgggagaataccaagatttaatgaaatttaattag

SEQ ID NO: 419155 - DNA, 120 bp, Artificial Sequence
  ENSG00000149970_119 (sequence is synthesized)
cttagaaatatccacagaaggtgttcttccaatgttaggacagaacatgtctcataggcaaaaggtaactgatttgttctcctgctgataaactggatacatcgtttatcagctttctaa

SEQ ID NO: 419156 - DNA, 120 bp, Artificial Sequence
  ENSG00000149970_120 (sequence is synthesized)
ttagtcaaatctcctagaatttcttaggtttaacagtcctaaagcattgtaaggactggtgagaaacaaccttagttatgattgaaccatatgaaactttcttctaaagtgcttttaaac

SEQ ID NO: 419157 - DNA, 120 bp, Artificial Sequence
  ENSG00000149970_121 (sequence is synthesized)
tcagagccaaggcatgagccaaatagagaggaagggactggggtcatccctggggaaacctcttggcctcagggagttctttttctatttgggtacttggaccatctccaaatatgcctt

SEQ ID NO: 419158 - DNA, 120 bp, Artificial Sequence
  ENSG00000149970_122 (sequence is synthesized)
attccaccaacttgactgagaggttgctttggctcctgttggttaaccaacatttggagacagagcaaagcaaatgtcattttggcaacctgagcaggagagagggagctgtgcaagtca

SEQ ID NO: 419159 - DNA, 120 bp, Artificial Sequence
  ENSG00000149970_123 (sequence is synthesized)
gctctagaattaattaatgaatttttaagaagagagaaaaggaggaatgaaggttttgatgaaatggaaagccatatttgtcacggttccagaaaaagagtcatttgaattacatgtcct

SEQ ID NO: 419160 - DNA, 120 bp, Artificial Sequence
  ENSG00000149970_124 (sequence is synthesized)
cctgctgtttggccctttctcagaggtgaacaatgaatcagatgtatttctctggaccctttcttattcagaagatgattagtttgaaactcatccaagcaacttatttcttctctttct

SEQ ID NO: 419161 - DNA, 120 bp, Artificial Sequence
  ENSG00000149970_125 (sequence is synthesized)
tttggtgcctgacttttggccatttttctcattactactatgagagggagattaaaaaagacaaagaagtcagttttgattattaaaagcagttacaacatggtttattgagtttagaag

SEQ ID NO: 419162 - DNA, 120 bp, Artificial Sequence
  ENSG00000149970_126 (sequence is synthesized)
gaagtgaaaatattacataaaacaaaatatctttattcttgtggcatttaaaaatttgttttatttctaccctattgctttatgtctatatgtagatacatctctaagcatttaaaattt

SEQ ID NO: 419163 - DNA, 120 bp, Artificial Sequence
  ENSG00000149970_127 (sequence is synthesized)
tcatctgaaaaaaaatagctttaatataaattgtacaatgttgtcatgatgagatcctcttcctataactactagatactgtctttggcttacaattgtcagttaagttcctggtatttg

SEQ ID NO: 419164 - DNA, 120 bp, Artificial Sequence
  ENSG00000149970_128 (sequence is synthesized)
taataattatacacagataaatttagagtcatagctatgctgtttccatgattttttattatcccaataactacagtgtcttttctaaacatttttctttaaatattaggctttctttat

SEQ ID NO: 419165 - DNA, 120 bp, Artificial Sequence
  ENSG00000149970_129 (sequence is synthesized)
gacctcatcatttatagaatcatttaggactcttgtcaaacacctttaattcgtagtcaatagtgaaagatacatggagaaaaatagaatcaacttctgcttacagttgtcaagatgttg

SEQ ID NO: 419166 - DNA, 120 bp, Artificial Sequence
  ENSG00000149970_130 (sequence is synthesized)
acagctgttgtgaaacctcggttcttcttagtttaaaagaacttaaacaagagatacacagcaaaggagatgtagcatagagcaatttattgcaaaggaaaaagaatattgtgaaagtta

SEQ ID NO: 419167 - DNA, 120 bp, Artificial Sequence
  ENSG00000149970_131 (sequence is synthesized)
ggtgcagaatagccagtacaccctgagagaggattcagggcaggctgctcctgaggatgagaccgccaagactggcactagggagactccctttatgggagtcttacgtgattatttata

SEQ ID NO: 419168 - DNA, 120 bp, Artificial Sequence
  ENSG00000149970_132 (sequence is synthesized)
tgggggtgggaagagctgttactagtaagcatgttctgggtggtcctctgggtgtgcacgtgcacagtagctgtacatgcctgttcatatgttgcatgtctctttagcatcttaaatctc

SEQ ID NO: 419169 - DNA, 120 bp, Artificial Sequence
  ENSG00000149970_133 (sequence is synthesized)
cacccagggctgtgctttttactattataatgagcaaaggcttagtttgaggacaggtaaaatcaaaatgcacgtgctccctccgggggaaatttcctagctgtgcttgaatgagcttga

SEQ ID NO: 419170 - DNA, 120 bp, Artificial Sequence
  ENSG00000149970_134 (sequence is synthesized)
ctacattgtgaatgctggggcttattgtgttaaccatacattcgccacagttgccaaattccaaggacatgttaattccttgactacctatcctgcctcaaagagagatgggtaattgaa

SEQ ID NO: 419171 - DNA, 120 bp, Artificial Sequence
  ENSG00000149970_135 (sequence is synthesized)
atgaatttgtaaaatatcaatcccagttattcttttagctacatttcatatactacatatttgctaaagtggtcttagtcttttagaacagatattaaaaagtgaatgtttgactttaat

SEQ ID NO: 419172 - DNA, 120 bp, Artificial Sequence
  ENSG00000149970_136 (sequence is synthesized)
atctacagtcatcaaatattctaataagaaaagttaaggtgtacaactctcctaactgtaaataaagccataaatcaggagcccagtggttgagagtgtggactctggagtcagactgcc

SEQ ID NO: 419173 - DNA, 120 bp, Artificial Sequence
  ENSG00000149970_137 (sequence is synthesized)
tgggcttgaaagctggcttcaccaccttgggcagactccccagcctctctgtgcctcagtttccttatctctaaaacagagataatgatagtttccactacatagactattgtgaaataa

SEQ ID NO: 419174 - DNA, 120 bp, Artificial Sequence
  ENSG00000149970_138 (sequence is synthesized)
gtgcaagacacttaaaacagtccctggcacattgtaacaagtagatattaatggtggtgatagataatgatggatgataattattttgtgtgtccgaacagtgtattttgttttgttcac

SEQ ID NO: 419175 - DNA, 120 bp, Artificial Sequence
  ENSG00000149970_139 (sequence is synthesized)
tcactttttccactttatcctctcacaacccttatatgtcaaaaactaaaaattggccaggcaccgtggcttatgtctataatcccagcagcgtgagaggccaaggcaggcagatcacct

SEQ ID NO: 419176 - DNA, 120 bp, Artificial Sequence
  ENSG00000149970_140 (sequence is synthesized)
tcttttctagaaacattgatgtaatgttcttagactctactggaatgtaagcactccaaaatacaatacctttcacacctggtcagccaagaaaaaattgtcttgatgactgtttgcagc

SEQ ID NO: 419177 - DNA, 120 bp, Artificial Sequence
  ENSG00000149970_141 (sequence is synthesized)
aggaacggatttattagtacagatatctaagccatagttacagagtatcattaccttcacacctttgtatataataaactaaccaagagtcttggctcttcaggatgaaaaagcagaagg

SEQ ID NO: 419178 - DNA, 120 bp, Artificial Sequence
  ENSG00000149970_142 (sequence is synthesized)
attcattagcctgcctgaatttaaaattgatagagccagtgaatgccgcaaaaaatagtaagttgattttatttgggaagagggaacgatagtttttttttttaatttccagcttttaaa

SEQ ID NO: 419179 - DNA, 120 bp, Artificial Sequence
  ENSG00000149970_143 (sequence is synthesized)
ttataggttgctcatttaatgctttcacattgaggtaataagaaagcagttttgtgggcagaaaattgaactttttactgatttctgtcaccatgatagaagcattatatatgtgaactc

SEQ ID NO: 419180 - DNA, 120 bp, Artificial Sequence
  ENSG00000149970_144 (sequence is synthesized)
aggacataaaactggtgaagagggaaacttctctttttcttcttttgttgcttttcccttttttcttctcctcttttgataatcgaaatgcaaatagaagaaaaaaactctgattctcaa

SEQ ID NO: 419181 - DNA, 120 bp, Artificial Sequence
  ENSG00000149970_145 (sequence is synthesized)
ccagctggacctgatattttcttccttccttaaatttattatattagtgccaaataacagttccctgtttgtaacatcttttataacagtaagacttgggtatatcagaaccttaagtcc

SEQ ID NO: 419182 - DNA, 120 bp, Artificial Sequence
  ENSG00000149970_146 (sequence is synthesized)
agagtgtatgtctcataagcagggctcttcatagatgaaccactcatgtgctaggctctcacactgccagttgagaaaggaaagaatattgattgacagtgttacatacatacagtctag

SEQ ID NO: 419183 - DNA, 120 bp, Artificial Sequence
  ENSG00000149970_147 (sequence is synthesized)
acgtttgaagtttgacccatgaacaaggctctgccgacctaaacctacttaaaaggatggcatcagaaatagatgtctagaccacttctaagtttgaaccatgtagctgtggtgaatcct

SEQ ID NO: 419184 - DNA, 120 bp, Artificial Sequence
  ENSG00000149970_148 (sequence is synthesized)
ttctgatgctgagctttaatccctgtacagttctgggtttaagcaccaggtttaagtcatgtcatttggatagttcattatgtgattgagctcttctggaagttaatgcggaaaataaat

SEQ ID NO: 419185 - DNA, 120 bp, Artificial Sequence
  ENSG00000149970_149 (sequence is synthesized)
ttaaacaccatttttttttctgtttattcagcaattccttagtcgcagtccccaaagaggtcaaatgttaaacttccttcttaccccttcctaatgtagtggatatacatcaacaagtca

SEQ ID NO: 419186 - DNA, 120 bp, Artificial Sequence
  ENSG00000149970_150 (sequence is synthesized)
gaagtacagatgtatttcagtttatgcaacagatgctttctggggaatataaagcaaatttctgggtagtgaattctaattttcttctacataccattatgaaatcaggaggtgagattc

SEQ ID NO: 419187 - DNA, 120 bp, Artificial Sequence
  ENSG00000149970_151 (sequence is synthesized)
cttatcaacaagctgagttgactagtccaggaagttgtgctattgggactatatctttacctccttcccctctatccccaactactctttgaatttccgtttaccctgctaagtcttgtc

SEQ ID NO: 419188 - DNA, 120 bp, Artificial Sequence
  ENSG00000149970_152 (sequence is synthesized)
tctctgatctttactggcctttctacattttccttatgtctactgtattcatttctttttcaacaattacatattcatgctcaaacagtgctatcacggggaatgcaaagatgaaaaaga

SEQ ID NO: 419189 - DNA, 120 bp, Artificial Sequence
  ENSG00000149970_153 (sequence is synthesized)
cagtctgtactcctgaaacatatacagtccattaagaaagacaatagccatcagaagacaacatagatttaaagaaaattccaggggagtgtagaaggaaatgaacacttctgagggatt

SEQ ID NO: 419190 - DNA, 120 bp, Artificial Sequence
  ENSG00000149970_154 (sequence is synthesized)
caggaagtgtaggtaagatatgcatttggtcttgcaggatgatgagatgtttgccagacaaaaagttggagaaaagttatctaggcagaagaaatatcatgtgtaaagacagaattgtga

SEQ ID NO: 419191 - DNA, 120 bp, Artificial Sequence
  ENSG00000149970_155 (sequence is synthesized)
tcttttatcctttaattcatgttgggctcctcaaaggaagacatctttgtttagttcatattttttattcagctttctgcccagtgcttagctcataaaagatgctaaattaatgttatc

SEQ ID NO: 419192 - DNA, 120 bp, Artificial Sequence
  ENSG00000149970_156 (sequence is synthesized)
ttactgaattaaactctctgtctttcttcagagaagcataatttttctcttacctgcatagcctttgactttgaagtttctgttcctcatataaaggaagacatagaaaaattagcagat

SEQ ID NO: 419193 - DNA, 120 bp, Artificial Sequence
  ENSG00000149970_157 (sequence is synthesized)
tccttttgtttctttaagctatactatattttcgtctaccttgtcttgaagttattccttatgtgaataaatgtttatggcagctgatgagaatcaaaggtttatttagtcacttgttta

SEQ ID NO: 419194 - DNA, 120 bp, Artificial Sequence
  ENSG00000149970_158 (sequence is synthesized)
ttcatgcaacatatatttattaagcatcagatatattgtttgcatcatgttattctagaaagaagtaagctgttcatgatttggaggtgtaataatatttcaagctattaagctataatt

SEQ ID NO: 419195 - DNA, 120 bp, Artificial Sequence
  ENSG00000149970_159 (sequence is synthesized)
tagtatgctttaatagagagcaaagatattaactgaaagagtaaaaatgtaaataaaaatatatatatagcttaacgtatggtccttaatttgtgttctgacaatacactttttattagg

SEQ ID NO: 419196 - DNA, 120 bp, Artificial Sequence
  ENSG00000149970_160 (sequence is synthesized)
aactgtaaataaatcatttatgacaggataagaacagttttcatttcatttttcatgtacttataatttcaggcattttgcatgaaagatttgatgtttgcaattgctgggatttgtttc

SEQ ID NO: 419197 - DNA, 120 bp, Artificial Sequence
  ENSG00000149970_161 (sequence is synthesized)
tttgcaacataattgcttggttcattcatcttaaaataatttattttccaaaaaaattcattaaagcaagccttttaggactcactcatatttataaagcaatgtattataaagctaaaa

SEQ ID NO: 419198 - DNA, 120 bp, Artificial Sequence
  ENSG00000149970_162 (sequence is synthesized)
aggtgctacacgatgcattcaaattaagaactctgaataaaatggcattgacattgtaaaatctgttgttgccaatattaagtatttctagttaagtggttagtgaaaatttgccactag

SEQ ID NO: 419199 - DNA, 120 bp, Artificial Sequence
  ENSG00000149970_163 (sequence is synthesized)
tgaggatatagctgaccttatttttctaaaatgttaaatacatttctttatttctttcaaatgcttttgcatgcatatgattgaaagagaaggctgatatgaacttagcataaattcatt

SEQ ID NO: 419200 - DNA, 120 bp, Artificial Sequence
  ENSG00000149970_164 (sequence is synthesized)
aagacttaaatggctgtgttgaatcagttctaagtcattactggttctggcacatggtaatggccaagtatatgaacaaataagtaacatatatgacaaacacagcagctaagtacattt

SEQ ID NO: 419201 - DNA, 120 bp, Artificial Sequence
  ENSG00000149970_165 (sequence is synthesized)
catgtataagtttttgttttcttgaggtagtcctttttatactaatagtaataccaagttttgctatgcatatccaataaaaagcaaatctgtggtgaataaacctgcatttttaaaaag

SEQ ID NO: 419202 - DNA, 120 bp, Artificial Sequence
  ENSG00000149970_166 (sequence is synthesized)
ttgaggcagtgccctccgtacccctggcctaacacaaaaggtgcttgatatacttgtcagttctttaaatggtaggtaagggtgtgtgatttactggtgacttaccatgtcacaacaaac

SEQ ID NO: 419203 - DNA, 120 bp, Artificial Sequence
  ENSG00000149970_167 (sequence is synthesized)
catccacttacatgaaagaaatagccagaaggtatctgtattggtagtaattgagaattgtaattataaaaattaacctgaggctgggcatggtggcatgcctgtaattccagcactttg

SEQ ID NO: 419204 - DNA, 75 bp, Artificial Sequence
  ENSG00000149970_168 (sequence is synthesized)
aggctgggcatggtggcatgcctgtaattccagcactttgggagcctgaggagggccaagaccacatctctacaa

SEQ ID NO: 419205 - DNA, 120 bp, Artificial Sequence
  ENSG00000149970_169 (sequence is synthesized)
caggaacagaaaaccaaataccacgtgttctcactcatatgtgagaactgaataatgagaactcatgcacacaaagaagggaacagacactggggcctacttgagtagggtggatgggag

SEQ ID NO: 419206 - DNA, 120 bp, Artificial Sequence
  ENSG00000149970_170 (sequence is synthesized)
gagggagaggagcagaaagaataactattgggtaccaggattagtgcctgggtgatgaaataatctgtacaaaaaacccctgtgacacgcatttacctgtataacaaaccttcacgtgta

SEQ ID NO: 419207 - DNA, 120 bp, Artificial Sequence
  ENSG00000149970_171 (sequence is synthesized)
gttactgataggtgaggaattactccttcatttaggcaattgttttgcttattctttgttgctttcttctctttttgttttatctttgcagtttggtggttttctgtagtgataaggttt

SEQ ID NO: 419208 - DNA, 120 bp, Artificial Sequence
  ENSG00000149970_172 (sequence is synthesized)
gattcatttatctttgtcatttgtgtttctactctaccagtgacttttattcttttgtgtgcttccatgatggaaattactgtctttttgcttatagatgtaggattcccttaagtattt

SEQ ID NO: 419209 - DNA, 120 bp, Artificial Sequence
  ENSG00000149970_173 (sequence is synthesized)
cttttaggcctggtctagtggtaatgaattccctcagtcttttcttgtctgggaaagactttatttctccttcattgctgaatcatggctttgctcgttgtagtagtattagccaacaat

SEQ ID NO: 419210 - DNA, 120 bp, Artificial Sequence
  ENSG00000149970_174 (sequence is synthesized)
ttttttctttcagcactttgagtatatcatcccattctttcttggtctgtaaagtttctgctgagaaatccactgttattctgatggaggttctttttatgtgatctgacacttttttct

SEQ ID NO: 419211 - DNA, 120 bp, Artificial Sequence
  ENSG00000149970_175 (sequence is synthesized)
tactgtttttaaatttttttctgtgtctttgacttttgacaatttgaatataatgtgatttggagaagacttttttgggtttgaatctgtttgcggttctttgagcttcctgtatgtttg

SEQ ID NO: 419212 - DNA, 120 bp, Artificial Sequence
  ENSG00000149970_176 (sequence is synthesized)
atctgtttgcggttctttgagcttcctgtatgtttgtatggtatatcgcttgcaaaacttgggaagtttttagctcttattttgttaaatagtgtattagtcagggttctccagagggac

SEQ ID NO: 419213 - DNA, 90 bp, Artificial Sequence
  ENSG00000149970_177 (sequence is synthesized)
taaggaagccagtagtggctcagtccaggtcccaaagcctcaaaagtggagaagccaacagtgcggacttcagtatgtggccgaaggcct

SEQ ID NO: 419214 - DNA, 120 bp, Artificial Sequence
  ENSG00000149970_178 (sequence is synthesized)
gaagccaacagtgcggacttcagtatgtggccgaaggcctgagagccactggcaaaccgctgataaaagttcaagaatccaaaggctgaagaacctggagtctgattcaagggcaggaac

SEQ ID NO: 419215 - DNA, 120 bp, Artificial Sequence
  ENSG00000149970_179 (sequence is synthesized)
catctagcatgggagaaagatgaaagccgaaagactcagcaagccagcttattccacctccttctgcctgctgtttctagccatgctgacagccagttggatggtgccacccacattgag

SEQ ID NO: 419216 - DNA, 120 bp, Artificial Sequence
  ENSG00000149970_180 (sequence is synthesized)
gatctttgggaaaacttggttccagctcttgctctgaaattgacttatggctttaagtgagtcatggtaactgtgcatctgtttacctttttctaatgataataaccatagctaacactt

SEQ ID NO: 419217 - DNA, 120 bp, Artificial Sequence
  ENSG00000149970_181 (sequence is synthesized)
attgtgttcttacagtgtgccaagcatcatgttaagtattttacatattttatttcatttagtccatgcaataatcctgcaaataaggtatatgtagaaattgagactcagaataattat

SEQ ID NO: 419218 - DNA, 120 bp, Artificial Sequence
  ENSG00000149970_182 (sequence is synthesized)
tcagctcacccaaaactcaaagttctttgactctaagacccatgttcttacttcaattttattatactccctcccaaaactcaaaaattatataactatccaacaaaagaggaagaatcc

SEQ ID NO: 419219 - DNA, 120 bp, Artificial Sequence
  ENSG00000149970_183 (sequence is synthesized)
taacaagcatgtaagtaaatctcaggattcaatgaaagattaagtggggccaaggtaggagaagaagaaaggaagtgagaatttacatagctgggatagcgagccagctgaactgaaatt

SEQ ID NO: 419220 - DNA, 120 bp, Artificial Sequence
  ENSG00000149970_184 (sequence is synthesized)
agaaatagggttgaaacttaactttactgccacttcctcactctgcttctttcactcagataagtaagatatgtaaaaacacctgtcataatgccgggcacacattaggagctcaataac

SEQ ID NO: 419221 - DNA, 120 bp, Artificial Sequence
  ENSG00000149970_185 (sequence is synthesized)
aactttgcaaccgcctttcttctcttttacctgctacaacagttggaccaattggaatcctccttcttggcatactgctactagagccaacaaattgattttggaatataatagagacaa

SEQ ID NO: 419222 - DNA, 120 bp, Artificial Sequence
  ENSG00000149970_186 (sequence is synthesized)
gatagtatgttgaatttcatgaaagtagacttttttaataatatgatcggttgccaggtttttttgtgttcaagtagaggcatatttgggcaaaaccaatgcatttcactaaatgtagcc

SEQ ID NO: 419223 - DNA, 120 bp, Artificial Sequence
  ENSG00000149970_187 (sequence is synthesized)
tactctgccctctttttcttgctgttgcctgtattgtggtctgtacagtgcatttaatctcttattagataatatacagaggtggtgaaatggaaattctcttaattgaagcaagtataa

SEQ ID NO: 419224 - DNA, 120 bp, Artificial Sequence
  ENSG00000149970_188 (sequence is synthesized)
attatttatagtctgcaattatcccttctctccctacgttcattaccatagggtttggttatgatataatagttacattaaagtatggcctaataaatttgaaatacataactaatatta

SEQ ID NO: 419225 - DNA, 120 bp, Artificial Sequence
  ENSG00000149970_189 (sequence is synthesized)
tttagactcattaatgaaaagaacaatgttaaatcttataattttggatgatactaacccagttagtatttttctgtaattctaaaatttcctatgactataggtagtaatgtaaaatat

SEQ ID NO: 419226 - DNA, 120 bp, Artificial Sequence
  ENSG00000149970_190 (sequence is synthesized)
aaaattattttaaatatttccctaagagtctaagaaagttgaataaatcagatgaattcaaatactatttttttaaattgctagtatggtatatcttcaagatgtctaattagatgccta

SEQ ID NO: 419227 - DNA, 120 bp, Artificial Sequence
  ENSG00000149970_191 (sequence is synthesized)
tatggtatatcttcaagatgtctaattagatgcctatgtttctagtttgctccttttttaaaagtattttcttaattgaaatgaaactggaagttttatgtcctttttcatgttgctata

SEQ ID NO: 419228 - DNA, 120 bp, Artificial Sequence
  ENSG00000149970_192 (sequence is synthesized)
taatgaggaggtaagataaagcaccttttgttttctcatccattctctatctttaatcaaaagaatcattttgagacttatattttaaaatcgtataatcaccttaaggccaattcagta

SEQ ID NO: 419229 - DNA, 120 bp, Artificial Sequence
  ENSG00000149970_193 (sequence is synthesized)
gacttctgctaggtatttttcaatccaccctcttaaaatgattgcatgttggggttctagaaagatagctgtctcaattatgctaatgtagcaacatatctgaaacacagataaagtgta

SEQ ID NO: 419230 - DNA, 120 bp, Artificial Sequence
  ENSG00000149970_194 (sequence is synthesized)
gtaaaattctgtatatctaaataaaaatgcgaagctaatccaagcagtagcttaactaaaaggattatatgtggaaatttgacattaatttttaaatgtcttgcttttgttcaaaatttt

SEQ ID NO: 419231 - DNA, 120 bp, Artificial Sequence
  ENSG00000149970_195 (sequence is synthesized)
acacttttttctggttttttttttctttttagaagtggggaaggggaagccctttactaatttaagtaaactaataccacctgaatttatttccatttttctttaaaaatgatctagtag

SEQ ID NO: 419232 - DNA, 120 bp, Artificial Sequence
  ENSG00000149970_196 (sequence is synthesized)
actagttttgaaaatctgcaagtattcatttcacttggcccagtgggggggtatatatataatacatttaaattattcttatgattttctggggtgttttaatataacagatttatatcc

SEQ ID NO: 419233 - DNA, 120 bp, Artificial Sequence
  ENSG00000149970_197 (sequence is synthesized)
agaggagtcatatcaaaacttattacgtatcttgacagatatgccaaaaacatttgttgatattccctttattctgcatttgcttttattcctttgctatagccatctactagttcactt

SEQ ID NO: 419234 - DNA, 120 bp, Artificial Sequence
  ENSG00000149970_198 (sequence is synthesized)
tattagttttttaaaacaatgatttctgctatttccttattttataaaaaatgtacatggcttaatgtagtgtgctgggtgaatagtccaatactattatgttaagacattcatcaattt

SEQ ID NO: 419235 - DNA, 120 bp, Artificial Sequence
  ENSG00000149970_199 (sequence is synthesized)
gcatttgaatattgttgaaatataatttaacaacattattatgcctacgattacaaaacataatatctagataattttatgttccctagacaggttataatgtagtgttatgttgtgttt

SEQ ID NO: 419236 - DNA, 120 bp, Artificial Sequence
  ENSG00000149970_200 (sequence is synthesized)
aagagtagactcagaaatcataccacctgagttactgtgccatagtttcttcatctgcaaaatgagagtaataataatgcttatcactggactatcatatggatgaaatgaatcaatgcc

SEQ ID NO: 419237 - DNA, 120 bp, Artificial Sequence
  ENSG00000149970_201 (sequence is synthesized)
tatcatatggatgaaatgaatcaatgcctggcacatactgagtgttcaataaacatgtggtaggctgggcccagtggttcacacctgtaatgacagcactttgggaggttgaggcaggag

SEQ ID NO: 419238 - DNA, 69 bp, Artificial Sequence
  ENSG00000149970_202 (sequence is synthesized)
ggcaggaggatcacttgagctcaggagcttgattagccaagcgtggtggtgcacgtctgtagtcccagc

SEQ ID NO: 419239 - DNA, 120 bp, Artificial Sequence
  ENSG00000149970_203 (sequence is synthesized)
cagtgagccatgattgcaccactgcactcagagcaagaccctgtctgaaaaaaatgtgtgctattagtaacatttttcaaagggacctctcattttatttgtaaaatcttgaattaatat

SEQ ID NO: 419240 - DNA, 120 bp, Artificial Sequence
  ENSG00000149970_204 (sequence is synthesized)
aatcttgaattaatatttttctatttaatgtaaatgtctatatcacctatataaaaatatttggttgttttctgtacttttgacatttttgtggcaaatcacacaattacctaaaatacc

SEQ ID NO: 419241 - DNA, 120 bp, Artificial Sequence
  ENSG00000149970_205 (sequence is synthesized)
ctctgcttcgctaagtgtgtcttattttaaatgtaggaaacaagccataattttacctacagtttcatttaatagatatatattaaatactttttatatgccaatcaaatattatcaaga

SEQ ID NO: 419242 - DNA, 120 bp, Artificial Sequence
  ENSG00000149970_206 (sequence is synthesized)
tatagtatctccatgtttctctttattgtaaggtcacttgcaggtttgtctgccacatactagattatatcctgtctttcaaagtttaagtgatgaaaaactgtggcccctttttgttga

SEQ ID NO: 419243 - DNA, 120 bp, Artificial Sequence
  ENSG00000149970_207 (sequence is synthesized)
actaagtttcattcagcaagttattgttactgttagccttgtgagagatgagtgaagaattctacagtatacattgcaagaaatacctttaatatgataatatttttaggagaaatgtaa

SEQ ID NO: 419244 - DNA, 120 bp, Artificial Sequence
  ENSG00000149970_208 (sequence is synthesized)
aaatccctcatcacatcattatggggagataataactacctcaaaatattttaaattgttcaaaattttaaatatttacattatgaatgtcaagggtaaagtaacatagaaattaaagtt

SEQ ID NO: 419245 - DNA, 120 bp, Artificial Sequence
  ENSG00000149970_209 (sequence is synthesized)
gggaaaaggatttaaaaatactgtcttgtccttactccaagattggaagaaaaaatattcaaatactgaaaaagtttaatactactctttttcataacacatattcagtcactatcagta

SEQ ID NO: 419246 - DNA, 120 bp, Artificial Sequence
  ENSG00000149970_210 (sequence is synthesized)
gcatcagatttttgttttgcgtggaagcttagcagtgaaagcagtcatacaaatatacaatctaaaagaatcgagaactctttttttcctctgtgatagtggatgggagtataatctcac

SEQ ID NO: 419247 - DNA, 120 bp, Artificial Sequence
  ENSG00000149970_211 (sequence is synthesized)
aagggatacaatgattaaagcatttagcaaaagatagttttagcttagttgggataactcgtatctaacataatattttggataattcttctgtcttgtttttccatccagcattagaga

SEQ ID NO: 419248 - DNA, 120 bp, Artificial Sequence
  ENSG00000149970_212 (sequence is synthesized)
gagcaggattttatggattttattccattttccaggtgaaaaatgacctttatatatatatagcacataccccaagccagatatttgaaagtcagattgacctatttcatttgtaaactc

SEQ ID NO: 419249 - DNA, 120 bp, Artificial Sequence
  ENSG00000149970_213 (sequence is synthesized)
ttgaatgcacagaataattgttataagacgctgatgagcttgcagagaagacaagaatacttatatactgttggtgagagtataaattagttcagccattgtggaaagcagtgtggcagt

SEQ ID NO: 419250 - DNA, 120 bp, Artificial Sequence
  ENSG00000149970_214 (sequence is synthesized)
acctcaaagagctaaaagcagaactaccattccacccagcagtcccattacagggtatatacccagaggaatgtaaatctttctaccataaagacacatgcacgtgaatgttcattgcag

SEQ ID NO: 419251 - DNA, 86 bp, Artificial Sequence
  ENSG00000149970_215 (sequence is synthesized)
ttctaccataaagacacatgcacgtgaatgttcattgcagcactattcgtgatagcaaagacatgaatcgacctaaatgcatatca

SEQ ID NO: 419252 - DNA, 120 bp, Artificial Sequence
  ENSG00000149970_216 (sequence is synthesized)
aaaatcaaatttgataagagatttgttggaggaaaattgaatcagtgaacatccctatattttacatctgaacattaagaaaatagaaaattgtgaattacaaaagtggactacatttat

SEQ ID NO: 419253 - DNA, 120 bp, Artificial Sequence
  ENSG00000149970_217 (sequence is synthesized)
tttatatgttatagaagtgtatgtatgttctgaccagaaaattagttataaaacacattccactttgagaattaaagaattttccattctcattttaatatgaaaaagactttttaaaag

SEQ ID NO: 419254 - DNA, 120 bp, Artificial Sequence
  ENSG00000149970_218 (sequence is synthesized)
tgttaatttattagcaacttcatattccaacaatgggaagtatcctatgtaccaagagtttttaagatactggtttagaagtttctcaaagacaaaccattctaaagaaatgaaatgtgt

SEQ ID NO: 419255 - DNA, 120 bp, Artificial Sequence
  ENSG00000149970_219 (sequence is synthesized)
agttatttattgggagactgtgcatttagctcagttagcttaccagaagatataaaaggaacctgacctgtacacacacaaacaaatgtgcctaatagcttttaacagtgatctaattac

SEQ ID NO: 419256 - DNA, 120 bp, Artificial Sequence
  ENSG00000149970_220 (sequence is synthesized)
ctgaactgattttccacttcaaatattatctaagccagggatccccaaaccagatgccttcagggtccagcagctaatataaatgtttaaattaagtccggtataaggcaaggagaaatg

SEQ ID NO: 419257 - DNA, 120 bp, Artificial Sequence
  ENSG00000149970_221 (sequence is synthesized)
gaagagacttgggtgaattgactggaacatatcccatatccaaacatatcttttagaggaaatgtaattataggcatgatatattagtgcttgtaaattatctcttaaataatctgttct

SEQ ID NO: 419258 - DNA, 120 bp, Artificial Sequence
  ENSG00000149970_222 (sequence is synthesized)
ttttctactgttatgtgatgatatctcttttcagtaccaagtttttctgggctctgtggtctcttgctaccagtagtagcaagaagaataaggattaataggtaaaataatgaaataaaa

SEQ ID NO: 419259 - DNA, 120 bp, Artificial Sequence
  ENSG00000149970_223 (sequence is synthesized)
ggaggcagcaggggaaaacataggagaaaaaagatggaattgtgatttgggaatttagaggaacactcaaattatctggaaacagtattttcttacctgttttgcctatggcttaggttc

SEQ ID NO: 419260 - DNA, 120 bp, Artificial Sequence
  ENSG00000149970_224 (sequence is synthesized)
gcctgaagagaagtgagaaggagatgaagaagagggcaaaaagagaagaaaataaaggtgctttcatattttcagttgcaacagtagccccaattgacttaattggtattcatctgagaa

SEQ ID NO: 419261 - DNA, 120 bp, Artificial Sequence
  ENSG00000149970_225 (sequence is synthesized)
gccttaccatttataagctgttggatcccaggcatggtccctaaatttaaattttcttatctgtaaaatcaagataatgatatacagttcataaataatagaaggtattactattattca

SEQ ID NO: 419262 - DNA, 120 bp, Artificial Sequence
  ENSG00000149970_226 (sequence is synthesized)
gcatcaattcttctatatagaattgatataaaactattgaaagtgtagcctttttcaaaataagttaggacagagtaaatgagaacagtcccagaagaaaattatccttccttttaaaat

SEQ ID NO: 419263 - DNA, 120 bp, Artificial Sequence
  ENSG00000149970_227 (sequence is synthesized)
tttatttggttttcttgagaatccttgtgaaaacaaatcatatgctacttgttatagagcgactgcttgcttgtaggaggacgactgttaaggatgcctttgaagaacataaagaacagg

SEQ ID NO: 419264 - DNA, 120 bp, Artificial Sequence
  ENSG00000149970_228 (sequence is synthesized)
ggtttctcaggtcaacatgtattatattggtatctaaaaactatttgcaatgtttcccctttcattcattcaaatgccacttcagattgaatgccatctgggtactctacacagtattga

SEQ ID NO: 419265 - DNA, 120 bp, Artificial Sequence
  ENSG00000149970_229 (sequence is synthesized)
attcatcaagagtatgctagcatggactttagtccttggtagttttaattttttttttctggtaggtctagaagagtgtgatttcattagccactgttgtatgttattctttttcatttt

SEQ ID NO: 419266 - DNA, 120 bp, Artificial Sequence
  ENSG00000149970_230 (sequence is synthesized)
aataactgtatgtttctatctctctttacccatttatttttgcaagggtatgaatccactttattgttgagatgtgttttttcagtcttgagatggtccgatatagtcgaattaggtttg

SEQ ID NO: 419267 - DNA, 120 bp, Artificial Sequence
  ENSG00000149970_231 (sequence is synthesized)
attttggatcctctgggaccaggttttaattattggtttgcctgtgagttacttactgtgtacacttagagaattacctaatctcactgagctttaatttcttcacttctgaaattggta

SEQ ID NO: 419268 - DNA, 120 bp, Artificial Sequence
  ENSG00000149970_232 (sequence is synthesized)
taacagcagtctctttgacacgacttggcatctttctgtttacttcccatcctcaccattatcctgtaatcttctaaaggaatattctacatgcaaggccttcactttctcatttcccag

SEQ ID NO: 419269 - DNA, 120 bp, Artificial Sequence
  ENSG00000149970_233 (sequence is synthesized)
tcactgctcaatcccgtagtctgtctggcttctctttgccttattctaatactgttctggctaaaatcattgataatctcttaattctcagagtgctttagtccttatcttactagaatg

SEQ ID NO: 419270 - DNA, 120 bp, Artificial Sequence
  ENSG00000149970_234 (sequence is synthesized)
ctgtgttgcatttaacacttgtctgtcgtgcctttcttattattaccttgtcctctctgatccatttttgttttcattcttagatgcccctttgtctggccaaccctcaagttgtatgga

SEQ ID NO: 419271 - DNA, 120 bp, Artificial Sequence
  ENSG00000149970_235 (sequence is synthesized)
ccactatacctttcaccctatacagttgagggagattggttccaggaacccccacagataccaaactctgcaaatgctcatgtcccttatataaaatagtatggtatttggatataatct

SEQ ID NO: 419272 - DNA, 120 bp, Artificial Sequence
  ENSG00000149970_236 (sequence is synthesized)
atgaaatcctcttgtatactttaagtcatctctaggttacaaataatacctaatacaagtactgcattccttgaggtctgtgtcttatttacccttttatctccagcgttcacagcagtg

SEQ ID NO: 419273 - DNA, 120 bp, Artificial Sequence
  ENSG00000149970_237 (sequence is synthesized)
tctgacaaataattccttcatttttccccttgttcctgactttagagtcttccttttaaaatataaatcctgtttagctctgtgacactgtaattactaccaactccatttagatattca

SEQ ID NO: 419274 - DNA, 120 bp, Artificial Sequence
  ENSG00000149970_238 (sequence is synthesized)
gcacatatttgtaatagtatcaatttacatgtttattttatttacaaataactcagtgaactctcacacagatccataatgttgtcttatagttattaggcagggagtccctcatcttac

SEQ ID NO: 419275 - DNA, 120 bp, Artificial Sequence
  ENSG00000149970_239 (sequence is synthesized)
tcacaggctataaatctacctgcatctacacccatcttctcctccttccctcctttttcaatagagatatacagttcttatccacatttaaatatcttcaagtctctaacatctttaaga

SEQ ID NO: 419276 - DNA, 120 bp, Artificial Sequence
  ENSG00000149970_240 (sequence is synthesized)
aagaaaaacagactctctctctcaatcccatattctctagatatcctcttatttttctcttctcttacgtagcctgactgctttgaagactcctcaacccattcgatgctggcttattgc

SEQ ID NO: 419277 - DNA, 120 bp, Artificial Sequence
  ENSG00000149970_241 (sequence is synthesized)
catcactgtgaaaacaactctcaggaatatcactagtgactttcacattgctatatccagtgagaacatttcagccctcatcagtatacacatactaatggagaatgaaagaaaaagaag

SEQ ID NO: 419278 - DNA, 120 bp, Artificial Sequence
  ENSG00000149970_242 (sequence is synthesized)
attgtatagggaggctacaaagtaattctagttactttaaggaattttgagactatagtaaagacatctgtggccttatactagaccctgtcaggaatcacactgcttttaggactgact

SEQ ID NO: 419279 - DNA, 120 bp, Artificial Sequence
  ENSG00000149970_243 (sequence is synthesized)
acatcttttctaatttcatctctgttttttctattctcttataatttctgctcctccataacttcagctggaatgtagccccttatagcctctggtctccctccttgacataatgaggac

SEQ ID NO: 419280 - DNA, 120 bp, Artificial Sequence
  ENSG00000149970_244 (sequence is synthesized)
ctcttagtttcagctaattgccttattttcttggtattctttacttaaatttctagagcgttagttttattagtccagttcatcatttgtatcaggccacttcacaggtgattgaaaccg

SEQ ID NO: 419281 - DNA, 120 bp, Artificial Sequence
  ENSG00000149970_245 (sequence is synthesized)
cctcaatctatagcctagccaatcacttatgaattgccctgggtaatcctgatttctacttttggatttgagtaaaatccaaatgataatggattaaggagcgcatcacaggtgaggaaa

SEQ ID NO: 419282 - DNA, 120 bp, Artificial Sequence
  ENSG00000149970_246 (sequence is synthesized)
taagggtaagggcttgaatccaaagagggtgacagactagtggggagcacacatgatcaacaaaatcaaataaaggattttgtgttttattttaagatggcagagatttgaacatagaat

SEQ ID NO: 419283 - DNA, 120 bp, Artificial Sequence
  ENSG00000149970_247 (sequence is synthesized)
gagtcaataggcaatagttgaaacaaagagagaatttaattttttagttattgaagttgtgttaaggtggcagaagatgggactacagagtacagaaagatagattagctttaaatagga

SEQ ID NO: 419284 - DNA, 120 bp, Artificial Sequence
  ENSG00000149970_248 (sequence is synthesized)
aggatacctcttcctctgaagtggagtttaagtaagaaagtaagaatttgatgcagataaatttgaaaataggggaacctgcctgttggcatactttatgaaatagtcagcaaggagaac

SEQ ID NO: 419285 - DNA, 120 bp, Artificial Sequence
  ENSG00000149970_249 (sequence is synthesized)
tgcacagaagaaagataaagatttccagtacgtgctgaggaaaattcaactaggtacctaacaactacgagtatgatgaagtgattttctttttcactgtagcccatatgtaggttaaga

SEQ ID NO: 419286 - DNA, 120 bp, Artificial Sequence
  ENSG00000149970_250 (sequence is synthesized)
aagggcgaaggatttggctagttcagagttaaaatggacttaatttgtgacatggtagcattaatgcttgcttctaacccacccttcacatttatttggtttgaccatgttttcattctg

SEQ ID NO: 419287 - DNA, 120 bp, Artificial Sequence
  ENSG00000149972_0 (sequence is synthesized)
acaccagccgcaggaggcgccgcacctacttcccaatataaccaactacggcgtgggggagcggaactgcgagaaggcggcagccaaagtgccattaaagctcggggcggagaggatgcg

SEQ ID NO: 419288 - DNA, 120 bp, Artificial Sequence
  ENSG00000149972_1 (sequence is synthesized)
ttacctgggtcccgtctgctgcgagaggcagggcaagctggaggattccctctgaatgattaagaactccgcaattcgcctctgccacaggctgcaaaggacccgaggaaccgctctctc

SEQ ID NO: 419289 - DNA, 120 bp, Artificial Sequence
  ENSG00000149972_2 (sequence is synthesized)
tgaactgtgctgatgggcaggaggatgggagacaggaattgagagtcacagaggaaggacagtggagtctggcatcttattggtgtctttaaaggattgccatttaatgccattcaagat

SEQ ID NO: 419290 - DNA, 120 bp, Artificial Sequence
  ENSG00000149972_3 (sequence is synthesized)
ctactaagcatcatttttgcatgactactgcaaaaggattactttacagataccagttcctttgtcaagagcatactttggaccctgttttcagaaagcagggcactctttaatgaagaa

SEQ ID NO: 419291 - DNA, 120 bp, Artificial Sequence
  ENSG00000149972_4 (sequence is synthesized)
acaccagagctgttaaacacattgagacacagaagattctagtgactgaggatggcttcctcttggaaactaatgctgtttctgtcagtcaccatgtgtctttcagagtattcaaaatct

SEQ ID NO: 419292 - DNA, 120 bp, Artificial Sequence
  ENSG00000149972_5 (sequence is synthesized)
cttcctggtctctccacttcatatgctgctttgttaagaattaagaagagttcatcttcatctctctttggttccaaaaccagaccacgatacagcagcccttcattaggaacactgagt

SEQ ID NO: 419293 - DNA, 120 bp, Artificial Sequence
  ENSG00000149972_6 (sequence is synthesized)
gcttcttcacccagctggctaggggcagctcagaattattattcccccatcaatctttatcattcctcagatgccttcaaacaagatgaaagtgtggactatgggccagtttttgtgcaa

SEQ ID NO: 419294 - DNA, 120 bp, Artificial Sequence
  ENSG00000149972_7 (sequence is synthesized)
gaaccagatgatattatttttccaactgattctgatgaaaagaaggtagcattgaattgtgaagttcgtggcaatccagttcccagttacagatggcttcgaaatggaacagaaatagat

SEQ ID NO: 419295 - DNA, 120 bp, Artificial Sequence
  ENSG00000149972_8 (sequence is synthesized)
ctggaaagtgattatcgctacagtttgatagatggcaccttcattataagcaatccaagtgaagcaaaggattctggtcattatcagtgtttagcaaccaacactgtggggagtattctt

SEQ ID NO: 419296 - DNA, 120 bp, Artificial Sequence
  ENSG00000149972_9 (sequence is synthesized)
agtagagaagctacactgcagtttgcctatctgggaaattttagtggccggacaagaagtgcagtctctgtgagggaaggccagggtgtcgttctgatgtgctctcctccgccacattca

SEQ ID NO: 419297 - DNA, 120 bp, Artificial Sequence
  ENSG00000149972_10 (sequence is synthesized)
ccagagatcatctatagctgggtatttaatgagttcccttcctttgtggcggaagacagccggcggttcatctcccaggagacaggcaacctttatatttctaaagtccaaacatcagat

SEQ ID NO: 419298 - DNA, 120 bp, Artificial Sequence
  ENSG00000149972_11 (sequence is synthesized)
gttggcagctatatttgtctggtgaaaaacacagtgacgaatgctagagtccttagtcctccaacgccactcactctgcgtaatgatggtgtgatgggagaatatgagccgaaaattgag

SEQ ID NO: 419299 - DNA, 120 bp, Artificial Sequence
  ENSG00000149972_12 (sequence is synthesized)
gtccattttcctttcacggttacagctgctaaaggaacaactgttaagatggaatgctttgcacttggcaaccccgttccaacaatcacatggatgaaggttaatggttatattcctagt

SEQ ID NO: 419300 - DNA, 120 bp, Artificial Sequence
  ENSG00000149972_13 (sequence is synthesized)
aaggcacgtctgcggaaatctcaggcggtgctggaaataccgaatgtacagctggatgatgcaggcatttatgagtgcagagctgaaaactcacgtggaaaaaattcctttcgtggacaa

SEQ ID NO: 419301 - DNA, 120 bp, Artificial Sequence
  ENSG00000149972_14 (sequence is synthesized)
ttacaagtatacacctacccacactgggtagaaaaactgaatgatactcagttagacagtgggagccctctccgatgggaatgtaaggctactggaaaacccagacccacgtatcgttgg

SEQ ID NO: 419302 - DNA, 120 bp, Artificial Sequence
  ENSG00000149972_15 (sequence is synthesized)
ctgaagaatggagtacccctctcacctcagagtagggttgagatggttaatggagtattgatgatccacaatgtgaatcaatcagatgctggaatgtatcagtgtttggctgaaaataag

SEQ ID NO: 419303 - DNA, 120 bp, Artificial Sequence
  ENSG00000149972_16 (sequence is synthesized)
tatggagccatttacgctagtgctgagctgaagattctagcttcagctcccacttttgcactgaatcaactgaagaaaacaataattgttaccaaagaccaagaagttgtcatagagtgc

SEQ ID NO: 419304 - DNA, 120 bp, Artificial Sequence
  ENSG00000149972_17 (sequence is synthesized)
aaaccccaaggctctccaaaaccaaccatctcttggaagaaaggagacagagcagttagagaaaacaaaagaatagctattcttccagacgggagtctacggatcctaaatgcttccaaa

SEQ ID NO: 419305 - DNA, 120 bp, Artificial Sequence
  ENSG00000149972_18 (sequence is synthesized)
tcagacgagggaaagtacgtttgccgaggggaaaacgtctttggttctgctgaaattatagcttcgctatctgtaaaagaacctacaaggatagaacttactcctaaaagaacagaattg

SEQ ID NO: 419306 - DNA, 120 bp, Artificial Sequence
  ENSG00000149972_19 (sequence is synthesized)
acagtgggagaaagcattgtccttaattgcaaagcaattcacgatgctagtttggatgtcactttctactggactctgaaaggacagcctattgatttcgaggaagagggtggacatttt

SEQ ID NO: 419307 - DNA, 120 bp, Artificial Sequence
  ENSG00000149972_20 (sequence is synthesized)
gaaagcatcagggcccaagcatcctctgcagatttaatgatcaggaacatccttctgatgcatgctgggagatatggctgcagggtacagaccacagcagacagtgtgtcagatgaggca

SEQ ID NO: 419308 - DNA, 120 bp, Artificial Sequence
  ENSG00000149972_21 (sequence is synthesized)
gaacttcttgttaggggacccccaggcccacctgggatagtaattgttgaggaaataaccgaaagtacggccacactgtcctggagcccagcagctgacaaccacagcccaatctcctcc

SEQ ID NO: 419309 - DNA, 120 bp, Artificial Sequence
  ENSG00000149972_22 (sequence is synthesized)
tacaaccttcaagctcgcagcccattttccctgggctggcaaacagtaaagacagtcccagaaatcataacaggggacatggagtcagccatggctgtggacctaaatccctgggtggaa

SEQ ID NO: 419310 - DNA, 120 bp, Artificial Sequence
  ENSG00000149972_23 (sequence is synthesized)
tatgaatttcgagtggtagccaccaaccctattgggacaggagatccaagcaccccatctcgaatgatccgcacaaatgaagcagttccgaagacagcacccaccaatgtaagcggaaga

SEQ ID NO: 419311 - DNA, 120 bp, Artificial Sequence
  ENSG00000149972_24 (sequence is synthesized)
agtggaagaaggcatgagttagtcattgcctgggagccagtatctgaagagtttcagaatggggaaggcttcggctatattgtggctttcagacccaatggaacacgtggctggaaggaa

SEQ ID NO: 419312 - DNA, 120 bp, Artificial Sequence
  ENSG00000149972_25 (sequence is synthesized)
aaaatggtgacatcctctgaagcttccaaattcatttatcgagatgaaagtgtccctcctcttactccctttgaagtgaaagttggcgtttataacaataaaggagatgggccttttagt

SEQ ID NO: 419313 - DNA, 120 bp, Artificial Sequence
  ENSG00000149972_26 (sequence is synthesized)
caaattgtggtcatctgttcagctgaaggagaacccagtgctgctcccacagatgtcaaggcgacaagtgtgtctgtgtcagagattcttgttgcatggaaacacattaaagagagtcta

SEQ ID NO: 419314 - DNA, 120 bp, Artificial Sequence
  ENSG00000149972_27 (sequence is synthesized)
aggttggttactggaaagacatggaacaggaagatacagcagaaacagtcaaaactagagggaatgagtctttcgtcatcctaacaggattagaaggaaatacgttatatcacttcacag

SEQ ID NO: 419315 - DNA, 120 bp, Artificial Sequence
  ENSG00000149972_28 (sequence is synthesized)
tgagggcttacaatggagctggatatgggccacctagcagtgaagtgagtgcaaccaccaagaaatcccctcctagtcaagcacctagcaacctcaggtgggagcagcaaggctctcagg

SEQ ID NO: 419316 - DNA, 120 bp, Artificial Sequence
  ENSG00000149972_29 (sequence is synthesized)
tttctctgggctgggaacccgtcataccattagccaacgaatctgaagttgtgggttacaaggttttttataggcaagagggtcacagcaacagccaagttattgaaacacagaaacttc

SEQ ID NO: 419317 - DNA, 120 bp, Artificial Sequence
  ENSG00000149972_30 (sequence is synthesized)
aagcagtagtaccactcccagatgctggagtctatattattgaagttcgagcatatagtgaaggaggagatggaacagctagttctcaaattagggtaccatcatattcaggtggaaaaa

SEQ ID NO: 419318 - DNA, 120 bp, Artificial Sequence
  ENSG00000149972_31 (sequence is synthesized)
tcacaagtgcacagtcgacccttcactctctctccacatcttcgtcatcagtcaccttgctcttggcattgatgattccttcaacttcctggtgaaaactgctgacttaatttgcttttg

SEQ ID NO: 419319 - DNA, 120 bp, Artificial Sequence
  ENSG00000149972_32 (sequence is synthesized)
tttgctttagcttggtaacagcggtgaatagagtgtagtgtaagtggagaaccaggatcctgagatgagcttgagctttaaaaacttgggactatacatggtgaacttacaggaggttag

SEQ ID NO: 419320 - DNA, 120 bp, Artificial Sequence
  ENSG00000149972_33 (sequence is synthesized)
gggggaaatattacttatccatcaggtttctctttggtttttgtaaacggagaggacagttcttagtccagtaaaaatatgcagattgtatgtaatgaatttttgtaaacaaaggtaatt

SEQ ID NO: 419321 - DNA, 120 bp, Artificial Sequence
  ENSG00000149972_34 (sequence is synthesized)
tctgtcaaatgtattctttacttttttaatatgttgggattttattttatatctgatgactccgagtgtgtgccatccatttgttaagtaactggcctttagcagatctgtttcaaaaac

SEQ ID NO: 419322 - DNA, 120 bp, Artificial Sequence
  ENSG00000149972_35 (sequence is synthesized)
aaatacaaaaatgagaatgaaaagtttgcttaagactaagtccagtgtttttcattttccctttggctgaatatttcaattgacaaaccagcaggacatatgaaaaatgcttcagtgatg

SEQ ID NO: 419323 - DNA, 120 bp, Artificial Sequence
  ENSG00000149972_36 (sequence is synthesized)
tggtccattataagataagtacacaaaaattttcttgaaaaatattgtatgattgcatagtgaaatagcaagatttgtcaatatgctattctatatgcacccctagagcaagtcattagg

SEQ ID NO: 419324 - DNA, 120 bp, Artificial Sequence
  ENSG00000149972_37 (sequence is synthesized)
gtagggaataagccatttacattagtgcaagatagaaagcgagtccagatgaatttcagtgctatagtttttcataaagtactatgttatctagcagcaaatataataaatatttatttt

SEQ ID NO: 419325 - DNA, 120 bp, Artificial Sequence
  ENSG00000149972_38 (sequence is synthesized)
taataacaaaagatggtttaacatcaccaaaaaatatgatcactaaaaactgcagacatgctggcatgggtgctaacttaaaaatgagatgaatatgggacagagcgtttccatttcttt

SEQ ID NO: 419326 - DNA, 120 bp, Artificial Sequence
  ENSG00000149972_39 (sequence is synthesized)
acctactgccaaaacagatgttgaattaggtccaaggttttcttctaattgcaaaattttgcaaaaattttaagggcaatgaaaatttgttgtgcaaataattatgcatagtctgtagat

SEQ ID NO: 419327 - DNA, 120 bp, Artificial Sequence
  ENSG00000149972_40 (sequence is synthesized)
taaaatggttcaagtataacaaataagttttgatttttaaaaacagttccatgcatcacataccactgataaaatcaactagtaaaataaagacagtctttcttggataaattgaatttt

SEQ ID NO: 419328 - DNA, 120 bp, Artificial Sequence
  ENSG00000149972_41 (sequence is synthesized)
taattaagctgtggaaacatggcatcagtacagggattcagctagtctagccagctatgcactgtttgattctgtggcttgggaagtaatccttatttgctatttcaaagagtcatcttg

SEQ ID NO: 419329 - DNA, 120 bp, Artificial Sequence
  ENSG00000149972_42 (sequence is synthesized)
agcctgagagatcctagagagttgttggaaaatgagatgaaaattttctacttgatgatatcttaaagaagttctaacaagcacaagaatgtgccagagttggcatcatacccatgaaga

SEQ ID NO: 419330 - DNA, 120 bp, Artificial Sequence
  ENSG00000149972_43 (sequence is synthesized)
tgcgtgaaaggatagttattgcaaagtcatatgccagagaagagcctggagaaactatggttttataggcgatgttaacaagagaacaaaaattggttttataattttatataatttaaa

SEQ ID NO: 419331 - DNA, 120 bp, Artificial Sequence
  ENSG00000149972_44 (sequence is synthesized)
cttgttaactgtatttgcttcattaataacaagcaaaatgaaacaatatggagctcaaattgctagctctcaaggttaatccttgtagaatcagagaagtgattgaagtttctgttctga

SEQ ID NO: 419332 - DNA, 120 bp, Artificial Sequence
  ENSG00000149972_45 (sequence is synthesized)
acatcctgaaagaatagtttcagagccacagtaaaagtctgtatgtaggttacatattctctttggggaaatgatgtaagacaccctaaacaaacaagaaattagttaaaagactcactc

SEQ ID NO: 419333 - DNA, 120 bp, Artificial Sequence
  ENSG00000149972_46 (sequence is synthesized)
aatgatattatagtaaatactacagatggtaagtatttaagcctgtaagtaagtaattatgaccaagtggcctttcttgaacgcctcctttaaagtgggagaggctggactttgcaaaaa

SEQ ID NO: 419334 - DNA, 120 bp, Artificial Sequence
  ENSG00000149972_47 (sequence is synthesized)
cagggatgctaattgtttagctggcaaaacatgagctctcccaagtatagtttacctttatgaattgtgcatctgaataaaagacagaaagaatatttttaatgcaaaataattttacgt

SEQ ID NO: 419335 - DNA, 120 bp, Artificial Sequence
  ENSG00000149972_48 (sequence is synthesized)
atttcatgaatcaagccattttcttcattttccatggtggtgtacaccagatttagtgaaggactttaagaatcaacttcttacttacactctcagaaagcaaagcccagtaaaatatta

SEQ ID NO: 419336 - DNA, 120 bp, Artificial Sequence
  ENSG00000149972_49 (sequence is synthesized)
aacaaataaaatggcaaatttaaattaaccaatatttttaattagctgatggatggtacgtatctgacagagtatttacacatatagaatgtctgatgtattcttacaggaatcagagat

SEQ ID NO: 419337 - DNA, 120 bp, Artificial Sequence
  ENSG00000149972_50 (sequence is synthesized)
atggaatgtttttacttaacatacacagaatatgtattttgcatcataaacctatttaaaaaacaggttttcaatgtttatgtacttatgtgctgcatatctgttactttgtagaaacca

SEQ ID NO: 419338 - DNA, 120 bp, Artificial Sequence
  ENSG00000149972_51 (sequence is synthesized)
gaagagcattcttatcaaggtacattatttttcagctacagtactgagttttttctgctatgggatagtaaccacagtcttaaatcactaaagagactgtatttttgtataatgtccatt

SEQ ID NO: 419339 - DNA, 120 bp, Artificial Sequence
  ENSG00000149972_52 (sequence is synthesized)
gaatatgaagaaagcaacagtccttataattagaaatttcatgaaagcaaaagttttgcatacccaaatgaaggtactgtggaccccatgtcaaactgttaaatatattgtgtacgatct

SEQ ID NO: 419340 - DNA, 120 bp, Artificial Sequence
  ENSG00000149972_53 (sequence is synthesized)
gtatatatactatatataaggcatataccgtgtggaaggcacagtcaaataatagttctgtgtactgttcttgtaacattagatctttttaataaataattctctttttattgactttta

SEQ ID NO: 419341 - DNA, 120 bp, Artificial Sequence
  ENSG00000149972_54 (sequence is synthesized)
tctctgtttatcacttggtgtcctttctaagaaatgtcacaattatggaaaaaagaaacatcttatgaagatgtctaccctctacctaaagaccaatctgccacccttatgaaaataaac

SEQ ID NO: 419342 - DNA, 120 bp, Artificial Sequence
  ENSG00000149972_55 (sequence is synthesized)
caccataaattatcatacaaaggaatttaaatgcatggactttgagcacatcagtactgtgcattttactttcaattttacaatatatgttattttcgcttaaccttttgcctttgaaaa

SEQ ID NO: 419343 - DNA, 120 bp, Artificial Sequence
  ENSG00000149972_56 (sequence is synthesized)
aattacatggaaaactcctccttagtaacagatgaaaaccaccaaactaacttcagagtccaaaacacctttagtagtaagttgtcactaagtgtttaacctaatgccaaggaaataatc

SEQ ID NO: 419344 - DNA, 120 bp, Artificial Sequence
  ENSG00000149972_57 (sequence is synthesized)
taaacagttgagctactaagtcacttggactacagagataaaatttgtgtgtgtgtatatatgttttgcaaatgaaaagctagtggaacccccaggcatttttttcttctactacttcta

SEQ ID NO: 419345 - DNA, 120 bp, Artificial Sequence
  ENSG00000149972_58 (sequence is synthesized)
agttgggcttccaaaaacagaaaaactgcatgtgtaagatggtggcatttgcaattgttaagtgacaaggatttttttaaagtctgaaaatgtcaacatacaacctctctatgcagaaat

SEQ ID NO: 419346 - DNA, 120 bp, Artificial Sequence
  ENSG00000149972_59 (sequence is synthesized)
gacagttaaatggtttccagttatgaaacagtacaccaaattctgcaatcctaggaagctacatcttaagcaaatgactagagcacccatttcctttagcacagtattccacagtatggg

SEQ ID NO: 419347 - DNA, 120 bp, Artificial Sequence
  ENSG00000149972_60 (sequence is synthesized)
ttactgtcttccctgctgatctcagttgtttctcttttatcttctcaatgtcattttcctcttgaacttataagccaactgaaggagatggaggtagggttgcaagatgaaataaaggac

SEQ ID NO: 419348 - DNA, 120 bp, Artificial Sequence
  ENSG00000149972_61 (sequence is synthesized)
ccatggaagattgcttccaggaccctccccagcaatggaaaccaaactcaggagaagttcaagtactccagtcagcctttcacatccatggtttctgcatccacagttgggtgaatccac

SEQ ID NO: 419349 - DNA, 120 bp, Artificial Sequence
  ENSG00000149972_62 (sequence is synthesized)
agatgtgtaacccgtagctaccactggctgactgcacttgacttatatatatttgggctcctgtatatccctattgtcaattgtctatacagcactggtaaaaaaaggactgaaaatcaa

SEQ ID NO: 419350 - DNA, 120 bp, Artificial Sequence
  ENSG00000149972_63 (sequence is synthesized)
tttcttctgacatcacattctcctaaagagaggttttggtgacacctcagaatttcaacagaatttcttagaaattttgctctatgttaaagaaactaagaaatactattttactgggat

SEQ ID NO: 419351 - DNA, 120 bp, Artificial Sequence
  ENSG00000149972_64 (sequence is synthesized)
gtgttatgttgctcattaactggtttatttttcagtacagtagcttccgtagcactatgcaaagatgtttttaaaagatgaaatagagttttagacaaaagcaggagctacaggtagata

SEQ ID NO: 419352 - DNA, 120 bp, Artificial Sequence
  ENSG00000149972_65 (sequence is synthesized)
tttaattgtatccaatttactggtcattttaaaagtttttgtgtcttcctttctaataatttaatgtataaatacaagttttccttttgtactttattggtatctcttaccctcagtgct

SEQ ID NO: 419353 - DNA, 120 bp, Artificial Sequence
  ENSG00000149972_66 (sequence is synthesized)
gaattatcaaattttgcttggaatttaatgatctgtattgtatctatgtattcagatagtttttttggtcccttaaatgttgctatttttaaacatagttattccagccttataatggtg

SEQ ID NO: 419354 - DNA, 120 bp, Artificial Sequence
  ENSG00000149972_67 (sequence is synthesized)
aacatttcatatcaaatgaataacatcaatgaaattttagcctccgcagagaatagcagattgtgagtagtctgtgaacatgaatattttatgataacaaggtttggcttctcacacagc

SEQ ID NO: 419355 - DNA, 120 bp, Artificial Sequence
  ENSG00000149972_68 (sequence is synthesized)
tcttgttcttgttcttgccttgcttggccagtcatggagaggaattagggggataatgtctaaaagaaaaaaagaattagcatctgacccaagactttagttgcatttaaaaaaatttat

SEQ ID NO: 419356 - DNA, 120 bp, Artificial Sequence
  ENSG00000149972_69 (sequence is synthesized)
tcttacttttcctctgcttcagttcccattaagagaaaatcatcttgtgtcttgaacaatgatcaagtataggacttgtatactaacatggtttccaggctgaaacatatttttaattct

SEQ ID NO: 419357 - DNA, 120 bp, Artificial Sequence
  ENSG00000149972_70 (sequence is synthesized)
atttgagttttcaaataatgcccaacaattatttgattaacatacagctggcattaaataatgatttctatgataaaaaaatttatacaatctttctaagagttacagcaagaacaattt

SEQ ID NO: 419358 - DNA, 120 bp, Artificial Sequence
  ENSG00000149972_71 (sequence is synthesized)
atgggaaaccattacctacttatacaatatcatggacttatttctacaatcttgcttcaattaattatttggaatgataatttagtatctcattatgattgcatgtttaatgtgatgaat

SEQ ID NO: 419359 - DNA, 120 bp, Artificial Sequence
  ENSG00000149972_72 (sequence is synthesized)
atttctgtttctcccaatccatgcttcagggaccatgtttgttcatcattaaatctcagcaaatgataatatatatatttggcccataactgaccacaataaatatgttgaatgaataaa

SEQ ID NO: 419360 - DNA, 120 bp, Artificial Sequence
  ENSG00000149972_73 (sequence is synthesized)
aacaaaaggttagaatctattttataattcaagttcaacattagacttttttgaggttacaggtgacacacacaaactatgcaagaaagagtcttgcagtaccgtgagacgtattttatg

SEQ ID NO: 419361 - DNA, 120 bp, Artificial Sequence
  ENSG00000150045_0 (sequence is synthesized)
atttcatgttatacttaataaaacaaaacatacctgtatacacacacattcactcacattgaagatgcaagatgaagaaagatacatgacattgaatgtacagtcaaagaaaaggagttc

SEQ ID NO: 419362 - DNA, 120 bp, Artificial Sequence
  ENSG00000150045_1 (sequence is synthesized)
tgcccaaacatctcaacttacatttaaagattattcagtgacgttgcactggtataaaatcttactgggaatatctggaaccgtgaatggtattctcactttgactttgatctccttgat

SEQ ID NO: 419363 - DNA, 120 bp, Artificial Sequence
  ENSG00000150045_2 (sequence is synthesized)
cctgttggtttctcagggagtattgctaaaatgccaaaaaggaagttgttcaaatgccactcagtatgaggacactggagatctaaaagtgaataatggcacaagaagaaatataagtaa

SEQ ID NO: 419364 - DNA, 120 bp, Artificial Sequence
  ENSG00000150045_3 (sequence is synthesized)
taaggacctttgtgcttcgagatctgcagaccagacagtactatgccaatcagaatggctcaaataccaagggaagtgttattggttctctaatgagatgaaaagctggagtgacagtta

SEQ ID NO: 419365 - DNA, 120 bp, Artificial Sequence
  ENSG00000150045_4 (sequence is synthesized)
tgtgtattgtttggaaagaaaatctcatctactaatcatacatgaccaacttgaaatggcttttatacagaaaaacctaagacaattaaactacgtatggattgggcttaactttacctc

SEQ ID NO: 419366 - DNA, 120 bp, Artificial Sequence
  ENSG00000150045_5 (sequence is synthesized)
agattcaaagatattcttcataaagggaccagctaaagaaaacagctgtgctgccattaaggaaagcaaaattttctctgaaacctgcagcagtgttttcaaatggatttgtcagtatta

SEQ ID NO: 419367 - DNA, 120 bp, Artificial Sequence
  ENSG00000150045_6 (sequence is synthesized)
gagtttgacaaaattcacagtgaaataatcaatgatcactatttttggcctattagtttctaatattaatctccaggtgtaagattttaaagtgcaattaaatgccaaaatctcttctcc

SEQ ID NO: 419368 - DNA, 120 bp, Artificial Sequence
  ENSG00000150045_7 (sequence is synthesized)
cttctccctccatcatcgacactggtctagcctcagagtaacccctgttaacaaactaaaatgtacacttcaaaatttttacgtgatagtataaaccaatgtgacttcatgtgatcatat

SEQ ID NO: 419369 - DNA, 120 bp, Artificial Sequence
  ENSG00000150045_8 (sequence is synthesized)
ccaggatttttattcgtcgcttattttatgccaaatgtgatcaaattatgcctgtttttctgtatcttgcgttttaaattcttaataaggtcctaaacaaaatttcttatatttctaatg

SEQ ID NO: 419370 - DNA, 120 bp, Artificial Sequence
  ENSG00000150045_9 (sequence is synthesized)
gttgaattataatgtgggtttatacattttttacccttttgtcaaagagaattaactttgtttccaggcttttgctactcttcactcagctacaataaacatcctgaatgttttcttaaa

SEQ ID NO: 419371 - DNA, 120 bp, Artificial Sequence
  ENSG00000150048_0 (sequence is synthesized)
acagtagcccggcggcccagggcaatccgaccacatttcactctcaccgctgtaggaatccagatgcaggccaagtacagcagcacgagggacatgctggatgatgatggggacaccacc

SEQ ID NO: 419372 - DNA, 120 bp, Artificial Sequence
  ENSG00000150048_1 (sequence is synthesized)
atgagcctgcattctcaaggctctgccacaactcggcatccagagccccggcgcacagagcacagggctccctcttcaacgtggcgaccagtggccctgaccctgctgactttgtgcttg

SEQ ID NO: 419373 - DNA, 120 bp, Artificial Sequence
  ENSG00000150048_2 (sequence is synthesized)
gtgctgctgatagggctggcagccctggggcttttgttttttcagtactaccagctctccaatactggtcaagacaccatttctcaaatggaagaaagattaggaaatacgtcccaagag

SEQ ID NO: 419374 - DNA, 120 bp, Artificial Sequence
  ENSG00000150048_3 (sequence is synthesized)
ttgcaatctcttcaagtccagaatataaagcttgcaggaagtctgcagcatgtggctgaaaaactctgtcgtgagctgtataacaaagctggagcacacaggtgcagcccttgtacagaa

SEQ ID NO: 419375 - DNA, 120 bp, Artificial Sequence
  ENSG00000150048_4 (sequence is synthesized)
caatggaaatggcatggagacaattgctaccagttctataaagacagcaaaagttgggaggactgtaaatatttctgccttagtgaaaactctaccatgctgaagataaacaaacaagaa

SEQ ID NO: 419376 - DNA, 120 bp, Artificial Sequence
  ENSG00000150048_5 (sequence is synthesized)
gacctggaatttgccgcgtctcagagctactctgagtttttctactcttattggacagggcttttgcgccctgacagtggcaaggcctggctgtggatggatggaacccctttcacttct

SEQ ID NO: 419377 - DNA, 120 bp, Artificial Sequence
  ENSG00000150048_6 (sequence is synthesized)
gaactgttccatattataatagatgtcaccagcccaagaagcagagactgtgtggccatccttaatgggatgatcttctcaaaggactgcaaagaattgaagcgttgtgtctgtgagaga

SEQ ID NO: 419378 - DNA, 120 bp, Artificial Sequence
  ENSG00000150048_7 (sequence is synthesized)
agggcaggaatggtgaagccagagagcctccatgtcccccctgaaacattaggcgaaggtgactgattcgccctctgcaactacaaatagcagagtgagccaggcggtgccaaagcaagg

SEQ ID NO: 419379 - DNA, 120 bp, Artificial Sequence
  ENSG00000150048_8 (sequence is synthesized)
gctagttgagacattgggaaatggaacataatcaggaaagactatctctctgactagtacaaaatgggttctcgtgtttcctgttcaggatcaccagcatttctgagcttgggtttatgc

SEQ ID NO: 419380 - DNA, 120 bp, Artificial Sequence
  ENSG00000150048_9 (sequence is synthesized)
acgtatttaacagtcacaagaagtcttatttacatgccaccaaccaacctcagaaacccataatgtcatctgccttcttggcttagagataacttttagctctctttcttctcaatgtct

SEQ ID NO: 419381 - DNA, 120 bp, Artificial Sequence
  ENSG00000150048_10 (sequence is synthesized)
aatatcacctccctgttttcatgtcttccttacacttggtggaataagaaactttttgaagtagaggaaatacattgaggtaacatccttttctctgacagtcaagtagtccatcagaaa

SEQ ID NO: 419382 - DNA, 120 bp, Artificial Sequence
  ENSG00000150048_11 (sequence is synthesized)
ctttttgtttgtttcagttcatactagtcccttcccaatccatcagtaaagaccccatctgccttgtccatgccgtttcccaacagggatgtcacttgatatgagaatctcaaatctcaa

SEQ ID NO: 419383 - DNA, 120 bp, Artificial Sequence
  ENSG00000150048_12 (sequence is synthesized)
tgccttataagcattccttcctgtgtccattaagactctgataattgtctcccctccataggaatttctcccaggaaagaaatatatccccatctccgtttcatatcagaactaccgtcc

SEQ ID NO: 419384 - DNA, 120 bp, Artificial Sequence
  ENSG00000150048_13 (sequence is synthesized)
ccgatattcccttcagagagattaaagaccagaaaaaagtgagcctcttcatctgcacctgtaatagtttcagttcctattttcttccattgacccatatttatacctttcaggtactga

SEQ ID NO: 419385 - DNA, 120 bp, Artificial Sequence
  ENSG00000150048_14 (sequence is synthesized)
agatttaataataataaatgtaaatactgtgaagtgtgtgtgattttacaatggacttatggttggtgggaaaattcagcatggaaatgcttttcaaaatatgatagcggtcattatttt

SEQ ID NO: 419386 - DNA, 120 bp, Artificial Sequence
  ENSG00000150048_15 (sequence is synthesized)
gattgtgccttactgaaagtttttggggaatttacaagagtactgattacatgattatctggagaaaataagatgtctttgaaatacgtgttggcttcaagaaaacagttttaacgtttt

SEQ ID NO: 419387 - DNA, 120 bp, Artificial Sequence
  ENSG00000150048_16 (sequence is synthesized)
cctaaaatgaaatcttttgaggtgagcttatggcatcaacacatggttgatgaggaagctgagttgcattagtgcacatgatttccagtcaggtcatgggaaatgaacagagacagtgac

SEQ ID NO: 419388 - DNA, 120 bp, Artificial Sequence
  ENSG00000150048_17 (sequence is synthesized)
atctttgtagctgctcctttgtgaggcacttctttcttgagacgactccatgcacaaatataacagggatcattgggaatgacaccatcacagccaccaagtttattggtttactgataa

SEQ ID NO: 419389 - DNA, 120 bp, Artificial Sequence
  ENSG00000150048_18 (sequence is synthesized)
atcaattttgagggttttatgctagaaaagataacattataaatctttgtttttcaacagtggaaactgaggtgcttcagttttgtttttcataaacatctatctcatggtaaaatgacg

SEQ ID NO: 419390 - DNA, 120 bp, Artificial Sequence
  ENSG00000150048_19 (sequence is synthesized)
tatagtagcaatcatatgatagaaagaacacattggtgctcattttcataaacttcattttgttagattgtcacttagcaaagactattgcggattcttccttgagaactttcctttcaa

SEQ ID NO: 419391 - DNA, 120 bp, Artificial Sequence
  ENSG00000150048_20 (sequence is synthesized)
ttttctgttgatttccttaaaattttcttcagggtcgagcaagttctgttgatatattgtgtcatgcaaagaaaactgtatttgtggttagaaaatgaagattttagacctcttattctg

SEQ ID NO: 419392 - DNA, 120 bp, Artificial Sequence
  ENSG00000150048_21 (sequence is synthesized)
atttacttattaggcaagtcactttacttcatgaaacctatttcactgcatatgaagtagaaataattataatttcctcataatgttactgttagctgaaataaagtaaatgtgaaatca

SEQ ID NO: 419393 - DNA, 120 bp, Artificial Sequence
  ENSG00000150048_22 (sequence is synthesized)
aaagcgccttgggctcggctgtgctccagctcgcgctgctgaggtctggcctccgccagctgacttcaactgcaactgcaactcctcctcctcagccgccgcctcagggaacccaccgac

SEQ ID NO: 419394 - DNA, 120 bp, Artificial Sequence
  ENSG00000150048_23 (sequence is synthesized)
cgccgcctcagggaacccaccgacccacaaaccagctcccgcaggggcggtgccgctgcctccttttcgttttctgtttttgtttttgttgtgttttttgtttttgttttgttttgtttt

SEQ ID NO: 419395 - DNA, 120 bp, Artificial Sequence
  ENSG00000150051_0 (sequence is synthesized)
gactcggcgggcccggggctccccggcagcggctcctctgctaggggttaacagcagcccccgcggccgggcgggcgcggacgcttcctctccacccgcccgggaacgtggataccgcgc

SEQ ID NO: 419396 - DNA, 120 bp, Artificial Sequence
  ENSG00000150051_1 (sequence is synthesized)
ccgcaggatgttcgccggctgggaccggcagtcaggaaacatgagaaggcctcgctattcctgttcccgggcggcgcgcgccgggctgggtaaataaagccgagacgacggcggtggcgg

SEQ ID NO: 419397 - DNA, 120 bp, Artificial Sequence
  ENSG00000150051_2 (sequence is synthesized)
tggtgagcgcgctggagcccgcgtggagaacatgcggcggggatgggagtgcgcctagtctcgaggcgggagagccagccgccctgcagccggccgtcggccccgcagccacagccgagc

SEQ ID NO: 419398 - DNA, 120 bp, Artificial Sequence
  ENSG00000150051_3 (sequence is synthesized)
cccgctgcggagctcccggcggcccagccccgaggctctgcggccgcgccgcgcgtccctaccaaccgacaccatgaacaccatcgtcttcaacaagctcagcggtgcggtgctgtttga

SEQ ID NO: 419399 - DNA, 120 bp, Artificial Sequence
  ENSG00000150051_4 (sequence is synthesized)
ggacggaggcgcctcggagcgggagcggggtggccggccctacagcggtgtcctggacagtcctcacgcccgccccgaggtgggcattcccgacggcccgcccctcaaggacaacctcgg

SEQ ID NO: 419400 - DNA, 120 bp, Artificial Sequence
  ENSG00000150051_5 (sequence is synthesized)
cctgagacaccggaggaccggcgcccggcagaatggcgggaaggtgaggcacaagcggcaggccctgcaagacatggcgcgacccctcaagcagtggctttacaagcaccgtgacaaccc

SEQ ID NO: 419401 - DNA, 120 bp, Artificial Sequence
  ENSG00000150051_6 (sequence is synthesized)
gtaccccaccaagaccgagaagatactcttggccctcggctcgcagatgacgctagtgcaggtgtcaaattggtttgctaatgcaagacgtcggcttaagaataccgttcgacagccaga

SEQ ID NO: 419402 - DNA, 120 bp, Artificial Sequence
  ENSG00000150051_7 (sequence is synthesized)
tttaagctgggctttgagaataaagttatacaacaagtatgttcaaggcaatgctgaacggcttagcgtaagcagtgatgactcatgttctgaagatggagaaaatcctccaagaaccca

SEQ ID NO: 419403 - DNA, 120 bp, Artificial Sequence
  ENSG00000150051_8 (sequence is synthesized)
catgaacgaagggggctataataccccagttcaccatcctgtgattaaaagtgagaattcggtcatcaaagcgggagtgaggccagagtcacgggccagtgaggactacgtggcaccccc

SEQ ID NO: 419404 - DNA, 120 bp, Artificial Sequence
  ENSG00000150051_9 (sequence is synthesized)
caaatacaagagcagcttgttgaaccgttaccttaatgactctttgagacatgtcatggccacgaacactaccatgatgggaaaaacaaggcaaagaaaccactcgggatcttttagctc

SEQ ID NO: 419405 - DNA, 120 bp, Artificial Sequence
  ENSG00000150051_10 (sequence is synthesized)
caatgaatttgaggaagaattagtgtctccatcgtcatcagaaactgaaggcaactttgtctatcgcacagacactctggaaaacggatccaataagggtgaaagcgcagctaacagaaa

SEQ ID NO: 419406 - DNA, 120 bp, Artificial Sequence
  ENSG00000150051_11 (sequence is synthesized)
aggaccaagcaaggatgacacgtattggaaggagatcaacgcagctatggccttaacaaatcttgcacagggaaaggacaaactgcagggaactaccagctgcatcatccagaagtcgtc

SEQ ID NO: 419407 - DNA, 120 bp, Artificial Sequence
  ENSG00000150051_12 (sequence is synthesized)
ccatatagcagaagtaaagactgtcaaagtgccgctggtgcagcagttttaagagcttgttgcttttcagatccaatggatgttctttccggtgttttcatcaaccctcatcctaagagc

SEQ ID NO: 419408 - DNA, 120 bp, Artificial Sequence
  ENSG00000150051_13 (sequence is synthesized)
cgaagcagggatgaaaatgactctctcccaaacctcttcttatttttaattatcccaaatatatcatttagttgcttctataaaagacatataaattataaaaaactcattttaatcaaa

SEQ ID NO: 419409 - DNA, 120 bp, Artificial Sequence
  ENSG00000150051_14 (sequence is synthesized)
aatattaacttattttatgttactcaaactatgcataaaacatctgcattaccattacagtaagtgccttgcttcccgacaataagctccaacgtgggcatagttgaacaagctatgcct

SEQ ID NO: 419410 - DNA, 120 bp, Artificial Sequence
  ENSG00000150051_15 (sequence is synthesized)
caaaatgccaacgccatatgcttattagcctgtgtgcatcattccagacgggcctaatcattccaggactgaaaccagaatcgctgaaagcccttgaaatacattcaataattcatatgt

SEQ ID NO: 419411 - DNA, 120 bp, Artificial Sequence
  ENSG00000150051_16 (sequence is synthesized)
ttggatatctgttcagcccaaatgaaatcttccttttaaaaaacgtctacattattgaaaattgttcaatgtgcttttcagagtgacggtgagaattttatgcatgtatcttgcctgcat

SEQ ID NO: 419412 - DNA, 120 bp, Artificial Sequence
  ENSG00000150051_17 (sequence is synthesized)
atttgatatgttacaaacttccaaaattcaaggtgcagcgatccacagaacgttgtacatttaagaagtgattccttcaagctaatttaaaatttcattgaacacatggtgaccaggaaa

SEQ ID NO: 419413 - DNA, 120 bp, Artificial Sequence
  ENSG00000150051_18 (sequence is synthesized)
actttttttcaagcactgttggaaagcaccacaaagccctttagaattaatctggatttgtttctcaagttctgctgaagtttaaaaaaaaactttattatacaaataactcaaaatttt

SEQ ID NO: 419414 - DNA, 120 bp, Artificial Sequence
  ENSG00000150051_19 (sequence is synthesized)
cctgtgtaaaactaaacctgtagttttaaaacataatcctgtttgcattagagctcactgtctttttgtgatggaaactgtgttcgtatggaatgactaaaaatcttttatttggtttgt

SEQ ID NO: 419415 - DNA, 120 bp, Artificial Sequence
  ENSG00000150051_20 (sequence is synthesized)
ttcaaattacaattgctgatggacaatttgtattgcagcgagaacaacagaatgaaagaaatgtatctctgtgcggctatacatatacatacataaaattgatttttaaatttaaaacat

SEQ ID NO: 419416 - DNA, 120 bp, Artificial Sequence
  ENSG00000150051_21 (sequence is synthesized)
atggaaaacaaaacattgaacagtttgaattttgccaagttggacattaaagtaaaaatgaagtgaaatcatgcattgaaagaaaacattttgtttctaaattagtctaccattgagtga

SEQ ID NO: 419417 - DNA, 120 bp, Artificial Sequence
  ENSG00000150051_22 (sequence is synthesized)
gaataatcaatatcaagaaagaagactatctttctcaactaaacaataatattccaatcagcttgggaagacctgaaacttgaataagcagtggaaatgccaaatataacagagggtatg

SEQ ID NO: 419418 - DNA, 120 bp, Artificial Sequence
  ENSG00000150051_23 (sequence is synthesized)
tgctacagagaagtaaaaagggtttgactttttatgatgggattttttttttctgggtatgtaatctattttttttttaaactggaaagcatttttgtcagtgtgaatgagggtcaatag

SEQ ID NO: 419419 - DNA, 120 bp, Artificial Sequence
  ENSG00000150051_24 (sequence is synthesized)
tgcagccagtggtgacatttttctttattttgcaaaatgcttttaaaaccaaaggctgctctagttgatggacagtatcagtcttgatctaaattgtaggacactttttcatgtaacata

SEQ ID NO: 419420 - DNA, 120 bp, Artificial Sequence
  ENSG00000150051_25 (sequence is synthesized)
acatttggggattgggtttatttagtgtaatgaagataatttgatataaaaatattttgtgtatatatatatatttttactttgttttctaaattgctgtttgcagtaacagtaagcgca

SEQ ID NO: 419421 - DNA, 120 bp, Artificial Sequence
  ENSG00000150051_26 (sequence is synthesized)
aagcaaaatatataagttatgactgtatgatcagatgaagtatgagttcttttggtttgcatccttaaatagttagagatctctgataaaaactttggaatctttgcaaaacaatacaaa

SEQ ID NO: 419422 - DNA, 120 bp, Artificial Sequence
  ENSG00000150051_27 (sequence is synthesized)
aatgccaaaatgtgagcatgtcaatgaaaactaaagacaaatacttcactctttttcatactattataagttattctggtattaaatatgttaataaaagtgtttttgttttgacatatt

SEQ ID NO: 419423 - DNA, 120 bp, Artificial Sequence
  ENSG00000150051_28 (sequence is synthesized)
tcagttaaatgaatgaatgctggttgtattttatttgaatgagtcatgattcatgtttgccatctttttaaaaaaatcagcaaatttcttctatgttataaattatagatgacaaggcaa

SEQ ID NO: 419424 - DNA, 120 bp, Artificial Sequence
  ENSG00000150051_29 (sequence is synthesized)
tataggacaactattcacatgattttttttaataccaaaggttggaagattttataattaacatgtcaagaagactttatagtaagcacatccttggtaatatctccaattgcaatgact

SEQ ID NO: 419425 - DNA, 120 bp, Artificial Sequence
  ENSG00000150051_30 (sequence is synthesized)
ttttaatttattttttcttttgctgctttaacattttctggatattaaaatccccccagtcctttaaaagaatcttgaacaatgctgagccggcagctgaaaatctaactcataatttat

SEQ ID NO: 419426 - DNA, 120 bp, Artificial Sequence
  ENSG00000150051_31 (sequence is synthesized)
gttgtagagaaatagaattacctctattctttgttttgccatatgtaatcattttaataaaattaataactgccaggagttcttgacagatttaaaataaaagttaatttctagacctcg

SEQ ID NO: 419427 - DNA, 120 bp, Artificial Sequence
  ENSG00000150051_32 (sequence is synthesized)
ggtgagcgcgctggagcccgcgtggagaacatgcggcggggatgggagtgcgcctagtctcgaggcgggagagccagccgccctgcagccggccgtcggccccgcagccacagaagccga

SEQ ID NO: 419428 - DNA, 120 bp, Artificial Sequence
  ENSG00000150051_33 (sequence is synthesized)
aaggtctggtggagaggcgctcgggtagcggccaaggctggcccaagggtctgcgcggagcttgggagcccacctggccgcgcctcctttgctttaaaattattcgccggcgttggggga

SEQ ID NO: 419429 - DNA, 120 bp, Artificial Sequence
  ENSG00000150054_0 (sequence is synthesized)
aggtatagcagtcttggcagttgctgaactgaattcctggctgatttccttactgcataaactcaactgctctcactgaggtcgtcattaagtcctgtgtgtgtttgggcaggccgactt

SEQ ID NO: 419430 - DNA, 120 bp, Artificial Sequence
  ENSG00000150054_1 (sequence is synthesized)
gatttacagccagcactccactgcggaaacggcttacaaaatatacagatcttggtagacaacgtggctgcaggctgttgaattggaattccctgtggctgtccgaaggcagggtgtccg

SEQ ID NO: 419431 - DNA, 120 bp, Artificial Sequence
  ENSG00000150054_2 (sequence is synthesized)
gagagcggtgggctgacctgttcctacaccttgcatcatgccagctttgtcaacgggatctgggagtgacactggtctgtatgagctgttggctgctctgccagcccagctgcagccaca

SEQ ID NO: 419432 - DNA, 120 bp, Artificial Sequence
  ENSG00000150054_3 (sequence is synthesized)
tgtggatagccaggaagacctgaccttcctctgggatatgtttggtgaaaaaagcctgcattcattggtaaagattcatgaaaaactacactactatgagaagcagagtccggtgcccat

SEQ ID NO: 419433 - DNA, 120 bp, Artificial Sequence
  ENSG00000150054_4 (sequence is synthesized)
tctccatggtgcggcggccttggccgatgatctggccgaagagcttcagaacaagccattaaacagtgagatcagagagctgttgaaactactgtcaaaacccaatgtgaaggctttgct

SEQ ID NO: 419434 - DNA, 120 bp, Artificial Sequence
  ENSG00000150054_5 (sequence is synthesized)
ctctgtacatgatactgtggctcagaagaattacgacccagtgttgcctcctatgcctgaagatattgacgatgaggaagactcagtaaaaataatccgtctggtcaaaaatagagaacc

SEQ ID NO: 419435 - DNA, 120 bp, Artificial Sequence
  ENSG00000150054_6 (sequence is synthesized)
actgggagctaccattaagaaggatgaacagaccggggcgatcattgtggccagaatcatgagaggaggagctgcagatagaagtggtcttattcatgttggtgatgaacttagggaagt

SEQ ID NO: 419436 - DNA, 120 bp, Artificial Sequence
  ENSG00000150054_7 (sequence is synthesized)
caacgggataccagtggaggataaaaggcctgaggaaataatacagattttggctcagtctcagggagcaattacatttaagattatacccggcagcaaagaggagacaccatcaaaaga

SEQ ID NO: 419437 - DNA, 120 bp, Artificial Sequence
  ENSG00000150054_8 (sequence is synthesized)
aggcaagatgtttatcaaagccctctttgactataatcctaatgaggataaggcaattccatgtaaggaagctgggctttctttcaaaaagggagatattcttcagattatgagccaaga

SEQ ID NO: 419438 - DNA, 120 bp, Artificial Sequence
  ENSG00000150054_9 (sequence is synthesized)
tgatgcaacttggtggcaagcgaaacacgaagctgatgccaaccccagggcaggcttgatcccctcaaagcatttccaggaaaggagattggctttgagacgaccagaaatattggttca

SEQ ID NO: 419439 - DNA, 120 bp, Artificial Sequence
  ENSG00000150054_10 (sequence is synthesized)
gcccctgaaagtttccaacaggaaatcatctggttttagaaaaagttttcgtcttagtagaaaagataagaaaacaaataaatccatgtatgaatgcaagaagagtgatcagtacgacac

SEQ ID NO: 419440 - DNA, 120 bp, Artificial Sequence
  ENSG00000150054_11 (sequence is synthesized)
agctgacgtacccacatacgaagaagtgacaccgtatcggcgacaaactaatgaaaaatacagactcgttgtcttggttggtcccgtgggagtagggctgaatgaactgaaacgaaagct

SEQ ID NO: 419441 - DNA, 120 bp, Artificial Sequence
  ENSG00000150054_12 (sequence is synthesized)
gctgatcagtgacacccagcactatggcgtgacagtgccccataccaccagagcaagaagaagccaggagagtgatggtgttgaatacattttcatttccaagcatttgtttgagacaga

SEQ ID NO: 419442 - DNA, 120 bp, Artificial Sequence
  ENSG00000150054_13 (sequence is synthesized)
tgtacaaaataacaagtttattgaatatggagaatataaaaacaactactacggcacaagtatagactcagttcggtctgtccttgctaaaaacaaagtttgtttgttggatgttcagcc

SEQ ID NO: 419443 - DNA, 120 bp, Artificial Sequence
  ENSG00000150054_14 (sequence is synthesized)
tcatacagtgaagcatttaaggacactagaatttaagccctatgtgatatttataaagcctccatcaatagagcgtttgagagaaacaagaaaaaatgcaaagattatttcaagcagaga

SEQ ID NO: 419444 - DNA, 120 bp, Artificial Sequence
  ENSG00000150054_15 (sequence is synthesized)
tgaccaaggtgctgcaaaacccttcacagaagaagattttcaagaaatgattaaatctgcacagataatggaaagtcaatatggtcatctttttgacaaaattataataaatgatgacct

SEQ ID NO: 419445 - DNA, 120 bp, Artificial Sequence
  ENSG00000150054_16 (sequence is synthesized)
cactgtggcattcaatgagctcaaaacaacttttgacaaattagagacagagacccattgggtgccagtgagctggttacattcataactaagagaaatttccataattgtctttttcta

SEQ ID NO: 419446 - DNA, 120 bp, Artificial Sequence
  ENSG00000150054_17 (sequence is synthesized)
tagagtgcatgatgaaatcaattacagttttggtagtagggtttttaaatctatatcactgtcatagatgtacaatcttggttcaagttgaatgctggttttgtttgtatctttttacag

SEQ ID NO: 419447 - DNA, 120 bp, Artificial Sequence
  ENSG00000150054_18 (sequence is synthesized)
ccttatttcaaacgccatgtgttagtataagatccgaaatcaaaatatgcacagtactgtattctaagcaaaacctcaaaccttctcgttgtcttcaataccgctctatctccaagatga

SEQ ID NO: 419448 - DNA, 120 bp, Artificial Sequence
  ENSG00000150054_19 (sequence is synthesized)
ggctgaaattttcagagagacttagctagaggcttagtatgtatgggagttcagcgcttctgctggtctcaggtgtggctgctgctgtcgagtttgaatgttagctgttgaaggtatcaa

SEQ ID NO: 419449 - DNA, 120 bp, Artificial Sequence
  ENSG00000150054_20 (sequence is synthesized)
ttcagcagccatgagcagctccagacagacaggtgagctctgctgtttctgggtggatcatcacagatttagccgggcaggcagtaaggtgtcctcttactattcaaaaagtgtagactt

SEQ ID NO: 419450 - DNA, 120 bp, Artificial Sequence
  ENSG00000150054_21 (sequence is synthesized)
aaataattcttaaaggagtaactgaaattttaccttgagtgaatggccttcataatatagcttgagaagtccttttgagtacctgtcagtgactcaacaacatttaataagggaaagtag

SEQ ID NO: 419451 - DNA, 120 bp, Artificial Sequence
  ENSG00000150054_22 (sequence is synthesized)
acttttaacagttattatatatgtaacgaaaagcctttcctttgggattaatataagtaagaatggtagccttgtggcaagaaatgattacaaaggatatttttatttgtaattcctcag

SEQ ID NO: 419452 - DNA, 120 bp, Artificial Sequence
  ENSG00000150054_23 (sequence is synthesized)
aagacaatttatgaagtcacccaaaatgttattttagctggttttggatttttccaataaattagaagaaggatttctattctaaaacatgtaaaacctgttttacatattactgataca

SEQ ID NO: 419453 - DNA, 120 bp, Artificial Sequence
  ENSG00000150054_24 (sequence is synthesized)
attaaagattatttttcatctatgtgcaatagatcacccctctttaaattgctctaagatttattttagaaaacttttcatgtgatgttatttctttgtcatcaaaatgcttgttaacac

SEQ ID NO: 419454 - DNA, 120 bp, Artificial Sequence
  ENSG00000150054_25 (sequence is synthesized)
tgtccagacaccatcctaaccttgccattgttaaagaagtttaggaaagactcttatattgtaaatatttagatgggttctctcacttttctttgatactactgattttcagcaagtgaa

SEQ ID NO: 419455 - DNA, 120 bp, Artificial Sequence
  ENSG00000150054_26 (sequence is synthesized)
ttatataattcaaaatgctagaaatgtctatccgttctataagagagcatatcctgccgttcttgcatgcagtgaagccctgcccgtcgaaaatcattgcatctgtgactttcaaagtgg

SEQ ID NO: 419456 - DNA, 120 bp, Artificial Sequence
  ENSG00000150054_27 (sequence is synthesized)
tttttgttgatttgtaaagagagtttaaatgtcatgtgaaaaaaaatagaatgtagtaaaattctatatatttatgaaatattttaaaggcatatttttttaaatatcaaacggggctat

SEQ ID NO: 419457 - DNA, 120 bp, Artificial Sequence
  ENSG00000150054_28 (sequence is synthesized)
tatcaaacggggctattcataaaataaactgattgtatgtcaagatgtcctaatttaaaagagtagttttataaatcatggtcaacattccatgtaaatatttgagctttacaaagatag

SEQ ID NO: 419458 - DNA, 120 bp, Artificial Sequence
  ENSG00000150054_29 (sequence is synthesized)
atccaagtgtgcgatctgtgcactgcacatttgatagcattattcactggttttccttcatacttgtcaagttcatattagaagcagagacaaaaaccactccaatggccttgacacata

SEQ ID NO: 419459 - DNA, 120 bp, Artificial Sequence
  ENSG00000150054_30 (sequence is synthesized)
gtcacaccaaaatagataatcagactaagtattatataacaacgtgatccagacagtgagttctaagtgtattaattaaatagcaaaaaattttgtttttaaaaaatgaaagagggaggg

SEQ ID NO: 419460 - DNA, 120 bp, Artificial Sequence
  ENSG00000150054_31 (sequence is synthesized)
ttgccaacctgaagtcttaagtagattgtttgggtagcatatttccttctttgaacattgtctgaaattttctataaatcaagacttcttgtacaaagaatgatgggacatatgtaataa

SEQ ID NO: 419461 - DNA, 120 bp, Artificial Sequence
  ENSG00000150054_32 (sequence is synthesized)
ttcaggcaatcacctgagtaatttaggcagtccaaattctttaccctgaaatacccacattttaaaaaaattgcagataattgcttcagttatttactttggggacagagatatagtgta

SEQ ID NO: 419462 - DNA, 120 bp, Artificial Sequence
  ENSG00000150054_33 (sequence is synthesized)
aagtgggagaaactgagtccttttttggtggtggtaataataagatgttataaaaatataacattttaaaaaagaaaggtccagaccttaagcgcagagctagaacaatattttttaaat

SEQ ID NO: 419463 - DNA, 120 bp, Artificial Sequence
  ENSG00000150054_34 (sequence is synthesized)
ccagaccttaagcgcagagctagaacaatattttttaaataatggggggaaaagggggcactttggtaattttagaaatcaggtagtatacttttttttttttttttgagacagggtctt

SEQ ID NO: 419464 - DNA, 120 bp, Artificial Sequence
  ENSG00000150054_35 (sequence is synthesized)
ggattacaggcatgatccaccgtgcccagccggtagacgtggtcttaaaaacagtgtttacatggccatcttgatgcttagaaagataattgattaaaatttaataaggcagggccaact

SEQ ID NO: 419465 - DNA, 120 bp, Artificial Sequence
  ENSG00000150054_36 (sequence is synthesized)
attgattaaaatttaataaggcagggccaactccgagagttcattgacaacggcagcaaaaaggccctgaattctgtactttcttcccccagcctccttctccagcaaggagaatagcac

SEQ ID NO: 419466 - DNA, 120 bp, Artificial Sequence
  ENSG00000150054_37 (sequence is synthesized)
tcctccctccagaagccagctccctaagttggagccactatgtaagagaagaggaacgttcactttttaaaattcatatatttaaaaatcaagaccaaaaagtaaattctgtactcctat

SEQ ID NO: 419467 - DNA, 120 bp, Artificial Sequence
  ENSG00000150054_38 (sequence is synthesized)
tattgactgtagtcaatcaaacataaaaaggtgaaagtaaaatttaattttttacccttattttactgaccaatatggaagttcttggtatctttaaggctgaccttcctggtattgtgt

SEQ ID NO: 419468 - DNA, 120 bp, Artificial Sequence
  ENSG00000150054_39 (sequence is synthesized)
aatgattgaatgtatctaaactgtaataatttgaaactgacaaacataaccttctcagacttacaaaactatgttctttctaaagatacagatttttattattttattttgactaggaag

SEQ ID NO: 419469 - DNA, 120 bp, Artificial Sequence
  ENSG00000150054_40 (sequence is synthesized)
gatttataaataaatgtaatgaaaaatctttgatcttaataaagtaccttcaaacagtgtgtgtacttacttgaaaattgtttttgcacttggatattctattttattatactactattg

SEQ ID NO: 419470 - DNA, 120 bp, Artificial Sequence
  ENSG00000150054_41 (sequence is synthesized)
tgatctattccattatactatttcccatggtagaacaaattatattttctactgtgatatgaagtgatgtaattgaacttgccatgtctaaaattaaatttcatatttttttcaatcaaa

SEQ ID NO: 419471 - DNA, 120 bp, Artificial Sequence
  ENSG00000150054_42 (sequence is synthesized)
aatggaactaacaggaaccacctgtgcacttccttttacaggaatgttcataaacagcaggttctcctaggctttgaacaaaatttagcttctccaaggccaaaagcctcattgtgaaga

SEQ ID NO: 419472 - DNA, 120 bp, Artificial Sequence
  ENSG00000150054_43 (sequence is synthesized)
caacagtcccatgtgttgtaggtcccaggaggtcttggtgtttttgtagacagcagacaagaaataaaaggaattttgtcctttttacctcatgtaatcccactggaaaatgaaacatgt

SEQ ID NO: 419473 - DNA, 120 bp, Artificial Sequence
  ENSG00000150054_44 (sequence is synthesized)
gctatgagttgatattgactcctgccaggtcacctccctaaagagtctcgggcaggcactgttgcaacatttcttggacaggagtgtgacgggctgtgatggagatggatggtttatgta

SEQ ID NO: 419474 - DNA, 120 bp, Artificial Sequence
  ENSG00000150054_45 (sequence is synthesized)
gtacgctaccgtggaacactgcactactgtctgcccctaggaagtggctagtgaggacgccacgagtaacccgcatctgttactttaactctttcagagggtctgtatgagctgttggct

SEQ ID NO: 419475 - DNA, 120 bp, Artificial Sequence
  ENSG00000150054_46 (sequence is synthesized)
catttttgagaattttcatgtgactgttttttataagcacatgcctgtcccgttttagacaactgagagttctccatttgaagtgtattttaattatcataataatatttgaaacagatg

SEQ ID NO: 419476 - DNA, 120 bp, Artificial Sequence
  ENSG00000150054_47 (sequence is synthesized)
gcaaaacagtagcttcactcagacaccgtaaccatcatctcatcctggatgcaattgctgtggttaacacaggaagaaaaggagaagtatcactctttttgctgcacaaatgtgaaaact

SEQ ID NO: 419477 - DNA, 120 bp, Artificial Sequence
  ENSG00000150054_48 (sequence is synthesized)
ttcccataagcagcgttgcttagcagtgtcgctgacgtcgtcccattagttccaggggaacagagttgaagtcagacccttgtgccacaggagcaaggcacccgactcacagcagcctag

SEQ ID NO: 419478 - DNA, 120 bp, Artificial Sequence
  ENSG00000150054_49 (sequence is synthesized)
atgcatggattgctcatttgggaaaatacgttctgtgtaaaacttttaccacttcttctttcccttcttgcttatttcacgaagaaaaaaaaaactaattatacaagtaatacataaaaa

SEQ ID NO: 419479 - DNA, 120 bp, Artificial Sequence
  ENSG00000150093_0 (sequence is synthesized)
gccagcccgcgggagaggcccagcgggagtcgcggaacagcaggcccgagcccaccgcgccgggccccggacgccgcgcggaaaagatgaatttacaaccaattttctggattggactga

SEQ ID NO: 419480 - DNA, 120 bp, Artificial Sequence
  ENSG00000150093_1 (sequence is synthesized)
tcagttcagtttgctgtgtgtttgctcaaacagatgaaaatagatgtttaaaagcaaatgccaaatcatgtggagaatgtatacaagcagggccaaattgtgggtggtgcacaaattcaa

SEQ ID NO: 419481 - DNA, 120 bp, Artificial Sequence
  ENSG00000150093_2 (sequence is synthesized)
catttttacaggaaggaatgcctacttctgcacgatgtgatgatttagaagccttaaaaaagaagggttgccctccagatgacatagaaaatcccagaggctccaaagatataaagaaaa

SEQ ID NO: 419482 - DNA, 120 bp, Artificial Sequence
  ENSG00000150093_3 (sequence is synthesized)
ataaaaatgtaaccaaccgtagcaaaggaacagcagagaagctcaagccagaggatattactcagatccaaccacagcagttggttttgcgattaagatcaggggagccacagacattta

SEQ ID NO: 419483 - DNA, 120 bp, Artificial Sequence
  ENSG00000150093_4 (sequence is synthesized)
cattaaaattcaagagagctgaagactatcccattgacctctactaccttatggacctgtcttactcaatgaaagacgatttggagaatgtaaaaagtcttggaacagatctgatgaatg

SEQ ID NO: 419484 - DNA, 120 bp, Artificial Sequence
  ENSG00000150093_5 (sequence is synthesized)
aaatgaggaggattacttcggacttcagaattggatttggctcatttgtggaaaagactgtgatgccttacattagcacaacaccagctaagctcaggaacccttgcacaagtgaacaga

SEQ ID NO: 419485 - DNA, 120 bp, Artificial Sequence
  ENSG00000150093_6 (sequence is synthesized)
actgcaccagcccatttagctacaaaaatgtgctcagtcttactaataaaggagaagtatttaatgaacttgttggaaaacagcgcatatctggaaatttggattctccagaaggtggtt

SEQ ID NO: 419486 - DNA, 120 bp, Artificial Sequence
  ENSG00000150093_7 (sequence is synthesized)
tcgatgccatcatgcaagttgcagtttgtggatcactgattggctggaggaatgttacacggctgctggtgttttccacagatgccgggtttcactttgctggagatgggaaacttggtg

SEQ ID NO: 419487 - DNA, 120 bp, Artificial Sequence
  ENSG00000150093_8 (sequence is synthesized)
gcattgttttaccaaatgatggacaatgtcacctggaaaataatatgtacacaatgagccattattatgattatccttctattgctcaccttgtccagaaactgagtgaaaataatattc

SEQ ID NO: 419488 - DNA, 120 bp, Artificial Sequence
  ENSG00000150093_9 (sequence is synthesized)
agacaatttttgcagttactgaagaatttcagcctgtttacaaggagctgaaaaacttgatccctaagtcagcagtaggaacattatctgcaaattctagcaatgtaattcagttgatca

SEQ ID NO: 419489 - DNA, 120 bp, Artificial Sequence
  ENSG00000150093_10 (sequence is synthesized)
ttgatgcatacaattccctttcctcagaagtcattttggaaaacggcaaattgtcagaaggcgtaacaataagttacaaatcttactgcaagaacggggtgaatggaacaggggaaaatg

SEQ ID NO: 419490 - DNA, 120 bp, Artificial Sequence
  ENSG00000150093_11 (sequence is synthesized)
gaagaaaatgttccaatatttccattggagatgaggttcaatttgaaattagcataacttcaaataagtgtccaaaaaaggattctgacagctttaaaattaggcctctgggctttacgg

SEQ ID NO: 419491 - DNA, 120 bp, Artificial Sequence
  ENSG00000150093_12 (sequence is synthesized)
aggaagtagaggttattcttcagtacatctgtgaatgtgaatgccaaagcgaaggcatccctgaaagtcccaagtgtcatgaaggaaatgggacatttgagtgtggcgcgtgcaggtgca

SEQ ID NO: 419492 - DNA, 120 bp, Artificial Sequence
  ENSG00000150093_13 (sequence is synthesized)
atgaagggcgtgttggtagacattgtgaatgcagcacagatgaagttaacagtgaagacatggatgcttactgcaggaaagaaaacagttcagaaatctgcagtaacaatggagagtgcg

SEQ ID NO: 419493 - DNA, 120 bp, Artificial Sequence
  ENSG00000150093_14 (sequence is synthesized)
tctgcggacagtgtgtttgtaggaagagggataatacaaatgaaatttattctggcaaattctgcgagtgtgataatttcaactgtgatagatccaatggcttaatttgtggaggaaatg

SEQ ID NO: 419494 - DNA, 120 bp, Artificial Sequence
  ENSG00000150093_15 (sequence is synthesized)
gtgtgtgtgagtgcaaccccaactacactggcagtgcatgtgactgttctttggatactagtacttgtgaagccagcaacggacagatctgcaatggccggggcatctgcgagtgtggtg

SEQ ID NO: 419495 - DNA, 120 bp, Artificial Sequence
  ENSG00000150093_16 (sequence is synthesized)
tctgtaagtgtacagatccgaagtttcaagggcaaacgtgtgagatgtgtcagacctgccttggtgtctgtgctgagcataaagaatgtgttcagtgcagagccttcaataaaggagaaa

SEQ ID NO: 419496 - DNA, 120 bp, Artificial Sequence
  ENSG00000150093_17 (sequence is synthesized)
agaaagacacatgcacacaggaatgttcctattttaacattaccaaggtagaaagtcgggacaaattaccccagccggtccaacctgatcctgtgtcccattgtaaggagaaggatgttg

SEQ ID NO: 419497 - DNA, 120 bp, Artificial Sequence
  ENSG00000150093_18 (sequence is synthesized)
acgactgttggttctattttacgtattcagtgaatgggaacaacgaggtcatggttcatgttgtggagaatccagagtgtcccactggtccagacatcattccaattgtagctggtgtgg

SEQ ID NO: 419498 - DNA, 120 bp, Artificial Sequence
  ENSG00000150093_19 (sequence is synthesized)
ttgctggaattgttcttattggccttgcattactgctgatatggaagcttttaatgataattcatgacagaagggagtttgctaaatttgaaaaggagaaaatgaatgccaaatgggaca

SEQ ID NO: 419499 - DNA, 120 bp, Artificial Sequence
  ENSG00000150093_20 (sequence is synthesized)
cgggtgaaaatcctatttataagagtgccgtaacaactgtggtcaatccgaagtatgagggaaaatgagtactgcccgtgcaaatcccacaacactgaatgcaaagtagcaatttccata

SEQ ID NO: 419500 - DNA, 120 bp, Artificial Sequence
  ENSG00000150093_21 (sequence is synthesized)
gtcacagttaggtagctttagggcaatattgccatggttttactcatgtgcaggttttgaaaatgtacaatatgtataatttttaaaatgttttattattttgaaaataatgttgtaatt

SEQ ID NO: 419501 - DNA, 120 bp, Artificial Sequence
  ENSG00000150093_22 (sequence is synthesized)
catgccagggactgacaaaagacttgagacaggatggttactcttgtcagctaaggtcacattgtgcctttttgaccttttcttcctggactattgaaatcaagcttattggattaagtg

SEQ ID NO: 419502 - DNA, 120 bp, Artificial Sequence
  ENSG00000150093_23 (sequence is synthesized)
atatttctatagcgattgaaagggcaatagttaaagtaatgagcatgatgagagtttctgttaatcatgtattaaaactgatttttagctttacaaatatgtcagtttgcagttatgcag

SEQ ID NO: 419503 - DNA, 120 bp, Artificial Sequence
  ENSG00000150093_24 (sequence is synthesized)
aatccaaagtaaatgtcctgctagctagttaaggattgttttaaatctgttattttgctatttgcctgttagacatgactgatgacatatctgaaagacaagtatgttgagagttgctgg

SEQ ID NO: 419504 - DNA, 120 bp, Artificial Sequence
  ENSG00000150093_25 (sequence is synthesized)
tgtaaaatacgtttgaaatagttgatctacaaaggccatgggaaaaattcagagagttaggaaggaaaaaccaatagctttaaaacctgtgtgccattttaagagttacttaatgtttgg

SEQ ID NO: 419505 - DNA, 120 bp, Artificial Sequence
  ENSG00000150093_26 (sequence is synthesized)
taacttttatgccttcactttacaaattcaagccttagataaaagaaccgagcaattttctgctaaaaagtccttgatttagcactatttacatacaggccatactttacaaagtatttg

SEQ ID NO: 419506 - DNA, 120 bp, Artificial Sequence
  ENSG00000150093_27 (sequence is synthesized)
ctgaatggggaccttttgagttgaatttattttattatttttattttgtttaatgtctggtgctttctgtcacctcttctaatcttttaatgtatttgtttgcaattttggggtaagact

SEQ ID NO: 419507 - DNA, 120 bp, Artificial Sequence
  ENSG00000150093_28 (sequence is synthesized)
ttttttatgagtactttttctttgaagttttagcggtcaatttgcctttttaatgaacatgtgaagttatactgtggctatgcaacagctctcacctacgcgagtcttactttgagttag

SEQ ID NO: 419508 - DNA, 120 bp, Artificial Sequence
  ENSG00000150093_29 (sequence is synthesized)
tgccataacagaccactgtatgtttacttctcaccatttgagttgcccatcttgtttcacactagtcacattcttgttttaagtgcctttagttttaacagttcactttttacagtgcta

SEQ ID NO: 419509 - DNA, 120 bp, Artificial Sequence
  ENSG00000150093_30 (sequence is synthesized)
tttactgaagttatttattaaatatgcctaaaatacttaaatcggatgtcttgactctgatgtattttatcaggttgtgtgcatgaaatttttatagattaaagaagttgaggaaaagca

SEQ ID NO: 419510 - DNA, 120 bp, Artificial Sequence
  ENSG00000150093_31 (sequence is synthesized)
gagccagcccagccgcgttccgaacgtgagggtcgccggcctgggcgctgtcacgtcggggctgccggagctgcgggggaccgggcccgaacggcccctgacacctgcggtctcccgccg

SEQ ID NO: 419511 - DNA, 120 bp, Artificial Sequence
  ENSG00000150093_32 (sequence is synthesized)
tgttggctgggttggtctcaaactcctgacctcaggatgttggccttagcctgaagaaataaaaactgatgaagcgcattgttagcagagggatgacttgatcaggtttttgaaaacgaa

SEQ ID NO: 419512 - DNA, 120 bp, Artificial Sequence
  ENSG00000150093_33 (sequence is synthesized)
tgttcagcattgaggtaactgaggcatctggatatgctggtctgggcccctgggagccgcaggagataatggagatagagattctatgggctgagaccattgatgaatttacaaccaatt

SEQ ID NO: 419513 - DNA, 120 bp, Artificial Sequence
  ENSG00000150093_34 (sequence is synthesized)
tgctggttttataatctcagaaaagatacgttggagacagtctgtattagcgcttaccatgtagaaggcatactcttccttaggtagatgcaaagaaacctaaaacatactttgaacata

SEQ ID NO: 419514 - DNA, 120 bp, Artificial Sequence
  ENSG00000150093_35 (sequence is synthesized)
gagcctgagaaattctgggattatggattagatgaatatggacttttcagttatttaacatactgaaagcaaagggaaagccttgaagattcttatgaaaatagatgtttaaaagcaaat

SEQ ID NO: 419515 - DNA, 120 bp, Artificial Sequence
  ENSG00000150093_36 (sequence is synthesized)
aaaggaaacaccgactttaattatttgacataataatgacttaagagatggcagaagacaattgataataattgggagacagtgtaggtaaggtatggatttatcttgaactcaagatac

SEQ ID NO: 419516 - DNA, 120 bp, Artificial Sequence
  ENSG00000150093_37 (sequence is synthesized)
ttatgatgttctattaggttggtgcacacagccatctggtcgaccttagacacgggaaggcaagcacattatcactccagaaaagcagtcctggcttagccagttcccttccagaaggac

SEQ ID NO: 419517 - DNA, 120 bp, Artificial Sequence
  ENSG00000150093_38 (sequence is synthesized)
gctcgaaacgggacatcagtggacaaacgggagcgagggtcgaacgcgcggctccgaggaagaggaacttaaagaacacgggcccagcaggctacaccaggaacgcgcggggctctaggg

SEQ ID NO: 419518 - DNA, 120 bp, Artificial Sequence
  ENSG00000150093_39 (sequence is synthesized)
cgcgtccgactcctcccgcccttcgcagaggaggaaactgaggcacggcgactgtctcaacgcagtcccggccctgccccccgcggcctccctcaggcgcgctcccgcgcagccggttcc

SEQ ID NO: 419519 - DNA, 120 bp, Artificial Sequence
  ENSG00000150093_40 (sequence is synthesized)
gaacagcaggcccgagcccaccgcgccgggccccggacgccgcgcggaaaagatacctgatcagagaagcagtttgatgtactaaaggcttctcgattgggagacaggaaacctgggtgt

SEQ ID NO: 419520 - DNA, 120 bp, Artificial Sequence
  ENSG00000150093_41 (sequence is synthesized)
cagtgccgggtctgccactgaatttctgtgtgacctttgtcagagtactgtacttccagagcgttggtttccacatctaccctataaagcagcctgcatgtttctctcattctctcgttc

SEQ ID NO: 419521 - DNA, 120 bp, Artificial Sequence
  ENSG00000150093_42 (sequence is synthesized)
ctgcctgatggaaaggcaaaaaagtccgcaggcatagagagtggaaagaaggaacagcatactaggctggtttgaaaaacaatcaattgctagatgaatttacaaccaattttctggatt

SEQ ID NO: 419522 - DNA, 120 bp, Artificial Sequence
  ENSG00000150093_43 (sequence is synthesized)
agaaatcttaaagtagaagcgtcacaggacttgttcttccaaatgctgcatggcaaatattattaggaaatatacttaacatttatttatttttattctcaataaggagttacattcaaa

SEQ ID NO: 419523 - DNA, 120 bp, Artificial Sequence
  ENSG00000150093_44 (sequence is synthesized)
gtaactggaagtgacggatgagaaaaatatatctaggttggtgcacacagccatctggtcgaccttagacacgggaaggcaagcaccccctggttgaccttagacatggaaagatgaatt

SEQ ID NO: 419524 - DNA, 120 bp, Artificial Sequence
  ENSG00000150093_45 (sequence is synthesized)
agtgcaaacgcagtgagtcatccgcagggcgtgcggagtgtgccggctgggtccctgcagcccccaagcccggagggatgcgggaaaatcgctcttggaagatgcaattgctttaataat

SEQ ID NO: 419525 - DNA, 120 bp, Artificial Sequence
  ENSG00000150093_46 (sequence is synthesized)
aatgaaaagtggtcaaacaacttaacatggtgccagttttcctaagcgtgcttgccactgattgtaatgcttttattgtttggcttcttgataaatgaatttacaaccaattttctggat

SEQ ID NO: 419526 - DNA, 82 bp, Artificial Sequence
  ENSG00000150093_47 (sequence is synthesized)
gagtttctgtgcacacactctcctgcctgctgccacgtaagacgtgccttttgcctgccgccatgtaatatgtgtctcccca

SEQ ID NO: 419527 - DNA, 120 bp, Artificial Sequence
  ENSG00000150093_48 (sequence is synthesized)
taggtcatagtattaatatttaacatatgtattgcattgtcattgtgattctgatttttcattattttctctctgacacttcacataaaatgttctgttctttcttctttctgacagatg

SEQ ID NO: 419528 - DNA, 120 bp, Artificial Sequence
  ENSG00000150201_0 (sequence is synthesized)
ctcctcagatccgttctctgcgctgccagctcaggtgagccctcgccaaggtgacctcgcaggacactggtgaaggagcagtgaggaacctgcagagtcacacagttggccaccaccatc

SEQ ID NO: 419529 - DNA, 120 bp, Artificial Sequence
  ENSG00000150201_1 (sequence is synthesized)
tctagatgggaagacagaaagtagttactttcccaagatctccccacaagcaagtgtatccttggggtttgtacacctactttcaccatggggctctgcctgcccccgcccctgcctcct

SEQ ID NO: 419530 - DNA, 120 bp, Artificial Sequence
  ENSG00000150201_2 (sequence is synthesized)
ctcgctgaccaattgagctgtgagcctggagcagatccgtgggctgcagacccccgccccagtgcctctccccctgcagccctgcccctcgaactgtgacatggagagagtgaccctggc

SEQ ID NO: 419531 - DNA, 120 bp, Artificial Sequence
  ENSG00000150201_3 (sequence is synthesized)
acgatcccttctactatgactggaaaaacctgcagctgagcggactgatctgcggagggctcctggccattgctgggatcgcggcagttctgagtggcaaatgcaaatgcaagagcagcc

SEQ ID NO: 419532 - DNA, 120 bp, Artificial Sequence
  ENSG00000150201_4 (sequence is synthesized)
agaagcagcacagtcctgtacctgagaaggccatcccactcatcactccaggctctgccactacttgctgagcacaggactggcctccagggatggcctgaagcctaacactggccccca

SEQ ID NO: 419533 - DNA, 120 bp, Artificial Sequence
  ENSG00000150201_5 (sequence is synthesized)
gcacctcctcccctgggaggccttatcctcaaggaaggacttctctccaagggcaggctgttaggcccctttctgatcaggaggcttctttatgaattaaactcgccccaccaccccctc

SEQ ID NO: 419534 - DNA, 120 bp, Artificial Sequence
  ENSG00000150201_6 (sequence is synthesized)
ctgcgctgccagctcaggtgagccctcgccaaggtgacctcgcaggacactggtgaaggagcagtgaggaacctgcagagtcacacagttggcctgactgccttggaagccaatgaccca

SEQ ID NO: 419535 - DNA, 120 bp, Artificial Sequence
  ENSG00000150244_0 (sequence is synthesized)
agttttctccaaaggagaaggagtgcacttagagggagctgtgttttggtgacctctgaaactcagtactgcagcgaatgagctcctgaccttgaggagtacttaacagaattatgtctc

SEQ ID NO: 419536 - DNA, 120 bp, Artificial Sequence
  ENSG00000150244_1 (sequence is synthesized)
gaagaatcattgtgggaacccttcaaagaacccagcgaaacatgaattctggaatctcgcaagtcttccagagggaactcacctgccccatctgcatgaactacttcatagacccggtca

SEQ ID NO: 419537 - DNA, 120 bp, Artificial Sequence
  ENSG00000150244_2 (sequence is synthesized)
ccatagactgtgggcacagcttttgcaggccctgtttctacctcaactggcaagacatcccaattcttactcagtgctttgaatgcataaagacaatacagcagagaaacctcaaaacta

SEQ ID NO: 419538 - DNA, 120 bp, Artificial Sequence
  ENSG00000150244_3 (sequence is synthesized)
acattcgattgaagaagatggcttcccttgccagaaaagccagtctctggctattcctgagctctgaggagcaaatgtgtggcattcacagggagacaaagaagatgttctgtgaagtgg

SEQ ID NO: 419539 - DNA, 120 bp, Artificial Sequence
  ENSG00000150244_4 (sequence is synthesized)
acaggagcctgctctgtttgctgtgctccagctctcaggagcaccggtatcacagacactgtcccgctgagtgggctgctgaggaacactgggagaagcttttaaagaaaatgcagtctt

SEQ ID NO: 419540 - DNA, 120 bp, Artificial Sequence
  ENSG00000150244_5 (sequence is synthesized)
tctttatgggaaaaagcttgtgaaaatcagagaaacctgaatgtggaaaccaccagaatcagccactggaaggcttttggagacatattatacaggagtgagtccgtgctgctgcacatg

SEQ ID NO: 419541 - DNA, 120 bp, Artificial Sequence
  ENSG00000150244_6 (sequence is synthesized)
ggcccatcactggactgagggacaggctcaaccaattctgagtggatattactctgcatcacaatgaagccaacagtcatatcttccgatgtggagatttgagaagcatttgtattggat

SEQ ID NO: 419542 - DNA, 120 bp, Artificial Sequence
  ENSG00000150244_7 (sequence is synthesized)
gtgaccgtcaaaatccgccccatatcactgcaacacctacaagttttcttgcatggggtgctcagactttcacctctggcaaatattactgggaggtccatgtgggggactcttggaatt

SEQ ID NO: 419543 - DNA, 120 bp, Artificial Sequence
  ENSG00000150244_8 (sequence is synthesized)
gggcttttggtgtctgtaataagtattggaaagggaagaatcagaatggcaatatatatggagaggagggactctttagtcttgggtgtgttaagaacgacattcagtgcagtctcttta

SEQ ID NO: 419544 - DNA, 120 bp, Artificial Sequence
  ENSG00000150244_9 (sequence is synthesized)
ccacctccccaattacactgcagtatgtcccaagacctaccaaccatgtagaattattcctggattgtgaagctagaactgtgagcttcgttgatgttagtcaaagctcccctatataca

SEQ ID NO: 419545 - DNA, 120 bp, Artificial Sequence
  ENSG00000150244_10 (sequence is synthesized)
ccatccctaattgctccttctcacttcctctcagacctatctttttctgtattctcctctgaccagagacaaatcagaaatgtgttcatctgctgtgggaacccctttatcccagaaagc

SEQ ID NO: 419546 - DNA, 120 bp, Artificial Sequence
  ENSG00000150244_11 (sequence is synthesized)
cctcttccttgtgccttatcaaacaggacaaataggttcggttttatgtcttgaattgcattctaatgttattaaaactcatttattgtgttactattaaatgtagtaaaaacactaaaa

SEQ ID NO: 419547 - DNA, 120 bp, Artificial Sequence
  ENSG00000150261_0 (sequence is synthesized)
cctctattgctcatacatcaaattgttaattttcttagaagataatgtttcaaatataataaatattgattttctagtttgcacagttaccaagatgaatcatgtggtaaaacacaatca

SEQ ID NO: 419548 - DNA, 120 bp, Artificial Sequence
  ENSG00000150261_1 (sequence is synthesized)
cacggcagtgaccaaggtgactgaatttattctcatggggattacagacaaccctgggctgcaggctccactgtttggactcttcctcatcatatatctggtcacagtgataggcaatct

SEQ ID NO: 419549 - DNA, 120 bp, Artificial Sequence
  ENSG00000150261_2 (sequence is synthesized)
gggcatggttatcttgacctacttggactccaagctacacacccccatgtactttttccttagacatttgtcaatcactgatcttggttactccactgtcattgccccgaagatgttagt

SEQ ID NO: 419550 - DNA, 120 bp, Artificial Sequence
  ENSG00000150261_3 (sequence is synthesized)
aaacttcatagtgcacaaaaacacaatttcttacaattggtatgccactcagctagcattctttgagattttcatcatctctgagctctttattctatcagcaatggcctatgatcgcta

SEQ ID NO: 419551 - DNA, 120 bp, Artificial Sequence
  ENSG00000150261_4 (sequence is synthesized)
atctgtaaacctcttctgtacgtgatcatcatggcagagaaagtactttgggtgctggtaattgttccctatctctatagcacgtttgtgtcactatttctcacaattaagttatttaaa

SEQ ID NO: 419552 - DNA, 120 bp, Artificial Sequence
  ENSG00000150261_5 (sequence is synthesized)
ctgtccttctgtggctcaaacataatcagctatttttactgtgactgtatccctctgatgtccatactctgttctgacacaaatgaattagaattaataattttgatcttctcaggctgt

SEQ ID NO: 419553 - DNA, 120 bp, Artificial Sequence
  ENSG00000150261_6 (sequence is synthesized)
aatttgctcttctccctctcaattgttctcatatcctacatgtttattctagtggccattctcagaatgaactcaaggaaagggaggtacaaagccttctccacctgtagctctcatctg

SEQ ID NO: 419554 - DNA, 120 bp, Artificial Sequence
  ENSG00000150261_7 (sequence is synthesized)
acagtggtgatcatgttctatgggacattgttatttatttacttgcaacccaagtccagtcatactttggctattgataaaatggcctcagtgttttataccctgttgattcctatgctg

SEQ ID NO: 419555 - DNA, 120 bp, Artificial Sequence
  ENSG00000150261_8 (sequence is synthesized)
aatccgttgatctacagcctaaggaacaaagaagtaaaagatgctctaaagagaactttaaccaatcgattcaaaattcccatttaatatcttaatactcagttgcatagttgggtacaa

SEQ ID NO: 419556 - DNA, 120 bp, Artificial Sequence
  ENSG00000150269_0 (sequence is synthesized)
atgcctaatttcacggatgtgacagaatttactctcctggggctgacctgtcgtcaggagctacaggttctcttttttgtggtgttcctagcggtttacatgatcactctgttgggaaat

SEQ ID NO: 419557 - DNA, 120 bp, Artificial Sequence
  ENSG00000150269_1 (sequence is synthesized)
attggtatgatcattttgattagcatcagtcctcagcttcagagtcccatgtactttttcctgagtcatctgtcttttgcggacgtgtgcttctcctccaacgttacccccaaaatgctg

SEQ ID NO: 419558 - DNA, 120 bp, Artificial Sequence
  ENSG00000150269_2 (sequence is synthesized)
gaaaacttattatcagagacaaaaaccatttcctatgtgggatgcttggtgcagtgctactttttcattgccgttgtccacgtggaggtctatatcctggctgtgatggcctttgacagg

SEQ ID NO: 419559 - DNA, 120 bp, Artificial Sequence
  ENSG00000150269_3 (sequence is synthesized)
tctgtcagcctaatatgcacactatggacttatggcttatacttctgtggaaactttgaaatcaatcacttctattgtgcagatccccctctcatccagattgcctgtgggagagtgcac

SEQ ID NO: 419560 - DNA, 120 bp, Artificial Sequence
  ENSG00000150269_4 (sequence is synthesized)
atcaaagaaatcacaatgattgttattgctggaattaacttcacatattccctctcggtggtcctcatctcctacactctcattgtagtagctgtgctacgcatgcgctctgccgatggc

SEQ ID NO: 419561 - DNA, 120 bp, Artificial Sequence
  ENSG00000150269_5 (sequence is synthesized)
aggaggaaggcgttctccacctgtgggtcccacttgacggctgtttctatgttttatgggacccccatcttcatgtatctcaggagacccactgaggaatccgtagagcagggcaaaatg

SEQ ID NO: 419562 - DNA, 120 bp, Artificial Sequence
  ENSG00000150269_6 (sequence is synthesized)
gtggctgtgttttacaccacagtaattcctatgttgaatcccatgatctacagtctgagaaataaggatgtaaaagaagcagtcaacaaagcaatcaccaagacatatgtgaggcagtaa

SEQ ID NO: 419563 - DNA, 120 bp, Artificial Sequence
  ENSG00000150275_0 (sequence is synthesized)
caacgtgctgagctaatagcgacagatagagggcagacagattcctgctagcagcttagtgttagttgcttgtggtaactaaggcaggtggcatacatctcagaacgtggagaatgatgg

SEQ ID NO: 419564 - DNA, 120 bp, Artificial Sequence
  ENSG00000150275_1 (sequence is synthesized)
tatgctttctgagttaacatgttgaactgttttgcttttctaaaaattttcctagtaacattttcttgatgatatgagagtggatatcaatgcctcacagaaacaagaggtggaacatgt

SEQ ID NO: 419565 - DNA, 120 bp, Artificial Sequence
  ENSG00000150275_2 (sequence is synthesized)
gaatgaatcgtcttggaactagattatgagcactggttctttttaaagggatgtgcaagaggcagccttggcaagaaaacttgctgcataatcttacatggactaaagatgaaactttaa

SEQ ID NO: 419566 - DNA, 120 bp, Artificial Sequence
  ENSG00000150275_3 (sequence is synthesized)
accgcaaatcagctttgagtgaactttgacagaagatgtttcgacagttttatctctggacatgtttagcttcagggatcatcctgggctctctctttgaaatctgcttgggccagtatg

SEQ ID NO: 419567 - DNA, 120 bp, Artificial Sequence
  ENSG00000150275_4 (sequence is synthesized)
atgatgattgcaaactagctaggggaggaccaccagctaccatagttgctattgatgaagaaagtcggaatggtacaattctggtggacaacatgctgatcaaagggactgctggaggac

SEQ ID NO: 419568 - DNA, 120 bp, Artificial Sequence
  ENSG00000150275_5 (sequence is synthesized)
cagaccccaccatagaactttctttaaaggataatgtggattactgggtgttgatggatcctgttaagcaaatgcttttcctgaacagcaccggaagagttctggatagagatccaccga

SEQ ID NO: 419569 - DNA, 120 bp, Artificial Sequence
  ENSG00000150275_6 (sequence is synthesized)
tgaacatacactccattgtggtgcaggtccagtgcatcaacaaaaaagtgggcactattatctaccatgaagtgcgaatagtggtgagagacaggaatgacaactcacccactttcaagc

SEQ ID NO: 419570 - DNA, 120 bp, Artificial Sequence
  ENSG00000150275_7 (sequence is synthesized)
atgaaagctactatgccacagtgaatgagctcactccagttggtaccacaatattcacaggattttcaggagacaatggagctacagatatagatgatggaccaaatggacagatagagt

SEQ ID NO: 419571 - DNA, 120 bp, Artificial Sequence
  ENSG00000150275_8 (sequence is synthesized)
atgttattcagtataatccagatgatccgacatccaatgacacctttgaaattcccctaatgttgactggaaatatagtgttaaggaagaggctcaactatgaagataagactcgctact

SEQ ID NO: 419572 - DNA, 120 bp, Artificial Sequence
  ENSG00000150275_9 (sequence is synthesized)
ttgtcataatccaagctaatgaccgtgcccaaaatctgaatgagaggcgaaccaccaccaccactctcacagtggatgttctggatggagatgacttgggtccaatgtttcttccttgtg

SEQ ID NO: 419573 - DNA, 120 bp, Artificial Sequence
  ENSG00000150275_10 (sequence is synthesized)
tccttgtgccaaacactcgtgattgccgtccactcacttatcaagctgccatacctgagttgagaactccggaagaactgaaccccattattgttacgccaccaatccaagccattgatc

SEQ ID NO: 419574 - DNA, 120 bp, Artificial Sequence
  ENSG00000150275_11 (sequence is synthesized)
aggaccggaatattcaaccgccatcagataggccaggaatcctctattccatccttgttgggactcctgaggattacccacgatttttccatatgcatcctaggacagcagaacttagtc

SEQ ID NO: 419575 - DNA, 120 bp, Artificial Sequence
  ENSG00000150275_12 (sequence is synthesized)
tcctggagccagtaaacagagactttcaccagaaatttgatttggttattaaggctgaacaagacaatggtcatcctcttcctgcctttgccggtctacacattgaaatactggatgaaa

SEQ ID NO: 419576 - DNA, 120 bp, Artificial Sequence
  ENSG00000150275_13 (sequence is synthesized)
acaatcaaagtccatattttacaatgcccagttatcaaggctatatcctggaatctgccccagtgggagcaaccatttcggacagtctcaatttgacttcacctttaagaatagtagctc

SEQ ID NO: 419577 - DNA, 120 bp, Artificial Sequence
  ENSG00000150275_14 (sequence is synthesized)
tggacaaggacatagaagatacaaaagacccagagcttcacctttttctgaatgactacacctcagtcttcaccgtcacacagactggtattactcgctacctcaccttacttcaaccag

SEQ ID NO: 419578 - DNA, 120 bp, Artificial Sequence
  ENSG00000150275_15 (sequence is synthesized)
tggacagggaagaacagcaaacttacaccttttcgataacagcatttgatggtgtacaagaaagtgagccagtcatcgtcaatattcaagtgatggatgcaaatgataacacgccaacct

SEQ ID NO: 419579 - DNA, 120 bp, Artificial Sequence
  ENSG00000150275_16 (sequence is synthesized)
tccctgaaatatcctatgatgtgtatgtttatacagacatgagacctggggacagtgtcatacagctcactgcagtcgacgcagacgaagggtcaaatggggagatcacatatgaaatcc

SEQ ID NO: 419580 - DNA, 120 bp, Artificial Sequence
  ENSG00000150275_17 (sequence is synthesized)
ttgttggggctcagggagacttcatcatcaataaaacaacagggcttatcaccatcgctccaggggtggaaatgatagtcgggcggacttacgcactcacggtccaagcagcggataatg

SEQ ID NO: 419581 - DNA, 120 bp, Artificial Sequence
  ENSG00000150275_18 (sequence is synthesized)
ctcctcctgcagagcgaaggaactccatctgcactgtgtatattgaagtgcttccaccaaataatcaaagccctcctcgcttcccacagctgatgtatagccttgaaattagtgaagcca

SEQ ID NO: 419582 - DNA, 120 bp, Artificial Sequence
  ENSG00000150275_19 (sequence is synthesized)
tgagggttggtgctgttttattaaatctacaggcaactgatcgagagggagactcaataacatatgccattgagaatggagatcctcagagagtttttaatctttcagaaaccacgggga

SEQ ID NO: 419583 - DNA, 120 bp, Artificial Sequence
  ENSG00000150275_20 (sequence is synthesized)
ttctaaccttagggaaagcactggacagggaaagcactgatcgctacattctgatcatcacagcttcagatggcaggccagatgggacctcaactgccacagtaaacatagtggtgacag

SEQ ID NO: 419584 - DNA, 120 bp, Artificial Sequence
  ENSG00000150275_21 (sequence is synthesized)
atgtcaatgacaatgctccagtgtttgatccttatctgccaagaaatttatctgtggtggaagaagaagccaatgcctttgtgggtcaagtaaaagcaacagaccctgatgctggaataa

SEQ ID NO: 419585 - DNA, 120 bp, Artificial Sequence
  ENSG00000150275_22 (sequence is synthesized)
atggtcaagtgcactacagtttgggtaactttaataatctttttcgtatcacatccaatgggagcatttacacagcagtgaagcttaacagagaagtcagggactactatgaacttgttg

SEQ ID NO: 419586 - DNA, 120 bp, Artificial Sequence
  ENSG00000150275_23 (sequence is synthesized)
ttgtggcaacagatggagcagtacaccctcgtcattcaactctaaccttggccatcaaggttttggacattgatgataacagtcctgtgttcaccaattcaacatacactgtccttgttg

SEQ ID NO: 419587 - DNA, 120 bp, Artificial Sequence
  ENSG00000150275_24 (sequence is synthesized)
aagagaatttgccagctgggactaccatccttcaaatagaggccaaagatgtcgaccttggagcaaatgtgtcttaccggataagaagcccagaagtgaagcacttttttgcactacatc

SEQ ID NO: 419588 - DNA, 120 bp, Artificial Sequence
  ENSG00000150275_25 (sequence is synthesized)
catttacaggagaactatcgcttttaaggagtttagattatgaggcatttccagaccaagaagcaagtatcacttttctggtagaggcctttgatatttatggaacaatgccacctggta

SEQ ID NO: 419589 - DNA, 120 bp, Artificial Sequence
  ENSG00000150275_26 (sequence is synthesized)
ttgctactgtcacagtgattgtaaaggatatgaatgattatcctcctgtctttagtaaacgaatatacaaagggatggtggctccggatgcagtcaagggtacacctatcacaacagttt

SEQ ID NO: 419590 - DNA, 120 bp, Artificial Sequence
  ENSG00000150275_27 (sequence is synthesized)
atgctgaagatgcagaccctcctggattacctgcaagtcgtgtgaggtatagagtagatgatgtacagtttccttaccctgccagtatttttgaagtggaagaagattctggaagagtaa

SEQ ID NO: 419591 - DNA, 120 bp, Artificial Sequence
  ENSG00000150275_28 (sequence is synthesized)
cgagtcaatcttaatgaagaacctacaacaatttttaagttggtggtggttgcttttgatgatggggagcctgtgatgtccagcagtgccacagtgaagattcttgtcttacatcctggt

SEQ ID NO: 419592 - DNA, 120 bp, Artificial Sequence
  ENSG00000150275_29 (sequence is synthesized)
gagatcccacgcttcacacaggaggaatatagacctcctccagtaagtgaacttgccaccaaagggaccatggttggtgtaatttctgctgctgccattaatcaaagtattgtgtactcc

SEQ ID NO: 419593 - DNA, 120 bp, Artificial Sequence
  ENSG00000150275_30 (sequence is synthesized)
attgtttcaggaaatgaagaagatacatttggaattaataacatcacaggtgttatctatgtgaatggacctctggattatgagaccaggacaagctatgtacttcgagtccaagctgat

SEQ ID NO: 419594 - DNA, 120 bp, Artificial Sequence
  ENSG00000150275_31 (sequence is synthesized)
tccctggaagtggtccttgccaatctccgagttccttcaaaaagcaatacagctaaagtatacattgagattcaggatgaaaataatcatcccccagtgtttcagaaaaaattctacatc

SEQ ID NO: 419595 - DNA, 120 bp, Artificial Sequence
  ENSG00000150275_32 (sequence is synthesized)
ggaggtgtatctgaagatgcaagaatgtttacttctgtactcagagtgaaggctactgataaagatactggcaattatagtgtcatggcctacagactcataataccaccaattaaagag

SEQ ID NO: 419596 - DNA, 120 bp, Artificial Sequence
  ENSG00000150275_33 (sequence is synthesized)
ggaaaagaaggatttgtagtggaaacatatacagggcttatcaaaactgctatgctcttccataatatgaggagatcctacttcaagtttcaagttattgcaactgacgactatgggaag

SEQ ID NO: 419597 - DNA, 120 bp, Artificial Sequence
  ENSG00000150275_34 (sequence is synthesized)
ggactgagcggcaaagccgatgtactcgtctccgtggtcaatcagctggatatgcaagtcattgtttccaatgtgcctcctactctagtggaaaaaaagatagaagatcttacagagatc

SEQ ID NO: 419598 - DNA, 120 bp, Artificial Sequence
  ENSG00000150275_35 (sequence is synthesized)
ttggatcgctatgttcaggaacaaattcctggtgccaaggtcgtagtggagtccattggagctcgccggcatggagatgccttttccctagaagattacaccaaatgtgacttgactgtc

SEQ ID NO: 419599 - DNA, 120 bp, Artificial Sequence
  ENSG00000150275_36 (sequence is synthesized)
tatgcaattgacccccaaaccaacagagccatcgatagaaatgagctttttaaatttttggatggcaaactacttgatatcaataaagactttcagccgtattatggggaaggaggacgc

SEQ ID NO: 419600 - DNA, 120 bp, Artificial Sequence
  ENSG00000150275_37 (sequence is synthesized)
attctggagatccggactccagaggcagtgaccagcattaaaaagagaggagaaagtctaggatacacagaaggggccttgttggctctggccttcatcatcatcctctgctgcattcct

SEQ ID NO: 419601 - DNA, 120 bp, Artificial Sequence
  ENSG00000150275_38 (sequence is synthesized)
gccatcttggtggttttggtcagctacagacagtttaaagtacgtcaagctgagtgtacaaagactgcacgaattcaggccgcattacccgcggctaaaccagcagtgccggctcctgca

SEQ ID NO: 419602 - DNA, 120 bp, Artificial Sequence
  ENSG00000150275_39 (sequence is synthesized)
ccagtggcagcgcccccgccgccgccgccgcctccgccaggtgcgcatctctatgaagaacttggagacagctcaattcttttccttctctaccattttcaacaaagcaggggaaataac

SEQ ID NO: 419603 - DNA, 120 bp, Artificial Sequence
  ENSG00000150275_40 (sequence is synthesized)
tcagtctcagaagacaggaaacatcaacaagttgtgatgcccttttcttccaatactattgaggctcacaagtcagctcatgtagacggatcacttaagagcaacaaactgaagtctgca

SEQ ID NO: 419604 - DNA, 120 bp, Artificial Sequence
  ENSG00000150275_41 (sequence is synthesized)
agaaaattcacatttctatctgatgaggatgacttaagtgcccataatcccctttataaggaaaacataagtcaagtatcaacaaattcagacatttcacagagaacagattttgtagac

SEQ ID NO: 419605 - DNA, 120 bp, Artificial Sequence
  ENSG00000150275_42 (sequence is synthesized)
ccattttcacccaaaatacaagccaagagtaagtctctgaggggcccaagagaaaagattcagaggctgtggagtcagtcagtcagcttacccaggaggctgatgaggaaagttccaaat

SEQ ID NO: 419606 - DNA, 120 bp, Artificial Sequence
  ENSG00000150275_43 (sequence is synthesized)
agaccagagatcatagatctgcagcagtggcaaggcaccaggcagaaagctgaaaatgaaaacactggaatctgtacaaacaaaagaggtagcagcaatccattgcttacaactgaagag

SEQ ID NO: 419607 - DNA, 120 bp, Artificial Sequence
  ENSG00000150275_44 (sequence is synthesized)
gcaaatttgacagagaaagaggaaataaggcaaggtgaaacactgatgatagaaggaacagaacagttgaaatctctctcttcagactcttcattttgctttcccaggcctcacttctca

SEQ ID NO: 419608 - DNA, 120 bp, Artificial Sequence
  ENSG00000150275_45 (sequence is synthesized)
ttctccactttgccaactgtttcaagaactgtggaactcaaatcagaacctaatgtcatcagttctcctgctgagtgttccttggaactttctccttcaaggccttgtgttttacattct

SEQ ID NO: 419609 - DNA, 120 bp, Artificial Sequence
  ENSG00000150275_46 (sequence is synthesized)
tcactctctaggagagagacacctatttgtatgttacctattgaaaccgaaagaaatatttttgaaaattttgcccatccaccaaacatctctccttctgcctgtccccttccccctcct

SEQ ID NO: 419610 - DNA, 120 bp, Artificial Sequence
  ENSG00000150275_47 (sequence is synthesized)
cctcctatttctcctccttctcctcctcctgctcctgctcctcttgctcctcctcctgacatttctcctttttctcttttttgtcctcctccctctcctccttctatccctcttcctctt

SEQ ID NO: 419611 - DNA, 120 bp, Artificial Sequence
  ENSG00000150275_48 (sequence is synthesized)
cctcctcctacattttttccactttccgtttcaacgtctggtcccccaacaccacctcttctacctccatttccaactcctcttcctccaccacctccttctattccttgccctccacct

SEQ ID NO: 419612 - DNA, 120 bp, Artificial Sequence
  ENSG00000150275_49 (sequence is synthesized)
ccttcagcttcatttctgtccacagagtgtgtctgtataacaggtgttaaatgcacgaccaacttgatgcctgccgagaaaattaagtcctctatgacacagctatcaacaacgacagtg

SEQ ID NO: 419613 - DNA, 120 bp, Artificial Sequence
  ENSG00000150275_50 (sequence is synthesized)
tgtaaaacagaccctcagagagaaccaaaaggcatcctcagacacgttaaaaacttagcagaacttgaaaaatcagtagctaacatgtacagtcaaatagaaaaaaactatctacgcaca

SEQ ID NO: 419614 - DNA, 120 bp, Artificial Sequence
  ENSG00000150275_51 (sequence is synthesized)
aatgtttcagaacttcaaactatgtgcccttcagaagtaacaaatatggaaatcacatctgaacaaaacaaggggagtttgaacaatattgtcgagggaactgaaaaacaatctcacagt

SEQ ID NO: 419615 - DNA, 120 bp, Artificial Sequence
  ENSG00000150275_52 (sequence is synthesized)
caatctacttcactgtaatgttgcttttcttattttagtcgggcaaacctcttgttgatcatagtcttcaagttgaacatcaaatttgaacgtcaaagaagactctattattttacccca

SEQ ID NO: 419616 - DNA, 120 bp, Artificial Sequence
  ENSG00000150275_53 (sequence is synthesized)
aattcaatgaaatgcagttttttttctcgtttttaatttaaaaagatattaacctcatcactactaactcactcatataatagatttaccttactttttaaaaactacaaagtagcataa

SEQ ID NO: 419617 - DNA, 120 bp, Artificial Sequence
  ENSG00000150275_54 (sequence is synthesized)
tttgttctacatttatttgaaaagtaagtaattttaatctcttttttagtgggaatatgtgggcatgaaaattagatacccaacttaaaccaaaggcatgtctatcatgtggatgcagta

SEQ ID NO: 419618 - DNA, 120 bp, Artificial Sequence
  ENSG00000150275_55 (sequence is synthesized)
acatttacatttagtttttgatcgtagttttatatgaatgttccaagaaaaaagcagactgttacaaataagttaaaactgatatgattgataggttctgttttttcttgaagcctatgt

SEQ ID NO: 419619 - DNA, 120 bp, Artificial Sequence
  ENSG00000150275_56 (sequence is synthesized)
atttggtaagaagaaatactaccgaagtaaaatataatgtacctagattgtaggagatgacagacataaggtatttcaaaataaatctcaggtgctataacatgtagtcatctgttttct

SEQ ID NO: 419620 - DNA, 120 bp, Artificial Sequence
  ENSG00000150275_57 (sequence is synthesized)
cttatggatttagtagtatgcttatggatttgataaatcttatactttttcagttgctgtcttattctctttatttctcattgtgctttcccttcccttctttataatgaaaataaatct

SEQ ID NO: 419621 - DNA, 120 bp, Artificial Sequence
  ENSG00000150275_58 (sequence is synthesized)
gtcgattgttaccaccagctggacaggaggaatatggtgaggtggttggtgaagctgaggaagaatatgaggaggaagagtgggcaagaaaaagaatgatcaagttagttgttgatcgag

SEQ ID NO: 419622 - DNA, 120 bp, Artificial Sequence
  ENSG00000150275_59 (sequence is synthesized)
agtatgaaaccagctcaactggagaagacagtgctcctgaatgtcagagaaaccgtcttcaccatcctagtatccacagtaatatcaacggcaatatatatattgcacagaatggttctg

SEQ ID NO: 419623 - DNA, 120 bp, Artificial Sequence
  ENSG00000150275_60 (sequence is synthesized)
tggtgagaacccgccgtgcctgcctcacggacaacttaaaagttgcttcccctgttcgactgggagggccctttaagaaactagacaagttggcagtgacacatgaggagaatgtacctc

SEQ ID NO: 419624 - DNA, 120 bp, Artificial Sequence
  ENSG00000150275_61 (sequence is synthesized)
tgaacacattatcaaaggggccattttctactgaaaaaatgaatgcaagaccaactctggttacatttgccccttgccctgtggggactgacaatacagcggtgaagccactaaggaaca

SEQ ID NO: 419625 - DNA, 120 bp, Artificial Sequence
  ENSG00000150275_62 (sequence is synthesized)
ggctgaaaagcacagttgaacaggagtccatgattgacagtaagaacatcaaggaggctttggaatttcatagtgaccacacacagtctgatgatgaagagctttggatgggcccctgga

SEQ ID NO: 419626 - DNA, 120 bp, Artificial Sequence
  ENSG00000150275_63 (sequence is synthesized)
acaacctccatataccaatgacaaaactgtgaccaattttttaaaagatattttaattaatttttacttacatttttaataaactgtgctttttattgtcactgagaaaacaatgtatgg

SEQ ID NO: 419627 - DNA, 120 bp, Artificial Sequence
  ENSG00000150275_64 (sequence is synthesized)
aatttatatcatgcacacaagctaaaactttgaacaatatgctttaaaattttaagagacagatttgcactcacattgttatcaattaatcgtttttcccagaaaatccttttggacata

SEQ ID NO: 419628 - DNA, 120 bp, Artificial Sequence
  ENSG00000150275_65 (sequence is synthesized)
tggacatactttcactaaataacctatcgtttaaacatttagctgttttgttgggtcttgaatttttgttcattttaataaacaagaaataattactaaataatcatttatattttattg

SEQ ID NO: 419629 - DNA, 120 bp, Artificial Sequence
  ENSG00000150275_66 (sequence is synthesized)
agattatgctttatttctagctccacaaaacatttttagtacatgtaattttattttccatagccaaaagggcaaaaaagaagtaagaggatatttacaggcaatgagtttatacagctg

SEQ ID NO: 419630 - DNA, 120 bp, Artificial Sequence
  ENSG00000150275_67 (sequence is synthesized)
ctgtctatactgccctaatttttaaaatgaaagctagaattgcaaagtaaagtaaatgagggaatcacctgtaaataattaattattttaaatcatgagcttgttttctttctttattgt

SEQ ID NO: 419631 - DNA, 120 bp, Artificial Sequence
  ENSG00000150275_68 (sequence is synthesized)
cctgtataaaggttttcacattttaccataaatacatttatatcttgaccctttaggaaaccacttgaagtcgtatgtctttttatcaatattatttacaatattctcttgtcccttcat

SEQ ID NO: 419632 - DNA, 120 bp, Artificial Sequence
  ENSG00000150275_69 (sequence is synthesized)
ctcatatcaaatatggtagatactttagtttagtttaatcacttgaggttaaataattgtttggagcaacatggaaatctcacccttagcaaaagcttttagggaagtgagaaaggttcg

SEQ ID NO: 419633 - DNA, 120 bp, Artificial Sequence
  ENSG00000150275_70 (sequence is synthesized)
agtaagcagtaatgcatctagaacgacaatttcataatggaagacatggtgaggttagggaagtctcacattaatgtcactagactttaatagtttgtaaacccagcatatcagagtaaa

SEQ ID NO: 419634 - DNA, 120 bp, Artificial Sequence
  ENSG00000150275_71 (sequence is synthesized)
ggaatttggcagggttgaaatgtatataatatataaagcttataaaggctatgaattcataacttcaaatgttgtgtttaacttcttccattttcaggttatttatagaatattttaatg

SEQ ID NO: 419635 - DNA, 120 bp, Artificial Sequence
  ENSG00000150275_72 (sequence is synthesized)
cacatatttatgtgcctaaaatccagaaccaggaaatcattgcctgggcattttttaaaatcaaagaacatggtcttgattttttaccattgaacaaagcacagtgtttcatcataagta

SEQ ID NO: 419636 - DNA, 120 bp, Artificial Sequence
  ENSG00000150275_73 (sequence is synthesized)
gaaatgaaaacagaatatcctttaaaaaacttgccttgtgtgttgcttattttccagatgatgtaaaaagaatgaaacaatatagattaagagaattcagaattctattgaatattactt

SEQ ID NO: 419637 - DNA, 120 bp, Artificial Sequence
  ENSG00000150275_74 (sequence is synthesized)
agtatgatatagatgtagctcacttcaaattttgcacagtattgaccaagttcaggttttaatgaaatttcctcatgcatgcttaatatatggttgaaggactgaataatgcactattat

SEQ ID NO: 419638 - DNA, 120 bp, Artificial Sequence
  ENSG00000150275_75 (sequence is synthesized)
ttattcccctcttacatgtttcgcgtcttaaaaattgtttattattatgctatttcctcatttccaaagtgaatgaattgtactgacataaacttgccgacttgtaagagtagtatgttt

SEQ ID NO: 419639 - DNA, 120 bp, Artificial Sequence
  ENSG00000150275_76 (sequence is synthesized)
ttacttcagatttccaagaaaatatttgagatcaaatacagtaacatctcatctaccttattttattgagaattaatgcattccatacccttgccaaaaaaacaaaacaaaacaaacaaa

SEQ ID NO: 419640 - DNA, 120 bp, Artificial Sequence
  ENSG00000150275_77 (sequence is synthesized)
caaaaaaaaacctagtggcattagctagattagaaacgtagaatcatgaccacacctcctggcctgccaaacaagcatccacattttcaaaagatcctaaggtggtttatatgcacatta

SEQ ID NO: 419641 - DNA, 120 bp, Artificial Sequence
  ENSG00000150275_78 (sequence is synthesized)
aattttggaagcaatgaagtccggggcttattccttcaggcaccaaagcaatggtttttagtataggatactttgtataggaattagattaagcatatatttccctactaattcaatcag

SEQ ID NO: 419642 - DNA, 120 bp, Artificial Sequence
  ENSG00000150275_79 (sequence is synthesized)
aggtcatcgaatataatttaatattatcttgatacccccagatcatctcagtcagcatcccttgatattctctctatatacagcttcatggctgcgtttttgtcctttgatttctggctg

SEQ ID NO: 419643 - DNA, 120 bp, Artificial Sequence
  ENSG00000150275_80 (sequence is synthesized)
tgacatttaacttattctgttgttgtgcctttctcacatttttttctttcagtttatagcttctagtatcctgatgggaaagtttgtgttttttgtttgttttcttaatgttgaaaaatc

SEQ ID NO: 419644 - DNA, 120 bp, Artificial Sequence
  ENSG00000150275_81 (sequence is synthesized)
atgaagcttaagatgggaattaggtacacggattcaaccaaatgttttgcgactcttagacgctttctttggttaccagtagatttggaaatatgatgttggcagaagtctagtggcctg

SEQ ID NO: 419645 - DNA, 120 bp, Artificial Sequence
  ENSG00000150275_82 (sequence is synthesized)
acatatgagatgtcactgtattttaaactacattttttatgagaaaatatgcaaaattttacaagccacttagcagacacatttcagtaatttaaacttgatcatttcagtaaaaacaat

SEQ ID NO: 419646 - DNA, 120 bp, Artificial Sequence
  ENSG00000150275_83 (sequence is synthesized)
catgaggtcaatcatctgttacttaatggagatagtataaagagaagcagaatttacacagagcaaccaaaccaaatatttggtcagtatatttttgggtaacgtagagcagcaaaatta

SEQ ID NO: 419647 - DNA, 120 bp, Artificial Sequence
  ENSG00000150275_84 (sequence is synthesized)
ttactaactaaataaatctggatcaattaaatagttactttcatagaactttcactagtctataaatccctgactcaggattaaaactgtggaacccagaggaaatacccaggtatgttt

SEQ ID NO: 419648 - DNA, 120 bp, Artificial Sequence
  ENSG00000150275_85 (sequence is synthesized)
aatcttaagaatacttcatataaataacgtttcaatgtaaatatttataaagaaattggttgttatttttcctaggaaggtgtaggaaggttttcttgttgttctcaatcagcactagct

SEQ ID NO: 419649 - DNA, 120 bp, Artificial Sequence
  ENSG00000150275_86 (sequence is synthesized)
tcaatcaggcagaagaaacagcaggtcttggctaatcgaggtgagaacagaatgatgtaatgactaatattgcaacccgttgattttagaaggtcttgtgggcattaagggaaagcagag

SEQ ID NO: 419650 - DNA, 120 bp, Artificial Sequence
  ENSG00000150275_87 (sequence is synthesized)
gaagaatgagaaaatatggtcagagtgacataggacatttgtgacttaatgaccatcgaatcacaggtgttaatctccctctctcaatttgtctttctcattaattacagactctgagag

SEQ ID NO: 419651 - DNA, 120 bp, Artificial Sequence
  ENSG00000150275_88 (sequence is synthesized)
ttgtcatagaattgcaaccgtaggttggccaaaaccatctttttaaaatacagaagaaagtttgccttgaattttatatgtgatatgtcattcatgttattttaccacattgttcacagg

SEQ ID NO: 419652 - DNA, 120 bp, Artificial Sequence
  ENSG00000150275_89 (sequence is synthesized)
gatgttaaagactattatttacttaagtggttgttccaaaggtgattcagtagttaccattaaaatattatttaaaaacatttttatatcatagagccagaagtaattgaatattgactc

SEQ ID NO: 419653 - DNA, 120 bp, Artificial Sequence
  ENSG00000150275_90 (sequence is synthesized)
tcgagggaagacattttctgtcttttatttcatgagctttgatttttctctttctctgcttcaccttctgcactttataccttaagtgggatttatataccacttgaatttaattagcaa

SEQ ID NO: 419654 - DNA, 120 bp, Artificial Sequence
  ENSG00000150275_91 (sequence is synthesized)
aataggcaaaaagtgctaataatctattctcagggcagatgcctattggtgcctgcaaattacacagcgataaggctgaaggataggttcaaaataatgttgaggacttacacattttat

SEQ ID NO: 419655 - DNA, 120 bp, Artificial Sequence
  ENSG00000150275_92 (sequence is synthesized)
agatagtttctttctattcccaaatggtatgtgaaatttttgttctattttttttattggttttcaatagttaattttgatctttatcataagaagctttagttatagactggtattttt

SEQ ID NO: 419656 - DNA, 120 bp, Artificial Sequence
  ENSG00000150275_93 (sequence is synthesized)
ttcattgcaatctactttaaatttatggtcagttaagcacatgtatggaagattcgaacattgtctatagtttgaaaaatctatcaacaccttcactgctttcccaatttctttatccaa

SEQ ID NO: 419657 - DNA, 120 bp, Artificial Sequence
  ENSG00000150275_94 (sequence is synthesized)
atacctgttcttccttaacaaatattatgttactgtataagaatctgaattagaagttttaagttaaaatgcattgttattcactacacaatgtttcaaaaataaattttcatttgaaaa

SEQ ID NO: 419658 - DNA, 120 bp, Artificial Sequence
  ENSG00000150275_95 (sequence is synthesized)
aggtgcgcatctctatgaagaacttggagacagctcaatgaataggaattatccatggagtctggaattgatcctggccaggaatatggacaagattattacagttatgagcatgggtat

SEQ ID NO: 419659 - DNA, 120 bp, Artificial Sequence
  ENSG00000150275_96 (sequence is synthesized)
attaaaaaaccaaaggttgaaattagagagcctagtgaggaggaagaagtagttgtaactatcgaaaaaccaccagcagctgagcctacatacacaacatggaagagagccagaatattc

SEQ ID NO: 419660 - DNA, 120 bp, Artificial Sequence
  ENSG00000150275_97 (sequence is synthesized)
cccatgatttttaagaaagttagaggattagctgataaaagaggaatcgttgaccttgagggtgaagagtggcagagacgccttgaggaagaagataaagattatttgaaactcactctg

SEQ ID NO: 419661 - DNA, 120 bp, Artificial Sequence
  ENSG00000150275_98 (sequence is synthesized)
gaccaagaggaagcaacagaaagcactgtagaatcagaggaggaatcctccagcgactatactgaatacagtgaagaagagtctgagttcagtgagtctgagactacagaagaggaatct

SEQ ID NO: 419662 - DNA, 120 bp, Artificial Sequence
  ENSG00000150275_99 (sequence is synthesized)
gagtcagagacaccctctgaggaggaggagagttccacccctgaatcagaagaatcggaatccacagagtcagaaggagaaaaagcaaggaaaaacattgtgcttgcaagaagaaggccc

SEQ ID NO: 419663 - DNA, 120 bp, Artificial Sequence
  ENSG00000150275_100 (sequence is synthesized)
atggttgaggaggtcaaggaagtcaagggtaggaaagaggagccacaagaagaacaaaaagaacctaagatggaagaagaagaacactcagaagaagaagaaagtggaccagcccctgtg

SEQ ID NO: 419664 - DNA, 120 bp, Artificial Sequence
  ENSG00000150275_101 (sequence is synthesized)
gaagaaagtacagaccctgaagctcaagatatccctgaagagggcagtgcagaatcagcttcggtggaaggaggtgtggaaagtgaggaggaatcagaatcaggtagtagtagcagtagt

SEQ ID NO: 419665 - DNA, 120 bp, Artificial Sequence
  ENSG00000150275_102 (sequence is synthesized)
agcgaaagtcagtctggaggtccatggggctatcaggtaccagcgtatgacagaagcaagaatgcaaaccaaaagaagtcgccaggagcaaactctgaaggttacaacacagcactttga

SEQ ID NO: 419666 - DNA, 120 bp, Artificial Sequence
  ENSG00000150275_103 (sequence is synthesized)
agtgccttctgtgtgttctccaaagtgacacttgaaagggaggaaattgatcaagattttgatatgacttatgatcagaagcatgccagaaaagtgaatatatatgttgtccaaatccat

SEQ ID NO: 419667 - DNA, 120 bp, Artificial Sequence
  ENSG00000150275_104 (sequence is synthesized)
actaatccttcctatattagtaaatcagaacacatgcaatcagctaatcaatatttaatatttactggtaggatttttgttaatgcaatgtggcattatgtattatcagtgacactctgt

SEQ ID NO: 419668 - DNA, 120 bp, Artificial Sequence
  ENSG00000150275_105 (sequence is synthesized)
tatatatatatacacacacacactatatatgtttttatatcatctttcaaaataaatactaagacaagcttcaacaaattatatctttaacagtcgtctacttttgcatatatgtacgtt

SEQ ID NO: 419669 - DNA, 120 bp, Artificial Sequence
  ENSG00000150275_106 (sequence is synthesized)
gtcgtctacttttgcatatatgtacgtttcaactggcaaaggtattataaaaactatcatgaacatgttcaaataagtaagtttgtatctgcaacttcaagtattaggaattcaatgaaa

SEQ ID NO: 419670 - DNA, 120 bp, Artificial Sequence
  ENSG00000150275_107 (sequence is synthesized)
ttggagacagctcaatttggagtttttgttggcagctggtcatatgcatgagaacttgtgctatttggcggactctgacaaggagaggttatggatcagagcaacagcaactgctgaggc

SEQ ID NO: 419671 - DNA, 120 bp, Artificial Sequence
  ENSG00000150275_108 (sequence is synthesized)
gtatgaaatgcctcaatatgggagtcgccgtcgattgttaccaccagctggacaggaggaatatggtgaggtggttggtgaagctgaggaagaatatgaggaggaagaggtaattactga

SEQ ID NO: 419672 - DNA, 120 bp, Artificial Sequence
  ENSG00000150275_109 (sequence is synthesized)
atatcaagacttgtgtataacagagatcatgtataatattttttatccaaattgattgataataatagagtcaaagtttgtcattatacactattgaaataaaatagattttgcatgttt

SEQ ID NO: 419673 - DNA, 120 bp, Artificial Sequence
  ENSG00000150275_110 (sequence is synthesized)
ttttgcatgttttgttgctcatatggaacgaggctctgggttgatcattattttagtaattcaggtgtgaaaccatgatcttcctgttttgataattccacaaaatatacttcccactga

SEQ ID NO: 419674 - DNA, 120 bp, Artificial Sequence
  ENSG00000150275_111 (sequence is synthesized)
gatagtgtttagtagaaattgtcttctcagttttactcagacattttttaaagcccttatctgtcagtcattttgtttaataacgaaaatctaagatgtttaatactgatttatttattt

SEQ ID NO: 419675 - DNA, 120 bp, Artificial Sequence
  ENSG00000150275_112 (sequence is synthesized)
tatgcaggatttccaggaaaatggaaacatcattccctagaaacagttgaagttgacagacctagaggttgacaaaaggacacgacactagggaatttgcattgtcatgtttcgaaatac

SEQ ID NO: 419676 - DNA, 120 bp, Artificial Sequence
  ENSG00000150275_113 (sequence is synthesized)
gcttccaagcttctgccttgaaataatcaatatccaaatttggtggaagaacatggtacaatccttagtggggaagcacgtgagccaaggaaattgatgatgtcatgtacattgtataca

SEQ ID NO: 419677 - DNA, 120 bp, Artificial Sequence
  ENSG00000150275_114 (sequence is synthesized)
catgaataaaaaagtcaaaaagaacgctgttctagtgatttaactataggtgtatacttatttgcttttccttttcttactggccaacatttattttacattctttaagtagacacacta

SEQ ID NO: 419678 - DNA, 120 bp, Artificial Sequence
  ENSG00000150275_115 (sequence is synthesized)
caatttcttataattgtcccagtgacttctcaagtggataatctggtgacttctccttcccgagacaaggagcaagcacatgacccaaactaggacagtcaggacacattagaaagacac

SEQ ID NO: 419679 - DNA, 120 bp, Artificial Sequence
  ENSG00000150275_116 (sequence is synthesized)
gctatcaggaggagcaaaagggaaggatctgctgctgggggctcgctgggtgaccctttgccagacgaaaagagctggtcgagagagaagcgcttggcaggagctctctgcgggacctaa

SEQ ID NO: 419680 - DNA, 120 bp, Artificial Sequence
  ENSG00000150275_117 (sequence is synthesized)
agaccctcctgtaagtagaaggcattgattaatattctgaactgtactgagaaaaatccttaacactcataaatgaccgaatcacaagacagcaaaagtagtctctgtaaatttcaccct

SEQ ID NO: 419681 - DNA, 120 bp, Artificial Sequence
  ENSG00000150275_118 (sequence is synthesized)
atttattcatacattttatgttcttttacttatttcatccacaggtacagagcatatttcagatgactattattgaacctagacaaagaatatgctttttgtttttctagaatgcacaat

SEQ ID NO: 419682 - DNA, 120 bp, Artificial Sequence
  ENSG00000150275_119 (sequence is synthesized)
gtactaattactaatttatctaacaatgataaatatatatgaattgtctccatttgtaagcttcacttaatctggatatgttttaaatttatgtattttccactgtatgcatatatgact

SEQ ID NO: 419683 - DNA, 120 bp, Artificial Sequence
  ENSG00000150275_120 (sequence is synthesized)
attttgttagcaaactccaaatcaacatatcacatgaaacttatattgaatgtgtttattttggtaaattaaaaagcttaagattgcttacagaaaatagttaacattcttttatcatat

SEQ ID NO: 419684 - DNA, 120 bp, Artificial Sequence
  ENSG00000150275_121 (sequence is synthesized)
atagttaacattcttttatcatatagaactttacttttttgagatatcccaaattatctttcaaggcaaggttttaattaaaatattattatagtgagagtgataaaataccatgtataa

SEQ ID NO: 419685 - DNA, 120 bp, Artificial Sequence
  ENSG00000150275_122 (sequence is synthesized)
tttctataaataccttgttttataaatattaattattatcctgatgatttaaatttttctctgagtgggctcacactgtaagttggtggctgataaattttagaaaaatacaaataaaag

SEQ ID NO: 419686 - DNA, 120 bp, Artificial Sequence
  ENSG00000150275_123 (sequence is synthesized)
ttttagaagagtaagaaaataaaatcctgaatcttataagtgatttagaagttctgttttctattgctaatataaatagtatttcttttaatgcttgtatttaattaaaagtgaatggcc

SEQ ID NO: 419687 - DNA, 120 bp, Artificial Sequence
  ENSG00000150275_124 (sequence is synthesized)
aagtgaatggccatcataacatttttcagcttcgatttggacaagtcttataaactctattgtgactatatggaatcaaaatgtattaatgttaatatgaaagtggtgggctttaattca

SEQ ID NO: 419688 - DNA, 120 bp, Artificial Sequence
  ENSG00000150275_125 (sequence is synthesized)
gaagctccttttcttaagtgtgttaaaatgtctttgaaactgctttattgtgctttgggatatatgataggcaaaaatttcatagacttgaacccatcaataaagatagtgaatgtgaaa

SEQ ID NO: 419689 - DNA, 120 bp, Artificial Sequence
  ENSG00000150281_0 (sequence is synthesized)
ggggcgtgaagggagccgggatcagccaggggccagcatgagccggagggagggaagtctggaagacccccagactgattcctcagtctcacttcttccccacttggaggccaagatccg

SEQ ID NO: 419690 - DNA, 120 bp, Artificial Sequence
  ENSG00000150281_1 (sequence is synthesized)
tcagacacacagccttgcgcacctcctcaccaaatacgctgagcagctgctccaggaatatgtgcagctccagggagaccccttcgggctgcccagcttctcgccgccgcggctgccggt

SEQ ID NO: 419691 - DNA, 80 bp, Artificial Sequence
  ENSG00000150281_2 (sequence is synthesized)
ccagtgcacgagcggctgcggctggacgcggcggcgctggccgcgctgcccccgctgctggacgcagtgtgtcgccgcca

SEQ ID NO: 419692 - DNA, 80 bp, Artificial Sequence
  ENSG00000150281_3 (sequence is synthesized)
cagtgtgtcgccgccaggccgagctgaacccgcgcgcgccgcgcctgctgcgccgcctggaggacgcggcgcgccaggcc

SEQ ID NO: 419693 - DNA, 120 bp, Artificial Sequence
  ENSG00000150281_4 (sequence is synthesized)
cgagccccccgccgccaccgcctcagccgcctccgccaccggggtcttccccgccaaggtgctggggctccgcgtttgcggcctctaccgcgagtggctgagccgcaccgagggcgacct

SEQ ID NO: 419694 - DNA, 120 bp, Artificial Sequence
  ENSG00000150281_5 (sequence is synthesized)
cgagggcgacctgggccagctgctgcccgggggctcggcctgagcgccgcggggcagctcgccccgcctcctcccgctgggttccgtctctccttccgcttctttgtctttctctgccgc

SEQ ID NO: 419695 - DNA, 120 bp, Artificial Sequence
  ENSG00000150281_6 (sequence is synthesized)
gcctcaacctcctgggctcaagccatccttccgcctcagcttccccagcagctgggactacaggcacgcgccaccacagccggctaattttttatttaattttttgtagagacgaggttt

SEQ ID NO: 419696 - DNA, 120 bp, Artificial Sequence
  ENSG00000150281_7 (sequence is synthesized)
atgttgcccaggctggtcttgaactccggggctcaagcgatcctcccgcttcagcctccctaagtgctgggattgcaggcgtgagccactttcccagcctctctttgctttgcctgcccc

SEQ ID NO: 419697 - DNA, 120 bp, Artificial Sequence
  ENSG00000150281_8 (sequence is synthesized)
gccactttcccagcctctctttgctttgcctgccccgttctcttaactcttggaccctcctcgtctgcatggtaactccgtctgagtctaccattttcttgctctccctccttccttggg

SEQ ID NO: 419698 - DNA, 120 bp, Artificial Sequence
  ENSG00000150281_9 (sequence is synthesized)
cctgcctcagttccctttggcctccccctttacccagctcttggggtgtctctgttttttccatccccacttcctgccttctcgtggccctgtgtgagcacatgtgtacatctcagcctt

SEQ ID NO: 419699 - DNA, 120 bp, Artificial Sequence
  ENSG00000150281_10 (sequence is synthesized)
atctcaaggaggtgacaccttctctccttgtccccatctggctgtctctctgtgcttccctggccaggggcgtgcctgctggtcctatggggggaaggctactctgcatctcagccacct

SEQ ID NO: 419700 - DNA, 120 bp, Artificial Sequence
  ENSG00000150281_11 (sequence is synthesized)
tcctcaggctcactccacctacatccccagtctgccacaccccatccctttgggcctcagccctgtccctttgatgtcctcctttccttcagcccctctgccctgtccctgcacacctcc

SEQ ID NO: 419701 - DNA, 120 bp, Artificial Sequence
  ENSG00000150281_12 (sequence is synthesized)
actgcctcccagcagatctgtggagacaaaacaagcaacaccttaaaagagttttatttctgaaaataaattaattttttgtaaataaaatgtttaaaaataaaaaagaaactaaagtta

SEQ ID NO: 419702 - DNA, 120 bp, Artificial Sequence
  ENSG00000150316_0 (sequence is synthesized)
aagagtggtaatggcgtctgtatgatcttcggagcctgctgcatcggacctcggccagtcataaaagatgacaacagcagccaggccaacctttgaacctgccagaggtggaaggggaaa

SEQ ID NO: 419703 - DNA, 120 bp, Artificial Sequence
  ENSG00000150316_1 (sequence is synthesized)
aggagaaggtgatttgagccaactttcaaagcagtattcaagcagagacctaccctctcatacaaagataaaatacagacagactactcaggatgcccctgaagaggttcgtaaccgtga

SEQ ID NO: 419704 - DNA, 120 bp, Artificial Sequence
  ENSG00000150316_2 (sequence is synthesized)
cttcaggagagagttggaagaaagagagagagctgctgcaagagagaaaaatagggatcgtccaacccgagaacatacaacctcctcttcagtgtcaaaaaagccacggttagaccagat

SEQ ID NO: 419705 - DNA, 120 bp, Artificial Sequence
  ENSG00000150316_3 (sequence is synthesized)
tcctgccgccaaccttgatgcagatgaccctctaacagatgaggaagatgaagattttgaagaagaaagtgatgatgatgatactgcagctcttcttgcagaactggaaaaaattaaaaa

SEQ ID NO: 419706 - DNA, 120 bp, Artificial Sequence
  ENSG00000150316_4 (sequence is synthesized)
agaaagagctgaagagcaggccaggaaggaacaagaacaaaaagctgaagaagagaggattcgtatggaaaacattctgagcggaaaccctctccttaatctcactggcccatcccagcc

SEQ ID NO: 419707 - DNA, 120 bp, Artificial Sequence
  ENSG00000150316_5 (sequence is synthesized)
tcaggccaacttcaaagttaaaagaaggtgggatgatgacgttgtcttcaagaactgtgcaaaaggtgtagatgaccagaagaaagacaaaagatttgtaaatgacacactgcgatctga

SEQ ID NO: 419708 - DNA, 120 bp, Artificial Sequence
  ENSG00000150316_6 (sequence is synthesized)
attctgactttttttatgagttttttttttcttttcccctgtctaaattgtgtgtgggcttccccagttttaaactcctatctttttctttagtgataccttacttgataatggacttgg

SEQ ID NO: 419709 - DNA, 120 bp, Artificial Sequence
  ENSG00000150316_7 (sequence is synthesized)
gaataggtttaacccagtttgcattctccaaatgtttccagtgatatgttttcctgggaaaagcaaatctgcctgtaataaatatttttaatctaaataaccaaatctgggtgcccaact

SEQ ID NO: 419710 - DNA, 120 bp, Artificial Sequence
  ENSG00000150316_8 (sequence is synthesized)
ttttgttggaatttatgctgctagtaatacattccataatatcttttgaaaagaaaaattaccattgtgtattgtgcttgtgcattaacttgtccttttccccctgtttctctcacattt

SEQ ID NO: 419711 - DNA, 120 bp, Artificial Sequence
  ENSG00000150316_9 (sequence is synthesized)
aagatgagttaattcatattttctctgcattttttaaaagagtgtaatggaagatgagagggattctattttggaccacatgttggtgtggaggagtgtcattgacagtaagcaccccag

SEQ ID NO: 419712 - DNA, 120 bp, Artificial Sequence
  ENSG00000150316_10 (sequence is synthesized)
gcgtgtgtctgggagagcattgggtatcgctcacttctgcaggtacttgtttttttttctcatggccgaagaggagagctctgtaagcattcttttaaagtatacggtactcacttgtgt

SEQ ID NO: 419713 - DNA, 120 bp, Artificial Sequence
  ENSG00000150316_11 (sequence is synthesized)
tctggatactcaactgccatgtttcctttgaaagagattgaatatgcacctgacatgcatttagtgcaaagcctgagaaagcttcaaacaatatataaaataaaacctttggaaataaca

SEQ ID NO: 419714 - DNA, 120 bp, Artificial Sequence
  ENSG00000150316_12 (sequence is synthesized)
atggcgtctgtatgatcttcggagcctgctgcatcggacctcggccagtgtgagcggcaagaggataggagattatctttcttatcgcgatgggacgggaaagggcagttggggtcggag

SEQ ID NO: 419715 - DNA, 120 bp, Artificial Sequence
  ENSG00000150316_13 (sequence is synthesized)
tcggcggcagagtgcagagcgcgggcggtggaggccctggagcagcgggctaggggcggaaccgagtgcctgtcaggcgcgtctggagctcttgggcccgccgaggagatcgcagcgtac

SEQ ID NO: 419716 - DNA, 120 bp, Artificial Sequence
  ENSG00000150316_14 (sequence is synthesized)
ttttctttatgtagcaattggaaaatgttaaccatttgtttacttttacagattgatgtgagctgtactactttcttaggtcattagagataataacaacaaatatttaccaaaggctta

SEQ ID NO: 419717 - DNA, 120 bp, Artificial Sequence
  ENSG00000150316_15 (sequence is synthesized)
tttgcccaggcactgtggatgtgagttcactgtggataatgcttttaatgtgggctccttgtgctcacaggtccctaaaacattttaagaaatgaagtatttgttttactaagttaaatg

SEQ ID NO: 419718 - DNA, 120 bp, Artificial Sequence
  ENSG00000150316_16 (sequence is synthesized)
gtttcctcctttcatctctaataattgatttaccatgctattctaaaatacttgttatgtctttgctttaagaagtgacatatatttatgtttagttactgttattcaaatatagccctg

SEQ ID NO: 419719 - DNA, 120 bp, Artificial Sequence
  ENSG00000150316_17 (sequence is synthesized)
acctcagtgctaaactttatagttgattttaaaatcaaaagtattattttgtgggactttaagaacaagtttgatctctagagaaccaaatatggaaggaatctataaaaggatatgctt

SEQ ID NO: 419720 - DNA, 120 bp, Artificial Sequence
  ENSG00000150316_18 (sequence is synthesized)
tcccccaaaataatgtcctgtactaaactactgcactactgctgtgttacacacctctccagggcactcttcatactgggcttcctataaacagtgccctctagagttgtacctggaggc

SEQ ID NO: 419721 - DNA, 120 bp, Artificial Sequence
  ENSG00000150316_19 (sequence is synthesized)
ctttccatattagatatgtccccttctataagtgcaatacacttaatggttccctctgtgcttagggagggaagtaatctaagcagaaggtttttaaggattagcacatcagttaatgtt

SEQ ID NO: 419722 - DNA, 120 bp, Artificial Sequence
  ENSG00000150316_20 (sequence is synthesized)
cttttttgcacttttgagtatctttgctgctagcttaaagttgttttgagctacataaaattgttttgactttcttagggtgatacgttgtacatatgtactgtgttttggtagtgtgta

SEQ ID NO: 419723 - DNA, 120 bp, Artificial Sequence
  ENSG00000150337_0 (sequence is synthesized)
cttcaatatcttgcatgttacagatttcactgctcccaccagcttggagacaacatgtggttcttgacaactctgctcctttgggttccagttgatgggcaagtggacaccacaaaggca

SEQ ID NO: 419724 - DNA, 120 bp, Artificial Sequence
  ENSG00000150337_1 (sequence is synthesized)
gtgatcactttgcagcctccatgggtcagcgtgttccaagaggaaaccgtaaccttgcactgtgaggtgctccatctgcctgggagcagctctacacagtggtttctcaatggcacagcc

SEQ ID NO: 419725 - DNA, 120 bp, Artificial Sequence
  ENSG00000150337_2 (sequence is synthesized)
actcagacctcgacccccagctacagaatcacctctgccagtgtcaatgacagtggtgaatacaggtgccagagaggtctctcagggcgaagtgaccccatacagctggaaatccacaga

SEQ ID NO: 419726 - DNA, 120 bp, Artificial Sequence
  ENSG00000150337_3 (sequence is synthesized)
ggctggctactactgcaggtctccagcagagtcttcacggaaggagaacctctggccttgaggtgtcatgcgtggaaggataagctggtgtacaatgtgctttactatcgaaatggcaaa

SEQ ID NO: 419727 - DNA, 120 bp, Artificial Sequence
  ENSG00000150337_4 (sequence is synthesized)
gcctttaagtttttccactggaattctaacctcaccattctgaaaaccaacataagtcacaatggcacctaccattgctcaggcatgggaaagcatcgctacacatcagcaggaatatct

SEQ ID NO: 419728 - DNA, 120 bp, Artificial Sequence
  ENSG00000150337_5 (sequence is synthesized)
gtcactgtgaaagagctatttccagctccagtgctgaatgcatctgtgacatccccactcctggaggggaatctggtcaccctgagctgtgaaacaaagttgctcttgcagaggcctggt

SEQ ID NO: 419729 - DNA, 120 bp, Artificial Sequence
  ENSG00000150337_6 (sequence is synthesized)
ttgcagctttacttctccttctacatgggcagcaagaccctgcgaggcaggaacacatcctctgaataccaaatactaactgctagaagagaagactctgggttatactggtgcgaggct

SEQ ID NO: 419730 - DNA, 120 bp, Artificial Sequence
  ENSG00000150337_7 (sequence is synthesized)
gccacagaggatggaaatgtccttaagcgcagccctgagttggagcttcaagtgcttggcctccagttaccaactcctgtctggtttcatgtccttttctatctggcagtgggaataatg

SEQ ID NO: 419731 - DNA, 120 bp, Artificial Sequence
  ENSG00000150337_8 (sequence is synthesized)
tttttagtgaacactgttctctgggtgacaatacgtaaagaactgaaaagaaagaaaaagtgggatttagaaatctctttggattctggtcatgagaagaaggtaatttccagccttcaa

SEQ ID NO: 419732 - DNA, 120 bp, Artificial Sequence
  ENSG00000150337_9 (sequence is synthesized)
agagctgaaatgtcaggaacaaaaagaagaacagctgcaggaaggggtgcaccggaaggagccccagggggccacgtagcagcggctcagtgggtggccatcgatctggaccgtcccctg

SEQ ID NO: 419733 - DNA, 120 bp, Artificial Sequence
  ENSG00000150337_10 (sequence is synthesized)
cccacttgctccccgtgagcactgcgtacaaacatccaaaagttcaacaacaccagaactgtgtgtctcatggtatgtaactcttaaagcaaataaatgaactgacttcaactgggatac

SEQ ID NO: 419734 - DNA, 120 bp, Artificial Sequence
  ENSG00000150337_11 (sequence is synthesized)
atttggaaatgtggtcatcaaagatgacttgaaatgaggcctactctaaagaattcttgaaaaacttacaagtcaagcctagcctgataatcctattacatagtttgaaaaatagtattt

SEQ ID NO: 419735 - DNA, 120 bp, Artificial Sequence
  ENSG00000150337_12 (sequence is synthesized)
tatttctcagaacaaggtaaaaaggtgagtgggtgcatatgtacagaagattaagacagagaaacagacagaaagagacacacacacagccaggagtgggtagatttcagggagacaaga

SEQ ID NO: 419736 - DNA, 120 bp, Artificial Sequence
  ENSG00000150337_13 (sequence is synthesized)
gggaatagtatagacaataaggaaggaaatagtacttacaaatgactcctaagggactgtgagactgagagggctcacgcctctgtgttcaggatacttagttcatggcttttctctttg

SEQ ID NO: 419737 - DNA, 120 bp, Artificial Sequence
  ENSG00000150337_14 (sequence is synthesized)
actttactaaaagagaatgtctccatacgcgttctaggcatacaagggggtaactcatgatgagaaatggatgtgttattcttgccctctcttttgaggctctctcataacccctctatt

SEQ ID NO: 419738 - DNA, 120 bp, Artificial Sequence
  ENSG00000150337_15 (sequence is synthesized)
tctagagacaacaaaaatgctgccagtcctaggcccctgccctgtaggaaggcagaatgtaactgttctgtttgtttaacgattaagtccaaatctccaagtgcggcactgcaaagagac

SEQ ID NO: 419739 - DNA, 120 bp, Artificial Sequence
  ENSG00000150337_16 (sequence is synthesized)
gcttcaagtggggagaagcggcgataccatagagtccagatcttgcctccagagatttgctttaccttcctgattttctggttactaattagcttcaggatacgctgctctcatacttgg

SEQ ID NO: 419740 - DNA, 120 bp, Artificial Sequence
  ENSG00000150337_17 (sequence is synthesized)
gctgtagtttggagacaaaatattttcctgccactgtgtaacatagctgaggtaaaaactgaactatgtaaatgactctactaaaagtttagggaaaaaaaacaggaggagtatgacaca

SEQ ID NO: 419741 - DNA, 120 bp, Artificial Sequence
  ENSG00000150337_18 (sequence is synthesized)
ccagcttggagacaacatgtggttcttgacaactctgctcctttgggttccagttgatgggcaagtgggtgagtgatctctaactcagcttctccttctatgccactttcctacttccaa

SEQ ID NO: 419742 - DNA, 120 bp, Artificial Sequence
  ENSG00000150337_19 (sequence is synthesized)
aggatgggtcctattaacctgcagaagagcatatagggaaagcagagaaagaagaaagatttataaattatgtaaaatctcccatattcagagcatgattttcataaaaactatgatttg

SEQ ID NO: 419743 - DNA, 120 bp, Artificial Sequence
  ENSG00000150337_20 (sequence is synthesized)
taagctttctttctaaagttttctgaatgagctctttcctctgagcgaaatgcctgaatgtatatataacagcaggaaagggccagaattgcacaaacactaaagtagtctgctgacact

SEQ ID NO: 419744 - DNA, 120 bp, Artificial Sequence
  ENSG00000150337_21 (sequence is synthesized)
agagaggagtttgaacctccgtttccaatgtacaagctgctgaagccctgcaatgtactctcagagacagtatagctcagaggataaggaaaacagctccgcttggcttgcccaagtcta

SEQ ID NO: 419745 - DNA, 120 bp, Artificial Sequence
  ENSG00000150337_22 (sequence is synthesized)
aaaccctgcttcattgctcccaacagaaaaacctacatcagtaatttaatcctcaggagccccagattcccaacacccagatgaggatttaataacaatgaacagaggtctctgcagcag

SEQ ID NO: 419746 - DNA, 120 bp, Artificial Sequence
  ENSG00000150337_23 (sequence is synthesized)
gaggacactcttaaaggctggcttttgtaggtttccacttgcctatttttcaaataaatctaaatatgtatttttcccttgtgctatccacaaaagcctcaccagttgctcagagccctc

SEQ ID NO: 419747 - DNA, 120 bp, Artificial Sequence
  ENSG00000150347_0 (sequence is synthesized)
agaacgtcgagatggagcccaactcactccagtgggtcggctcaccgtgtggcttgcacggaccttacattttctacaaggcttttcaattccaccttgaaggcaaaccaagaattttgt

SEQ ID NO: 419748 - DNA, 120 bp, Artificial Sequence
  ENSG00000150347_1 (sequence is synthesized)
cccttggcgactttttctttgtaagatgtacgccaaaggatccgatttgcatagcggagctccagctgttgtgggaagagaggaccagccggcaacttttatccagctctaaactttatt

SEQ ID NO: 419749 - DNA, 120 bp, Artificial Sequence
  ENSG00000150347_2 (sequence is synthesized)
tcctcccagaagacactccccagggcagaaatagcgaccatggcgaggatgaagtcattgctgtttccgaaaaggtgattgtgaagcttgaagacctggtcaagtgggtacattctgatt

SEQ ID NO: 419750 - DNA, 120 bp, Artificial Sequence
  ENSG00000150347_3 (sequence is synthesized)
tctccaagtggagatgtggcttccacgctggaccagtgaaaactgaggccttgggaaggaatggacagaaggaagctctgctgaagtacaggcagtcaaccctaaacagtggactcaact

SEQ ID NO: 419751 - DNA, 120 bp, Artificial Sequence
  ENSG00000150347_4 (sequence is synthesized)
tcaaagacgttctcaaggagaaggcagacctgggggaggacgaggaagaaacgaacgtgatagttctcagctacccccagtactgccggtaccgctcgatgctgaaacgcatccaggata

SEQ ID NO: 419752 - DNA, 120 bp, Artificial Sequence
  ENSG00000150347_5 (sequence is synthesized)
agccatcttccattctaacggaccagtttgcattggccctggggggcattgcagtggtcagcaggaaccctcagatcctgtactgtcgggacacctttgaccacccgactctcatagaaa

SEQ ID NO: 419753 - DNA, 120 bp, Artificial Sequence
  ENSG00000150347_6 (sequence is synthesized)
acgagagtatatgcgatgagtttgcgccaaatcttaaaggcagaccacgcaaaaagaaaccatgcccacaaagaagagattcattcagtggtgttaaggattccaacaacaattccgatg

SEQ ID NO: 419754 - DNA, 120 bp, Artificial Sequence
  ENSG00000150347_7 (sequence is synthesized)
gcaaagccgttgccaaggtgaaatgtgaggccaggtcagccttgaccaagccgaagaataaccataactgtaaaaaagtctcaaatgaagaaaaaccaaaggttgccattggtgaagagt

SEQ ID NO: 419755 - DNA, 120 bp, Artificial Sequence
  ENSG00000150347_8 (sequence is synthesized)
gcagggcagatgaacaagccttcttggtggcactttataaatacatgaaagaaaggaaaacgccgatagaacgaataccctatttaggttttaaacagattaacctttggactatgtttc

SEQ ID NO: 419756 - DNA, 120 bp, Artificial Sequence
  ENSG00000150347_9 (sequence is synthesized)
aagctgctcaaaaactgggaggatatgaaacaataacagcccgccgtcagtggaaacatatttatgatgaattaggcggtaatcctgggagcaccagcgctgccacttgtacccgcagac

SEQ ID NO: 419757 - DNA, 120 bp, Artificial Sequence
  ENSG00000150347_10 (sequence is synthesized)
attatgaaagattaatcctaccatatgaaagatttattaaaggagaagaagataagcccctgcctccaatcaaacctcggaaacaggagaacagttcacaggaaaatgagaacaaaacaa

SEQ ID NO: 419758 - DNA, 120 bp, Artificial Sequence
  ENSG00000150347_11 (sequence is synthesized)
aagtatctggaaccaaacgcatcaaacatgaaatacctaaaagcaagaaagaaaaagaaaatgccccaaagccccaggatgcagcagaggtttcatcagagcaagaaaaagaacaagaga

SEQ ID NO: 419759 - DNA, 120 bp, Artificial Sequence
  ENSG00000150347_12 (sequence is synthesized)
ctttaataagccagaaaagcatccctgagcctctcccagcagcagacatgaagaaaaaaatagaagggtatcaggaattttcagcgaagcccctggcatccagagtagacccagagaagg

SEQ ID NO: 419760 - DNA, 120 bp, Artificial Sequence
  ENSG00000150347_13 (sequence is synthesized)
acaacgaaacagaccaaggttccaacagtgagaaggtggcagaggaggcgggagagaaggggcccacacctccactcccaagtgctcctctggccccagaaaaagattcagccttggtcc

SEQ ID NO: 419761 - DNA, 120 bp, Artificial Sequence
  ENSG00000150347_14 (sequence is synthesized)
ctggggccagcaaacagccactcacctctcctagtgccctggtggactcaaaacaagaatccaaactgtgctgttttacagagagccctgaaagtgaaccccaagaagcatccttcccca

SEQ ID NO: 419762 - DNA, 120 bp, Artificial Sequence
  ENSG00000150347_15 (sequence is synthesized)
gcttccccaccacacagccaccgctggcaaaccagaatgagacggaggatgacaaactgcccgccatggcagattacattgccaactgcaccgtgaaggtggaccagctgggcagtgacg

SEQ ID NO: 419763 - DNA, 120 bp, Artificial Sequence
  ENSG00000150347_16 (sequence is synthesized)
acatccacaatgcgctcaagcagaccccaaaggtccttgtggtccagtcgtttgacatgttcaaagacaaagacctgactgggcccatgaacgagaaccatggacttaattacacgcccc

SEQ ID NO: 419764 - DNA, 120 bp, Artificial Sequence
  ENSG00000150347_17 (sequence is synthesized)
tgctctactctaggggcaacccaggcatcatgtccccactggccaagaaaaagcttttgtcccaagtgagtggggccagcctctccagcagctacccttatggctccccaccccctttga

SEQ ID NO: 419765 - DNA, 120 bp, Artificial Sequence
  ENSG00000150347_18 (sequence is synthesized)
tcagcaaaaagaaactgattgctagggatgacttgtgttccagtttgtcccagacccaccatggccaaagcactgaccatatggcggtcagccggccatcagtgattcagcacgtccaga

SEQ ID NO: 419766 - DNA, 120 bp, Artificial Sequence
  ENSG00000150347_19 (sequence is synthesized)
gtttcagaagcaagccctcggaagagagaaagaccatcaatgacatctttaagcatgagaaactgagtcgatcagatccccaccgctgcagcttctccaagcatcaccttaacccccttg

SEQ ID NO: 419767 - DNA, 120 bp, Artificial Sequence
  ENSG00000150347_20 (sequence is synthesized)
ctgactcctacgtcctgaagcaagaaattcaggagggcaaggataaactcttagagaaaagggccctcccccattcccacatgcctagcttcctggctgacttctactcgtcccctcatc

SEQ ID NO: 419768 - DNA, 120 bp, Artificial Sequence
  ENSG00000150347_21 (sequence is synthesized)
tccatagcctctacagacacaccgagcaccatcttcataatgaacagacatccaaatacccttccagggacatgtacagggaatcggaaaacagttcttttccttcccacagacaccaag

SEQ ID NO: 419769 - DNA, 120 bp, Artificial Sequence
  ENSG00000150347_22 (sequence is synthesized)
aaaagctccatgtaaattatctcacgtccctgcacctgcaagacaaaaagtcggcggcagcagaagcccctacggatgatcagcctacagatctgagccttcccaagaacccgcacaaac

SEQ ID NO: 419770 - DNA, 120 bp, Artificial Sequence
  ENSG00000150347_23 (sequence is synthesized)
ctaccggcaaggtcctgggcctggctcattccaccacagggccccaggagagcaaaggcatctcccagttccaggtcttaggcagccagagtcgagactgtcaccccaaagcctgtcggg

SEQ ID NO: 419771 - DNA, 120 bp, Artificial Sequence
  ENSG00000150347_24 (sequence is synthesized)
tatcacccatgaccatgtcaggccctaaaaaataccctgaatcgctttcaagatcaggaaaacctcaccatgtgagactggagaatttcaggaagatggaaggcatggtccacccaatcc

SEQ ID NO: 419772 - DNA, 120 bp, Artificial Sequence
  ENSG00000150347_25 (sequence is synthesized)
tgcaccggaaaatgagcccgcagaacattggggcggcgcggccgatcaagcgcagcctggaggatttggaccttgtgattgcagggaaaaaggcccgggcagtgtctcccttagacccat

SEQ ID NO: 419773 - DNA, 120 bp, Artificial Sequence
  ENSG00000150347_26 (sequence is synthesized)
ccaaggaggtctctgggaaggagaaggcctctgagcaggagagtgaaggcagcaaagcagcgcacggtgggcattccgggggcggatcagaaggccacaagcttcccctctcctccccta

SEQ ID NO: 419774 - DNA, 120 bp, Artificial Sequence
  ENSG00000150347_27 (sequence is synthesized)
tcttcccaggtctgtattccgggagcctgtgtaactcgggcctcaactccaggctcccggctgggtattctcattctctgcagtacttgaaaaaccagactgtgctttctccactcatgc

SEQ ID NO: 419775 - DNA, 120 bp, Artificial Sequence
  ENSG00000150347_28 (sequence is synthesized)
agcccctggctttccactcgcttgtgatgcaaagaggaatttttacatcaccgacaaattctcagcagctgtacagacacttggctgcggctacacctgtaggaagttcatatggggacc

SEQ ID NO: 419776 - DNA, 120 bp, Artificial Sequence
  ENSG00000150347_29 (sequence is synthesized)
ttttgcataacagcatttaccctttagctgctataaatcctcaagctgcctttccatcttcccagctgtcatccgtgcaccccagtacaaaactgtaggctcagctctgcccagcagtcc

SEQ ID NO: 419777 - DNA, 120 bp, Artificial Sequence
  ENSG00000150347_30 (sequence is synthesized)
aaagcggcatggccaacagagcttcactccttacccaggagtgctggcttatagagttagaagtcagtatttcttctaatctgaggctatgatcagtcccagctgtaggggcccagaggg

SEQ ID NO: 419778 - DNA, 120 bp, Artificial Sequence
  ENSG00000150347_31 (sequence is synthesized)
gctggtgagtcttgactcccttccaacacagatgcccaggcacctccagatcattcacttcgcacgtgggccttgtgaagggatttgtgaatatccaggaagaacttagaggaccccatc

SEQ ID NO: 419779 - DNA, 120 bp, Artificial Sequence
  ENSG00000150347_32 (sequence is synthesized)
tgagttcggatggtcaggaaacaatctgggcaaaaaagaggcaggcatttcaaaggaaggggcaaggaagactggcaaacagatggcaagggatgcccctctttttcataaaactctcca

SEQ ID NO: 419780 - DNA, 120 bp, Artificial Sequence
  ENSG00000150347_33 (sequence is synthesized)
aggttcaatcaatgcaatgtatagtgaaacttcaatagatctttcattttgacactattaaacaatccagagaagtaaacactgttaaattgactgtatatatttgcttcttaaaactac

SEQ ID NO: 419781 - DNA, 120 bp, Artificial Sequence
  ENSG00000150347_34 (sequence is synthesized)
ttaaattgactgtatatatttgcttcttaaaactacctgtatcactgtttgctcacctaatttatatacaggtagttccattttctcccagttccttctcgtcttttttttttttttttt

SEQ ID NO: 419782 - DNA, 120 bp, Artificial Sequence
  ENSG00000150347_35 (sequence is synthesized)
ggtctttttgtttttgttttgtttttgaggctgactgactgtcctagttgttgtgtgtttgtaatttttccacatcttattttgagcagctttgggtggtaaagttattgtttacaaatt

SEQ ID NO: 419783 - DNA, 120 bp, Artificial Sequence
  ENSG00000150347_36 (sequence is synthesized)
gaagcaactgattctagtggaacaaatgaaaaagaaacagtcaagcacacaatagtgcaaagaacgttcctttgtagatccgcaacttaaggattttgttcctcataaatggcatagttg

SEQ ID NO: 419784 - DNA, 120 bp, Artificial Sequence
  ENSG00000150347_37 (sequence is synthesized)
aaagagcttatacactgcttacccagccaaatgctttgctttgaagtattgggttctgtgaaaatattgagcattgtacttaccttatctaggctgtgaaactgtcctacataccagaga

SEQ ID NO: 419785 - DNA, 120 bp, Artificial Sequence
  ENSG00000150347_38 (sequence is synthesized)
atcataaaaacaaaaacctcactggcagcaagctgccgaataacaacagagtctagaggacatatttgtgggctgcacagatattttaggaatttcagaaattagaacaggagccaaaat

SEQ ID NO: 419786 - DNA, 120 bp, Artificial Sequence
  ENSG00000150347_39 (sequence is synthesized)
gatttacattggcgttggcactgattcctttaaatggtctgggaaagggggttgggaagaggatggagctcaactggccagaagaggagcagctgcagtcctgatagcttctctagcctc

SEQ ID NO: 419787 - DNA, 120 bp, Artificial Sequence
  ENSG00000150347_40 (sequence is synthesized)
ggtcttttgagtgataagtagtcatgttgttttcatccagttggtttcttgtcattcccaagaagaatctcccaggccacatctttggggataactgacatactggattagccttttcaa

SEQ ID NO: 419788 - DNA, 120 bp, Artificial Sequence
  ENSG00000150347_41 (sequence is synthesized)
aagaaaagtcatcctatttggttttatggggtgtgagttttgtgtgtacacacacagaaacatgtaaggtggtttgggtcatgtttttaaccacctggcaatacagtccactttctggtt

SEQ ID NO: 419789 - DNA, 120 bp, Artificial Sequence
  ENSG00000150347_42 (sequence is synthesized)
tcttttattgtgggaagtaaatggtcaagctgctcaggcagtgaaaagatgtggagaatgtccgttgtcattcttgccactgtattccatttgctaccgagatataacattaaggtggac

SEQ ID NO: 419790 - DNA, 120 bp, Artificial Sequence
  ENSG00000150347_43 (sequence is synthesized)
acattttctaactgtattaattaaaagtcaatggatacagagagtggattttctccccaagtcccatccctgctgaagaccgcttggatgaactccccaacccactgtgcccctcccgca

SEQ ID NO: 419791 - DNA, 120 bp, Artificial Sequence
  ENSG00000150347_44 (sequence is synthesized)
acactaccagtagactttagaaccatagttaactaagtcttttacctctgagatacttaattctgggaaaattggtgacaattttcaacttctaaataggtaactcgactgcaaaataat

SEQ ID NO: 419792 - DNA, 120 bp, Artificial Sequence
  ENSG00000150347_45 (sequence is synthesized)
caaaactgataacaatgaaactgcggctcttaaacaaagccatgcatgccgtgcatttgtattgaaatgtctccatgatatgaagccaaatattcaatgtaacatacttaatatccaaag

SEQ ID NO: 419793 - DNA, 120 bp, Artificial Sequence
  ENSG00000150347_46 (sequence is synthesized)
gtggaaacaaaagaatgtagagatccagtgttaagagttccatttgcttcaattaattatttaccttcctgtggaataatatatatatatatatttaatagaaccatagatagactagta

SEQ ID NO: 419794 - DNA, 120 bp, Artificial Sequence
  ENSG00000150347_47 (sequence is synthesized)
gaatttagattataaatgtgtgagtgcagattatcctgctattgcacaagctagaggggggaaaaatctcaattccagctggcaagatgctagccaggacacatataagaaagttgcact

SEQ ID NO: 419795 - DNA, 120 bp, Artificial Sequence
  ENSG00000150347_48 (sequence is synthesized)
agattgaatggtcacagaatcggaggacatggaagaaaaaggaaacttcggtggttctgcagcagacatgggctaggtcatatgtggtttctatgagttcgtgtctcaaaaaaaaaagga

SEQ ID NO: 419796 - DNA, 120 bp, Artificial Sequence
  ENSG00000150347_49 (sequence is synthesized)
gggggggcatctgtccccggtggagctcacctatttggaatatggggcatttgttttttccactgcaatgatttcagtctggtttcatcatgttggaattcgatcacaccattttcaaac

SEQ ID NO: 419797 - DNA, 120 bp, Artificial Sequence
  ENSG00000150347_50 (sequence is synthesized)
aatgttaacatagtccagcttttgtttttctcatctcttctgagaggagactcactgtttctgtctgaggaagctcataccctcggcaaaacatcaggacaaataaagagaaatgggggt

SEQ ID NO: 419798 - DNA, 120 bp, Artificial Sequence
  ENSG00000150347_51 (sequence is synthesized)
acgcattcccaacagaagcagtgtgttatttgttttaaaactctgaacagagatcttggaaatctttcaaaaagaccattgaattcttcattggctgagaacgacgttttaaaatgtctt

SEQ ID NO: 419799 - DNA, 120 bp, Artificial Sequence
  ENSG00000150347_52 (sequence is synthesized)
aaataaggctttgtttgcattgtttgagttcaaggggccttattattgaatggaattgcacaagcctttctttgtgcaatcaaaccattgttattggtagttctgtaaaggaaactgtgg

SEQ ID NO: 419800 - DNA, 120 bp, Artificial Sequence
  ENSG00000150347_53 (sequence is synthesized)
aatcgaattggcagtggagtcataaatctatttactgagtgtggcttccaagaaatgttgcaattcaaaatgcactaagtctgtgatttattggagatttggagattctaaataatattt

SEQ ID NO: 419801 - DNA, 120 bp, Artificial Sequence
  ENSG00000150347_54 (sequence is synthesized)
ttaaaaaacttccatgcaacttctggtttaatgtttggcaactccacatgataaaaaaataaaaacagcccaaccgagtttcggaattaagtattcttctagtaagtgattcaaacttgt

SEQ ID NO: 419802 - DNA, 120 bp, Artificial Sequence
  ENSG00000150347_55 (sequence is synthesized)
aatatttgccacaggactgacttatttatttactagctagaagctcttaagttcacttgtttatcagggcatatacagaagggtttgttaaaactcgatgttaactttacaactttctga

SEQ ID NO: 419803 - DNA, 120 bp, Artificial Sequence
  ENSG00000150347_56 (sequence is synthesized)
cctggtgcatgaattctcaagtactgtatttcactgtgttggtgtgtctgatggaaatttcgaggtggtcccacaaaaatattttatgtagtgtgccttcaaagagaaccatttatttct

SEQ ID NO: 419804 - DNA, 120 bp, Artificial Sequence
  ENSG00000150347_57 (sequence is synthesized)
cttcacttatcgtcccacaaagtcacatttggtggtggtcagccaagtcgcatctggtctagttttactcttgtcccaattttaaagagaaatgggaatgagtttgccctggtgagaccc

SEQ ID NO: 419805 - DNA, 120 bp, Artificial Sequence
  ENSG00000150347_58 (sequence is synthesized)
ataccattgcaatgattatcttgagcacttaaagtccagtgttggctgttagtgtatttgatattctgcctgtctcctcatggttgaaatatgtctgaagaatagcagcataatctcttg

SEQ ID NO: 419806 - DNA, 120 bp, Artificial Sequence
  ENSG00000150347_59 (sequence is synthesized)
gctgtttatacttttttaaactttcctgtgttgtaaatattgtatacttttggtgattccagctatgtaacctctatgctctgtaaggtgattatttgtatatagcaacatggcccagtg

SEQ ID NO: 419807 - DNA, 120 bp, Artificial Sequence
  ENSG00000150347_60 (sequence is synthesized)
atattatatagtttcccaatggagaggttattgagtaacctttgcattagtttaaacactaccagaagaatgctgagccaactataaacactcaattttgtatgttttccaaattgtact

SEQ ID NO: 419808 - DNA, 120 bp, Artificial Sequence
  ENSG00000150347_61 (sequence is synthesized)
tattactgcttttgatactgtattacgtgccaatagtttcccaatcacatagcaggcaagagatattttgtactttttgatccactgtaatatttaataaaaaatgttactatctgtttc

SEQ ID NO: 419809 - DNA, 120 bp, Artificial Sequence
  ENSG00000150347_62 (sequence is synthesized)
agagccctccctgccagtctggcaactccagcaaagtcctcaggctcatcccacacactcggtgctagtcactgctgtgtgtttacatgagtaatggagctgccgggggaggggagttgt

SEQ ID NO: 419810 - DNA, 120 bp, Artificial Sequence
  ENSG00000150347_63 (sequence is synthesized)
aagcagagcgctgagcctcgcagctcgcattcggagggaagctgacatccacaccaagtcgagacttccagggatgtggccggggagcagtcacatgctgtagctttcatgagcacaggc

SEQ ID NO: 419811 - DNA, 120 bp, Artificial Sequence
  ENSG00000150347_64 (sequence is synthesized)
agatgggcagtcagaggggaaagattttttttttaaaccacagagatctttcactgattaggcagaagagtcagtggcccactggttaaggagggtaatatgtagggctctctgactaag

SEQ ID NO: 419812 - DNA, 120 bp, Artificial Sequence
  ENSG00000150347_65 (sequence is synthesized)
ttttattggccttagtgggagtcttgccacctactgctgggtcaagactaaaggggaccccactcgctgtcaattctgtcggacagtgtttcctgtctggggtgggctgcagcaccctcg

SEQ ID NO: 419813 - DNA, 120 bp, Artificial Sequence
  ENSG00000150347_66 (sequence is synthesized)
tttcacgggtagatattgattgagtttccactagagacgaatgatcatctgtattgttattcttttcgggttctgaaatggcttggaaagaacttttaaaatatcgagaatggctctgta

SEQ ID NO: 419814 - DNA, 120 bp, Artificial Sequence
  ENSG00000150347_67 (sequence is synthesized)
ccaaagacacttaggaatagacaagtatctaagaaaagatagctacttgattactacatataagtgccctactggaagcagtgctataagtaaaagtcttgcaggttaagtataattcgt

SEQ ID NO: 419815 - DNA, 120 bp, Artificial Sequence
  ENSG00000150347_68 (sequence is synthesized)
tttcgtagaacattatttgtagaagcaatgttttaaaaggtggggagggtaggtttctcaccatggacctgatagccagcttttaattggaatggccataaacattgtaattaatcaact

SEQ ID NO: 419816 - DNA, 120 bp, Artificial Sequence
  ENSG00000150347_69 (sequence is synthesized)
atgtactcaattataaagtatataattgcattctgaacagtaaaaagcttccgaaagtgtatataaatcaactaaactgggcaatacagtaactgatcacataaaattatatttaatgag

SEQ ID NO: 419817 - DNA, 120 bp, Artificial Sequence
  ENSG00000150347_70 (sequence is synthesized)
atgtgtcatctatcacagtgttttccacacagttcttatcttacatctttgtgattcatttgtgctttatttttattgcaacaaatctcacagtaaagaaacctctttatcttggccata

SEQ ID NO: 419818 - DNA, 120 bp, Artificial Sequence
  ENSG00000150361_0 (sequence is synthesized)
gtactgtgaggaccttgacagcttcacaggcgggctttttcttttgcctccctatatgcgctagaatatctatttttctcttttacaaactgactatataaaaccacctcttctggcatt

SEQ ID NO: 419819 - DNA, 120 bp, Artificial Sequence
  ENSG00000150361_1 (sequence is synthesized)
gcagaaagcaattgactttctcagagccacccggcaggctatcggggcatcctcgaaaaggccagggacaggggcgcaggtgcaccaagagatctggcgaggggtacgcttcctcgagac

SEQ ID NO: 419820 - DNA, 120 bp, Artificial Sequence
  ENSG00000150361_2 (sequence is synthesized)
ttggggctctttctctctgcgctctccagacactgaactctgagctgcaaggacaagaacgccaccaccttccctactaaggctctgccacaagcgcatcccagtgaggtgtatccagct

SEQ ID NO: 419821 - DNA, 120 bp, Artificial Sequence
  ENSG00000150361_3 (sequence is synthesized)
gcagccgcctccggagcttcggagcgctcagacctccctccctcgcgcatctccagcctaagggttgtcccacctcgccataacacggggctctcgcgcgggcatcgaggattctcagct

SEQ ID NO: 419822 - DNA, 120 bp, Artificial Sequence
  ENSG00000150361_4 (sequence is synthesized)
tttggcgtcccagtcctgcctctgctcctgcctggtggtgtccccacgcccaggtcctgcggacccgaccacggctgaaacgcgcggctttgccgtctgcgctccagccttcgcctggca

SEQ ID NO: 419823 - DNA, 120 bp, Artificial Sequence
  ENSG00000150361_5 (sequence is synthesized)
gagcgcgcagcccacctagcgtcttctggctctaggggtgcagagggcgcatcccgcctcttcctccgcccccgggccccgctgtcctcccccacctgctgaccagcctactcctgcgtg

SEQ ID NO: 419824 - DNA, 120 bp, Artificial Sequence
  ENSG00000150361_6 (sequence is synthesized)
agctgccagccttttgccttctgtgcgtaaagcatgtcaggctctgggcgaaaagacttcgatgtgaagcacattctgcgactccgctggaaactcttcagccacccgtctccttccacc

SEQ ID NO: 419825 - DNA, 120 bp, Artificial Sequence
  ENSG00000150361_7 (sequence is synthesized)
ggcggcccggcggggggaggctgcctgcaacaggacggcagtggcagctttgagcactggggacccagccagagtcgcctgctcaaaagccaagagagaagcggtgtgagcactttctgg

SEQ ID NO: 419826 - DNA, 120 bp, Artificial Sequence
  ENSG00000150361_8 (sequence is synthesized)
aagaagccttcctcctcttcctcttcatcgtcctccccgtcctcttcctcctcttccttcaatccgctgaatggcaccctgcttccagttgccacgaggctgcagcaaggggctcctggg

SEQ ID NO: 419827 - DNA, 120 bp, Artificial Sequence
  ENSG00000150361_9 (sequence is synthesized)
cagggcactcagcagccagccaggactctcttctacgtggagtcactagaggaggaggtggtgccaggcatggactttcctggaccacacgaaaaagggctggttctgcaagagctcaaa

SEQ ID NO: 419828 - DNA, 120 bp, Artificial Sequence
  ENSG00000150361_10 (sequence is synthesized)
gtggagccagacaactctagccaggcaacaggtgaaggatgtggacacaggctgtcatcaaccggccattcaatgacacctcaaagtgatttggactccagtagctctgaagaattctat

SEQ ID NO: 419829 - DNA, 120 bp, Artificial Sequence
  ENSG00000150361_11 (sequence is synthesized)
caagctgttcatcatgctgagcaaaccttcagaaagatggaaagttatttgaagcagcagcaactttgtgatgttatcctgattgttgggaaccgaaagatacctgcacataggcttgtt

SEQ ID NO: 419830 - DNA, 120 bp, Artificial Sequence
  ENSG00000150361_12 (sequence is synthesized)
ctgagttcagtctccgactattttgcggccatgtttacaagtgatgtttgtgaagccaagcaagaggagatcaaaatggaaggcatagaccccaatgctctctgggaccttgtccaattt

SEQ ID NO: 419831 - DNA, 120 bp, Artificial Sequence
  ENSG00000150361_13 (sequence is synthesized)
gcatatacaggctgcttggaattaaaagaggacaccattgagaaccttcttgctgcagcgtgccttcttcagcttccacaggtggtggaagtgtgctgccacttcctcatgaagcttttg

SEQ ID NO: 419832 - DNA, 120 bp, Artificial Sequence
  ENSG00000150361_14 (sequence is synthesized)
catccatctaactgtttaggaattcgagccttcgcagatgctcaaggatgcattgagttaatgaaggtggcccacagctacacaatggaaaacataatggaagttatcagaaatcaagag

SEQ ID NO: 419833 - DNA, 120 bp, Artificial Sequence
  ENSG00000150361_15 (sequence is synthesized)
tttttactccttccagctgaggagctccataaactactggccagtgatgatgtcaatgttcctgatgaagaaaccatcttccatgcattgatgatgtgggtcaagtatgacatgcagagt

SEQ ID NO: 419834 - DNA, 120 bp, Artificial Sequence
  ENSG00000150361_16 (sequence is synthesized)
agatgcaatgacctgagcatgcttcttgcctttataagactgccactgcttccaccacagatattggctgacctagaaaatcatgcattatttaagaatgatctggaatgtcaaaagctg

SEQ ID NO: 419835 - DNA, 120 bp, Artificial Sequence
  ENSG00000150361_17 (sequence is synthesized)
tattgccagaaagaagaactttaatgcaaagtccgagaactaaacccagaaaatctacagtcggaactttgtatgctgtaggaggaatggataacaacaaaggagctacaactatagaga

SEQ ID NO: 419836 - DNA, 120 bp, Artificial Sequence
  ENSG00000150361_18 (sequence is synthesized)
aatatgatctgagaacaaatctgtggatccaggcagggatgatgaatggcagaaggctgcagtttggtgtggctgttattgatgacaaactctttgtaattggaggtcgagatggcttaa

SEQ ID NO: 419837 - DNA, 120 bp, Artificial Sequence
  ENSG00000150361_19 (sequence is synthesized)
agacattgaacactgttgaatgttacaatcccaaaaccaagacatggactgtcttaccaccaatgtcaacacacagacatggtctaggtgtaacagtacttgaaggccctatttatgctg

SEQ ID NO: 419838 - DNA, 120 bp, Artificial Sequence
  ENSG00000150361_20 (sequence is synthesized)
tgggaggccatgatggctggagctatctgaatacagtggaaaggtgggatccacagagtcaacaatggacatttgtagccagtatgtcaattgctcggagcacagttggtgtagcagcat

SEQ ID NO: 419839 - DNA, 120 bp, Artificial Sequence
  ENSG00000150361_21 (sequence is synthesized)
tgaatggcaagttgtattcagttggaggtcgtgatggaagttcctgtttgagttcaatggaatattatgatcctcatacaaataagtggaacatgtgtgctcccatgtgtaagaggagag

SEQ ID NO: 419840 - DNA, 120 bp, Artificial Sequence
  ENSG00000150361_22 (sequence is synthesized)
ggggtgtcggagtggccacatgtgacggttttctttatgcagtaggaggtcatgatgctcctgcttcaaatcactgttcccggctactggattatgtagaaagatatgatcccaaaacag

SEQ ID NO: 419841 - DNA, 120 bp, Artificial Sequence
  ENSG00000150361_23 (sequence is synthesized)
acacttggaccatggtggctcctttgagtatgcccagagatgctgttggggtctgtctccttggtgacagattatatgctgttggtggctatgatggacagacatacctcaacactatgg

SEQ ID NO: 419842 - DNA, 120 bp, Artificial Sequence
  ENSG00000150361_24 (sequence is synthesized)
aatcctatgacccacaaactaatgagtggacacagatggcttccttgaatattgggagagcaggtgcctgtgtggtagtcatcaagcaaccttgacttattgatattttacttggaaaga

SEQ ID NO: 419843 - DNA, 120 bp, Artificial Sequence
  ENSG00000150361_25 (sequence is synthesized)
ttttacttgctggagtggttatttttatattgaatggcaagaatgagaacttccagagatgaaaactcttcaagaacaaggatctctgtagcgttacctactgatgttgaaagagttagt

SEQ ID NO: 419844 - DNA, 120 bp, Artificial Sequence
  ENSG00000150361_26 (sequence is synthesized)
agatcaaacagaatagtaggaaacaagaaaacattaaacttatacaggaaaaatgtctggccatatgttagttagttcgggaatggttattggtaatttgttttgtattatagcatacaa

SEQ ID NO: 419845 - DNA, 120 bp, Artificial Sequence
  ENSG00000150361_27 (sequence is synthesized)
taactagagttaccaaaggcttgttttttcttgagcagttgaaaggagagaccaatatttgtgacatggatagtttcatgaccacaactcattcaatcattttatagtctatggcaatat

SEQ ID NO: 419846 - DNA, 120 bp, Artificial Sequence
  ENSG00000150361_28 (sequence is synthesized)
ccaagagattgccaagagtagaagacagaatatttcatctgacagtatctgattggtttactgtttttctaatcatatgtggtcataacgggaagcagaattatgctttattcaaacaaa

SEQ ID NO: 419847 - DNA, 120 bp, Artificial Sequence
  ENSG00000150361_29 (sequence is synthesized)
cctgcttctgcctcattttcctaagctatgagaacaattagagaaacagattcatgcttgtatcttgcattcagaaaacaaactgtcctactaatcaaagctgcatatctcatcagagat

SEQ ID NO: 419848 - DNA, 120 bp, Artificial Sequence
  ENSG00000150361_30 (sequence is synthesized)
aatggttgaattttattgcaaccatattggcaatctgaaactggcaaacacaaaggattgttttcactaggcttaccattttgctttgcttttttaacacactgagccaaagatgcagtg

SEQ ID NO: 419849 - DNA, 120 bp, Artificial Sequence
  ENSG00000150361_31 (sequence is synthesized)
taattattgggcttttgccttatgttgagttcagtgtaagcatggaagctagtgattctgaatgatatatatatccattgcatgttgaactcctttagaattttgttcttaaacaaactt

SEQ ID NO: 419850 - DNA, 120 bp, Artificial Sequence
  ENSG00000150361_32 (sequence is synthesized)
agaatttcaaaagaaaaacatatgatccattaagttggagtgtttatgattattgctagaaagaaggcagacttcatattctcatcgcccatttttcaaacttgttacattgatctgtac

SEQ ID NO: 419851 - DNA, 120 bp, Artificial Sequence
  ENSG00000150361_33 (sequence is synthesized)
attattttaagccacatgtttgtaattgtttaaaacaaagtggaaacattacacaatgtccttaataaataggcccatgtaaattttaattacaattaataaatgatcaaaaaatttgca

SEQ ID NO: 419852 - DNA, 120 bp, Artificial Sequence
  ENSG00000150394_0 (sequence is synthesized)
acagttacatttggcaggcaggcgggctcgcacgccggagcgctcagcccagaattagtggatttatttggaatctccctgcctcctccaagctccgccgccgccgccggcttgtgcata

SEQ ID NO: 419853 - DNA, 120 bp, Artificial Sequence
  ENSG00000150394_1 (sequence is synthesized)
gacggtagcgtcaagacaccagctgcactttgggttgcggacacccagagcccagcgcgcccgccctgcgtctccgcaccaagccctgtagctccgagaggcatgaacggaatccggagg

SEQ ID NO: 419854 - DNA, 120 bp, Artificial Sequence
  ENSG00000150394_2 (sequence is synthesized)
cgcctgcctagcgagcgaggaccggtcggcgcttgccgccctcgggagctaaccccgagcacctccagccatttgtgaacctggaggcttgacattcgccagcgcagggccccacaagag

SEQ ID NO: 419855 - DNA, 120 bp, Artificial Sequence
  ENSG00000150394_3 (sequence is synthesized)
aaatttcaatgaaaagaaaagccaatggattgtggtcttagaaaagctgcttagatgatgtctgtttcccgtgctatagacacgtggcagagctgtaagtaaatgctcggcactgcatga

SEQ ID NO: 419856 - DNA, 120 bp, Artificial Sequence
  ENSG00000150394_4 (sequence is synthesized)
tgaattggatggctgcagaccggagacaaaaaaaataattgtctcattttcgtggtgatttgcttaactggtgggaccatgccagaacggctagcggaaatgctcttggatctctggact

SEQ ID NO: 419857 - DNA, 120 bp, Artificial Sequence
  ENSG00000150394_5 (sequence is synthesized)
ccattaataatattatggattactcttcccccttgcatttacatggctccgatgaatcagtctcaagttttaatgagtggatcccctttggaactaaacagtctgggtgaagaacagcga

SEQ ID NO: 419858 - DNA, 120 bp, Artificial Sequence
  ENSG00000150394_6 (sequence is synthesized)
attttgaaccgctccaaaagaggctgggtttggaatcaaatgtttgtcctggaagagttttctggacctgaaccgattcttgttggccggctacacacagacctggatcctgggagcaaa

SEQ ID NO: 419859 - DNA, 120 bp, Artificial Sequence
  ENSG00000150394_7 (sequence is synthesized)
aaaatcaagtatatcctatcaggtgatggagctgggaccatatttcaaataaatgatgtaactggagatatccatgctataaaaagacttgaccgggaggaaaaggctgagtatacccta

SEQ ID NO: 419860 - DNA, 120 bp, Artificial Sequence
  ENSG00000150394_8 (sequence is synthesized)
acagctcaagcagtggactgggagacaagcaaacctctggagcctccttctgaatttattattaaagttcaagacatcaatgacaatgcaccagagtttcttaatggaccctatcatgct

SEQ ID NO: 419861 - DNA, 120 bp, Artificial Sequence
  ENSG00000150394_9 (sequence is synthesized)
actgtgccagaaatgtccattttgggtacatctgtcactaacgtcactgcgaccgacgctgatgacccagtttatggaaacagtgcaaagttggtttatagtatattggaagggcagcct

SEQ ID NO: 419862 - DNA, 120 bp, Artificial Sequence
  ENSG00000150394_10 (sequence is synthesized)
tatttttccattgagcctgaaacagctattataaaaactgcccttcccaacatggacagagaagccaaggaggagtacctggttgttatccaagccaaagatatgggtggacactctggt

SEQ ID NO: 419863 - DNA, 120 bp, Artificial Sequence
  ENSG00000150394_11 (sequence is synthesized)
ggcctgtctgggaccacgacacttacagtgactcttactgatgttaatgacaatcctccaaaatttgcacagagcctgtatcacttctcagtaccggaagatgtggttcttggcactgca

SEQ ID NO: 419864 - DNA, 120 bp, Artificial Sequence
  ENSG00000150394_12 (sequence is synthesized)
ataggaagggtgaaggccaatgatcaggatattggtgaaaatgcacagtcatcatatgatatcatcgatggagatggaacagcactttttgaaatcacttctgatgcccaggcccaggat

SEQ ID NO: 419865 - DNA, 120 bp, Artificial Sequence
  ENSG00000150394_13 (sequence is synthesized)
ggcattataaggctaagaaaacctctggactttgagaccaaaaaatcctatacgctaaaggtagaggcagccaatgtccatattgacccacgcttcagtggcagggggccctttaaagac

SEQ ID NO: 419866 - DNA, 120 bp, Artificial Sequence
  ENSG00000150394_14 (sequence is synthesized)
acggcgacagtcaaaatcgtggttgaagatgctgatgagcctccggtcttctcttcaccgacttacctacttgaagttcatgaaaatgctgctctaaactccgtgattgggcaagtgact

SEQ ID NO: 419867 - DNA, 120 bp, Artificial Sequence
  ENSG00000150394_15 (sequence is synthesized)
gctcgtgaccctgatatcacttccagtcctataaggttttccatcgaccggcacactgacctggagaggcagttcaacattaatgcagacgatgggaagataacgctggcaacaccactt

SEQ ID NO: 419868 - DNA, 120 bp, Artificial Sequence
  ENSG00000150394_16 (sequence is synthesized)
gacagagaattaagtgtatggcacaacataacaatcattgctactgaaattaggaaccacagtcagatatcacgagtacctgttgctattaaagtgctggatgtcaatgacaacgcccct

SEQ ID NO: 419869 - DNA, 120 bp, Artificial Sequence
  ENSG00000150394_17 (sequence is synthesized)
gaattcgcatccgaatatgaggcatttttatgtgaaaatggaaaacccggccaagtcattcaaactgttagcgccatggacaaagatgatcccaaaaacggacattatttcttatacagt

SEQ ID NO: 419870 - DNA, 120 bp, Artificial Sequence
  ENSG00000150394_18 (sequence is synthesized)
ctccttccagaaatggtcaacaatccgaatttcaccatcaagaaaaatgaagataattccctcagtattttggcaaagcataatggattcaaccgccagaagcaagaagtctatctttta

SEQ ID NO: 419871 - DNA, 120 bp, Artificial Sequence
  ENSG00000150394_19 (sequence is synthesized)
ccaatcataatcagtgatagtggaaatcctccactgagcagcactagcaccttgacaatcagggtctgtggctgcagcaatgacggtgtcgtccagtcttgcaatgtcgaagcttatgtc

SEQ ID NO: 419872 - DNA, 120 bp, Artificial Sequence
  ENSG00000150394_20 (sequence is synthesized)
cttccaattggactcagtatgggcgccttaattgccatattagcatgcatcattttgctgttagtcatcgtggtgctgtttgtaactctacggcggcataaaaatgaaccattaattatc

SEQ ID NO: 419873 - DNA, 120 bp, Artificial Sequence
  ENSG00000150394_21 (sequence is synthesized)
aaagatgatgaagacgttcgagaaaacatcattcgctacgatgatgaaggaggaggggaggaggacacagaggcttttgacattgcaactttacaaaatccagatggaattaatggattt

SEQ ID NO: 419874 - DNA, 120 bp, Artificial Sequence
  ENSG00000150394_22 (sequence is synthesized)
ttaccccgtaaggatattaaaccagatttgcagtttatgccaaggcaagggcttgctccagttccaaatggtgttgatgtcgatgaatttataaatgtaaggctgcatgaggcagataat

SEQ ID NO: 419875 - DNA, 120 bp, Artificial Sequence
  ENSG00000150394_23 (sequence is synthesized)
gatcccacggccccgccatatgactccattcagatatatggctatgaaggccgagggtcagtggctggctccctcagctccttggagtccaccacatcagactcagaccagaattttgac

SEQ ID NO: 419876 - DNA, 120 bp, Artificial Sequence
  ENSG00000150394_24 (sequence is synthesized)
tacctcagtgactggggtccccgctttaagagactgggcgaactctactctgttggtgaaagtgacaaagaaacttgacagtggattataaataaatcactggaactgagcattctgtaa

SEQ ID NO: 419877 - DNA, 120 bp, Artificial Sequence
  ENSG00000150394_25 (sequence is synthesized)
tattctagggtcactccccttagatacaaccaatgtggctatttgttttagaggcaagtttagcaccagtcatctataaactcaaccacattttaatgttgaaccaaaaaaagataataa

SEQ ID NO: 419878 - DNA, 120 bp, Artificial Sequence
  ENSG00000150394_26 (sequence is synthesized)
aataaaaaagtatatgttaggaggttataaatcttgtggagtgtgaattaagtatgtggagtgtctagaagtccttggatatttgatatttacctgaccaccacagacaaagattgggat

SEQ ID NO: 419879 - DNA, 120 bp, Artificial Sequence
  ENSG00000150394_27 (sequence is synthesized)
cctggctaatccttagataaatggtttaaatagaggaaaaaatcataattaaaaggtgctttcttagaaaaaaaaatacggacctgcaaggaatctgctgctgatatgtgtcttctgcaa

SEQ ID NO: 419880 - DNA, 120 bp, Artificial Sequence
  ENSG00000150394_28 (sequence is synthesized)
ggatttttatgaatgcaaatggttttttccccttcaccaataaggatcccgccacaaatgataaagcaatacttggtctgctgtacattataactttttggagttttgagaggcctccta

SEQ ID NO: 419881 - DNA, 120 bp, Artificial Sequence
  ENSG00000150394_29 (sequence is synthesized)
gattatacagtacggtgaccacacattgtacataattgttggccccactcactagagactgaatagcatctttaaatattgtgtcgagccttaaaatattcacatgttcgtaatccattc

SEQ ID NO: 419882 - DNA, 120 bp, Artificial Sequence
  ENSG00000150394_30 (sequence is synthesized)
cagggtggggcttgccaattcagtggtgggaggagagaaatcccattcaaacatgcttgttttctagaagcaggattcctcgttccctcctcttcatcttcttccacaaggacacaaaga

SEQ ID NO: 419883 - DNA, 120 bp, Artificial Sequence
  ENSG00000150394_31 (sequence is synthesized)
taaactgtatcacacagtggactacataagagacagatggttttattgctagcgcgtgaatttatttgtttaatcctcgaaataaatattttattgatgtccattaatgcttttatttat

SEQ ID NO: 419884 - DNA, 120 bp, Artificial Sequence
  ENSG00000150394_32 (sequence is synthesized)
ttaaggggatatatgggaaaaaactaaattatatccattaataatcctttagattgttttatataaatatatatacaatgaatgtttaatacatgtacattttgatgagatgagtatggc

SEQ ID NO: 419885 - DNA, 120 bp, Artificial Sequence
  ENSG00000150394_33 (sequence is synthesized)
tttgatgagatgagtatggcaggcaatattatcgaaaggagagctaatagtctctttagagtagaaagtgttattgtaactggagatggcaggaacagcatcttcccagacaaacttttg

SEQ ID NO: 419886 - DNA, 120 bp, Artificial Sequence
  ENSG00000150394_34 (sequence is synthesized)
gactgttttctattttgttcataatcctagtatttggtgtttttactacaagcacaaacatcctaaagtatattgattcctgtgaatatttaaactctagacttttagatacctacatca

SEQ ID NO: 419887 - DNA, 120 bp, Artificial Sequence
  ENSG00000150394_35 (sequence is synthesized)
tgccctgcccaataaacatgcttcaatttacccccacagttttagagcaggaactgatttgtacataatttcactgtttacgtttttagcactcctatccctgatcttcatggtgatgca

SEQ ID NO: 419888 - DNA, 120 bp, Artificial Sequence
  ENSG00000150394_36 (sequence is synthesized)
cagaatgtcttagactccaaaaaggaacagcactagaagatgtgagcatatttaatttgtaatgcaaacctgccatttaggagtagaaaatgtatgataaaactcaagtattacatgcag

SEQ ID NO: 419889 - DNA, 120 bp, Artificial Sequence
  ENSG00000150394_37 (sequence is synthesized)
atcattttaattttctactttgctttaatgcaatattgtttattcactccatgtattgtattcagagaaactcctgtattgtttcctactttgtgaaatatatttttataaatacctttg

SEQ ID NO: 419890 - DNA, 120 bp, Artificial Sequence
  ENSG00000150394_38 (sequence is synthesized)
tcaaccaaatcatcccaagggtcacttttgtttgtaagactctttattatagagaaacagagaagagaaatggcttgccagtgatcacacagcaagataccagcagggacataagaggaa

SEQ ID NO: 419891 - DNA, 120 bp, Artificial Sequence
  ENSG00000150394_39 (sequence is synthesized)
catggaacacctaaaggctagtccagctgtgtcatttgggtccttctggaagcagacgcattgggcagggaaaaccttcagacaagtttgcagacctaaaacttgtaacaatagagggat

SEQ ID NO: 419892 - DNA, 120 bp, Artificial Sequence
  ENSG00000150394_40 (sequence is synthesized)
tgggagcaggatttggcaagagagtcttagactgcagtgcggacctggcaaaatctctgccagtctgacagggggttctagagtgaaaacacatccattaaagcagtcaggctgtggtcc

SEQ ID NO: 419893 - DNA, 120 bp, Artificial Sequence
  ENSG00000150394_41 (sequence is synthesized)
tctgtcatctcagtcattggtgcggggctgctaagaagagaacggtttttgactcaaaagctgaacgcaccaacttctagaggccaccttcactgtgacagaaactgcatgtttaaatac

SEQ ID NO: 419894 - DNA, 120 bp, Artificial Sequence
  ENSG00000150394_42 (sequence is synthesized)
tatactaacaatttataactatccggtggcttaatcaactttttattgagtttctgttgctgagaataagtcatcttttatgcgtattattacggctagtgaacactttttcttgaggtc

SEQ ID NO: 419895 - DNA, 120 bp, Artificial Sequence
  ENSG00000150394_43 (sequence is synthesized)
aaagggatggtccaacatgactttaaaatatactaggacttggcacagtgtctaaaacaagtgcttggtgaatgtaaattattagtagtagttgcagtaataaccaatagtaatattcca

SEQ ID NO: 419896 - DNA, 120 bp, Artificial Sequence
  ENSG00000150394_44 (sequence is synthesized)
actatcttacaccttccaaaccaaggagagattattatgttttatgtatctcttgaacaccagactcatttctagtgtactttgaagtgcccaaagattatagacacacaaatatgtcta

SEQ ID NO: 419897 - DNA, 120 bp, Artificial Sequence
  ENSG00000150394_45 (sequence is synthesized)
acagaataattacagtattttttaaggagtataaaatctgtatcctcaaatattggtaatcaacaggataatcttcgtacagtggtttctgtgagcaggagataatgtctgctctactag

SEQ ID NO: 419898 - DNA, 120 bp, Artificial Sequence
  ENSG00000150394_46 (sequence is synthesized)
ttgcccaaatatcgcctaagtattctctttgcctaggaacacagaatgaaagcttgcatctcttgctgactttctttgccaccacagtgtcagcattttgtgtttaaaagcctatttcag

SEQ ID NO: 419899 - DNA, 120 bp, Artificial Sequence
  ENSG00000150394_47 (sequence is synthesized)
gtcttgtaacatagaataaagtgactaataccttgatcctaataagattgacctatacttttagagtgtcatgaattaaactaaaaatctcaggaactatctctctctttctctctttct

SEQ ID NO: 419900 - DNA, 120 bp, Artificial Sequence
  ENSG00000150394_48 (sequence is synthesized)
cacacacacacacacacacacaacaaacaaataaaaaacacacattttgacttgaagttttactttagcaatagacttgccaggactttcccaaccaaaagatatcaataaggttcctaa

SEQ ID NO: 419901 - DNA, 120 bp, Artificial Sequence
  ENSG00000150394_49 (sequence is synthesized)
actttcccaaccaaaagatatcaataaggttcctaacattttctaagatttaagtatcccatgctcaatttgttaaataacacattttaaaaactttattgaaatgactatatttttaaa

SEQ ID NO: 419902 - DNA, 120 bp, Artificial Sequence
  ENSG00000150394_50 (sequence is synthesized)
gctatgtgcattgttgtctgtttcatcaacattgacatagcagaaacaagagtactctctgctaaatagagaagaatgattaagttggagccaagtgagacaaagttatctccctctgcc

SEQ ID NO: 419903 - DNA, 120 bp, Artificial Sequence
  ENSG00000150394_51 (sequence is synthesized)
tacctcacaattcaaggttcccacctagggaactgatgcatccctgggtgattggacacaacatgggatcaattcagcctctactctgcctatgatttgatcaaatcatattagcaaagt

SEQ ID NO: 419904 - DNA, 120 bp, Artificial Sequence
  ENSG00000150394_52 (sequence is synthesized)
gtctcttaaacatccatatatgaatattaaagagtattaaggggggcatttcttaacaatatttttatgagtatagttataagtttctaaacatttataatacgatgactaaaatatgct

SEQ ID NO: 419905 - DNA, 120 bp, Artificial Sequence
  ENSG00000150394_53 (sequence is synthesized)
atttttaaattcaagtgttaaccttgccacacagaattatgacttctagggtgtaaactttaaagtgaaactgttttgaaaaaaatctgcagttaagtgtatgtgtatatatagaagaaa

SEQ ID NO: 419906 - DNA, 120 bp, Artificial Sequence
  ENSG00000150394_54 (sequence is synthesized)
aggaaacttagatttactggtatcaccagtgaagcaagaatgcttagaaagatacaaatgtgtctttgggagagtctgcttaatcagatgcttaaagtaagacaagtctctgcatgagac

SEQ ID NO: 419907 - DNA, 120 bp, Artificial Sequence
  ENSG00000150394_55 (sequence is synthesized)
ttagaaatctcctaggagcagctggattccacactgagactcaacagagttctgggctatgctgtattttggaaaaggaaaagcgggtgctgagagctaagtagccaattactctttata

SEQ ID NO: 419908 - DNA, 120 bp, Artificial Sequence
  ENSG00000150394_56 (sequence is synthesized)
gccacataaggactgaaggcaagtaggcccttccaacaagttgtattatgcgatcactggctttgcagggaatctcacgaatgtataaccttctgattgcctttttgattgaaagttcca

SEQ ID NO: 419909 - DNA, 120 bp, Artificial Sequence
  ENSG00000150394_57 (sequence is synthesized)
tctgagatcagggcagtgtaaccagtaataagatttcaaaaaaatcccatcactggcactgtcggaaaggctgagcatgactgaaatcctatcattgtcagtcaaaaagataaggtaaca

SEQ ID NO: 419910 - DNA, 120 bp, Artificial Sequence
  ENSG00000150394_58 (sequence is synthesized)
aaaagataaggtaacagcgggcatcactataaaagctctataaatgcacaacttaaacatgaatatcaacattaaaaagaatatatatatccttatacatatatttataaatatattcat

SEQ ID NO: 419911 - DNA, 120 bp, Artificial Sequence
  ENSG00000150394_59 (sequence is synthesized)
atatatacacaattcagttactggggataatttatagttttaatttttcatctcataatctcacgcactgccaacaaattgaaattgtggctctctgttttcatgaatctaaccttgaat

SEQ ID NO: 419912 - DNA, 120 bp, Artificial Sequence
  ENSG00000150394_60 (sequence is synthesized)
ttgaaagaagttgaattgagggtaaagggttttaaaagcagctttttatttgtgaacagaataatggctcataatacctgggattagaattaaatatgtcacgttgtgaggctgtactta

SEQ ID NO: 419913 - DNA, 120 bp, Artificial Sequence
  ENSG00000150394_61 (sequence is synthesized)
gactttttaaatgtcattgtatttttttgtggacaaaataattgtagaatatactttgcaggaaatacttttctatattttttcaatttcaatactgttttatttgctataaaaagtgtc

SEQ ID NO: 419914 - DNA, 120 bp, Artificial Sequence
  ENSG00000150394_62 (sequence is synthesized)
tttgcactgttactcagccaaacagtgttgaatgtattatttgcccttgtaattattgcttcttatgataattgtagaagagcatgtctttatgatctatcatttaaaaatacatttatt

SEQ ID NO: 419915 - DNA, 120 bp, Artificial Sequence
  ENSG00000150394_63 (sequence is synthesized)
gtcattgtagttttagtcaacacaaatttatggattacatggtatactgttgctattgaagatattctagtcctagtattttgagcacagacctagcgttatggaggacataaaatttaa

SEQ ID NO: 419916 - DNA, 120 bp, Artificial Sequence
  ENSG00000150394_64 (sequence is synthesized)
aaatttcctgacttgatggactatctgaggaaaaagaattttgtctgtcacatttattgagtatctatcagtacagaaattaagctacatggttgatacagaaagattaaatacagtagc

SEQ ID NO: 419917 - DNA, 120 bp, Artificial Sequence
  ENSG00000150394_65 (sequence is synthesized)
attctcaaacttattttctttatttataaaatgtacctaatcaatctcataagaactaattgttgaattttttttttatctatggataaatactatttgagtctgggtttaagtttggtt

SEQ ID NO: 419918 - DNA, 120 bp, Artificial Sequence
  ENSG00000150394_66 (sequence is synthesized)
gatctgacactaaatccccttaactttcaactaaacagttatctctgtaattatgagacttttgatgataagaaatagaaactaagttatatatagtgctatggaagtactgaggaggaa

SEQ ID NO: 419919 - DNA, 120 bp, Artificial Sequence
  ENSG00000150394_67 (sequence is synthesized)
gtaagggaccccatatgggaagactcaagaagacgtcacggtgaaattttccaaaaagatgggaactcaagaatgggtgcaacagaaatcacagcttttccaaatactaaaagggaaaat

SEQ ID NO: 419920 - DNA, 120 bp, Artificial Sequence
  ENSG00000150394_68 (sequence is synthesized)
tataaaaagcaccaatggcacacttttggacattcagaaagatccagaaattaggtgcttataggaaactctaggtttgccaaattgtagtgttttatggataggaaaaatgaagttcag

SEQ ID NO: 419921 - DNA, 120 bp, Artificial Sequence
  ENSG00000150394_69 (sequence is synthesized)
aaacgttataaggaattttcagggttaaattacacatcaaatatgtgagagaaacagaaattacatgctggtatttggggtcatctcctgagttgtaatgttgtaagtgtttttgtatgt

SEQ ID NO: 419922 - DNA, 120 bp, Artificial Sequence
  ENSG00000150394_70 (sequence is synthesized)
attctcctccttcctttatgtgtggaagtttcatctaggtctcaaggttagtaggcatttgctggtgaaaatagtgcctttgggtactatttccccaacttgagttacctgccaccatct

SEQ ID NO: 419923 - DNA, 120 bp, Artificial Sequence
  ENSG00000150394_71 (sequence is synthesized)
aattcacatcttgaatgcaagtattatttcttgcaagtatccctactaatagataatagatatttctattattatccacagattacagaagagggttgctaggaggaatatcacaagatg

SEQ ID NO: 419924 - DNA, 120 bp, Artificial Sequence
  ENSG00000150394_72 (sequence is synthesized)
ctgtctgaagagaaagactgtggaaaaccatggcttcaatgaactcagaggtcaggaccagaaaaggaaatgagaggtcaccaaagccaaatgttaatttcttgggatttcttctgtaca

SEQ ID NO: 419925 - DNA, 120 bp, Artificial Sequence
  ENSG00000150394_73 (sequence is synthesized)
tgcaaagaacttcaggccatcctatgattcctcaaaaataagaggaaaattttaacaattatgctctaagatggaccatgacaatttaggagtcattgggatcaccccccaaagccaaat

SEQ ID NO: 419926 - DNA, 120 bp, Artificial Sequence
  ENSG00000150394_74 (sequence is synthesized)
gttaatttcttgggatttcttctgtacatgcaaagaacttcaggccatcctatgatccctcacaaataagaggaagattttaacaattatgctctaagatggaacatgacaatttaggag

SEQ ID NO: 419927 - DNA, 120 bp, Artificial Sequence
  ENSG00000150394_75 (sequence is synthesized)
tcactgggatcaccccccccacctttccaacgttactctgctttaactacaaatatgtcgaatggttttctaatttttctttaacttaacctctaaagttcgagagctgtcatctttgtc

SEQ ID NO: 419928 - DNA, 120 bp, Artificial Sequence
  ENSG00000150394_76 (sequence is synthesized)
aagtctgattgttgagtatgtgaatggatgtttttggctcaatgttagagccaaaatttataaataataattatttatacataatgatattgcaaataaactttaagaaagagctttaaa

SEQ ID NO: 419929 - DNA, 120 bp, Artificial Sequence
  ENSG00000150394_77 (sequence is synthesized)
taaaattttattatgactctgaagtgaaattttgatggcacaattcatgactgtgaatattttgtgaattccaagtgaaatgagcaaaacaaaacaataggagattagattcactgagct

SEQ ID NO: 419930 - DNA, 120 bp, Artificial Sequence
  ENSG00000150394_78 (sequence is synthesized)
tatataataaacagacataaataaatgcccataaaatttacaggttgaatctgggggactggagagtgatcccattaaggctcacaaatgggtttaaatgcacataactttcatccatca

SEQ ID NO: 419931 - DNA, 120 bp, Artificial Sequence
  ENSG00000150394_79 (sequence is synthesized)
ctccatgttgttaatgctgaatatgtttgtatacaactgtctcatatttgactaacctgcattatattgtgcatttgcatcatttatgatctgcaaagtctcaggcaagaaacacatcca

SEQ ID NO: 419932 - DNA, 120 bp, Artificial Sequence
  ENSG00000150394_80 (sequence is synthesized)
aatgggaacagagagggaattttttttctccatcagatgttatttctcttcctacttatgaccaaattggctcctaaagtggaacaacctgctgtgccacaaacccagagccaaatcact

SEQ ID NO: 419933 - DNA, 120 bp, Artificial Sequence
  ENSG00000150394_81 (sequence is synthesized)
gtcttaaaatatcttgggatatggatgatagcaggagatgtcttagagtgacgggggctgaatttttactttcaaatgacaagaagcaaggtaaaacctcgtggagaggagacatttgtt

SEQ ID NO: 419934 - DNA, 120 bp, Artificial Sequence
  ENSG00000150394_82 (sequence is synthesized)
tcacagcaaacatatgaataccaaataatagtgaaacccaagaaggccagtggtttatagaaagttgtaggaagtgaatattgaaatctgtaaatatgtaaatatatttagataaacata

SEQ ID NO: 419935 - DNA, 120 bp, Artificial Sequence
  ENSG00000150394_83 (sequence is synthesized)
agatgaacaacacgttttacatgtgtgtattagtagaacattttttgtgcctcatattgcatagatgggtcaatgaaaacagaaaaaaaagaaacataaagaaagtgagagagagggaga

SEQ ID NO: 419936 - DNA, 120 bp, Artificial Sequence
  ENSG00000150394_84 (sequence is synthesized)
aggaaagggagagggagagggaatgggaatgggagtgggaggaagggagggagggagagagaaaaagagggaggaagaaagggaggaaaatagttaaacaagcaagatgaacagaaacaa

SEQ ID NO: 419937 - DNA, 120 bp, Artificial Sequence
  ENSG00000150394_85 (sequence is synthesized)
atatctgctatactctgaatgtcaaaatggaaatagcctgtgtaaagttctgcaaaaccataaatgtaatagatttattttaacaaggtaccaaagtactgtatgtttaagaaatttatc

SEQ ID NO: 419938 - DNA, 120 bp, Artificial Sequence
  ENSG00000150394_86 (sequence is synthesized)
atttttcaacttcctaatttatttctggatggtgacattttaatttaaataaacagcagctgacagtatgacactggagttgttaatccaactattcttgtgcctcatgtgggtgttagg

SEQ ID NO: 419939 - DNA, 120 bp, Artificial Sequence
  ENSG00000150394_87 (sequence is synthesized)
aattaaacttactatttgctaagcagcttacctgacaagagtcagattttttccccctaaagaaaggactggcactgtagctgtatgctttattataaatgatcaatttgttaccctcct

SEQ ID NO: 419940 - DNA, 120 bp, Artificial Sequence
  ENSG00000150394_88 (sequence is synthesized)
tcctataaaacagtgggcatttctccgtagactactctcatgtatctggagaattagcattgtttccatctaccagaataagacacaccacaccacacacacacacacgcacacacacac

SEQ ID NO: 419941 - DNA, 120 bp, Artificial Sequence
  ENSG00000150394_89 (sequence is synthesized)
gttaaagctaaaattctaataataaaactgattaacttttaaacatctagccatgttctcatcaaagcattcagctttagtagagatataggtttatttttataatattctaacattagc

SEQ ID NO: 419942 - DNA, 120 bp, Artificial Sequence
  ENSG00000150394_90 (sequence is synthesized)
ttaaatgtttcctaattttatcatgtggaattaccccctatcaatcacacgttttgagcatcttcatttgtgatcctttgagaagggagtgtgtatatgtttatatatacacatatcaat

SEQ ID NO: 419943 - DNA, 120 bp, Artificial Sequence
  ENSG00000150394_91 (sequence is synthesized)
acatatcatttacctaaattggtagattgagttgtcagagagagtttgatcaaaatatggcaggttgtttcaaagatatggttgttgtgtggaccagatcattgctgagataatgtagcc

SEQ ID NO: 419944 - DNA, 120 bp, Artificial Sequence
  ENSG00000150394_92 (sequence is synthesized)
aaatcacagactggtaagctagactttttcaatcacatagagtctgtaaaatacttcagaatttaaataaaactccattgctcatgcaaaactcatcagataagttcaaggagtcaatga

SEQ ID NO: 419945 - DNA, 120 bp, Artificial Sequence
  ENSG00000150394_93 (sequence is synthesized)
cattgatatttcaaaaactcaacattggcttcacttgcgttattgacaagcatgtttcttggatctctgggaatttgtaggtttgccctgtggattttgactgttttcaaagttctaatg

SEQ ID NO: 419946 - DNA, 120 bp, Artificial Sequence
  ENSG00000150394_94 (sequence is synthesized)
atttctcagtcgttcttcttaacttcagaaaaaaaaatgcattgttttctcatctttcctatgcaaaaccaaaataaaaaattgattctttgttttatgatttttgcaaatcacaatgaa

SEQ ID NO: 419947 - DNA, 120 bp, Artificial Sequence
  ENSG00000150394_95 (sequence is synthesized)
ctcaaattggaaagaaacctgtaattgcccagtggatatttcaaatacacttaactttgctatttcaagccacagacaccaaatggacacaaaggtcattcaaactgttagcgccatgga

SEQ ID NO: 419948 - DNA, 120 bp, Artificial Sequence
  ENSG00000150394_96 (sequence is synthesized)
aaatgaagatcagaaatccatgagttttgcttcatagaccactacttacttggcacctgaataggaaatttgaggtctccagaaaactactcttcctcagcctgaacactgtaggtaaaa

SEQ ID NO: 419949 - DNA, 120 bp, Artificial Sequence
  ENSG00000150394_97 (sequence is synthesized)
aacataacgccagccccagagctcaggtgagacctctagagagaaagctcgcaggtacctcatccgcatgctgttattatctgccagcccacttatccaggagctcggtcctcagcgggc

SEQ ID NO: 419950 - DNA, 120 bp, Artificial Sequence
  ENSG00000150394_98 (sequence is synthesized)
tgcgcgcaccgcgcggaagggcgcatcttcacctcgtggctctggcggcagagacgcgcggggcttgctcgggagcgaggagcgaaaagttgtgcgcccacttgggtagggggaaagaga

SEQ ID NO: 419951 - DNA, 120 bp, Artificial Sequence
  ENSG00000150394_99 (sequence is synthesized)
gcgatcgagccagcgcgggagagcgaagggggaaggcggggagggggcggggaggggggactgcttacatgaatttccaagtggtagacctgcctctgcgctctgcccaatgagatccgt

SEQ ID NO: 419952 - DNA, 120 bp, Artificial Sequence
  ENSG00000150394_100 (sequence is synthesized)
gccaaagtatcagaccacaaaaagaatgtcactaagcttttaccgatggcaggagcctctgaaatcatcagaaatgctgacgtcaagttttatgtttcaggtcattcaaactgttagcgc

SEQ ID NO: 419953 - DNA, 120 bp, Artificial Sequence
  ENSG00000150394_101 (sequence is synthesized)
tctccaggctacactcttgagtcgacactcatagttcgctacacacagacctggatcctgggagcaaaaaaatcaagtatatcctatcaggtgatggagctgggaccatatttcaaataa

SEQ ID NO: 419954 - DNA, 120 bp, Artificial Sequence
  ENSG00000150394_102 (sequence is synthesized)
taatcccaaactggaaagtgtaaaacaacagatgcttattctcttagagtttctggaggctggaaatctgaaatcaaggtgtgggcagggccatgctctcctcaaaaactctagaggaga

SEQ ID NO: 419955 - DNA, 120 bp, Artificial Sequence
  ENSG00000150394_103 (sequence is synthesized)
aatagcacagcccactctctgtccattttcactccaaaatgacaatcatgcagatatttacagaactctactgctagatggttacagtgcagaaagagcctgccaagtgatcttctgtat

SEQ ID NO: 419956 - DNA, 120 bp, Artificial Sequence
  ENSG00000150394_104 (sequence is synthesized)
taaaatgttctaattcattttgtgtataattgtaaattgttgggtaaacattcagtttggtgttagtctaggaacttccacaggaatccaccatgatgttgattttttttttccaaagcc

SEQ ID NO: 419957 - DNA, 120 bp, Artificial Sequence
  ENSG00000150394_105 (sequence is synthesized)
aaagtggaccttgctccaatattttatggctagatataccacattactaaatattataatatttggtaatgagtcaacactccaaaaaaatggagattattgacatcaggtggcatgaca

SEQ ID NO: 419958 - DNA, 120 bp, Artificial Sequence
  ENSG00000150401_0 (sequence is synthesized)
gcagaaggccggggccggccagaagcgggcggcgcgggggagatgcataagcttaaatcgtctcagaaggacaaggtccgccagtttatggcgtgcactcaggctggcgagagaactgct

SEQ ID NO: 419959 - DNA, 120 bp, Artificial Sequence
  ENSG00000150401_1 (sequence is synthesized)
atctactgcttaacgcagaatgagtggagactagacgaggccacggacagcttcttccaaaacccagactcgctccacagggagtccatgcggaacgctgtggacaagaagaagctggag

SEQ ID NO: 419960 - DNA, 120 bp, Artificial Sequence
  ENSG00000150401_2 (sequence is synthesized)
cggctgtacggcaggtacaaagatccacaagatgaaaacaaaattggagtcgatgggattcaacagttttgtgatgatctgagcctggatcctgccagtatcagtgtattggtcatagcg

SEQ ID NO: 419961 - DNA, 120 bp, Artificial Sequence
  ENSG00000150401_3 (sequence is synthesized)
tggaagttcagggcagcaactcagtgtgaatttagcagaaaggaatttctagatggcatgacagaacttgggtgtgacagcatggagaagctaaaggctcttctgccaagactggagcag

SEQ ID NO: 419962 - DNA, 120 bp, Artificial Sequence
  ENSG00000150401_4 (sequence is synthesized)
gagctgaaggacacagccaagtttaaagatttttatcagtttaccttcaccttcgctaagaacccagggcagaaaggtttagacttagaaatggctgttgcgtattggaaattagtgtta

SEQ ID NO: 419963 - DNA, 120 bp, Artificial Sequence
  ENSG00000150401_5 (sequence is synthesized)
tctggaaggtttaaatttttagatctctggaacacattcttaatggaacatcacaaaagatcaattccaagggacacctggaacctcctgctggactttggaaacatgattgcggatgat

SEQ ID NO: 419964 - DNA, 120 bp, Artificial Sequence
  ENSG00000150401_6 (sequence is synthesized)
atgtctaactacgatgaagaaggagcttggcccgttcttatagatgattttgtagaatatgcacggccagtagtcacaggtggaaaacgcagccttttctaggcagcaagttaagcagga

SEQ ID NO: 419965 - DNA, 120 bp, Artificial Sequence
  ENSG00000150401_7 (sequence is synthesized)
gtaagattatgaaatgatttgtatcctgcaaggagattgcagtcagttcctgggtgcattgtcgctgattccagaagtcattcttgaccagccatgaaaccagaggcgccatcccattct

SEQ ID NO: 419966 - DNA, 120 bp, Artificial Sequence
  ENSG00000150401_8 (sequence is synthesized)
gccggaggacagccagcggctgctttgtggacaccgcaggaagttcctcgggacacggctgctttgggatgtttggagatttgtcatcatagcttttgcgttaggaaatttctgcatgat

SEQ ID NO: 419967 - DNA, 120 bp, Artificial Sequence
  ENSG00000150401_9 (sequence is synthesized)
tttttaatatttacaaaatactaaggtagagccatagcgccgcctgtgggaccgcagagcatgctgcgtagctcgcgcgtcaggcgaaccagcgtccggcagcgtcccgccgaatgacgt

SEQ ID NO: 419968 - DNA, 120 bp, Artificial Sequence
  ENSG00000150401_10 (sequence is synthesized)
tgcggtggcactggcaacacggcatgtgtcctctgcagggcgctgcgtttttatacacgtcaaagctgttaagaatgtgccctaagggagaggatcttgtcgtagagtctaatgtttttt

SEQ ID NO: 419969 - DNA, 120 bp, Artificial Sequence
  ENSG00000150401_11 (sequence is synthesized)
aaaattggtgccagcaattcacgatttatattttttgaattaccaaatatctagatttaccagctctatttttgttttcattttctctagacattcatctgaaaatcattttatggttct

SEQ ID NO: 419970 - DNA, 120 bp, Artificial Sequence
  ENSG00000150401_12 (sequence is synthesized)
cacgtggcacgattccagcagagtttatctcacaccgtttatatatcactgggcctctcttacttaaatattatttgacctgcctgagaagcttcataaagtatgtttttttaaaatata

SEQ ID NO: 419971 - DNA, 120 bp, Artificial Sequence
  ENSG00000150401_13 (sequence is synthesized)
gtttttttaaaatatattttaattacatttaaaaagacatttttccatgaaaaacatttattttatgagtgatgaattatagattttaaaatcaaggccgggcgtggtggctcacacctg

SEQ ID NO: 419972 - DNA, 66 bp, Artificial Sequence
  ENSG00000150401_14 (sequence is synthesized)
gaactcaggagacggaggttctgtctcaaaataaatacatacatacatacaataaaaccgaatgag

SEQ ID NO: 419973 - DNA, 120 bp, Artificial Sequence
  ENSG00000150401_15 (sequence is synthesized)
caaaataaatacatacatacatacaataaaaccgaatgagctggttctttccatcctcttgtggtacccgtagtgcccagcatccagacctttgtgcccctgtgcacatttggaagctaa

SEQ ID NO: 419974 - DNA, 120 bp, Artificial Sequence
  ENSG00000150401_16 (sequence is synthesized)
aatgtacatcgttgtctgaaaaaacccaaccccaaaaccttcatctgattggtgagctgaagtctgtccttgcaccatgttatcatctgtttctcgtgtccgcctggttgaggaggaccc

SEQ ID NO: 419975 - DNA, 120 bp, Artificial Sequence
  ENSG00000150401_17 (sequence is synthesized)
acgagtgctgccgaggtgtggagggctggtattgagttgtggacatcactgttgaccctacctcacgtgccgagactctcatgtcacaggcgtgccttgctgcccccctgcagcactgtg

SEQ ID NO: 419976 - DNA, 120 bp, Artificial Sequence
  ENSG00000150401_18 (sequence is synthesized)
caggacgtggaccagctggagctgctgcccagcacagaggagagtcgccgcagatgacctagctgcggtgtgagagagcatggcccagacaagcagctgggttggcttctgagaacagga

SEQ ID NO: 419977 - DNA, 120 bp, Artificial Sequence
  ENSG00000150401_19 (sequence is synthesized)
cttaccctgggcttcaggaacatctgatggctgaggttagtgtgcttggaggctgcaggacgaactgtcgatgtttcttagcagagatggtcacagagggcagcagggacaggactggaa

SEQ ID NO: 419978 - DNA, 120 bp, Artificial Sequence
  ENSG00000150401_20 (sequence is synthesized)
gggacctgcagcctgcagaccccgcctggcccccgctggcttctggctggtccagtgatgggcaagtgacagaccttccccaggctctgcttccagaactctaatgggaaactgggcctg

SEQ ID NO: 419979 - DNA, 120 bp, Artificial Sequence
  ENSG00000150401_21 (sequence is synthesized)
tctacctttagaagtcttcgattctcagagagcatttgtctaatacaataaaaactggcattaatacaaacctcaaaaacgtgagcgtatcttccaggcttcatggattcttgacatgta

SEQ ID NO: 419980 - DNA, 120 bp, Artificial Sequence
  ENSG00000150401_22 (sequence is synthesized)
attgttttgttcagaaaagtttatagaattcacataattctgtataaactatggagatccacagtacttttttgtttttgagatttaaagttctaagggattgtcaatagatatcaaaat

SEQ ID NO: 419981 - DNA, 120 bp, Artificial Sequence
  ENSG00000150401_23 (sequence is synthesized)
attaatcattggacaaaggcttttccaaaaattgtgggtttttttcttctgttgtatccatttgagtcctgcatgctgtgaaatgctgagaacagaagcattaaattggtttttctcggg

SEQ ID NO: 419982 - DNA, 120 bp, Artificial Sequence
  ENSG00000150401_24 (sequence is synthesized)
gtgcagtctttgtaactgatgaagagcaaggctttgtctctaattctgcccagttaaagtgcaggcgttaggctaaagctgggacaaacctggagcggcttcattggctttcctacttct

SEQ ID NO: 419983 - DNA, 120 bp, Artificial Sequence
  ENSG00000150401_25 (sequence is synthesized)
taagtccattaggacaatattaaacatttttatgtaaataataataaatattgaaaaagcatatatttacttttgataatgtgattgacaaacatacaaatcaggtcctttgtaagaaaa

SEQ ID NO: 419984 - DNA, 120 bp, Artificial Sequence
  ENSG00000150401_26 (sequence is synthesized)
ccccaggttcacctccatttctcaatgtgaaagctttacatcattaagatgagttgaatatagatttcaattaatgttcttcctaagtgataaggatgtagacttataagcaggacaaga

SEQ ID NO: 419985 - DNA, 120 bp, Artificial Sequence
  ENSG00000150401_27 (sequence is synthesized)
ttttaacaattttattgtacttgttcctaatcaaattaatgaacattaattgaagatcgctaggccactagaatatatgagagttaagctctgtattttaaacctggtgggttttttttt

SEQ ID NO: 419986 - DNA, 120 bp, Artificial Sequence
  ENSG00000150401_28 (sequence is synthesized)
acagaacttgggtaagtcaactattcttagcttaaatgttttcagaaatgaaaatacttctaacattatttttcagcaacctgtacatactaatttcatatctgcttattttctttgtgt

SEQ ID NO: 419987 - DNA, 80 bp, Artificial Sequence
  ENSG00000150401_29 (sequence is synthesized)
gcacttcctggccggcgtggggcctggcagccgcaggctggcgttggaccccgcaggggcgagccaaggccctcgcagag

SEQ ID NO: 419988 - DNA, 80 bp, Artificial Sequence
  ENSG00000150401_30 (sequence is synthesized)
gctcccggcactgccccggagccgagggccgcggccgtccgaggacgagggcggagccgccgccgcgcctgcgcagaagg

SEQ ID NO: 419989 - DNA, 80 bp, Artificial Sequence
  ENSG00000150401_31 (sequence is synthesized)
gtcggcgcaggcggcgcgctggatgtgggaggccgagcccagcgagctgcgcggggcgttccgcgtggatccgagggagg

SEQ ID NO: 419990 - DNA, 120 bp, Artificial Sequence
  ENSG00000150401_32 (sequence is synthesized)
gtcggaggcgcgggaccgcggggagcgcgggtttgacccggagccgcgagggacgaccgggagatgctggagaggagcgttccactgctgccgaggttggagatccaagagcagggatga

SEQ ID NO: 419991 - DNA, 120 bp, Artificial Sequence
  ENSG00000150403_0 (sequence is synthesized)
gggagtccgggtcggcttggctgagcgggggcggtgctgggcagggcggcggccgctccctcccggactcccggcctcccggcctccctggtcccgcctgggaagggatgcaaggaagcc

SEQ ID NO: 419992 - DNA, 120 bp, Artificial Sequence
  ENSG00000150403_1 (sequence is synthesized)
tgcaaggaagccctccggcgctgcgctccgaggcgggagacagcgtccccctccgcccctcgggtcctggcgcctcagagcccggcccaggccgcggaacggtgatgctcgggccggacg

SEQ ID NO: 419993 - DNA, 120 bp, Artificial Sequence
  ENSG00000150403_2 (sequence is synthesized)
tccctgcgtcccgctgaaaatgtgtgtctgacatgcaagctcagtggggcagagacccgtggattgctgtgccctgccctccggacctggatcatgaaggtgttgggaagaagcttcttc

SEQ ID NO: 419994 - DNA, 120 bp, Artificial Sequence
  ENSG00000150403_3 (sequence is synthesized)
tgggtgctgtttcccgtccttccctgggcggtgcaggctgtggagcacgaggaggtggcgcagcgtgtgatcaaactgcaccgcgggcgaggggtggctgccatgcagagccggcagtgg

SEQ ID NO: 419995 - DNA, 120 bp, Artificial Sequence
  ENSG00000150403_4 (sequence is synthesized)
gtccgggacagctgcaggaagctctcagggcttctccgccagaagaatgcagttctgaacaaactgaaaactgcaattggagcagtggagaaagacgtgggcctgtcggatgaagagaaa

SEQ ID NO: 419996 - DNA, 120 bp, Artificial Sequence
  ENSG00000150403_5 (sequence is synthesized)
ctgtttcaggtgcacacgtttgaaattttccagaaagagctgaatgaaagtgaaaattccgttttccaagctgtctacggactgcagagagccctgcagggggattacaaagatgtcgtg

SEQ ID NO: 419997 - DNA, 120 bp, Artificial Sequence
  ENSG00000150403_6 (sequence is synthesized)
aacatgaaggagagcagccggcagcgcctggaggccctgagagaggctgcaataaaggaagaaacagaatatatggaacttctggcagcagaaaaacatcaagttgaagcccttaaaaat

SEQ ID NO: 419998 - DNA, 120 bp, Artificial Sequence
  ENSG00000150403_7 (sequence is synthesized)
atgcaacatcaaaaccaaagtttatccatgcttgacgagattcttgaagatgtaagaaaggcagcggatcgtctggaggaagagatagaggaacatgcttttgacgacaataaatcagtc

SEQ ID NO: 419999 - DNA, 120 bp, Artificial Sequence
  ENSG00000150403_8 (sequence is synthesized)
aagggggtcaattttgaggcagttctgagggtggaggaagaagaggccaattctaagcaaaatataacaaaacgagaagtggaggatgacttgggtcttagcatgctgattgactcccag

SEQ ID NO: 420000 - DNA, 120 bp, Artificial Sequence
  ENSG00000150403_9 (sequence is synthesized)
aacaaccagtatattttgaccaagcccagagattcaaccatcccacgtgcagatcaccactttataaaggacattgttaccataggaatgctgtccttgccttgtggctggctatgtaca

SEQ ID NO: 420001 - DNA, 120 bp, Artificial Sequence
  ENSG00000150403_10 (sequence is synthesized)
gccataggattgcctacaatgtttggttatattatttgtggtgtacttctgggaccttcaggactaaatagtattaagtctattgtgcaagtggagacattaggagaatttggggtgttt

SEQ ID NO: 420002 - DNA, 120 bp, Artificial Sequence
  ENSG00000150403_11 (sequence is synthesized)
tttactctttttcttgttggcttagaattttctccagaaaagctaagaaaggtgtggaagatttccttacaagggccgtgttacatgacactgttaatgattgcatttggcttgctgtgg

SEQ ID NO: 420003 - DNA, 120 bp, Artificial Sequence
  ENSG00000150403_12 (sequence is synthesized)
tgtcaagcacacccctcgtgtccaggttcctcatgggcagtgctcggggtgacaaagaaggcgacattgactacagcaccgtgctcctcggcatgctggtgacgcaggacgtgcagctcg

SEQ ID NO: 420004 - DNA, 120 bp, Artificial Sequence
  ENSG00000150403_13 (sequence is synthesized)
ggctcttcatggccgtcatgccgactctcatacaggcgggcgccagtgcatcttctagcattgtcgtggaagttctccgaatcctggttttgattggtcagattcttttttcactagcgg

SEQ ID NO: 420005 - DNA, 120 bp, Artificial Sequence
  ENSG00000150403_14 (sequence is synthesized)
cggtttttcttttatgtcttgttataaagaagtatctcattggaccctattatcggaagctgcacatggaaagcaaggggaacaaagaaatcctgatcttgggaatatctgcctttatct

SEQ ID NO: 420006 - DNA, 120 bp, Artificial Sequence
  ENSG00000150403_15 (sequence is synthesized)
tcttaatgttaacggtcacggagctgctggacgtctccatggagctgggctgtttcctggctggagcgctcgtctcctctcagggccccgtggtcaccgaggagatcgccacctccatcg

SEQ ID NO: 420007 - DNA, 120 bp, Artificial Sequence
  ENSG00000150403_16 (sequence is synthesized)
aacccatccgcgacttcctggccatcgttttcttcgcctccatagggctccacgtgttccccacgtttgtggcgtacgagctcacggtgctggtgttcctcaccttgtcagtggtggtga

SEQ ID NO: 420008 - DNA, 120 bp, Artificial Sequence
  ENSG00000150403_17 (sequence is synthesized)
tgaagtttctcctggcggcgctggtcctgtctctcattctgccgaggagcagccagtacatcaagtggatcgtctctgcggggcttgcccaggtcagcgagttttcctttgtcctgggga

SEQ ID NO: 420009 - DNA, 120 bp, Artificial Sequence
  ENSG00000150403_18 (sequence is synthesized)
gccgggcgcgaagagcgggcgtcatctctcgggaggtgtacctccttatactgagtgtgaccacgctcagcctcttgctcgccccggtgctgtggagagctgcaatcacgaggtgtgtgc

SEQ ID NO: 420010 - DNA, 120 bp, Artificial Sequence
  ENSG00000150403_19 (sequence is synthesized)
ccagaccggagagacggtccagcctctgatggctcggagatgatggaccgtggaagggaagcgtctgtggggagtgagcgcttagatggccagcagctgctccttctgggaagctcgcac

SEQ ID NO: 420011 - DNA, 120 bp, Artificial Sequence
  ENSG00000150403_20 (sequence is synthesized)
cttggcaacagaacagccctctagcagagcgtcagtgcagtcgtgttatcccggcttttacagaatattcttgtcctattttagaattttccggagtagtttatttgcagtctgttgatt

SEQ ID NO: 420012 - DNA, 120 bp, Artificial Sequence
  ENSG00000150403_21 (sequence is synthesized)
atgtgcagtagacccgggacactgcgttttaccgatcaccttgaatgtggtgcctggatgtgccttttttttttttccctgaaattattattaattttctattgtgagttcatcagttca

SEQ ID NO: 420013 - DNA, 120 bp, Artificial Sequence
  ENSG00000150403_22 (sequence is synthesized)
tagtttttttagtaaagaagcaaaattaaaaggcttttaaaaatgtacaacttcagaattataatctgttagtcaaatatttgttattaaacatttctgtaatatgaagttgtaatcctg

SEQ ID NO: 420014 - DNA, 120 bp, Artificial Sequence
  ENSG00000150403_23 (sequence is synthesized)
gccgtgagcttggaagcttacttttgattcttaaagcctatgttttctaaaatgagacaaatacggatgtctatttgccttttattgtaacttttaaatgaaataatttcatgtcaattt

SEQ ID NO: 420015 - DNA, 120 bp, Artificial Sequence
  ENSG00000150403_24 (sequence is synthesized)
gcgttccagaacagctgcttcttcacctcctgagccactcactaatcagaagacatgttgttgaaattgttcacgtgtatgtttttaatgtagattgaaaatgaagacaaactaaaatgc

SEQ ID NO: 420016 - DNA, 120 bp, Artificial Sequence
  ENSG00000150403_25 (sequence is synthesized)
tcaacctgttactgcagctaaggagcttcacatcatgtggttttggttcatacacttttaacacttgttgatgaattcactatcaaatgtttttagaatagaatatgatatttcggtttg

SEQ ID NO: 420017 - DNA, 120 bp, Artificial Sequence
  ENSG00000150403_26 (sequence is synthesized)
atgttatttttgggacaaattcagaaagataaaaaatatcaggtttgaaagcgtagaaattcagtgaagaattggaatttgccttcacatggctaacttcaggaagggtctggaaagtaa

SEQ ID NO: 420018 - DNA, 120 bp, Artificial Sequence
  ENSG00000150403_27 (sequence is synthesized)
tgtgtgtgaactttaatagatggctccctctaaggtgcgaaactgttagagggtcagatgtcatagagcttgcatattcagtgtgttaccctagaaaaaactttgtcaattggaagtgag

SEQ ID NO: 420019 - DNA, 120 bp, Artificial Sequence
  ENSG00000150403_28 (sequence is synthesized)
ttaattaaaagacactttgtttttccagacaccgcacaaaagaggaaagtagctgattaaaagccagggtggggagaggtaaaatgaacactgttcataacaaaaacaccctgtgaatta

SEQ ID NO: 420020 - DNA, 120 bp, Artificial Sequence
  ENSG00000150403_29 (sequence is synthesized)
agatcagataccactttgcctgcagtgctagctggaaaactagcatcgacttagcaaaagtttttaagtgactgtcagatgtaacaggcattcttgaaccagattcgtgagaatcacaac

SEQ ID NO: 420021 - DNA, 120 bp, Artificial Sequence
  ENSG00000150403_30 (sequence is synthesized)
tgtacaccctttctgtatttttggggttttttttccacgaaagacttggtcattttaaacaaagtgacttaatttacagtgtctggtttgcctaatcattcagctctctcatgtagtatt

SEQ ID NO: 420022 - DNA, 120 bp, Artificial Sequence
  ENSG00000150403_31 (sequence is synthesized)
ccttctttttttaatttaaaatttttttatttcaataggttgttgggaacaggtggtgtttggttacatgcgtaggttctttagtggtgatctgtgagattttggtgcacctgtcaccag

SEQ ID NO: 420023 - DNA, 120 bp, Artificial Sequence
  ENSG00000150403_32 (sequence is synthesized)
agcagtgtacactgctcccgatgtgtagtcttttatccctcgccacccaccaccctttgccccaagtccgcagagtccagtgtgtcattcttacacatttgtgtcctcatagcttagctc

SEQ ID NO: 420024 - DNA, 83 bp, Artificial Sequence
  ENSG00000150403_33 (sequence is synthesized)
gacgtttgattttccattcctgagttactgcacttagaataatggtctccagttccatccaggttgctacaaataccccttat

SEQ ID NO: 420025 - DNA, 120 bp, Artificial Sequence
  ENSG00000150403_34 (sequence is synthesized)
tccatatttttgcaactgcaaatcgtgctgctctagacatgtgcatgcaagtctctttttcgtataatgacttattttcccctggcagtggggttgctggatcaaatggtagagctactt

SEQ ID NO: 420026 - DNA, 120 bp, Artificial Sequence
  ENSG00000150403_35 (sequence is synthesized)
ttagttctctgagcaacctccacactgttttccttagtggttgtgctagtttacgctcccaccagcagtgcagaagtgttccctgttccccacatccctgccaacatctattcttttcat

SEQ ID NO: 420027 - DNA, 79 bp, Artificial Sequence
  ENSG00000150403_36 (sequence is synthesized)
cagcatttttttatgtctgttggccatttgtatatcttctttagagaattgtctatttatatccttagcccacttttgg

SEQ ID NO: 420028 - DNA, 84 bp, Artificial Sequence
  ENSG00000150403_37 (sequence is synthesized)
tcagcatttttttatgtctgttggccatttgtatatcttctttagagaattgtctatttatatccttactgacttttttgagtt

SEQ ID NO: 420029 - DNA, 120 bp, Artificial Sequence
  ENSG00000150403_38 (sequence is synthesized)
gattgtggagattttctccagctctttggatttgtacactctttttggagagctgtctagcaatttgacctaaaagccttaaaatgtacatatgccttgacctggtagttcttctaggtc

SEQ ID NO: 420030 - DNA, 120 bp, Artificial Sequence
  ENSG00000150403_39 (sequence is synthesized)
tctctccaaaggaaagaatcaaacataagtttttaaaaaatttacccacaaaaggtttcacctcctcattgtaaatttttaagaaacagtggaaccagtcctgagcatctaacggtcagt

SEQ ID NO: 420031 - DNA, 120 bp, Artificial Sequence
  ENSG00000150403_40 (sequence is synthesized)
tcagctgcggcgtgactaccatggagtgttaggtagccactgcaaagtaacaagagcatcagcaacagagcaaaatatcggttggaaagctaaatgtggggaaaaaaggagcatgtaaca

SEQ ID NO: 420032 - DNA, 120 bp, Artificial Sequence
  ENSG00000150403_41 (sequence is synthesized)
tgaccgcggcaatgtaaaagaagcaccaatacatgggggaaaaatgggaaagaagcgttccgggtagccatgatgacttctggtttcttctccatattttccaaattttctataataagc

SEQ ID NO: 420033 - DNA, 120 bp, Artificial Sequence
  ENSG00000150403_42 (sequence is synthesized)
agtcaatactttgtcattaggaggaagaataaacttttcttttaaaggcttgtgtttactttcagaagtcaactctgatctcactggcatgtttttctttatactctcttcccatttgct

SEQ ID NO: 420034 - DNA, 120 bp, Artificial Sequence
  ENSG00000150403_43 (sequence is synthesized)
tcctcagttcatcctcttacctagaactttttgttttctttatctttctgtttttccactaaaagctccgtttttccatcttcccattactctccctttcctgtgtacactcctgaagac

SEQ ID NO: 420035 - DNA, 120 bp, Artificial Sequence
  ENSG00000150403_44 (sequence is synthesized)
aggcatcctcataaggtgttctgaattaactttagggtgttctccaggtactttgcatctttttatatttcttgtaaattgttaatttctaagctccatgattaaagagaattcaccact

SEQ ID NO: 420036 - DNA, 120 bp, Artificial Sequence
  ENSG00000150403_45 (sequence is synthesized)
agtgccctgaatgacgagagaaagcatgctagggtctctgcctaactgatcactcaggttacggtgaaatcctaccggatcaacatctgagaccaggcttatggaagtgagcttccaacc

SEQ ID NO: 420037 - DNA, 120 bp, Artificial Sequence
  ENSG00000150403_46 (sequence is synthesized)
tgaatgcttgaggctgagggggtgttggcggcctcgataacaacctgaacaacagctggcagcagggagtgcctgggccatgtgtccccagagcactgacctgggtggtccagtctcctg

SEQ ID NO: 420038 - DNA, 120 bp, Artificial Sequence
  ENSG00000150403_47 (sequence is synthesized)
acgcttgcagtgcacatcgaggggacagaagcatttgaaccgtagcaggcattcaggatacagtggagtctctgcaacagggtgactttttttttgtctccaacacctgtgaccatcttt

SEQ ID NO: 420039 - DNA, 120 bp, Artificial Sequence
  ENSG00000150403_48 (sequence is synthesized)
gcatgctagggtctctgcctaactgatcactcaggtaagatcctaactgcccaggaacggtgtcctcaaagccccagctgggcccacctgccccactccagccacaggacctggctctgt

SEQ ID NO: 420040 - DNA, 120 bp, Artificial Sequence
  ENSG00000150403_49 (sequence is synthesized)
gaacccgtcactcccgttttcacccccacctctctgctagtgacttcctcatctgtgacctgcccgtttgtcccatgctgacccagcagaaccctttcttgacctcatgactcctctttc

SEQ ID NO: 420041 - DNA, 120 bp, Artificial Sequence
  ENSG00000150403_50 (sequence is synthesized)
atccagaccttccagaaagcttcaccctccccatcccatccccatcatgtctgcccctgtcatccagatgggggtctccgagccaccgagcccctggtagccacattgcccccaccctgc

SEQ ID NO: 420042 - DNA, 120 bp, Artificial Sequence
  ENSG00000150403_51 (sequence is synthesized)
tctcagcatttccccagtgtgtagcatgtcactagaaagaagtgggaggacggactcatggtgagtcttgtggggacatgtttgctggaggctaaccagcctgatcatgacatcttcatc

SEQ ID NO: 420043 - DNA, 120 bp, Artificial Sequence
  ENSG00000150403_52 (sequence is synthesized)
acactccccccaaaaccagccattctcaaccagcgaggcctctgtgtctgcaaggccagttttatttcttctttgatatttctgcttctgtgtcctttccccgctgcccaaaagctgcct

SEQ ID NO: 420044 - DNA, 120 bp, Artificial Sequence
  ENSG00000150403_53 (sequence is synthesized)
cccgtctgcccatgcagagctgtattacccaacaacacccagctcgactcggacagcacccagctcaactcggacaggccccgggaaagtaagagcttggggggagacccacaggcccac

SEQ ID NO: 420045 - DNA, 120 bp, Artificial Sequence
  ENSG00000150403_54 (sequence is synthesized)
acggcagcactgcgaggctagaccgtaaacatgggtcaattgaatatttataaacaggatacttaaaggttcttgggatattgaacaatgaaagaaattgtactatttgaaaattctatt

SEQ ID NO: 420046 - DNA, 120 bp, Artificial Sequence
  ENSG00000150403_55 (sequence is synthesized)
tcacatgaaaatgtaaaatttcagcatatcagaaagcatcgtgaacaaatttgaaagccaagcaaaactgggaaaaatatttggataaaaaaatcctaacactggtacataatacataat

SEQ ID NO: 420047 - DNA, 120 bp, Artificial Sequence
  ENSG00000150403_56 (sequence is synthesized)
aacttataaaaactgcatggagatattttaaagaaaaaattttgaaacccattttggttttctttataattccttcagttcagcccattcctgtaaccacgtgctcatccccacaggact

SEQ ID NO: 420048 - DNA, 120 bp, Artificial Sequence
  ENSG00000150403_57 (sequence is synthesized)
aggcagtgcccacccttggtgccctgcagtgcaccgcaaggacatggccgtggcctggagccgcgtccctgagttcctggtgggccgcgtgagtctccctgttcctccctgctgccttct

SEQ ID NO: 420049 - DNA, 77 bp, Artificial Sequence
  ENSG00000150403_58 (sequence is synthesized)
cgtcatgggttgaccgagggaggtgattggatcatgggggcagatgtcccccaggctgttctcatgatagtgagttc

SEQ ID NO: 420050 - DNA, 120 bp, Artificial Sequence
  ENSG00000150403_59 (sequence is synthesized)
gttctcatgatagtgagttctcacaaggtctgacggttttaaaagtggcagtttgttctcgcgctctcgcttctccatcctgctgccttgtgaataaggatgtgtctgcttccccttctg

SEQ ID NO: 420051 - DNA, 120 bp, Artificial Sequence
  ENSG00000150403_60 (sequence is synthesized)
ctccatcctgctgccttgtgaataaggatgtgtctgcttccccttctgccgtgattgtgtttcctgaggtctccccagccatggagaactgcaagtcaattaaacctgtttcctttataa

SEQ ID NO: 420052 - DNA, 120 bp, Artificial Sequence
  ENSG00000150403_61 (sequence is synthesized)
acagacaaacatgcctgagtccccgagtctgtgatgctcctcattcttcagcacggcctgtgcccgggacggggcgctcctccagtgcagagctcacaccatgactgtggtgtccttcaa

SEQ ID NO: 420053 - DNA, 120 bp, Artificial Sequence
  ENSG00000150403_62 (sequence is synthesized)
ataacactgctgctgccagcttcccagggactcttctcctgtgtgattccagtgccttgcctatgtccctgctaatcttctggagtttaggggtccgtgcgaagcccaccccacctgagt

SEQ ID NO: 420054 - DNA, 120 bp, Artificial Sequence
  ENSG00000150403_63 (sequence is synthesized)
cctttcatcctgggtgccttcacctccgtccaggactccggggttgcagccacacatgctcatgtcaccgtgaggcccagccctccagggcctgagatgtacagatgctatccccctggg

SEQ ID NO: 420055 - DNA, 120 bp, Artificial Sequence
  ENSG00000150403_64 (sequence is synthesized)
cacccagtgtttccccttcctccctgtctgccttttgctcaatctctcagcgccctcaggaagccctttcacagctcagcagggaaacctctgggctcctccccctccagcaagtcacct

SEQ ID NO: 420056 - DNA, 120 bp, Artificial Sequence
  ENSG00000150403_65 (sequence is synthesized)
ggaagctctcaggctggccatggaaagctgaacccactgccaggggactggacagagaggctggtctcattttccaatcccttccagaaggaaggaggatgcttctcctgagagcagcga

SEQ ID NO: 420057 - DNA, 120 bp, Artificial Sequence
  ENSG00000150403_66 (sequence is synthesized)
caggtttgtgtcctgtgacctctgccttccctcgcccgggggagggtgatggggcgtctttttggctttggtttaagtagcaaaagagatggagtgttcaaaggattgaggggtcggccg

SEQ ID NO: 420058 - DNA, 120 bp, Artificial Sequence
  ENSG00000150403_67 (sequence is synthesized)
agggtggggcttctcagtgaggggcgggtcctctgggcgtcatgagggcctggggagaggaccctgacccactgccagggagctgtgccagaggttcccatgggacatggaaggggaacc

SEQ ID NO: 420059 - DNA, 120 bp, Artificial Sequence
  ENSG00000150403_68 (sequence is synthesized)
gacatccgtttctgcactggggtgtggacacctggccccacaccacctaggttcccccacaggggcctgaagactggaggttctctccagaatgttctggtttgattctgagagcaggag

SEQ ID NO: 420060 - DNA, 120 bp, Artificial Sequence
  ENSG00000150403_69 (sequence is synthesized)
agacacccataaaaatgattggggttaaatttctggccaggtagatgggaactcacagccaaaatttaattaaggagaataaacaattgtgccacgccatgcatccaagtccggcagggc

SEQ ID NO: 420061 - DNA, 120 bp, Artificial Sequence
  ENSG00000150403_70 (sequence is synthesized)
aaatccacacccgctactcactgagcttcccctgggccggaatgctccccctacatttgcaagaacaaagcctccttcctgtagaaaagaaaacaaaagtaaaataaaaaagaacaaagc

SEQ ID NO: 420062 - DNA, 120 bp, Artificial Sequence
  ENSG00000150403_71 (sequence is synthesized)
gggacacagctgtccagctcagctgagagcacaggagcctccggggcatcagcgactggccggggtgagggatgccaccaggtgcagaggtggaggctcagggcgtgctggggaggaaga

SEQ ID NO: 420063 - DNA, 120 bp, Artificial Sequence
  ENSG00000150403_72 (sequence is synthesized)
atggcaatattttgactttggatacttttgagttgtcgtagacctgtcttcaatgcctttccccccacaggcgacattgactacagcaccgtgctcctcggcatgctggtgacgcaggac

SEQ ID NO: 420064 - DNA, 120 bp, Artificial Sequence
  ENSG00000150403_73 (sequence is synthesized)
tttaataatggttaaaatatttgaaacatttactagtattttttattttatacacactttcttatactacccatcaaaatataatacagggagctaaacccgtttaactggtttgactca

SEQ ID NO: 420065 - DNA, 120 bp, Artificial Sequence
  ENSG00000150403_74 (sequence is synthesized)
tactcttaagcactttgctaaaatagtgtttgtgagtatttcattaaaaacaaatccgtgggccgggtatagtggctcacacctgtagtcctagcatgtggggaagctgaggcaggagaa

SEQ ID NO: 420066 - DNA, 120 bp, Artificial Sequence
  ENSG00000150403_75 (sequence is synthesized)
tcacttgagctcagaagtttgggagcagccaggacaacagagtgagaacccctctgctacaaaaaatagaaaaaccagctggggcgtggtcgcgctcatgtatagaccagctgctggaga

SEQ ID NO: 420067 - DNA, 120 bp, Artificial Sequence
  ENSG00000150403_76 (sequence is synthesized)
cgtggtcgcgctcatgtatagaccagctgctggagagactgagctgggaggatggcttgagcccaggaggccaaggctgcagggagctgtggtcgcaccactgcactctagcctgggtga

SEQ ID NO: 420068 - DNA, 120 bp, Artificial Sequence
  ENSG00000150403_77 (sequence is synthesized)
ccagcctgggcgacagagcaagaccccatatcaaaacaaacaaaactgtgatgataaaaagcgccataaacactaatatcaaaccatgctactctgtcttaaattttcaaatagctttgc

SEQ ID NO: 420069 - DNA, 120 bp, Artificial Sequence
  ENSG00000150403_78 (sequence is synthesized)
ttgcacctgaaatacaaaattaagtttggaaaaacagtttttaactgtgttgctcacaagctaattaactgtataagttctgccatgtgaaaggttaaaaaataaagttcattttggaaa

SEQ ID NO: 420070 - DNA, 120 bp, Artificial Sequence
  ENSG00000150403_79 (sequence is synthesized)
agcatttgctgttgctttcacacgtgcacttgggaggatttaggattttaattcctgtattgaagcaagtgacacactgaagttgtgagaaatagtgtgcgctgggggaggctgtcctgc

SEQ ID NO: 420071 - DNA, 120 bp, Artificial Sequence
  ENSG00000150433_0 (sequence is synthesized)
tagagcctgggggagagtggatccaggtgaagggggcagaggactgggagttttcatcctcttgaataagaactcgacaacagagtgggaactttctgtcttgtgatccattgcctggtg

SEQ ID NO: 420072 - DNA, 120 bp, Artificial Sequence
  ENSG00000150433_1 (sequence is synthesized)
agtcacagctcacaccatggatttaacctgagagcttcaacttctgctttggccctggagttcccatgccctggtgtcttctaccagttcttaggctttctgtatttgtctgaatgcttt

SEQ ID NO: 420073 - DNA, 120 bp, Artificial Sequence
  ENSG00000150433_2 (sequence is synthesized)
cacgggagtgtgttgcactggagcacagaggacactcgatcgtgcggcgcgcagggcggggggccgccgctgcctccccgcgggatggctggcactgtgctcggagtcggtgcgggcgtg

SEQ ID NO: 420074 - DNA, 120 bp, Artificial Sequence
  ENSG00000150433_3 (sequence is synthesized)
ttcatcttagccctgctctgggtggcagtgctgctgctgtgtgtgctgctgtccagagcctccggggcggcgaggttctctgtcatttttttattcttcggtgctgtgatcatcacatca

SEQ ID NO: 420075 - DNA, 120 bp, Artificial Sequence
  ENSG00000150433_4 (sequence is synthesized)
cattggccgctatgtcctgctggctttccttagtgccatcttccttggaggcctcttcttggttttaatccattatgttctggagccgatctatgccaaaccactgcactcctactgacc

SEQ ID NO: 420076 - DNA, 120 bp, Artificial Sequence
  ENSG00000150433_5 (sequence is synthesized)
actcttcaggaaaacgaaaacctgttctctccttcattgtgatgacattgatgagcaggaaggcactattcagagccttgttttgacagccctcatgccttaaggttagaggagtatctg

SEQ ID NO: 420077 - DNA, 120 bp, Artificial Sequence
  ENSG00000150433_6 (sequence is synthesized)
tccatcactaagacaaatctctggagtcctggcttccagaaacaggattgccaaattgtccctgtggggctagattcttaccagcttaagaaggatattgctatcttcttagtacccgta

SEQ ID NO: 420078 - DNA, 120 bp, Artificial Sequence
  ENSG00000150433_7 (sequence is synthesized)
ccttaggatttccaactgttttgaaagggaaatagtaacagtgatctgcttagagtggattttcactcaagtccttagtaagtggattttggggaaaaaagcacctgggcttctggttct

SEQ ID NO: 420079 - DNA, 120 bp, Artificial Sequence
  ENSG00000150433_8 (sequence is synthesized)
cccgtgggctggaacgcgccggaatctgagggcttgagtcagtgtgaaaatcgggggatgggtgagatatctccctccagcagcagcacttaggccacattaccctctgaggaatccaca

SEQ ID NO: 420080 - DNA, 120 bp, Artificial Sequence
  ENSG00000150433_9 (sequence is synthesized)
gaagttggccgttgaaagagcaacgctgattagtgaatcttaaatcacctaaatgaaagcccacttgtgattcgccctaagtaaaccagagccccgtgggctggaacgcgccggaatctg

SEQ ID NO: 420081 - DNA, 120 bp, Artificial Sequence
  ENSG00000150433_10 (sequence is synthesized)
acttactcagatgttggtcattgaccactctgtgcatatatttctgcagagctctgtgaaggcaatgagtgtcacttccctctgctctaataaagcaataaataatagctaaagggctga

SEQ ID NO: 420082 - DNA, 120 bp, Artificial Sequence
  ENSG00000150433_11 (sequence is synthesized)
ctttcacttcgaactcttggccacggctttttaatcaagttctttaggtttccttgggattagaggaaaggtatggaaatattgttttttgttttttgtcttgccatgtatctgtaggtt

SEQ ID NO: 420083 - DNA, 120 bp, Artificial Sequence
  ENSG00000150433_12 (sequence is synthesized)
tttttcttccatgatgtggtgggctgtgtgtgccttatttaattaccatgagtccattttggggtgtcttcacttttcatctttgtagccctttctccaaagctagtgaggaaggtatat

SEQ ID NO: 420084 - DNA, 120 bp, Artificial Sequence
  ENSG00000150433_13 (sequence is synthesized)
tctcaacatcagatataactctatacctgtctgatctcccagaccaaatgaaatttgcattaaatggaggggccctggtcaggttccactttggaagtctgatcctgactccctagagcc

SEQ ID NO: 420085 - DNA, 120 bp, Artificial Sequence
  ENSG00000150433_14 (sequence is synthesized)
atttgaaaaagaatcttctggcttaaaattaagaaccaagaaaacaagttggaaagagatcactgatggagtatgtgctctatgccaatagcacactaattcctttgaggtttaatttat

SEQ ID NO: 420086 - DNA, 120 bp, Artificial Sequence
  ENSG00000150433_15 (sequence is synthesized)
ctgtccagagcctccggggcggcgaggaattgggaattaccaagaataaatgggaatgcacccagctggtacctgtctaggaagaaggactttgggatgaagaggttctctgtcattttt

SEQ ID NO: 420087 - DNA, 120 bp, Artificial Sequence
  ENSG00000150433_16 (sequence is synthesized)
gaggtgtgagtagagcctgggggagagtggatccaggtgaagggggcagaggttacctgtgcagggatcagtccatttattcctattttctctgacagctggatgaaagggactgggagt

SEQ ID NO: 420088 - DNA, 120 bp, Artificial Sequence
  ENSG00000150433_17 (sequence is synthesized)
acaccctctcagtccccaccaaagagaaaggctttgggttctaaatttccagtttccattaagggactctgggactggacatttctgaaaattaatgacctgtactgagtaatcctccta

SEQ ID NO: 420089 - DNA, 120 bp, Artificial Sequence
  ENSG00000150433_18 (sequence is synthesized)
attgctagttctttgccatcgtgggcttgagaccttatctgccctgaagagaatcaccctgaaggtctgtatcaggcaccaggaccctcgtagacttttaggctcagctcaggccttgag

SEQ ID NO: 420090 - DNA, 120 bp, Artificial Sequence
  ENSG00000150433_19 (sequence is synthesized)
ttacatttttttatagcacttaatgatttttctttattgctttcgagctctgctgtgtactaaattcttcttgttctattttattgaacatttatgtgtttgctgttgtatgaggcactt

SEQ ID NO: 420091 - DNA, 120 bp, Artificial Sequence
  ENSG00000150433_20 (sequence is synthesized)
cccttgttaacttccatccagcatattgaccagaggttacagtcatctttctaaaactccatatgatcctttcactccctcacctgatgtttgtggacttgttagcactgtgtcatttat

SEQ ID NO: 420092 - DNA, 120 bp, Artificial Sequence
  ENSG00000150433_21 (sequence is synthesized)
tcctcccacagatacttgttgtgcataatctctgtgctaagaactggggttaccacagtgagaaagatatcaggtctctgccttcgtggagtttactattctagttggacagacagaaaa

SEQ ID NO: 420093 - DNA, 120 bp, Artificial Sequence
  ENSG00000150433_22 (sequence is synthesized)
taaacttgtaaacaaataaatgaaaatattaactagttttgtgaaaaatgctctgaaggaaatagagtgatggagagtcagtgtttgaggggttactttagagaagacactcggggaaga

SEQ ID NO: 420094 - DNA, 120 bp, Artificial Sequence
  ENSG00000150433_23 (sequence is synthesized)
cctcactgaagagtgacatttaagcagaaatcagaaggctgaggaaagccagtcctacaaatagtagcaggagtgcttggggttgagggctagttccaggcagtggaaacagcaagtaca

SEQ ID NO: 420095 - DNA, 120 bp, Artificial Sequence
  ENSG00000150433_24 (sequence is synthesized)
aagacccagagatggggaaaccccgggcgtgttagagtgaccgagatggcgcccatgtggccctaatgagggcagactgctccccagagaagttaggcatgcaggtgggccccaggtccc

SEQ ID NO: 420096 - DNA, 120 bp, Artificial Sequence
  ENSG00000150433_25 (sequence is synthesized)
atctcccctcactctgtcatcttttcactctgattctttcctaaatgtgcctgtgcagagtatttcctttgtaaagcccctctcactattgcagttcccactgcacttcgcttttaccat

SEQ ID NO: 420097 - DNA, 120 bp, Artificial Sequence
  ENSG00000150433_26 (sequence is synthesized)
taatcagaatgtaatatggacacttgttttcaggacaatgttctccaatagaccttgagcttctgtcagaagatatcttattcacctttggcatccccagcttgtagcgcagtgctttac

SEQ ID NO: 420098 - DNA, 120 bp, Artificial Sequence
  ENSG00000150433_27 (sequence is synthesized)
atggtgggaacatcataaatgttgattcaataaacgtattttttttaccagttcatgcttagaccctcctttccaataactttataacttctcatagctaatattttcgtggtatttaaa

SEQ ID NO: 420099 - DNA, 120 bp, Artificial Sequence
  ENSG00000150433_28 (sequence is synthesized)
ccataagggtaaagaaaaccagcaacctagaggaatgtgtttgcttaagacttgtctccaatgctgaaaaggaaaaccaggagaggtagtgtggtgtgctgttcctctgctgtgagttga

SEQ ID NO: 420100 - DNA, 120 bp, Artificial Sequence
  ENSG00000150433_29 (sequence is synthesized)
atggtggtccccaaaaatatatgtccgcatcctcacccctggaatctgtgaccatgaccttgtttgacaaaagggtctttgcagatttaattaagttaagcatctcaagataatactaga

SEQ ID NO: 420101 - DNA, 120 bp, Artificial Sequence
  ENSG00000150433_30 (sequence is synthesized)
ttatttgtacagaccctaaatccaatgacaagtaccgttataagagacagaaaatgtgaagacagacacaggagaatgccatgggaagatggaggcagagactggagttgtgagttaaaa

SEQ ID NO: 420102 - DNA, 120 bp, Artificial Sequence
  ENSG00000150433_31 (sequence is synthesized)
gccagtgaatggtgcctggagctaccagaagatggaagaggcagggaaagattctcccctagagcactgatccccaatctttttggtaccagggactggtttcatggaagacagtttttc

SEQ ID NO: 420103 - DNA, 120 bp, Artificial Sequence
  ENSG00000150433_32 (sequence is synthesized)
cacagggggatgcaggggggtggtttccggatgaaactgttccacctcagatcttcaggcattagattctcataaggagcctgcaacctagatgcttcgcacgtgcagtccacactaggg

SEQ ID NO: 420104 - DNA, 120 bp, Artificial Sequence
  ENSG00000150433_33 (sequence is synthesized)
ttcgtgctcctgtgagaacctaatgccgctgccactgataggacaggaggcgaagctcaggtggtaaggctggcttgcctgctgctcacctcctcctgtgcggcccagttcctaaaaggc

SEQ ID NO: 420105 - DNA, 120 bp, Artificial Sequence
  ENSG00000150433_34 (sequence is synthesized)
catggaccagtaccagtccatggcccaggggttggggacccctgccctagagcctttggagggagcacagccctgctgacacctttattttggattgctggcctgtgagaaaataaattt

SEQ ID NO: 420106 - DNA, 120 bp, Artificial Sequence
  ENSG00000150433_35 (sequence is synthesized)
ctattttgagctgctaattaggaaactaatagataccccatcgcgcttatatctcacttacccatcctgtaacatggctatagtaatacctttctcagaagcttcgctccgggattcaat

SEQ ID NO: 420107 - DNA, 120 bp, Artificial Sequence
  ENSG00000150433_36 (sequence is synthesized)
tcttctaccagttcttaggtagggttttatattcagagagggttcagctttctcccgtgggctgggggaagaggtcaaagtagaactcaggtaccaaatttgaaaggaaacactcagaaa

SEQ ID NO: 420108 - DNA, 120 bp, Artificial Sequence
  ENSG00000150433_37 (sequence is synthesized)
aatttaagagatcagttttgtaattactggcagtttgaatgagttgcattttaacctctttttataaacactaactgtgttatttatgctctggagcagagatgggaggagaaggaagta

SEQ ID NO: 420109 - DNA, 120 bp, Artificial Sequence
  ENSG00000150433_38 (sequence is synthesized)
gtgttcttgagttctaactgtggcaagaaactctgctttcactgcttattgagtttcttgaggctgtatgtgtatgtgtttatgaattgttcagatttatggcagaggcttggtccagta

SEQ ID NO: 420110 - DNA, 120 bp, Artificial Sequence
  ENSG00000150433_39 (sequence is synthesized)
cccgaggctctagccctggacccaggaaaacgaaagcaacatttgatgagttgggcctgctttctatatcaggcattgccttcagaacagggttaggccataaaccgactctgaaaacac

SEQ ID NO: 420111 - DNA, 120 bp, Artificial Sequence
  ENSG00000150433_40 (sequence is synthesized)
tagagttgcactctggcaagacagtgttagtatgaagcagagagttgtagaattttctaaagtattctgttctaaaaacaacagaagtggaggtggagaggggatgctttggtttttctt

SEQ ID NO: 420112 - DNA, 120 bp, Artificial Sequence
  ENSG00000150433_41 (sequence is synthesized)
gattatgactttgggcagaagtaaaaataaaaactacacatttccattcttaggaattgggaattaccaagaataaatgggaatgcacccagctggtacctgtctaggaagaaggacttt

SEQ ID NO: 420113 - DNA, 120 bp, Artificial Sequence
  ENSG00000150433_42 (sequence is synthesized)
gggatgaagaggttgttgacagcaggcctctggacattgttaagggactgaaacatagaatattggctccaaggaagagactgtccagacctaactgatcaaagaagaaattatagacag

SEQ ID NO: 420114 - DNA, 120 bp, Artificial Sequence
  ENSG00000150455_0 (sequence is synthesized)
gcgctgctcttccccgcggagcccgcgcagtccgcgcagccctcatcgcaactgggcccgcgcgcaggccttacataggaagtccttctaaagagctgcctgccagctgcccttccccag

SEQ ID NO: 420115 - DNA, 120 bp, Artificial Sequence
  ENSG00000150455_1 (sequence is synthesized)
atcccgaatatcctcctggccaggtggagcagagaacagttcctcagctggtcatgctgagctcataccctgatggctgctccatgaggtcaagactgggtctcctccctcctccccctt

SEQ ID NO: 420116 - DNA, 120 bp, Artificial Sequence
  ENSG00000150455_2 (sequence is synthesized)
caccaatgcctggtctcacggggctagttttgacccccacgctatggcatcatcgacctccctcccagctcctggctctcggcctaagaagcctctaggcaagatggctgactggttcag

SEQ ID NO: 420117 - DNA, 120 bp, Artificial Sequence
  ENSG00000150455_3 (sequence is synthesized)
gcagaccctgctgaagaagcccaagaagaggcccaactccccagaaagcacctccagcgatgcttcacagcctacctcacaggacagcccactacccccaagcctcagctcagtcacgtc

SEQ ID NO: 420118 - DNA, 120 bp, Artificial Sequence
  ENSG00000150455_4 (sequence is synthesized)
tcccagcctgccacccacacatgcgagtgacagtggcagtagtcgctggagcaaagactatgacgtctgcgtgtgccacagtgaggaagacctggtggccgcccaggacctggtctccta

SEQ ID NO: 420119 - DNA, 120 bp, Artificial Sequence
  ENSG00000150455_5 (sequence is synthesized)
cttggaaggcagcactgccagcctgcgctgcttcctgcaactccgggatgcaaccccaggcggcgctatagtgtccgagctgtgccaggcactgagcagtagtcactgccgggtgctgct

SEQ ID NO: 420120 - DNA, 120 bp, Artificial Sequence
  ENSG00000150455_6 (sequence is synthesized)
catcacgccgggcttccttcaggacccctggtgcaagtaccagatgctgcaggccctgaccgaggctccaggggccgagggctgcaccatccccctgctgtcgggcctcagcagagctgc

SEQ ID NO: 420121 - DNA, 120 bp, Artificial Sequence
  ENSG00000150455_7 (sequence is synthesized)
ctacccacctgagctccgattcatgtactacgtcgatggcaggggccctgatggtggctttcgtcaagtcaaagaagctgtcatgcgttatctgcagacactcagttgacacttgttata

SEQ ID NO: 420122 - DNA, 120 bp, Artificial Sequence
  ENSG00000150455_8 (sequence is synthesized)
tcatgggaccccggaaattggagtgaagctagaaacagaaaacccatgcagggcctcggattcccacaaatgtgacaagaggtatagggagtgagtcacagcgctttgctcgtgaccctg

SEQ ID NO: 420123 - DNA, 120 bp, Artificial Sequence
  ENSG00000150455_9 (sequence is synthesized)
gctccctaagaagaccatggagagcttggggactcccccaggaaggccgtgaagctggggattccccctaggaaagccatgaggaagctggggactccccaagaaggccatgaggaagcc

SEQ ID NO: 420124 - DNA, 120 bp, Artificial Sequence
  ENSG00000150455_10 (sequence is synthesized)
agaaattggaggtggtaggaagtggtactgatcaatgatggccagcaggactcatctcctgcctaactggacaggaagcctggcacccacttctgtcttcccctggaactgggcactggc

SEQ ID NO: 420125 - DNA, 120 bp, Artificial Sequence
  ENSG00000150455_11 (sequence is synthesized)
gtacactggtatccctcctaaagaagtgactcacctgactgatcagcaagaagcctagattgcaggcctcaccatggatggtcttcctagttgcctggggaaaccctggaatgggcatca

SEQ ID NO: 420126 - DNA, 120 bp, Artificial Sequence
  ENSG00000150455_12 (sequence is synthesized)
ggagaaagcaacaagaatccagtccttcacactcacactactctgttcctcttcccagagacatcgattcacttcaaagagctgtagggaagatgcagtcagcactgcactgtatttttt

SEQ ID NO: 420127 - DNA, 120 bp, Artificial Sequence
  ENSG00000150455_13 (sequence is synthesized)
atttattgcctaggtgccattaaagacacaaacctagaagcctagaggccattctgaatatgggggtggggtggtggagggagcaagtgaagagatgggaatccagggctcagggttcaa

SEQ ID NO: 420128 - DNA, 120 bp, Artificial Sequence
  ENSG00000150455_14 (sequence is synthesized)
tgccttcacctgagatcacaagcccatggatgctgtgacatctgggagcttcatcagtggtctggctaaagctgatactttcacagtcaccatcttcacctttggactgggaagaatcac

SEQ ID NO: 420129 - DNA, 120 bp, Artificial Sequence
  ENSG00000150455_15 (sequence is synthesized)
catttttcttctggcagatgactgtattccttataggacaggcaaggtttcattcatctgttctcagtaagtttgttgttgaactgaaatgaatttcattatttcctccaatgtgtactt

SEQ ID NO: 420130 - DNA, 120 bp, Artificial Sequence
  ENSG00000150455_16 (sequence is synthesized)
ttgtgcccccctctcacttctccctatcatgacccctcttttgctgaaaaaaatttttattattttttctatctctagttctagaaagagaaaatttattttttaaattataaactattt

SEQ ID NO: 420131 - DNA, 120 bp, Artificial Sequence
  ENSG00000150455_17 (sequence is synthesized)
ccgcgcagccctcatcgcaactgggcccgcgcgcagatccaccaaagagaaagcagccctgtgccagttgctctgccagcctttcacaggagaagtgtcactagaatactacagccccca

SEQ ID NO: 420132 - DNA, 120 bp, Artificial Sequence
  ENSG00000150455_18 (sequence is synthesized)
caggctctgctccacagaaacttaaggctgaaagagtgtccgccatcagggacatcctctgtcactacggccttacataggaagtccttctaaagagctgcctgccagctgcccttcccc

SEQ ID NO: 420133 - DNA, 120 bp, Artificial Sequence
  ENSG00000150455_19 (sequence is synthesized)
gagacagccctgtagcctagtagttcaaagcgcagcttctggaaaaggctgtcggggtttgtatcctggctcctgcacttattaacccataaaaagtaacttggccaagttactcacccg

SEQ ID NO: 420134 - DNA, 63 bp, Artificial Sequence
  ENSG00000150455_20 (sequence is synthesized)
gtagctgggactacaggtgcgtgtcaccacacccagataattttttgtatttttagtagcgat

SEQ ID NO: 420135 - DNA, 120 bp, Artificial Sequence
  ENSG00000150455_21 (sequence is synthesized)
atgagccactgcacccagcctttttttaattattatttgaagaatttaagattggaattaattgctccttgaatgtttggtagactcatctgtaataccatttgagcctagaatattctg

SEQ ID NO: 420136 - DNA, 120 bp, Artificial Sequence
  ENSG00000150455_22 (sequence is synthesized)
accatttgagcctagaatattctggtttttttgagacggagtcttgccctattgcccaggccggagtgcagtgggattacacgcgtgagccaccatgcctggccagaatattctttattg

SEQ ID NO: 420137 - DNA, 120 bp, Artificial Sequence
  ENSG00000150455_23 (sequence is synthesized)
taaaatttaaagctgtaatttcaatgtcttgaagagttatagatctaattagattttccatttctcctggagtcaatttggtacaaacagtcaataaagactacaagaccagtttaagta

SEQ ID NO: 420138 - DNA, 120 bp, Artificial Sequence
  ENSG00000150455_24 (sequence is synthesized)
gcttccggagagcggggcctgcgcgctgctcttccccgcggagcccgcgcagtccgcgcagccctcatcgcaactgggcccgcgcgcaggatggctgctccatgaggtcaagactgggtc

SEQ ID NO: 420139 - DNA, 120 bp, Artificial Sequence
  ENSG00000150455_25 (sequence is synthesized)
tatctgtccttatcaaaggctggggaagctgttttcatctccttatggagtcccatactccaaacacagacctgagcagtgtttctcccccacagactggttcaggcagaccctgctgaa

SEQ ID NO: 420140 - DNA, 120 bp, Artificial Sequence
  ENSG00000150455_26 (sequence is synthesized)
gaagcccaagaagaggcccggctccctgacatacctgacactgcattatctcagttaactttcagcaactaagacaggtccacaagtccacagtcaaagccgtgtccctgactccagagt

SEQ ID NO: 420141 - DNA, 120 bp, Artificial Sequence
  ENSG00000150455_27 (sequence is synthesized)
agcccgcgcagtccgcgcagccctcatcgcaactgggcccgcgcgcagttccacagctccagctacaaaagaactgaaaaggaacagggaaggtgcatggcgtcttggattccaggaagt

SEQ ID NO: 420142 - DNA, 120 bp, Artificial Sequence
  ENSG00000150456_0 (sequence is synthesized)
gagtggcgggttcgggcgcagctgtagggttggctgcgcgccgccgaggcgttttggactgggttataaacaacttgtgaaatgagtgatttggaagatgatgagacaccccagctttct

SEQ ID NO: 420143 - DNA, 120 bp, Artificial Sequence
  ENSG00000150456_1 (sequence is synthesized)
gcccatgccttagcagctctccaggaattttatgctgagcaaaagcaacaaattgagccaggcgaggatgataaatataacattggaataatagaagagaattggcaactgagccagttt

SEQ ID NO: 420144 - DNA, 120 bp, Artificial Sequence
  ENSG00000150456_2 (sequence is synthesized)
tggtatagtcaggaaactgctctgcagctggcacaggaggcaattgcagctgtaggagaaggtggcagaatcgcatgtgtgagtgcccctagtgtttaccagaaactcagagagctgtgc

SEQ ID NO: 420145 - DNA, 120 bp, Artificial Sequence
  ENSG00000150456_3 (sequence is synthesized)
caaaagatttgccatgtatggagaggagtttattttctatgattacaataatccattggacttacccgaaagaattgctgcacatagttttgacatcgtaatagcagatcctccctatct

SEQ ID NO: 420146 - DNA, 120 bp, Artificial Sequence
  ENSG00000150456_4 (sequence is synthesized)
ttcggaggaatgtctcagaaaaacatcggaaaccgtcaagtacctgacgcggggcaagattctgctgtgcacaggtgccatcatggaagaacaggcagcagaactccttggagtgaagat

SEQ ID NO: 420147 - DNA, 120 bp, Artificial Sequence
  ENSG00000150456_5 (sequence is synthesized)
gtgcacgtttgttccaagacacacccggaacttggcaaatgagtttcgctgttatgtgaattatgattctgggctggactgtgggatctgattacagacggtgacataacacaggaagga

SEQ ID NO: 420148 - DNA, 120 bp, Artificial Sequence
  ENSG00000150456_6 (sequence is synthesized)
accctgtcacattcctctttttgtattttcgtagtagatttaaaagttataatctcttcccctccccccaaactggagctgtccctggcctggttttcaaaataaagtgtgcgatcttca

SEQ ID NO: 420149 - DNA, 120 bp, Artificial Sequence
  ENSG00000150456_7 (sequence is synthesized)
cttagaatctgcctgatcttctctcctcatttaacatgtgtaaaaacagaagaacagttgtgtggcttgcccaagggctcctgaatgagacaggaccttggcctctgcctcgggccagag

SEQ ID NO: 420150 - DNA, 120 bp, Artificial Sequence
  ENSG00000150456_8 (sequence is synthesized)
tagaagagaattgggtaagtaaatgcatttcacagccatcaggaagtattgatgtggaacctactctgtgcattagtccagtgtttgtctgtctcacctaaaaccggaatctctgtcacc

SEQ ID NO: 420151 - DNA, 120 bp, Artificial Sequence
  ENSG00000150456_9 (sequence is synthesized)
tgtcatttgggatctgaacttctctatggggagctaagacagaaagcagtcagtgaacattttagaacagtgtaacagcttttcttgaacagctgttcttgattctgactatcaggctgg

SEQ ID NO: 420152 - DNA, 120 bp, Artificial Sequence
  ENSG00000150457_0 (sequence is synthesized)
gacgcccgtggaatgccaacaatgtagcgaatgtcccacttgggtctgcgctttggaaccgcggcgtgagcgccccgggaagatggagcagtcgccgtccacgccaccgccgccgcccgg

SEQ ID NO: 420153 - DNA, 120 bp, Artificial Sequence
  ENSG00000150457_1 (sequence is synthesized)
cgtccctgcggggccagcagcagctccagccaccagtgcccggtctcccggcgcgagaggcccgggagccgccggccaggacgcccccgagggtgtagaccgcgcccctggagagagtga

SEQ ID NO: 420154 - DNA, 120 bp, Artificial Sequence
  ENSG00000150457_2 (sequence is synthesized)
gagagtgataatcttcaaaatgaagactttggaaaattttaggttctctataggaactacaaaaatggaaggaaagaacattttcaaaaggaaattattttgaaagtatgtttacaacaa

SEQ ID NO: 420155 - DNA, 120 bp, Artificial Sequence
  ENSG00000150457_3 (sequence is synthesized)
actgatactattgacagtttttttttttaaataataaaacactttaagaagattgtatttatggtaaaaggaaactggactaacaatgaggccaaagacttttcctgccacgacttattc

SEQ ID NO: 420156 - DNA, 120 bp, Artificial Sequence
  ENSG00000150457_4 (sequence is synthesized)
tggaaatagccggcagcgactgcaagagattcgtgaggggttaaaacagccatccaagtcttcggttcaggggctacccgcaggaccaaacagtgacacttccctggatgccaaagtcct

SEQ ID NO: 420157 - DNA, 120 bp, Artificial Sequence
  ENSG00000150457_5 (sequence is synthesized)
ggggagcaaagatgccaccaggcagcagcagcagatgagagccaccccaaagttcggaccttatcagaaagccttgagggaaatcagatattccttgttgccttttgctaatgaatcggg

SEQ ID NO: 420158 - DNA, 120 bp, Artificial Sequence
  ENSG00000150457_6 (sequence is synthesized)
cacctctgcagctgcagaagtgaaccggcaaatgctgcaggaactggtgaacgcaggatgcgaccaggagatggctggccgagctctcaagcagactggcagcaggagcatcgaggccgc

SEQ ID NO: 420159 - DNA, 120 bp, Artificial Sequence
  ENSG00000150457_7 (sequence is synthesized)
cctggagtacatcagcaagatgggctacctggacccgaggaatgagcagattgtgcgggtcattaagcagacctccccaggaaaggggctcatgccaaccccagtgacgcggaggcccag

SEQ ID NO: 420160 - DNA, 120 bp, Artificial Sequence
  ENSG00000150457_8 (sequence is synthesized)
cttcgaaggaaccggcgattcgtttgcgtcctaccaccagctgagcggtaccccctacgagggcccaagcttcggcgctgacggccccacggcgctggaggagatgccgcggccgtacgt

SEQ ID NO: 420161 - DNA, 120 bp, Artificial Sequence
  ENSG00000150457_9 (sequence is synthesized)
ggactaccttttccccggagtcggcccccacgggcccggccaccagcaccagcacccacccaagggctacggtgccagcgtagaggcagcaggggcacacttcccgctgcagggcgcgca

SEQ ID NO: 420162 - DNA, 120 bp, Artificial Sequence
  ENSG00000150457_10 (sequence is synthesized)
ctacgggcggccgcacctgctggtgcctggggaacccctgggctacggagtgcagcgcagcccctccttccagagcaagacgccgccggagaccgggggttacgccagcctgcccacgaa

SEQ ID NO: 420163 - DNA, 120 bp, Artificial Sequence
  ENSG00000150457_11 (sequence is synthesized)
gggccagggaggaccgccaggcgccggcctcgctttcccaccccctgccgccgggctctacgtgccgcacccacaccacaagcaggccggtcccgcggcccaccagctgcatgtgctggg

SEQ ID NO: 420164 - DNA, 120 bp, Artificial Sequence
  ENSG00000150457_12 (sequence is synthesized)
ctcccgcagccaggtgttcgccagcgacagccccccgcagagcctgctcactccctcgcggaacagcctcaacgtggacctgtatgaattgggcagcacctccgtccagcagtggccggc

SEQ ID NO: 420165 - DNA, 120 bp, Artificial Sequence
  ENSG00000150457_13 (sequence is synthesized)
tgccaccctggcccgccgggactccctgcagaagccgggcctggaggcgccgccgcgcgcgcacgtggccttccggcctgactgcccagtgcccagcaggaccaactccttcaacagcca

SEQ ID NO: 420166 - DNA, 120 bp, Artificial Sequence
  ENSG00000150457_14 (sequence is synthesized)
ccagccgcggcccggtccgcctggcaaggccgagccctccctgcccgcccccaacaccgtgacggctgtcacggccgcgcacatcttgcacccggtgaagagcgtgcgtgtgctgaggcc

SEQ ID NO: 420167 - DNA, 80 bp, Artificial Sequence
  ENSG00000150457_15 (sequence is synthesized)
agcgtgcgtgtgctgaggccggagccgcagacggctgtggggccctcgcaccccgcctgggtgcccgcgcctgccccggc

SEQ ID NO: 420168 - DNA, 120 bp, Artificial Sequence
  ENSG00000150457_16 (sequence is synthesized)
ggcgctgggcggcgcaggcgccttcccgctggacgtggagtacggaggcccagaccggaggtgcccgcctccgccctacccgaagcacctgctgctgcgcagcaagtcggagcagtacga

SEQ ID NO: 420169 - DNA, 120 bp, Artificial Sequence
  ENSG00000150457_17 (sequence is synthesized)
cctggacagcctgtgcgcaggcatggagcagagcctccgtgcgggccccaacgagcccgagggcggcgacaagagccgcaaaagcgccaagggggacaaaggcggaaaggataaaaagca

SEQ ID NO: 420170 - DNA, 120 bp, Artificial Sequence
  ENSG00000150457_18 (sequence is synthesized)
gattcagacctctcccgttcccgtccgcaaaaacagcagagacgaagagaagagagagtcacgcatcaagagctactcgccatacgcctttaagttcttcatggagcagcacgtggagaa

SEQ ID NO: 420171 - DNA, 120 bp, Artificial Sequence
  ENSG00000150457_19 (sequence is synthesized)
tgtcatcaaaacctaccagcagaaggttaaccggaggctgcagctggagcaagaaatggccaaagctggactctgtgaagctgagcaggagcagatgcggaagatcctctaccagaaaga

SEQ ID NO: 420172 - DNA, 120 bp, Artificial Sequence
  ENSG00000150457_20 (sequence is synthesized)
gtctaattacaacaggttaaagagggccaagatggacaagtctatgtttgtcaagatcaaaaccctggggatcggtgcctttggagaagtgtgccttgcttgtaaggtggacactcacgc

SEQ ID NO: 420173 - DNA, 120 bp, Artificial Sequence
  ENSG00000150457_21 (sequence is synthesized)
cctgtacgccatgaagaccctaaggaaaaaggatgtcctgaaccggaatcaggtggcccacgtcaaggccgagagggacatcctggccgaggcagacaatgagtgggtggtcaaactcta

SEQ ID NO: 420174 - DNA, 120 bp, Artificial Sequence
  ENSG00000150457_22 (sequence is synthesized)
ctactccttccaagacaaagacagcctgtactttgtgatggactacatccctggtggggacatgatgagcctgctgatccggatggaggtcttccctgagcacctggcccggttctacat

SEQ ID NO: 420175 - DNA, 120 bp, Artificial Sequence
  ENSG00000150457_23 (sequence is synthesized)
gtgtccacaagatgggcttcatccaccgagacatcaagcctgataacattttgatagatctggatggtcacattaaactcacagatttcggcctctgcactgggttcaggtggactcaca

SEQ ID NO: 420176 - DNA, 120 bp, Artificial Sequence
  ENSG00000150457_24 (sequence is synthesized)
attccaaatattaccagaaagggagccatgtcagacaggacagcatggagcccagcgacctctgggatgatgtgtctaactgtcggtgtggggacaggctgaagaccctagagcagaggg

SEQ ID NO: 420177 - DNA, 120 bp, Artificial Sequence
  ENSG00000150457_25 (sequence is synthesized)
cgcggaagcagcaccagaggtgcctggcacattcactggtggggactccaaactacatcgcacccgaggtgctcctccgcaaagggtacactcaactctgtgactggtggagtgttggag

SEQ ID NO: 420178 - DNA, 120 bp, Artificial Sequence
  ENSG00000150457_26 (sequence is synthesized)
tgattctcttcgagatgctggtggggcagccgccctttttggcacctactcccacagaaacccagctgaaggtgatcaactgggagaacacgctccacattccagcccaggtgaagctga

SEQ ID NO: 420179 - DNA, 120 bp, Artificial Sequence
  ENSG00000150457_27 (sequence is synthesized)
gccctgaggccagggacctcatcaccaagctgtgctgctccgcagaccaccgcctggggcggaatggggccgatgacctgaaggcccaccccttcttcagcgccattgacttctccagtg

SEQ ID NO: 420180 - DNA, 120 bp, Artificial Sequence
  ENSG00000150457_28 (sequence is synthesized)
acatccggaagcagccagccccctacgttcccaccatcagccaccccatggacacctcgaatttcgaccccgtagatgaagaaagcccttggaacgatgccagcgaaggtagcaccaagg

SEQ ID NO: 420181 - DNA, 120 bp, Artificial Sequence
  ENSG00000150457_29 (sequence is synthesized)
cctgggacacactcacctcgcccaataacaagcatcctgagcacgcattttacgaattcaccttccgaaggttctttgatgacaatggctacccctttcgatgcccaaagccttcaggag

SEQ ID NO: 420182 - DNA, 120 bp, Artificial Sequence
  ENSG00000150457_30 (sequence is synthesized)
cagaagcttcacaggctgagagctcagatttagaaagctctgatctggtggatcagactgaaggctgccagcctgtgtacgtgtagatgggggccaggcacccccaccactcgctgcctc

SEQ ID NO: 420183 - DNA, 120 bp, Artificial Sequence
  ENSG00000150457_31 (sequence is synthesized)
ccaggtcagggtcccggagccggtgccctcacaggccaatagggaagccgagggctgttttgttttaaattagtccgtcgattacttcacttgaaattctgctcttcaccaagaaaaccc

SEQ ID NO: 420184 - DNA, 120 bp, Artificial Sequence
  ENSG00000150457_32 (sequence is synthesized)
aaacaggacacttttgaaaacaggactcagcatcgctttcaataggcttttcaggaccttcactgcattaaaacaatatttttgaaaatttagtacagtttagaaagagcacttattttg

SEQ ID NO: 420185 - DNA, 120 bp, Artificial Sequence
  ENSG00000150457_33 (sequence is synthesized)
tttatatccattttttcttactaaattatagggattaactttgacaaatcatgctgctgttattttctacatttgtattttatccatagcacttattcacatttaggaaaagacataaaa

SEQ ID NO: 420186 - DNA, 120 bp, Artificial Sequence
  ENSG00000150457_34 (sequence is synthesized)
actgaagaacattgatgagaaatctctgtgcaataatgtaaaaaaaaaaaaagataacactctgctcaatgtcacggagaccattttatccacacaatggtttttgttttttattttttc

SEQ ID NO: 420187 - DNA, 120 bp, Artificial Sequence
  ENSG00000150457_35 (sequence is synthesized)
ccatgtttcaaaattgtgatataatgatataatgttaaaagctgctttttttggctttttgcatatctagtataataggaagtgtgagcaaggtgatgatgtggctgtgatttccgacgt

SEQ ID NO: 420188 - DNA, 120 bp, Artificial Sequence
  ENSG00000150457_36 (sequence is synthesized)
ctggtgtgtggagagtactgcatgagcagagttcttctattataaaattaccatatcttgccattcacagcaggtcctgtgaatacgtttttactgagtgtctttaaatgaggtgttcta

SEQ ID NO: 420189 - DNA, 120 bp, Artificial Sequence
  ENSG00000150457_37 (sequence is synthesized)
gacagtgtgctgataatgtattgtgcgggtgacctcttcgctatgattgtatctcttactgttttgttaaagaaatgcagatgtgtaactgagaagtgatttgtgtgtgtgtcttggttg

SEQ ID NO: 420190 - DNA, 120 bp, Artificial Sequence
  ENSG00000150457_38 (sequence is synthesized)
tgattggattctttggggggggggaactgaaacatttgtcatatactgaacttatatacatcaaaagggattaatacagcgatgccaaaaagtttaatcacggacacatgtccgtttctg

SEQ ID NO: 420191 - DNA, 120 bp, Artificial Sequence
  ENSG00000150457_39 (sequence is synthesized)
tagtccgtatgctctttcattcttggtagagctggtatgtggaatgccatacctctgaccctactacttacctttttactgacagactgcccacactgaaagcttcagtgaatgttctta

SEQ ID NO: 420192 - DNA, 120 bp, Artificial Sequence
  ENSG00000150457_40 (sequence is synthesized)
gtcctgttttcttctgttactgtcaggaaactgagtgatctaatggttctctcactttttttttgttcttttagtgtactttgaagtatcaaatcttaacttggtttaaacaatacatat

SEQ ID NO: 420193 - DNA, 120 bp, Artificial Sequence
  ENSG00000150457_41 (sequence is synthesized)
tcctaacctttgtaaaaaagcaaagattcttcaaaatgacattgaaataaaaagtaagccatacgtattttcttagaagtatagatgtatgtgcgtgtatacacacacacacacacacac

SEQ ID NO: 420194 - DNA, 120 bp, Artificial Sequence
  ENSG00000150457_42 (sequence is synthesized)
agagataaacacaatattccttatttcaaattagtatgattcctatttaaagtgatttatatttgagtaaaaagttcaattcttttttgctttttaaaaaatctgatgcttcataatttt

SEQ ID NO: 420195 - DNA, 120 bp, Artificial Sequence
  ENSG00000150457_43 (sequence is synthesized)
cattatattattccacatatttttccttgaagttcttagcataatgtatccattacttagtatatatctaggcaacaacacttagaagtttatcagtgtttaaactaaaaaaataaagat

SEQ ID NO: 420196 - DNA, 120 bp, Artificial Sequence
  ENSG00000150457_44 (sequence is synthesized)
tcctgtgtactggtttacatttgtgtgagtggcatactcaagtctgctgtgcctgtcgtcgtgactgtcagtattctcgctattttatagtcgtgccatgttgttactcacagcgctctg

SEQ ID NO: 420197 - DNA, 120 bp, Artificial Sequence
  ENSG00000150457_45 (sequence is synthesized)
acatactttcatgtggtaggttctttctcaggaactcagtttaactattatttattgatatatcattacctttgaaaagcttctactggcacaatttattattaaaattttgaatccaaa

SEQ ID NO: 420198 - DNA, 120 bp, Artificial Sequence
  ENSG00000150457_46 (sequence is synthesized)
atgccgggagcgatctttggaaaggagtccccggctcgagcgacactgcccccctggggctctgcaggagatggctggccgagctctcaagcagactggcagcaggagcatcgaggccgc

SEQ ID NO: 420199 - DNA, 120 bp, Artificial Sequence
  ENSG00000150459_0 (sequence is synthesized)
taaagtgtcgagcttctcctcgcgagagacttagtgctcatgctcgctgcaggggtcggaggtcagggcgagcgtctcgcaggccgtaggaggaagatggcggtggagtcgcgcgttacc

SEQ ID NO: 420200 - DNA, 120 bp, Artificial Sequence
  ENSG00000150459_1 (sequence is synthesized)
caggaggaaattaagaaggagccagagaaaccgatcgaccgcgagaagacatgcccactgttgctacgggtcttcaccaccaataacggccgccaccaccgaatggacgagttctcccgg

SEQ ID NO: 420201 - DNA, 120 bp, Artificial Sequence
  ENSG00000150459_2 (sequence is synthesized)
ggaaatgtaccgtccagcgagttgcagatctacacttggatggatgcaaccttgaaagaactgacaagcttagtaaaagaagtctacccagaagctagaaagaagggcactcacttcaat

SEQ ID NO: 420202 - DNA, 120 bp, Artificial Sequence
  ENSG00000150459_3 (sequence is synthesized)
tttgcaatcgtttttacagatgttaaaagacctggctatcgagttaaggagattggcagcaccatgtctggcagaaaggggactgatgattccatgaccctgcagtcgcagaagttccag

SEQ ID NO: 420203 - DNA, 120 bp, Artificial Sequence
  ENSG00000150459_4 (sequence is synthesized)
ataggagattacttggacatagcaattacccctccaaatcgggcaccacctccttcagggcgcatgagaccatattaaattctatttactatttgttgaatttatttttccgtcagttat

SEQ ID NO: 420204 - DNA, 120 bp, Artificial Sequence
  ENSG00000150459_5 (sequence is synthesized)
gtaaaataaacatactcttcttcctcccctgattattgccattaagcctttaaattctaaacaaattataatgcatcatctatttaggagttagatttggatgtgctattgtatgattac

SEQ ID NO: 420205 - DNA, 120 bp, Artificial Sequence
  ENSG00000150459_6 (sequence is synthesized)
gaatagtctgtatgtttcaagcccttctgtaaaatatgaagaaaagtgctcttagcattctgtgtaaaactgtactgttaaatatatgtgtgtaatcagcctgagtgtgaaagttaatgg

SEQ ID NO: 420206 - DNA, 120 bp, Artificial Sequence
  ENSG00000150459_7 (sequence is synthesized)
aggcctgggaacagggtttatactaagtagtggaggagcgtatggttaagcccaaaggggcagaacaagaaagccacgggattgtatgaaatcaaacatgagtttgtggtgtagactgct

SEQ ID NO: 420207 - DNA, 120 bp, Artificial Sequence
  ENSG00000150459_8 (sequence is synthesized)
gtatgcagttggaaaggacacgtgagagtgagctcaagtggcagcagaggcagtttggaataagctgcggcaagttgaagaagctgtgttggacgagattgccccgccttgatcagggta

SEQ ID NO: 420208 - DNA, 120 bp, Artificial Sequence
  ENSG00000150459_9 (sequence is synthesized)
aagaacaggcaacacaatgagcacttaagtttttaacatgtggggaatagggcattttaaaggctggaaccagttcagaggaaacaagggtttgggtagaggtagaaaggtttaattaac

SEQ ID NO: 420209 - DNA, 120 bp, Artificial Sequence
  ENSG00000150459_10 (sequence is synthesized)
cctggagatctgcaaatggagggaggggtgaaggaggaatcttaagaccgagggagaagagccaaggacaaggtcaggttgaatgagtaggaggtgttcacacatcctcttgtgtgctag

SEQ ID NO: 420210 - DNA, 120 bp, Artificial Sequence
  ENSG00000150459_11 (sequence is synthesized)
gtagtggcgtgcatctgatctgagaggcagtaaagcagtgatgaagacagtgcagcagaacattgaagtcctgattgcagcagtgactctgcaaccttggataaattatttcaatcttta

SEQ ID NO: 420211 - DNA, 120 bp, Artificial Sequence
  ENSG00000150459_12 (sequence is synthesized)
ttttgtaaaacggagataacggcctataggattgttaagactgaatattttaaaagagcttagaatggtgcctgacaaatgagaaacaataaatactgattattggccataaagtggtat

SEQ ID NO: 420212 - DNA, 120 bp, Artificial Sequence
  ENSG00000150459_13 (sequence is synthesized)
taaaactggatctcttttcttccatggcactactctcattttgaagtttatgaacagtacgacagtgtattgtaaattccctttagtttgttacagtagccaattgaaaatgtatatccc

SEQ ID NO: 420213 - DNA, 120 bp, Artificial Sequence
  ENSG00000150459_14 (sequence is synthesized)
aaaatttaaaaaaaaaagtaccagcagcaataaaattgcactagttttatctggtacatacaaaaacagccatttaaaatctgatgattctgtggaattggtgtccctgttagcaatggc

SEQ ID NO: 420214 - DNA, 120 bp, Artificial Sequence
  ENSG00000150459_15 (sequence is synthesized)
agagaccagcctggagcctagatctggtgcttcttctgtgctgtggtttaccccaaacctttaggttgtttattcattcagattagatagactggagccataaagttaatttgcacctag

SEQ ID NO: 420215 - DNA, 120 bp, Artificial Sequence
  ENSG00000150459_16 (sequence is synthesized)
ctttttggagaatagccatgattaactgctattcgtggtgggggtgggggggaaccctatgatttactatgcagatgaagagggtaggaactaaataaaggactttgtaagccaaagtgg

SEQ ID NO: 420216 - DNA, 120 bp, Artificial Sequence
  ENSG00000150459_17 (sequence is synthesized)
ttgggctgctttgtcaaattccaccctttgcttggttccaacatggaatttctcctttaaagatttcaatatcccatcaaaagtacagttagagaatacctagtgaatttattgaatata

SEQ ID NO: 420217 - DNA, 120 bp, Artificial Sequence
  ENSG00000150459_18 (sequence is synthesized)
atgctaagaatcaaaagacttgtactagtttacctctggctttggtaagtgtggctttgagtaataactgagctgtttccccgcatataaaatagaaataaataagtagtcatcatgaca

SEQ ID NO: 420218 - DNA, 120 bp, Artificial Sequence
  ENSG00000150459_19 (sequence is synthesized)
gtttttggtctcggggaggctcggaggccgcaacgcctcgggaagagagatgagctccgggttcgcagctggtgtttttaacttctgcccttccgttttctctctccctcagacatgccc

SEQ ID NO: 420219 - DNA, 120 bp, Artificial Sequence
  ENSG00000150459_20 (sequence is synthesized)
ttttgcatatttggatttatttggactagttacccttaggtaaatcactaggccataaggtgttgtgtagcaacagaagatagcatatagaatctctgaagtcccttttagcactaagag

SEQ ID NO: 420220 - DNA, 120 bp, Artificial Sequence
  ENSG00000150459_21 (sequence is synthesized)
tctaattaattgaaatttccagcagtaaggctggtacatggagtttttggaggcaaatagtatttttagctgctttaaaattaatctctagtataagaccctggcagtttctaatgtaaa

SEQ ID NO: 420221 - DNA, 120 bp, Artificial Sequence
  ENSG00000150459_22 (sequence is synthesized)
cctttgccagtgtagagttattctccctgatttcaatttcatttctccacttggggccttcggactcagctttcaggaagttagaagtttttgttgttaggtgaaaggagatttgcccgt

SEQ ID NO: 420222 - DNA, 120 bp, Artificial Sequence
  ENSG00000150459_23 (sequence is synthesized)
ctaggtacaaaagtgataggtagataaatatgttgtagtatctgccctaaagggactcatagtcaaataaattgcactaggacaacatggtaagggagagtgatgctgtcgagtggtatt

SEQ ID NO: 420223 - DNA, 120 bp, Artificial Sequence
  ENSG00000150459_24 (sequence is synthesized)
tgttattctcaaagagcatttccacataatattaagccttaggtaccaaagcaccaaaagtgaaaaataaactaccaaaacccgagttatttcttctctaagggttattggaaaagcttt

SEQ ID NO: 420224 - DNA, 120 bp, Artificial Sequence
  ENSG00000150459_25 (sequence is synthesized)
tgatatgtgtttagtgaagatggttcctgaatgtttatctcttgggtgtacctccctacaaactactgtgggcttgtctttagcgctgcacataactccttggattgacaccataatggc

SEQ ID NO: 420225 - DNA, 120 bp, Artificial Sequence
  ENSG00000150471_0 (sequence is synthesized)
atgtggccatcgcagctactaattttcatgatgctcttagctccaataattcatggtggcaagcacagtgaacgacatcctgcccttgctgctccattgcgacacgctgagcgcagccca

SEQ ID NO: 420226 - DNA, 120 bp, Artificial Sequence
  ENSG00000150471_1 (sequence is synthesized)
ggaggcgctcttccacccagacatctgcttcagcagccagctgcagagcgcaccgctgctcatcgtggacaagggccccgtggagctaccagaggagttcgcggtccaggtgcccaagga

SEQ ID NO: 420227 - DNA, 120 bp, Artificial Sequence
  ENSG00000150471_2 (sequence is synthesized)
gcacagattgcagcgcaagctttcagccgtgccccaattccaatggctgtggtccgcagagagctatcctgtgagagctatcctatagagcttcgctgtccaggaacagacgtcatcatg

SEQ ID NO: 420228 - DNA, 120 bp, Artificial Sequence
  ENSG00000150471_3 (sequence is synthesized)
atagaaagtgccaactatggcaggactgatgacaaaatttgtgactctgaccctgctcagatggagaatatccgatgttatctgccagatgcctataagattatgtctcaaagatgcaat

SEQ ID NO: 420229 - DNA, 120 bp, Artificial Sequence
  ENSG00000150471_4 (sequence is synthesized)
aacagaacccagtgtgcagtggtggcaggtcctgatgtttttccagacccgtgtccaggaacctataaataccttgaagtgcagtatgaatgtgtcccttacaaagtggaacaaaaagtt

SEQ ID NO: 420230 - DNA, 120 bp, Artificial Sequence
  ENSG00000150471_5 (sequence is synthesized)
tttctttgtcctggactactaaaaggagtataccagagtgaacatttgtttgagtccgaccaccaatctggggcgtggtgcaaagaccctctgcaggcatctgacaagatttattatatg

SEQ ID NO: 420231 - DNA, 120 bp, Artificial Sequence
  ENSG00000150471_6 (sequence is synthesized)
ccctggactccctacagaactgataccctgactgagtattcatccaaggatgacttcattgctggaagaccaactacaacctacaagctccctcacagggtggatggcacaggatttgta

SEQ ID NO: 420232 - DNA, 120 bp, Artificial Sequence
  ENSG00000150471_7 (sequence is synthesized)
gtgtatgatggagctttgttcttcaacaaagagcgcaccaggaacatagtaaagtttgatttgcggactaggataaagagtggagaggctatcatagcaaatgccaattaccatgatacc

SEQ ID NO: 420233 - DNA, 120 bp, Artificial Sequence
  ENSG00000150471_8 (sequence is synthesized)
tccccttaccgatggggaggcaaatctgacatagacctggcagtagatgagaatgggctatgggtaatctatgcaacagaacaaaacaatggtaaaattgtcattagtcaattgaaccct

SEQ ID NO: 420234 - DNA, 120 bp, Artificial Sequence
  ENSG00000150471_9 (sequence is synthesized)
tacaccctacggatcgaaggaacatgggatactgcatatgataaaaggtcagcttccaatgcctttatgatttgtggaattctgtatgtggtcaaatctgtatatgaggatgatgacaat

SEQ ID NO: 420235 - DNA, 120 bp, Artificial Sequence
  ENSG00000150471_10 (sequence is synthesized)
gaggctactggaaataagattgactacatttacaacactgaccaaagcaaggatagtttggtggatgtaccctttcctaattcataccagtacattgcagctgtggattacaaccccagg

SEQ ID NO: 420236 - DNA, 120 bp, Artificial Sequence
  ENSG00000150471_11 (sequence is synthesized)
gacaacctactttatgtatggaataactatcacgtcgtgaaatattctttggattttggacctctggatagtagatcagggcaggcacatcatggacaagtttcatacatttctccgcca

SEQ ID NO: 420237 - DNA, 120 bp, Artificial Sequence
  ENSG00000150471_12 (sequence is synthesized)
attcaccttgactctgagctagaaagaccctctgttaaagatatctctaccacaggacctcttggcatgggaagcactaccaccagtaccacccttcggaccacaactttgagcccagga

SEQ ID NO: 420238 - DNA, 120 bp, Artificial Sequence
  ENSG00000150471_13 (sequence is synthesized)
aggagtaccaccccgtcagtgtcaggaagaagaaaccggagtactagtaccccatctccagctgtcgaggtacttgatgacatgaccacacaccttccatcagcatcgtcccaaatccca

SEQ ID NO: 420239 - DNA, 120 bp, Artificial Sequence
  ENSG00000150471_14 (sequence is synthesized)
gctctcgaagagagctgtgaggctgtggaagcccgagaaatcatgtggtttaagactcgtcaaggacagatagcaaagcagccatgccctgcaggaactataggtgtatcaacttatcta

SEQ ID NO: 420240 - DNA, 120 bp, Artificial Sequence
  ENSG00000150471_15 (sequence is synthesized)
tgccttgctcctgatggaatttgggatccccaaggtccagatctcagcaactgttcttctccttgggtcaatcatataacacagaagttgaaatctggtgaaacagctgccaacattgct

SEQ ID NO: 420241 - DNA, 120 bp, Artificial Sequence
  ENSG00000150471_16 (sequence is synthesized)
agagagctggctgaacagacaagaaatcacttgaatgctggggacatcacctactctgtccgggccatggaccagctggtaggcctcctagatgtacagcttcggaacttgaccccaggt

SEQ ID NO: 420242 - DNA, 120 bp, Artificial Sequence
  ENSG00000150471_17 (sequence is synthesized)
ggaaaagatagtgctgcccggagtttgaacaagcttcagaaaagagagcgctcttgcagagcctatgtccaggcaatggtcgagacagttaacaacctccttcagccacaagctttgaat

SEQ ID NO: 420243 - DNA, 120 bp, Artificial Sequence
  ENSG00000150471_18 (sequence is synthesized)
gcatggagagacctgactacgagtgatcagctgcgtgcggccaccatgttgcttcatactgtggaggaaagtgcttttgtgctggctgataaccttttgaagactgacattgtcagggag

SEQ ID NO: 420244 - DNA, 120 bp, Artificial Sequence
  ENSG00000150471_19 (sequence is synthesized)
aatacagacaatattaaattggaagttgcaagactgagcacagaaggaaacttagaagacctaaaatttccagaaaacatgggccatggaagcactatccagctgtctgcaaatacctta

SEQ ID NO: 420245 - DNA, 120 bp, Artificial Sequence
  ENSG00000150471_20 (sequence is synthesized)
ctgtataacaacttgggtccttatttatccacggagaatgccagtatgaagttgggaacggaagctttgtccacaaatcattctgttattgtcaattcccctgttattacggcagcaata

SEQ ID NO: 420246 - DNA, 120 bp, Artificial Sequence
  ENSG00000150471_21 (sequence is synthesized)
aacaaagagttcagtaacaaggtttatttggctgatcctgtggtatttactgttaaacatatcaagcagtcagaggaaaatttcaaccctaactgttcattttggagctactccaagcgt

SEQ ID NO: 420247 - DNA, 120 bp, Artificial Sequence
  ENSG00000150471_22 (sequence is synthesized)
acaatgacaggttattggtcaacacaaggctgtcggctcctgacaacaaataagacacatactacatgctcttgtaaccacctaacaaattttgcagtactgatggcacatgtggaagtt

SEQ ID NO: 420248 - DNA, 120 bp, Artificial Sequence
  ENSG00000150471_23 (sequence is synthesized)
aagcacagtgatgcggtccatgacctccttctggatgtgatcacgtgggttggaattttgctgtcccttgtttgtctcctgatttgcatcttcacattttgctttttccgggggctccag

SEQ ID NO: 420249 - DNA, 120 bp, Artificial Sequence
  ENSG00000150471_24 (sequence is synthesized)
agtgaccgtaacaccatccacaagaacctctgcatcagtctctttgtagcagagctgctcttcctgattgggatcaaccgaactgaccaaccaattgcctgtgctgttttcgctgccctg

SEQ ID NO: 420250 - DNA, 120 bp, Artificial Sequence
  ENSG00000150471_25 (sequence is synthesized)
ttacatttcttcttcttggctgccttcacctggatgttcctggagggggtgcagctttatatcatgctggtggaggtttttgagagtgaacattcacgtaggaaatacttttatctggtc

SEQ ID NO: 420251 - DNA, 120 bp, Artificial Sequence
  ENSG00000150471_26 (sequence is synthesized)
ggctatgggatgcctgcactcattgtggctgtgtcagctgcagtagactacaggagttatggaacagataaagtatgttggctccgacttgacacctacttcatttggagttttatagga

SEQ ID NO: 420252 - DNA, 120 bp, Artificial Sequence
  ENSG00000150471_27 (sequence is synthesized)
ccagcaactttgataattatgcttaatgtaatcttccttgggattgctttatataaaatgtttcatcatactgctatactgaaacctgaatcaggctgtcttgataacatcaactatgag

SEQ ID NO: 420253 - DNA, 120 bp, Artificial Sequence
  ENSG00000150471_28 (sequence is synthesized)
gataacagacccttcatcaagtcatgggttataggtgcaatagctcttctctgcctattaggattgacctgggcctttggactcatgtatattaatgaaagcacagtcatcatggcctat

SEQ ID NO: 420254 - DNA, 120 bp, Artificial Sequence
  ENSG00000150471_29 (sequence is synthesized)
ctcttcaccattttcaattctctacagggaatgtttatatttattttccattgtgtcctacagaagaaggtacgaaaagagtatgggaaatgcctgcgaacacattgctgtagtggcaaa

SEQ ID NO: 420255 - DNA, 120 bp, Artificial Sequence
  ENSG00000150471_30 (sequence is synthesized)
agtacagagagttccattggttcagggaaaacatctggttctcgaactcctggacgctactccacaggctcacagagccgaatccgtagaatgtggaatgacacggttcgaaagcagtca

SEQ ID NO: 420256 - DNA, 120 bp, Artificial Sequence
  ENSG00000150471_31 (sequence is synthesized)
gagtcttcctttattactggagacataaacagttcagcgtcactcaacagaggagccatggctaatcatcttataagcaatgctctgcttcgtccgcatggtactaacaatccctataat

SEQ ID NO: 420257 - DNA, 120 bp, Artificial Sequence
  ENSG00000150471_32 (sequence is synthesized)
acattgcttggggaaccggcggtctgtaacaacccttctgtcagcatgtacaacgcacaagaggggcttctgaacaatgccagggatacaagtgtcatggatactctaccactgaatggt

SEQ ID NO: 420258 - DNA, 120 bp, Artificial Sequence
  ENSG00000150471_33 (sequence is synthesized)
aaccatggcaatagttacagcattgccagcggcgaatacctgagcaactgtgtgcaaatcatagaccgtggctataaccataacgagaccgccctagagaaaaagattctgaaggaactc

SEQ ID NO: 420259 - DNA, 120 bp, Artificial Sequence
  ENSG00000150471_34 (sequence is synthesized)
acttccaactatatcccttcttacctgaacaaccatgagcgctccagtgaacagaacaggaatctgatgaacaagctggtgaataaccttggcagtggaagggaagatgatgccattgtc

SEQ ID NO: 420260 - DNA, 120 bp, Artificial Sequence
  ENSG00000150471_35 (sequence is synthesized)
ctggatgatgccacctcgtttaaccacgaggagagtttgggcctggaactcattcatgaggaatctgatgctcctttgctgcccccaagagtatactccaccgagaaccaccagccacac

SEQ ID NO: 420261 - DNA, 120 bp, Artificial Sequence
  ENSG00000150471_36 (sequence is synthesized)
cattataccagaaggcggatcccccaagaccacagtgagagctttttccctttgctaaccaacgagcacacagaagatctccagtcaccccatagagactctctctataccagcatgccg

SEQ ID NO: 420262 - DNA, 120 bp, Artificial Sequence
  ENSG00000150471_37 (sequence is synthesized)
acactggctggtgtggccgccacagagagtgttaccaccagcacccagaccgaacccccaccggccaaatgtggtgatgccgaagatgtttactacaaaagcatgccaaacctaggctcc

SEQ ID NO: 420263 - DNA, 120 bp, Artificial Sequence
  ENSG00000150471_38 (sequence is synthesized)
agaaaccacgtccatcagctgcatacttactaccagctaggtcgcggcagcagtgatggatttatagttcctccaaacaaagatgggacccctcccgagggaagttcaaaaggaccggct

SEQ ID NO: 420264 - DNA, 120 bp, Artificial Sequence
  ENSG00000150471_39 (sequence is synthesized)
catttggtcactagtctatagaagatgacacagaaattggaaccaacaaaactgctaacaccttgttgactgttctgagttgatataagcagtggtaataatgtgtgtactcctaaatct

SEQ ID NO: 420265 - DNA, 120 bp, Artificial Sequence
  ENSG00000150471_40 (sequence is synthesized)
ttatgctgtcctctaaagacaaacacaaactctcagacttttttttttttaatgggatttttaggtcagcccaggggagaaagataactgctaaaattcccctgtaccccatcctttctt

SEQ ID NO: 420266 - DNA, 120 bp, Artificial Sequence
  ENSG00000150471_41 (sequence is synthesized)
gtcttttgccccgggctcaatggctggattgtggaaactgcacccgccttcaggttgttgagcaactgatgggacgatctcagggaccggcgtttacgaaagaaatgtttaatttggtaa

SEQ ID NO: 420267 - DNA, 120 bp, Artificial Sequence
  ENSG00000150471_42 (sequence is synthesized)
attggaggaaaaaaacatggatttttagcaattgaagagcaaattaagccacagtggaaacagcaatccttcaatggccaccccttgctctttcacaaactagtgtgtgggcctggaatg

SEQ ID NO: 420268 - DNA, 120 bp, Artificial Sequence
  ENSG00000150471_43 (sequence is synthesized)
gcttctctgaaggtttcagcgcctccagcagaagtgaactgctcccacctttctttcttcagcagtctgtcaggaactctcaaaatgtgcacaatagtatctgcagtacttcatctttct

SEQ ID NO: 420269 - DNA, 120 bp, Artificial Sequence
  ENSG00000150471_44 (sequence is synthesized)
cactagtttttaatatgtccacagcaaacatatctaagtttgtttggattaatttttgtaaaaaggatgattgcctgagcatgttttgtatattgatttatttcaccaacattaagtacc

SEQ ID NO: 420270 - DNA, 120 bp, Artificial Sequence
  ENSG00000150471_45 (sequence is synthesized)
gtttcagatttgggatattggtgtttctgttttggagaaattattctttttctttttaatttgaagaaaaatcatcagtcttggaatacagaagagaaactagaaatatacgtattttgt

SEQ ID NO: 420271 - DNA, 120 bp, Artificial Sequence
  ENSG00000150471_46 (sequence is synthesized)
aaattaaatgaaaaaattggctaatattaatttttgagaatcatagaccctccctgccatcagaagaattagatattgcctaccctctcctacggcatttacttgtgattatttctgtat

SEQ ID NO: 420272 - DNA, 120 bp, Artificial Sequence
  ENSG00000150471_47 (sequence is synthesized)
atgaatacgtgttctaacacacttttcttaattaatgcaagaatataaaacatttagaaaaaggttgggggagtgttataccaattctccaggtccaagcagataagaggtgaaaatgag

SEQ ID NO: 420273 - DNA, 120 bp, Artificial Sequence
  ENSG00000150471_48 (sequence is synthesized)
caatacaattttatatgtaatgtatagcagttgatacattttgaatttgatagaattgtatctaagcttcatctgctgtcaacattttgagaattagaaatatattcatccagaaggagt

SEQ ID NO: 420274 - DNA, 120 bp, Artificial Sequence
  ENSG00000150471_49 (sequence is synthesized)
tgtcagcatgtacaacgcacaagagccctacagagagacaagtatgggagtaaagctaaacattgcatatcaaataggggcttctgaacaatgccagggatacaagtgtcatggatactc

SEQ ID NO: 420275 - DNA, 120 bp, Artificial Sequence
  ENSG00000150471_50 (sequence is synthesized)
atgctgtgttactaaaattacaaggacctgctttttaaaaggccagaacaattgtctgaaattagtaacaatgctgcatctagattggagtgctgcacaaacaaacataagagcaaagca

SEQ ID NO: 420276 - DNA, 120 bp, Artificial Sequence
  ENSG00000150471_51 (sequence is synthesized)
aaactgtatcacatagggtttttggtcactcacaacctgaattcaccacagctggaatagctgtggaaaacaaaataaaacaacaaaattaataatgaaatggaggggaattctagaatt

SEQ ID NO: 420277 - DNA, 120 bp, Artificial Sequence
  ENSG00000150471_52 (sequence is synthesized)
atatgctaaatgcatattttatgatttgctgtattaactgatgataaaactaatggcagaaaaagaagttgagcaatttctatgtaatgtacagatactagcattgcacatatagtctgc

SEQ ID NO: 420278 - DNA, 120 bp, Artificial Sequence
  ENSG00000150471_53 (sequence is synthesized)
tttctgttcctccagaatttgagtcctgttaatgtagtagaaaaaaaaaaaagaaattttctttttcttttgtgctggtcttgcaagtttgtctaccagtaagagagcaaagtttccttc

SEQ ID NO: 420279 - DNA, 120 bp, Artificial Sequence
  ENSG00000150471_54 (sequence is synthesized)
ctttcttctctttcttcattttctttttttcttttttgccttttattcctttaaaatttcgcctggcaaaaaataaataaatggaactatcactttataagaatcattttctagtaatgc

SEQ ID NO: 420280 - DNA, 120 bp, Artificial Sequence
  ENSG00000150471_55 (sequence is synthesized)
aaacaaattattttttacaaaaaaacaaaataaataaaattagacttccttccctcactatatatctttatgcagtcagaatatttccaacagtgttttttgcaaattagagcaggacaa

SEQ ID NO: 420281 - DNA, 120 bp, Artificial Sequence
  ENSG00000150471_56 (sequence is synthesized)
acttttatgtttacagggcacgtctgttgtaatgcaaagcatatttggcaagcagttcatcaccaggacactagctatgattctagaagtcaaaaggtgtctatagaactagtggggctt

SEQ ID NO: 420282 - DNA, 120 bp, Artificial Sequence
  ENSG00000150471_57 (sequence is synthesized)
ctgcatgtgaaaaacggttttccataggcattaaagtgctgaatgctcagtctgatcaacaagtgggcacctgcactaccactttttagaggaaattcactccctcgtaagcattggaag

SEQ ID NO: 420283 - DNA, 120 bp, Artificial Sequence
  ENSG00000150471_58 (sequence is synthesized)
gtcaaattattttgaagtgatttttttaaaaaaaagtcttctgtttattaacaggaaaatttatttatttgacaggattttgagtaatgtaggaatacaaaaggtaaattagcagcacat

SEQ ID NO: 420284 - DNA, 120 bp, Artificial Sequence
  ENSG00000150471_59 (sequence is synthesized)
ataatttttttttaatttatgatccattttgtatggtctcaaagttggatgacctcattactaatatttgttgtaaaagtgaaacttgtttgccaaccaataaacaactgattgagattt

SEQ ID NO: 420285 - DNA, 120 bp, Artificial Sequence
  ENSG00000150471_60 (sequence is synthesized)
ttcttaagcggcggcggcagcagcagcagcaagagaaggagaagcagccccagctatgactgccgcatgttaatagctgccgctgggtccctcggctgctgctggagacagagcctgact

SEQ ID NO: 420286 - DNA, 120 bp, Artificial Sequence
  ENSG00000150471_61 (sequence is synthesized)
ccgaagttgtgcaactgtggactgggagagacatttgaaccctcttttcttttcgctccccttttgcccccttggggtgtgtgaagcgaggaacgtaaaggaaggcgaacatttggctct

SEQ ID NO: 420287 - DNA, 120 bp, Artificial Sequence
  ENSG00000150471_62 (sequence is synthesized)
ctttttccttcccctttctccgtggctgtgtagcggaagaaagggaagagagactttttgttgttgtttccttgactggggtctccaccctcctgctgctttctctgcgcttcgattctc

SEQ ID NO: 420288 - DNA, 120 bp, Artificial Sequence
  ENSG00000150471_63 (sequence is synthesized)
gtatgtactatatgattaatcagtctttttatttttctcgcctttctttctttctgttttcaatacataaactttgctaatcctctgtggcccaaatgagccatgcaaaagaaatcaatc

SEQ ID NO: 420289 - DNA, 120 bp, Artificial Sequence
  ENSG00000150471_64 (sequence is synthesized)
tgcctagatgaataagctaagcacaaaatcatacaggtttgcagacaaagtaaaccagaaaaatggaatgggcatgtttattttggatgaaatcagatgcataacttaatgttgagcagg

SEQ ID NO: 420290 - DNA, 120 bp, Artificial Sequence
  ENSG00000150471_65 (sequence is synthesized)
ttaacatatatgttactatttgcttatctataaaccagctgcagtcactatgcttacctttaaaaccagattcaatcagagatataaatatgaaatttgggggctgggtgagtcatattt

SEQ ID NO: 420291 - DNA, 120 bp, Artificial Sequence
  ENSG00000150471_66 (sequence is synthesized)
tttcctcctttgtacattgcattttgatgttagaaattcaaattccctcaatttgctaaaagctgcaaagagaatattcattttataaagatataataagacttttattgtgtttttttc

SEQ ID NO: 420292 - DNA, 120 bp, Artificial Sequence
  ENSG00000150471_67 (sequence is synthesized)
ttattctatatatgagggaaatcggaaaagataaagaagttctttcaaagaaactttctagatctctcattactgcagatcctttatagcagtgtccaagtacagatcccctgttagggc

SEQ ID NO: 420293 - DNA, 120 bp, Artificial Sequence
  ENSG00000150471_68 (sequence is synthesized)
aaagctaaaaggaacctgccaaattataatttctcctgtagtgtgttttatctcggggtttcctttttcaaaaatctaaacactatccatctataaatgactatcttaaatcaagtttag

SEQ ID NO: 420294 - DNA, 120 bp, Artificial Sequence
  ENSG00000150471_69 (sequence is synthesized)
agaatggccaataatctgtatatagtttataaatacatgacaaaaaaatttctgctgagccagagtgcatcataaccttcacatcacctcaaaatattttatgtctcattcttttttagt

SEQ ID NO: 420295 - DNA, 120 bp, Artificial Sequence
  ENSG00000150471_70 (sequence is synthesized)
gaattggcatgaatattttttaagtctacagattttatgttagaggagaatcacaagcgttaatgataattaggttttctcacaccacactatggcaatattagcacgtccaaggctttt

SEQ ID NO: 420296 - DNA, 120 bp, Artificial Sequence
  ENSG00000150471_71 (sequence is synthesized)
aacccacccgatacatagaatacatttggcaataaaagaatcctttttagatgtgtttatggtaacttcagaaacacaaatgtggtctgtggattatgagcacttatgcttgttttgtca

SEQ ID NO: 420297 - DNA, 120 bp, Artificial Sequence
  ENSG00000150471_72 (sequence is synthesized)
aacagtaacctacatgaaagcaactctatcagtaagaagctggtttcacagaaaaatggggaaactacctcaattcagcttgctgattttctgacattgctacctccctgcccattattt

SEQ ID NO: 420298 - DNA, 120 bp, Artificial Sequence
  ENSG00000150471_73 (sequence is synthesized)
ttgtgtttctatatggaaatttgaagcaggtagcttctcaagctctacatagaccaaactgaagaaagatcacttgaatacacaaactggtgcagaagaacattcagcatataaagttac

SEQ ID NO: 420299 - DNA, 120 bp, Artificial Sequence
  ENSG00000150471_74 (sequence is synthesized)
taccaagctcttgcatcaagaaaaaagagtgagatttttgaactctatacatcataaatggcatgctttcagagagacttaagatcccaaagattataacagagagaaatttcccctgca

SEQ ID NO: 420300 - DNA, 120 bp, Artificial Sequence
  ENSG00000150471_75 (sequence is synthesized)
agtattatgtaaccgtaattaaaaaaaatggataaaggagctaattttacatacatttcaatagaaatttgcatatatctaacatattcattttgtcctgtttacactagcaagggttga

SEQ ID NO: 420301 - DNA, 120 bp, Artificial Sequence
  ENSG00000150471_76 (sequence is synthesized)
attcctgaacttgaatctttttcttcatatacattttcttatagagctattgatgaattaattaatgattttttaattgttcttttttctaccaccttttgtgactcaattttttaagat

SEQ ID NO: 420302 - DNA, 120 bp, Artificial Sequence
  ENSG00000150471_77 (sequence is synthesized)
cctgagacatttatgacctgcttatctgtatatttttatgtgttcatctgaatttccagtaagaagtaaatttccgtcaaacagatgtagtataccgctataatacagcttatttagcca

SEQ ID NO: 420303 - DNA, 120 bp, Artificial Sequence
  ENSG00000150471_78 (sequence is synthesized)
gctagaagtaaaacttatgccaccgaaacaaacaaatgattactttcttgtcaaataatatttttgtcacatttttagacttggttgtttttcctctttgaaatctagttcacatgacac

SEQ ID NO: 420304 - DNA, 120 bp, Artificial Sequence
  ENSG00000150471_79 (sequence is synthesized)
tttatcagggacactagctaatggacctcatgtttagttaattctgaaactgatggattgttgcacagcctctgctcctaactgataaatatttgcggcaaagtccaaattttgtgaagg

SEQ ID NO: 420305 - DNA, 120 bp, Artificial Sequence
  ENSG00000150471_80 (sequence is synthesized)
agaaattggttggaattaaattttatgggcgtcccttcttgtttccactatattataattaaacacactgaagttgaataataaattactgtgctaaaataattgtaataacaaaaatga

SEQ ID NO: 420306 - DNA, 120 bp, Artificial Sequence
  ENSG00000150471_81 (sequence is synthesized)
actgacagaacaattatcttgaagtaacaataatcaggaaaatatctaacaaaaagcacgtaagggaaatatccttaacttcctgtaaaaaaaattcacattgactctaaattaagatgt

SEQ ID NO: 420307 - DNA, 120 bp, Artificial Sequence
  ENSG00000150471_82 (sequence is synthesized)
agtttatcatctgtattttaaaatatccatcataactaaaaatgttgacatattaaggaaaggatctttaagatctaggtttaagattcttattagtattaacttaattggtatgacaaa

SEQ ID NO: 420308 - DNA, 120 bp, Artificial Sequence
  ENSG00000150471_83 (sequence is synthesized)
acttttcataatagatataagcatataagggaattagtaacatttataaaggacccacatatttaattttaggcattgtcttcagcttccctggacccccaacacatgttgaaatgttat

SEQ ID NO: 420309 - DNA, 120 bp, Artificial Sequence
  ENSG00000150471_84 (sequence is synthesized)
tgactagcttgctttttttaaggaatgacattaaaaatttcgactgactttctacattactgtaaagatcaaaagggagaggaaaaatagtttacaagttttctaaagatcaactccaga

SEQ ID NO: 420310 - DNA, 120 bp, Artificial Sequence
  ENSG00000150471_85 (sequence is synthesized)
ctaatctatatcatcccctaataatgaaaaaacaattagtttttagaagttgtctatcagtactgtaccgaagtgctactgcttggatttttttgttgtggttttaaagagatggggtct

SEQ ID NO: 420311 - DNA, 120 bp, Artificial Sequence
  ENSG00000150471_86 (sequence is synthesized)
tgctctgtcacaaagactgaagggcagtggcacaatcccagctcactgcagcctcagactcttgggctcaagtgatcctgctgtctcagccttctgcgtagccatgatcacaggtttgag

SEQ ID NO: 420312 - DNA, 120 bp, Artificial Sequence
  ENSG00000150471_87 (sequence is synthesized)
ccacagcacttggcctgtgatgtattgcagagggaaaaaaaccaacactacagaagtataatgcatgtcaattcagatttagagagtgtaaaaaacaaaaacccaaagtccaactattta

SEQ ID NO: 420313 - DNA, 120 bp, Artificial Sequence
  ENSG00000150471_88 (sequence is synthesized)
gttttgagcaaatctgaagatattggcatgaatatcctttcttctctaagaaaatttttgagataacaatatatatgaagttcccagtacattgtagaccaaggtgttaaaatttaatta

SEQ ID NO: 420314 - DNA, 120 bp, Artificial Sequence
  ENSG00000150471_89 (sequence is synthesized)
gttcatttttagtaattcataattttaacttaccacataaacaattactatgcatttctaagtaacgttttcaatatagcttatattagatttctgcacatcattaaattacgaagatgg

SEQ ID NO: 420315 - DNA, 120 bp, Artificial Sequence
  ENSG00000150471_90 (sequence is synthesized)
cacaaaagcaaagcagcaacattgcacaatagcttatggaagcatttttgtgcgaatggattttacataagaagcttttctgagctcataaaatatattcaatggatcccaacattaaat

SEQ ID NO: 420316 - DNA, 120 bp, Artificial Sequence
  ENSG00000150471_91 (sequence is synthesized)
ttaactttgcaatcagcaaatatgttctttataacatcttaaaaatattaaacaattaaattttcatttgtaggctagcagaacttaaatgtgttggtagttgcttctttcctgattagg

SEQ ID NO: 420317 - DNA, 120 bp, Artificial Sequence
  ENSG00000150471_92 (sequence is synthesized)
ccataagaagaaactttcctatttactaattaacactgattacactctctttggtttaaaagggaaactttcacctgtacacatacacactctgattccatttatttacagcctgcagaa

SEQ ID NO: 420318 - DNA, 120 bp, Artificial Sequence
  ENSG00000150471_93 (sequence is synthesized)
gaagtagcttgtttacgatatttaaaactttgtgatttctgcaataaaacaggtagttaatatagtttcgcataatctcattgaaagatattgctattccttctttatttaaaaaaaaat

SEQ ID NO: 420319 - DNA, 120 bp, Artificial Sequence
  ENSG00000150471_94 (sequence is synthesized)
ttaaaagtcagcacttctttcacatctagcacctataagttactattcaaatgtcttgatttcagctaagttttgatgtttctttttctcttaatagtatgtcaaaagcattgttctcat

SEQ ID NO: 420320 - DNA, 120 bp, Artificial Sequence
  ENSG00000150471_95 (sequence is synthesized)
ttgataatttgtgtcccgttacagtatttcaaaggtaaatgcaaactaatttttaggaaggcttgtgaaagaactttgatttatgtgaagaaatcaagaaagactatacatgaacaaatc

SEQ ID NO: 420321 - DNA, 120 bp, Artificial Sequence
  ENSG00000150471_96 (sequence is synthesized)
tctattgggataaacaagtctcttcaaccacaatatgaacaacggaagagcagaaaccaaacaagttagcaaacttatggtaaggtgacaggacctaaactagagttacagagaaaagtt

SEQ ID NO: 420322 - DNA, 120 bp, Artificial Sequence
  ENSG00000150471_97 (sequence is synthesized)
ttccaggaaagaataatgaagtcatttgtagtgataaaaatcttatacactacaccaaatgttacagatgtattccgaaaagtaaaatgggagtttcctatattctgatttcattctgct

SEQ ID NO: 420323 - DNA, 120 bp, Artificial Sequence
  ENSG00000150471_98 (sequence is synthesized)
aattccacgggaaacattaaatactttaaacactcttgagatatttcgtatctagctataccttgtctcaaggaaacatcaatattttataaatgtttcttaaatataagtattttgtct

SEQ ID NO: 420324 - DNA, 120 bp, Artificial Sequence
  ENSG00000150471_99 (sequence is synthesized)
gaattcatcttcactctctaatctgctggctctattgaacaccaacagagttaatgcttttagtagctttgtaccttttaaagctctattatgaatctttctaatacatatgaaattaat

SEQ ID NO: 420325 - DNA, 120 bp, Artificial Sequence
  ENSG00000150471_100 (sequence is synthesized)
aaataattcataaccaagaaatattcatactatagaataatttattattatatatatgaatattacattgagactgaacaaataaccactctgctccaaatattactctcaagttctctg

SEQ ID NO: 420326 - DNA, 120 bp, Artificial Sequence
  ENSG00000150471_101 (sequence is synthesized)
gctccaaatattactctcaagttctctgcctttaattattatagtcaattcataaaattctacatacagttgtacatggtgggttatcaaagtactccataatccaaatgcatctaaaag

SEQ ID NO: 420327 - DNA, 120 bp, Artificial Sequence
  ENSG00000150471_102 (sequence is synthesized)
tattccaaatgcgcctttcattctagaatactaaaggaaagcgtttgaaagaagaggaaagtaaagcagacttctaactatttaatttaaacattgccattcagattgaataatttttaa

SEQ ID NO: 420328 - DNA, 120 bp, Artificial Sequence
  ENSG00000150471_103 (sequence is synthesized)
atgatgatgctccactctttgatctacagacaaggttacaaaagatttacaattagtccaaaatcagaggattttaaatcttaaaggagttaagtttgtctcaatgatccaagactacaa

SEQ ID NO: 420329 - DNA, 120 bp, Artificial Sequence
  ENSG00000150471_104 (sequence is synthesized)
aatttcttgctacattggcaaggaaatatgtttaaagccgagaactaaaatagctttttaaaatttaaaaattcctctgtttcttctgaatgtaaaacaggcaaaatgatcctgacttca

SEQ ID NO: 420330 - DNA, 120 bp, Artificial Sequence
  ENSG00000150471_105 (sequence is synthesized)
aaatgaaatatattgattgctctcaaaagatgtttgacaaagttaagtcagtatcttcaatgctttaacagtaggtagaggtctttggggttggaactcaggatacagtgactaggacag

SEQ ID NO: 420331 - DNA, 120 bp, Artificial Sequence
  ENSG00000150471_106 (sequence is synthesized)
agtgcattcttaggctaattagtgcctagtcctctggagtattttttaatgccctgaatttcaagttgtcaaactggtttacatattgaatgacattttgaatcaataaaaatgagaaaa

SEQ ID NO: 420332 - DNA, 120 bp, Artificial Sequence
  ENSG00000150471_107 (sequence is synthesized)
aaacatttaaatttggttttcatgactcatttgagaataaagatttccttcatcaccctaagtaataaaagctgatatgtcttgaaacaactatagacaatcagaatgtgttcatttata

SEQ ID NO: 420333 - DNA, 120 bp, Artificial Sequence
  ENSG00000150471_108 (sequence is synthesized)
aagtatcactggtttgtatattttaatgctgacctttgcctgtgaactagaaaatcaagatttgtagagtcaggttgatttgccttcatttaattcctgcaaatgcattggaagtggatg

SEQ ID NO: 420334 - DNA, 120 bp, Artificial Sequence
  ENSG00000150471_109 (sequence is synthesized)
gataacttggaactttttccatactgttttccccctcaccaagcattaaatctaattcaaaatatgtctttctaaaaaacaatagtttatttttaaaactaacaactaattgtgttattc

SEQ ID NO: 420335 - DNA, 120 bp, Artificial Sequence
  ENSG00000150471_110 (sequence is synthesized)
cttgttgataagaaagtcactttttagaaacaagaatatagctattgtggctttggtcgcttaggattctcatatatttacacatggcattattcttttcatatacacctaccagatttc

SEQ ID NO: 420336 - DNA, 120 bp, Artificial Sequence
  ENSG00000150471_111 (sequence is synthesized)
aagctattggatatttcccttgtacaacctttacatcctttttttttccttaaatgctctgtacaatcacatgtaaagtcatgagctacaaacctcaataaaaatatcagtaaacaagaa

SEQ ID NO: 420337 - DNA, 120 bp, Artificial Sequence
  ENSG00000150471_112 (sequence is synthesized)
acttatgtgctgcctgttaactgtgcctgtgttggctgtttattcaactttatttctggattagatgcatatttcataatgaattgggttcagggatgatcactttcaagctgcaggcaa

SEQ ID NO: 420338 - DNA, 120 bp, Artificial Sequence
  ENSG00000150471_113 (sequence is synthesized)
agaaagcggacaggagggcgacttttctccgtcaggctggaactggtgccgctggaggcgggagcgggctggaggacggacagggtctggaaatgtttaatttggtaaattggaggaaaa

SEQ ID NO: 420339 - DNA, 120 bp, Artificial Sequence
  ENSG00000150477_0 (sequence is synthesized)
ggttgtttcaagatggcggacgtggcgggcccctcccgccccagtgccgcggcgttctggagccgggacttttctgatgaagaacaatcagtagtatacgttccaggaatttctgctgaa

SEQ ID NO: 420340 - DNA, 120 bp, Artificial Sequence
  ENSG00000150477_1 (sequence is synthesized)
ggaaatgtcagatcaagacacaagctgatgagtccaaaagctgatgttaaacttaagacttccagggtgactgatgcttcaatctccatggagtccttaaaaggcacaggagattcagta

SEQ ID NO: 420341 - DNA, 120 bp, Artificial Sequence
  ENSG00000150477_2 (sequence is synthesized)
gatgaacagaattcctgcaggggagaaataaagagtgcatcattgaaggatttatgtcttgaagacaaaagacgcattgcaaacttaattaaagaactggccagagtaagtgaggaaaag

SEQ ID NO: 420342 - DNA, 120 bp, Artificial Sequence
  ENSG00000150477_3 (sequence is synthesized)
gaagtgacagaggaaagactgaaagctgagcaggagtcatttgagaagaagatcaggcagttggaagaacagaatgaactgatcatcaaagaaagggaagctcttcagctacagtataga

SEQ ID NO: 420343 - DNA, 120 bp, Artificial Sequence
  ENSG00000150477_4 (sequence is synthesized)
gaatgccaagaacttctaagcctgtatcagaaatatttatcagaacaacaggagaagctcaccatgtctctctcagaacttggtgctgctagaatgcaggaacagcaggtatccagtaga

SEQ ID NO: 420344 - DNA, 120 bp, Artificial Sequence
  ENSG00000150477_5 (sequence is synthesized)
aaaagcactctccagtgttcatctgtggaactggatggttcctacttgagcatagccagaccacagacctactatcaaaccaagcaaagacctaagtctgcagtccaggattcagcttca

SEQ ID NO: 420345 - DNA, 120 bp, Artificial Sequence
  ENSG00000150477_6 (sequence is synthesized)
gaatcccttatagcatttaggaataattctttgaaaccagtaacccttcatcatcccaaagatgatctagataagataccatcagagaccacaacatgtaattgtgaatctccagggaga

SEQ ID NO: 420346 - DNA, 120 bp, Artificial Sequence
  ENSG00000150477_7 (sequence is synthesized)
aaacctgcagtcccaacagagaaaatgccacaagaagaattgcacatgaaggaatgtccacatcttaagcctactcctagtcaatgctgtggtcatagacttgctgcagatcgtgttcat

SEQ ID NO: 420347 - DNA, 120 bp, Artificial Sequence
  ENSG00000150477_8 (sequence is synthesized)
gacagccatcctacaaacatgacccctcaacatcctaagacacatccagaatcatgcagttattgtcggctttcttgggcatctctggtgcatggtggtggggcactgcaacccattgaa

SEQ ID NO: 420348 - DNA, 120 bp, Artificial Sequence
  ENSG00000150477_9 (sequence is synthesized)
actttgaaaaagcagatctcagaagatagaaagcagcaactgatgcttcagaaaatggaactggaaattgaaaaggagcgccttcagcatctgctggcccagcaggagacaaagcttctt

SEQ ID NO: 420349 - DNA, 120 bp, Artificial Sequence
  ENSG00000150477_10 (sequence is synthesized)
ctaaaacagcagcagcttcaccagtctcgactggattacaattgtttattgaagtcaaactgtgatggctggctgcttggaacatcatcatctattaaaaagcaccaagaccccccaaac

SEQ ID NO: 420350 - DNA, 120 bp, Artificial Sequence
  ENSG00000150477_11 (sequence is synthesized)
agtggagagaataggaaggagaggaagacagttgggtttcattcgcatatgaaagatgatgcccagtggtcatgtcaaaagaaagatacatgtagaccccaaagagggacagtgacagga

SEQ ID NO: 420351 - DNA, 120 bp, Artificial Sequence
  ENSG00000150477_12 (sequence is synthesized)
gttagaaaagatgcgtctacatctcctatgccaacaggaagcctaaaggattttgtcaccacagcctcaccatcattacagcacaccacctcccggtatgagacatctttgttggatttg

SEQ ID NO: 420352 - DNA, 120 bp, Artificial Sequence
  ENSG00000150477_13 (sequence is synthesized)
gttcagtctctgagcccaaactctgcgcccaaacctcagcgctatccctccagagaagctggggcctggaatcatggtactttccgactcagtcctctaaaatcaacccggaagaagatg

SEQ ID NO: 420353 - DNA, 120 bp, Artificial Sequence
  ENSG00000150477_14 (sequence is synthesized)
gggatgcacagaacccctgaagagttggaggagaatcagattctggaagatatatttttcatttgacatattgcaaaattttcttaggaaatttgtgggtttcctcacatactgatctag

SEQ ID NO: 420354 - DNA, 120 bp, Artificial Sequence
  ENSG00000150477_15 (sequence is synthesized)
gattttaaattatttcattgcaaagtaattgtgtctctcctttcacggggacttgtctcactagcatcctgttacgtattgaatatagaaatcattctaacaacccaggttattttcaat

SEQ ID NO: 420355 - DNA, 120 bp, Artificial Sequence
  ENSG00000150477_16 (sequence is synthesized)
cagaccaggcattcgataacacactaagggggtaggaatggaagatggtatcttttatatgctaaacagattagaaaattaacataggatactttctgcgtggtggaaaccattgcatat

SEQ ID NO: 420356 - DNA, 120 bp, Artificial Sequence
  ENSG00000150477_17 (sequence is synthesized)
tcagcctcatttcaagagtgtttccttctcaaacttctgctagaaaatgctgactcacttttatatacaagaaaaacctttccactgaaaaatccctctgatttaaaagtaacccctttg

SEQ ID NO: 420357 - DNA, 120 bp, Artificial Sequence
  ENSG00000150477_18 (sequence is synthesized)
aaacataagcagtttcagaaaggcagactctctcatctttctcatcctgttctctcactactacatttctgtaagtggtcctttaattctgaagttggagttggtgcccctgccatcaca

SEQ ID NO: 420358 - DNA, 120 bp, Artificial Sequence
  ENSG00000150477_19 (sequence is synthesized)
aacaacacgagagccaattgtgagtcagtctcagtagccatcagcctggcagctgcccatcccataaccaaagagctcaatgggctggagggtgagacccagccaatccttgggagcaag

SEQ ID NO: 420359 - DNA, 120 bp, Artificial Sequence
  ENSG00000150477_20 (sequence is synthesized)
acaagcctgaagcactcttctaccaatgtttgggtgaccacccctccaatatcccagaatgaataagaacaatccctaggtatttttatttacccaagtgttcagcttattcaccccacc

SEQ ID NO: 420360 - DNA, 120 bp, Artificial Sequence
  ENSG00000150477_21 (sequence is synthesized)
cccccaccccccatcacacgtgctcctgtgaactttccatggttatgtctacggaaaatgccactagagagagagtgatgcaagctgctgcaaagctgatgggcttcctctggccctccc

SEQ ID NO: 420361 - DNA, 120 bp, Artificial Sequence
  ENSG00000150477_22 (sequence is synthesized)
ttttcctccacgaggattaaaggatacaagctgaccaggcctcacaggtgctctgctcgtggccccaaagaaccatctctacttgccagagtatgttccaccacccaagcagggtctccc

SEQ ID NO: 420362 - DNA, 120 bp, Artificial Sequence
  ENSG00000150477_23 (sequence is synthesized)
tactttttctcactggcctcgttttgacccagagaaagcctatggaagttatgcagtgcagacctcatcctgtctgctgtcttttctcccacagagctcttgagatgggtccttcagctt

SEQ ID NO: 420363 - DNA, 120 bp, Artificial Sequence
  ENSG00000150477_24 (sequence is synthesized)
gcagtggtccctagtagcctctcaagctaatggggatgatgatcctggtttagccagagttcaaaactctccagtcattgaaagcaaggggagggtgtgttcccagatgtgtattacttg

SEQ ID NO: 420364 - DNA, 120 bp, Artificial Sequence
  ENSG00000150477_25 (sequence is synthesized)
ggaattttatttgatctggagggtgtggctttttttctctcctttttaccaaccccaactaaactgggagtaagacttagtcagtgttggtagacaaagtcataccacccagggcagcct

SEQ ID NO: 420365 - DNA, 120 bp, Artificial Sequence
  ENSG00000150477_26 (sequence is synthesized)
gcatgcagcgagtctgcgtggcttccctgaattactcttttaattaaaactagattatttcaatctagaaaagccttgttgagcagcctccttatccagatagatccaaagctcatgtct

SEQ ID NO: 420366 - DNA, 120 bp, Artificial Sequence
  ENSG00000150477_27 (sequence is synthesized)
cttcaggctgagactggcgctgtcacctccacccagccttctttcacttggggttttttattctttggagtagaaaagaatggagcccactaatattatatttttcttctgaaataaata

SEQ ID NO: 420367 - DNA, 120 bp, Artificial Sequence
  ENSG00000150477_28 (sequence is synthesized)
taaagtcaagactaactagttataatcattcccttaaaaagttggaaaatcattacagattaaaatttctttataaagttcacctctgagagtaaccaaatcggtttcatcccatatcaa

SEQ ID NO: 420368 - DNA, 120 bp, Artificial Sequence
  ENSG00000150477_29 (sequence is synthesized)
aaagcctttggagtgtggagctttctgtggtatggcagaaatgggtggatggcaaactaagagccctcagccattttttcagttaaagttaggttgccagaactttcttttccttgcccc

SEQ ID NO: 420369 - DNA, 120 bp, Artificial Sequence
  ENSG00000150477_30 (sequence is synthesized)
ctgtgtcatgactagcttaagtgtacttgactcccatagactactcccatgcccacagtcacccattccagactccagtgtccttaaaactctggagtgagaggatgccagaggatcaag

SEQ ID NO: 420370 - DNA, 120 bp, Artificial Sequence
  ENSG00000150477_31 (sequence is synthesized)
aaaaggatcacagtttcttgaagaagcttgtttgcctttagaagaatcgtaaacagagtctaaactaaaggctttttgggggtcacagccacagagtggagttttattgcttctttgcct

SEQ ID NO: 420371 - DNA, 120 bp, Artificial Sequence
  ENSG00000150477_32 (sequence is synthesized)
ctccatgaatggccaatttggaaaagcagagatgggctttcagcagaatatcaaccaatacatttttcacatgcaaaactcatcaccagttgcctttttctaacttaatggacattttgt

SEQ ID NO: 420372 - DNA, 120 bp, Artificial Sequence
  ENSG00000150477_33 (sequence is synthesized)
tggtgttggtgcaagggcaataggatgtaaatttgtatataatctaatgtcttcattattaattgaatagtacatgttaacattttaatctatttaaatttactttgaaatatatacata

SEQ ID NO: 420373 - DNA, 120 bp, Artificial Sequence
  ENSG00000150477_34 (sequence is synthesized)
catatgaatgaaaggttgttacagagcctcaaagctgttgcagactatcccaagagaaaggatctggcacaaaggaatctgcctttcctccgtctcaagtctcccacccttgactggttg

SEQ ID NO: 420374 - DNA, 120 bp, Artificial Sequence
  ENSG00000150477_35 (sequence is synthesized)
ggatttgctcgtccagcctctagacacttcccaaagcaagactggacacatgccgagggcgttgcggatagtgcctcaccattgcccaccctgctgcccaactcctgtgagagaaaaacc

SEQ ID NO: 420375 - DNA, 120 bp, Artificial Sequence
  ENSG00000150477_36 (sequence is synthesized)
aatcaatgtttacaaaatggaaaaggacacagcatgtcctttgaactccctaagtaaggcccacagttcttgatgcagagaaccaaagtgaatcatagaaaagcttttgctaacagtccg

SEQ ID NO: 420376 - DNA, 120 bp, Artificial Sequence
  ENSG00000150477_37 (sequence is synthesized)
ctttccaggaggcaaacttgtgtttatccaaacctgatccccatgatggggacttttctagagcaccccaaatgtcatggggagagagggactctttctgctccctcagagctactcttc

SEQ ID NO: 420377 - DNA, 120 bp, Artificial Sequence
  ENSG00000150477_38 (sequence is synthesized)
acttgtccctgcttccggcaccaagttcataatagagatcttctggccagagaatcaggggagaggagaggcctgatggggcagagctggacgaagtctgctaagagagatggaggctgt

SEQ ID NO: 420378 - DNA, 120 bp, Artificial Sequence
  ENSG00000150477_39 (sequence is synthesized)
ggcggactccttccaactcacgatttatcctcagctcagagtgtattttgaatatgagcaaatgtttatgtacgtatgagatttcaagttaataaatcatctctatggctattttcccca

SEQ ID NO: 420379 - DNA, 120 bp, Artificial Sequence
  ENSG00000150477_40 (sequence is synthesized)
ttaaatcaataccaattttattctttcatagatggagccagacattcttttatgtttgagggtacaacactgaacaaaataaaacaaaaatcattaccctcttggtgcctacattttagt

SEQ ID NO: 420380 - DNA, 120 bp, Artificial Sequence
  ENSG00000150477_41 (sequence is synthesized)
attaccctcttggtgcctacattttagtgagatgagatcaggtcatgaataaggaaaatatatgttcaatgatttttttttttttttttgagtcagagtctcggtctgttgcccaggctg

SEQ ID NO: 420381 - DNA, 120 bp, Artificial Sequence
  ENSG00000150477_42 (sequence is synthesized)
tattggtgctgtggagaaaaaataaagcaggaaagaggcagatagtagcgggaggtaggtaggttgtgggaagagagagttttgcaatttcaagtacctatatggttaggaagtgaaagc

SEQ ID NO: 420382 - DNA, 120 bp, Artificial Sequence
  ENSG00000150477_43 (sequence is synthesized)
ttcaatcagaaggtgacatgacatgacatatgacataagtcctaaagtgagccatgaagatatttgaggaaagagcttcctgggtagaagaaatcatacctgcagaagctataagttagt

SEQ ID NO: 420383 - DNA, 120 bp, Artificial Sequence
  ENSG00000150477_44 (sequence is synthesized)
tacaaattcccaggtcaaaagaaattatgaattataagaggtatacagaacagaagcagcatttggatgccggataatattattgtattttccttcatgttctcctgcgtagtttctgat

SEQ ID NO: 420384 - DNA, 120 bp, Artificial Sequence
  ENSG00000150477_45 (sequence is synthesized)
atcctcagctcagagtgtattttgaatatgagcaaatgtttattcaatcttcaagaagtatcaagtccatccaggcgcggtggcttacacctgtaatcccaggctttgggaggccgaggc

SEQ ID NO: 420385 - DNA, 74 bp, Artificial Sequence
  ENSG00000150477_46 (sequence is synthesized)
ggctaacacggtgaaaccccatctctgtattttgtatttgtaaaaatacaaaaaattacctgagcgtggtggca

SEQ ID NO: 420386 - DNA, 120 bp, Artificial Sequence
  ENSG00000150477_47 (sequence is synthesized)
ccccaagaactcaaactggatatgaatggcagtgactctggaccaaggtaaacctgaagtctcagttaaaacaagaatcttaagggcataaatatttaggatacgtttggtatactttta

SEQ ID NO: 420387 - DNA, 120 bp, Artificial Sequence
  ENSG00000150477_48 (sequence is synthesized)
tagctctatgttgattaatacagttttgtgaccatatgaatacgtacattcctgttatacaattttgaaaaatatagaaaaatatgaaaaacaaaataaaaatcattcataatcctacaa

SEQ ID NO: 420388 - DNA, 71 bp, Artificial Sequence
  ENSG00000150477_49 (sequence is synthesized)
tcaagtccacttcctattttcaaacttacccacttctctctctctttgctgatgcttctctagtacgacag

SEQ ID NO: 420389 - DNA, 120 bp, Artificial Sequence
  ENSG00000150477_50 (sequence is synthesized)
acttctctctctctttgctgatgcttctctagtacgacagtttctttattggtcttcctgccctatggcctggattcatgctagaacatgtaactctctctgcctcactcatctttaaat

SEQ ID NO: 420390 - DNA, 120 bp, Artificial Sequence
  ENSG00000150477_51 (sequence is synthesized)
ggggatcattgcagaacctacctcatgaagttattgtgaaggttaaatgagctaacacaggtagagtgttcagcatagaatataataagcactcagcaagggtaacctattattctccat

SEQ ID NO: 420391 - DNA, 120 bp, Artificial Sequence
  ENSG00000150477_52 (sequence is synthesized)
aaagccaccaggtcattatatcatgtcacaacctggattaaagcattagttagtttcccactgccctctgtgtttgtacttctgcacatactgcacaaggctcttggtgatatggcccac

SEQ ID NO: 420392 - DNA, 120 bp, Artificial Sequence
  ENSG00000150477_53 (sequence is synthesized)
tgcagcctttagacctccagccccttcttttcccactctattcctcttgacttccgtgcttcagccacactgagcttccagtagtttctaaaggcactgtaatacccttttcctgacctt

SEQ ID NO: 420393 - DNA, 120 bp, Artificial Sequence
  ENSG00000150477_54 (sequence is synthesized)
aggagctttctcagccctctgtacatcttttatcacaatacttactgtgctggaatggcctgtttacttttctgatttctcctttagtccgtaagcccaggatggccagaaaaagatatc

SEQ ID NO: 420394 - DNA, 120 bp, Artificial Sequence
  ENSG00000150477_55 (sequence is synthesized)
agtcttattcatcactaattcctcagaattcagcatggttcctggcacgttataggctcccaaacattatttatcaaataggtggatgggtaggcacataggagggaggaagaaaattta

SEQ ID NO: 420395 - DNA, 120 bp, Artificial Sequence
  ENSG00000150477_56 (sequence is synthesized)
acaattctgtggccccaaagtccagtaccctttggactactccagccttcttgcagctctctaaagcaagtagaaagtaagtgccatactcagaggactggggagggtggggctagaaga

SEQ ID NO: 420396 - DNA, 120 bp, Artificial Sequence
  ENSG00000150477_57 (sequence is synthesized)
taacttcagtgcttaaaatacacaagttccccactgcttacaggaaaggagtgcaccccttagagtggcacaccggaactgtcagcatcttgcccctcccttctcccctctgcagctcac

SEQ ID NO: 420397 - DNA, 120 bp, Artificial Sequence
  ENSG00000150477_58 (sequence is synthesized)
aactcttggccgtctcccaaggacatgctgctgtttcctgcctatgtgacttttccaggtccctctatcttggatgaatctttccagaccttgctcagttatcatcacttccatggaggt

SEQ ID NO: 420398 - DNA, 120 bp, Artificial Sequence
  ENSG00000150477_59 (sequence is synthesized)
ttcctaatctctcaggcatcattatatactcttggctcccatagtactctgtagagcctttgttatagcccacctcaatctgtcccatattgctctgtgcactgtctgccctattagaat

SEQ ID NO: 420399 - DNA, 120 bp, Artificial Sequence
  ENSG00000150477_60 (sequence is synthesized)
gtaaagtgttcaaagaaaacatatattcactttggagaacccagccttaccacttgtgagctgtgtagatttaggcaagttgcctatattctctaagcctcgaatataataatgcataaa

SEQ ID NO: 420400 - DNA, 120 bp, Artificial Sequence
  ENSG00000150477_61 (sequence is synthesized)
aatatttattaagatgagaagtgaccatttctgccttacaggtttggtgcctggaatgctgacctagatctggaaactagcccagatgaaagcaagaatgatgaggccacagtgtccatg

SEQ ID NO: 420401 - DNA, 120 bp, Artificial Sequence
  ENSG00000150477_62 (sequence is synthesized)
aaagtagggtgaggagggtgtccagtggagccagagggagtgccaagagggaggtccttggaacacggaggatccagaaggcccaggagtagaaagcagcgttggcatttgtaagaaagt

SEQ ID NO: 420402 - DNA, 120 bp, Artificial Sequence
  ENSG00000150477_63 (sequence is synthesized)
agaagaggtggttggccagaggacaggccctgttcaagatctgaccaggacatcagagctggcctctccctcccttcttccttgcaggccacagctgagcagccttaactgacacctcct

SEQ ID NO: 420403 - DNA, 120 bp, Artificial Sequence
  ENSG00000150477_64 (sequence is synthesized)
tggcaccagcacacaaacaatggcccatggcctgacgtcttccaggatgccctaggcccgtgcccttcacctgttctgcagctgtaagactgtggtgtttgccctccttgattcttccag

SEQ ID NO: 420404 - DNA, 120 bp, Artificial Sequence
  ENSG00000150477_65 (sequence is synthesized)
gtactgccccaccctgttcttctccccattctttgagtgctgagattggccagtcccatgctgagatgagggagctggaggaggggagactggctctcactcctcattgctgcccattgg

SEQ ID NO: 420405 - DNA, 120 bp, Artificial Sequence
  ENSG00000150477_66 (sequence is synthesized)
gatgggatgaacttcacagctctggtttcctctgttcttctctcagctgcaggtgatttaagcttgttggatttatataacattgggaaatggtaaactgtgtaaatttgctatgttttc

SEQ ID NO: 420406 - DNA, 120 bp, Artificial Sequence
  ENSG00000150477_67 (sequence is synthesized)
cagggacagttatttatggaagggcatttttaactcgagtgctagaagtgttaaatcattataataaattcatgctattcagactttcttacattgtaataaattttttctaagcatgaa

SEQ ID NO: 420407 - DNA, 120 bp, Artificial Sequence
  ENSG00000150477_68 (sequence is synthesized)
gagatggaagttgcaaaggaagtcatttgggacctttcagaagtgtagtatcctgaaacaccaagcaaattcagaccttcatgctgaggtgaatttgtaaagggtcattgggcgtaccct

SEQ ID NO: 420408 - DNA, 120 bp, Artificial Sequence
  ENSG00000150477_69 (sequence is synthesized)
ttgggagaactgatacggccttcagacctttgaccaaaacagataaaataaacacagaaagacataccaagaatgacttaaagggaggaagcaaaggagtccaataatgtattacatttc

SEQ ID NO: 420409 - DNA, 120 bp, Artificial Sequence
  ENSG00000150477_70 (sequence is synthesized)
aacataaaggagaaggatgggcctcctctcactggtgtgaaagagggttcttagagatgattgatacgcataccgtaagtatgttccctggaccagcaacatcagcattactcagaagct

SEQ ID NO: 420410 - DNA, 66 bp, Artificial Sequence
  ENSG00000150477_71 (sequence is synthesized)
aagtttgactatttcatgaagacaatgtaaactccagagaaataattgttctaatttgtaacaggg

SEQ ID NO: 420411 - DNA, 120 bp, Artificial Sequence
  ENSG00000150477_72 (sequence is synthesized)
gtaaactccagagaaataattgttctaatttgtaacagggagtaaatctgcatgtgctgccatttctaggcaatcagaacgtcacttaacaatatgtgctatagcttcctttgtgcctga

SEQ ID NO: 420412 - DNA, 120 bp, Artificial Sequence
  ENSG00000150477_73 (sequence is synthesized)
taaggccatccagctgttctgctgctgctgttaggctgctaagcacatacttgtcaactaaaaaggacaagaagaaatttgggcattgaagtgtagtgttggaactttattaaattctgt

SEQ ID NO: 420413 - DNA, 120 bp, Artificial Sequence
  ENSG00000150477_74 (sequence is synthesized)
tgcactgctgtaattgagctggaacctccttgtatttggtattctttctagttaaagctttgacagtcctaggaattctgctctgaaatcataaaaattaaaaaaaaattgtttttactg

SEQ ID NO: 420414 - DNA, 120 bp, Artificial Sequence
  ENSG00000150477_75 (sequence is synthesized)
ggacggcgaggggcgagccgtcgcgtggcagtccgagagcggaggagaagctccgaactaaccccggggatggggacgtgctgctcggccccagtctaggtgctgggctctccccttgct

SEQ ID NO: 420415 - DNA, 120 bp, Artificial Sequence
  ENSG00000150477_76 (sequence is synthesized)
acccacagagatcctgaattaatttacttttgagtattgaccaccagattgtaccattgaaagatgcattttcttctttgctgggcctctctacatttagttctgtattaggtcaagatt

SEQ ID NO: 420416 - DNA, 120 bp, Artificial Sequence
  ENSG00000150477_77 (sequence is synthesized)
catgtcaatcttcaagaagtatcaagtccatccaggcgcggtggcttacacctgtaatcccaggctttgggaggccgaggcagccggatcatgaggtttggtgcctggaatgctgaccta

SEQ ID NO: 420417 - DNA, 80 bp, Artificial Sequence
  ENSG00000150510_0 (sequence is synthesized)
gagttgtttgccggctcccgggccgccagacgctcggagggagcccggccggctcggactgggcggccgggagggagggc

SEQ ID NO: 420418 - DNA, 120 bp, Artificial Sequence
  ENSG00000150510_1 (sequence is synthesized)
ggacgtgcaccatggacccaaaggcgggcggcggcggcgaggaggacgactgcgtggactcgggcgccgagaccggagggtccgactacagccacctgtcctccacgagcaatggattct

SEQ ID NO: 420419 - DNA, 88 bp, Artificial Sequence
  ENSG00000150510_2 (sequence is synthesized)
tccgactacagccacctgtcctccacgagcaatggattctccacctggcggatgccatgttgcctgttcctttactgtacacacggtt

SEQ ID NO: 420420 - DNA, 120 bp, Artificial Sequence
  ENSG00000150510_3 (sequence is synthesized)
cgcaggaccctttcctggtcagcatccacataatcgcagacccaggggagtcccagcccctgcaggaggccatcgacaacgtcctggcgtggatccaccccgacctcccgctgttccggg

SEQ ID NO: 420421 - DNA, 120 bp, Artificial Sequence
  ENSG00000150510_4 (sequence is synthesized)
tgtccgagaggcgggcgtcccggcggcggcggaagccccccaagggcgctcagccagcgctggctgtggtgctgttcctgcaggaggagtacggcgaagagcagatcctgcagctgcacc

SEQ ID NO: 420422 - DNA, 120 bp, Artificial Sequence
  ENSG00000150510_5 (sequence is synthesized)
gcacactgcagcagccgccctggcgccaccaccacaccgagcaggtgcacggccggttcctgccctacctgccctgcagccaggacttcttcacgctggcccctgggacgccgctttggg

SEQ ID NO: 420423 - DNA, 120 bp, Artificial Sequence
  ENSG00000150510_6 (sequence is synthesized)
ccatccggcccgtgcactacggcaaggaaatcgtgcgcttcaccgtctactgtcgctacgacaactatgctgacagcctcaggttctaccagctgattctccggaggagccccagccaga

SEQ ID NO: 420424 - DNA, 120 bp, Artificial Sequence
  ENSG00000150510_7 (sequence is synthesized)
agaaagcggacttctgcatcttccctattttttccaacctggatgtggacatccagttctccctgaaaagactgccctgtgaccagtgcccggtgcccaccgactcctccgtgctggagt

SEQ ID NO: 420425 - DNA, 120 bp, Artificial Sequence
  ENSG00000150510_8 (sequence is synthesized)
ggggcgctggcagacggaggaccatgatgggaacaagatcctcctacaggcacaaagggtgcataagaagtttcctaaacctggcagagtacatcatgcctccgagaagaaacgtcattc

SEQ ID NO: 420426 - DNA, 120 bp, Artificial Sequence
  ENSG00000150510_9 (sequence is synthesized)
cactcctttgccgagcactgctgtaccaagccatacacctggcagcagccagcagtccccgctcaacagtcctcacccggggcccatccggacaggcctgcctcctgggcaccagcagga

SEQ ID NO: 420427 - DNA, 120 bp, Artificial Sequence
  ENSG00000150510_10 (sequence is synthesized)
atttgccggacgagccaacagcacccccaaccctccctggtctttccagagaagcaagtccttgttttgtttgcccacgggaggcccctccctggcctcctcagctgaaccacagtggtt

SEQ ID NO: 420428 - DNA, 120 bp, Artificial Sequence
  ENSG00000150510_11 (sequence is synthesized)
ttcaaacacaggtgccccagggcacagggcatcagagtggaggcatggccacctcctctccatcgatgacctagagggggcccaggagacagacgtggacacaggcctgcggctgtcctc

SEQ ID NO: 420429 - DNA, 120 bp, Artificial Sequence
  ENSG00000150510_12 (sequence is synthesized)
atcggacctgtctgtggtctctgcatattctgcacccagtaggttctgcagcacagtggagacacccctcccctccgaaagatgcagcagccactgggcagctcacaaggattccaggga

SEQ ID NO: 420430 - DNA, 120 bp, Artificial Sequence
  ENSG00000150510_13 (sequence is synthesized)
gggaccactgcccactgtcagcagggtgaccacagaggcctcctgggcttccctccctttcttcaccaaaaggtcttccagctcctcagcgacagctcgtgctgctcccccagctcccag

SEQ ID NO: 420431 - DNA, 120 bp, Artificial Sequence
  ENSG00000150510_14 (sequence is synthesized)
cacctccaccctcacagactcctccccacagctcccatgcgatacccccaaagtcaagcagactgatggagacatgccaccacccccagggtcggctggccccggggataacgacatgga

SEQ ID NO: 420432 - DNA, 120 bp, Artificial Sequence
  ENSG00000150510_15 (sequence is synthesized)
ggaattctacatctgaatgccctctgctcttgttctcgaaacacacaaactcagagacacagactcaggccccactgcccctctggccactgagcacaccacattcttcatgatccattt

SEQ ID NO: 420433 - DNA, 120 bp, Artificial Sequence
  ENSG00000150510_16 (sequence is synthesized)
cccaggagcccgtagcacatttgcctaccacccactcttagctggggggtggtatatctctagagacacagcagaaaaatactggcatttttatgcaaataaattctcaacaaacttgtc

SEQ ID NO: 420434 - DNA, 120 bp, Artificial Sequence
  ENSG00000150510_17 (sequence is synthesized)
tttagtgggtttatacaatttaaatggcttatataattatttgaaatgaaaagaaaacctagtcagccagaaccaatttggcaatttttccatggtatgaaggcaaatcaattaaggcca

SEQ ID NO: 420435 - DNA, 120 bp, Artificial Sequence
  ENSG00000150510_18 (sequence is synthesized)
aaacgttgaatgtgggagagatagtaagtgacttgtatgagggattactgcataataacgtaacgcacaccttactggattctccatatatatttacattaccagagaacagtggcccta

SEQ ID NO: 420436 - DNA, 120 bp, Artificial Sequence
  ENSG00000150510_19 (sequence is synthesized)
tgaagccatgcaacacctgcaaatctggatttatacaaaagttgctaatgtgtttcataaagatttagcatgagtaacagactcttggtgcatttaaaatatgtgagttccagaaagtag

SEQ ID NO: 420437 - DNA, 120 bp, Artificial Sequence
  ENSG00000150510_20 (sequence is synthesized)
atttgcatacaccttttcaacagcacatttcactggaatggatgaggggcttctgaagaccactccactacctgaatttatttggatcactgaggaagagcatttgttgggattacagaa

SEQ ID NO: 420438 - DNA, 120 bp, Artificial Sequence
  ENSG00000150510_21 (sequence is synthesized)
ttataggccattagacatcatgggtaggtagtcttaagatccttcaactttcaaaaaccacagtctaaggactatattcaaatgacaagagccgcactgtatactgctttctgcagtgac

SEQ ID NO: 420439 - DNA, 120 bp, Artificial Sequence
  ENSG00000150510_22 (sequence is synthesized)
catgctgggtcacgcatcctatgtttctcatttttaaatgatttggaacattttagccagcattttgatcacacagattaataatgctgttctccccaaaacgggaaactttacctgaaa

SEQ ID NO: 420440 - DNA, 120 bp, Artificial Sequence
  ENSG00000150510_23 (sequence is synthesized)
cgctctcctgaacaaacaccagtgcactgccagcctcacatgattgcatgggagctttaattaacgctggagcccagcaaccttggcttttcctgcctgttatctgctactgtcacaccg

SEQ ID NO: 420441 - DNA, 120 bp, Artificial Sequence
  ENSG00000150510_24 (sequence is synthesized)
tgaatggtatttgaatctcacctccctctcacctcagtaagagtatgtttgtttacagccccaacctcagcaatgccaaaggctggcatcgggggcagtgccaagctgtccctggatact

SEQ ID NO: 420442 - DNA, 120 bp, Artificial Sequence
  ENSG00000150510_25 (sequence is synthesized)
atttacctttgaggaagaacagcatgggtttgccaagctcaattcccaggctggtgctccttgaattaatcatggcacagtgttcatctctctggaaatgcccacgccagcccagacaca

SEQ ID NO: 420443 - DNA, 120 bp, Artificial Sequence
  ENSG00000150510_26 (sequence is synthesized)
gcctcagagtcctttccaacacgaccctccaggcagcagttaccaaccatcagtcttcagctgaagcttcaagtctttgccatccttgtaatgacagccttaggccttgccccaagcatt

SEQ ID NO: 420444 - DNA, 120 bp, Artificial Sequence
  ENSG00000150510_27 (sequence is synthesized)
ctggactctctaacactcagaattgtaatgtaatattctgctctaatttaaatttttaaaaatatagtctcctaattcaggataaggagtaagcaaactttctgaaaagggctagataat

SEQ ID NO: 420445 - DNA, 120 bp, Artificial Sequence
  ENSG00000150510_28 (sequence is synthesized)
aagtattttaggctttgccagtcatatggtctcttgcagctactcaactctgccactgtagtatgaaagcagccatgagtaatatgttaatgaatgggaatggctgagttccaataaagc

SEQ ID NO: 420446 - DNA, 120 bp, Artificial Sequence
  ENSG00000150510_29 (sequence is synthesized)
actgggattacaggcatgagccaccattcccagccaataaaactttatttacaagaacagctggtgggccagatttggcccaagggtcatagtttattatcccttgagctaggctgctgc

SEQ ID NO: 420447 - DNA, 120 bp, Artificial Sequence
  ENSG00000150510_30 (sequence is synthesized)
ttatcccttgagctaggctgctgcctgaggttgattcaacatcccagctccagtcaacaacaaaaattctaagtctcccgcctaatgctgctgtggtgtgtcatgccaaaaaagtgggct

SEQ ID NO: 420448 - DNA, 120 bp, Artificial Sequence
  ENSG00000150510_31 (sequence is synthesized)
actcaggttagaccaatgacttcagaaccacagggctcagaacaggaaggagcttctttctgcagagctgattcctggaaagccaccagcactccaccttctgcccagaaatgtgattca

SEQ ID NO: 420449 - DNA, 120 bp, Artificial Sequence
  ENSG00000150510_32 (sequence is synthesized)
gtcaatagctgatgaggaaaagcaacctgcaaacattaggaagaaggagaaaaataattcagaggtgatgataccacctccaatgaacagggaagcaagttcatcagtaacaaaagtcag

SEQ ID NO: 420450 - DNA, 120 bp, Artificial Sequence
  ENSG00000150510_33 (sequence is synthesized)
aaaaaaaaaaaaaaaaaaaaaaggctaatggccgagggctggctccttctttctccctaatcagtgtccttatttcagtgtgctcacatgctcgcctaggactgctttagagtacaactc

SEQ ID NO: 420451 - DNA, 120 bp, Artificial Sequence
  ENSG00000150510_34 (sequence is synthesized)
agagtacaactctggacccgccctcatcacagtccaatctaccaaactgagtgaccctaaaggacatcatagacaacatttgaaagcaagaaatgcaaaatgttcccatagcatcaggtg

SEQ ID NO: 420452 - DNA, 120 bp, Artificial Sequence
  ENSG00000150510_35 (sequence is synthesized)
agcagggagaggatgcccactgtagaccacatggaaatggcagtccctccacggagagggaatcacaggaacacatttaccaaagccttcccttccattcctggccattccagtagcatc

SEQ ID NO: 420453 - DNA, 120 bp, Artificial Sequence
  ENSG00000150510_36 (sequence is synthesized)
ttcctcatccagaagggcttccaatactctctggaggatcctgactcgtttggagtattatccttgtaaaagatgctggcacattgtaggtgctcaataaatgtgttcaattgaaaaata

SEQ ID NO: 420454 - DNA, 120 bp, Artificial Sequence
  ENSG00000150510_37 (sequence is synthesized)
tggcagacggaggaccatgatgggaacaagatcctcctacaggtactggggggacgcctgtctgtctgtttaggggacctgagaaaccagttagctttgcctcaaacactatagtaccag

SEQ ID NO: 420455 - DNA, 120 bp, Artificial Sequence
  ENSG00000150510_38 (sequence is synthesized)
aagactcttcccattggttctcttcatttcactttcagcaaacatgttcccaattcttccagctgccccttctgtcctcccctattgggcatccactaaacacccatgactcctggggat

SEQ ID NO: 420456 - DNA, 120 bp, Artificial Sequence
  ENSG00000150510_39 (sequence is synthesized)
ttcaaatgagcttataagctagggaatttgctattaaagattcctgaatctatgcccatgtacttagagagtttttaccactggattcttccctcccacaaaggaacttcaggaaagccc

SEQ ID NO: 420457 - DNA, 120 bp, Artificial Sequence
  ENSG00000150510_40 (sequence is synthesized)
atctatctggaaattttaaaatatatattgatgttcatagaggagatagctgttctcttccttcaggtgcctcccccaccttctactcttgcatccttctactgctgggcagcaggttgt

SEQ ID NO: 420458 - DNA, 120 bp, Artificial Sequence
  ENSG00000150510_41 (sequence is synthesized)
tgaaatcctgtgatcacttggaaaaggatgtcccgttaaacattttaaggagtaagtgatgccttgggagcttctggtttcactaagcttggaaggggtgaaggaattcattttaagtag

SEQ ID NO: 420459 - DNA, 120 bp, Artificial Sequence
  ENSG00000150510_42 (sequence is synthesized)
gctgccctagtccttccatggtaaactctttagcttcatcatcagctccctttctcctctcatccttccaggggttgtcccagactcattagagataattagttatactcaattcaaaat

SEQ ID NO: 420460 - DNA, 120 bp, Artificial Sequence
  ENSG00000150510_43 (sequence is synthesized)
tcagcatgtatattacagaacatcctacatctggtcctacctgagaaatgctttccagacccaggctttcttgattttacaagtaaattagttccaggagtatagggccttgtttttctg

SEQ ID NO: 420461 - DNA, 120 bp, Artificial Sequence
  ENSG00000150510_44 (sequence is synthesized)
aaaagcctctacctctgacgtctcaattttcacacttggctacccgaaaagagaaagttgatagtgaattgggggacattgccttaagaggcaaagattgtggttacttgaatcacaggt

SEQ ID NO: 420462 - DNA, 120 bp, Artificial Sequence
  ENSG00000150510_45 (sequence is synthesized)
aaagtttcatcgtttttgttggttttggctttaagcaccagaactataatccacatatcatgaaatgaagtcagaatttggcacatgtcagataactggttcagactacagccaggcctc

SEQ ID NO: 420463 - DNA, 120 bp, Artificial Sequence
  ENSG00000150510_46 (sequence is synthesized)
atttctcgtcagaaaggtcaccttgagatacttactatttataggaactagataattttgaaacttccttttgaactgtgcagataaggaactaagtaatgttttattattcaatatgct

SEQ ID NO: 420464 - DNA, 120 bp, Artificial Sequence
  ENSG00000150510_47 (sequence is synthesized)
agcatttgctctataatcccttttgaaatgtgagaaaaattgtctctgtgtttgaagaatgccacatctttatgcaaaatataatacagttgcaccaagtaaaagttaatgaaatgcaaa

SEQ ID NO: 420465 - DNA, 120 bp, Artificial Sequence
  ENSG00000150510_48 (sequence is synthesized)
cattttcaacacactgtgtctgaggtgttgcaagacatccaagtaaagatgatgaatcagcagttgggtatatctgtctggaactcagaagggaggtcttcatgatgacattgcatttgg

SEQ ID NO: 420466 - DNA, 120 bp, Artificial Sequence
  ENSG00000150510_49 (sequence is synthesized)
gtactatttacctaaaaatggcaatggaagctctgggagagactaaatcaactgaagatgaggaaatggagactcagagggcacatggctcgttagaggcatgaattgaagcctggatct

SEQ ID NO: 420467 - DNA, 120 bp, Artificial Sequence
  ENSG00000150510_50 (sequence is synthesized)
ccagtatgcttcccacctagtgaagttgcctctccaggagctgtctgatctgtaattaattcttgttttctgctcagacattttcttttgcttgaaatgctgctgctgctgtctcaccca

SEQ ID NO: 420468 - DNA, 120 bp, Artificial Sequence
  ENSG00000150527_0 (sequence is synthesized)
aaaacagacagtgtttgtctctcaagttaaaccaacaagccgatagaaaaaggtagttatcaagagatttttaaaacttcaaccctttttctcttatagttagtgaagagagtagaatat

SEQ ID NO: 420469 - DNA, 120 bp, Artificial Sequence
  ENSG00000150527_1 (sequence is synthesized)
ctccagttttggctgacatctctacaacctgaacaattggcttaaacttcacttgggattcccggttgcttgttttagcatggcaaaatttggcgttcacagaatccttcttctggctat

SEQ ID NO: 420470 - DNA, 120 bp, Artificial Sequence
  ENSG00000150527_2 (sequence is synthesized)
ttctctgacaaagtgtctggagagtacaaaactgctggcagaccttaaaaaatgtggtgacttggaatgtgaagctttaataaacagagtctcagccatgagagattatagaggacctga

SEQ ID NO: 420471 - DNA, 120 bp, Artificial Sequence
  ENSG00000150527_3 (sequence is synthesized)
ctgccgatacctgaacttcactaagggagaagagatatctgtttatgttaaacttgcaggagaaagggaagatttgtgggcaggaagtaaaggaaaggagtttggatattttcccagaga

SEQ ID NO: 420472 - DNA, 120 bp, Artificial Sequence
  ENSG00000150527_4 (sequence is synthesized)
tgcagtccagattgaagaggtgttcatatctgaggaaattcagatgtcaacgaaagaatctgactttctttgtcttcttggagtaagttacacatttgacaatgaagatagtgaattaaa

SEQ ID NO: 420473 - DNA, 120 bp, Artificial Sequence
  ENSG00000150527_5 (sequence is synthesized)
cggtgattatggtgaaaatatatatccttatgaagaagataaagatgaaaaatctagtatatatgaaagtgattttcagatagaacctggattttatgcaacttatgaaagtactttgtt

SEQ ID NO: 420474 - DNA, 120 bp, Artificial Sequence
  ENSG00000150527_6 (sequence is synthesized)
tgaagaccaagttccagcattagaggctcctgaagatatcggaagtaccagtgaatcaaaagactgggaagaagtagttgttgaaagtatggaacaggatcgtattccagaagtgcatgt

SEQ ID NO: 420475 - DNA, 120 bp, Artificial Sequence
  ENSG00000150527_7 (sequence is synthesized)
cccaccatcttcagctgtgtctggagtcaaagaatggtttggattgggaggagaacaagctgaagagaaggcttttgaatcagttattgaacctgtacaagaaagctcatttcggagtag

SEQ ID NO: 420476 - DNA, 120 bp, Artificial Sequence
  ENSG00000150527_8 (sequence is synthesized)
aaaaatagcagtggaagatgagaatgacctagaggaattaaataatggtgagcctcaaacagaacatcagcaagaatctgaatcagaaattgattcagtgccaaagacacagtctgaact

SEQ ID NO: 420477 - DNA, 120 bp, Artificial Sequence
  ENSG00000150527_9 (sequence is synthesized)
agcatctgagtcagagcacattcccaaacctcaatccactggttggtttggtggaggatttacaagttatttaggttttggagatgaggatacagggcttgaattaatagctgaagaaag

SEQ ID NO: 420478 - DNA, 120 bp, Artificial Sequence
  ENSG00000150527_10 (sequence is synthesized)
tcatctgataaagaagccacagttccatgtacagaaatattaacagaaaaaaaagacacaatcactaatgatagcttgagtctcaagccaagttggtttgattttggttttgctatacta

SEQ ID NO: 420479 - DNA, 120 bp, Artificial Sequence
  ENSG00000150527_11 (sequence is synthesized)
ggctttgcatatgccaaggaagataaaattatgttagatgacaggaaaaatgaagaagatggtggggcagatgaacatgaacatcctctaacaagtgaattagaccctgaaaaagaacaa

SEQ ID NO: 420480 - DNA, 120 bp, Artificial Sequence
  ENSG00000150527_12 (sequence is synthesized)
gaaatagaaacgataaaaattatagaaacagaagatcaaatagacaagaaaccagtctcagaaaaaacagacgaatctgatactataccatatttgaaaaagttcttgtataattttgac

SEQ ID NO: 420481 - DNA, 120 bp, Artificial Sequence
  ENSG00000150527_13 (sequence is synthesized)
aacccttggaacttccagaacattccaaaggaaacagaattgccatttcccaaacagatactggatcaaaataatgtaattgaaaatgaagaaactggagaattttccattgataattat

SEQ ID NO: 420482 - DNA, 120 bp, Artificial Sequence
  ENSG00000150527_14 (sequence is synthesized)
cccacagataatacaaaagttatgatattcaaaagttcatacagtctgtcagatatggtctctaacatagagttacctacgagaattcacgaagaagtatattttgaaccctcatcttct

SEQ ID NO: 420483 - DNA, 120 bp, Artificial Sequence
  ENSG00000150527_15 (sequence is synthesized)
aaagatagtgatgaaaattcgaaaccatcagtagacaccgaagggcctgctctggtggagatagacagatctgtggaaaataccctgctaaatagtcagatggtttcaactgataactct

SEQ ID NO: 420484 - DNA, 120 bp, Artificial Sequence
  ENSG00000150527_16 (sequence is synthesized)
ttgtcttctcaaaattatatttctcagaaagaagatgcttctgagtttcagattctgaaatacttattccaaattgatgtttatgatttcatgaattctgcattttcaccaattgtaatt

SEQ ID NO: 420485 - DNA, 120 bp, Artificial Sequence
  ENSG00000150527_17 (sequence is synthesized)
cttacagaaagggtaagtttgccttttaaaccttttgcaataattttacctattttgctaaatataagagtggctacaaaatatgtttgaatgaatcctccctgtttaatgtttatataa

SEQ ID NO: 420486 - DNA, 120 bp, Artificial Sequence
  ENSG00000150527_18 (sequence is synthesized)
tgtttctctttccatgacatcttacctgtaagatttctctttatatgaatgttttgtcaaatggatattgatttttaaaaacatttccctaagttttgttgatgttgatcttgagcggtg

SEQ ID NO: 420487 - DNA, 120 bp, Artificial Sequence
  ENSG00000150527_19 (sequence is synthesized)
tttgctttttactccaccctccccatttttcaaattagggaaagttaggtactaaataagttaactcaggaataataggaactagagctgggtgtggtggtgtgtgcctggagttcccac

SEQ ID NO: 420488 - DNA, 120 bp, Artificial Sequence
  ENSG00000150527_20 (sequence is synthesized)
tacttaggaggctgaggcaggaggatccttttactgaatgtaacaaggagaataaaagggaagagtgagcccaagggtttgagaccagtctgggcaacatagctagaccttatctcttaa

SEQ ID NO: 420489 - DNA, 120 bp, Artificial Sequence
  ENSG00000150527_21 (sequence is synthesized)
aaggtatgagaccagattctaatctttatggttttccatgggaattggtgatatgtgcagctgttgttggattttttgctgttctcttttttttgtggagaagttttagatcggttagga

SEQ ID NO: 420490 - DNA, 120 bp, Artificial Sequence
  ENSG00000150527_22 (sequence is synthesized)
gagaaaaagcttgctctaatgctttctggactaattgaagaaaaaagtaaactacttgaaaaatttagccttgttcaaaaagagtatgaaggctatgaagtagagtcatctttaaaggat

SEQ ID NO: 420491 - DNA, 120 bp, Artificial Sequence
  ENSG00000150527_23 (sequence is synthesized)
tctgaacttgaggatgaaatactctgtctagaaaaagagttaaaagaagagaaatccaaacattctgaacaagatgaattgatggcggatatttcaaaaaggatacagtctctagaagat

SEQ ID NO: 420492 - DNA, 120 bp, Artificial Sequence
  ENSG00000150527_24 (sequence is synthesized)
gagtcaaaatccctcaaatcacaagtagctgaagccaaaatgaccttcaagatatttcaaatgaatgaagaacgactgaagatagcaataaaagatgctttgaatgaaaattctcaactt

SEQ ID NO: 420493 - DNA, 120 bp, Artificial Sequence
  ENSG00000150527_25 (sequence is synthesized)
caggaaagccagaaacagcttttgcaagaagctgaagtatggaaagaacaagtgagtgaacttaataaacagaaagtaacatttgaagactccaaagtacatgcagaacaagttctaaat

SEQ ID NO: 420494 - DNA, 120 bp, Artificial Sequence
  ENSG00000150527_26 (sequence is synthesized)
gataaagaaagtcacatcaagactctgactgaacgcttgttaaagatgaaagattgggctgctatgcttggagaagacataacggatgatgataacttggaattagaaatgaacagtgaa

SEQ ID NO: 420495 - DNA, 120 bp, Artificial Sequence
  ENSG00000150527_27 (sequence is synthesized)
tcggaaaatggtgcttacttagataatcctccaaaaggagctttgaagaaactgattcatgctgctaagttaaatgcttctttaaaaaccttagaaggagaaagaaaccaaatttatatt

SEQ ID NO: 420496 - DNA, 120 bp, Artificial Sequence
  ENSG00000150527_28 (sequence is synthesized)
cagttgtctgaagttgataaaacaaaggaagagcttacagagcatattaaaaatcttcagactgaacaagcatctttgcagtcagaaaacacacattttgaaaatgagaatcagaagctt

SEQ ID NO: 420497 - DNA, 120 bp, Artificial Sequence
  ENSG00000150527_29 (sequence is synthesized)
caacagaaacttaaagtaatgactgaattatatcaagaaaatgaaatgaaactccacaggaaattaacagtagaggaaaattatcggttagagaaagaagagaaactttctaaagtagat

SEQ ID NO: 420498 - DNA, 120 bp, Artificial Sequence
  ENSG00000150527_30 (sequence is synthesized)
gaaaagatcagccatgccactgaagagctggagacctatagaaagcgagccaaagatcttgaagaagaattggagagaactattcattcttatcaagggcagattatttcccatgagaaa

SEQ ID NO: 420499 - DNA, 120 bp, Artificial Sequence
  ENSG00000150527_31 (sequence is synthesized)
aaagcacatgataattggttggcagctcggaatgctgaaagaaacctcaatgatttaaggaaagaaaatgctcacaacagacaaaaattaactgaaacagagcttaaatttgaactttta

SEQ ID NO: 420500 - DNA, 120 bp, Artificial Sequence
  ENSG00000150527_32 (sequence is synthesized)
gaaaaagatccttatgcactcgatgttccaaatacagcatttggcagagagcattccccatatggtccctcaccattgggttggccttcatctgaaacaagagcttttctctctcctcca

SEQ ID NO: 420501 - DNA, 120 bp, Artificial Sequence
  ENSG00000150527_33 (sequence is synthesized)
actttgttggagggtccactcagactctcacctttgcttccagggggaggaggaagaggctcacgaggcccagggaatcctctggaccatcagattaccaatgaaagaggagaatcaagc

SEQ ID NO: 420502 - DNA, 120 bp, Artificial Sequence
  ENSG00000150527_34 (sequence is synthesized)
tgtgataggttaaccgatcctcatagggctccctctgacactgggtctctgtcacctccatgggaccaggaccgtaggatgatgtttcctccgccaggacaatcatatcctgattcagcc

SEQ ID NO: 420503 - DNA, 120 bp, Artificial Sequence
  ENSG00000150527_35 (sequence is synthesized)
cttcctccacaaaggcaagacagattttgttctaattctggtagactgtctggaccagcagaactcagaagttttaatatgccttctttggataaaatggatgggtcaatgccttcagaa

SEQ ID NO: 420504 - DNA, 120 bp, Artificial Sequence
  ENSG00000150527_36 (sequence is synthesized)
atggaatccagtagaaatgataccaaagatgatcttggtaatttaaatgtgcctgattcatctctccctgctgaaaatgaagccactggccctggctttgttcctccacctcttgctcca

SEQ ID NO: 420505 - DNA, 120 bp, Artificial Sequence
  ENSG00000150527_37 (sequence is synthesized)
atcagaggtccattgtttccagtggatgcaagaggcccattcttgagaagaggacctcctttccccccacctcctccaggagccatgtttggagcttctcgagattattttccaccaggg

SEQ ID NO: 420506 - DNA, 120 bp, Artificial Sequence
  ENSG00000150527_38 (sequence is synthesized)
gatttcccaggtccaccacctgctccatttgcaatgagaaatgtctatccaccgaggggttttcctccttaccttcccccaagacctggatttttccccccacccccacattctgaaggt

SEQ ID NO: 420507 - DNA, 120 bp, Artificial Sequence
  ENSG00000150527_39 (sequence is synthesized)
agaagtgagttcccctcaggtttgattccaccttcaaatgagcctgctactgaacatccagaaccacagcaagaaacctgacaatatttttgctctcttcaaaagtaattttgactgatc

SEQ ID NO: 420508 - DNA, 120 bp, Artificial Sequence
  ENSG00000150527_40 (sequence is synthesized)
tcattttcagtttaagtaactgctgttacttaagtgattacacttttgctcaaattgaagcttaatggaattataattctcaggatagtattttgtaaataaagatgatttaaatatgaa

SEQ ID NO: 420509 - DNA, 77 bp, Artificial Sequence
  ENSG00000150527_41 (sequence is synthesized)
ctatgttgctcaggtgctttggcctctcaaagtgctggggttacaggcatgagccgccatggctggctgatgattca

SEQ ID NO: 420510 - DNA, 120 bp, Artificial Sequence
  ENSG00000150527_42 (sequence is synthesized)
gacaggccggggttactgtggcgaccacgagagcagctttggcgctatggaggagcccggggttacccctcaaccgtatttggggctgctcctggaggagctacgcagggttgtggcagc

SEQ ID NO: 420511 - DNA, 120 bp, Artificial Sequence
  ENSG00000150527_43 (sequence is synthesized)
agacggtataactatttcaatttgattaatccactattatataaacaatagtgggagttttatatatgtaatctttcaggtggggaggctttaaattctgaagtctgtgtctttatgcca

SEQ ID NO: 420512 - DNA, 120 bp, Artificial Sequence
  ENSG00000150527_44 (sequence is synthesized)
agaactgtatttactgtggttgtggacaaatgtgaaagtaactttatgcttaaataaattatagttgatttaaagatttgtttggcattgataataataaaatcagtagtttttctataa

SEQ ID NO: 420513 - DNA, 120 bp, Artificial Sequence
  ENSG00000150527_45 (sequence is synthesized)
caaaagccttaggctgtgttgtgctgaaggtctgctgtggggagaagtaatgtggaaaggccatggtcagaagatcagggtctttggaggagataatataaataattacccttttttgag

SEQ ID NO: 420514 - DNA, 120 bp, Artificial Sequence
  ENSG00000150527_46 (sequence is synthesized)
cacctgtctggcatgttcaaacagcattattctcattacacttaagagaagggacgcacagaggtagggtggggagattcaaactccaaacccaaatctctatcagtggtgttcaaaact

SEQ ID NO: 420515 - DNA, 120 bp, Artificial Sequence
  ENSG00000150527_47 (sequence is synthesized)
tgtttttattttttgagacaggtcttactttgttgcccaggctggctttgaatcaaactttttatttttaaagctgcaaattgattttttcttcctgtagggaaattgtatattggggaa

SEQ ID NO: 420516 - DNA, 120 bp, Artificial Sequence
  ENSG00000150527_48 (sequence is synthesized)
ctgattatactttacagataaaacctgaactggttgaaatcagggtaagagtacctgaaccctaggtcactcagtttctttctttggccttctcttattctcatccttggaaactttaag

SEQ ID NO: 420517 - DNA, 120 bp, Artificial Sequence
  ENSG00000150527_49 (sequence is synthesized)
tcacctctgtagaactccagtttgaagataattgcatttcaccatactgctgttctttacttggcgatagtgattgaaagttgacaaaaaaatgtactctgatactttctgtttggtgtt

SEQ ID NO: 420518 - DNA, 120 bp, Artificial Sequence
  ENSG00000150527_50 (sequence is synthesized)
agtctggcagcccattttgtgttgaccacataaacttgtacctatgtttgtaatcaatatttttaccaaaagtacatttttaagaacttacttttctttatcttgaaggttgtggcagca

SEQ ID NO: 420519 - DNA, 120 bp, Artificial Sequence
  ENSG00000150527_51 (sequence is synthesized)
aaacagaagagtgcaggatatattagaatctgaaatctttctcaaggatatgaggtgcctggtagaactttatttacatgttaggaaattttaacatgagcttttcaagaaatggaattg

SEQ ID NO: 420520 - DNA, 73 bp, Artificial Sequence
  ENSG00000150527_52 (sequence is synthesized)
ttgtgggcaggaagtggcctacaacttccagcttccaactcctgagctcaagccatcctcccacctcagcctc

SEQ ID NO: 420521 - DNA, 120 bp, Artificial Sequence
  ENSG00000150527_53 (sequence is synthesized)
aaaggagaaatagcaatcttgagttctgaaaagctaggccgcattttggtcctgaaaaatcacttgctgtgaacttgggccagtttttgattttttaaatggcataacagttcgttgcta

SEQ ID NO: 420522 - DNA, 120 bp, Artificial Sequence
  ENSG00000150527_54 (sequence is synthesized)
caagaggttacatcaggaaaatttcctaaggatttaagattttgttcatctattgagttcttttgggtgatttgtttaggaggaagtatctgctcctttttgagttgcttcaccaaagta

SEQ ID NO: 420523 - DNA, 120 bp, Artificial Sequence
  ENSG00000150527_55 (sequence is synthesized)
cttgagtgagaaggcagaatataatgagaatgatcatgctggcaaggaagacatatatatgagatgggttatcctttacacctacgtcagctaaaaccgtctcctacgaacaaatccagc

SEQ ID NO: 420524 - DNA, 120 bp, Artificial Sequence
  ENSG00000150527_56 (sequence is synthesized)
acttggcactttattcgacggtcctaaaaatagagtcctaaatttagaaggcaaggtgctacttttagctcctcttctcggaggaaaacagcacgcaccgcgccaggccaaggtccacgg

SEQ ID NO: 420525 - DNA, 120 bp, Artificial Sequence
  ENSG00000150527_57 (sequence is synthesized)
tttctagggacctcaagctgttcttgtggccgcaatataggatattggtgtccagctggcttatgtgccaacaaggggagtgggaaaataccaattttgtgatctggagatactctagga

SEQ ID NO: 420526 - DNA, 120 bp, Artificial Sequence
  ENSG00000150527_58 (sequence is synthesized)
gtataacaagagggtcgggatgggcagcgtaggcctgtgaggcctgcgggtgcccctgtcccccagctccccccgcagccggctccgcagtggtccactccggttgccgggtgcggattc

SEQ ID NO: 420527 - DNA, 120 bp, Artificial Sequence
  ENSG00000150527_59 (sequence is synthesized)
gccgaagcattggcggatgagactaacgagatctgtgacgactcgtatctgttcaagtggaacagaagccagaaggccctacagtgccgggtagctggcggcgggtaatcaaattgaagc

SEQ ID NO: 420528 - DNA, 120 bp, Artificial Sequence
  ENSG00000150527_60 (sequence is synthesized)
cttggcctaactgtctcggaggctgccatcttgcttggtgctcaacggaagccgactttcaagccttattgtttaaggaatacattttataagactatagctaccatagatagtatttca

SEQ ID NO: 420529 - DNA, 120 bp, Artificial Sequence
  ENSG00000150527_61 (sequence is synthesized)
tctgatggatttgggaaaagtaaagtgaaaacctcaaaaggattcacccttctagatgccattcagagtatttgtgattcatgggaggagattaaagtatcaacattaactggactttgt

SEQ ID NO: 420530 - DNA, 120 bp, Artificial Sequence
  ENSG00000150527_62 (sequence is synthesized)
aaggagtggattccatgtttaaggagtccattccatggaatccatggaatgattttgaggggtctaagacatcaggggaagaggtcaccgcatatgtggtggaagtagcaagagaactag

SEQ ID NO: 420531 - DNA, 120 bp, Artificial Sequence
  ENSG00000150527_63 (sequence is synthesized)
aatcagaagtggagcctgacaatgtgactaaagtgctgctgcaatctcatgataaaacttgaacaaatgaggaattgcttctatggatcagtaaaaaaagtgtgtttttgagatggaatt

SEQ ID NO: 420532 - DNA, 120 bp, Artificial Sequence
  ENSG00000150527_64 (sequence is synthesized)
gtgaagatgctgtgaacattgttgaaataacacaatacttcagatattccatacacttagtagataaagctgccgcagagttcgagaggattgagtccaattttgaaagaagttctgtgg

SEQ ID NO: 420533 - DNA, 120 bp, Artificial Sequence
  ENSG00000150527_65 (sequence is synthesized)
ttctgtggggaaaaagctataaaacatcatggcatactacagagaaaatgtccacaaaaagaaggaatggatgcggcagatttcactgttgtctcatttaagaaattgccagagccaccc

SEQ ID NO: 420534 - DNA, 120 bp, Artificial Sequence
  ENSG00000150527_66 (sequence is synthesized)
agccttcatcaaccaccactgccatcagtcagcagctatcaacatggaggtgatatcctccaccaggaaaaagattatgactcgctgaaggctcagattattattagcattttttagcaa

SEQ ID NO: 420535 - DNA, 120 bp, Artificial Sequence
  ENSG00000150527_67 (sequence is synthesized)
tattttaaaagttaaggtctgtacattttttagacataatgctattgtacacctaatacatttcagtataaacataacttttatgtgcattgtgaaaccaaaaagtttgtgtgacttgct

SEQ ID NO: 420536 - DNA, 120 bp, Artificial Sequence
  ENSG00000150527_68 (sequence is synthesized)
atattgcattattctctttattgtagtggtctggaactgaacctgcaatatctccaaggtagggctgtaccataatgccgagttcccccatctgctaatcatttattgccttatggaaaa

SEQ ID NO: 420537 - DNA, 120 bp, Artificial Sequence
  ENSG00000150527_69 (sequence is synthesized)
acaattgttttcatcagaaattagaatttaactttggtcaatatacaaagctgttgataaagtaaggcatacccatgtagagtatttattgacagctatccaaacaatcttacatttttt

SEQ ID NO: 420538 - DNA, 120 bp, Artificial Sequence
  ENSG00000150527_70 (sequence is synthesized)
ccttcatgtttttcttttcaaagaggcagttttattttgctgcattgttactgtaatttcaaactttatagtttaaacctgttttttcatgtctttccatatccctttaagtctaaattt

SEQ ID NO: 420539 - DNA, 120 bp, Artificial Sequence
  ENSG00000150527_71 (sequence is synthesized)
tatgtccttacctgatttccctctgaaaaatgttttccagagatgtagtgatattgtgatattaatgctaacccaaatgttaatatgccattcatttgagaaatatatttgagagtcttc

SEQ ID NO: 420540 - DNA, 120 bp, Artificial Sequence
  ENSG00000150527_72 (sequence is synthesized)
cgcctccccgccttctcgcggctgcccggccgaaaccaaaccgaggggtggggtggcgaggacagggtacgtcgcaggcttgtgcgggtcgggctcggacctgcgctgcctcgggatgta

SEQ ID NO: 420541 - DNA, 120 bp, Artificial Sequence
  ENSG00000150527_73 (sequence is synthesized)
tttccttttaccaataactttgaggtgcaaaactcaaacttatgtgggtcttttgtgttcaattatgttatgacaaatgtgctctctttcttgtaaatagacatgagtggcccaaagcaa

SEQ ID NO: 420542 - DNA, 120 bp, Artificial Sequence
  ENSG00000150527_74 (sequence is synthesized)
caaattaatacacttttaaaagtcaaaattgattatattttaaagataaccaggatattatctaatggtgaattgtagaattttgatcttcttattcactgagtttcttgcacggtttct

SEQ ID NO: 420543 - DNA, 120 bp, Artificial Sequence
  ENSG00000150527_75 (sequence is synthesized)
ttattgcttttttttccccgcctgttcttttgtaaggtatttactattttctgtggaggatattgagatgtactacaggataactgtagtgaatgatgtgtcatcattttgagctttgga

SEQ ID NO: 420544 - DNA, 120 bp, Artificial Sequence
  ENSG00000150527_76 (sequence is synthesized)
ctcaatatctttagtgtttccctaaatcagatttgtaggtcatgttaagcttcttgcacattaatatgattatggaaggaaaggcagtgaagcataactaataaacatcataatacttaa

SEQ ID NO: 420545 - DNA, 120 bp, Artificial Sequence
  ENSG00000150527_77 (sequence is synthesized)
gaaaagatcagccatgccactgaagagctggagacctatagaaagcgagccaaagatcttgaagaagaattggagagaactattcattcttatcaagggcaggtatatatatatgtgtgt

SEQ ID NO: 420546 - DNA, 120 bp, Artificial Sequence
  ENSG00000150527_78 (sequence is synthesized)
gtgtgtgtgtgtgtgtatatatatataatttaaaacaattctgatttctttgaattgatgcaggaatataattacttgaccagttgtatacctcttttgaggtgttgcatgtggctgtgg

SEQ ID NO: 420547 - DNA, 120 bp, Artificial Sequence
  ENSG00000150527_79 (sequence is synthesized)
gtatacctcttttgaggtgttgcatgtggctgtgggacatttcccaggagccaaagattctgagataagaaatcttatttaaaattgctgtattggctgggtgcagtggctcacaccagt

SEQ ID NO: 420548 - DNA, 120 bp, Artificial Sequence
  ENSG00000150527_80 (sequence is synthesized)
gaagcttgcgcgaagaaggggaagtttgcggctgtccgcgcctccccgccttctcgcggctgcccggccgaaaccaaaccgaggggtggggtggcgaggacagggttgtggcagcactgc

SEQ ID NO: 420549 - DNA, 120 bp, Artificial Sequence
  ENSG00000150527_81 (sequence is synthesized)
tgatatatattggaacacttcaccccagcatttccccaggtgttgtttggaacactgatcttgtgaagtatttttgctccctttctattctaaccctcacctcaaaaaaaaaaaacaaaa

SEQ ID NO: 420550 - DNA, 120 bp, Artificial Sequence
  ENSG00000150540_0 (sequence is synthesized)
ctttctcagaaaaccaaatatggcatcttccatgaggagcttgttttctgaccacgggaaatatgttgaatctttccggaggtttctcaaccattccacggaacaccagtgcatgcagga

SEQ ID NO: 420551 - DNA, 120 bp, Artificial Sequence
  ENSG00000150540_1 (sequence is synthesized)
attcatggacaagaagctgccaggcataataggaaggattggagacacaaaatcagaaattaagattctaagcataggcggaggtgcaggtgaaattgatcttcaaattctctccaaagt

SEQ ID NO: 420552 - DNA, 120 bp, Artificial Sequence
  ENSG00000150540_2 (sequence is synthesized)
tcaggctcaatacccaggagtttgtatcaacaatgaagttgttgagccaagtgctgaacaaattgccaaatacaaagagcttgtagccaagacatcgaacctcgagaacgtaaagtttgc

SEQ ID NO: 420553 - DNA, 120 bp, Artificial Sequence
  ENSG00000150540_3 (sequence is synthesized)
ttggcataaggagacatcatctgaataccaaagtagaatgttggagaaaaaggagcttcaaaagtgggactttattcatatgattcaaatgctgtattatgtaaaagacatcccagctac

SEQ ID NO: 420554 - DNA, 120 bp, Artificial Sequence
  ENSG00000150540_4 (sequence is synthesized)
cctgaaattcttccatagtctcttaggtaccaatgctaagatgctcattattgttgtgtcaggaagcagtggctgggacaagctgtggaaaaagtacggatcacgctttccccaggatga

SEQ ID NO: 420555 - DNA, 120 bp, Artificial Sequence
  ENSG00000150540_5 (sequence is synthesized)
cctctgccagtatatcacatcagatgacctcactcagatgctggacaacctagggcttaagtatgagtgctatgaccttttgtccaccatggatatatctgactgctttattgatggtaa

SEQ ID NO: 420556 - DNA, 120 bp, Artificial Sequence
  ENSG00000150540_6 (sequence is synthesized)
tgaaaatggagacctgctttgggattttttgactgaaacctgcaactttaatgccacagcaccacctgatctcagagcagagcttgggaaagatctacaagagcctgaatttagtgctaa

SEQ ID NO: 420557 - DNA, 120 bp, Artificial Sequence
  ENSG00000150540_7 (sequence is synthesized)
gaaagaggggaaggttctttttaataatactctgagtttcatagtgattgaggcataactatcaatcacaaaagtatattcaaaaattatattttgaacaactcgaatcactcatttatt

SEQ ID NO: 420558 - DNA, 120 bp, Artificial Sequence
  ENSG00000150540_8 (sequence is synthesized)
tccatattaaaatcacaaactcatccattaatgtagataaagcactgtttggatatgagatgtagcaaattccaatacattattggacttccatttggaatcatatgggatactgctggt

SEQ ID NO: 420559 - DNA, 120 bp, Artificial Sequence
  ENSG00000150540_9 (sequence is synthesized)
cttatcctgtccctcctccaggtagagagaccacaagcaggctcaacataacataagctagaaaaattagatgactgaatttctatggcatattgataataaaattcattccatttgctg

SEQ ID NO: 420560 - DNA, 120 bp, Artificial Sequence
  ENSG00000150540_10 (sequence is synthesized)
attgtctgaaattttctagaatactaataaaatacatactatagattctttattagtgaagtatgcactaatcaatactttgaacacaaagcctgtgttactgatttggccgttttgtga

SEQ ID NO: 420561 - DNA, 120 bp, Artificial Sequence
  ENSG00000150540_11 (sequence is synthesized)
agaaacatttatctttgtacgttcttctattgtgctttctatctaatttttattaatttgtaagagtaagcacctttagaatattaaaaattaattctttatcacatgttgtcatttctt

SEQ ID NO: 420562 - DNA, 120 bp, Artificial Sequence
  ENSG00000150540_12 (sequence is synthesized)
cccattgtgttttctcttgtaattttatctgtgaattaatagctttttgtttgtctttttgatatactgaagttttctattatattcagccagatttttttttaagtctcggcttctgat

SEQ ID NO: 420563 - DNA, 120 bp, Artificial Sequence
  ENSG00000150540_13 (sequence is synthesized)
tagaatactaacattttatcaaaataatattatagttttgctttttttaaaaaatgaaatctttactatgtttgaaatttagataagtataaacagtgagaacaaactgtttcccctcaa

SEQ ID NO: 420564 - DNA, 120 bp, Artificial Sequence
  ENSG00000150540_14 (sequence is synthesized)
aacaaactgtttcccctcaaaataatagccagatgtataaacaaaatttattgaagaacaaagaaacacaaaactaaacctgttctagcttaaaatgcagcttttaccagatttctagga

SEQ ID NO: 420565 - DNA, 120 bp, Artificial Sequence
  ENSG00000150540_15 (sequence is synthesized)
attgggtaaatgcaaggttctagaaaaccttcaatgcattttgatactttatagtttcttatgtcactctcaagaactcctataagaccaagagtcatctttggactgtaggatttcagg

SEQ ID NO: 420566 - DNA, 120 bp, Artificial Sequence
  ENSG00000150540_16 (sequence is synthesized)
taggatttcaggggggttttgaaaacaaatttgatgtttcttatttttaataataacgctctgttatttttgacataaacagtacatttaataattaataaataaatattttaagtatgt

SEQ ID NO: 420567 - DNA, 120 bp, Artificial Sequence
  ENSG00000150540_17 (sequence is synthesized)
ctccctgtcacaaacaaaacaaaagtaaggttttactaaacagctcatgagccctcattctgccagtgaggaagccttcaaccccgtgtgatactcactctttcatgcaatagggcttcc

SEQ ID NO: 420568 - DNA, 120 bp, Artificial Sequence
  ENSG00000150540_18 (sequence is synthesized)
atgtaatgttgccgtataatcactttaaaaagttaaacgacccatctcaatcacctagtttatccccagggaatacactggcatagagagcctatttacactaataaactaccaagcttt

SEQ ID NO: 420569 - DNA, 120 bp, Artificial Sequence
  ENSG00000150540_19 (sequence is synthesized)
gttgttcataataagtaaaatggacttgcattgctctcttttttggacaacttcatcaatgctttttgaattatatgtttcaacaaatgaaacgacagttatccaatcagattcctgaaa

SEQ ID NO: 420570 - DNA, 120 bp, Artificial Sequence
  ENSG00000150540_20 (sequence is synthesized)
atgaacactgaaccgttaatcatactgatatgtactactgacaaaggaaatctgtgaggcacacatgattgatgggtatggggccatgaagaccttgaagagcttcaccagaagtatgga

SEQ ID NO: 420571 - DNA, 120 bp, Artificial Sequence
  ENSG00000150540_21 (sequence is synthesized)
aatcaagactttacagagtcttttgtataaagcacacgtgcaaaaacaaacaaaattagaactaacaatgctattgaaagatacaaaagaattgcagtccatagattggtgtttgtaaat

SEQ ID NO: 420572 - DNA, 120 bp, Artificial Sequence
  ENSG00000150540_22 (sequence is synthesized)
atggcctttttctcgtccttattaaacccttagtatacaaggataaataaattctcacctgcttaattttagtgcaattgaaacacataagcctttttaaagagagaaattcccatgaaa

SEQ ID NO: 420573 - DNA, 120 bp, Artificial Sequence
  ENSG00000150540_23 (sequence is synthesized)
acctactagtcagcaatgggaagttgtataaattcaagggataaacctatccctgttttcttcctgcactgtatgataataccaaaatttgggacagtcacatactaacttttcagattt

SEQ ID NO: 420574 - DNA, 120 bp, Artificial Sequence
  ENSG00000150540_24 (sequence is synthesized)
gttcttgtgtttcagaaaaaagtgctcagcatgaatttggaatgttgttttatgtattgttgtggatctctcagtgtttaacatggtgccttgcatatggtaaatgctaagtaaagcggg

SEQ ID NO: 420575 - DNA, 120 bp, Artificial Sequence
  ENSG00000150540_25 (sequence is synthesized)
atcaatgaattatttccttctcaaacatttatcttataccttgtgtgttcatattattattataaacagagctcaagaaacccaataaagttatgtgttgccagtgtaaaccttaactta

SEQ ID NO: 420576 - DNA, 120 bp, Artificial Sequence
  ENSG00000150540_26 (sequence is synthesized)
cagtcttccgttaaagatttcactgctgtagatttctgagagtgctgtgtagctgtcctctttatcctggtgtttgccacttcgaacagtcactttcccacttggaacttacttgtggct

SEQ ID NO: 420577 - DNA, 120 bp, Artificial Sequence
  ENSG00000150540_27 (sequence is synthesized)
gactcagtaatgagctctacaagccagcctttgtggcatgttaaattcaaaacaagcttagcatttttttttttttttttggatagaaactggtgggggtggggaaagaaagagggaact

SEQ ID NO: 420578 - DNA, 120 bp, Artificial Sequence
  ENSG00000150540_28 (sequence is synthesized)
gcgctcttctgagttgccatttggagctgcccgtttagaaagcaaatctgcatttccctcattcctagtttccttcatcctcttttaagtgtcatcttttccatgaagcctactagatca

SEQ ID NO: 420579 - DNA, 120 bp, Artificial Sequence
  ENSG00000150540_29 (sequence is synthesized)
cacagttgaaaattgcaaagtcttcacaccgcagcttcccctttctttgttgctttggttttctccgtgggacttcccaccatccgtaaaattaggtgtttttgcctgttttattcactg

SEQ ID NO: 420580 - DNA, 120 bp, Artificial Sequence
  ENSG00000150540_30 (sequence is synthesized)
ctacgtctccaatggttagaacctgacatttagtgggtgctcaataatatttgttgaagtaatgtataataacttcactttcttgagtaattactatatatcatgaactgtggtaaatta

SEQ ID NO: 420581 - DNA, 120 bp, Artificial Sequence
  ENSG00000150540_31 (sequence is synthesized)
aaaagtgggactttattcatatgattcaagtaaatgaaaatcttctgatttctaattttacaagtgaccatgatctgcccaaataaaaggtaaagatgtttattatactaagattctctt

SEQ ID NO: 420582 - DNA, 120 bp, Artificial Sequence
  ENSG00000150540_32 (sequence is synthesized)
gcatgcaggaattcatggacaagaagctgccaggcataataggaagataccagaattgctgttaacaaataaaatactggccagatgtgttggttcacgcctgtaatcctagcacttcgg

SEQ ID NO: 420583 - DNA, 120 bp, Artificial Sequence
  ENSG00000150540_33 (sequence is synthesized)
atagcaagatcccatctctacaaaaaagtgaaaaagttagctgaacaaggcggcatgcacatgctactccagacgctgaagtgggaagatcacttaagtccgagagatcgaggcttcagt

SEQ ID NO: 420584 - DNA, 120 bp, Artificial Sequence
  ENSG00000150540_34 (sequence is synthesized)
gagatcgaggcttcagtgagatatggctgagacactgctctcagcctggatgacagaaatcttcttacgtctagtattctgaaattttaaaatactgagctgtgaaatggttccttttta

SEQ ID NO: 420585 - DNA, 120 bp, Artificial Sequence
  ENSG00000150540_35 (sequence is synthesized)
cccattttatgggtactccctgggctatttcaattgagattcagatccttcagttatgcggaactttggattggagacacaaaatcagaaattaagattctaagcataggcggaggtgca

SEQ ID NO: 420586 - DNA, 120 bp, Artificial Sequence
  ENSG00000150540_36 (sequence is synthesized)
gggcggggccaagatggccgactagaaacagcagcgtttggaggcccccattgaaaaaaaacataagcttgtgaatacttcaccagcaaccaaggcatccaggttctctcatcagaactg

SEQ ID NO: 420587 - DNA, 120 bp, Artificial Sequence
  ENSG00000150540_37 (sequence is synthesized)
tccgagagatcgaggcttcagtgagatatggctgagacactgctctcagcctggatgacagagtgagaacctgtctcaaacaagagaaaaaaataaatcaaatgctactcaaaattctca

SEQ ID NO: 420588 - DNA, 120 bp, Artificial Sequence
  ENSG00000150551_0 (sequence is synthesized)
ccttcagtctcagccgccaactccggaggcgcggtgctcggcccgggagcgcgagcgggaggagcagagacccgcagccgggagcccgagcgcgggcgatgcaggctccgcgagcggcac

SEQ ID NO: 420589 - DNA, 120 bp, Artificial Sequence
  ENSG00000150551_1 (sequence is synthesized)
ctgcggctcctctaagctacgaccgtcgtctccgcggcagcagcgcgggccccagcagcctcggcagccacagccgctgcagccggggcagcctccgctgctgtcgcctcctctgatgcg

SEQ ID NO: 420590 - DNA, 120 bp, Artificial Sequence
  ENSG00000150551_2 (sequence is synthesized)
cttgccctctcccggccccgggactccgggagaatgtgggtcctaggcatcgcggcaactttttgcggattgttcttgcttccaggctttgcgctgcaaatccagtgctaccagtgtgaa

SEQ ID NO: 420591 - DNA, 120 bp, Artificial Sequence
  ENSG00000150551_3 (sequence is synthesized)
gaattccagctgaacaacgactgctcctcccccgagttcattgtgaattgcacggtgaacgttcaagacatgtgtcagaaagaagtgatggagcaaagtgccgggatcatgtaccgcaag

SEQ ID NO: 420592 - DNA, 120 bp, Artificial Sequence
  ENSG00000150551_4 (sequence is synthesized)
tcctgtgcatcatcagcggcctgtctcatcgcctctgccgggtaccagtccttctgctccccagggaaactgaactcagtttgcatcagctgctgcaacacccctctttgtaacgggcca

SEQ ID NO: 420593 - DNA, 120 bp, Artificial Sequence
  ENSG00000150551_5 (sequence is synthesized)
aggcccaagaaaaggggaagttctgcctcggccctcaggccagggctccgcaccaccatcctgttcctcaaattagccctcttctcggcacactgctgaagctgaaggagatgccacccc

SEQ ID NO: 420594 - DNA, 120 bp, Artificial Sequence
  ENSG00000150551_6 (sequence is synthesized)
ctcctgcattgttcttccagccctcgcccccaaccccccacctccctgagtgagtttcttctgggtgtccttttattctgggtagggagcgggagtccgtgttctcttttgttcctgtgc

SEQ ID NO: 420595 - DNA, 120 bp, Artificial Sequence
  ENSG00000150551_7 (sequence is synthesized)
aaataatgaaagagctcggtaaagcattctgaataaattcagcctgactgaattttcagtatgtacttgaaggaaggaggtggagtgaaagttcacccccatgtctgtgtaaccggagtc

SEQ ID NO: 420596 - DNA, 120 bp, Artificial Sequence
  ENSG00000150551_8 (sequence is synthesized)
aaggccaggctggcagagtcagtccttagaagtcactgaggtgggcatctgccttttgtaaagcctccagtgtccattccatccctgatgggggcatagtttgagactgcagagtgagag

SEQ ID NO: 420597 - DNA, 120 bp, Artificial Sequence
  ENSG00000150551_9 (sequence is synthesized)
tgacgttttcttagggctggagggccagttcccactcaaggctccctcgcttgacattcaaacttcatgctcctgaaaaccattctctgcagcagaattggctggtttcgcgcctgagtt

SEQ ID NO: 420598 - DNA, 120 bp, Artificial Sequence
  ENSG00000150551_10 (sequence is synthesized)
gggctctagtgactcgagactcaatgactgggacttagactggggctcggcctcgctctgaaaagtgcttaagaaaatcttctcagttctccttgcagaggactggcgccgggacgcgaa

SEQ ID NO: 420599 - DNA, 120 bp, Artificial Sequence
  ENSG00000150551_11 (sequence is synthesized)
gagcaacgggcgctgcacaaagcgggcgctgtcggtggtggagtgcgcatgtacgcgcaggcgcttctcgtggttggcgtgctgcagcgacaggcggcagcacagcacctgcacgaacac

SEQ ID NO: 420600 - DNA, 120 bp, Artificial Sequence
  ENSG00000150551_12 (sequence is synthesized)
ccgccgaaactgctgcgaggacaccgtgtacaggagcgggttgatgaccgagctgaggtagaaaaacgtctccgagaaggggaggaggatcatgtacgcccggaagtaggacctcgtcca

SEQ ID NO: 420601 - DNA, 120 bp, Artificial Sequence
  ENSG00000150551_13 (sequence is synthesized)
gtcgtgcttgggtttggccgcagccatgatcctccgaatctggttgggcatccagcatacggccaatgtcacaacaatcagccctgggcagacacgagcaggagggagagacagagaaaa

SEQ ID NO: 420602 - DNA, 120 bp, Artificial Sequence
  ENSG00000150551_14 (sequence is synthesized)
agtgttggacttgacagcttcttttgccacaagcaagagagaatttaacactgtttcaaacccgggggagttggctgtgttaaagaaagaccattaaatgctttagacagtgtatttata

SEQ ID NO: 420603 - DNA, 120 bp, Artificial Sequence
  ENSG00000150551_15 (sequence is synthesized)
ccagttgatgtctgttaattttaaaaaaatgttttcattggtgtttgtttgcgtatccagaaagcagttcatgttatccataaatctggttttgtctttttttgttttaaagaaaaagat

SEQ ID NO: 420604 - DNA, 120 bp, Artificial Sequence
  ENSG00000150551_16 (sequence is synthesized)
gtatacatacagtatagctgcattagataaagcagtgtttgtattttaaaggatgtctgcacaaagaagacctagtgatatttttaaatcaaatggaagaagtgtccctttggcaacaaa

SEQ ID NO: 420605 - DNA, 120 bp, Artificial Sequence
  ENSG00000150551_17 (sequence is synthesized)
gcagcatatttaatgacactggttttgcattcagtttcaggggaagcaaagtcaggaatagcctgtcgccaagaatgttttttggacatatacatactaggtatgcacacctataatcat

SEQ ID NO: 420606 - DNA, 120 bp, Artificial Sequence
  ENSG00000150551_18 (sequence is synthesized)
gatgctcatatctgcaacagcatatgtgtttcttttcagacacttttagatccctcatgtggggaaaaagaattattcagagatggcaaatataaaacttccttctagttcagccagtaa

SEQ ID NO: 420607 - DNA, 120 bp, Artificial Sequence
  ENSG00000150551_19 (sequence is synthesized)
catgttcccttcctttgcagcactgagctgtgctgtcaacagcccagaagcaatcaggccctagagaagagaccactcaaaggcccttctgtagatcaaatgtttactgcatgtacattt

SEQ ID NO: 420608 - DNA, 120 bp, Artificial Sequence
  ENSG00000150551_20 (sequence is synthesized)
gtttgcatgcccacatatttgtattccaacttaagtaaccaccaccagttctgcaattctgactgacagagataaagatgctacatagaccacaaacaactgaaatcacaggtatcatga

SEQ ID NO: 420609 - DNA, 120 bp, Artificial Sequence
  ENSG00000150551_21 (sequence is synthesized)
gagtttagttacagtgacaaaagcaaaaaagaacaaaggaagatcaggggatctgtgaagcatttgctctctcttttcgtaaggagccaagacacccacagtaaattcccctgtagagag

SEQ ID NO: 420610 - DNA, 120 bp, Artificial Sequence
  ENSG00000150551_22 (sequence is synthesized)
ctgctaccttaaagcaggatttgcattttcagaaatgcttccttcctctcctacatttcaatcgtagtaagaaacatttactcacattttcaatcttctgattttctagaaaccctaggg

SEQ ID NO: 420611 - DNA, 120 bp, Artificial Sequence
  ENSG00000150551_23 (sequence is synthesized)
aagtgacagttggcaatgaatgcttcctgcctatgacccatggtaaatattctattaataaatgggggccagacatggtggcgcatgcctgatatctcaatactctgggaggccaaggca

SEQ ID NO: 420612 - DNA, 88 bp, Artificial Sequence
  ENSG00000150551_24 (sequence is synthesized)
gaaaaacttagccaggcatggtggtacatacacacctgtggtctcagatactttttgggggctgaggcgggaggatcacttgagccca

SEQ ID NO: 420613 - DNA, 86 bp, Artificial Sequence
  ENSG00000150551_25 (sequence is synthesized)
ggaggtgaaggctacagtgagacacgaataactgtctcaataaaccaataaataaatgctccaggaaaaaacagccacattcacac

SEQ ID NO: 420614 - DNA, 120 bp, Artificial Sequence
  ENSG00000150551_26 (sequence is synthesized)
aataaataaatgctccaggaaaaaacagccacattcacacatccagaattgagcctcctgtatgcactggcctgagtattccttgcctgctgttggaggggaccctagctgtgttcaaat

SEQ ID NO: 420615 - DNA, 120 bp, Artificial Sequence
  ENSG00000150551_27 (sequence is synthesized)
cctccacaaatccatatgtgagcaaggaaggccttggaaactcttctcctttgttaatttccacaggtttctcctgtcaactcccagcctaaaactttgaaatataagccaatttgttta

SEQ ID NO: 420616 - DNA, 120 bp, Artificial Sequence
  ENSG00000150551_28 (sequence is synthesized)
gaaatgaaagaagggggagagggagggagggagggagagaaggagcctgaggcagatatggaacgatctctgcagaggaattacaaagaaagtcatttaagcccctttacagaccagctc

SEQ ID NO: 420617 - DNA, 120 bp, Artificial Sequence
  ENSG00000150551_29 (sequence is synthesized)
tgctgggaggatgcagaaataaatgatcagcgtcccggcgtgagagagctgcccccagaagtggccgggggagaaaagggtgaagaggagctaaagcttaggaggcgatttccacggaaa

SEQ ID NO: 420618 - DNA, 120 bp, Artificial Sequence
  ENSG00000150551_30 (sequence is synthesized)
tggatgctccctaaggatgtgcggaaaggggatgggaatgtgcggattgggggcgggggcaccaacgcactccggcgggcaagcggtctcccgcaccacctgctgcaaggctcgggaagg

SEQ ID NO: 420619 - DNA, 120 bp, Artificial Sequence
  ENSG00000150556_0 (sequence is synthesized)
cccgcgcggtagcagccaacgccggccccaggcgggtgcgctgggagcctgggccgggagccgggtgagggcgccgagaggctcggtgggcgcgggcggcgagatatgccacacttctgc

SEQ ID NO: 420620 - DNA, 120 bp, Artificial Sequence
  ENSG00000150556_1 (sequence is synthesized)
ctgctgttggcaaccctcctggactaggctgctcttgttaatcacatggatgttgctgattactctgagtgcaaaccttttcactgttccagagaggagcctgacaaccacattctcctt

SEQ ID NO: 420621 - DNA, 120 bp, Artificial Sequence
  ENSG00000150556_2 (sequence is synthesized)
ctcaagatataagagttcggaccgcccagcacacaaggtcagcatgctgctcctctgtcacgctctcgctatagctgttgtccagatcgttatcttctcagaaagctgggcatttgccaa

SEQ ID NO: 420622 - DNA, 120 bp, Artificial Sequence
  ENSG00000150556_3 (sequence is synthesized)
gaacatcaacttctataatgtgaggcctcctctcgaccctacaccatttccaaatagcttcaagtgctttacttgtgaaaacgcaggggataattataactgcaatcgatgggcagaaga

SEQ ID NO: 420623 - DNA, 120 bp, Artificial Sequence
  ENSG00000150556_4 (sequence is synthesized)
caaatggtgtccacaaaatacacagtactgtttgacagttcatcacttcaccagccacggaagaagcacatccatcaccaaaaagtgtgcctccagaagtgaatgtcattttgtcggttg

SEQ ID NO: 420624 - DNA, 120 bp, Artificial Sequence
  ENSG00000150556_5 (sequence is synthesized)
acggagtgtaggtcttgctgtgaaggaatgatctgcaatgtagaattacccaccaatcacactaatgcagtgtttgccgtaatgcacgctcagagaacatctggcagcagtgcccccaca

SEQ ID NO: 420625 - DNA, 120 bp, Artificial Sequence
  ENSG00000150556_6 (sequence is synthesized)
ctctacctaccagtgcttgcctgggtctttgtgcttccattgctgtgatgccaccattcctaggagaggcagagaccagcctctaaagcacaagccaaaaactgtgtgaacggtgaactt

SEQ ID NO: 420626 - DNA, 120 bp, Artificial Sequence
  ENSG00000150556_7 (sequence is synthesized)
tggagtgaagatcaatcttgcacttggtgaagagtgcacattggacctcaaggcgaaagccagtggtttgcttggataaaatgttcccgcatgaggccacaggactgaggatgggaattt

SEQ ID NO: 420627 - DNA, 120 bp, Artificial Sequence
  ENSG00000150556_8 (sequence is synthesized)
ggcagggcctgagaagatggtctgacttccaggcttcctggtcaaagagagctacgtttgggcagttctgcagagaggatcctggcaactagtcccacctgactaggcctttagctgaaa

SEQ ID NO: 420628 - DNA, 120 bp, Artificial Sequence
  ENSG00000150556_9 (sequence is synthesized)
ggatttcttgacctccttgactgcctcagaggctgccaggtcaaaccctcttgtttatgtgattagctcagagcatctctatgaaatctaacccttcccctcatgagaaagcagttttcc

SEQ ID NO: 420629 - DNA, 120 bp, Artificial Sequence
  ENSG00000150556_10 (sequence is synthesized)
ccaccaacagcatagtcaatgagaaaggcaactgtacgaagaaaacttccagtggaactaatatgaaatctatttgcaaattatggggggaaataaagcttttaaattatacaatgtaaa

SEQ ID NO: 420630 - DNA, 120 bp, Artificial Sequence
  ENSG00000150556_11 (sequence is synthesized)
ctctgctggagcaggacttcagagtgtttgttttcagcctgcttttaaagtgatttgaagagagtggctttgaagattatcgcggaacacctgcccattaatcttgaccctgttaaaaca

SEQ ID NO: 420631 - DNA, 120 bp, Artificial Sequence
  ENSG00000150556_12 (sequence is synthesized)
aaagctctggtgattcagtagtggacgggactctgctggagcaggacttcagagtgtttgttttcagcctgcttttaaagtgatttgaagagagtggctttgaagtgtgtgccttcggca

SEQ ID NO: 420632 - DNA, 120 bp, Artificial Sequence
  ENSG00000150556_13 (sequence is synthesized)
aaagaggcatacctccaaattcagctgattactcagctattcaatatcagcgcgactgaagggaacctagccatctccatgaaggggtgcttctccgccagagccagtctccaatgtagc

SEQ ID NO: 420633 - DNA, 120 bp, Artificial Sequence
  ENSG00000150556_14 (sequence is synthesized)
attgagcaactgcactcaccaaaggcagaaaatagaaaggaattggggtgggacatcacagccctaaaaagccctaaaagacactgaattatgaatttatagtaactagtgaaaatgctg

SEQ ID NO: 420634 - DNA, 120 bp, Artificial Sequence
  ENSG00000150556_15 (sequence is synthesized)
cggcttaagtaatgcttggcaaaccatcatgtatagttgtgtctattgatcactgcccaagggcaccagccaagagctgaaggggggccaagatccacctcatgtgctgtctggcagaag

SEQ ID NO: 420635 - DNA, 120 bp, Artificial Sequence
  ENSG00000150556_16 (sequence is synthesized)
agtgtgtgtgctggggctggggcggctacatagctgtgactaccagggggtgcagtctctggggaccaccactaccgaggctgggtaccatgattatcgcggaacacctgcccattaatc

SEQ ID NO: 420636 - DNA, 120 bp, Artificial Sequence
  ENSG00000150556_17 (sequence is synthesized)
aagaaaggattctgtggtttttctaagtctctcaagccagtggacagccacggcactcagcataattgggctgattactctgagtgcaaaccttttcactgttccagagaggagcctgac

SEQ ID NO: 420637 - DNA, 120 bp, Artificial Sequence
  ENSG00000150556_18 (sequence is synthesized)
aaccacattctccttctcaaggtgtggtgcttactgcgcaggctgaccagatataagagttcggaccgcccagcacacaaggtcagcatgctgctcctctgtcacgctctcgctatagct

SEQ ID NO: 420638 - DNA, 120 bp, Artificial Sequence
  ENSG00000150556_19 (sequence is synthesized)
gtctgctatcatttaccttatggattcctgtatatgcaaccctgcccatgctgcatattagaaacttctgctcagcttttaaaaaatactggtgttctggccaacttcacttaagaccag

SEQ ID NO: 420639 - DNA, 120 bp, Artificial Sequence
  ENSG00000150556_20 (sequence is synthesized)
agttgcaaaatttatcaaatgcaaatgttgactcaaggaatggaactgacagataggtggtccagtgactttggctcaacatgcctcagaaccacggttgatttgagaaatccagtgatt

SEQ ID NO: 420640 - DNA, 120 bp, Artificial Sequence
  ENSG00000150556_21 (sequence is synthesized)
cagcacagaggaaaccagctagccgcagtcactgagggaatggggtgcagccaggccagctctgcctgcttgtcattacttacctttcatttgatcaaaaacaatgcaatttactcgcag

SEQ ID NO: 420641 - DNA, 120 bp, Artificial Sequence
  ENSG00000150556_22 (sequence is synthesized)
tttcagctgaatattggaaagtaagattccctgcgagcaggatctcaggcaacgtcaatgaacaacatgaagcctgacacattctaattagtctaaggaaaatggtgacagaggatatat

SEQ ID NO: 420642 - DNA, 120 bp, Artificial Sequence
  ENSG00000150556_23 (sequence is synthesized)
tccgtaacgtctcaggaggtcgcctggctccagagagtgtaaaatgccacacgttggatgagatgattatccgagctcagacttgggaaatagtcatgcttctggaccaagtgccaggta

SEQ ID NO: 420643 - DNA, 120 bp, Artificial Sequence
  ENSG00000150556_24 (sequence is synthesized)
ctctcgaccacaagtaaaacgtctttgatatactttattagagagtgattcttataaataaaaaattatttggtatacatgtgggtacctgtagttcccacgcctggaagagtatcagaa

SEQ ID NO: 420644 - DNA, 120 bp, Artificial Sequence
  ENSG00000150556_25 (sequence is synthesized)
tcatgatgaaaggatttttaactgcatatccctaatcacttctccagagatttaacagtcaagaggctacaccatttccaaatagcttcaagtgctttacttgtgaaaacgcaggggata

SEQ ID NO: 420645 - DNA, 120 bp, Artificial Sequence
  ENSG00000150556_26 (sequence is synthesized)
gcaattttttgattattttattttcctatggattgccaataggtctaaataacctccttagttgtactggcaggaccaagtaaaaagacaagggatgaaaaggagggaaggaaaaaaagg

SEQ ID NO: 420646 - DNA, 120 bp, Artificial Sequence
  ENSG00000150556_27 (sequence is synthesized)
aaagaaagagagaaagagcgaggaaatatgagaaagaaaaagaggagggaaagaggaaagagagaattgtcttgggaaggtgatataggccactaattactttagagctgcaagcctcct

SEQ ID NO: 420647 - DNA, 120 bp, Artificial Sequence
  ENSG00000150593_0 (sequence is synthesized)
agagactctccgaggcggcggcagagacagaagagcggggtcggggccggctgaccaggaacctgggcgagcagcggcgggggcccgagggattctgaaggaagatttccattaggtaat

SEQ ID NO: 420648 - DNA, 120 bp, Artificial Sequence
  ENSG00000150593_1 (sequence is synthesized)
ttgtttaatcagtgcaagcgaaattaagggaaaatggatgtagaaaatgagcagatactgaatgtaaaccctgcagatcctgataacttaagtgactctctcttttccggtgatgaagaa

SEQ ID NO: 420649 - DNA, 120 bp, Artificial Sequence
  ENSG00000150593_2 (sequence is synthesized)
aatgctgggactgaggaaataaagaatgaaataaatggaaattggatttcagcatcctccattaacgaagctagaattaatgccaaggcaaaaaggcgactaaggaaaaactcatcccgg

SEQ ID NO: 420650 - DNA, 120 bp, Artificial Sequence
  ENSG00000150593_3 (sequence is synthesized)
gactctggcagaggcgattcggtcagcgacagtgggagtgacgcccttagaagtggattaactgtgccaaccagtccaaagggaaggttgctggataggcgatccagatctgggaaagga

SEQ ID NO: 420651 - DNA, 120 bp, Artificial Sequence
  ENSG00000150593_4 (sequence is synthesized)
aggggactaccaaagaaaggtggtgcaggaggcaaaggtgtctggggtacacctggacaggtgtatgatgtggaggaggtggatgtgaaagatcctaactatgatgatgaccaggagaac

SEQ ID NO: 420652 - DNA, 120 bp, Artificial Sequence
  ENSG00000150593_5 (sequence is synthesized)
tgtgtttatgaaactgtagttttgcctttggatgaaagggcatttgagaagactttaacaccaatcatacaggaatattttgagcatggagatactaatgaagttgcggaaatgttaaga

SEQ ID NO: 420653 - DNA, 120 bp, Artificial Sequence
  ENSG00000150593_6 (sequence is synthesized)
gatttaaatcttggtgaaatgaaaagtggagtaccagtgttggcagtatccttagcattggaggggaaggctagtcatagagagatgacatctaagcttctttctgacctttgtgggaca

SEQ ID NO: 420654 - DNA, 120 bp, Artificial Sequence
  ENSG00000150593_7 (sequence is synthesized)
gtaatgagcacaactgatgtggaaaaatcatttgataaattgttgaaagatctacctgaattagcactggatactcctagagcaccacagttggtgggccagtttattgctagagctgtt

SEQ ID NO: 420655 - DNA, 120 bp, Artificial Sequence
  ENSG00000150593_8 (sequence is synthesized)
ggagatggaattttatgtaatacctatattgatagttacaaaggaactgtagattgtgtgcaggctagagctgctctggataaggctaccgtgcttctgagtatgtctaaaggtggaaag

SEQ ID NO: 420656 - DNA, 120 bp, Artificial Sequence
  ENSG00000150593_9 (sequence is synthesized)
cgtaaagatagtgtgtggggctctggaggtgggcagcaatctgtcaatcaccttgttaaagagattgatatgctgctgaaagaatatttactctctggagacatatctgaagctgaacat

SEQ ID NO: 420657 - DNA, 120 bp, Artificial Sequence
  ENSG00000150593_10 (sequence is synthesized)
tgccttaaggaactggaagtacctcattttcaccatgagcttgtatatgaagctattataatggttttagagtcaactggagaaagtacatttaagatgattttggatttattaaagtcc

SEQ ID NO: 420658 - DNA, 120 bp, Artificial Sequence
  ENSG00000150593_11 (sequence is synthesized)
ctttggaagtcttctaccattactgtagaccaaatgaaaagaggttatgagagaatttacaatgaaattccggacattaatctggatgtcccacattcatactctgtgctggagcggttt

SEQ ID NO: 420659 - DNA, 120 bp, Artificial Sequence
  ENSG00000150593_12 (sequence is synthesized)
gtagaagaatgttttcaggctggaataatttccaaacaactcagagatctttgtccttcaaggggcagaaagcgttttgtaagcgaaggagatggaggtcgtcttaaaccagagagctac

SEQ ID NO: 420660 - DNA, 120 bp, Artificial Sequence
  ENSG00000150593_13 (sequence is synthesized)
tgaatataagaactcttgcagtcttagatgttataaaaatatatatctgaattgtaagagttgttagcacaagttttttttttttttttttttaagcacttgttttgggtacaaggcatt

SEQ ID NO: 420661 - DNA, 120 bp, Artificial Sequence
  ENSG00000150593_14 (sequence is synthesized)
ctgacattttataaacctacatttaaggggaatttttaaaggaaatgttttttcttttttttttgtttttcgagggggcaaggagggacagaaaagtaacctcttcttaagtggaatatt

SEQ ID NO: 420662 - DNA, 120 bp, Artificial Sequence
  ENSG00000150593_15 (sequence is synthesized)
ctaataagctaccttttgtaagtgccatgtttattatctaatcattccaagttttgcattgatgtctgactgccactcctttctttcaaggacagtgttttttgtagtaaaatcactggt

SEQ ID NO: 420663 - DNA, 120 bp, Artificial Sequence
  ENSG00000150593_16 (sequence is synthesized)
ttatacaaagctttatttagggggtaaagttaagctgctaaaaccccatgttggctgctgctgttgagatactgtgctttgggagtaaaaaaagaaagttatttctttgtcttaaagaat

SEQ ID NO: 420664 - DNA, 120 bp, Artificial Sequence
  ENSG00000150593_17 (sequence is synthesized)
ttttaaaaaattagtcatgagacttattcatctttccagggaacatactgattggtcttaaaagactagacagttaagtaaaaggtggctggaacatctatttttctacaaaactggaaa

SEQ ID NO: 420665 - DNA, 120 bp, Artificial Sequence
  ENSG00000150593_18 (sequence is synthesized)
aatgaacctggttctagaagaatgtacaccaaaataaaacatgtgaagcagtattgattctttattgggagtacatttttttaggtctcttaaactttaatttcacacagtaaattttga

SEQ ID NO: 420666 - DNA, 120 bp, Artificial Sequence
  ENSG00000150593_19 (sequence is synthesized)
atctcataaggaagcatatttgaacctagtcaatttaatcttagtgttcccttgaaaactttttttccctacaaaattttaagtgaaaaatacaatagtaaattaagattacactgggga

SEQ ID NO: 420667 - DNA, 120 bp, Artificial Sequence
  ENSG00000150593_20 (sequence is synthesized)
aaaaaatgcaggtatcactttactccattgttatctgacctagagcttaattaagttttagaaatatgtaataccttccatcattccatcatccttaaattctgttaccaaataatggct

SEQ ID NO: 420668 - DNA, 120 bp, Artificial Sequence
  ENSG00000150593_21 (sequence is synthesized)
aatgttacaaaaagttatactccagagacccaaagcttgacatttacctaatgtatgagaaaatattaccaattaacaataaagaatgatcatatttttaacctcttttacatagcctaa

SEQ ID NO: 420669 - DNA, 120 bp, Artificial Sequence
  ENSG00000150593_22 (sequence is synthesized)
taactcagcaaggcctcaacgtctgtgctaatttaaactgccaaatattgactgcagcaaacaagaattatattcagaatttatgagggtactgttaggagtatactgcttacaggttta

SEQ ID NO: 420670 - DNA, 120 bp, Artificial Sequence
  ENSG00000150593_23 (sequence is synthesized)
gatatagtctgttagaattaaaaccaagtttagtgttcatatttacctcatgggctttatcaagcccatattacctcagcttatatatagttaccatttttaggtttttaattgtttgac

SEQ ID NO: 420671 - DNA, 120 bp, Artificial Sequence
  ENSG00000150593_24 (sequence is synthesized)
acttggatgataaatgcagtcattttattctcaagtgcttaaaattaatgtaattaaaagcttagctgactacagaataggtgagggtttcttaaaaatgagatttaagggctgggcacg

SEQ ID NO: 420672 - DNA, 90 bp, Artificial Sequence
  ENSG00000150593_25 (sequence is synthesized)
aggccgaggtgggcggatcacttgaggttgggagttcatgaccagcttgaccaacatgagtagccaggcatggtggcgcatgcgtgtaat

SEQ ID NO: 420673 - DNA, 120 bp, Artificial Sequence
  ENSG00000150593_26 (sequence is synthesized)
ctcttgtctcaaaaaaaaaaaaaaatgaggtttaagacagttttgtcattactggtgggatctggtcacacaagatagcattaaacgtgacatggcacataaaattggttaaaaaatttt

SEQ ID NO: 420674 - DNA, 120 bp, Artificial Sequence
  ENSG00000150593_27 (sequence is synthesized)
aaaattggttaaaaaattttgttttttaattacgtaatgtaaaagcccaacaaacactttatgcaagattggaatgtatcttcaaattcagatttaataaacatgtaaagatcctctgta

SEQ ID NO: 420675 - DNA, 120 bp, Artificial Sequence
  ENSG00000150593_28 (sequence is synthesized)
tggaggtgggcagcaatctgtcaatcaccttgttaaagaggtaatgattgggtattgtttttaacttaatttatatgtattcctctgagtgaaataaattgtggctactagctggtattt

SEQ ID NO: 420676 - DNA, 120 bp, Artificial Sequence
  ENSG00000150593_29 (sequence is synthesized)
ttatggacaaaaattaagttcggtcttacagctgcaattggaaaatgaaataatttttttaatatgtggctttataaccttttattataaattatatgattaaaaaatgagtctgttaaa

SEQ ID NO: 420677 - DNA, 120 bp, Artificial Sequence
  ENSG00000150593_30 (sequence is synthesized)
tttcaccatgagcttgtatatgaaggttatgagagaatttacaatgaaattccggacattaatctggatgtcccacattcatactctgtgctggagcggtttgtagaagaatgttttcag

SEQ ID NO: 420678 - DNA, 120 bp, Artificial Sequence
  ENSG00000150593_31 (sequence is synthesized)
gcagtgacatataaattctactatttttattatgatttattattattattttttagctttgttgtccaggctggagtgcagtgatgaattatagctcactgcagcctcgaactcttgggc

SEQ ID NO: 420679 - DNA, 120 bp, Artificial Sequence
  ENSG00000150593_32 (sequence is synthesized)
gaactcttgggcttaagagatccttctgcctcagcttcctgagtagctaggactacaggggcaagctaccatgtctggctaatttttaaaacttttttgtagagacagggtcttgctatg

SEQ ID NO: 420680 - DNA, 120 bp, Artificial Sequence
  ENSG00000150593_33 (sequence is synthesized)
gtattgaactccaggcctcaagtgaacctcccgcctttgcctcccaaagtgttgggattataggtatgagtctccttgcctggcctagattctatttttatatgcgatcaatgtatgtag

SEQ ID NO: 420681 - DNA, 120 bp, Artificial Sequence
  ENSG00000150593_34 (sequence is synthesized)
catgtctttgtcttgtgctaagtggggattattaaccacttagaatataaaattgtacaacaatttcacttgtttatttgcattttgttttttataactcttactcccttttcccctcaa

SEQ ID NO: 420682 - DNA, 120 bp, Artificial Sequence
  ENSG00000150593_35 (sequence is synthesized)
ctagagttgtaagggaagttttaatgcagggagtaagacttgggctatatcctaaaggattttgataactgaaaataacagtgagggcgacattctactgggaactccagtatgttgatc

SEQ ID NO: 420683 - DNA, 120 bp, Artificial Sequence
  ENSG00000150593_36 (sequence is synthesized)
cttttcctcctcagctccggctccgccgccacgattggccagccgaccacccggcctcggccaataagcgccgccctctcgcccccgtgttactgggtagaagaaaacaaaaacaaacag

SEQ ID NO: 420684 - DNA, 120 bp, Artificial Sequence
  ENSG00000150594_0 (sequence is synthesized)
gagcagcagcagctccagctcggtgcagaagcccagcagccggcgtgccgccgcccggccactccagcgccttcttccccgccttgcgctcctgccccaactcgcgctgtcgtcggaccc

SEQ ID NO: 420685 - DNA, 120 bp, Artificial Sequence
  ENSG00000150594_1 (sequence is synthesized)
cggcccatccagcagcgctcggcgcccaccaggcggacgcccaggagaacccctgcctccgtcgcggctcctggagagctgatcgttcacctgccccggcccgcctgaggacgggggtgc

SEQ ID NO: 420686 - DNA, 120 bp, Artificial Sequence
  ENSG00000150594_2 (sequence is synthesized)
cttcatgcggcccccacactcctcaccccgccgccgccgccgtcccggagctccgcacagtgtgccccagccccagcagggcgcacaactttggaagtctcgcggcgctccgagaggcgg

SEQ ID NO: 420687 - DNA, 120 bp, Artificial Sequence
  ENSG00000150594_3 (sequence is synthesized)
cagagtccgcgccccagccccgggccgggccgggccagaaccgcagcgtctgggggaagccagagagtcggtaatcgcttcggggatgtaaggcgacagacataggacccccgagctcgc

SEQ ID NO: 420688 - DNA, 120 bp, Artificial Sequence
  ENSG00000150594_4 (sequence is synthesized)
atcagcacccttcggctgcctcccggggtgggggcgggccccgcacacggtaagacctcttgctttcgctcaggctcaagattcaagatacagatattgatatgtatatatatatttaat

SEQ ID NO: 420689 - DNA, 120 bp, Artificial Sequence
  ENSG00000150594_5 (sequence is synthesized)
ttcctgtcatccttccaagttatcaggccaccgatgatttttgttctcccttcttgaagaataaatctctctttacccatcggctctccctactctctcccgccgcttagaaataaaact

SEQ ID NO: 420690 - DNA, 120 bp, Artificial Sequence
  ENSG00000150594_6 (sequence is synthesized)
tggctgtattaggagctcggagcaagaaggcgcccaccgagagcgtctgaagcgcgagccaggcgcagttcgcgggacccgggccatgggccgctagcggtcctccagttcgggcccggc

SEQ ID NO: 420691 - DNA, 120 bp, Artificial Sequence
  ENSG00000150594_7 (sequence is synthesized)
ccctccctatgtgagccgcagccaggcgagcggggcgccggaggaagaggaggacccacgggcgccgggccggaaggcagctggcagcaggcccaggccagcgggcgcccgcgttcatgt

SEQ ID NO: 420692 - DNA, 120 bp, Artificial Sequence
  ENSG00000150594_8 (sequence is synthesized)
ccgcgttcatgttccgccaggagcagccgttggccgagggcagctttgcgcccatgggctccctgcagccggacgcgggcaacgcgagctggaacgggaccgaggcgccggggggcggcg

SEQ ID NO: 420693 - DNA, 120 bp, Artificial Sequence
  ENSG00000150594_9 (sequence is synthesized)
cccgggccaccccttactccctgcaggtgacgctgacgctggtgtgcctggccggcctgctcatgctgctcaccgtgttcggcaacgtgctcgtcatcatcgccgtgttcacgagccgcg

SEQ ID NO: 420694 - DNA, 120 bp, Artificial Sequence
  ENSG00000150594_10 (sequence is synthesized)
cgctcaaggcgccccaaaacctcttcctggtgtctctggcctcggccgacatcctggtggccacgctcgtcatccctttctcgctggccaacgaggtcatgggctactggtacttcggca

SEQ ID NO: 420695 - DNA, 120 bp, Artificial Sequence
  ENSG00000150594_11 (sequence is synthesized)
aggcttggtgcgagatctacctggcgctcgacgtgctcttctgcacgtcgtccatcgtgcacctgtgcgccatcagcctggaccgctactggtccatcacacaggccatcgagtacaacc

SEQ ID NO: 420696 - DNA, 120 bp, Artificial Sequence
  ENSG00000150594_12 (sequence is synthesized)
tgaagcgcacgccgcgccgcatcaaggccatcatcatcaccgtgtgggtcatctcggccgtcatctccttcccgccgctcatctccatcgagaagaagggcggcggcggcggcccgcagc

SEQ ID NO: 420697 - DNA, 120 bp, Artificial Sequence
  ENSG00000150594_13 (sequence is synthesized)
cggccgagccgcgctgcgagatcaacgaccagaagtggtacgtcatctcgtcgtgcatcggctccttcttcgctccctgcctcatcatgatcctggtctacgtgcgcatctaccagatcg

SEQ ID NO: 420698 - DNA, 120 bp, Artificial Sequence
  ENSG00000150594_14 (sequence is synthesized)
tctacgtgcgcatctaccagatcgccaagcgtcgcacccgcgtgccacccagccgccggggtccggacgccgtcgccgcgccgccggggggcaccgagcgcaggcccaacggtctgggcc

SEQ ID NO: 420699 - DNA, 120 bp, Artificial Sequence
  ENSG00000150594_15 (sequence is synthesized)
gcgcagaggccgaaccgctgcccacccagctcaacggcgcccctggcgagcccgcgccggccgggccgcgcgacaccgacgcgctggacctggaggagagctcgtcttccgaccacgccg

SEQ ID NO: 420700 - DNA, 80 bp, Artificial Sequence
  ENSG00000150594_16 (sequence is synthesized)
ggggcaaaggcaaggcccgagcgagccaggtgaagccgggcgacagcctgccgcggcgcgggccgggggcgacggggatc

SEQ ID NO: 420701 - DNA, 120 bp, Artificial Sequence
  ENSG00000150594_17 (sequence is synthesized)
ctgccaaggcgtcgcgctggcgcgggcggcagaaccgcgagaagcgcttcacgttcgtgctggccgtggtcatcggagtgttcgtggtgtgctggttccccttcttcttcacctacacgc

SEQ ID NO: 420702 - DNA, 120 bp, Artificial Sequence
  ENSG00000150594_18 (sequence is synthesized)
tcacggccgtcgggtgctccgtgccacgcacgctcttcaaattcttcttctggttcggctactgcaacagctcgttgaacccggtcatctacaccatcttcaaccacgatttccgccgcg

SEQ ID NO: 420703 - DNA, 120 bp, Artificial Sequence
  ENSG00000150594_19 (sequence is synthesized)
ccttcaagaagatcctctgtcggggggacaggaagcggatcgtgtgaggtttccgctggcgcccgcgtagactcacgctgactgcaggcagcggggggcatcgaggggtgcttagcccca

SEQ ID NO: 420704 - DNA, 120 bp, Artificial Sequence
  ENSG00000150594_20 (sequence is synthesized)
gggcactcagaaacccgggcgctgcctgctctgcgtttcctcgtctggggtggctctgcagcctcctgcgggcgggcgtctgctgctcctacaagggaagcttcttgctgccaggcccac

SEQ ID NO: 420705 - DNA, 120 bp, Artificial Sequence
  ENSG00000150594_21 (sequence is synthesized)
acatccccagttgttggtttggccactcttgacctggagccatcttcctagtgggccacccctaatcactattgcttcctaaaggtattttcaccctcttcgcctggtacagccctcaca

SEQ ID NO: 420706 - DNA, 120 bp, Artificial Sequence
  ENSG00000150594_22 (sequence is synthesized)
gctcttcagagcaagcactggactacaagggcatggctcacaaaaggttaatggatgggggttacctagccctggctaattccccttccattcccaactctctctctctttttaaagaaa

SEQ ID NO: 420707 - DNA, 120 bp, Artificial Sequence
  ENSG00000150594_23 (sequence is synthesized)
aatgctaagggcagccctgcctgccctccccatcccccgctgtaaatatacactatttttgatagcacacatggggcccccatatctcttggccttggttttgatgttgaaatcctggcc

SEQ ID NO: 420708 - DNA, 120 bp, Artificial Sequence
  ENSG00000150594_24 (sequence is synthesized)
ttgggagagatgccttccaggcagacacagctgtctggttcaggccaagcccctttgcaatgcaagccctttctggtgttatgaagtccctctatgtcgtcgttttcaccagcaactggt

SEQ ID NO: 420709 - DNA, 120 bp, Artificial Sequence
  ENSG00000150594_25 (sequence is synthesized)
gactgtcccttcgacacggacctgctttgagatttcctgacagggaaaagatttctgtccatttttttcctgtgcctaacagcataattgccttttcctatgtaaatattatgatggtgg

SEQ ID NO: 420710 - DNA, 120 bp, Artificial Sequence
  ENSG00000150594_26 (sequence is synthesized)
atcaagacataagtaaatgagcctttctgcctcacatcagccctgtgtataaagccattattctctgatgcactgtttgccccagtaactcactttaaaacctctctttccagtgttccc

SEQ ID NO: 420711 - DNA, 120 bp, Artificial Sequence
  ENSG00000150594_27 (sequence is synthesized)
tctctccctccagggccactgcttgaagaagaatatgtatgtttctatcttgtatgtctgtgtgcccctcctgccccgaaagtgctgactatggggaaatcttttagctgctgtttttag

SEQ ID NO: 420712 - DNA, 120 bp, Artificial Sequence
  ENSG00000150594_28 (sequence is synthesized)
actccaaggagtggaaattatgtggaagaagcaaacctgatacaatttgcccaaggtaaacagtttgaaaagacaaatgggcctgccaaactgtacagtttcttccccaagagctgttag

SEQ ID NO: 420713 - DNA, 120 bp, Artificial Sequence
  ENSG00000150594_29 (sequence is synthesized)
gtatcaaaatgttgtcctttcccccctccgtgcttttctggttgagatcatgtcattgatgaactgccaaagtcaggggaggagggcagagactttgtgtttacatctgcatttctacat

SEQ ID NO: 420714 - DNA, 120 bp, Artificial Sequence
  ENSG00000150594_30 (sequence is synthesized)
gttttagacagagacaatttaaggcctgcactcttatttcactaaagaaaaactaatgtcagcacatgttgctaatgacagtggatttttttttaaataaaaaagtttacagatcaaatg

SEQ ID NO: 420715 - DNA, 120 bp, Artificial Sequence
  ENSG00000150594_31 (sequence is synthesized)
tgaaataaatatgaatggagtggtcctcttgtctgttatctgagttttcaaaagctttaagactctgggaacatctgattttatggattttttaaaaataaaaaatgtacattataaaaa

SEQ ID NO: 420716 - DNA, 120 bp, Artificial Sequence
  ENSG00000150625_0 (sequence is synthesized)
gagaagcaggacctcgggccatggattctactgaagaaaggtagccatggaagagaatatggaagagggacagacacaaaaagggtgttttgaatgctgtatcaaatgcctggggggcat

SEQ ID NO: 420717 - DNA, 120 bp, Artificial Sequence
  ENSG00000150625_1 (sequence is synthesized)
tccctatgcctctctgattgccaccatcctgctctatgcgggtgttgccctgttctgtggctgcggtcatgaagcgctttctggaactgtcaacattctgcaaacctactttgagatggc

SEQ ID NO: 420718 - DNA, 120 bp, Artificial Sequence
  ENSG00000150625_2 (sequence is synthesized)
aagaactgctggagacacactggatgtttttaccatgattgacatctttaagtatgtgatctacggcatcgcagctgcgttctttgtgtatggcattttgctgatggtggaaggtttctt

SEQ ID NO: 420719 - DNA, 120 bp, Artificial Sequence
  ENSG00000150625_3 (sequence is synthesized)
cacaactggggccatcaaagatctctatggggatttcaaaatcaccacttgtggcagatgtgtgagcgcttggttcattatgctgacatatcttttcatgttggcctggctgggagtcac

SEQ ID NO: 420720 - DNA, 120 bp, Artificial Sequence
  ENSG00000150625_4 (sequence is synthesized)
ggctttcacctcactgccagtttacatgtacttcaatctgtggaccatctgccggaacaccacattagtggagggagcaaatctctgcttggaccttcgtcagtttggaattgtgacaat

SEQ ID NO: 420721 - DNA, 120 bp, Artificial Sequence
  ENSG00000150625_5 (sequence is synthesized)
tggagaggaaaagaaaatttgtactgtctctgagaatttcttgaggatgtgcgaatctactgagctgaacatgaccttccacttgtttattgtggcacttgctggagctggggcagcagt

SEQ ID NO: 420722 - DNA, 120 bp, Artificial Sequence
  ENSG00000150625_6 (sequence is synthesized)
cattgctatggttcactaccttatggttctgtctgccaactgggcctatgtgaaagacgcctgccggatgcagaagtatgaagacatcaagtcgaaggaagagcaagagcttcatgacat

SEQ ID NO: 420723 - DNA, 120 bp, Artificial Sequence
  ENSG00000150625_7 (sequence is synthesized)
ccactctactcgctccaaagagcggctcaatgcatacacataaatgcatcttcctgttctttctaccatttgaatgcattggtgtttaactaagggccatccaaccatccaacctttaaa

SEQ ID NO: 420724 - DNA, 120 bp, Artificial Sequence
  ENSG00000150625_8 (sequence is synthesized)
aaacaaaacgaaagtgcttctcatcaatgatatgtaaggtgacttatgaatcacctgagtacaattctttgttgtttagcacttaaatttcccaatttattaaattgatgtaaatcagat

SEQ ID NO: 420725 - DNA, 120 bp, Artificial Sequence
  ENSG00000150625_9 (sequence is synthesized)
cttttctacaagctcctatccagccttttttttgaaatttctcaaactcatttactagttctgtaaaatcaaagatactaacattgtcaaatgcaaagatttgtttgatttttaaccact

SEQ ID NO: 420726 - DNA, 120 bp, Artificial Sequence
  ENSG00000150625_10 (sequence is synthesized)
tcccatgtgttatacataacaccttttgcattatttcttatgttttgaaaagaaaatagctttttatactttttagttttgatttcggtaactagtttaactacaggtaaccttcaaagg

SEQ ID NO: 420727 - DNA, 120 bp, Artificial Sequence
  ENSG00000150625_11 (sequence is synthesized)
taggccctggttcatgttttcatcaatctaaggtgcaatttctaaatttgtaagagtaggtttaaaaaaaaaagtgcttcttatctttgttaacattgtacttttccttgatgttcttaa

SEQ ID NO: 420728 - DNA, 120 bp, Artificial Sequence
  ENSG00000150625_12 (sequence is synthesized)
aaggtatttccctcagattactcatgtttatgttgtgagcatgtagaaacagtaatgctaatgcatggctagttgcctttttaagattgtgacaccaggcttaccttttaaagtttagta

SEQ ID NO: 420729 - DNA, 120 bp, Artificial Sequence
  ENSG00000150625_13 (sequence is synthesized)
tatagagacaattttaatggaaataactactgtagactattgaagaatgatctctttgtgatttaagaagtggctggattggaacttttaatatgctaatgtggaaaattaattaccttt

SEQ ID NO: 420730 - DNA, 120 bp, Artificial Sequence
  ENSG00000150625_14 (sequence is synthesized)
atgaaggtggtttattacaaataagcacactaacccctcggaagttgttttacctactttaaaagttttaatggattgcacctctgtaaactattcctaaaatgtgtatgatatatttga

SEQ ID NO: 420731 - DNA, 120 bp, Artificial Sequence
  ENSG00000150625_15 (sequence is synthesized)
aaaggcttccattaatataatagctttgcttgcagccttccaatctatgttggtttacctgtagtgttttataaagtgtggtcagaggcccctatagaatgtattgtttgaaagtgtagt

SEQ ID NO: 420732 - DNA, 120 bp, Artificial Sequence
  ENSG00000150625_16 (sequence is synthesized)
gatatatttgtgtttttatttcaagtaagtcattttaaccgaatgttcattcatattcatttataaaaagtacctgtatcaaaggaattttaacaaagagcaatcagtattattggacca

SEQ ID NO: 420733 - DNA, 120 bp, Artificial Sequence
  ENSG00000150625_17 (sequence is synthesized)
aatttggtgtttgttttcaccttgacgctcttcttttcattatttctaatgctacaagaatgctgtaaagtgtcttctaaaatgatgtagcctgacaagacatttttttcagtgtataaa

SEQ ID NO: 420734 - DNA, 120 bp, Artificial Sequence
  ENSG00000150625_18 (sequence is synthesized)
actaggtagtattgtgcactgatttgaccattgtgaaatcctttctcagtgtaactgcatttctaataaaaatttattgagtgaaacaatctttgtacaatgactagtcatgcatcatca

SEQ ID NO: 420735 - DNA, 120 bp, Artificial Sequence
  ENSG00000150625_19 (sequence is synthesized)
gtaattttacaagttcttgtagtaggtagggggtactactagggatatctgtggcatgattatgcattccgtagtattatttaattaatttggggttcattttgcttccttttctttatg

SEQ ID NO: 420736 - DNA, 120 bp, Artificial Sequence
  ENSG00000150625_20 (sequence is synthesized)
cttagattatcttactggttcaacatttttctgatatatgcagtattacagatattcagcaaaagtattaatgggcttctttaaattctatattatagtatttcagttccgtgtcttaac

SEQ ID NO: 420737 - DNA, 120 bp, Artificial Sequence
  ENSG00000150625_21 (sequence is synthesized)
agtttgtgataatttctaaaactgtcttttcaacttatgtaatgatgttgacacttttggcttttatttctggtattagagtttgtattttcacagagtgctttgtagcaggcattacaa

SEQ ID NO: 420738 - DNA, 120 bp, Artificial Sequence
  ENSG00000150625_22 (sequence is synthesized)
ttaatctgttttgtacataaatgtgccaacagcttgatggtggcgtttttgaaatgtagaacagagtgcttgcaaaatgtaataaatacacttgtgtactttgtgtacttattattagct

SEQ ID NO: 420739 - DNA, 120 bp, Artificial Sequence
  ENSG00000150625_23 (sequence is synthesized)
actctggaatgaaggggggaattacgggttggtggtcggcttcatgttaggaggacacccctccatctgttcacagctcagcctgtttccaatttaaagcccagatttcaatacaaacct

SEQ ID NO: 420740 - DNA, 120 bp, Artificial Sequence
  ENSG00000150625_24 (sequence is synthesized)
caatttcttttccccattttaaatgcaaagcaagacttgtgaatcatagtgtctctgctcctgggattcagaccaaatttccccccaaaattctcaggctatttgtttgaatacctgctt

SEQ ID NO: 420741 - DNA, 120 bp, Artificial Sequence
  ENSG00000150625_25 (sequence is synthesized)
acagtggtacacaatgggcagctttgagaagaaaaattgataatcttcacggaagagtaatttgaatgaaattacacttgacagcctgtctccaagcaaacaagaggaacgagggagcct

SEQ ID NO: 420742 - DNA, 85 bp, Artificial Sequence
  ENSG00000150625_26 (sequence is synthesized)
acagcctgtctccaagcaaacaagaggaacgagggagcctgagctaagctctgaggacttgcccaagccactgctgttggagctt

SEQ ID NO: 420743 - DNA, 120 bp, Artificial Sequence
  ENSG00000150625_27 (sequence is synthesized)
atctctgtaccgcaccctgtgttcttcagttgggaaaaaaaagggtctgtcggtatcgagtgatgcctacacttgaatgcagtagtgacttctgaactcctatatgctggccaaaaaaag

SEQ ID NO: 420744 - DNA, 120 bp, Artificial Sequence
  ENSG00000150625_28 (sequence is synthesized)
aaaatcagttttattttgatttttgttgaatgaacattcttctttaaaagtaatctaaagatcatgtctacagaagctgagtgatcatagttcctgctctattagccattcatctggaga

SEQ ID NO: 420745 - DNA, 120 bp, Artificial Sequence
  ENSG00000150625_29 (sequence is synthesized)
aaaagagcaatgcagtttttaagaggcagttcaaattctcaccaccttcttttctctcttacagcttctcaaggaataactactgtcctgaaattagaatgacttttttctgtatgtttc

SEQ ID NO: 420746 - DNA, 120 bp, Artificial Sequence
  ENSG00000150625_30 (sequence is synthesized)
tgttttaattacttattctggttaatgcctcctaacaaagatcatcaggaaatctgtatttgaataagttcggtacatttcgatgatggagaatgcacatcataagaaagcgtggagcac

SEQ ID NO: 420747 - DNA, 120 bp, Artificial Sequence
  ENSG00000150625_31 (sequence is synthesized)
agttgggattgagattggaaaagagcacaattaaaactagaggactctcatgggaacaagtagtcctcttgggtgtatgcatgtgtacgtgaatctgattggaggtggaagaatggcatg

SEQ ID NO: 420748 - DNA, 120 bp, Artificial Sequence
  ENSG00000150625_32 (sequence is synthesized)
taggagagaaaaaccagtgttctgaggcagcaggtgttctgtaagacagaccaggaagaggtagtaaggcagccagaaagctaccatggtacaccagagaagccaaattattcttgaggt

SEQ ID NO: 420749 - DNA, 120 bp, Artificial Sequence
  ENSG00000150625_33 (sequence is synthesized)
actcgctctcctctggggactgcagagaagcaggacctcgggccatggaatgcagtagtgacttctgaactcctatatgctggccaaaaaaagaaaatcagttttattttgatttttgtt

SEQ ID NO: 420750 - DNA, 120 bp, Artificial Sequence
  ENSG00000150625_34 (sequence is synthesized)
aaagatctctatggggatttcaaaatcaccacttgtggcagatgtttcattatgctgacatatcttttcatgttggcctggctgggagtcacggctttcacctcactgccagtttacatg

SEQ ID NO: 420751 - DNA, 120 bp, Artificial Sequence
  ENSG00000150625_35 (sequence is synthesized)
gcatatattaaatttgtctgactaggaagagttatgtcagtaaagcaattagatacatgggttgtgatttggggaaaaaagctgaattagaaatctgtacttgtaaatcatcaacaagta

SEQ ID NO: 420752 - DNA, 120 bp, Artificial Sequence
  ENSG00000150625_36 (sequence is synthesized)
tgtaatcattggtgatgttgatactgatgaaatcaacctaaaggtggaacaaaaaggaccaaaaatagtgacttaaaaaaacaatttagaaaaaatctcagaacacgaaacagaatgtta

SEQ ID NO: 420753 - DNA, 120 bp, Artificial Sequence
  ENSG00000150625_37 (sequence is synthesized)
aattgtcacaggagagagcttatgcccttgaatcaagggaaaatagagttcacaaggagccagcggccggcagcatcacacttttatgacagacctggaagggtgttttgaatgctgtat

SEQ ID NO: 420754 - DNA, 120 bp, Artificial Sequence
  ENSG00000150625_38 (sequence is synthesized)
gggtgctgagacaacgtgtgtgtctgtaatgtgcattcaatgtatttaggagagagactttgcacgtgtctctaatgaaagtgaaagggggcagggtgggggcctctggggaggagaccc

SEQ ID NO: 420755 - DNA, 120 bp, Artificial Sequence
  ENSG00000150625_39 (sequence is synthesized)
acagtgaaggggaggaaaacgggcttctcgcagaggaggcaggtggaaagagggaggggtctgtgcgcccgcagagtcgccaggcgccctgcgagttgtctccgctgggaggggcgaggc

SEQ ID NO: 420756 - DNA, 120 bp, Artificial Sequence
  ENSG00000150625_40 (sequence is synthesized)
tgtcacttgccagggcgcgaggagcctcagcgcggcttggagaacttggccccgcgcagcgtctggtcactcgctctcctctggggactgcagagaagcaggacctcgggccatggggtg

SEQ ID NO: 420757 - DNA, 120 bp, Artificial Sequence
  ENSG00000150625_41 (sequence is synthesized)
aagcacaggctctggcgtccatctctgtaccgcaccctgtgttcttcagttgggaaaaaaaagggtctgtcggtatcgagtgatgcctacacttgggtgttttgaatgctgtatcaaatg

SEQ ID NO: 420758 - DNA, 120 bp, Artificial Sequence
  ENSG00000150625_42 (sequence is synthesized)
aattccgtgtaccagattctactgaagaaaggtagccatggaagagaatatggaagagggacagacacaaaaagggcatccaaacagaccacctgggattcctcagtccgcttgggcctc

SEQ ID NO: 420759 - DNA, 120 bp, Artificial Sequence
  ENSG00000150625_43 (sequence is synthesized)
aagtcgtgaattgaatccaaaaagatgaattggttcaattggccttctttcttgagaacggggaaaagatgactctcagtatgctctgaggatctctttatcccacggcaaattttaata

SEQ ID NO: 420760 - DNA, 120 bp, Artificial Sequence
  ENSG00000150625_44 (sequence is synthesized)
ataactatgctgccccatctttcagctactctgggtgaatctctattctttgcaatcgaaagacctctaagtaaaacaaatcttcagatccttttaggagtcttacataaagaggcttac

SEQ ID NO: 420761 - DNA, 120 bp, Artificial Sequence
  ENSG00000150625_45 (sequence is synthesized)
tcacaaggagccagcggccggcagcatcacacttttatgacagacctggaagaataaagtttagccttgttcctcgaactcaaagaaagaaagtttggggtgttttgaatgctgtatcaa

SEQ ID NO: 420762 - DNA, 120 bp, Artificial Sequence
  ENSG00000150625_46 (sequence is synthesized)
gagaagcgaggtgctagcaaaatcaaatctgaaataaaggatgagaagagtgtagatggaaaaaatggggaagaaaagatgaaacaatggaaaagtgtaattttcataacttaaaacttc

SEQ ID NO: 420763 - DNA, 120 bp, Artificial Sequence
  ENSG00000150625_47 (sequence is synthesized)
aaagtatatatgtatgacttttttcgtcttcatgagattgatttgttcattcattcaacatttaataaatatataacaagcacccagtgtgggccagctgtagtcaaattgctgggaaga

SEQ ID NO: 420764 - DNA, 120 bp, Artificial Sequence
  ENSG00000150625_48 (sequence is synthesized)
agactacactcaagccagctgaaaagcctgtgcctttcatcagtatgcctgaagacccccttttattgctaaatgcacgtgatatttagtttaggatcacagtaagtgttcattatgctg

SEQ ID NO: 420765 - DNA, 120 bp, Artificial Sequence
  ENSG00000150625_49 (sequence is synthesized)
taagagtggctgataatgttccttacttctgtagctgagatttcccaacttaatttgggttctcatcagggtagaattccatccaagtcaatcgcagcatctgcacccacagctctgaga

SEQ ID NO: 420766 - DNA, 120 bp, Artificial Sequence
  ENSG00000150625_50 (sequence is synthesized)
actccgtctcaaacaaaacaaaacaaaccatgaaaataaaacaacaataacaaaaacaactaaagagcagaaaatgctaaaatcttaggtattagaatgtcctgaaaatgttttatcatg

SEQ ID NO: 420767 - DNA, 120 bp, Artificial Sequence
  ENSG00000150625_51 (sequence is synthesized)
tagaatgtcctgaaaatgttttatcatgcctgtatgtgtttagcacttcaagagttcagaaaataaaattaaagagccatgctcagatgaacttggttacttttgctctctaagatgaga

SEQ ID NO: 420768 - DNA, 120 bp, Artificial Sequence
  ENSG00000150625_52 (sequence is synthesized)
caaagaggcgtgccagtgaattgcctctgtgctcgttttaaaaatgcagtgttctaggcctaatattcatagattcccatctatcagttttgtgttagagtctaaaaatacatatttttg

SEQ ID NO: 420769 - DNA, 120 bp, Artificial Sequence
  ENSG00000150625_53 (sequence is synthesized)
acaacttcctaggtgattctaatgctgttggtctatgaaccaactggaacaagggtaaatagaagcgaaatggcaacttttcatttcctgttactaatagcattgtttgcaatattggca

SEQ ID NO: 420770 - DNA, 120 bp, Artificial Sequence
  ENSG00000150625_54 (sequence is synthesized)
gaaaaaaaagtactcctttgggcagtatgcttttagagattaacagaagcactgcaccagctgaacaaatttagatcctgacttcagcacagtctggggcatagttaacaaaataattgt

SEQ ID NO: 420771 - DNA, 120 bp, Artificial Sequence
  ENSG00000150625_55 (sequence is synthesized)
gatgcctatactatcacattaatgggccaaaccaataaactggctataattgagtctggaaattctggtggtgagattcaattgaattcagattgaaattatttaaattgcttgagggct

SEQ ID NO: 420772 - DNA, 120 bp, Artificial Sequence
  ENSG00000150625_56 (sequence is synthesized)
aaatagtcttgcatattatattcataattctatgcatagttattatccacaatgaaagctagattatttttccactgtaacataacataagataaaatggaacttgcttagatttgatta

SEQ ID NO: 420773 - DNA, 120 bp, Artificial Sequence
  ENSG00000150625_57 (sequence is synthesized)
gaacaatgtactcagctgcatgccccagcagtaagacagcgtgtgtcaggccaaggaaataactgtttccaccctcccaaaagcaagagatcccatcactgactttcacaagggtgtttt

SEQ ID NO: 420774 - DNA, 120 bp, Artificial Sequence
  ENSG00000150627_0 (sequence is synthesized)
gcggggagggtccgcgcgttggtggtgctcgcctcgcagctgcgcccgccggcttcagcaccttccgctgtccgccgctgcagccgcctcctcctccaggtgctgactattctgatgccg

SEQ ID NO: 420775 - DNA, 120 bp, Artificial Sequence
  ENSG00000150627_1 (sequence is synthesized)
agtttccaattgccttgattaaagtagaaacattctatggcttggatgacttacatttcaaattggtttgagcaagatgattggtatgaaggactacaaagagcaaacatgtcccaggta

SEQ ID NO: 420776 - DNA, 120 bp, Artificial Sequence
  ENSG00000150627_2 (sequence is synthesized)
aggcaagtgggattgctggctgctggatgtcagccatggaacaaggatgtatgtgctgccagtggagacaggtttgcatattgtgcgaccctggctatctatatttatcagttggatcac

SEQ ID NO: 420777 - DNA, 120 bp, Artificial Sequence
  ENSG00000150627_3 (sequence is synthesized)
cgttataatgaattcaaacttcacgcaattatgtctgaacataaaaaaacaatcacagcaatttcttggtgtccacataatcctgatctgtttgcaagtggcagtactgataatttagtg

SEQ ID NO: 420778 - DNA, 120 bp, Artificial Sequence
  ENSG00000150627_4 (sequence is synthesized)
atcatttggaatgttgcagaacaaaaagtcattgctaaactcgacagtacaaaagggatccctgcttctcttagttggtgctggaatgcagaggatgtggtggcatttgtttcccacaga

SEQ ID NO: 420779 - DNA, 120 bp, Artificial Sequence
  ENSG00000150627_5 (sequence is synthesized)
ggcccactgttcatttggaccatctcaggaccagatagtggagtgattgtacacaaagatgctcatagcttcttgtctgatatctgtatgttcagatggcatacacaccaaaaggggaaa

SEQ ID NO: 420780 - DNA, 120 bp, Artificial Sequence
  ENSG00000150627_6 (sequence is synthesized)
gttgtgtttggtcatattgatggaagtctatcaatttttcatccaggtaataaaaatcagaaacatgttttgagaccagaatctcttgaagggacagatgaagaggatccagttacggcc

SEQ ID NO: 420781 - DNA, 120 bp, Artificial Sequence
  ENSG00000150627_7 (sequence is synthesized)
ttggaatgggacccactatctactgattatcttctagtggttaatttgcattatggaattcgcctggtagattctgaatcactttcttgcataacaacatttaatcttcccagtgcagca

SEQ ID NO: 420782 - DNA, 120 bp, Artificial Sequence
  ENSG00000150627_8 (sequence is synthesized)
gcttctgtacagtgcttagcctgggttcccagtgctcctgggatgtttataactggagattctcaagtgggtgttttacgcatttggaatgtttcaagaacaacacctattgataatctt

SEQ ID NO: 420783 - DNA, 120 bp, Artificial Sequence
  ENSG00000150627_9 (sequence is synthesized)
aaattaaagaaaacaggatttcactgcttacatgtacttaattctcctccaagaaaaaagttttcagtccaatctccaaccaaaaatcattatacatcctcaacaagcgaagcagttcca

SEQ ID NO: 420784 - DNA, 120 bp, Artificial Sequence
  ENSG00000150627_10 (sequence is synthesized)
cccccaactttaacacagaatcaagcattttctcttcctcctggtcatgcagtgtgttgtttcttggatggtggagttggactttatgatatgggagctaagaagtgggattttcttaga

SEQ ID NO: 420785 - DNA, 120 bp, Artificial Sequence
  ENSG00000150627_11 (sequence is synthesized)
gacttgggacatgtggaaactatctttgactgcaaattcaaacctgacgatcctaatcttttagcaacagcttcatttgatggcactataaaagtctgggatataaacacattaacagca

SEQ ID NO: 420786 - DNA, 120 bp, Artificial Sequence
  ENSG00000150627_12 (sequence is synthesized)
gtgtacacatccccgggtaatgaaggtgttatttattccctttcttgggctccaggtggtttaaattgtattgctgggggaacttcccgaaatggtgcttttatttggaatgttcaaaag

SEQ ID NO: 420787 - DNA, 120 bp, Artificial Sequence
  ENSG00000150627_13 (sequence is synthesized)
ggcaaaattatacaacgatttaatgagcatggaacaaatggaatattctgcattgcctggagtcataaagattctaaaagaatagcaacctgcagcagtgatggtttctgtattattcga

SEQ ID NO: 420788 - DNA, 120 bp, Artificial Sequence
  ENSG00000150627_14 (sequence is synthesized)
acaattgatggtaaagtgctacacaaatataaacatccagctgcagtgtttggttgtgattggagccaaaacaataaagacatgatagccactggctgtgaagacacaaatgttcgtgtt

SEQ ID NO: 420789 - DNA, 120 bp, Artificial Sequence
  ENSG00000150627_15 (sequence is synthesized)
tattatgtagccaccagctcagatcaaccattgaaagtatttagtgggcatacagcaaaagtgtttcatgttaaatggtctcctctgagagagggaattctttgcagtggttctgatgat

SEQ ID NO: 420790 - DNA, 120 bp, Artificial Sequence
  ENSG00000150627_16 (sequence is synthesized)
ggtaccgttcgaatctgggattatactcaggatgcttgcatcaatattcttaatggacacactgcacctgtgagaggattaatgtggaatactgagattccatatctgctcatatctggc

SEQ ID NO: 420791 - DNA, 120 bp, Artificial Sequence
  ENSG00000150627_17 (sequence is synthesized)
agctgggactatactataaaagtatgggacactcgagaaggaacttgtgtggatactgtgtatgatcacggtgcagatgtatatggtttaacctgccatcccagtcgccccttcactatg

SEQ ID NO: 420792 - DNA, 120 bp, Artificial Sequence
  ENSG00000150627_18 (sequence is synthesized)
gcctcttgctcccgtgactctacagtgagactctggtcattaacagccttagtcactcctgtacaaataaatattctggcagacagatcttgggaagaaattattgggaacactgattat

SEQ ID NO: 420793 - DNA, 120 bp, Artificial Sequence
  ENSG00000150627_19 (sequence is synthesized)
tactgtgtggtaaagtgtcaagagatattagacaggaaatagaaaaactaactgctaattctcaagtgaaaaaactaagatggttctcagaatgtttatctcctccaggtggcagtgaca

SEQ ID NO: 420794 - DNA, 120 bp, Artificial Sequence
  ENSG00000150627_20 (sequence is synthesized)
atttatggaacttggttgctgtgataaaaggacaggatgatagcttacttcctcagaactactgcaaaggaataatgcacttgaaacatctgattaaatttagaacatctgaagctcaag

SEQ ID NO: 420795 - DNA, 120 bp, Artificial Sequence
  ENSG00000150627_21 (sequence is synthesized)
aactaacaacagtcaagatgtctaaatttggtggtggtattggtgtacctgctaaagaggaaagactgaaggaagctgctgaaatccacttgagattaggacaaattcagagatactgtg

SEQ ID NO: 420796 - DNA, 120 bp, Artificial Sequence
  ENSG00000150627_22 (sequence is synthesized)
aacttatggttgaacttggagagtgggacaaagccctgtcaattgcaccaggagtctctgtgaaatactggaagaagttaatgcagaggagagctgaccaattaatccaggaagataagg

SEQ ID NO: 420797 - DNA, 120 bp, Artificial Sequence
  ENSG00000150627_23 (sequence is synthesized)
atgatgtcattccatactgcatagccattggtgatgtgaaaaagctagtccattttttcatgtcaagaggtcagcttaaagaagctctgcttgttgcacaggctgcttgtgaaggaaata

SEQ ID NO: 420798 - DNA, 120 bp, Artificial Sequence
  ENSG00000150627_24 (sequence is synthesized)
tgcagcccttacatgtttccgtgcctaaaggagcttcatattctgatgatatctacaaggaagactttaatgaactcctgcacaaagtcagtaaagaactggcagaatggtattttcaag

SEQ ID NO: 420799 - DNA, 120 bp, Artificial Sequence
  ENSG00000150627_25 (sequence is synthesized)
atggtcgagcagtactagccgcatgttgccatcttgccatagataatattgagcttgctatggcatacctgattcgcggaaatgaactggagttggcagtctgtgtgggcacagtactag

SEQ ID NO: 420800 - DNA, 120 bp, Artificial Sequence
  ENSG00000150627_26 (sequence is synthesized)
gagagtctgcagcaccagcaacccactatgccttagaattactggcgagaaagtgcatgatgatttcagtatgctttccatgtgttggatacagtgtccccttttgttacgttaacagga

SEQ ID NO: 420801 - DNA, 120 bp, Artificial Sequence
  ENSG00000150627_27 (sequence is synthesized)
atttggcagctgatcttcttctgatgattcctgataatgaactacatttaataaaactctgtgctttctacccaggatgtactgaagagataaatgaccttcatgataagtgtaagctac

SEQ ID NO: 420802 - DNA, 120 bp, Artificial Sequence
  ENSG00000150627_28 (sequence is synthesized)
ccacagtggaagaatgtatgcagttagctgagacagcccgtgcagatgacaatatatttgaaactgtaaaatattacttgttaagtcaagaacctgaaaaagcccttcctattggtatta

SEQ ID NO: 420803 - DNA, 120 bp, Artificial Sequence
  ENSG00000150627_29 (sequence is synthesized)
gctttgttaaagaatacatcagtagctcagactggactttggataccatataccctgttcttgacctactgagctatattcgtactgaaaaattactcttgcatacgtgtactgaagctc

SEQ ID NO: 420804 - DNA, 120 bp, Artificial Sequence
  ENSG00000150627_30 (sequence is synthesized)
gaaatgagttgctgatattatgtggttacattggtgcattactggctatcagaagacagtaccaaagcattgttccagcactttatgagtacacaagtcagctattaaaacgtcgggagg

SEQ ID NO: 420805 - DNA, 120 bp, Artificial Sequence
  ENSG00000150627_31 (sequence is synthesized)
tgtcagtacctttaaaaattgaatatctttctgaggaattggatgcatggagagcttgcacacagtccaccaacagatcattagaagactctccgtatacacccccttctgattcacaaa

SEQ ID NO: 420806 - DNA, 120 bp, Artificial Sequence
  ENSG00000150627_32 (sequence is synthesized)
gaatgatttatgcaactttattaaagagactaaaagaagagtcactgaaaggaattattggaccagattatgtgactggatcaaatcttccaagtcattctgatattcacatttcttgtc

SEQ ID NO: 420807 - DNA, 120 bp, Artificial Sequence
  ENSG00000150627_33 (sequence is synthesized)
ttacgggattaaaaatccagggccctgtgtttttccttgaagacgggaaatctgctatctccttgaatgatgctttgatgtgggcaaaggtgaatccattctcacctttagggactggaa

SEQ ID NO: 420808 - DNA, 120 bp, Artificial Sequence
  ENSG00000150627_34 (sequence is synthesized)
tacgactcaatccattctgatagaagatttttgtccatgcttgatttttttttttaaagaaaaactttcatgggttagcattaccttaatctttgttgctcaagtgccagaggttgggag

SEQ ID NO: 420809 - DNA, 120 bp, Artificial Sequence
  ENSG00000150627_35 (sequence is synthesized)
aaggattgcaggttgggagaggtgggaaatagcagtgaattttagtcattaacttcaaaatatatatatatatataatttaaaggaaaaataggtgcctcctttataaacagtaatagct

SEQ ID NO: 420810 - DNA, 120 bp, Artificial Sequence
  ENSG00000150627_36 (sequence is synthesized)
acgtttgggaaggaggaaacatttaaattataaaggactgaataatctaaaaagcatataaaagtttcacacagcataaaagataccaaaatatcatatggttgaaatattgaaacatat

SEQ ID NO: 420811 - DNA, 120 bp, Artificial Sequence
  ENSG00000150627_37 (sequence is synthesized)
taaattgtgcaacacctagaatagtgctagacatacagtaagtacttaatggatatttgaatgattgaatatcttgaaatgttgaaatgtaaggtgtgcacagtgatcttcaacttaaca

SEQ ID NO: 420812 - DNA, 120 bp, Artificial Sequence
  ENSG00000150627_38 (sequence is synthesized)
aacacttacgttctcctttataaaatgcatagtaaaccactaacgttagctgttttaataaaagttttcagttataagtttagtaaatattaataaatggatacacattcaaaatacttt

SEQ ID NO: 420813 - DNA, 80 bp, Artificial Sequence
  ENSG00000150627_39 (sequence is synthesized)
gcctctggggcagaccctggagatcgggctcgcggcgccttccatcgtggctccgcgctggggcttgcggagcacgcttc

SEQ ID NO: 420814 - DNA, 120 bp, Artificial Sequence
  ENSG00000150627_40 (sequence is synthesized)
ggcgccctgagcgagcaggcggggagggcggggagggtccgcgcgttggtggtgctcgcctcgcagctgcgcccgccggcttcagcaccttccgctgtccgccgctgcagccgcctcctc

SEQ ID NO: 420815 - DNA, 120 bp, Artificial Sequence
  ENSG00000150627_41 (sequence is synthesized)
agtgaagtcatgtatcttccagtacgtcttcaggaacagagatttcatcgaaattatattaatttatagaaatcatatgaggataggctgcgtgcggtggctcatacctgtaatcccggc

SEQ ID NO: 420816 - DNA, 85 bp, Artificial Sequence
  ENSG00000150627_42 (sequence is synthesized)
aagttccataaatcttgcaacatgggatggccttcttcagtgatactattaatatagcatgtgcaatttctatttcactggagtt

SEQ ID NO: 420817 - DNA, 120 bp, Artificial Sequence
  ENSG00000150627_43 (sequence is synthesized)
ttatctgaagtttaactgtcccattgtaaaggtgtaagttatataggcttgaaaaaaattggcgggtaaaaatcacaaaatgcagtcgaatatatatatgaaaacttgcattaggtgata

SEQ ID NO: 420818 - DNA, 120 bp, Artificial Sequence
  ENSG00000150627_44 (sequence is synthesized)
agcctgggcaacaaagagcgaaactctgtctcaaaaaacaaaccaacaaaaaccacaattgatttgatgaaaattagttttaagtaaatgtttgtaaatagatattggttgaatttttgg

SEQ ID NO: 420819 - DNA, 120 bp, Artificial Sequence
  ENSG00000150627_45 (sequence is synthesized)
gatattggttgaatttttggatatattatgttgatttaacttttaaaatgttgtttaaaagtgtgaagctatgaaaagcctgataatgtgactacagatatttcagttggactagaattc

SEQ ID NO: 420820 - DNA, 120 bp, Artificial Sequence
  ENSG00000150627_46 (sequence is synthesized)
tgactttgaaacttattaaattaatgcatactggaagtactttgatactcaagttgtttcacaagatttataatatagatggttttgtttgactaaagaataatctcatataactagaat

SEQ ID NO: 420821 - DNA, 120 bp, Artificial Sequence
  ENSG00000150627_47 (sequence is synthesized)
atctttaaacttgttgcatttaaaatatttttaaaaccttcttaacaaaacttcttaaaactggaaaaaatatatattatgtatctatgtatcatatttatcacatgaccacttttgatt

SEQ ID NO: 420822 - DNA, 120 bp, Artificial Sequence
  ENSG00000150627_48 (sequence is synthesized)
gtatctatgtatcatatttatcacatgaccacttttgattccttaaaaagacattacaggcttaaattccattttattaaaaaaaaaaaattgcctgtaatcccagcacttcaggaggcc

SEQ ID NO: 420823 - DNA, 120 bp, Artificial Sequence
  ENSG00000150627_49 (sequence is synthesized)
tatagaagagaatatacacaactcagagatgcaatggataatataaaaagagtacctgagatgtatttttttaaactcttagagatatctgtaactcaaatttttcttaggtgaggagga

SEQ ID NO: 420824 - DNA, 120 bp, Artificial Sequence
  ENSG00000150627_50 (sequence is synthesized)
ttattaactggcacatatgtactaaaaacccctcacttaaaaatggcagtctcaatcctactgtcattctttttattttaaaataaataaataagcctatctttttgtgcttacatactt

SEQ ID NO: 420825 - DNA, 120 bp, Artificial Sequence
  ENSG00000150627_51 (sequence is synthesized)
aaaaggatatcattaagtatataaacaatcattacttctgtatttttaatgaatgcaggaaaataatatttttatgtataaaagatgaagaaaaaattttgcaagtctttaagcacataa

SEQ ID NO: 420826 - DNA, 120 bp, Artificial Sequence
  ENSG00000150627_52 (sequence is synthesized)
atacaacagaatagccacccaatttctgtctgaaatctaaattggatggatttgaccatcattctattatctttgatttctacaatgtctatatcttattacctataactattaattttt

SEQ ID NO: 420827 - DNA, 120 bp, Artificial Sequence
  ENSG00000150627_53 (sequence is synthesized)
gaattataaatgtcatttgactatgtcaatctgtatatattgtaccttaatatgaaaaacaaattttttaattcataaaagtatttttattagatttcatatgcatgaaacccaagcaaa

SEQ ID NO: 420828 - DNA, 120 bp, Artificial Sequence
  ENSG00000150627_54 (sequence is synthesized)
caaattatatgaatttattttactatttgaaaatgttcatattaccaataatgtggacaaattactttgcaggtttaaatatgcctctgtaaaggaagagtctcattagacaatgatttt

SEQ ID NO: 420829 - DNA, 120 bp, Artificial Sequence
  ENSG00000150627_55 (sequence is synthesized)
taaagcattggaaaaatattttgcctgtaaaagttagtaactaggtggttcacaaaattacaacatcaaaatagttacatcttgtgaaaatatatgatttttatgtcaatcaagacaaat

SEQ ID NO: 420830 - DNA, 82 bp, Artificial Sequence
  ENSG00000150627_56 (sequence is synthesized)
aaatatatatatgtgcctatgaaattgtccagatgtgttcaggaacatgattgcattagagcaatgactgtattttgttgtc

SEQ ID NO: 420831 - DNA, 120 bp, Artificial Sequence
  ENSG00000150627_57 (sequence is synthesized)
gaacatgattgcattagagcaatgactgtattttgttgtccttataacatttatattatttcagttttaagtcaaaaggtattctgaatataataaaagcctcacaaattatttgtaaaa

SEQ ID NO: 420832 - DNA, 120 bp, Artificial Sequence
  ENSG00000150627_58 (sequence is synthesized)
gtagttcatatttagtatatcagtaatatagaagacatctttatagtcaactcttaattaatgcttattgtaccaaatctttgagatatttgtacataaatgaaatatgtactttcatgc

SEQ ID NO: 420833 - DNA, 120 bp, Artificial Sequence
  ENSG00000150627_59 (sequence is synthesized)
atgctaaaattatatatcatgactgtgctataatttggcatgtcattatctagatttatatgtatgtacgtatttcaggtccttgaaattttaataaatattacagttaaatcctgatat

SEQ ID NO: 420834 - DNA, 120 bp, Artificial Sequence
  ENSG00000150628_0 (sequence is synthesized)
gccgcagcaacccagaaagcgtcatggctgccgccggccaggaaaaagggtatttgacacagactgcggcagccctagacaagtcaccgtcactttcgccacagctagcagctcccatcc

SEQ ID NO: 420835 - DNA, 120 bp, Artificial Sequence
  ENSG00000150628_1 (sequence is synthesized)
gagggaggcctaagaagtgtctggtctatccgcatgcgccgaagagctcccgcttgtctcgttccgttctgcgttggcttcagggtctggatctcagcttcttccccaggaacatcaaca

SEQ ID NO: 420836 - DNA, 120 bp, Artificial Sequence
  ENSG00000150628_2 (sequence is synthesized)
gagatttttcaaatggcttcctaattgcagaaatattctgtatatattacccctgggaacttgaattatcatcctttgaaaacgggacctctttaaaagtcaagttggataactgggcac

SEQ ID NO: 420837 - DNA, 120 bp, Artificial Sequence
  ENSG00000150628_3 (sequence is synthesized)
agttggagaagttcctggcaagaaaaaaatttaaattacctaaagaactaatccatggaacaattcattgtaaagctggagtgcctgaaatattgatagaagaggtttacactttattaa

SEQ ID NO: 420838 - DNA, 120 bp, Artificial Sequence
  ENSG00000150628_4 (sequence is synthesized)
atgcgtttacccctggtttccaggtctacagtttcgaagtctattaaagataacattaggttatcagaattactaagcaatcccaacatgctgaccaatgaacttaaagcggagttcctc

SEQ ID NO: 420839 - DNA, 120 bp, Artificial Sequence
  ENSG00000150628_5 (sequence is synthesized)
atccttttacatatgttgcaaagaaaattaggcagaaaattgaatccagaatggtttgatgtgaaaccaacagtgggagaagttactctcaatcaccttcctgcccaagcctctgggcgc

SEQ ID NO: 420840 - DNA, 120 bp, Artificial Sequence
  ENSG00000150628_6 (sequence is synthesized)
agatataatttaaaagttaaaagaggaagagttgtccctgttttaccaaatataggtagtggtggcagttcacatagagaaatacatgtgaagcaagctggacaacattcttattactct

SEQ ID NO: 420841 - DNA, 120 bp, Artificial Sequence
  ENSG00000150628_7 (sequence is synthesized)
gctatgaaacctatcagaaacatggacaagaaaccttgaaaagcacctgtcaaatggctttgaagaagtgatgccaccatctctagccataataaagaaacagaatcacctagtattgga

SEQ ID NO: 420842 - DNA, 120 bp, Artificial Sequence
  ENSG00000150628_8 (sequence is synthesized)
tgtatttcaataataaatagagtggtgtcttttccataattgtgttaaagaacatttcttttccattcaatttgtttattaaactcctatgccaggcattgttgaaaatacaaaattaaa

SEQ ID NO: 420843 - DNA, 87 bp, Artificial Sequence
  ENSG00000150628_9 (sequence is synthesized)
tggggaggctgcaggcaggagaatcgagattatgccgctgcactccagcctaggtggcagggtaagactctgtctcaaaaaaaaaaa

SEQ ID NO: 420844 - DNA, 120 bp, Artificial Sequence
  ENSG00000150628_10 (sequence is synthesized)
aaaaaaaaaaaaaaaaaaaaaaatactggtaaggatcagtttaccctttgtcggagatggcatctagtttgagagttaccaacaagtttttaaagttgctgcttaattgtaggcactttg

SEQ ID NO: 420845 - DNA, 120 bp, Artificial Sequence
  ENSG00000150628_11 (sequence is synthesized)
gtaggcactttgtatgtaactggcagctaatatttgctctgggaatgcaaactaaattctataaaaaggcaatgaatcttttgcagaactctggtttaaagtagtctctccttatcagag

SEQ ID NO: 420846 - DNA, 120 bp, Artificial Sequence
  ENSG00000150628_12 (sequence is synthesized)
aggcataggttccaagatccccagtggatggcaactgtggatactacagaaccctctgtcagaacacatttctgtttatgtcttccatccacaaatttaatgcctttttaaaaatcttaa

SEQ ID NO: 420847 - DNA, 120 bp, Artificial Sequence
  ENSG00000150628_13 (sequence is synthesized)
ctaagcacttatcacacactgtggctgaaagtttttcagtttgaggtgtgatgccgaaactatcaagaatttctttttcttcatatttcaggaatatgattcattcctaccattgtaacc

SEQ ID NO: 420848 - DNA, 120 bp, Artificial Sequence
  ENSG00000150628_14 (sequence is synthesized)
attcttacaactttctattaagtcaagaactttcatcttttcacctaaaggaataattttatggtttctctctggcatatctgaatcaccagcatcactgctcttgcactttgcacacaa

SEQ ID NO: 420849 - DNA, 120 bp, Artificial Sequence
  ENSG00000150628_15 (sequence is synthesized)
gcgcaccacactgtacagttgatctgatgactaaaaggtgactgatgtctacaacgtggagactctggacaaagggaggactcacatcctaggcaacacagagcaggcagggaggtttca

SEQ ID NO: 420850 - DNA, 120 bp, Artificial Sequence
  ENSG00000150628_16 (sequence is synthesized)
tcagactgcccagaacagagtacaatttaaaagttacaaattatttcttgaattttccatttaatattttccgactgtgattgacccaaggtaactgaaactgcagaaagcaaaactgca

SEQ ID NO: 420851 - DNA, 120 bp, Artificial Sequence
  ENSG00000150628_17 (sequence is synthesized)
atgaatcacctggggatcttcttgaaatgcggattcaatacaaattaacagtttgggttcatcaaaagaacaccaaagcctttgaaacgtagataatcttagcaaaattccacagtaggt

SEQ ID NO: 420852 - DNA, 120 bp, Artificial Sequence
  ENSG00000150628_18 (sequence is synthesized)
tctccttagagcaacgatccaacaacactcactttacaagatacttttagtatggaatattagactagtattaattataaaataatacaaactgcataattaactacactttatttcatt

SEQ ID NO: 420853 - DNA, 120 bp, Artificial Sequence
  ENSG00000150630_0 (sequence is synthesized)
cccggcaccgccgccagcgcccccgccgcagcgcccgcggcccggctcctctcacttcggggaaggggagggaggagggggacgagggctctggcgggtttggaggggctgaacatcgcg

SEQ ID NO: 420854 - DNA, 120 bp, Artificial Sequence
  ENSG00000150630_1 (sequence is synthesized)
cgcggggtgttctggtgtcccccgccccgcctctccaaaaagctacaccgacgcggaccgcggcggcgtcctccctcgccctcgcttcacctcgcgggctccgaatgcggggagctcgga

SEQ ID NO: 420855 - DNA, 120 bp, Artificial Sequence
  ENSG00000150630_2 (sequence is synthesized)
tgtccggtttcctgtgaggcttttacctgacacccgccgcctttccccggcactggctgggagggcgccctgcaaagttgggaacgcggagccccggacccgctcccgccgcctccggct

SEQ ID NO: 420856 - DNA, 80 bp, Artificial Sequence
  ENSG00000150630_3 (sequence is synthesized)
tcgcaggggcgcccgcgcccccacccctgcccccgccagcggaccggtcccccacccccggtccttccaccatgcacttg

SEQ ID NO: 420857 - DNA, 120 bp, Artificial Sequence
  ENSG00000150630_4 (sequence is synthesized)
gtccttccaccatgcacttgctgggcttcttctctgtggcgtgttctctgctcgccgctgcgctgctcccgggtcctcgcgaggcgcccgccgccgccgccgccttcgagtccggactcg

SEQ ID NO: 420858 - DNA, 120 bp, Artificial Sequence
  ENSG00000150630_5 (sequence is synthesized)
acctctcggacgcggagcccgacgcgggcgaggccacggcttatgcaagcaaagatctggaggagcagttacggtctgtgtccagtgtagatgaactcatgactgtactctacccagaat

SEQ ID NO: 420859 - DNA, 120 bp, Artificial Sequence
  ENSG00000150630_6 (sequence is synthesized)
attggaaaatgtacaagtgtcagctaaggaaaggaggctggcaacataacagagaacaggccaacctcaactcaaggacagaagagactataaaatttgctgcagcacattataatacag

SEQ ID NO: 420860 - DNA, 120 bp, Artificial Sequence
  ENSG00000150630_7 (sequence is synthesized)
agatcttgaaaagtattgataatgagtggagaaagactcaatgcatgccacgggaggtgtgtatagatgtggggaaggagtttggagtcgcgacaaacaccttctttaaacctccatgtg

SEQ ID NO: 420861 - DNA, 120 bp, Artificial Sequence
  ENSG00000150630_8 (sequence is synthesized)
tgcctctctctcaaggccccaaaccagtaacaatcagttttgccaatcacacttcctgccgatgcatgtctaaactggatgtttacagacaagttcattccattattagacgttccctgc

SEQ ID NO: 420862 - DNA, 120 bp, Artificial Sequence
  ENSG00000150630_9 (sequence is synthesized)
cagcaacactaccacagtgtcaggcagcgaacaagacctgccccaccaattacatgtggaataatcacatctgcagatgcctggctcaggaagattttatgttttcctcggatgctggag

SEQ ID NO: 420863 - DNA, 120 bp, Artificial Sequence
  ENSG00000150630_10 (sequence is synthesized)
atgactcaacagatggattccatgacatctgtggaccaaacaaggagctggatgaagagacctgtcagtgtgtctgcagagcggggcttcggcctgccagctgtggaccccacaaagaac

SEQ ID NO: 420864 - DNA, 120 bp, Artificial Sequence
  ENSG00000150630_11 (sequence is synthesized)
tagacagaaactcatgccagtgtgtctgtaaaaacaaactcttccccagccaatgtggggccaaccgagaatttgatgaaaacacatgccagtgtgtatgtaaaagaacctgccccagaa

SEQ ID NO: 420865 - DNA, 120 bp, Artificial Sequence
  ENSG00000150630_12 (sequence is synthesized)
atcaacccctaaatcctggaaaatgtgcctgtgaatgtacagaaagtccacagaaatgcttgttaaaaggaaagaagttccaccaccaaacatgcagctgttacagacggccatgtacga

SEQ ID NO: 420866 - DNA, 120 bp, Artificial Sequence
  ENSG00000150630_13 (sequence is synthesized)
accgccagaaggcttgtgagccaggattttcatatagtgaagaagtgtgtcgttgtgtcccttcatattggaaaagaccacaaatgagctaagattgtactgttttccagttcatcgatt

SEQ ID NO: 420867 - DNA, 120 bp, Artificial Sequence
  ENSG00000150630_14 (sequence is synthesized)
ttctattatggaaaactgtgttgccacagtagaactgtctgtgaacagagagacccttgtgggtccatgctaacaaagacaaaagtctgtctttcctgaaccatgtggataactttacag

SEQ ID NO: 420868 - DNA, 120 bp, Artificial Sequence
  ENSG00000150630_15 (sequence is synthesized)
aaatggactggagctcatctgcaaaaggcctcttgtaaagactggttttctgccaatgaccaaacagccaagattttcctcttgtgatttctttaaaagaatgactatataatttatttc

SEQ ID NO: 420869 - DNA, 120 bp, Artificial Sequence
  ENSG00000150630_16 (sequence is synthesized)
cactaaaaatattgtttctgcattcatttttatagcaacaacaattggtaaaactcactgtgatcaatatttttatatcatgcaaaatatgtttaaaataaaatgaaaattgtattataa

SEQ ID NO: 420870 - DNA, 120 bp, Artificial Sequence
  ENSG00000150630_17 (sequence is synthesized)
cacagagaaatgactcttgaagaaactcaagaagggacaaagaaaggtcaaatcagtcattgctatttgcagaaggtgatgggtggatggaggacaagggggcaatcttcgacaaactgt

SEQ ID NO: 420871 - DNA, 120 bp, Artificial Sequence
  ENSG00000150630_18 (sequence is synthesized)
catatgaagaggaatgaagagaccttccccatgtctgtgtctagtagatgctgtagagacttgctggacaggaaagctttggtaaatcttcagaaatgatgttcaagctgaaggaagatg

SEQ ID NO: 420872 - DNA, 120 bp, Artificial Sequence
  ENSG00000150630_19 (sequence is synthesized)
ttcaagctgcattttggttgcaaaatgcagatttgcttgtttttctgttgaaaaattcctctatgtgatgctgtaagagttaccaggctattattaaaagaaagatgtattgtcacactg

SEQ ID NO: 420873 - DNA, 120 bp, Artificial Sequence
  ENSG00000150636_0 (sequence is synthesized)
aggactccagaactgtacggatgagaaaaggatgcaggaaattctgttgtttacacatgtggctgcaactgagacactggagcagcccagcaagcccagagggtcttaaaaataaatatg

SEQ ID NO: 420874 - DNA, 120 bp, Artificial Sequence
  ENSG00000150636_1 (sequence is synthesized)
aatttagattccatacatcgattaattgaggaaacacagatcttccagatgcaacaatcatcaattaagtcacgcggcgacatggtggcacctgcctcaccccccagggatacctgtaat

SEQ ID NO: 420875 - DNA, 120 bp, Artificial Sequence
  ENSG00000150636_2 (sequence is synthesized)
acctgcttcccacttcatgggctacaatctcatgctgctcacaatttctgtgctcactcatataacaccaacaaatgggatatttgtgaagaacttcgcctgcgggagcttgaagaagtc

SEQ ID NO: 420876 - DNA, 120 bp, Artificial Sequence
  ENSG00000150636_3 (sequence is synthesized)
aaggccagagctgctcagatggaaaagaccatgcggtggtggtcggactgcactgccaactggagagaaaaatggagtaaagttcgagctgaaaggaacagtgccagggaggaaggaaga

SEQ ID NO: 420877 - DNA, 120 bp, Artificial Sequence
  ENSG00000150636_4 (sequence is synthesized)
caactcagaataaaactagagatggcgatgaaagaattgagtacactgaaaaagaaacagagtttgccacctcagaaggaggcattagaagctaaagttacccaggatctgaagcttcct

SEQ ID NO: 420878 - DNA, 120 bp, Artificial Sequence
  ENSG00000150636_5 (sequence is synthesized)
ggcttcgtagaagaatcctgtgaacatacagaccaatttcaattgagttcacaaatgcatgagtctatcagagagtatttggtaaaaagacaattttctacaaaggaggacacaaataat

SEQ ID NO: 420879 - DNA, 120 bp, Artificial Sequence
  ENSG00000150636_6 (sequence is synthesized)
aaggaacaaggtgtggttattgattctctaaaattaagtgaggagatgaagcccaatctagatggtgttgatttattcaacaatggtggttctggaaacggtgaaacgaaaactgggctg

SEQ ID NO: 420880 - DNA, 120 bp, Artificial Sequence
  ENSG00000150636_7 (sequence is synthesized)
agactgaaagcaataaatctgcctttggaaaatgaagtaactgaaatttcagctttgcaggtgcatttggatgaattccaaaaaatcttatggaaggaaagagaaatgcgcacagctttg

SEQ ID NO: 420881 - DNA, 120 bp, Artificial Sequence
  ENSG00000150636_8 (sequence is synthesized)
gaaaaagaaatagagagactggagtcggctttgtctctgtggaagtggaagtatgaagaactgaaagaatcaaagccaaaaaatgtgaaagagtttgacattcttcttggtcaacataat

SEQ ID NO: 420882 - DNA, 120 bp, Artificial Sequence
  ENSG00000150636_9 (sequence is synthesized)
gatgaaatgcaagaactgtcaggcaatataaaggaagaatccaaatctcaaaacagcaaagacagagtgatttgtgagttaagagcagagctagagagattgcaagctgaaaatacctcg

SEQ ID NO: 420883 - DNA, 120 bp, Artificial Sequence
  ENSG00000150636_10 (sequence is synthesized)
gagtgggacaagagggaaatacttgaaagagaaaagcagggactggagagagaaaatagaaggctgaagatccaggtgaaagaaatggaagagcttttggataagaaaaatagattaagt

SEQ ID NO: 420884 - DNA, 120 bp, Artificial Sequence
  ENSG00000150636_11 (sequence is synthesized)
ccttcaacatgcctactataaactaaacagacaataccaggcaaatattgcagaactgactcatgcaaacaaccgagtggatcaaaatgaagcagaagtaaagaaactaagattacgagt

SEQ ID NO: 420885 - DNA, 120 bp, Artificial Sequence
  ENSG00000150636_12 (sequence is synthesized)
ggaagaactaaagcagggactcaatcaaaaagaagatgagcttgatgattccctgaatcagatccgtaagctccagaggtctctggatgaagagaaagaaagaaatgaaaacttagagac

SEQ ID NO: 420886 - DNA, 120 bp, Artificial Sequence
  ENSG00000150636_13 (sequence is synthesized)
tgaactcaggcacttgcaaaactggtaattttttcacaaaatatgctgaattaaagattagggccttaaagacatttccatatccttttcttaaatatcagtaaaattgtttttattaac

SEQ ID NO: 420887 - DNA, 120 bp, Artificial Sequence
  ENSG00000150636_14 (sequence is synthesized)
tagaaatattaatgaaaaaaacgtagacaatacacaaattaatgggcttcttcacttcttctaatttttgcctaacagatactgcatattctcaaaaagacaatttaaatgtcatttaaa

SEQ ID NO: 420888 - DNA, 120 bp, Artificial Sequence
  ENSG00000150636_15 (sequence is synthesized)
aacaactttaattctaagatgtgtaaatattttgaaagtcaaaaagggctttcagaatactttttacataaaatctgaaagagttataatatcggtaagaaaaagtaagttgaaaaccat

SEQ ID NO: 420889 - DNA, 120 bp, Artificial Sequence
  ENSG00000150636_16 (sequence is synthesized)
acaagacgctgggtcattaataagaaaaccattgactttaagtataaagtactggtttgtttaaataattggtaaacttttatgtacgtgttgtctatgtggtggggatggcaggttgta

SEQ ID NO: 420890 - DNA, 120 bp, Artificial Sequence
  ENSG00000150636_17 (sequence is synthesized)
ttaacaaaaatgaatcattctagaggtgtaacaatacatttcttatataattttataagtcatttctaatctttgtataaaacagaagtgagcagatgaatcagaaaaaagtgttttgta

SEQ ID NO: 420891 - DNA, 120 bp, Artificial Sequence
  ENSG00000150636_18 (sequence is synthesized)
ttttaaagtaacagataaccagtgattgaatctaagacaggctgtaagcatcgctgagaaactaaaaggacttttgacttttatctggatagacatttctacagtaaaatcatggaaagg

SEQ ID NO: 420892 - DNA, 120 bp, Artificial Sequence
  ENSG00000150636_19 (sequence is synthesized)
catcagcattgcaaagtagcatctaggtagaaatcaggccaaaattaagctgtggtttccctctgagtagtgggaatagagaaaattaggaaattgtggttatgtgaatatttctttaaa

SEQ ID NO: 420893 - DNA, 120 bp, Artificial Sequence
  ENSG00000150636_20 (sequence is synthesized)
acttttatgtacattatagtttattgcttcatatttaagtttagtttttaaggtaaaatgttattttgaacaaaaagacacttataattttccatacctattttcaactgaaggcaactt

SEQ ID NO: 420894 - DNA, 120 bp, Artificial Sequence
  ENSG00000150636_21 (sequence is synthesized)
gtaagatttaactcagtcaataacatactggttttactcatctccccctccattgattagccaaaaaaaaatgaaatcttactaattcattattgaataaagaccacttttatcagagtc

SEQ ID NO: 420895 - DNA, 120 bp, Artificial Sequence
  ENSG00000150636_22 (sequence is synthesized)
gtactactttatgagtgaacacgtgctggacagcttctaaatagtattttagagcatatctaaagattgtctcccttattaacatatggcattaatgggatataaatattcatatcttaa

SEQ ID NO: 420896 - DNA, 120 bp, Artificial Sequence
  ENSG00000150636_23 (sequence is synthesized)
attgatctgcaagaaaaaaaccaggatgtaaaataacgttcatgcatctgaaacaaagtgtgtcaaatgttaaaatatgacaaatcttcagacagtttcaagatttccaaaaggaagaag

SEQ ID NO: 420897 - DNA, 120 bp, Artificial Sequence
  ENSG00000150636_24 (sequence is synthesized)
aaaaatgaagtaagaaatagaactttctggttttttgtttcttattaaagctttgtctcagtattttctaagctaatgatcttatttccaataaagattttttcattaattcaagcgact

SEQ ID NO: 420898 - DNA, 120 bp, Artificial Sequence
  ENSG00000150636_25 (sequence is synthesized)
gcgcgtttccgggaaggtgaataccggtgaaagttatgctgagggtgagtaaactcaaaaactgacactcgattcagctattggaaagtttttttaatgtggttggaacaactgagaact

SEQ ID NO: 420899 - DNA, 120 bp, Artificial Sequence
  ENSG00000150636_26 (sequence is synthesized)
tggcaggatgaagacaaagtgtgtgaaaggtattctttggaattttgtggatgcgttttctcagctgaaagagagcctggatcttcattttcttctgatgatctcttatgaaaacttaga

SEQ ID NO: 420900 - DNA, 120 bp, Artificial Sequence
  ENSG00000150636_27 (sequence is synthesized)
tatctccagtcttggggataaagatatgagtgatacaaattagttaacaagcttattacagatggtctcaaccacttccactcatatgaacacacacctcacataccacacacattacca

SEQ ID NO: 420901 - DNA, 120 bp, Artificial Sequence
  ENSG00000150636_28 (sequence is synthesized)
tatgaacacacacctcacataccacacacattaccacacatgcaaagataagaaacatagcattctctctcctttcctctctctcctctctctctctttttgagacagtcttgctctgtc

SEQ ID NO: 420902 - DNA, 120 bp, Artificial Sequence
  ENSG00000150636_29 (sequence is synthesized)
tggcagcctcgaactcctagactcatgcgatcctcccacttctacctccagaatagctaggaccagagggtatgccactgcatttggctaattattattttacaaaaaaaaaaaatgtag

SEQ ID NO: 420903 - DNA, 120 bp, Artificial Sequence
  ENSG00000150636_30 (sequence is synthesized)
ggattgggtcttgccttgctgccaaggctggtttcgaactcctgggcttatgcaattctcccatctggtcctctcaaagtattgggatcacagacatgagccaccacacccatccagtat

SEQ ID NO: 420904 - DNA, 120 bp, Artificial Sequence
  ENSG00000150636_31 (sequence is synthesized)
ttatattaatatatacatactaaagttttataaacatggagtgactttttttcaataataaaaatgattcaaatattctattttcttttttaaacactccatatgggttgtgtacagaca

SEQ ID NO: 420905 - DNA, 120 bp, Artificial Sequence
  ENSG00000150636_32 (sequence is synthesized)
ttgtaatcaatctatcaatactgttgtatagcagtttcctcctttggaaaacagaaaaacatattattacttgggtgtaaattatttatttcacaaaatatttgaggaggtttacaatca

SEQ ID NO: 420906 - DNA, 120 bp, Artificial Sequence
  ENSG00000150636_33 (sequence is synthesized)
aaattataaaaaaacaatagcaagacttttggcaaaatgaaaggaacacaaataattccctctctgtcttttaaaatcccgtttaaacatccagtagattaaaaaaatacagaaaaatct

SEQ ID NO: 420907 - DNA, 120 bp, Artificial Sequence
  ENSG00000150636_34 (sequence is synthesized)
gcatgttcactggaaatcagtcagaggtgtgtatattccacattttaaagaactagaggaattgctgttaaatttagtatgaaagtaactgaactgagcaagcctatgtagaagtggtat

SEQ ID NO: 420908 - DNA, 120 bp, Artificial Sequence
  ENSG00000150636_35 (sequence is synthesized)
gagtcttctgaaacaaggatacgcagacagtagtggtggctgaacattgtagacagtacaaaatttgaggggaaggctgggcatggtggctcacagctgtaatcctggagatttgggagg

SEQ ID NO: 420909 - DNA, 120 bp, Artificial Sequence
  ENSG00000150636_36 (sequence is synthesized)
ctgaggtgggcagattgcttgagaccaggagtttgatgttgcagtgtgttgtgattccaccgctgtactccagcctgggtgacagagtgagcccatgtctctattgaaaacaaaagaaaa

SEQ ID NO: 420910 - DNA, 120 bp, Artificial Sequence
  ENSG00000150636_37 (sequence is synthesized)
ggaaagaaaaaaaattgaggggagagggttggaagcaaaaatggctggggagactgttacggactgaatgtgtctcctcaaattcctatgctgaaatcctaactcccaatgtaatggtgt

SEQ ID NO: 420911 - DNA, 120 bp, Artificial Sequence
  ENSG00000150636_38 (sequence is synthesized)
tagaagctggagccattggtacgtgattagatactgactggagctttcatgaataggatcagtactctcataagagaagcttaagagagatctctagctccttccaccatgtgagcatgc

SEQ ID NO: 420912 - DNA, 120 bp, Artificial Sequence
  ENSG00000150636_39 (sequence is synthesized)
agggagaagatggaagtcaatgaagaggaaacgagcccttaacagacactgactctgctaatatttggacttcccaggctccagaactgtgagaaataaacttttgttgtttataagcca

SEQ ID NO: 420913 - DNA, 120 bp, Artificial Sequence
  ENSG00000150636_40 (sequence is synthesized)
gtgaataccggtgaaagttatgctgagggtgaggtaggctctgacgacgcacttgcaggttgaatactggcacatcatttacttgttactcccgtgtggtgagtgcacctgtgggttttg

SEQ ID NO: 420914 - DNA, 120 bp, Artificial Sequence
  ENSG00000150636_41 (sequence is synthesized)
tgggacatctcttaaatgcagcaagctttaatgcatttttgccaaataaactcaaaaactgacactcgattcagctattggaaagtttttttaatgtggttggaacaactgagccatgtg

SEQ ID NO: 420915 - DNA, 120 bp, Artificial Sequence
  ENSG00000150636_42 (sequence is synthesized)
aaaacacaacaagaaggtaccatcctggaagcagagagcaaacccttatcagataccacacctgctgactcctttatgtgcagcctccagaactttaagaaataaatttttattatttat

SEQ ID NO: 420916 - DNA, 120 bp, Artificial Sequence
  ENSG00000150636_43 (sequence is synthesized)
aagatgtcacaaattgatctgcaagaaaaaaaccaggtatgggtgctccttggagcaaattctcactgtctaatctcactctgatgcctacgcagagtctgtcttcactcgtacacgcct

SEQ ID NO: 420917 - DNA, 120 bp, Artificial Sequence
  ENSG00000150636_44 (sequence is synthesized)
ccacatttggatatttccttttgtgccagctaatacctgatactccttgctcttttgcccactaggatgtaaaataacgttcatgcatctgaaacaaagtgtgtcaaatgttaaaatatg

SEQ ID NO: 420918 - DNA, 120 bp, Artificial Sequence
  ENSG00000150636_45 (sequence is synthesized)
catactattttaagtagggtaacggtcgtgcctttggttactttatgaaagtgaatgctgctgctaatgtaatcagcttatatgtgatttaaaaggctgtggaatgacattggcccataa

SEQ ID NO: 420919 - DNA, 120 bp, Artificial Sequence
  ENSG00000150637_0 (sequence is synthesized)
gctatctgaggaagttctggtagagagaagagctcaagagcatgggcagagtcagctcctgagtgggctgaacgctcccctcagctcctgcagtgctaattaagggagggagcagcgggg

SEQ ID NO: 420920 - DNA, 120 bp, Artificial Sequence
  ENSG00000150637_1 (sequence is synthesized)
agcttgcagtgaccaagagggtgttgaggctaggaggccacgataaacaggatacgataaaagtccttaaccaagacgcagatgggaagaagcgttagagcgagcagcactcacatctca

SEQ ID NO: 420921 - DNA, 120 bp, Artificial Sequence
  ENSG00000150637_2 (sequence is synthesized)
agaaccagcctttcaaacagtttccagagatggattatcctactttacttttggctcttcttcatgtatacagagctctatgtgaagaggtgctttggcatacatcagttccctttgccg

SEQ ID NO: 420922 - DNA, 120 bp, Artificial Sequence
  ENSG00000150637_3 (sequence is synthesized)
agaacatgtctctagaatgtgtgtatccatcaatgggcatcttaacacaggtggagtggttcaagatcgggacccagcaggattccatagccattttcagccctactcatggcatggtca

SEQ ID NO: 420923 - DNA, 120 bp, Artificial Sequence
  ENSG00000150637_4 (sequence is synthesized)
taaggaagccctatgctgagagggtttactttttgaattcaacgatggcttccaataacatgactcttttctttcggaatgcctctgaagatgatgttggctactattcctgctctcttt

SEQ ID NO: 420924 - DNA, 120 bp, Artificial Sequence
  ENSG00000150637_5 (sequence is synthesized)
acacttacccacagggaacttggcagaaggtgatacaggtggttcagtcagatagttttgaggcagctgtgccatcaaatagccacattgtttcggaacctggaaagaatgtcacactca

SEQ ID NO: 420925 - DNA, 120 bp, Artificial Sequence
  ENSG00000150637_6 (sequence is synthesized)
cttgtcagcctcagatgacgtggcctgtgcaggcagtgaggtgggaaaagatccagccccgtcagatcgacctcttaacttactgcaacttggtccatggcagaaatttcacctccaagt

SEQ ID NO: 420926 - DNA, 120 bp, Artificial Sequence
  ENSG00000150637_7 (sequence is synthesized)
tcccaagacaaatagtgagcaactgcagccacggaaggtggagcgtcatcgtcatccccgatgtcacagtctcagactcggggctttaccgctgctacttgcaggccagcgcaggagaaa

SEQ ID NO: 420927 - DNA, 120 bp, Artificial Sequence
  ENSG00000150637_8 (sequence is synthesized)
acgaaaccttcgtgatgagattgactgtagccgagggtaaaaccgataaccaatataccctctttgtggctggagggacagttttattgttgttgtttgttatctcaattaccaccatca

SEQ ID NO: 420928 - DNA, 120 bp, Artificial Sequence
  ENSG00000150637_9 (sequence is synthesized)
ttgtcattttccttaacagaaggagaaggagagagagaagagatctatttacagagtcctgggatacacagaaggcacccaataactatagaagtcccatctctaccagtcaacctacca

SEQ ID NO: 420929 - DNA, 120 bp, Artificial Sequence
  ENSG00000150637_10 (sequence is synthesized)
atcaatccatggatgatacaagagaggatatttatgtcaactatccaaccttctctcgcagaccaaagactagagtttaagcttattcttgacatgagtgcattagtaatgactcttatg

SEQ ID NO: 420930 - DNA, 120 bp, Artificial Sequence
  ENSG00000150637_11 (sequence is synthesized)
tactcatgcatggatctttatgcaatttttttccactacccaaggtctaccttagatactagttgtctgaattgagttactttgataggaaaaatacttcattacctaaaatcatttttc

SEQ ID NO: 420931 - DNA, 120 bp, Artificial Sequence
  ENSG00000150637_12 (sequence is synthesized)
atagaactgtttcagaaaacctgactctaactggtttatatacaaaagaaaacttactgtatcatataacagaatgatccaggggagattaagctttgggcaagggctatttaccagggc

SEQ ID NO: 420932 - DNA, 120 bp, Artificial Sequence
  ENSG00000150637_13 (sequence is synthesized)
ttaaatgttgtgtctagaattaagtatgggcataaactggcttctgaatccctttccagagtgttggatccatttccctggtcttggcctcactctcatgcaggctttcctcttgtgttg

SEQ ID NO: 420933 - DNA, 120 bp, Artificial Sequence
  ENSG00000150637_14 (sequence is synthesized)
gcaagatggctgccaactcttggcaattcatacatccttgtttctgtctggtagagagtttgcttctcaaatggagcaaacaaatttgattattttttcattgttaaataggcaacatga

SEQ ID NO: 420934 - DNA, 120 bp, Artificial Sequence
  ENSG00000150637_15 (sequence is synthesized)
ccagaaaggatggaatggcttaagtaaactaagggttcacttctagagctgagaagcagggtcaaagcacaatactgggcaattcagagcatggttagaagaggaaaggggagtctcaaa

SEQ ID NO: 420935 - DNA, 120 bp, Artificial Sequence
  ENSG00000150637_16 (sequence is synthesized)
gctggagagtttaccaacaaatattgactgcagtgattaaccaagacatttttgttaactaaaaagtgaaatatgggatggattctagaaatggggtatctctgtccatacttctagaat

SEQ ID NO: 420936 - DNA, 120 bp, Artificial Sequence
  ENSG00000150637_17 (sequence is synthesized)
ccactctatcagcatagtccagaagaatacctggcagtagaagaaatgaatattcaagaggaagataaatgcgagagggcaatcctttactattctcatatttatttatctctcattctg

SEQ ID NO: 420937 - DNA, 120 bp, Artificial Sequence
  ENSG00000150637_18 (sequence is synthesized)
tatagaattcttgccgccatcccaggtctagccttaggagcaaatgtagtagatagtcgaataataaataacttaatgttttggacatattttgtctacttttgagaattatttttaata

SEQ ID NO: 420938 - DNA, 120 bp, Artificial Sequence
  ENSG00000150637_19 (sequence is synthesized)
tgtaaattctctcaaaagggtcaggcacctagttattattttttaatgattatgtgaaagttgaatataatataccactaaaagtgacagttgaaagtggtggcataggacggtagggta

SEQ ID NO: 420939 - DNA, 120 bp, Artificial Sequence
  ENSG00000150637_20 (sequence is synthesized)
gaaatttgggagggaaaaaagaaattgggagggtacaggcaacaggagaaaggaatcaaaccacagaaaaatacaaagggaaacttctgcttcactattcagacaaagacagccctaatg

SEQ ID NO: 420940 - DNA, 120 bp, Artificial Sequence
  ENSG00000150637_21 (sequence is synthesized)
acatcaccaacagtcaaagcaattagagaccatacctaatattgtttaaattctagatgtaggctaacaatgaaaagtatttgccaaactgaataaaactgtcatggttaccttgaaagg

SEQ ID NO: 420941 - DNA, 120 bp, Artificial Sequence
  ENSG00000150637_22 (sequence is synthesized)
acaatggttattgttaaatatagtgatcattcatgtctaaaagattcattatttatctctaaagatttctaaagaccaccatctagaaaagattcattatgaaggctgtatttaaatatc

SEQ ID NO: 420942 - DNA, 120 bp, Artificial Sequence
  ENSG00000150637_23 (sequence is synthesized)
aaagttgtggacttcatgataatcttaaataaagcaaatccaaattctcctgttgcctagacagattctaagatgtaatttacacttttaagctaattagtgagtattttatgattttag

SEQ ID NO: 420943 - DNA, 120 bp, Artificial Sequence
  ENSG00000150637_24 (sequence is synthesized)
ccttaaacaccatgtatgccaaataatgcacttgttttgtgaattacagaaatggtaagtgcccacatttctgtgaattataaaatttgtgagtttcttttaacccttttcaggagtgaa

SEQ ID NO: 420944 - DNA, 120 bp, Artificial Sequence
  ENSG00000150637_25 (sequence is synthesized)
aaaataaaaacgaccatttcctggttgtgcttaagtatatgcaagaagggtaaactctcatttttattatgtttgcttaaagatctttttatacctggattcatgaaatgtttccacaaa

SEQ ID NO: 420945 - DNA, 120 bp, Artificial Sequence
  ENSG00000150637_26 (sequence is synthesized)
tatattagtgtaacaaacttgaaaggcagtttacaagaaagcactctactatcagatcaatcaaagattctgtgagtgaatttattggtttgcatggtgaagcaagcttagcatcaatta

SEQ ID NO: 420946 - DNA, 120 bp, Artificial Sequence
  ENSG00000150637_27 (sequence is synthesized)
aaaggtaaataatttcttttctgaatggtaaagacaatcaaaatattactttctggaaaactccaataaccaaattctcaatgattagtgtatgtgagcaggaaaacatttttacagttg

SEQ ID NO: 420947 - DNA, 120 bp, Artificial Sequence
  ENSG00000150637_28 (sequence is synthesized)
tagtatggggaaatataaatccaattttaagagagaaaattatgactgggtgtggaagggacagtatagtcagataccattgtcatggtggtttttactgggaacttcatgaaagacttt

SEQ ID NO: 420948 - DNA, 120 bp, Artificial Sequence
  ENSG00000150637_29 (sequence is synthesized)
tgtagcaaaccactgcagtattgcaaagcctccagaacatttggaacttgtctctttttccttgtgtgtgtttgtgtttttggtctctcattcaaaatattgatgagaactatttactct

SEQ ID NO: 420949 - DNA, 120 bp, Artificial Sequence
  ENSG00000150637_30 (sequence is synthesized)
gtcctttcttctctatatattcttcctctacagagtgtagggttttttcaggaatttggagccatctgaagtcctcccaaaaattctctgacgtcttctgatgctcctgttataccctca

SEQ ID NO: 420950 - DNA, 120 bp, Artificial Sequence
  ENSG00000150637_31 (sequence is synthesized)
ggggtaatgcttgtgaaattccattcattcattttctttctctggacatctttacttaccaaagcactttcattgtcatctttttaacatcattcttaattcgtgatagttttgggactc

SEQ ID NO: 420951 - DNA, 120 bp, Artificial Sequence
  ENSG00000150637_32 (sequence is synthesized)
tccctagtgtatgtttctccccctctactcttttgcacctatgattctgattgttactaagaaagcagatgaaaaacagatccacagaataaacgatcagaattccagtaaattctattt

SEQ ID NO: 420952 - DNA, 120 bp, Artificial Sequence
  ENSG00000150637_33 (sequence is synthesized)
ataaacgatcagaattccagtaaattctattttaaatacagatactttttacaagttgctgctttggaagcaaaatgcttcttaagttttacatatatatatatatatatacatatatat

SEQ ID NO: 420953 - DNA, 120 bp, Artificial Sequence
  ENSG00000150637_34 (sequence is synthesized)
attaagaatctatgcttcctttgaatgccattaatatttatgttaaagtaaccaatgaaaggaaattactttgttataataagataggaagacttgttaatggagtacacagttttgtca

SEQ ID NO: 420954 - DNA, 120 bp, Artificial Sequence
  ENSG00000150637_35 (sequence is synthesized)
gggaaagaacacatcttattgaactatgatgactatgcattgactatattattataagagataccttcaaactttatttaaagaactttaggtataatatgttgagaaaataaaatagaa

SEQ ID NO: 420955 - DNA, 120 bp, Artificial Sequence
  ENSG00000150637_36 (sequence is synthesized)
atttcatttacttgtaatcatgcttaaaatgggaggcaggtaggtgaagatataatttttagtaaaaactccaatttatgttttaagtaattcagtgtattactaaaatactatatatat

SEQ ID NO: 420956 - DNA, 120 bp, Artificial Sequence
  ENSG00000150637_37 (sequence is synthesized)
aaacttaaaatacatgggttatcaatttaaaagacaaagtaagtaaaaatacttttagtaggcattcgtggattgtgaacatccaagttatattggtttgtatagaatggcattaagtaa

SEQ ID NO: 420957 - DNA, 120 bp, Artificial Sequence
  ENSG00000150637_38 (sequence is synthesized)
aaattacagctgtataacagtagttttctaaattgagagagtccacattgtaattagagatcactgtgaccaaaatgcttctccttgatttataatgatgtactgtattttgtactgctt

SEQ ID NO: 420958 - DNA, 120 bp, Artificial Sequence
  ENSG00000150637_39 (sequence is synthesized)
atatgaaatttcagcaagattgacgatattataaagatgcttataaagtgtaagtggagacgctaaattgtgagtacaaagtttctttttcacaacagtgataagaaaatatctttaaaa

SEQ ID NO: 420959 - DNA, 120 bp, Artificial Sequence
  ENSG00000150637_40 (sequence is synthesized)
aatataagacaatataaacatgtcatcattagtttagctactattaaaatgtaacatctagaaagtactgatctccaccttcagacttctgtataagtatattttttcactgatctgttc

SEQ ID NO: 420960 - DNA, 120 bp, Artificial Sequence
  ENSG00000150637_41 (sequence is synthesized)
attagagttcttccagccaagactctgggctcttaaaacatgtatctgaaaactaaaaacaagttaatttttttaaaagcttctctatttctagtgattcaataggtagaaaaatagctt

SEQ ID NO: 420961 - DNA, 120 bp, Artificial Sequence
  ENSG00000150637_42 (sequence is synthesized)
ctagaattaactgcaatgctttctaaggaaattttataaatcctcaaggtcggtttacacatatttttccagattcagagcactaactatcttgtaagatgtaagaaaaggtccatttgg

SEQ ID NO: 420962 - DNA, 120 bp, Artificial Sequence
  ENSG00000150637_43 (sequence is synthesized)
aagtatgagtaataaatgtctgggataattctggtttatttcgtattatccttgttagaataagttatatggtcaacctgttcagaacactttttctagtgttagtgtgtacttttggat

SEQ ID NO: 420963 - DNA, 120 bp, Artificial Sequence
  ENSG00000150637_44 (sequence is synthesized)
ttttggttcttgtagggtatagaaatattttcctttgtcttgtattctgttgttttgaatgaataaaacacaatgtttcacgatcactactttcatttgccatggagaaatagcagggaa

SEQ ID NO: 420964 - DNA, 120 bp, Artificial Sequence
  ENSG00000150637_45 (sequence is synthesized)
gcagggaaaaatttctacagaataaaattaactgatgaattacatgcagaaaaaattcaaatcaatgatacattgtaatttttatctcaatgcaatgttctttgtattttattttattat

SEQ ID NO: 420965 - DNA, 73 bp, Artificial Sequence
  ENSG00000150637_46 (sequence is synthesized)
tgggattacaggcatatgccacgttggtcagacttgtcttgaactctggacctcaggtgatccacctgcctca

SEQ ID NO: 420966 - DNA, 120 bp, Artificial Sequence
  ENSG00000150637_47 (sequence is synthesized)
cctaaattgctgggattacaggcatgagcgaccactcctggccttgttctttgtattttataagtgcatgtagtgcaaagggtcaaagggctttacaggttttttgtttgtttgtttttg

SEQ ID NO: 420967 - DNA, 120 bp, Artificial Sequence
  ENSG00000150637_48 (sequence is synthesized)
tttttcccgaaacatagtagtcccttgcccttcctcatttttgttaccttgagacaacaaattttactacttctaactcattattttatttatgttcacttttctgaatagcatgcttat

SEQ ID NO: 420968 - DNA, 120 bp, Artificial Sequence
  ENSG00000150637_49 (sequence is synthesized)
gacactaatactttttttttcaattttagacattcattattcatttagatgtctttctctccccaaactcaccacataaaatactcttctcatgtctctttcagaaatatttgtattaaa

SEQ ID NO: 420969 - DNA, 120 bp, Artificial Sequence
  ENSG00000150637_50 (sequence is synthesized)
tttgctttccctcctacataactttttttccacctagagctaataattgtcattctggggactgactttttctgtatttaccataaattgacctgaaactcccctgtgatgcagcaggaa

SEQ ID NO: 420970 - DNA, 120 bp, Artificial Sequence
  ENSG00000150637_51 (sequence is synthesized)
ttctaccaacgtcaacttccttagaaagactccattagaagcttgacttggggctagaaggagaggcacacaactgccatcctggtgtctcccttcatccagaaaaagggggaggaatac

SEQ ID NO: 420971 - DNA, 120 bp, Artificial Sequence
  ENSG00000150637_52 (sequence is synthesized)
atgaaacctagaatccactctaaaacattttccagaacaaaaggacatgtgtttccgtgttgtaaatgtttaacgagtgcccataacaaggaataataagtctattatgtttgcttttgt

SEQ ID NO: 420972 - DNA, 120 bp, Artificial Sequence
  ENSG00000150637_53 (sequence is synthesized)
tctattatgtttgcttttgtgtctgtaaaagttgggggtattggttgtaagcacgaaaacagatactgactgttgaagaaaaaaaaaaatacgaggtcaggagtttgagaccaacttggc

SEQ ID NO: 420973 - DNA, 69 bp, Artificial Sequence
  ENSG00000150637_54 (sequence is synthesized)
gagtttgagaccaacttggccaatatggtgaaaccctgtcttagtaaaaatagaaaaattagccaggcc

SEQ ID NO: 420974 - DNA, 76 bp, Artificial Sequence
  ENSG00000150637_55 (sequence is synthesized)
tttgaacataggggtggctcatagaattcccaggacacccgatggagtaggcttgcaaaacacaacatgtggcaac

SEQ ID NO: 420975 - DNA, 120 bp, Artificial Sequence
  ENSG00000150637_56 (sequence is synthesized)
acccgatggagtaggcttgcaaaacacaacatgtggcaactccagtgggaaacgaggcaggaaacactcgtttcctgcagaaagcaacaatttgggcttcgataccctccctagaacaca

SEQ ID NO: 420976 - DNA, 120 bp, Artificial Sequence
  ENSG00000150637_57 (sequence is synthesized)
gggcagtgaatctgagcagcatcagtaccccacgttcggatgagtcctgagcccctatttttattcactgacttattccaaaatcagtgtctcttaaatatatctggaaggcagcagctt

SEQ ID NO: 420977 - DNA, 120 bp, Artificial Sequence
  ENSG00000150637_58 (sequence is synthesized)
gtatctcccccttcagcttccatagtggcagtcagggtacaacttactttccaaacagaacacactgcgacattccctccaggctcgttgaagaacttcaactgacaaatgtccctcctc

SEQ ID NO: 420978 - DNA, 120 bp, Artificial Sequence
  ENSG00000150637_59 (sequence is synthesized)
gaccagatgatagttttcttaaaggcagggtttaatatacccttttataaatgtttcaaggccctgtgtaatacctgagtttattccagatgtaactaaatatatccaagattgttttaa

SEQ ID NO: 420979 - DNA, 120 bp, Artificial Sequence
  ENSG00000150637_60 (sequence is synthesized)
aataaattgctgaaaaaacaaataaatacagttagtatctatatcaatattctcagttggcagttttgcaataatggccgatagttcatttttagtaacactattgacattgcatttgga

SEQ ID NO: 420980 - DNA, 120 bp, Artificial Sequence
  ENSG00000150637_61 (sequence is synthesized)
tattagggtttactaatcatccgcatgtatacattgcatatttttctagactttaactttattcaaatctattgatttttaaacctgcaacttatgtctagacacaggtatacctttaca

SEQ ID NO: 420981 - DNA, 120 bp, Artificial Sequence
  ENSG00000150637_62 (sequence is synthesized)
agaactaccattttttttggtaacatactacctccaaaatttcaagtaagaagttgatttttgtccatttttaaatggaaaacttgtaatcaaaatgccacaaaattatactgtgtatca

SEQ ID NO: 420982 - DNA, 120 bp, Artificial Sequence
  ENSG00000150637_63 (sequence is synthesized)
tttgacctatagaaaccaatattattacaggaagaaagcagagccaatcttctacctgtggtcaaataagtggaggccctttctagactaagttctcatgagtttaaaataccaagcata

SEQ ID NO: 420983 - DNA, 120 bp, Artificial Sequence
  ENSG00000150637_64 (sequence is synthesized)
agttctccaaattcctgaaaaggaagccttgtgttgtattgcccagccatatttgtaagacataaaaataaaacttgagaagaagctatgataacttactttcttcattcttcaaaattt

SEQ ID NO: 420984 - DNA, 120 bp, Artificial Sequence
  ENSG00000150637_65 (sequence is synthesized)
acataatctcaactgattttatgtttttatgaaaatgcattcttaagatatatccttattcaatcatgtattcattacatcctttatgccaggtatccaaaagtacttacagtgactaag

SEQ ID NO: 420985 - DNA, 120 bp, Artificial Sequence
  ENSG00000150637_66 (sequence is synthesized)
accattattctttgatcagctgcctgagtaagactttgagctctccaatatactctcagtgatactaagttttctgagtaacagctttggatgtggcttcagttgagctgatttatccca

SEQ ID NO: 420986 - DNA, 120 bp, Artificial Sequence
  ENSG00000150637_67 (sequence is synthesized)
cactttatttttatcgtataatggtcctcagaagcaaattttgattttagctcacataaaaaatgtacaaagaaatgtaatggctcagtagcttctagagatagagattactcttctaac

SEQ ID NO: 420987 - DNA, 120 bp, Artificial Sequence
  ENSG00000150637_68 (sequence is synthesized)
tcagtagcttctagagatagagattactcttctaacctttctgtaattttgtatgtctattttataattctttcaatgtctaatgaatagctatctttttttgagacggagtctcgctct

SEQ ID NO: 420988 - DNA, 120 bp, Artificial Sequence
  ENSG00000150637_69 (sequence is synthesized)
taaggtggaagcctagattattgattttatatgttgttttcttttccaatagtggcacttaatgctataaatttcactttgttccacaagttttggtaagctctatttttattttcattt

SEQ ID NO: 420989 - DNA, 120 bp, Artificial Sequence
  ENSG00000150637_70 (sequence is synthesized)
agtccaaaatattttaaaatttcttttgatatttcttctttgagccatgaattatttacaatgtgttgtttaatctctatatattttgggatttttctactttatatctcttacagattt

SEQ ID NO: 420990 - DNA, 120 bp, Artificial Sequence
  ENSG00000150637_71 (sequence is synthesized)
ctaacttaatttcatcatgttttaaaaacattctttgtataatttctattcttttaaatttttcaggtgtattttatggcccagaatatggtctatcttgtagaatgtttcatgtgatct

SEQ ID NO: 420991 - DNA, 120 bp, Artificial Sequence
  ENSG00000150637_72 (sequence is synthesized)
taagaagaatgttcattctgctgttgagtgtaatattctacaaatgtccattagattaaactgattgataccaccgttcagattatctatatcctttctgattttccctcttcttgatct

SEQ ID NO: 420992 - DNA, 120 bp, Artificial Sequence
  ENSG00000150637_73 (sequence is synthesized)
atcacatactgacagatcaagtgatcaagtctcgttaaagactgcaagtaaaatagtggatttttctatttctccttgcagttttgttagtttttgtctcatgtatcttgatactcttgt

SEQ ID NO: 420993 - DNA, 120 bp, Artificial Sequence
  ENSG00000150637_74 (sequence is synthesized)
tagtacatatactttcagaatcgttaggttttcttggagaattgacccctttaccacatgtaatgtcccttttattcttgataatctttcttgttctgtctgctttttctgatattaaca

SEQ ID NO: 420994 - DNA, 120 bp, Artificial Sequence
  ENSG00000150637_75 (sequence is synthesized)
taactttcagttttttaaaaaattaacattagcatctcacatctttatccttttaattttaaattatctaaatatttatatttaatgtgcctttcttatagacaatgtatagttgcgtct

SEQ ID NO: 420995 - DNA, 120 bp, Artificial Sequence
  ENSG00000150637_76 (sequence is synthesized)
atttgtaatttccccacttttcttacttaaaaatgttgtagatatataggagttgtatatatttggggggtacatgtgatgttttgatacctgtatacaatatgtaatgatcatattggg

SEQ ID NO: 420996 - DNA, 120 bp, Artificial Sequence
  ENSG00000150637_77 (sequence is synthesized)
taatcgtgatatctgtcacctctaacattcatcttttttgtgtgtttaaacccaccacttctaattggtacatttagattattcaaatttaagtgattattgatatagttggattaatat

SEQ ID NO: 420997 - DNA, 120 bp, Artificial Sequence
  ENSG00000150637_78 (sequence is synthesized)
ctactatgtttgtaacttttctatccttgcactcgttctttcttttttatcctcctttttctgtgttctctgattttaactggggtttttacatgatttaattttctctcgtggcatatc

SEQ ID NO: 420998 - DNA, 120 bp, Artificial Sequence
  ENSG00000150637_79 (sequence is synthesized)
tttcattgatcaacctaggtttttctccttttcccctcttttttttggtatttattctatttagtgttatctgagctacctgagttggtgtctatcactaattttggcaagttcccagac

SEQ ID NO: 420999 - DNA, 120 bp, Artificial Sequence
  ENSG00000150637_80 (sequence is synthesized)
gttattacttctaacattcttttgctccattctttcttcttcttcaattattccatagtcttgaatattctgggtttttcccactctttgaattttagtttgaaaagtttctattggcct

SEQ ID NO: 421000 - DNA, 120 bp, Artificial Sequence
  ENSG00000150637_81 (sequence is synthesized)
agcttcaaagtcattcattcttccttcggggttccaagtcaactgataattgcatcaaagatatccttcctttctattactatgttttttattgctaccatttcttttttattccttctt

SEQ ID NO: 421001 - DNA, 120 bp, Artificial Sequence
  ENSG00000150637_82 (sequence is synthesized)
agtgtttccatctttcttcttacattatccatctgttgtctatttttttcatgagagctcttaacatattaatgataagttccatgtctgataattctgacacgtgtcatgtctctatct

SEQ ID NO: 421002 - DNA, 120 bp, Artificial Sequence
  ENSG00000150637_83 (sequence is synthesized)
ggttccaatgattgctttatctcttcagaccatgacttttcttgccttttgacgttctttgacattttttttgaattttttgttgcaagccagatctggtgtgttatgtaataggaacag

SEQ ID NO: 421003 - DNA, 120 bp, Artificial Sequence
  ENSG00000150637_84 (sequence is synthesized)
gtaaataagtctttagcttgcagacttatcttaatctgactaactattagactgtgtttaaagtctgttataaccataggtgctaaatttcttcaaattcctctagtgtctttgttttgt

SEQ ID NO: 421004 - DNA, 120 bp, Artificial Sequence
  ENSG00000150637_85 (sequence is synthesized)
ttgttcatgtgtttttccccttcttgagttcaggcttccctaagtgctcctcttcagagagactttctgtctttcagctctttcctctgcaattcactgttactatactggagccctgtt

SEQ ID NO: 421005 - DNA, 120 bp, Artificial Sequence
  ENSG00000150637_86 (sequence is synthesized)
ggtgtagtactaagctgtgggaaaggagagtgctctgtaatcttacagtgaaatctcagtcttttagtgggtctgtgtctgggacattcacagagcttctccagtggtattgcttcctca

SEQ ID NO: 421006 - DNA, 120 bp, Artificial Sequence
  ENSG00000150637_87 (sequence is synthesized)
tcctcaactctctttcctggctgcagcattcccaatgtatttctttgaaggcctgccccctgttgactgttattttccctctttccttaagtgggacagggagacttcaggggctgggat

SEQ ID NO: 421007 - DNA, 120 bp, Artificial Sequence
  ENSG00000150637_88 (sequence is synthesized)
gaggtttgggaattgtgcttggcagagtcctttccatctttgttaccaagaaggttcatggcttatttctcaatggatgtccctctctatctgttgccagagccacgaggaaatttttct

SEQ ID NO: 421008 - DNA, 120 bp, Artificial Sequence
  ENSG00000150637_89 (sequence is synthesized)
tggatcctcataatgagaaccttggagtttcctactggaaaagcccttgaatgtgtggagtgcctcaagagcacagcccccatgggtttcttgctcacaccagtccacaaacagatgcca

SEQ ID NO: 421009 - DNA, 120 bp, Artificial Sequence
  ENSG00000150637_90 (sequence is synthesized)
gcaattcacccaacttaccatataaaggctcatactagtttatggctccagtgctttgactccagataaatggctattggttgcgtatctctctggatgtatctgtatctccagattttg

SEQ ID NO: 421010 - DNA, 120 bp, Artificial Sequence
  ENSG00000150637_91 (sequence is synthesized)
gggtggcagtttgctcaggaccttggttctctaataggtctaataagaaaagtcattgattttcagctttccaactttccagctttgtcttgttataagcatggcagcaacatcttccat

SEQ ID NO: 421011 - DNA, 120 bp, Artificial Sequence
  ENSG00000150637_92 (sequence is synthesized)
gccttaacatgatgacactaaaggcagaagtcgatctccatgtataaacattttaacacatatgttttttgttatcgtggtttctgacctgtctctttgccctgactttctgatactgca

SEQ ID NO: 421012 - DNA, 120 bp, Artificial Sequence
  ENSG00000150637_93 (sequence is synthesized)
ctagggttcctgttgctggactccattccatatgacttgctctcgtctaggctgctctttggctcatctttataaatcatgatccaaaatgaagcacatatttattttttaaataaatat

SEQ ID NO: 421013 - DNA, 120 bp, Artificial Sequence
  ENSG00000150637_94 (sequence is synthesized)
gaaatgaagtatagacatcaaactgaagatgagtagatcatactgagtttcactgtctgtgcttggatcaacatcaggccttatacaaatattcaagtccagaggcaaaaggtaataagg

SEQ ID NO: 421014 - DNA, 120 bp, Artificial Sequence
  ENSG00000150637_95 (sequence is synthesized)
aaaatttgtagcacaagccacaaggagataacatgtcaagtctatgcgattggaaataaactaaagatgaactgctggggatgctcactcatcacagagctcagtctaaagcaccagatt

SEQ ID NO: 421015 - DNA, 120 bp, Artificial Sequence
  ENSG00000150637_96 (sequence is synthesized)
tcacaagcattttttgggggaaattctgttaaaatgaaatatgagtcacatggtggtgtttcactcatcatatgtgttcaatattaattcattttaaggtttagttgcacaaaaggtaaa

SEQ ID NO: 421016 - DNA, 120 bp, Artificial Sequence
  ENSG00000150637_97 (sequence is synthesized)
tgagaattagaagactccatgggtaagaggagccacagaagtaaagcattgtcaagggttctatgtctatatatttagatattaggcttctgagaaaaaaacacaataggaaggaagatg

SEQ ID NO: 421017 - DNA, 120 bp, Artificial Sequence
  ENSG00000150637_98 (sequence is synthesized)
aacacaacagagggcagaaggtctatacgtcctgaggccttttatgcaacgtttgtttgtggaatgttttttaagaatgtgtgagagtcattttaatgtgaaataaagacctacgtctac

SEQ ID NO: 421018 - DNA, 120 bp, Artificial Sequence
  ENSG00000150637_99 (sequence is synthesized)
agtgaggacttctctgctccatgcatgcaccacctttcacttattatttatatttttacatctttattttagtttctgcctcctccacatagaatgtaagttctatcatggcaatatttt

SEQ ID NO: 421019 - DNA, 120 bp, Artificial Sequence
  ENSG00000150637_100 (sequence is synthesized)
tttttttttgtattattgtatcctcattgcctacagctgagttaggcacagagaatgcatgcagcacatgtttgttgaatgaatgactccttgtagaaaatgaaagcccgaaaataagcc

SEQ ID NO: 421020 - DNA, 120 bp, Artificial Sequence
  ENSG00000150637_101 (sequence is synthesized)
gactggttccccgagagagaagaaactcaaatctgcccatcctcataaaggagcaaacctgtcttttaagctaaggcctttttcctgtgttcatacttcagaaaaagaagacacgactga

SEQ ID NO: 421021 - DNA, 120 bp, Artificial Sequence
  ENSG00000150637_102 (sequence is synthesized)
tcatttagaaaaattcccaaagaagaacttagcacttacccgggcctgatgcttgaggtctggagtccttaaggtgtgtgtgtaagtacttatttccttgaaaccttgagaccctcaaga

SEQ ID NO: 421022 - DNA, 120 bp, Artificial Sequence
  ENSG00000150637_103 (sequence is synthesized)
gagggggactaaaaacagtggaggaagaaaagaacagtggccaagggagtcgtgggtgaagtttgctgggcccttggcaatgctaaaaccagaaaaagaagacacgactgataacatctg

SEQ ID NO: 421023 - DNA, 120 bp, Artificial Sequence
  ENSG00000150637_104 (sequence is synthesized)
agtgaaaccatggcaagttgatgcagcaggacaagagagttgccggaaaaagctggaaaaaagaagacacgactgataacatctgagaggaaggaaactgcattgtgctggggatctgca

SEQ ID NO: 421024 - DNA, 120 bp, Artificial Sequence
  ENSG00000150637_105 (sequence is synthesized)
atcgtcatccccgatgtcacagtctcagactcggggctttaccgctgctacttgcaggccagcgcaggagaaaacgaaaccttcgtgatgagattgactgtagccgagggttaaatggaa

SEQ ID NO: 421025 - DNA, 120 bp, Artificial Sequence
  ENSG00000150637_106 (sequence is synthesized)
agtgtatagaaacactactgacaggccataatgaataatgagattgaaggagtaataaaagtcttccaccaaagaaaagcccaggacctagtggaatcactgccaacctttgcctatcag

SEQ ID NO: 421026 - DNA, 120 bp, Artificial Sequence
  ENSG00000150637_107 (sequence is synthesized)
taataccagtttcacttaaactatttcaaaaaattgaagaggagataatacttccaaacctactctatgagacatcagagctccaggcctttggactatgggacctacaccattggcttt

SEQ ID NO: 421027 - DNA, 120 bp, Artificial Sequence
  ENSG00000150637_108 (sequence is synthesized)
tagaacaaaggagaagtgcgtcctttcaaattatagattctttgggggaaaagagggacagaactttatctgagtttggaatgagtctgagtagctgcaatagtaaagttgcttccagaa

SEQ ID NO: 421028 - DNA, 120 bp, Artificial Sequence
  ENSG00000150637_109 (sequence is synthesized)
acagtttccagagatggattatcctactttacttttggctcttcttcatgtatacagagggaacttggcagaaggtgatacaggtggttcagtcaggacaaccaattgaaaacagctcaa

SEQ ID NO: 421029 - DNA, 120 bp, Artificial Sequence
  ENSG00000150656_0 (sequence is synthesized)
agatgtgaatagctccactataccagcctcgtcttccttccgggggacaacgtgggtcagggcacagagagatatttaatgtcaccctcttggggctttcatgggactccctctgccaca

SEQ ID NO: 421030 - DNA, 120 bp, Artificial Sequence
  ENSG00000150656_1 (sequence is synthesized)
ttttttggaggttgggaaagttgctagaggcttcagaactccagcctaatggatcccaaactcgggagaatggctgcgtccctgctggctgtgctgctgctgctgctggagcgcggcatg

SEQ ID NO: 421031 - DNA, 120 bp, Artificial Sequence
  ENSG00000150656_2 (sequence is synthesized)
ttctcctcaccctccccgcccccggcgctgttagagaaagtcttccagtacattgacctccatcaggatgaatttgtgcagacgctgaaggagtgggtggccatcgagagcgactctgtc

SEQ ID NO: 421032 - DNA, 120 bp, Artificial Sequence
  ENSG00000150656_3 (sequence is synthesized)
cagcctgtgcctcgcttcagacaagagctcttcagaatgatggccgtggctgcggacacgctgcagcgcctgggggcccgtgtggcctcggtggacatgggtcctcagcagctgcccgat

SEQ ID NO: 421033 - DNA, 120 bp, Artificial Sequence
  ENSG00000150656_4 (sequence is synthesized)
ggtcagagtcttccaatacctcccgtcatcctggccgaactggggagcgatcccacgaaaggcaccgtgtgcttctacggccacttggacgtgcagcctgctgaccggggcgatgggtgg

SEQ ID NO: 421034 - DNA, 120 bp, Artificial Sequence
  ENSG00000150656_5 (sequence is synthesized)
ctcacggacccctatgtgctgacggaggtagacgggaaactttatggacgaggagcgaccgacaacaaaggccctgtcttggcttggatcaatgctgtgagcgccttcagagccctggag

SEQ ID NO: 421035 - DNA, 120 bp, Artificial Sequence
  ENSG00000150656_6 (sequence is synthesized)
caagatcttcctgtgaatatcaaattcatcattgaggggatggaagaggctggctctgttgccctggaggaacttgtggaaaaagaaaaggaccgattcttctctggtgtggactacatt

SEQ ID NO: 421036 - DNA, 120 bp, Artificial Sequence
  ENSG00000150656_7 (sequence is synthesized)
gtaatttcagataacctgtggatcagccaaaggaagccagcaatcacttacggaacccgggggaacagctacttcatggtggaggtgaaatgcagagaccaggattttcactcaggaacc

SEQ ID NO: 421037 - DNA, 120 bp, Artificial Sequence
  ENSG00000150656_8 (sequence is synthesized)
tttggtggcatccttcatgaaccaatggctgatctggttgctcttctcggtagcctggtagactcgtctggtcatatcctggtccctggaatctatgatgaagtggttcctcttacagaa

SEQ ID NO: 421038 - DNA, 120 bp, Artificial Sequence
  ENSG00000150656_9 (sequence is synthesized)
gaggaaataaatacatacaaagccatccatctagacctagaagaataccggaatagcagccgggttgagaaatttctgttcgatactaaggaggagattctaatgcacctctggaggtac

SEQ ID NO: 421039 - DNA, 120 bp, Artificial Sequence
  ENSG00000150656_10 (sequence is synthesized)
ccatctctttctattcatgggatcgagggcgcgtttgatgagcctggaactaaaacagtcatacctggccgagttataggaaaattttcaatccgtctagtccctcacatgaatgtgtct

SEQ ID NO: 421040 - DNA, 120 bp, Artificial Sequence
  ENSG00000150656_11 (sequence is synthesized)
gcggtggaaaaacaggtgacacgacatcttgaagatgtgttctccaaaagaaatagttccaacaagatggttgtttccatgactctaggactacacccgtggattgcaaatattgatgac

SEQ ID NO: 421041 - DNA, 120 bp, Artificial Sequence
  ENSG00000150656_12 (sequence is synthesized)
acccagtatctcgcagcaaaaagagcgatcagaacagtgtttggaacagaaccagatatgatccgggatggatccaccattccaattgccaaaatgttccaggagatcgtccacaagagc

SEQ ID NO: 421042 - DNA, 120 bp, Artificial Sequence
  ENSG00000150656_13 (sequence is synthesized)
gtggtgctaattccgctgggagctgttgatgatggagaacattcgcagaatgagaaaatcaacaggtggaactacatagagggaaccaaattatttgctgcctttttcttagagatggcc

SEQ ID NO: 421043 - DNA, 120 bp, Artificial Sequence
  ENSG00000150656_14 (sequence is synthesized)
cagctccattaatcacaagaaccttctagtctgatctgatccactgacagattcacctcccccacatccctagacagggatggaatgtaaatatccagagaatttgggtctagtatagta

SEQ ID NO: 421044 - DNA, 120 bp, Artificial Sequence
  ENSG00000150656_15 (sequence is synthesized)
cattttcccttccatttaaaatgtcttgggatatctggatcagtaataaaatatttcaaaggcacagatgttggaaatggtttaaggtcccccactgcacaccttcctcaagtcatagct

SEQ ID NO: 421045 - DNA, 120 bp, Artificial Sequence
  ENSG00000150656_16 (sequence is synthesized)
gcttgcagcaacttgatttccccaagtcctgtgcaatagccccaggattggattccttcaaaccttttagcatatctccaaccttgcaatttgattggcataatcactccagtttgcttt

SEQ ID NO: 421046 - DNA, 120 bp, Artificial Sequence
  ENSG00000150656_17 (sequence is synthesized)
ctaggtcctcaagtgctcgtgacacataatcattccatccaatgatcgcctttgctttaccactctttccttttatcttattaataaaaatgttggtctccaccactgactacaatgatt

SEQ ID NO: 421047 - DNA, 120 bp, Artificial Sequence
  ENSG00000150656_18 (sequence is synthesized)
ggagttactaaggcatggtactatattaacctcttgcctccccttcatttattttttcccacttcttgaaaagttccgaagctgaaatgatcaatattcatacccatatgccatttggga

SEQ ID NO: 421048 - DNA, 120 bp, Artificial Sequence
  ENSG00000150656_19 (sequence is synthesized)
gtccttgtgcaaagatgagtatttttttttttattccaagcttctttacctttcctgagatcgatgccaccttgtcagcttctctgcctcccgttccttcttcctgtcccatcagaaaag

SEQ ID NO: 421049 - DNA, 120 bp, Artificial Sequence
  ENSG00000150656_20 (sequence is synthesized)
gcccactctctctctatccaacatctgtgcacaggttgcaccagagcagaatttatcctgatagaatttctctcaccccattgaagttttactcaatgacaacatctaaattgctcaaag

SEQ ID NO: 421050 - DNA, 120 bp, Artificial Sequence
  ENSG00000150656_21 (sequence is synthesized)
cttttaatagcatcagttttagatagagaactaatcaaccctgacatcagtaacacacgctaaatttaaagccatcagctaatgctgcattcattaatcattttagttaaccatcatgtt

SEQ ID NO: 421051 - DNA, 120 bp, Artificial Sequence
  ENSG00000150656_22 (sequence is synthesized)
tggcttgattggatttgacggtgtaaacaacaaaaaaagacagtcatttttctacagttgagtgtatataaacaaaatcaatctttatgaatttattatttaaatcacattaatggagaa

SEQ ID NO: 421052 - DNA, 120 bp, Artificial Sequence
  ENSG00000150656_23 (sequence is synthesized)
ttattatttaaatcacattaatggagaatcatttaggggcttattaaaatttttttctattatgactccaaataaaaacaaagcagagggccaggcgcggtggctcatgcccataatccc

SEQ ID NO: 421053 - DNA, 120 bp, Artificial Sequence
  ENSG00000150656_24 (sequence is synthesized)
aaaaaaagcagaacacatttgcgttcaacttttttccatcactctgttggttcttgagatgtcagtgtcagtttaaaaacgtgctgtaccacctttaaaaggactggagcaggcaggcag

SEQ ID NO: 421054 - DNA, 120 bp, Artificial Sequence
  ENSG00000150656_25 (sequence is synthesized)
tgattcagttcaccttgactctagtcatagaagtggacccaactgagagctcaacctagttgtgggcatttgtgaaggattccagttagtgttttctttggaagcaggaggcttcaagcc

SEQ ID NO: 421055 - DNA, 120 bp, Artificial Sequence
  ENSG00000150656_26 (sequence is synthesized)
atcacatctccaattctatagaatatcaagtcatcgttaaagaacagcagcaggtgtttgatattttgtgctattaagtgtagtttgcgctcatctaattatgcagagtttcgtggtgtt

SEQ ID NO: 421056 - DNA, 120 bp, Artificial Sequence
  ENSG00000150656_27 (sequence is synthesized)
tctcgattttgttgaacctacctgatgcatttggcactgtagataaggactaacagtaagagagatttagagtcttcatgttagtccattaacataagtttattataaaatacactgtaa

SEQ ID NO: 421057 - DNA, 120 bp, Artificial Sequence
  ENSG00000150656_28 (sequence is synthesized)
gcatttctggctaatgtaccatcagatttaagaagttacccaacaatatgtattcgctgatcttcattcctgctgaatctgagaccagcagtgtctcaattattacgttgctgccaggag

SEQ ID NO: 421058 - DNA, 120 bp, Artificial Sequence
  ENSG00000150656_29 (sequence is synthesized)
agaaggggaggagaatgaatagttatggaagttgtagaatctaggatattccaaccctggattgccagagttcagagtccatgtttttctgtcacccagggtcacgactggtctccccag

SEQ ID NO: 421059 - DNA, 120 bp, Artificial Sequence
  ENSG00000150656_30 (sequence is synthesized)
ctcttccctcctgtttttccacccaattctaagccctgtggtgatccagaccctaccctgacgtgggagtcagaaaggagtatcttccaagctccttgtactcaaagggataaaagaaag

SEQ ID NO: 421060 - DNA, 120 bp, Artificial Sequence
  ENSG00000150656_31 (sequence is synthesized)
ctactcagttgttattcagatatattaaccagccatatggaggcaaaaaagggagaaatttaaatatttgttttttaacattttaatgatgaaatatatgcacttggacaaaaatgatca

SEQ ID NO: 421061 - DNA, 120 bp, Artificial Sequence
  ENSG00000150656_32 (sequence is synthesized)
cccagtaaagttgggcgtacattgtggcatgcccatcagggggactttgttgtattggaggagggcaatgtatctggctttgttagtagacgtagcgcattaaagcgtaactattgtgat

SEQ ID NO: 421062 - DNA, 120 bp, Artificial Sequence
  ENSG00000150656_33 (sequence is synthesized)
aagtttaggggttaggaatatcatttgagtttggtagatgcttttctggaaaacaatgaggctgggaatgtttctggctttatgttgtattcataaaaataaaatgtactggcttggaaa

SEQ ID NO: 421063 - DNA, 120 bp, Artificial Sequence
  ENSG00000150656_34 (sequence is synthesized)
ttctgaatagcacagacatcaatggctcccctttccctgtgatggcgtttcaggcatgagccaccgcgcctggccgtataattttttttttgagacagagtctgactttatcacccaggc

SEQ ID NO: 421064 - DNA, 87 bp, Artificial Sequence
  ENSG00000150656_35 (sequence is synthesized)
attttttttttgagacagagtctgactttaacttactgcagcctcaacttcctgggatcaatgatcctcccacctcagcttcccaag

SEQ ID NO: 421065 - DNA, 120 bp, Artificial Sequence
  ENSG00000150656_36 (sequence is synthesized)
tattttttgtagagacagggtctcgccacgttgcccaggctggttgggaattcctgggctcaagcgatccacttgctttgacctcccaaagtgctgggagtacagatgtgagccaccgca

SEQ ID NO: 421066 - DNA, 120 bp, Artificial Sequence
  ENSG00000150656_37 (sequence is synthesized)
cccagcatgtattttaaatgttttataatgaacacatattacttttaaaatcaggataagacaaaactaaaaaaccttgtttatgtataaaaggcatagctgagaacgtgaacatgatgc

SEQ ID NO: 421067 - DNA, 120 bp, Artificial Sequence
  ENSG00000150656_38 (sequence is synthesized)
gggactccctctgccacattttttggaggttgggaaagttgctagaggcttcagaactccagcctaatggatcccaaactcgggagaatgacgctgaaggagtgggtggccatcgagagc

SEQ ID NO: 421068 - DNA, 120 bp, Artificial Sequence
  ENSG00000150656_39 (sequence is synthesized)
tgttttcagccacacctttgacaaggtgaacactaaagcagggcggactccagctgcgtgatcctggtgaccaactcctttctctgacagtcacttcttggatggagttgctgccaatgg

SEQ ID NO: 421069 - DNA, 120 bp, Artificial Sequence
  ENSG00000150656_40 (sequence is synthesized)
tcaagaggcctgctgcaaccctgaagagtcctcccacagtctggctccaggaccacaacattggcacactcctttctacctggctttgttttctgtgtgtgttttgtaggtagcctggta

SEQ ID NO: 421070 - DNA, 120 bp, Artificial Sequence
  ENSG00000150656_41 (sequence is synthesized)
ctccgtatcttagaatccaaagcagatgtgaattcccaggcatatttttgacattcacagccacttccccgtgggctggatcaaccagtcctttttcaatggcgtctaattggcactggc

SEQ ID NO: 421071 - DNA, 120 bp, Artificial Sequence
  ENSG00000150656_42 (sequence is synthesized)
ttctggcacttaaccacaagcagttacccatttcccagccatgttttccaaagctgttcattaacctaaatcccacgtcagccttcagccagtgagctggacttcttaccttttcaaaga

SEQ ID NO: 421072 - DNA, 120 bp, Artificial Sequence
  ENSG00000150656_43 (sequence is synthesized)
ccaagaaaagtctgagatgattccagctccaagacctctaactgttcatttttccagacaaaaccaagagccttaggggctaatctgtaagtgaatacatcattgtctcagtggactaag

SEQ ID NO: 421073 - DNA, 120 bp, Artificial Sequence
  ENSG00000150656_44 (sequence is synthesized)
taaacacaaagctgaaaacattccttacaggcaaatttcgaattgttttgcttttctcttcttcctctttctgggcagcatgcttgcctgacaaggtgtttggtagctagggctggttcc

SEQ ID NO: 421074 - DNA, 120 bp, Artificial Sequence
  ENSG00000150656_45 (sequence is synthesized)
tggggaaggggccgagagggggaaaagcaagctgaaaagaagcggtagagtgaattattatgaagcaggcatcttcttgcagaccagctccaggatggccagaagaaagaaaactggctt

SEQ ID NO: 421075 - DNA, 120 bp, Artificial Sequence
  ENSG00000150656_46 (sequence is synthesized)
aaacatctgaagagttatttgatgtcttctgaataagaaaatgctttcattacataagttattattgtaatttggggttagaaatttataattgaacccacgtttctgaaagggctcctt

SEQ ID NO: 421076 - DNA, 120 bp, Artificial Sequence
  ENSG00000150656_47 (sequence is synthesized)
tatctatggccataccacactgaacgtgcccgatctcgtttgaaagggcccctttgccatttgttaactgaaaactgcagatcttgggcaaagaggggcactcatcaatggggagcattg

SEQ ID NO: 421077 - DNA, 120 bp, Artificial Sequence
  ENSG00000150656_48 (sequence is synthesized)
gtagtgatgggtagtgaaggcatctgaggacagcagagagtttgtgtcctgaggaaaaagtccttgcgtgaggcacagctgagtaaggtgacagttaacgtgtcctgaatggtgtctcag

SEQ ID NO: 421078 - DNA, 120 bp, Artificial Sequence
  ENSG00000150656_49 (sequence is synthesized)
aatgagaaaatcaacaggtcagctgatgcctgtgcaatgtgcctctctcttcttcctttactgcacacacccgggtctacacgtgggtgagctcctgttcaatttatgtgagaatggaaa

SEQ ID NO: 421079 - DNA, 120 bp, Artificial Sequence
  ENSG00000150656_50 (sequence is synthesized)
atcgtccagactgggagcttaaagaacagacattcattcctcacagttctggagcctggatgccctagatcaggtgccaggccatttggttcctggtgggtatgggctgtcttcctggcc

SEQ ID NO: 421080 - DNA, 120 bp, Artificial Sequence
  ENSG00000150656_51 (sequence is synthesized)
gtccctgcgatggtggggttaggtggttctggtgtctctctttttataagagcaccagacccattggattaggacccccattttaacctcatttaacctttattatctcctccaggccct

SEQ ID NO: 421081 - DNA, 120 bp, Artificial Sequence
  ENSG00000150656_52 (sequence is synthesized)
gtctccaaatacagacacactggggggttaggggttcaacacaggactttgaggaaacacaaatatttagtgcataacaaaaaaggctattaggaatgtttgctttatgcgctactggca

SEQ ID NO: 421082 - DNA, 120 bp, Artificial Sequence
  ENSG00000150656_53 (sequence is synthesized)
gatactacaagatctcctaagcatcccagactactgagaaacaagaaattgtttgaccctgatatccatatcagtgataagaaatcaaggaaaattcacttttggatttgagtctaggac

SEQ ID NO: 421083 - DNA, 120 bp, Artificial Sequence
  ENSG00000150656_54 (sequence is synthesized)
tgattctcatcttcttaataataataatgcaattttcacatggaacttactaagtgcttttcatactgggatctcagaagtatgttaaataatttaaatggaatttataacatcaaatct

SEQ ID NO: 421084 - DNA, 120 bp, Artificial Sequence
  ENSG00000150656_55 (sequence is synthesized)
tcctgtctaaatgacagaatatttttcctccttcatttgaatggaaattgtaacaaaatttctctttgtttttcctcttcttaggtggaactacatagagggaaccaaattatttgctgc

SEQ ID NO: 421085 - DNA, 120 bp, Artificial Sequence
  ENSG00000150667_0 (sequence is synthesized)
atcgcgcatctggttgccagggaaacagcggtcccacaggcaggagggatctggaccggcggcttcttccactaccagagaggctgaggtggcgggagagacccctctcctctgggggta

SEQ ID NO: 421086 - DNA, 120 bp, Artificial Sequence
  ENSG00000150667_1 (sequence is synthesized)
agtggctggcgcggcgagtgtctgcggcgcgcttctgcggccatctgcgccctgactgacggcggccagttcctcgaggaggcccggcgggaaggatttcaatggatattataaagggaa

SEQ ID NO: 421087 - DNA, 120 bp, Artificial Sequence
  ENSG00000150667_2 (sequence is synthesized)
acctagatggaatttcaaaaccagcttcaaattcaagaatacgccctgggagcagaagttcaaatgcttctttggaggtgctctcaacagaaccaggatccttcaaggtcgatactgcaa

SEQ ID NO: 421088 - DNA, 120 bp, Artificial Sequence
  ENSG00000150667_3 (sequence is synthesized)
gcaacttgaactctggtaaagaggaccactccgaaagcagtaatacagagaacagaagaactagtaatgatgataagcaggaaagctgctctgagaaaataaaattggctgaagagggat

SEQ ID NO: 421089 - DNA, 120 bp, Artificial Sequence
  ENSG00000150667_4 (sequence is synthesized)
cagatgaagatctggatttggttcaacatcagataatctctgagtgttcagatgaacccaaattaaaagaattagattctcaacttcaagatgctattcagaagatgaaaaaacttgata

SEQ ID NO: 421090 - DNA, 120 bp, Artificial Sequence
  ENSG00000150667_5 (sequence is synthesized)
aaatattggcaaagaaacaacgcagagaaaaagaaattaagaagcaaggtctagaaatgagaataaagctgtgggaagaaattaagtctgcaaaatatagtgaagcttggcaaagtaaag

SEQ ID NO: 421091 - DNA, 120 bp, Artificial Sequence
  ENSG00000150667_6 (sequence is synthesized)
aggagatggaaaatacaaaaaaatttttatctttgactgctgtttctgaagaaactgttggtccttctcatgaggaggaagacaccttttcctcagtgtttcatactcaaatccctccag

SEQ ID NO: 421092 - DNA, 120 bp, Artificial Sequence
  ENSG00000150667_7 (sequence is synthesized)
aagaatatgaaatgcagatgcagaaactcaataaagattttacctgtgatgtggaaagaaatgagtcattgatcaaatcaggaaagaaacctttctcgaatacagaaaagattgagctca

SEQ ID NO: 421093 - DNA, 120 bp, Artificial Sequence
  ENSG00000150667_8 (sequence is synthesized)
ggggtaaacacaaccaggattttattaagagaaacattgagttggccaaggaatcaagaaacccagtggttatggttgacagagagaagaaaaggctggttgagcttttgaaggacttgg

SEQ ID NO: 421094 - DNA, 120 bp, Artificial Sequence
  ENSG00000150667_9 (sequence is synthesized)
atgagaaagattccgggctctccagttctgagggtgatcagtctggctgggtggtcccagtaaaaggatatgaacttgcagtcacccagcatcagcagcttgctgaaattgatataaaac

SEQ ID NO: 421095 - DNA, 120 bp, Artificial Sequence
  ENSG00000150667_10 (sequence is synthesized)
tccaagaactctctgcagcctcccctacaatttccagtttttctccaagacttgaaaatcggaataatcagaaacctgaccgtgatggtgaaagaaatatggaagtaactccaggagaaa

SEQ ID NO: 421096 - DNA, 120 bp, Artificial Sequence
  ENSG00000150667_11 (sequence is synthesized)
gatgaaaagctgaaaatgatgaaggaaaatgtgttagagtccacatcatgtctctctgaagaacagttaaagtgtcttctggatgaatgcatacttaaacaaaaatccatcattaaactt

SEQ ID NO: 421097 - DNA, 120 bp, Artificial Sequence
  ENSG00000150667_12 (sequence is synthesized)
tcttcagaaagaaaaaaggaagacattgaggacgtaacacctgtgttcccccagctttccaggtccatcatctctaaattgctaaatgaatcagaaacaaaggtccagaaaactgaggta

SEQ ID NO: 421098 - DNA, 120 bp, Artificial Sequence
  ENSG00000150667_13 (sequence is synthesized)
gaagatgcagatatgcttgagagtgaagaatgtgaagcttctaaaggctactatctcactaaagccttgactggacataacatgtcagaagctcttgtcactgaagcagagaatatgaaa

SEQ ID NO: 421099 - DNA, 120 bp, Artificial Sequence
  ENSG00000150667_14 (sequence is synthesized)
tgccttcaattttccaaggacgttattattagtgacacaaaagactattttatgtcgaagactcttggcattgggagactgaaaaggccctccttcttagatgatccactgtatggtatc

SEQ ID NO: 421100 - DNA, 120 bp, Artificial Sequence
  ENSG00000150667_15 (sequence is synthesized)
agtgtgagcctttcatcagaagaccaacatctgaaactcagttctccagagaatacaatagcagatgagcaggagactaaagatgcagcagaagaatgtaaagaaccctaatcaaggact

SEQ ID NO: 421101 - DNA, 120 bp, Artificial Sequence
  ENSG00000150667_16 (sequence is synthesized)
tgctgggtgtgcttttcagaaagttggtaatgaagttaaattaaatttcttattgaattatttgaattcaatgaatgcactgcagagactattctttattgattttgacatttggagtcg

SEQ ID NO: 421102 - DNA, 120 bp, Artificial Sequence
  ENSG00000150667_17 (sequence is synthesized)
ctctttgtggattatatttccttgatatttttgagacttggggtgtaattgttcagtggtttttgctcattaaaatttctgggaccattgtttataaatttattgctaatcttacagtat

SEQ ID NO: 421103 - DNA, 120 bp, Artificial Sequence
  ENSG00000150667_18 (sequence is synthesized)
taggattcattataaaaaccaacattttaatgtatacgtgttagggtaaaactcgttgaagtgctgtgattgtcctgtattcaattttgtatgtttcacctctactgtgattcagacaga

SEQ ID NO: 421104 - DNA, 120 bp, Artificial Sequence
  ENSG00000150667_19 (sequence is synthesized)
tcatggtggtcactgggaatttttgctgtggccctgcttttccttcttcccacttgtctcatgtctgtgaaactggtacaacctgccataagatgaaatgaattgtctcaacaaagcaat

SEQ ID NO: 421105 - DNA, 120 bp, Artificial Sequence
  ENSG00000150667_20 (sequence is synthesized)
attagaagagcctttactatcttattggtgatgacacgtttcttaagtaggagtttgagtgaattatttgatatattactttgttaataatagttaacaatagtttcttattttctttca

SEQ ID NO: 421106 - DNA, 120 bp, Artificial Sequence
  ENSG00000150667_21 (sequence is synthesized)
gagtttgggccttttagattgcatcaaataaagatgagctactttaaaagacagtctgcggtactatttgaagagagatggtttagttacaagtcagtaacttagattcatgagaaaatt

SEQ ID NO: 421107 - DNA, 120 bp, Artificial Sequence
  ENSG00000150667_22 (sequence is synthesized)
ttgtgttgacattccataagatgagttggcattagaattggaagtccagtttatttctgaatcaaaaaatgagcgggctattgtgctgcctttaataaaatttgagtgatgtatacataa

SEQ ID NO: 421108 - DNA, 120 bp, Artificial Sequence
  ENSG00000150667_23 (sequence is synthesized)
aaccagccaaacacagaggtgaacagaaagaaatgtatgtttataaatccaagaattactctatgctagaagataagaataaccataggtaggcctaaaagtccagattatattaacaga

SEQ ID NO: 421109 - DNA, 120 bp, Artificial Sequence
  ENSG00000150667_24 (sequence is synthesized)
ctaatgaaacccgtctttggcctgtggctgagacgccatctgtaggcggtgaaatctttccagcctatgtgacgagggtcatgccacagggtgcgcacctgaaggaaaaggaaaaggaaa

SEQ ID NO: 421110 - DNA, 120 bp, Artificial Sequence
  ENSG00000150667_25 (sequence is synthesized)
ggttgaaacacagctccttcaggtgacagaacagatgtcccatggtgaccaaggaccccagcctccattgactgtaagaagatgaaccacaggcaacaattaagatcaactttcaaatcc

SEQ ID NO: 421111 - DNA, 120 bp, Artificial Sequence
  ENSG00000150667_26 (sequence is synthesized)
ctcccttgtcatagactctcctaagcccgttcaagaaacctctgcttctctgacacatggaaagaatgctggggaagagggtgagtttgtttttcattaaaagaagttgctgagcctgca

SEQ ID NO: 421112 - DNA, 120 bp, Artificial Sequence
  ENSG00000150667_27 (sequence is synthesized)
aacacagctccttcagggctttgcttcttacctggccaggggtgtttcctgtgtgccacagggcgttccgcaggtgctcgccaggccctgtggtggagtttacaactttcacagaaaggc

SEQ ID NO: 421113 - DNA, 120 bp, Artificial Sequence
  ENSG00000150672_0 (sequence is synthesized)
acagaagaaaaaaatgaaagggacagcaagctggattctgagttactgaggggaagactcagcctggatttcaaaactgaacactgaagtggtttgcaacagttacctggctcttggcct

SEQ ID NO: 421114 - DNA, 120 bp, Artificial Sequence
  ENSG00000150672_1 (sequence is synthesized)
caatccagctggatcaaactgagacctgaaaagagatattgactcctgtggcagtggaaagacccaagaatgccagtcaagaagacagatactgaccgagctttatcattactggaagaa

SEQ ID NO: 421115 - DNA, 120 bp, Artificial Sequence
  ENSG00000150672_2 (sequence is synthesized)
tactgcaaaaaattaaggaaaccagaggagcagctgttgaaaaatgcggttaaaaaggtgatgggtatctttaagagcagcttattccaagctttgctagatatccaagaattttatgag

SEQ ID NO: 421116 - DNA, 120 bp, Artificial Sequence
  ENSG00000150672_3 (sequence is synthesized)
gtgacattgctaaattctcaaaaaagttgtgagcagaagatagaagaagccaatcaagttttacagaaatgggagaagacatcccttcttgctccgtgccatgacagacttcaaaaatct

SEQ ID NO: 421117 - DNA, 120 bp, Artificial Sequence
  ENSG00000150672_4 (sequence is synthesized)
tcagagcttacagattgcagtggatcaaaggaaaatgcttcatgtattgagcaaaataaagaaaatcagagttttgaaaatgaaactgatgagacgacaactcaaaaccaaggcagatgc

SEQ ID NO: 421118 - DNA, 120 bp, Artificial Sequence
  ENSG00000150672_5 (sequence is synthesized)
ccagcccagaattgttcagtggaagcccctgcttggatgcctgtccaccactgtactaagtatcgatatcaagatgaggacgctccacatgatcattccttacctcgactaacccacgaa

SEQ ID NO: 421119 - DNA, 120 bp, Artificial Sequence
  ENSG00000150672_6 (sequence is synthesized)
gtaagaggcccagaactcgtgcatgtatcagaaaagaacctctctcaaatagaaaatgtccatggatatgtcttgcagtctcatatttctcctctgaaggccagtcctgctcctataatt

SEQ ID NO: 421120 - DNA, 120 bp, Artificial Sequence
  ENSG00000150672_7 (sequence is synthesized)
gtcaacacagatactttggacacaattccttatgtcaatgggacagaaattgaatatgaatttgaagaaattacactggagagggggaattctggcctgggattcagtattgctgggggg

SEQ ID NO: 421121 - DNA, 120 bp, Artificial Sequence
  ENSG00000150672_8 (sequence is synthesized)
acagataatccccacattggagatgaccctggcatatttattacgaagattataccaggaggtgctgcagcagaggatggcagactcagggtcaatgattgtatcttgcgggtgaatgag

SEQ ID NO: 421122 - DNA, 120 bp, Artificial Sequence
  ENSG00000150672_9 (sequence is synthesized)
gttgatgtgtcagaggtttcccacagtaaagcggtggaagccctgaaggaagcagggtctatcgttcggctgtatgtgcgtagaagacgacctattttggagaccgttgtggaaatcaaa

SEQ ID NO: 421123 - DNA, 120 bp, Artificial Sequence
  ENSG00000150672_10 (sequence is synthesized)
ctgttcaaaggccctaaaggtttaggcttcagtattgcaggaggtgtggggaaccaacacattcctggagacaacagcatttatgtaactaaaattatagatggaggagctgcacaaaaa

SEQ ID NO: 421124 - DNA, 120 bp, Artificial Sequence
  ENSG00000150672_11 (sequence is synthesized)
gatggaaggttgcaagtaggagatagactactaatggtaaacaactacagtttagaagaagtaacacacgaagaggcagtagcaatattaaagaacacatcagaggtagtttatttaaaa

SEQ ID NO: 421125 - DNA, 120 bp, Artificial Sequence
  ENSG00000150672_12 (sequence is synthesized)
gttggcaaacccactaccatttatatgactgatccttatggtccacctgatattactcactcttattctccaccaatggaaaaccatctactctctggcaacaatggcactttagaatat

SEQ ID NO: 421126 - DNA, 120 bp, Artificial Sequence
  ENSG00000150672_13 (sequence is synthesized)
aaaacctccctgccacccatctctccaggaaggtactcaccaattccaaagcacatgcttgttgacgacgactacaccaggcctccggaacctgtttacagcactgtgaacaaactatgt

SEQ ID NO: 421127 - DNA, 120 bp, Artificial Sequence
  ENSG00000150672_14 (sequence is synthesized)
gataagcctgcttctcccaggcactattcccctgttgagtgtgacaaaagcttcctcctctcagctccctattcccactaccacctaggcctgctacctgactctgagatgaccagtcat

SEQ ID NO: 421128 - DNA, 120 bp, Artificial Sequence
  ENSG00000150672_15 (sequence is synthesized)
tcccaacatagcaccgcaactcgtcagccttcaatgactctccaacgggccgtctccctggaaggagagcctcgcaaggtagtcctgcacaaaggctccactggcctgggcttcaacatt

SEQ ID NO: 421129 - DNA, 120 bp, Artificial Sequence
  ENSG00000150672_16 (sequence is synthesized)
gtcggtggggaagatggagaaggtatttttgtgtccttcattctggctggtggaccagcagacctaagtggggagctccagagaggagaccagatcctatcggtgaatggcattgacctc

SEQ ID NO: 421130 - DNA, 120 bp, Artificial Sequence
  ENSG00000150672_17 (sequence is synthesized)
cgtggtgcatcccacgagcaggcagctgctgcactaaagggggctggacagacagtgacgattatagcacaatatcaacctgaagattacgctcgatttgaggccaaaatccatgaccta

SEQ ID NO: 421131 - DNA, 120 bp, Artificial Sequence
  ENSG00000150672_18 (sequence is synthesized)
cgagagcagatgatgaaccacagcatgagctccgggtccggatccctgcgaaccaatcagaaacgctccctctacgtcagagccatgttcgactacgacaagagcaaggacagtgggctg

SEQ ID NO: 421132 - DNA, 120 bp, Artificial Sequence
  ENSG00000150672_19 (sequence is synthesized)
ccaagtcaaggacttagttttaaatatggagatattctccacgttatcaatgcctctgatgatgagtggtggcaagccaggagagtcatgctggagggagacagtgaggagatgggggtc

SEQ ID NO: 421133 - DNA, 120 bp, Artificial Sequence
  ENSG00000150672_20 (sequence is synthesized)
atccccagcaaaaggagggtggaaagaaaggaacgtgcccgattgaagacagtgaagtttaatgccaaacctggagtgattgattcgaaagggtcattcaatgacaagcgtaaaaagagc

SEQ ID NO: 421134 - DNA, 120 bp, Artificial Sequence
  ENSG00000150672_21 (sequence is synthesized)
ctcattctttcctatgagcctgttacaaggcaggaaataaactacacccggccggtgattatcctggggcccatgaaggatcggatcaatgacgacttgatatctgaattccctgataaa

SEQ ID NO: 421135 - DNA, 120 bp, Artificial Sequence
  ENSG00000150672_22 (sequence is synthesized)
tttggctcctgtgtgcctcatactacgaggccaaagcgagactacgaggtggatggcagagactatcactttgtcatttccagagaacaaatggagaaagatatccaagagcacaagttt

SEQ ID NO: 421136 - DNA, 120 bp, Artificial Sequence
  ENSG00000150672_23 (sequence is synthesized)
atagaagccggccagtacaatgacaatttatatggaaccagtgtgcagtctgtgagatttgtagcagaaagaggcaaacactgtatacttgatgtatcaggaaatgctatcaagcggtta

SEQ ID NO: 421137 - DNA, 120 bp, Artificial Sequence
  ENSG00000150672_24 (sequence is synthesized)
caagttgcccagctctatcccattgccatcttcataaaacccaggtctctggaacctcttatggagatgaataagcgtctaacagaggaacaagccaagaaaacctatgatcgagcaatt

SEQ ID NO: 421138 - DNA, 120 bp, Artificial Sequence
  ENSG00000150672_25 (sequence is synthesized)
aagctagaacaagaatttggagaatattttacagctattgtccaaggagatactttagaagatatatataaccaatgcaagcttgttattgaagagcaatctgggcctttcatctggatt

SEQ ID NO: 421139 - DNA, 120 bp, Artificial Sequence
  ENSG00000150672_26 (sequence is synthesized)
ccctcaaaggaaaagttataaattagctactgcgcctctgacaacgacagaagagcatttagaagaacaaaatatatataacatactacttggaggcttttatgtttttgttgcatttat

SEQ ID NO: 421140 - DNA, 120 bp, Artificial Sequence
  ENSG00000150672_27 (sequence is synthesized)
gtttttgcagtcaatgtgaattcttacgaatgtacaacacaaactgtatgaagccatgaaggaaacagaggggccaaagggtgggacagaaaagacattgcagtatgaaggaaggctttg

SEQ ID NO: 421141 - DNA, 120 bp, Artificial Sequence
  ENSG00000150672_28 (sequence is synthesized)
gtttgctcaaagtgccaggtgtagggatgaacctctgacgggctttctgcccaagagatgagatgagagcctcctcaccccagcagatgtccagagctgatttagctgcagagctctctg

SEQ ID NO: 421142 - DNA, 120 bp, Artificial Sequence
  ENSG00000150672_29 (sequence is synthesized)
tgtcttttgctttaaagaaaaattgccagcactcgaacctcatcagccttcccattacccacatctgtaattggtacactttgaattttataactatgcacatcttttgatttcttaaca

SEQ ID NO: 421143 - DNA, 120 bp, Artificial Sequence
  ENSG00000150672_30 (sequence is synthesized)
agcaaatgaaagaaagaaggaaaaaagaaaggaatccctttggagatgacatactatcagggaaggataagtgtgtagttttttgactggcatctgcaaagacaagaatttcataaaatt

SEQ ID NO: 421144 - DNA, 120 bp, Artificial Sequence
  ENSG00000150672_31 (sequence is synthesized)
tgcaagtgtatggaggactaacctcactgacaggaggggattccacctgggattagctttatgattgttgattgcctattttgccatttataaactgaaagaaggcactaaagatgagaa

SEQ ID NO: 421145 - DNA, 120 bp, Artificial Sequence
  ENSG00000150672_32 (sequence is synthesized)
acaataaaaatatattaaatgtatagaaacaaatttctataggttaaaaaagttttgtgaaatattttgtaaagactaatattgaaagactaaatgtatgcaacatcagcagatgatcaa

SEQ ID NO: 421146 - DNA, 120 bp, Artificial Sequence
  ENSG00000150672_33 (sequence is synthesized)
atgatcaaattcaagacctgaaagttgcactctcccttttgttgccaatgatctgttaagagcatctgagttccttttaagtctgacaaagacttcttcctcacttacctcccttccaca

SEQ ID NO: 421147 - DNA, 120 bp, Artificial Sequence
  ENSG00000150672_34 (sequence is synthesized)
ttagtgatacactctcatgcagcacatcccttaatgagttgccctcatggatatttttggaagacatttggttaatgcatttttttatgctgatggcttttcagagacaaacttatgcaa

SEQ ID NO: 421148 - DNA, 120 bp, Artificial Sequence
  ENSG00000150672_35 (sequence is synthesized)
atgatctaaagggaagtttttgctttcctctagttaaataacctgagcctgccatgcaaatagttgaataactttgttcctagttactgacatacaattcttaaaggaccatttagcatt

SEQ ID NO: 421149 - DNA, 120 bp, Artificial Sequence
  ENSG00000150672_36 (sequence is synthesized)
ttggccaacaatgagtaattaggattagtacctttttgttttacagagtaactgagagttttgtaacatccagagatggtactagagccaatgagagatctgttcctagatgcactattt

SEQ ID NO: 421150 - DNA, 120 bp, Artificial Sequence
  ENSG00000150672_37 (sequence is synthesized)
ctttgaggaagagagagaagagaagtgtctggttgggggtgagggggtgcagacttttttgtttctatgtacagagcaaagagatagagtcacaaggaaagacaattaatgactttgagc

SEQ ID NO: 421151 - DNA, 120 bp, Artificial Sequence
  ENSG00000150672_38 (sequence is synthesized)
tcaaccaactgaactgcctttcttggagctgcacctggaccaagtttattttttaacaattataataacgatgatttaaaaaaagaaacctcccaaagcctataaactgaactagaagag

SEQ ID NO: 421152 - DNA, 120 bp, Artificial Sequence
  ENSG00000150672_39 (sequence is synthesized)
ttggtttcccactttagagtggatggcgacatcagcattgcttttgcccatggtgtttggggagagacttttcagtgataataaccactctactctgggttctgtgcatgcccagactaa

SEQ ID NO: 421153 - DNA, 120 bp, Artificial Sequence
  ENSG00000150672_40 (sequence is synthesized)
gccccatcgccttatttctggggtacatccagacctggcagggattctgccacactgtgcagcaaaccagcatgtaggctgggtaggagagcaagagatagagccatcagagtgatgggg

SEQ ID NO: 421154 - DNA, 120 bp, Artificial Sequence
  ENSG00000150672_41 (sequence is synthesized)
cttcttcacagtaagaacatcggagcttagaatgagagtctctttccaaaaacaggcattgttcatcttacgctaaacatcattgtctgcctggctacagtcaccaaaacaaaacagaaa

SEQ ID NO: 421155 - DNA, 120 bp, Artificial Sequence
  ENSG00000150672_42 (sequence is synthesized)
atgtacccagtgagcgagaatgctgcatggtcaccccctgtgatgtaaaatatgagaatctaggaggggctgttttataattcatcaggttccgctagtgagttctgtcagagtcttagt

SEQ ID NO: 421156 - DNA, 120 bp, Artificial Sequence
  ENSG00000150672_43 (sequence is synthesized)
tataaaggcaagtgtgaaccggacagcagacaggagaacctggcaccaaggagacggagaagctgcctttggtgcctcctgcctcctccctgctttgttccaataattttgtgctcgatt

SEQ ID NO: 421157 - DNA, 120 bp, Artificial Sequence
  ENSG00000150672_44 (sequence is synthesized)
cttagattgctcaaaatgttaaagatatgtccatgtctgcaattcgccagtttcaggtcaaggcctactttcatcaatattgctcccagaagttttctgacaccagaatgccattcctga

SEQ ID NO: 421158 - DNA, 120 bp, Artificial Sequence
  ENSG00000150672_45 (sequence is synthesized)
tcccagctctatttttaggccaccacgataacttctttggtttctcaactgagcatgcaaccatttatttaaaagactgtcattaatgagtagatgttttcgcgggtcgtgtgatgtgct

SEQ ID NO: 421159 - DNA, 120 bp, Artificial Sequence
  ENSG00000150672_46 (sequence is synthesized)
ttccatttactagtgttgctgtggctaagtacaatcaaattgaaccaccaacccttggttttgtagtaatataactatttattttcctagtgtagatgctttcagattagaattggcatt

SEQ ID NO: 421160 - DNA, 120 bp, Artificial Sequence
  ENSG00000150672_47 (sequence is synthesized)
tgcactgatttttttatgtagatttatataaatatatagatacatatatatttgcttgaagaatcaccaagcaaattggtgagagggtcttttccaatagaatttacacctccatttgtt

SEQ ID NO: 421161 - DNA, 120 bp, Artificial Sequence
  ENSG00000150672_48 (sequence is synthesized)
gtgttgtcttgcacttcccaatgttgatgtctctatggctccaatgaactggtgtattttgcagcaaatctgatgacttgtatggaaatggcatgaaagttacccagattacatctggtg

SEQ ID NO: 421162 - DNA, 120 bp, Artificial Sequence
  ENSG00000150672_49 (sequence is synthesized)
caaatgcactcggagcctggggccagactggtgctaacactgcaaactttgtccagagctctctccaacctgaaggcttgctgggggtgcaatgtcaccttcacacatgctgggcccttt

SEQ ID NO: 421163 - DNA, 120 bp, Artificial Sequence
  ENSG00000150672_50 (sequence is synthesized)
cagaaaagtgccagatcgtgtaactggtgctatttttcatgctctggtacaatgtgtagcaccacgggggtctcagctttaccaaaatcaaaattccatttgtcagctaagtgcagaggc

SEQ ID NO: 421164 - DNA, 120 bp, Artificial Sequence
  ENSG00000150672_51 (sequence is synthesized)
atttgttttttgctctcctcccacagaattgtcggccatttatttgcaggccttttgcgggatttcttggctatttatttgcaggccttttttcccagccccaaattcttgggttggctc

SEQ ID NO: 421165 - DNA, 120 bp, Artificial Sequence
  ENSG00000150672_52 (sequence is synthesized)
tgtctgcttaaagagcctgtcttcacaaagctgcactcgggtgcctctgtgcgctgtcttagatcctactgccggcccttcaggactccgagccaggaaagaactctccaacctctggct

SEQ ID NO: 421166 - DNA, 120 bp, Artificial Sequence
  ENSG00000150672_53 (sequence is synthesized)
cgagactctactttttttctcattcttttccttactctcctcctccttctacttccgactaattccatctctttttttttttgttcctctccttttcctattcctccttcccaccatctc

SEQ ID NO: 421167 - DNA, 120 bp, Artificial Sequence
  ENSG00000150672_54 (sequence is synthesized)
tgagttgttgactttctcctataatccttctctattccctttctctttttgtccacctctcctttagtctctgtttctctgcccttcttattcctcttctgtcctttctcctctcctcaa

SEQ ID NO: 421168 - DNA, 120 bp, Artificial Sequence
  ENSG00000150672_55 (sequence is synthesized)
atctctgatcatcttctcccgtacatccctgtattgatttttctgtcctctaaagggctcatggctgattcagacagcaagtccatgcactggactaatgacacaaatactttaggtcgc

SEQ ID NO: 421169 - DNA, 120 bp, Artificial Sequence
  ENSG00000150672_56 (sequence is synthesized)
cgtttcacctactcagcccagaaagtaaagctgagcgtgaggccctgacctggagcctgctccagcccgcctcccggagccagcctgcaccgttgccctggcagcgatgatgcatgtgct

SEQ ID NO: 421170 - DNA, 120 bp, Artificial Sequence
  ENSG00000150672_57 (sequence is synthesized)
gtgggccctgccggcgcctgagtgcctctgcctgaacactgctcctaagcgagcccactcccagcactaccgcatggctctgaggacattttctttcaataaaggcagactctggcccca

SEQ ID NO: 421171 - DNA, 120 bp, Artificial Sequence
  ENSG00000150672_58 (sequence is synthesized)
attattctgatagcaaacctcttcctcctcattgaagccatgccatcaccttggtttggagagagacatttttttcccattcataagctttctttttcccatttttatgtgaagccccct

SEQ ID NO: 421172 - DNA, 120 bp, Artificial Sequence
  ENSG00000150672_59 (sequence is synthesized)
ctgcttttcagctggtgattgctctggtgagactgaatggacttgctggtgaaatgaaatctcttctttcctgtcttggtcctgcctaaattcctacaaatatatttaagccaaggactc

SEQ ID NO: 421173 - DNA, 120 bp, Artificial Sequence
  ENSG00000150672_60 (sequence is synthesized)
aggctaattcctaagttgatcacattaatttgttactcctagagggaaaaagatcaattcccttgaagcatgtggagtacctcctgtgacagctgacttgccaggggactccctacagaa

SEQ ID NO: 421174 - DNA, 120 bp, Artificial Sequence
  ENSG00000150672_61 (sequence is synthesized)
ttctgtgatatacattttacttctgtgtatgtatggtatatatggtatgtataccatgtacacacgttacattgagtatgaatgactgtggttggaaacacacacacacactcaagtctg

SEQ ID NO: 421175 - DNA, 120 bp, Artificial Sequence
  ENSG00000150672_62 (sequence is synthesized)
taaatatccttcctcactgaaacctgtgctttggaaatcatttcttgtacagctgtgcagtttcttgtaacagctgaggacaaagctaagacaggcggacaatttagacaaagatcatct

SEQ ID NO: 421176 - DNA, 120 bp, Artificial Sequence
  ENSG00000150672_63 (sequence is synthesized)
aaagagtatagtatctccctagcaactcatgaggacagacaaccaagtggcaaggttgactcccaatgggatggcagacttttcttctctcctttttgagtttgtgtttcctaagtgttt

SEQ ID NO: 421177 - DNA, 120 bp, Artificial Sequence
  ENSG00000150672_64 (sequence is synthesized)
cttaacttctgagtgcaccaggctgtacccgttagatcctttcaatatgacagttttgtgcttctctctgacaggatgtttctccaccgagctgtagcacaggatgggagggaggtggga

SEQ ID NO: 421178 - DNA, 120 bp, Artificial Sequence
  ENSG00000150672_65 (sequence is synthesized)
atactccttgcctaggctggagtttacagagacactgcacagcttacactcctgttaagtgtaaatattcaacacttccattccatttgtgtaaaaaataaagcacacacgattataaaa

SEQ ID NO: 421179 - DNA, 120 bp, Artificial Sequence
  ENSG00000150672_66 (sequence is synthesized)
gtgtggggcttgcgctgtgctgagaagctgaataccggtccatatgctccttatttactgcaatgttctttgcatgttactgtgcactccggactaacgtgaagaagtatcgatatcaag

SEQ ID NO: 421180 - DNA, 120 bp, Artificial Sequence
  ENSG00000150672_67 (sequence is synthesized)
ggaaaagcaactgaggtcttaactttcagacgctgaattctcatctaattgaaattactgggcataatgctatatatagccaatgaagagattttgagctctcactcagtgccttcaaga

SEQ ID NO: 421181 - DNA, 120 bp, Artificial Sequence
  ENSG00000150672_68 (sequence is synthesized)
ctttcatcagtacactactgaaagaccttgtgtttaagcatttggaataaatgtttgaaatgttattagattaaattagttaaaggtgcctgcttttatcaagttattctttggcaaagt

SEQ ID NO: 421182 - DNA, 120 bp, Artificial Sequence
  ENSG00000150672_69 (sequence is synthesized)
tatgattcaggataaaatgctcagcataggttgcaataaaaataatgagaagaaacattttcatttctaataaatcttaaatggcatatgtggaccaaacccttggacatttacttacca

SEQ ID NO: 421183 - DNA, 120 bp, Artificial Sequence
  ENSG00000150672_70 (sequence is synthesized)
tcagtgtgaaaagaaaatattcctgtattatctcctaacctgcctgatactgattgcattaactttagtgcatcagtttaaaatccacggcattcttctaaagagttatgtgcttttctc

SEQ ID NO: 421184 - DNA, 120 bp, Artificial Sequence
  ENSG00000150672_71 (sequence is synthesized)
taacaagttttggcagaaagacttccttctgtgtcatctcgctaccagtttttttctcagaccatagaagttacttgttccttgtctgacaaaactcatcaatttaccagaaaaagataa

SEQ ID NO: 421185 - DNA, 120 bp, Artificial Sequence
  ENSG00000150672_72 (sequence is synthesized)
atgattgattgaatgtgaaatgccttccagtctttcatcctagtagctacctcttgagtaagatccatcaacactcaactataacatgctcctcttccaagacaagcttcctgtattact

SEQ ID NO: 421186 - DNA, 120 bp, Artificial Sequence
  ENSG00000150672_73 (sequence is synthesized)
tccaaacttcatcagtgctgactgtacttttaaaaatatataagtactaacaggcaaaaggaagaaagtgatgcctaattaacgggcaacatgaatctatgtaccatatggaagaaccat

SEQ ID NO: 421187 - DNA, 120 bp, Artificial Sequence
  ENSG00000150672_74 (sequence is synthesized)
gcccattcttattgtattctccactccccactctggcctgaattcaatctgactccagcctgaggtcatatccttcttacctgaaattttaggcatgacgtatatgttatagatactaat

SEQ ID NO: 421188 - DNA, 120 bp, Artificial Sequence
  ENSG00000150672_75 (sequence is synthesized)
ttacatgcttgagttgaacttttgctgttggttccactttggctctaaagttaagttttgtatgtatttggtattcacagcagggctaagaagggagtgggattctggaaggcacaggtt

SEQ ID NO: 421189 - DNA, 120 bp, Artificial Sequence
  ENSG00000150672_76 (sequence is synthesized)
ctcatagggcttaatttcccgactgaactgataagcctagagtcccttcttattccagggaagccctgagattaagaaaaacaagttattaaccctatgaatttggccaactccatttca

SEQ ID NO: 421190 - DNA, 120 bp, Artificial Sequence
  ENSG00000150672_77 (sequence is synthesized)
aaagattattttgatacccttaattgtaatctgtgactgttcagaaccaccctaaaacatgtcttgtagtgacattacaaatatgatggaaagttaacaagctccatttgtggttcttct

SEQ ID NO: 421191 - DNA, 120 bp, Artificial Sequence
  ENSG00000150672_78 (sequence is synthesized)
tctctcttgtgttgtattgctggtctacatgctacaaagtatttttaaattttgaaatgttttagtccctggtagcaaattggaaaaagtcagctgggttaataggatagaactaaatca

SEQ ID NO: 421192 - DNA, 120 bp, Artificial Sequence
  ENSG00000150672_79 (sequence is synthesized)
gttagtgtaactgaaatggttatatatataataaagctcggagggaaaattaccaagtgtcttattaagagatagaatgcataaattgttcagatactagaagaaatttgctgaaatata

SEQ ID NO: 421193 - DNA, 120 bp, Artificial Sequence
  ENSG00000150672_80 (sequence is synthesized)
aatcataaataaaagtataacgtacagaagagacaaagacttagagtaacaaagtaatggttggagattgtattgaaaggaggaacctctttttaatgagactcaaaaatacttgacatt

SEQ ID NO: 421194 - DNA, 120 bp, Artificial Sequence
  ENSG00000150672_81 (sequence is synthesized)
tcataagaaagtccccaaatgaaatctctgtaatatacaaatatggtatttagtttccaaatgttcaattattactacttattttgtacctagagggctgactttagcatctaaatgact

SEQ ID NO: 421195 - DNA, 120 bp, Artificial Sequence
  ENSG00000150672_82 (sequence is synthesized)
ctaagagacatgaaattaaaagaaatatgggccatgcgtatagtcatatcagcaaatcagaaagaaagaacttacaagagccccctggccttattctcatgaaaagtgataaaacagacc

SEQ ID NO: 421196 - DNA, 120 bp, Artificial Sequence
  ENSG00000150672_83 (sequence is synthesized)
attaacactacgctgtgaataactttgtttactctcttccacattttaaaagaagataccagactaccacttcagagttggaatttcaaacaccagcagctagctgggaggcaggattga

SEQ ID NO: 421197 - DNA, 120 bp, Artificial Sequence
  ENSG00000150672_84 (sequence is synthesized)
atttggagataagaattcttcctggcgtccttcagcagcctccccaggcaggttttcacctcttcgacttttccaggactaagcctttttaactgagaagagaaagaaaaagagattacg

SEQ ID NO: 421198 - DNA, 120 bp, Artificial Sequence
  ENSG00000150672_85 (sequence is synthesized)
agtttgagtgttaccagctttcgctatgcaacggccaagtgtttctcgggctgagaattatcagcttttgtgggatactattgcttccttaaaacaatgtgaacaagctatgcaacatgc

SEQ ID NO: 421199 - DNA, 120 bp, Artificial Sequence
  ENSG00000150672_86 (sequence is synthesized)
atttggagaatattttacaggtaagttcacttttaccctggtagtgtgagaaaggggataaattgtctgacatttggcacagagagggttctgggcctggtgtacttgtgccctaaaacc

SEQ ID NO: 421200 - DNA, 120 bp, Artificial Sequence
  ENSG00000150672_87 (sequence is synthesized)
ttcctgttgagaatccctaatatctgtttcatatacaaggagtatccctctgcttcacccattttgatgtaaaaccctgggttctcctgagagttcagctgcagccagctcccaggttcc

SEQ ID NO: 421201 - DNA, 120 bp, Artificial Sequence
  ENSG00000150672_88 (sequence is synthesized)
caccagccctacccaaaaccatgggcaggagatacccctgagctatctcctaccatgaaaaggatttgaggcattgctacctcattaaactatctccctgatatcatcagaaaacttgaa

SEQ ID NO: 421202 - DNA, 120 bp, Artificial Sequence
  ENSG00000150672_89 (sequence is synthesized)
aaacaaaattttagggctcaaaatggtcagtgtccaaagcagttactcttgagaagaagcttggaggcgtccgtccccagctccatgagctttcatcagtgtccctatcagcagcacctg

SEQ ID NO: 421203 - DNA, 120 bp, Artificial Sequence
  ENSG00000150672_90 (sequence is synthesized)
gtgtgtgtgagagagagagagacagagaggaaaagagtgaaaggaagagagaatgggaaggaggagagacagagaaagagataaaaagatactgaccgagctttatcattactggaagaa

SEQ ID NO: 421204 - DNA, 120 bp, Artificial Sequence
  ENSG00000150672_91 (sequence is synthesized)
atttattccgttggaataaatcttccttgaagttcatgttattttcaagtgactcaagttagatgccatcatatttttccctgtaacttcgaaatcacttaaatgtcacaaactctgggc

SEQ ID NO: 421205 - DNA, 120 bp, Artificial Sequence
  ENSG00000150672_92 (sequence is synthesized)
gcagataatgctgtgcggagctgctgtcgctgctcccactgctcccacgatgcactgcttatagcagctgtcaaagatactgaggaatccacggtggaaaaaagacttttacaactggct

SEQ ID NO: 421206 - DNA, 120 bp, Artificial Sequence
  ENSG00000150672_93 (sequence is synthesized)
ggaagaaaggggtgtgagggaggagacatttctgtgcagagctgaccaaaggaaagagtaggcatcagtgcagtatgaatgcatacctcaccaagcaacacagctgcagccgggggtccg

SEQ ID NO: 421207 - DNA, 120 bp, Artificial Sequence
  ENSG00000150672_94 (sequence is synthesized)
atgggatggatgccgtcaggagtgcgcccaccctgatcagggatgcccactgtgcttgtggctggcagaggaactgtcaggggctcgggtacagttctcagaccatgccctcctcaggac

SEQ ID NO: 421208 - DNA, 120 bp, Artificial Sequence
  ENSG00000150672_95 (sequence is synthesized)
cagggggcccagcttcaaacaggaccggggggtccagcttcaacaggaccttgtgggacagtgtgcggaaaagcccccacaagacgagcaccaagggcaaagggacttgtggggagcatt

SEQ ID NO: 421209 - DNA, 120 bp, Artificial Sequence
  ENSG00000150672_96 (sequence is synthesized)
cgtttctagttgtcagcggtgggtggccccattgtaaaaatgcctgatagagtgtttataaacatgtcatggttttattataagatataaatattaaaacattttatactttatggcaaa

SEQ ID NO: 421210 - DNA, 120 bp, Artificial Sequence
  ENSG00000150672_97 (sequence is synthesized)
gaagctctccgggccccaaactatcagtagcataaaatatgaccaaggtacttaaatattaccgtaagtgttactgtacaagaaaaaaaatgtattcggccgaactcttttgaggaaaag

SEQ ID NO: 421211 - DNA, 120 bp, Artificial Sequence
  ENSG00000150672_98 (sequence is synthesized)
aactcaaactaataatgttctgatatgtctctgtgtggatctgtaccctcattactaataatttttattaactagagtcaccatcattggtgttttgtaaacctacctatagtgaaaaat

SEQ ID NO: 421212 - DNA, 120 bp, Artificial Sequence
  ENSG00000150672_99 (sequence is synthesized)
tgatggttcatgtccaaagaacgtgaaccgtggctttgttacctctaatcttccaggaaaatatcaagcagttagaaaggcctatgaaaatatgaattcaaataaatagcaaccagcatc

SEQ ID NO: 421213 - DNA, 120 bp, Artificial Sequence
  ENSG00000150672_100 (sequence is synthesized)
taaaaagaagaaacagcaatcaagcagcgggttcctgtaaaatggagataaagttttcatcttctttatcttatctgagttttcttaatgcagcctcctctgcggcttttacttgccttt

SEQ ID NO: 421214 - DNA, 120 bp, Artificial Sequence
  ENSG00000150672_101 (sequence is synthesized)
cgctcacatttctggtagccttgcatgagtgtattcctttccgttctggctgctcttcaatgcttggtatctctttaatttgctgtgctgttcttgcagaacatgtttcttctaatgcca

SEQ ID NO: 421215 - DNA, 120 bp, Artificial Sequence
  ENSG00000150672_102 (sequence is synthesized)
taaaagatgaaagaaaagccgatgaatcaattattcaccttgatccttggaaggctgctttctttggttgctaaagtttctcaggtttcattctatcagtttcatttgttgggtgagctt

SEQ ID NO: 421216 - DNA, 120 bp, Artificial Sequence
  ENSG00000150672_103 (sequence is synthesized)
atgcccagcagtatctcccagaccggcaacccccgaccctccagtctccatgtcttacagaagccaaattcgagagttatataatttctagtgctgctgttgctcctgcctgaggaaaca

SEQ ID NO: 421217 - DNA, 120 bp, Artificial Sequence
  ENSG00000150672_104 (sequence is synthesized)
cttcatcgcgtggagggtgcaggacatttcagtgctcttccctaaaagaacggggcttgggcaggggtggccagcggtggcaaagaaatgtcttgtcttttctgcaaaaggaaggtgggt

SEQ ID NO: 421218 - DNA, 120 bp, Artificial Sequence
  ENSG00000150672_105 (sequence is synthesized)
agtttgaagagagattgagagaaaaggtggatgtgaaagccaagcagctgcactttctcatttaggaaatcgcggaccgtttacatagcttatgcttacatgtctaatactactacggcg

SEQ ID NO: 421219 - DNA, 120 bp, Artificial Sequence
  ENSG00000150672_106 (sequence is synthesized)
tctctgaaaacacctttgggggaaggtttggcttctctcgaagtctcagtgtttttcctcgccggatagggagctgcttgaatgcgaagagatggcatgatgtgaatgactccagtgtga

SEQ ID NO: 421220 - DNA, 120 bp, Artificial Sequence
  ENSG00000150672_107 (sequence is synthesized)
agaaatctgcttcgccaactcatcctgcatcaagtgcccattgagtagcactgtcactttaatgtctccatgccaagggattgctttccttttttttcaatcctctcggttaatacatgg

SEQ ID NO: 421221 - DNA, 120 bp, Artificial Sequence
  ENSG00000150672_108 (sequence is synthesized)
ctggtctgtcacatcataaataagaactacaaaccttgtatgcgaatccactgaccacaccaggtgaaaggctgttgttcctttaactgaaggatgccaacgtggtggaagaggactgaa

SEQ ID NO: 421222 - DNA, 120 bp, Artificial Sequence
  ENSG00000150672_109 (sequence is synthesized)
gatcaattttggccatgacataattactacagttggatgcctctgtgatcataccagagtagtttggtgtttccctcattaggtagcttaaaagccctacaatccaatggctggagtttg

SEQ ID NO: 421223 - DNA, 120 bp, Artificial Sequence
  ENSG00000150672_110 (sequence is synthesized)
atgttcagtcccattagatccttttttgttatttcagaattcagtgggcaaaggtgaacttacacatatgctactatttgttttgctatgcagttctctcaataaatactgtagcagaaa

SEQ ID NO: 421224 - DNA, 120 bp, Artificial Sequence
  ENSG00000150672_111 (sequence is synthesized)
atttacagtctgcgatgcgatcccattgtaaagtatttaataggataacaccggggctctccagaaatataagtaactcattggttaaatttcaattcttcacctttccccccctccttc

SEQ ID NO: 421225 - DNA, 120 bp, Artificial Sequence
  ENSG00000150672_112 (sequence is synthesized)
agagctgaatttgggaagcagctgcctgctatgctgaaaacccctggaaacttgctaaagagctgtggtgccgatatcacataagatttcaccagggcttcttctagccagaagacatgt

SEQ ID NO: 421226 - DNA, 120 bp, Artificial Sequence
  ENSG00000150672_113 (sequence is synthesized)
atgctccttatttactgcaatgttctttgcatgttactgtgcactccggactaacgtgaaggtgaggaaactgaagactgagtcccaggcagtgttacttattccagcagatgtagttag

SEQ ID NO: 421227 - DNA, 120 bp, Artificial Sequence
  ENSG00000150672_114 (sequence is synthesized)
aatttggaccaagtatgtctgattcttatttaatatttcacacagtgttttgtggaaggcaaagaaaaatgaaatagagcatgtaacagggtccaactaggaaaacagaagtccttctaa

SEQ ID NO: 421228 - DNA, 120 bp, Artificial Sequence
  ENSG00000150672_115 (sequence is synthesized)
agaaacaaacagaagatggcaaggcaatctacagattaaccacagcaggaaaacatgcccactcctaaactgaaggactaaaggaaggaacttagggccagaatcaaccacaggaagctg

SEQ ID NO: 421229 - DNA, 120 bp, Artificial Sequence
  ENSG00000150672_116 (sequence is synthesized)
gaaccactgcaggcctgttcagcagagtaggagccaaggaggaggtgccactgctgttggaattatcacaggaagcagaaacatggagaaaaatgccttggctttcttctttttttctgc

SEQ ID NO: 421230 - DNA, 120 bp, Artificial Sequence
  ENSG00000150672_117 (sequence is synthesized)
gactctggattgcagcaagccactggctttttaccaaatcgggagctgcagtatgttttcttcttcttcttcttcttcagagggaataatttcagcccccttcagctcgcatgacaatct

SEQ ID NO: 421231 - DNA, 120 bp, Artificial Sequence
  ENSG00000150672_118 (sequence is synthesized)
tgtgtgactggggagagtaggcgggcacatccttttacatgctaatactgccccacctcctttgaaccctcctctaagtgcctggcttccttttatttttatggtttatttttattttat

SEQ ID NO: 421232 - DNA, 120 bp, Artificial Sequence
  ENSG00000150672_119 (sequence is synthesized)
tttatttttattttacctcccccaaattcaccgtagggggaaaaattctttcttggttctgtccctccccccacacgcctcgttccccagggaagggagaccccgagaggctcggtactt

SEQ ID NO: 421233 - DNA, 120 bp, Artificial Sequence
  ENSG00000150672_120 (sequence is synthesized)
gcccgcggcgttgcttccaccggggctccgggatggccacggcgggtgcagggggcagtgatcgaagcggcagctcggtctaggctgtcgctccatgtgcccggcgagcacagcgtttgg

SEQ ID NO: 421234 - DNA, 120 bp, Artificial Sequence
  ENSG00000150672_121 (sequence is synthesized)
gtcccccagcgagctgccactgccgcagcccggaaggaatgtcccctgttgttaaggaccctgactgttttacaccaatgatttgccactgcaaagttgcttgcaccaacaacactttat

SEQ ID NO: 421235 - DNA, 120 bp, Artificial Sequence
  ENSG00000150672_122 (sequence is synthesized)
gacacacatggagtttggtggcgacggtgccggtgccgaagaactgcagacaaatacttagccaactggatgtgtgtgagctggctacaaaggcagcgcctgcctcacccggacctcctg

SEQ ID NO: 421236 - DNA, 120 bp, Artificial Sequence
  ENSG00000150672_123 (sequence is synthesized)
ctggcaggatgtaaatatacctgcagactggccaaacaggactgccttttctcccccaacccctccctcctcccaccctctccctcagctaaccagcatgagaggaactgagaaagcaac

SEQ ID NO: 421237 - DNA, 120 bp, Artificial Sequence
  ENSG00000150672_124 (sequence is synthesized)
cgtaaaaagagcttcatcttttcacgaaaattcccattctacaagaacaaggagcagagtgagcaggaaaccagtgatcctgaactaaactacacccggccggtgattatcctggggccc

SEQ ID NO: 421238 - DNA, 120 bp, Artificial Sequence
  ENSG00000150672_125 (sequence is synthesized)
gatagaactgtgcggggcactcacaggagccttgttccaatcaaggaatccgctaaaagaccatgcagccacggagcccaggaagccaccgggaagttttgccggagctgatttctaggg

SEQ ID NO: 421239 - DNA, 120 bp, Artificial Sequence
  ENSG00000150672_126 (sequence is synthesized)
gattttctggtgcctagcagaatcctgcttgccttgagctgtatggaggagggctcgagtttcccatgaggggcccccttggaaaagccgtctgtacagaatccaagctctgcttctttc

SEQ ID NO: 421240 - DNA, 120 bp, Artificial Sequence
  ENSG00000150672_127 (sequence is synthesized)
tatacaccaagcagctcaaccaggaggagggaacagagctgaatttgggaagcagctgcctgctatgctgaaaacccctggaaacttgctaaagagctgtgattacgctcgatttgaggc

SEQ ID NO: 421241 - DNA, 120 bp, Artificial Sequence
  ENSG00000150672_128 (sequence is synthesized)
ctggagtgattgattcgaaagggttactggagtttaaatatgcttgaaatgtaaaagtggcatgaaactggagtgatgcaagaatatttagtattcttttaaggactatcatttttaact

SEQ ID NO: 421242 - DNA, 120 bp, Artificial Sequence
  ENSG00000150672_129 (sequence is synthesized)
agaaacgctccctctacgtcaggtaggcaaaggagtatttctctatctgcactttgtgagcaattcaacttgagaaaacaaaggcaacaccatgtagcaacagaacatgtgtcccactta

SEQ ID NO: 421243 - DNA, 120 bp, Artificial Sequence
  ENSG00000150676_0 (sequence is synthesized)
aaatgcagggcgcagcagccgctgcagtggagccggtaggcctggccggcgggctgaaaggaagtgcgagctgtccgcccagggccgggtatccgcccctgcaggctgtggaggggatgt

SEQ ID NO: 421244 - DNA, 120 bp, Artificial Sequence
  ENSG00000150676_1 (sequence is synthesized)
caggagactggctggcctcttttcttggcccccgactccttccagtctgacactgaagactttataagcttccccccgaccaccctccacgggctccactctccacgggcctgggcttgc

SEQ ID NO: 421245 - DNA, 120 bp, Artificial Sequence
  ENSG00000150676_2 (sequence is synthesized)
gccgcttcgagatcagcctgggggtcgcgccctcctggtcttgtccacgaagcgccgttcttgggccgttaggagctgctgggaagggctctgataggcccactcctcttctccacccag

SEQ ID NO: 421246 - DNA, 120 bp, Artificial Sequence
  ENSG00000150676_3 (sequence is synthesized)
gagatgagaaggagggcaggcctttttaatctgatcagaatgttaacccatctctccgccttgcggtagaacccctggatacattatttgccctctcgaaaggcaggctctgaatttgat

SEQ ID NO: 421247 - DNA, 120 bp, Artificial Sequence
  ENSG00000150676_4 (sequence is synthesized)
tcaggtatatttcttcatagctaaccagcacaatggaaaactcagggaaagcaaataaaaaggatacacatgacgggccaccaaaagaaattaaactgcctaccagtgaagcacttctag

SEQ ID NO: 421248 - DNA, 120 bp, Artificial Sequence
  ENSG00000150676_5 (sequence is synthesized)
actatcaatgtcaaataaaggaagatgccgtggagcaattcatgtttcaaataaagacacttaggaaaaagaaccaaaaatatcatgaaagaaatagccgcttaaaagaagaacagattt

SEQ ID NO: 421249 - DNA, 120 bp, Artificial Sequence
  ENSG00000150676_6 (sequence is synthesized)
ggcacatacggcatctactaaaggaactgagtgaagagaaggcagagggattgccagttgtaacaagagaggatgttgaagaagcgatgaaggaaaaatggaagtttgaaagagaccagg

SEQ ID NO: 421250 - DNA, 120 bp, Artificial Sequence
  ENSG00000150676_7 (sequence is synthesized)
aaaaaaacttgagagatatgcgcatgcaaataagtaatgctgagaaactatttcttgagaaactcagtgaaaaggaatattgggaggagtacaagaatgtagggagtgaacgacatgcta

SEQ ID NO: 421251 - DNA, 120 bp, Artificial Sequence
  ENSG00000150676_8 (sequence is synthesized)
aactcattacctccttacaaaatgacatcaacacagttaaagagaatgcagagaaaatgtcagaacactataaaatcactctggaagatactagaaagaaaataatcaaggaaactttgt

SEQ ID NO: 421252 - DNA, 120 bp, Artificial Sequence
  ENSG00000150676_9 (sequence is synthesized)
gggagaatgactggctcaaaaaagaggttgcaattcacaggaaggaagttgaagaattaaaaaatgctattcatgaactggaagcagaaaatttggtgcttattgatcaactatccaact

SEQ ID NO: 421253 - DNA, 120 bp, Artificial Sequence
  ENSG00000150676_10 (sequence is synthesized)
gtagacttgtggatctcaagatacccaggtatccagtgctacattcctgtcccacctctaatcctcgtcatctgctgctgctgcctttggaatcatgtctaatctctgccaggcgttgct

SEQ ID NO: 421254 - DNA, 120 bp, Artificial Sequence
  ENSG00000150676_11 (sequence is synthesized)
ggcgactatatcttacccaagctgctggactagaagtgccacctgaagaaatgtctttggaattgccagaaacacatatagaagagaagtcagaattgcaacccacagaagtagaaagta

SEQ ID NO: 421255 - DNA, 120 bp, Artificial Sequence
  ENSG00000150676_12 (sequence is synthesized)
gagacttgatgtcctcatcagatgagagcactatcttacatcttagtcatgaaaatagcatcgaagatctccagtatgtgaagatagataaagaggaaaactcaggcacagagtttgggg

SEQ ID NO: 421256 - DNA, 120 bp, Artificial Sequence
  ENSG00000150676_13 (sequence is synthesized)
acactgatatgaagtacttactatatgaggatgagaaggatttcaaggattatgtaaacttgggccccctgggagtgaagcttatgagtgtggagagcaagaaaatgcccattcattttc

SEQ ID NO: 421257 - DNA, 120 bp, Artificial Sequence
  ENSG00000150676_14 (sequence is synthesized)
aagagaaggaaattccagtcaaactctataaagatgtcaggagcccagaaagccacatcacatataagatgatgaagtcttttctctaagacggaaagctgcaaaggaaacacaactttt

SEQ ID NO: 421258 - DNA, 120 bp, Artificial Sequence
  ENSG00000150676_15 (sequence is synthesized)
ccttataaatgttctttgggaactgaagtatatccgttgcccattttacttacactttggctcatttttaaaccagctgttatttctaaaggtcatatttacatttaaaatcaaaggtat

SEQ ID NO: 421259 - DNA, 120 bp, Artificial Sequence
  ENSG00000150676_16 (sequence is synthesized)
tcagctattcatttacttgcatggtatgagtgaccaaaacggaagcacgctttgtatttctacactgaagtattcagaagcatgacagtgggttcaaggtagtctctgaggttccttttc

SEQ ID NO: 421260 - DNA, 120 bp, Artificial Sequence
  ENSG00000150676_17 (sequence is synthesized)
acacacaaaaaattcactgattaatctgtgattccagtatgaaatagttccattagaaatgtttctaagaaaaacttagaagtttgcatagcattgtctacacatctttccctctgagga

SEQ ID NO: 421261 - DNA, 120 bp, Artificial Sequence
  ENSG00000150676_18 (sequence is synthesized)
tgcatagcattgtctacacatctttccctctgaggatgctcaatgtgatagacagccagtctataatgcaagccaattctccgtagtttaaccctgtgtattagtctgttctcatgctgc

SEQ ID NO: 421262 - DNA, 120 bp, Artificial Sequence
  ENSG00000150676_19 (sequence is synthesized)
gatgtcaaataaaggaagatgccgtggagcaattcatgtttcaaataaagacacttaggaaaaagaaccaaaaatatcatgaaagaaacactataaaatcactctggaagatactagaaa

SEQ ID NO: 421263 - DNA, 120 bp, Artificial Sequence
  ENSG00000150681_0 (sequence is synthesized)
agttctgcatttctgcagagacagaaagaaacgcagctcttgacttcttttttgtaaacattactgtaagagttgtgataactttttattctactatgtatatgtatggaatagtattaa

SEQ ID NO: 421264 - DNA, 120 bp, Artificial Sequence
  ENSG00000150681_1 (sequence is synthesized)
taaatgaactagggaaggatgtaataaattagacatctcttcattttagagagaagatggaaacaacattgcttttcttttctcaaataaatatgtgtgaatcaaaagaaaaaacttttt

SEQ ID NO: 421265 - DNA, 120 bp, Artificial Sequence
  ENSG00000150681_2 (sequence is synthesized)
tcaagttaatacatggttcaggaaaagaagaaacaagcaaagaagccaaaatcagagctaaggaaaaaagaaatagactaagtcttcttgtgcagaaacctgagtttcatgaagacaccc

SEQ ID NO: 421266 - DNA, 120 bp, Artificial Sequence
  ENSG00000150681_3 (sequence is synthesized)
gctccagtagatctgggcacttggccaaagaaacaagagtctcccctgaagaggcagtgaaatggggtgaatcatttgacaaactgctttcccatagagatggactagaggcttttacca

SEQ ID NO: 421267 - DNA, 120 bp, Artificial Sequence
  ENSG00000150681_4 (sequence is synthesized)
gatttcttaaaactgaattcagtgaagaaaatattgaattttggatagcctgtgaagatttcaagaaaagcaagggacctcaacaaattcaccttaaagcaaaagcaatatatgagaaat

SEQ ID NO: 421268 - DNA, 120 bp, Artificial Sequence
  ENSG00000150681_5 (sequence is synthesized)
ttatacagactgatgccccaaaagaggttaaccttgattttcacacaaaagaagtcattacaaacagcatcactcaacctaccctccacagttttgatgctgcacaaagcagagtgtatc

SEQ ID NO: 421269 - DNA, 120 bp, Artificial Sequence
  ENSG00000150681_6 (sequence is synthesized)
agctcatggaacaagacagttatacacgttttctgaaatctgacatctatttagacttgatggaaggaagacctcagagaccaacaaatcttaggagacgatcacgctcatttacctgca

SEQ ID NO: 421270 - DNA, 120 bp, Artificial Sequence
  ENSG00000150681_7 (sequence is synthesized)
atgaattccaagatgtacaatcagatgttgccatttggttataaagaaaattgattttgctcatttttatgacaaacttatacatctgcttctaacatatcgcatgtttatgttaagatt

SEQ ID NO: 421271 - DNA, 120 bp, Artificial Sequence
  ENSG00000150681_8 (sequence is synthesized)
gtaaaaccttctatttgatgtcattccatttataatcagaaaaaaaacttatttcttaatcaaaaggcagtacaaaaaaagtaataatgttttataagattgtagagttaagtaaaagtt

SEQ ID NO: 421272 - DNA, 120 bp, Artificial Sequence
  ENSG00000150681_9 (sequence is synthesized)
aagcttttgcaaagttgtcaaaagttcaaacaaaagtctagttgggattttttaccaaagcagcataatatgtgttatataaacataataatactcagatatccaaatgttcagatagca

SEQ ID NO: 421273 - DNA, 120 bp, Artificial Sequence
  ENSG00000150681_10 (sequence is synthesized)
tttttcataatgaatgttctcttttttttggtaatagtgtagaagtgatctggttcttacaatgggagatgaagaacatttattattgggttactactaaccctgtcccaagaatagtaa

SEQ ID NO: 421274 - DNA, 120 bp, Artificial Sequence
  ENSG00000150681_11 (sequence is synthesized)
tatcacctctagttataagccagcaacaggaacttttgtgaagacacattcatctctacagaacttcagattaaatataatctagattaatgactgagaataagatccacatttgaactc

SEQ ID NO: 421275 - DNA, 120 bp, Artificial Sequence
  ENSG00000150681_12 (sequence is synthesized)
attcctaagtgaacatggacgtacccagttatacaaagtacttctgttggtcacagaaacatgaccagattttgcatatctccaggtagggaactaagtagactaccttatcaccggcta

SEQ ID NO: 421276 - DNA, 120 bp, Artificial Sequence
  ENSG00000150681_13 (sequence is synthesized)
agaaaacttgctactaaactattaggccatcaatggcttgaataaaaaccagagaaggtttttcccaggacgtctcatgtttggccctttagaattggggtagaaatcagaaatgagatg

SEQ ID NO: 421277 - DNA, 120 bp, Artificial Sequence
  ENSG00000150681_14 (sequence is synthesized)
aggggaagaagcaaggagtctaaggccctagcgatttgggcatctgccacattggttcatattcagaaagtgttatctcattgattatattcttgttaagcaaatctccttaagtaatta

SEQ ID NO: 421278 - DNA, 120 bp, Artificial Sequence
  ENSG00000150681_15 (sequence is synthesized)
ttattcaaataagattatactcatacatctatatgtcactgttttaaagagatatttaatttttaatgtgtgttacatggtctgtaaatatttgtatttaaaaatgccatgcattaggct

SEQ ID NO: 421279 - DNA, 120 bp, Artificial Sequence
  ENSG00000150681_16 (sequence is synthesized)
ttggaaatttaatgttagttgaaatgtaaaatgtgaaaactttagatcatttgtagtaataaatatttttaacttcattcatacagttaagtttatctgacaataaaagctctgactgaa

SEQ ID NO: 421280 - DNA, 120 bp, Artificial Sequence
  ENSG00000150681_17 (sequence is synthesized)
gatgatcaattagagggtgaaaatttcaattgacaataacatatagacaggatttctttcacttaatgaattagtatataataatttcatcatactttcattactcattcaaagcataga

SEQ ID NO: 421281 - DNA, 120 bp, Artificial Sequence
  ENSG00000150681_18 (sequence is synthesized)
aagatttagcaggatgattagtcctacagaaaatcctcacctagcattctgtaatctttcttctttaaaagtggtaaaaagcaaaaggacaaaatcgaatttgctactctctcttttctc

SEQ ID NO: 421282 - DNA, 120 bp, Artificial Sequence
  ENSG00000150681_19 (sequence is synthesized)
tactggtaatattgaagaacagtaaactatctgcaatttaaatcaagaagagacacatttaaagaaatcagcactgacccactggatattatcacttgtcatgattacaatgctaaatat

SEQ ID NO: 421283 - DNA, 120 bp, Artificial Sequence
  ENSG00000150681_20 (sequence is synthesized)
gtggtactttcaccaaatactttgtgtgcttaatggaaaattacacaaactatgcatgtaattatccgaaacaataggtcacaaaatttttgtctgattgttaattttcagtaattcaat

SEQ ID NO: 421284 - DNA, 120 bp, Artificial Sequence
  ENSG00000150681_21 (sequence is synthesized)
tttctgatcaacagaactaagtaatagaaaagtcaaataatggaaatttttttaaaagttctcattttgtttagaattacctactgtggatgaaatattagttatttatactgtagctag

SEQ ID NO: 421285 - DNA, 120 bp, Artificial Sequence
  ENSG00000150687_0 (sequence is synthesized)
cggggcaggcatgggagccgcgcgctctctcccggcgcccacacctgtctgagcggcgcagcgagccgcggcccgggcgggctgctcggcgcggaacagtgctcggcatggcagggattc

SEQ ID NO: 421286 - DNA, 120 bp, Artificial Sequence
  ENSG00000150687_1 (sequence is synthesized)
ggcatggcagggattccagggctcctcttccttctcttctttctgctctgtgctgttgggcaagtgagcccttacagtgccccctggaaacccacttggcctgcataccgcctccctgtc

SEQ ID NO: 421287 - DNA, 120 bp, Artificial Sequence
  ENSG00000150687_2 (sequence is synthesized)
gtcttgccccagtctaccctcaatttagccaagccagactttggagccgaagccaaattagaagtatcttcttcatgtggaccccagtgtcataagggaactccactgcccacttacgaa

SEQ ID NO: 421288 - DNA, 120 bp, Artificial Sequence
  ENSG00000150687_3 (sequence is synthesized)
gaggccaagcaatatctgtcttatgaaacgctctatgccaatggcagccgcacagagacgcaggtgggcatctacatcctcagcagtagtggagatggggcccaacaccgagactcaggg

SEQ ID NO: 421289 - DNA, 120 bp, Artificial Sequence
  ENSG00000150687_4 (sequence is synthesized)
tcttcaggaaagtctcgaaggaagcggcagatttatggctatgacagcaggttcagcatttttgggaaggacttcctgctcaactaccctttctcaacatcagtgaagttatccacgggc

SEQ ID NO: 421290 - DNA, 120 bp, Artificial Sequence
  ENSG00000150687_5 (sequence is synthesized)
tgcaccggcaccctggtggcagagaagcatgtcctcacagctgcccactgcatacacgatggaaaaacctatgtgaaaggaacccagaagcttcgagtgggcttcctaaagcccaagttt

SEQ ID NO: 421291 - DNA, 120 bp, Artificial Sequence
  ENSG00000150687_6 (sequence is synthesized)
aaagatggtggtcgaggggccaacgactccacttcagccatgcccgagcagatgaaatttcagtggatccgggtgaaacgcacccatgtgcccaagggttggatcaagggcaatgccaat

SEQ ID NO: 421292 - DNA, 120 bp, Artificial Sequence
  ENSG00000150687_7 (sequence is synthesized)
gacatcggcatggattatgattatgccctcctggaactcaaaaagccccacaagagaaaatttatgaagattggggtgagccctcctgctaagcagctgccagggggcagaattcacttc

SEQ ID NO: 421293 - DNA, 120 bp, Artificial Sequence
  ENSG00000150687_8 (sequence is synthesized)
tctggttatgacaatgaccgaccaggcaatttggtgtatcgcttctgtgacgtcaaagacgagacctatgacttgctctaccagcaatgcgatgcccagccaggggccagcgggtctggg

SEQ ID NO: 421294 - DNA, 120 bp, Artificial Sequence
  ENSG00000150687_9 (sequence is synthesized)
gtctatgtgaggatgtggaagagacagcagcagaagtgggagcgaaaaattattggcattttttcagggcaccagtgggtggacatgaatggttccccacaggatttcaacgtggctgtc

SEQ ID NO: 421295 - DNA, 120 bp, Artificial Sequence
  ENSG00000150687_10 (sequence is synthesized)
agaatcactcctctcaaatatgcccagatttgctattggattaaaggaaactacctggattgtagggaggggtgacacagtgttccctcctggcagcaattaagggtcttcatgttctta

SEQ ID NO: 421296 - DNA, 90 bp, Artificial Sequence
  ENSG00000150687_11 (sequence is synthesized)
cactgtcttataatcttttacctatttcttacaattgcaagatgactggctttactatttgaaaactggtttgtgtatcatatcatatat

SEQ ID NO: 421297 - DNA, 120 bp, Artificial Sequence
  ENSG00000150687_12 (sequence is synthesized)
tttactatttgaaaactggtttgtgtatcatatcatatatcatttaagcagtttgaaggcatacttttgcatagaaataaaaaaaatactgatttggggcaatgaggaatatttgacaat

SEQ ID NO: 421298 - DNA, 120 bp, Artificial Sequence
  ENSG00000150687_13 (sequence is synthesized)
taagttaatcttcacgtttttgcaaactttgatttttatttcatctgaacttgtttcaaagatttatattaaatatttggcatacaagagatatgaattcttatatgtgtgcatgtgtgt

SEQ ID NO: 421299 - DNA, 120 bp, Artificial Sequence
  ENSG00000150687_14 (sequence is synthesized)
tttcttctgagattcatcttggtggtgggtttttttgtttttttaattcagtgcctgatctttaatgcttccataaggcagtgttcccatttaggaactttgacagcatttgttaggcag

SEQ ID NO: 421300 - DNA, 120 bp, Artificial Sequence
  ENSG00000150687_15 (sequence is synthesized)
tgcttttagttccaaaaatagtttcttttccaaaggttgttgctctactttgtaggaagtctttgcatatggccctcccaactttaaagtcataccagagtggccaagagtgtttatccc

SEQ ID NO: 421301 - DNA, 120 bp, Artificial Sequence
  ENSG00000150687_16 (sequence is synthesized)
aacccttccatttaacaggatttcactcacatttctggaactagctatttttcagaagacaataatcagggcttaattagaacaggctgtatttcctcccagcaaacagttgtggccaca

SEQ ID NO: 421302 - DNA, 120 bp, Artificial Sequence
  ENSG00000150687_17 (sequence is synthesized)
ctaaaaacaatcatagcattttacccctggattatagcacatctcatgttttatcatttggatggagtaatttaaaatgaattaaattccagagaacaatggaagcattgcctggcagat

SEQ ID NO: 421303 - DNA, 120 bp, Artificial Sequence
  ENSG00000150687_18 (sequence is synthesized)
gtcacaacagaataaccacttgtttggagcctggcacagtcctccagcctgatcaaaaattattctgcatagttttcagtgtgctttctgggagctatgtacttcttcaatttggaaact

SEQ ID NO: 421304 - DNA, 120 bp, Artificial Sequence
  ENSG00000150687_19 (sequence is synthesized)
tttctctctcatttatagtgaaaatacttggaagttactttaagaaaaccagtgtggcctttttccctctagctttaaaagggccgcttttgctggaatgctctaggttatagataaaca

SEQ ID NO: 421305 - DNA, 120 bp, Artificial Sequence
  ENSG00000150687_20 (sequence is synthesized)
attaggtataatagcaaaaatgaaaattggaagaatgcaaaatggatcagaatcatgccttccaataaaggcctttacacatgttttatcaatatgattatcaaatcacagcatatacag

SEQ ID NO: 421306 - DNA, 120 bp, Artificial Sequence
  ENSG00000150687_21 (sequence is synthesized)
aaaagacttggacttattgtatgtttttattttatggctctcggcctaagcacttctttctaaatgtatcggagaaaaaatcaaatggactacaagcacgtgtttgctgtgcttgcaccc

SEQ ID NO: 421307 - DNA, 120 bp, Artificial Sequence
  ENSG00000150687_22 (sequence is synthesized)
caggtaaacctgcattgtagcaatttgtaaggatattcagatggagcactgtcacttagacattctctgggggattttctgcttgtctttcttgagctttttggaaggataattctgata

SEQ ID NO: 421308 - DNA, 120 bp, Artificial Sequence
  ENSG00000150687_23 (sequence is synthesized)
aggcactcaagaaacgtacaaccacagtgctttcttcaaatcatatgagaaatactatgcatagcaaggagatgcagagccgccaggaaaattctgagttccagcacaattttctttgga

SEQ ID NO: 421309 - DNA, 120 bp, Artificial Sequence
  ENSG00000150687_24 (sequence is synthesized)
atctaacaggaatctagcctgaggaagaagggaggtctccatttctatgtctggtatttgggggttttgtttgtttttgctttagcttggtgaaaaaaagttcactgaacaccaagacca

SEQ ID NO: 421310 - DNA, 120 bp, Artificial Sequence
  ENSG00000150687_25 (sequence is synthesized)
gaatggatttttttaaaaaaatagatgttccttttgtgaagcaccttgattccttgattttgattttttgcaaagttagacaatggcacaaagtcaaaatgaaatcaatgtttagttcac

SEQ ID NO: 421311 - DNA, 120 bp, Artificial Sequence
  ENSG00000150687_26 (sequence is synthesized)
aagtagatgtaatttactaaagaatgatacacccatatgctatatacagcttaactcacagaactgtaaaagaaaattataaaataattcaacatgtccatctttttagtgataataaaa

SEQ ID NO: 421312 - DNA, 120 bp, Artificial Sequence
  ENSG00000150687_27 (sequence is synthesized)
gaaagcatggtattaaactatcatagaagtagacagaaaaagaaaaaaggactcatggcattattaatataattagtgctttacatgtgttagttatacatattagaagcatatttgcct

SEQ ID NO: 421313 - DNA, 120 bp, Artificial Sequence
  ENSG00000150687_28 (sequence is synthesized)
agtaaggctagtagaaccacatttcccaaagtgtgctccttaaacactcatgccttatgattttctaccaaaagtaaaaagggttgtattaagtcagaggaagatgcctctccattttcc

SEQ ID NO: 421314 - DNA, 120 bp, Artificial Sequence
  ENSG00000150687_29 (sequence is synthesized)
ctctctttatcagaggttcacatgcctgtctgcacattaaaagctctgggaagacctgttgtaaagggacaagttgaggttgtaaaatctgcatttaaataaacatctttgatcacaaaa

SEQ ID NO: 421315 - DNA, 120 bp, Artificial Sequence
  ENSG00000150687_30 (sequence is synthesized)
ttttcactctggatacatgaggaggactgaccatgtactgtacttcttttaacttctatagagcaatctctttgtatttatacaattatgacaacagtagtaagagaagaaggttcagag

SEQ ID NO: 421316 - DNA, 120 bp, Artificial Sequence
  ENSG00000150687_31 (sequence is synthesized)
ttaagagaggaagacagagaagaaaaatccactggataccttatgtgtaattcaccaatctgttggaacacttctgccacgtgtgaagagttttggcagaccaaatccacatgcctgaag

SEQ ID NO: 421317 - DNA, 120 bp, Artificial Sequence
  ENSG00000150687_32 (sequence is synthesized)
tgatgcccaccaacaaagacataaaaattttcaacatttcaacagccatgttggaatcatctgcagaataccgaaaaagtgcccagttggagatttcataaaaataacaggcaatcacac

SEQ ID NO: 421318 - DNA, 120 bp, Artificial Sequence
  ENSG00000150687_33 (sequence is synthesized)
ggctgtgcggcggggcaggcatgggagccgcgcgctctctcccggcgcccacacctgtctgagcggcgcagcgagccgcggcccgggcgggctgctcggcgcggccaggactttgaactt

SEQ ID NO: 421319 - DNA, 120 bp, Artificial Sequence
  ENSG00000150687_34 (sequence is synthesized)
acttgctgtctctgtgtttcatctacttcagatggctccctaatgagtagaatgagacctgtgtgccaaccctggcctagtcctcatgcccccacaactgtgaagcgagagggctcaaca

SEQ ID NO: 421320 - DNA, 120 bp, Artificial Sequence
  ENSG00000150687_35 (sequence is synthesized)
cagtgttctgctttcatggagttcacagaagagtcgaggagacacagctggatcctccctgtttaccccagtggatgctaaatgctttggtgaagaggagacatccctgcacaaagcaga

SEQ ID NO: 421321 - DNA, 120 bp, Artificial Sequence
  ENSG00000150687_36 (sequence is synthesized)
gctgtggattctctgacctccttgaagactctcttctgagctgcagtggacatttgccatatttttattaatgggtgtctgtcatcaaatctccctctgtaagggttggtcactgttgtg

SEQ ID NO: 421322 - DNA, 120 bp, Artificial Sequence
  ENSG00000150687_37 (sequence is synthesized)
gatacaaggtaacacacctacataaacgacctactgggtacaaatattgtaaatcaacataggcctagaaaaggtggtcagatgctgaattttgactaaatacctccgatggcacataat

SEQ ID NO: 421323 - DNA, 120 bp, Artificial Sequence
  ENSG00000150687_38 (sequence is synthesized)
agatttgaccgaattttgaacaaggccaccaaacctgcagcaatgaacaaagttccaatgaccaaataagtaaagaggggagccaccacgaacccggtgagggcatcgagattttggttt

SEQ ID NO: 421324 - DNA, 120 bp, Artificial Sequence
  ENSG00000150687_39 (sequence is synthesized)
ccaacatagcacaagccagtcagttcatctgcatccaccagtctcataatcaagatgacaatggttttcactgcggggatggcccaggctgcaatgtggaaataagagctgtgcatttca

SEQ ID NO: 421325 - DNA, 120 bp, Artificial Sequence
  ENSG00000150687_40 (sequence is synthesized)
attgcctctgtcagtgtgacaggttccacagagctgtcaccctgcaaactcacccttcctccaggagcacaggcgcagagctgcagtggagggtacctgtgtggcttccttgtctgacac

SEQ ID NO: 421326 - DNA, 120 bp, Artificial Sequence
  ENSG00000150687_41 (sequence is synthesized)
gctgtgcggcggggcaggcatgggagccgcgcgctctctcccggcgcccacacctgtctgagcggcgcagcgagccgcggcccgggcgggctgctcggcgcggatggctccctaatgagt

SEQ ID NO: 421327 - DNA, 120 bp, Artificial Sequence
  ENSG00000150687_42 (sequence is synthesized)
ttcatccattcttaaaattgagccagtttagccctaggaggtgggcaggctctgaggaatcatcaatcaagagaagagaacatcgccagaaacaccatgctgcagtacaaaaattctata

SEQ ID NO: 421328 - DNA, 120 bp, Artificial Sequence
  ENSG00000150687_43 (sequence is synthesized)
catcagcaagaaaattattgcacatcctgtgttcttaagtccttcttggatgagaacaggttctgctgcctcttcaaaatcacaggatatcctttcccggcctacagtcagcctgacaat

SEQ ID NO: 421329 - DNA, 120 bp, Artificial Sequence
  ENSG00000150687_44 (sequence is synthesized)
ataagcaatgctataaatattatagcacatactgagaaatatgatggggcgctcagggtaggaaaacctagaagaatcgatcaggaaggtcagtactgtgaaggcagtggagatgaaaca

SEQ ID NO: 421330 - DNA, 120 bp, Artificial Sequence
  ENSG00000150687_45 (sequence is synthesized)
caggctggcccacacagccatccagatatcagtgaactccttggctgagcggctgtataagccagcatcatagccacacttgagcacacagttcaggctccttttcacccagatgtactg

SEQ ID NO: 421331 - DNA, 120 bp, Artificial Sequence
  ENSG00000150687_46 (sequence is synthesized)
atcagaattggttcccacagagtgacactcttccccaggctggatgggggttttgtgaggtaagggcacctcttcatcacctggcccttccatgcacatgtggttgtggtcgttctgtgg

SEQ ID NO: 421332 - DNA, 120 bp, Artificial Sequence
  ENSG00000150687_47 (sequence is synthesized)
tgggaatttgctgcagttcagactctctggccaggcaaatccaaattccttcaggacgggttcacagcgtctcttgactgaaagacacatgccgccgcatgggccaatggggatgttgat

SEQ ID NO: 421333 - DNA, 120 bp, Artificial Sequence
  ENSG00000150687_48 (sequence is synthesized)
cttctctgtgcacattggcacataaacagaacaaaggaagaactggaaaagtaacaaaatgaacacacacaaaaaaaacaatgacttggaagtttgaccaaatgctcccacaaagctgag

SEQ ID NO: 421334 - DNA, 120 bp, Artificial Sequence
  ENSG00000150687_49 (sequence is synthesized)
ttgaatgcttccaggcaatctaggtatctacttttaaaccaacctatcgggagtctgtctgtttactctgacctcaaacaagggcgcctgataatccatcacttacatacttttcttagt

SEQ ID NO: 421335 - DNA, 120 bp, Artificial Sequence
  ENSG00000150687_50 (sequence is synthesized)
ttggctttagtaatcctttccagaagaatgtacataaataaataaataaaataaatagggtctgaagaattgcataagccctctttgcacaacacttgaaataaatcttaaaaaactggc

SEQ ID NO: 421336 - DNA, 120 bp, Artificial Sequence
  ENSG00000150687_51 (sequence is synthesized)
cacacaaccctggcacaatctgagggtcagtaactgactttggctcagcccaccaagtggtctttccctgaagtgtgaatctcagggaagcaatacaaaaacaggcagggggtgggtggc

SEQ ID NO: 421337 - DNA, 120 bp, Artificial Sequence
  ENSG00000150687_52 (sequence is synthesized)
tacctctggagacagctggaggtcgtcctttcaaaagcaggctggcgggcacgctgaccaaactactcctgccaaggagccattgctgtggttcctttggactggacttctgactctccc

SEQ ID NO: 421338 - DNA, 120 bp, Artificial Sequence
  ENSG00000150687_53 (sequence is synthesized)
ctaatttctactcatttctaaggttaattctctttactctccaaccactccaatacatttccttccatttatgttctctagagtctgttttcattgctgacacctaaggtggtgcataat

SEQ ID NO: 421339 - DNA, 120 bp, Artificial Sequence
  ENSG00000150687_54 (sequence is synthesized)
tataagccagcgtgatttcatttcctatctgaagccttcgaaaaaaatggctctcaagcagtatctcagacacccaaatccaaggctttactttggtggccatggaaagacacctgaatg

SEQ ID NO: 421340 - DNA, 120 bp, Artificial Sequence
  ENSG00000150687_55 (sequence is synthesized)
ggtgggcgtgggaatagggtaagagaagtagaaaagaggaagggaaaagagaaagtactgcatatttcatacctactatagtctaggactgaggatacagcaatgatcaacataggcaga

SEQ ID NO: 421341 - DNA, 120 bp, Artificial Sequence
  ENSG00000150687_56 (sequence is synthesized)
ggctctaacagatgccaggagccagctaggcatttgtccggctatcttatgataatattatagggagggaggtgctcccataccccaagtgggaagagtgcggctcagtgaggctgagaa

SEQ ID NO: 421342 - DNA, 120 bp, Artificial Sequence
  ENSG00000150687_57 (sequence is synthesized)
acttgccgtgggtcacacagcagatgactattggagctggaatctgaaccagatctcattcctaccatatctgctctttccactacataaatttgttaaacaatggtgggtaaaccatgc

SEQ ID NO: 421343 - DNA, 120 bp, Artificial Sequence
  ENSG00000150687_58 (sequence is synthesized)
acctttttttcttttcgtattttgatttcagtgttgtatccatgatttggaacgagcccacctgagcctaatgatgcgacgagatcattggattatatatgtatttactttaaaaacaca

SEQ ID NO: 421344 - DNA, 120 bp, Artificial Sequence
  ENSG00000150687_59 (sequence is synthesized)
aggtagaaaactttactgagtccatgaaaagaaaagctggagacacgtcaaagcctgttttgatttaagtggaatagatccagcttgagtgtaaattcgagactgtgtttgcttgtgtca

SEQ ID NO: 421345 - DNA, 120 bp, Artificial Sequence
  ENSG00000150687_60 (sequence is synthesized)
cactctatttttcaaattactttcatatgtcctgtttcatttatttcccccagttcggaatgggaaaactgaggcctgggacttgaaataacagatgtatgtttgtacagcaaatcatca

SEQ ID NO: 421346 - DNA, 120 bp, Artificial Sequence
  ENSG00000150687_61 (sequence is synthesized)
tgagagccaaaactcaaacccatactctctcaccgaaccccactgcttctttcagcacacaataattattattatgccaagtaagtttaacaaggtgacttggatcgattcattctgatg

SEQ ID NO: 421347 - DNA, 120 bp, Artificial Sequence
  ENSG00000150687_62 (sequence is synthesized)
atttgagttggctcctgggatcatctgggtaaatattaggcccacatctctttccaaacatattccatctctctctctctctttggttttttcttttttctacattttcacctctgctcc

SEQ ID NO: 421348 - DNA, 120 bp, Artificial Sequence
  ENSG00000150687_63 (sequence is synthesized)
ctcatcatacctccctccctttctctgttgaactcctccccttctcttctttcctcccttcctctcatcctctcacccacaaaaacatttgtttgtcttacatagggatagtgtcatgtg

SEQ ID NO: 421349 - DNA, 120 bp, Artificial Sequence
  ENSG00000150687_64 (sequence is synthesized)
actgggtggctgaaaggagaagtatcttttaagctcctggaagcagaatattttcttatggattttttattgtttggattgttttgccaggctaatgaaagaagactctgaggtcccctt

SEQ ID NO: 421350 - DNA, 120 bp, Artificial Sequence
  ENSG00000150687_65 (sequence is synthesized)
atctcaggccaactagaggatgccttcaagtttttgtttttcttcccaagctggttccttacaaatgcatccagaaggtcattcccaggtccccaagatagtggtgggtaatcaatcaca

SEQ ID NO: 421351 - DNA, 120 bp, Artificial Sequence
  ENSG00000150687_66 (sequence is synthesized)
tccaggacatcagcatcacagcagataagctcatgcatgggaggatttgggaaaggagagaggggatcctaaactatccctgaaccatgtgctccagcaaaggcaagtggagggattact

SEQ ID NO: 421352 - DNA, 120 bp, Artificial Sequence
  ENSG00000150687_67 (sequence is synthesized)
ttttctaggagttcactgggacagccacaagtatattctagctccaatgaccattcttcccttttgatttttgactcaaaacaaataaaaatacacatacataaaatccttaaacatttc

SEQ ID NO: 421353 - DNA, 120 bp, Artificial Sequence
  ENSG00000150687_68 (sequence is synthesized)
ctatataatctgataattgcaattcagcaagcaataaagattgtgtgattgtgtttaacagctccaagggatgggtccacacagggcccccaggcaataactaatccctctgaaacaaac

SEQ ID NO: 421354 - DNA, 120 bp, Artificial Sequence
  ENSG00000150687_69 (sequence is synthesized)
agcttatttaagtcacctgacttctctaggcctcagattcctcagctataaaataatgagctagtttattatttcaaccaatgcttattaaacatccactttgtgtcaggctttgtgcaa

SEQ ID NO: 421355 - DNA, 120 bp, Artificial Sequence
  ENSG00000150687_70 (sequence is synthesized)
gaagctggaaatatttttaaagtatagacacagtatctgttctcagggtctcagtgtttaatgcgggaaaagatgcatcataagagaaaagtgctgtggacggcaaaggcaaaaacaact

SEQ ID NO: 421356 - DNA, 120 bp, Artificial Sequence
  ENSG00000150687_71 (sequence is synthesized)
cagcccaggagcttatctttaggattcttcccaaccccaaaagtctacgtgtatggcatttttttgtctgttcattttgttttggttgtcttttcacatgaatgttatttcattctttct

SEQ ID NO: 421357 - DNA, 120 bp, Artificial Sequence
  ENSG00000150687_72 (sequence is synthesized)
tgactagttgttttcaaatcattgttgcattgttgtcattatcatccattaccaattactaaacacatactgttaccccaaatgttgtaattaccccaactgttggtaattaccccaatg

SEQ ID NO: 421358 - DNA, 120 bp, Artificial Sequence
  ENSG00000150687_73 (sequence is synthesized)
actctaaaagttagacattataatcactattttttatataataacactgaagcccagagaggttaagtaacttacccaagctcacatcgctagaaagttacggaactgggattggagttg

SEQ ID NO: 421359 - DNA, 120 bp, Artificial Sequence
  ENSG00000150687_74 (sequence is synthesized)
acccctgccaactccaaagtacatgctctttctactacttggtgctgccttaggtatatgtagccacttaggacaaacatcatttacaggagcaggtgtgatataaaaatatgaggccct

SEQ ID NO: 421360 - DNA, 120 bp, Artificial Sequence
  ENSG00000150687_75 (sequence is synthesized)
ttgttcaaatattattgaaaatttcaagatagcaacagcaaagcattaaacaaagcacaaggcctgtctaagcacagggctctgaatgactgcccatgttgcaaacccaggaatccagcc

SEQ ID NO: 421361 - DNA, 120 bp, Artificial Sequence
  ENSG00000150687_76 (sequence is synthesized)
ctgccagccacaattcagtttgcaatggcatctcccactgaagcagaaaagcttcatagcaatttgcaggcccagatcacactcgcagaatgtttcagtgatcatgcttcacatgtagga

SEQ ID NO: 421362 - DNA, 120 bp, Artificial Sequence
  ENSG00000150687_77 (sequence is synthesized)
tttctggcactacccagagggttcattgtgaaccacctggcaggacttgggggctctgtgtggtggctttttcagagtagccctggcacctaacctaaagaatattaatatcatttctgg

SEQ ID NO: 421363 - DNA, 86 bp, Artificial Sequence
  ENSG00000150687_78 (sequence is synthesized)
ccctggcacctaacctaaagaatattaatatcatttctggtaatgccaattactttaaggctagagtgcaatggcacaatctcagc

SEQ ID NO: 421364 - DNA, 120 bp, Artificial Sequence
  ENSG00000150687_79 (sequence is synthesized)
ggattacaggcgtgaaccacagcgcccggccagccaattactttttttaatgtggggaaaggtatataatcttgctgaaagagttttgctccgtgtgatggttcatacctgtaatcccag

SEQ ID NO: 421365 - DNA, 68 bp, Artificial Sequence
  ENSG00000150687_80 (sequence is synthesized)
ttttaatgtggggaaaggtatataatcttgctgaaagagttttgctccgtgtgatggttcataagagt

SEQ ID NO: 421366 - DNA, 74 bp, Artificial Sequence
  ENSG00000150687_81 (sequence is synthesized)
gaccagcctgggaaacagagactgtacctgtagtaggaggctgagctgggaggatcacttgagcctgggaggtt

SEQ ID NO: 421367 - DNA, 120 bp, Artificial Sequence
  ENSG00000150687_82 (sequence is synthesized)
cagcctgggtgacagagtaaagaaaaaaaaaaaaaaagagttctggtcatacccttacacccttactcttacatttagaacatttagaacattaatgctgcataaatggaacatgtccaa

SEQ ID NO: 421368 - DNA, 120 bp, Artificial Sequence
  ENSG00000150687_83 (sequence is synthesized)
aagcctcttaggatgcaagcctcttttgaaattgcaaactgggaccagtacatgtgccctaatagagggcagtaggaaaaaaagcaagagctttgcagctgctggattacgaacctctct

SEQ ID NO: 421369 - DNA, 120 bp, Artificial Sequence
  ENSG00000150687_84 (sequence is synthesized)
actgaggcactaactcctattaaggtgttagctcctactgacccagcagaggctgagtaaagattgtcattttggtcaatgattcttaatcagtggtatttaatcttttgagatcacaga

SEQ ID NO: 421370 - DNA, 120 bp, Artificial Sequence
  ENSG00000150687_85 (sequence is synthesized)
ccccttctttgaaaagtatgaaccatctccccagaaaaaagacaggtgtatgtaaaatattcttgcattcaattgtagactctctgccttagccctagattttttaaaaccatattttaa

SEQ ID NO: 421371 - DNA, 120 bp, Artificial Sequence
  ENSG00000150687_86 (sequence is synthesized)
ttagccctagattttttaaaaccatattttaaagcatggctcccctaattatagaattgtcagaggcgtctgaaccagagcaactccatcttgagtaggggctgggtaaaataaggctga

SEQ ID NO: 421372 - DNA, 90 bp, Artificial Sequence
  ENSG00000150687_87 (sequence is synthesized)
caagatacaggtcatcaagaccttgctgataaaataggttgcagtaaagaagccagctgaagcccaccaaaaccaagatggccatgagag

SEQ ID NO: 421373 - DNA, 120 bp, Artificial Sequence
  ENSG00000150687_88 (sequence is synthesized)
tcaatctccttccattttagaaactatttgaaaaagctaaagaaactaatatgactcatttaggtggtttatttttatccccgtttctttatcattttaaaaataaaagttaaaaaaaaa

SEQ ID NO: 421374 - DNA, 120 bp, Artificial Sequence
  ENSG00000150712_0 (sequence is synthesized)
ggagccccagccgctagtgctggtggccgccgctgctgccccagctggagcccgagccgccgcctctgcgtccgcgcgtcgctgcttcccagggcggcggtatgctggggaaaggagtag

SEQ ID NO: 421375 - DNA, 120 bp, Artificial Sequence
  ENSG00000150712_1 (sequence is synthesized)
tcggcggtggcggcggcaccaaggcccccaagccctccttcgtgtcgtacgtacgccctgaggaaattcacacaaacgaaaaggaagtaacagagaaggaagtaactcttcacttgttgc

SEQ ID NO: 421376 - DNA, 120 bp, Artificial Sequence
  ENSG00000150712_2 (sequence is synthesized)
caggtgaacagctgctttgtgaagccagcacagtactgaagtatgtccaggaagattcctgtcagcatggggtctatgggaggcttgtctgcacagacttcaagattgccttcttgggtg

SEQ ID NO: 421377 - DNA, 120 bp, Artificial Sequence
  ENSG00000150712_3 (sequence is synthesized)
atgatgaatctgcattggataatgatgaaactcaatttaagaataaggttataggagaaaatgacattacactccactgtgttgatcagatttatggagtgtttgatgagaaaaagaaaa

SEQ ID NO: 421378 - DNA, 120 bp, Artificial Sequence
  ENSG00000150712_4 (sequence is synthesized)
ctctctttggacaactgaagaaataccctgagaagctcatcatccactgcaaagaccttcgagtgttccagttttgtctgaggtacacaaaggaagaggaagtcaaaaggattgtcagtg

SEQ ID NO: 421379 - DNA, 120 bp, Artificial Sequence
  ENSG00000150712_5 (sequence is synthesized)
gcataattcatcatacccaggctcctaaactgcttaaacgattatttctgttttcctatgcgactgctgcacaaaacaatacagtcactgatcccaagaaccataccgtaatgtttgaca

SEQ ID NO: 421380 - DNA, 120 bp, Artificial Sequence
  ENSG00000150712_6 (sequence is synthesized)
cacttaaggactggtgttgggaactggaacggaccaaaggcaacatgaagtacaaagcagtgagtgtcaacgaaggctataaagtctgtgagagattgccagcatactttgttgtcccca

SEQ ID NO: 421381 - DNA, 120 bp, Artificial Sequence
  ENSG00000150712_7 (sequence is synthesized)
cccctcttcctgaagagaatgtgcagcgctttcagggtcatggcataccaatatggtgttggtcctgccacaatggaagtgcccttttgaaaatgtcagcactgcccaaagaacaggatg

SEQ ID NO: 421382 - DNA, 120 bp, Artificial Sequence
  ENSG00000150712_8 (sequence is synthesized)
acggcattttacaaatccaaaagagcttcttagatggaatttacaagaccatccacaggccaccctatgaaattgttaaaacggaagacctgtcaagcaacttcctgtccctgcaggaaa

SEQ ID NO: 421383 - DNA, 120 bp, Artificial Sequence
  ENSG00000150712_9 (sequence is synthesized)
tccagactgcatactctaaatttaaacagctatttctgatagataacagtactgaattttgggacacagatataaaatggttttctctgttggaaagtagcagctggcttgacataatca

SEQ ID NO: 421384 - DNA, 120 bp, Artificial Sequence
  ENSG00000150712_10 (sequence is synthesized)
gacgttgcctgaaaaaagcaatagagattacagaatgtatggaagcacaaaacatgaatgttcttcttttagaggagaatgcatccgacctctgctgtctcatttcctctctggtgcaac

SEQ ID NO: 421385 - DNA, 120 bp, Artificial Sequence
  ENSG00000150712_11 (sequence is synthesized)
tgatgatggacccccactgcagaaccagaattggtttccagagcctcatccaaaaggagtgggtcatgggtggccactgtttcttggatcgctgcaaccatctccgccagaacgacaaag

SEQ ID NO: 421386 - DNA, 120 bp, Artificial Sequence
  ENSG00000150712_12 (sequence is synthesized)
aggaggttcctgtgttcctgcttttcctagattgtgtctggcagctggtgcaccagcatcccccggcatttgaattcacagagacttacctgactgttttgtcagatagcctgtatatac

SEQ ID NO: 421387 - DNA, 120 bp, Artificial Sequence
  ENSG00000150712_13 (sequence is synthesized)
ctatttttagcaccttcttcttcaattcacctcatcaaaaagatactaacatgggtagagaaggccaggatacacaaagcaagcctttgaatctgctcaccgtgtgggattggtcggtgc

SEQ ID NO: 421388 - DNA, 120 bp, Artificial Sequence
  ENSG00000150712_14 (sequence is synthesized)
agtttgaacccaaagcccagacattgctcaaaaaccctctttatgtggaaaagccaaaactggacaaaggccaacggaaaggaatgcgcttcaaacatcaacgacaactttctttgccac

SEQ ID NO: 421389 - DNA, 120 bp, Artificial Sequence
  ENSG00000150712_15 (sequence is synthesized)
ttacacaatctaagtcatctcccaaaagaggatttttcagggaagaaacagatcatttaattaaaaaccttctgggcaagagaattagcaaacttattaattcttctgatgagctccaag

SEQ ID NO: 421390 - DNA, 120 bp, Artificial Sequence
  ENSG00000150712_16 (sequence is synthesized)
acaactttcgagagttctatgacagctggcatagcaagtccactgactaccatggtttgttgttaccgcatatcgaggggcccgaaatcaaagtctgggcccagcgctacctacgttgga

SEQ ID NO: 421391 - DNA, 120 bp, Artificial Sequence
  ENSG00000150712_17 (sequence is synthesized)
ttccagaagcccaaatcctaggtggtggccaagtggccactctgagcaaactcttggaaatgatggaggaagtccagagtttacaagagaagatcgacgagagacaccacagccagcagg

SEQ ID NO: 421392 - DNA, 120 bp, Artificial Sequence
  ENSG00000150712_18 (sequence is synthesized)
ccccccaggctgaggccccctgcctgctgaggaactctgcccgcctctcgtctttgtttcctttcgctctgctccagcgacattcctctaagcccgtcttacccaccagtggctggaaag

SEQ ID NO: 421393 - DNA, 120 bp, Artificial Sequence
  ENSG00000150712_19 (sequence is synthesized)
ctttgggagatgaagacgatttggccaaacgagaagatgagttcgtggacctaggggatgtgtgacctgtttgttgagtgattgtgaaagaggaatgtgggagattgggacagctgatcc

SEQ ID NO: 421394 - DNA, 120 bp, Artificial Sequence
  ENSG00000150712_20 (sequence is synthesized)
ctggatttgtgtcacgctacagctcatgctggctgggtccttagcccggcactccgttagaataaacctgggccttcgggaaaagaggtggctctcattatttttcatgattctaaaaga

SEQ ID NO: 421395 - DNA, 120 bp, Artificial Sequence
  ENSG00000150712_21 (sequence is synthesized)
gttttctgatgcctaagtattatacagagcccacaatggccagtttactaccagaaagggcttcagtaagatattcttggacttgatactttcttcagatcctctttgtgccaagataat

SEQ ID NO: 421396 - DNA, 120 bp, Artificial Sequence
  ENSG00000150712_22 (sequence is synthesized)
ttatccagtcattgggaatagtaagtttctgtgtaacccatctcaattatagaagcaagttcagctttatgtatttgtatggggagttgaagattcagatagaggtattaagatgtgtgg

SEQ ID NO: 421397 - DNA, 120 bp, Artificial Sequence
  ENSG00000150712_23 (sequence is synthesized)
catttacttaaaccatcacatttttttctttctacgcccccttgcctgtaaaacacctgggaagttccactggtgtcatccatcctgatgcttcagaccaccctcccttcttcacagacc

SEQ ID NO: 421398 - DNA, 120 bp, Artificial Sequence
  ENSG00000150712_24 (sequence is synthesized)
gtgtcactttgcctgtgggtgggggctagccagccaccaccctcttttctgtgctgccagccccaggtcttcctccgcctgctccacaccactcgccgctgtccctctgcactccctgcc

SEQ ID NO: 421399 - DNA, 120 bp, Artificial Sequence
  ENSG00000150712_25 (sequence is synthesized)
ttggtgcgtgtagtcccagtgtctcactgccaaacctcttggttacgctgcggggatctgtttctttgcctgagatccttcctgaggagcgtccattcctctggagtctctccttgtttg

SEQ ID NO: 421400 - DNA, 120 bp, Artificial Sequence
  ENSG00000150712_26 (sequence is synthesized)
gaacaaatcgcttcgcctttttctacttgcctgctgaagctttggagcacttgtgattgcagttttctgccgcaacccctgagccgagttcctcacattcttttacctttatggactgat

SEQ ID NO: 421401 - DNA, 120 bp, Artificial Sequence
  ENSG00000150712_27 (sequence is synthesized)
gggattgggtcacttttgaatgtggctttcataggaaagcagcttaaacataaatatcagaagtgatgattatcatatgatacctcagtgattttaaaagccatagaagaaacttgacta

SEQ ID NO: 421402 - DNA, 120 bp, Artificial Sequence
  ENSG00000150712_28 (sequence is synthesized)
tgattttaaaagccatagaagaaacttgactatgcctggtcaccttcttggatctgctgtctaaatgatatatatatgatatatatgtgatatatatatatcatatatatgatatatata

SEQ ID NO: 421403 - DNA, 120 bp, Artificial Sequence
  ENSG00000150712_29 (sequence is synthesized)
atatatatatcacatatatatgatatatatatcatatatatgatatatattttttttaatgcaggaaagtatactttgtaaggagcagatttttttgttctcagtggaaccctgtcaaat

SEQ ID NO: 421404 - DNA, 120 bp, Artificial Sequence
  ENSG00000150712_30 (sequence is synthesized)
cgcataaaagaggaaaaaaacaaaactcattagaatgttttaaattgaatgttcgccttttacatatatttgctcttcagtatggatcccaatttgaatgttacatgttcggaaaaactt

SEQ ID NO: 421405 - DNA, 67 bp, Artificial Sequence
  ENSG00000150712_31 (sequence is synthesized)
tatggatcccaatttgaatgttacatgttcggaaaaactttcagttgctcaagggcaataagaaaat

SEQ ID NO: 421406 - DNA, 120 bp, Artificial Sequence
  ENSG00000150712_32 (sequence is synthesized)
tgagctaagatcgtgccactgcactccggcctgggtgatggagcaagacctcgtctcagaaaattggaaactattgactaagagaagtttctaggtttgcactgaattgtcttttgtaca

SEQ ID NO: 421407 - DNA, 120 bp, Artificial Sequence
  ENSG00000150712_33 (sequence is synthesized)
aattgtcttttgtacatacagtgaattgttttgctgttctccccactccatattaatgcaggagccaggttggtctgttaggatgaacaaaggttgaggggagggcaggattcgtgcatc

SEQ ID NO: 421408 - DNA, 120 bp, Artificial Sequence
  ENSG00000150712_34 (sequence is synthesized)
tgggggccaaacacatgttccgtcttgattgccttaagagttactagcgaggtcagtgttaggcttgcaatagggattttaaaatacactaactagttccttagctaccttcacatacat

SEQ ID NO: 421409 - DNA, 120 bp, Artificial Sequence
  ENSG00000150712_35 (sequence is synthesized)
tctataggccttcttaaattagcactaacctccacttccttctctgccccattgcctcccaaatatgctatggagctatttttgttaccacgttataacgtgaatatttatacagtagcc

SEQ ID NO: 421410 - DNA, 120 bp, Artificial Sequence
  ENSG00000150712_36 (sequence is synthesized)
tcttcaggctttgtaattttcattccaaaaatgcccggtgtgatgctttacactctacaaagtatggtttaaaggcacaaggtcatggcctttgtcatagcagttgaatgtgcattgaca

SEQ ID NO: 421411 - DNA, 120 bp, Artificial Sequence
  ENSG00000150712_37 (sequence is synthesized)
tatttttctatgattttttaaaattacaatagaaaaataagctgttgtaacgtgtaaggtcatgacaatttttgtatttatatttgaaatcagatttctataactcgtatttgtgtacag

SEQ ID NO: 421412 - DNA, 120 bp, Artificial Sequence
  ENSG00000150712_38 (sequence is synthesized)
aattctcaatggatttatatattgtgaaatttttatctgagattgggatgtggattatgcttaacagtgagagctgaaatgagaccatttactttgtttaaaatgctgtactgtgcaagt

SEQ ID NO: 421413 - DNA, 120 bp, Artificial Sequence
  ENSG00000150712_39 (sequence is synthesized)
ttggaaatgtaaattaatttactgtatataatatcttgagtttgtttatacctccaagtttttacactgaagataaactagctttaattcaaaactttttttttctttataagggaataa

SEQ ID NO: 421414 - DNA, 120 bp, Artificial Sequence
  ENSG00000150712_40 (sequence is synthesized)
gctgttgagctaaacctgtatacttgtgctttttattttctggatgcacaatgaaagtttatacttgtatctcactgcatcatatctgattgcagaaattaaagcacaatttacaagcaa

SEQ ID NO: 421415 - DNA, 120 bp, Artificial Sequence
  ENSG00000150712_41 (sequence is synthesized)
cttcacgccacaccgaaagcagcagttcctctgagctggttctgaacagggaaatatggtcccatctgcttaacactctgcttgtattcatcgtatccattgaagttgagctttcatatt

SEQ ID NO: 421416 - DNA, 120 bp, Artificial Sequence
  ENSG00000150712_42 (sequence is synthesized)
aaggagtagtcggcggtggcggcggcaccaaggcccccaagccctccttcgtgtcgtacgtacgccctgaggtcttgctctgttgcccagactggaatgcagtggtgtgatctcagctca

SEQ ID NO: 421417 - DNA, 120 bp, Artificial Sequence
  ENSG00000150722_0 (sequence is synthesized)
attgtgctgagaggatccaagggattggtgggggaacaggcaagccaggcatcaccgtggatgttgaagaagggggttactcaaacctcggcatcttcacttgctcgatctggaattaca

SEQ ID NO: 421418 - DNA, 120 bp, Artificial Sequence
  ENSG00000150722_1 (sequence is synthesized)
gctatttattacgaagcactctgtgtggcttagtggagtgtgtctgaggaaacacatcccggacaccacttagggttagtctttctgagctcttcacatctctgactaattatcatcatt

SEQ ID NO: 421419 - DNA, 120 bp, Artificial Sequence
  ENSG00000150722_2 (sequence is synthesized)
accatggagcccaacagtcccaaaaagatacagtttgccgtgcctgtattccagagtcagattgcacctgaagcagcagagcagatcaggaaaagaagacctacaccagcatcacttgtg

SEQ ID NO: 421420 - DNA, 120 bp, Artificial Sequence
  ENSG00000150722_3 (sequence is synthesized)
attctcaatgagcataaccccccagaaatagatgacaagagggggcccaacacacaaggggaattacagaatgcatcccctaagcaaaggaagcagagtgtgtacacaccacccaccata

SEQ ID NO: 421421 - DNA, 120 bp, Artificial Sequence
  ENSG00000150722_4 (sequence is synthesized)
aaaggggttaagcatctgaaaggccagaatgaatcagcattccctgaagaagaagaaggcaccaatgaaagagaggagcagcgggaccattaattactggtgcaaaatgagttgataaca

SEQ ID NO: 421422 - DNA, 120 bp, Artificial Sequence
  ENSG00000150722_5 (sequence is synthesized)
accagaagttgacttgttagtgctgtgcttctactcgagcttggaaaaatcccaacacaaaacaaacaccacctccgattccatcatgatgccacgttgctttctactggattacctcct

SEQ ID NO: 421423 - DNA, 120 bp, Artificial Sequence
  ENSG00000150722_6 (sequence is synthesized)
gaagcactttagatattttatacataagtattgacatgtttttcagaagctgtttcttcacttattgcttttttctaataatttttattacaccatttgccaagtccttccctttggttt

SEQ ID NO: 421424 - DNA, 120 bp, Artificial Sequence
  ENSG00000150722_7 (sequence is synthesized)
tagtttattcctctctacaactaaaaaagggatcttgagtttaggtacattttaagtgattcatttttagtttttctaattctggaatctgagccttctcttacaacagggagtctttca

SEQ ID NO: 421425 - DNA, 120 bp, Artificial Sequence
  ENSG00000150722_8 (sequence is synthesized)
aaaacatttttttgtttctttttcaaattccactgtgtttatttattgccttgtttctttttcaaattccattggtcttgatttaatttagttccacagattttactgatagtctactac

SEQ ID NO: 421426 - DNA, 120 bp, Artificial Sequence
  ENSG00000150722_9 (sequence is synthesized)
ctgccaactactgaattatgcagcagacttataaaaataaaaaggctattttattgttattgccatcctgctagtaaagatttattcaattatttataattaattaagtggcttcaccta

SEQ ID NO: 421427 - DNA, 120 bp, Artificial Sequence
  ENSG00000150722_10 (sequence is synthesized)
tatttctgttaataatcacattaattatgtatgacaggtaggatttatgttatagataagaaaactagagtccaaagaaaataagtgtccccaaatgaaccaataatccaacaaacgctt

SEQ ID NO: 421428 - DNA, 120 bp, Artificial Sequence
  ENSG00000150722_11 (sequence is synthesized)
ccactaactagcttctgacctgtttgagttgtgatagattttagaataaaaaagcctatcctccttaggagccatagacttttattctttcttatactgtcttatatattgacttagagc

SEQ ID NO: 421429 - DNA, 120 bp, Artificial Sequence
  ENSG00000150722_12 (sequence is synthesized)
cttcctccaattcagacataaagcataggcagatacttttgctaatgaggctaagctgggaagaaaaccctgagttctactttaattcttgggcattgacttcaaactaagatgacttat

SEQ ID NO: 421430 - DNA, 120 bp, Artificial Sequence
  ENSG00000150722_13 (sequence is synthesized)
aaagaagtaaatttgaaactttaataaaaaaagtacatggttcatttaaaaatgtttcctatgtctaaatctatattttaaaaataacctttatcatgtaaaatgagagaattgctgagt

SEQ ID NO: 421431 - DNA, 120 bp, Artificial Sequence
  ENSG00000150722_14 (sequence is synthesized)
tgctgagtttatgacaatcttaggtataaccttttcttaaagaacaaggcatcaatctttaatttgtttccctttcttgatttctcataagttgcaaaataaaaataaaaataatttcac

SEQ ID NO: 421432 - DNA, 120 bp, Artificial Sequence
  ENSG00000150722_15 (sequence is synthesized)
aaattgttcattattattatcctccctacttgccccaggatttaagtactaacttttacttcctactcttagactttgtattgccaaagaaataaaatatgaaaaagcataatcacccag

SEQ ID NO: 421433 - DNA, 120 bp, Artificial Sequence
  ENSG00000150722_16 (sequence is synthesized)
acctacctgcggaattgtggattatgctgtagatattagatcattgaaaggaacaatatactacttaatgaggagccaaagacaacattctacctgctgctcccttcaagctgaggaatg

SEQ ID NO: 421434 - DNA, 120 bp, Artificial Sequence
  ENSG00000150722_17 (sequence is synthesized)
agtttaattgacttcaaagtcccattattctcaaaagtagcaaaggtacaacatggctttgcatgaatcaaaggaagggaacaacaagaacttaaaaaaatagtttgcagatggttgaac

SEQ ID NO: 421435 - DNA, 120 bp, Artificial Sequence
  ENSG00000150722_18 (sequence is synthesized)
atctctttaataattagagaagaatatcttttctttctttattgtttacagataccaacatttttcaaagccttgcagtagatgagtgagtctcctgttacatttctcctgcagcatata

SEQ ID NO: 421436 - DNA, 120 bp, Artificial Sequence
  ENSG00000150722_19 (sequence is synthesized)
ttctgtggatgtgttttcctaagcagactaattatatgttgctctcttcttttaccctaatgaaacatagatttttctgttttgaatttgtcacttgtttgttacatttgtcaagtgttt

SEQ ID NO: 421437 - DNA, 120 bp, Artificial Sequence
  ENSG00000150722_20 (sequence is synthesized)
taaatattacattggtcctttatttgcttttgagaacacccaatagtttaaaaattaaaatgacatgaaggtcaattctaagacaggaatgatactactaaatcctggacttgcctatga

SEQ ID NO: 421438 - DNA, 120 bp, Artificial Sequence
  ENSG00000150722_21 (sequence is synthesized)
taacaagctcgagctacacacttttattgtcagaataaatggaatatataggaaggagttaattggaactggttagtacctaaataagatttttcaaagtaagttttttgtcgtattggc

SEQ ID NO: 421439 - DNA, 120 bp, Artificial Sequence
  ENSG00000150722_22 (sequence is synthesized)
agaacagtgttaaaaaatagacattgtcatcataaacacccacaactatatctgtagaagataatttaatgcaatattctggggaaaatacagttgccaaaattaatctccttgttttct

SEQ ID NO: 421440 - DNA, 120 bp, Artificial Sequence
  ENSG00000150722_23 (sequence is synthesized)
ttcattgtgcaatgtggagttaaattttttttctattgagcagtgtgtgtgtgtgtttgtgtctataatttatatatgtgcttgtatacatttctatatacacatgtatgtgtatgcaaa

SEQ ID NO: 421441 - DNA, 120 bp, Artificial Sequence
  ENSG00000150722_24 (sequence is synthesized)
gaactgctaggtactccttttggcctaaggacacagtgaaaaatgtaccgagaccttggagagccacgaaccaagaaacttcagaaacctctgatatctgatcaagagttaagagacgtc

SEQ ID NO: 421442 - DNA, 120 bp, Artificial Sequence
  ENSG00000150722_25 (sequence is synthesized)
agaatcatcacaactgacaaaaggtgctcccggattttgctctccagcttccggttcttggtctccaggctcctcactctgtccagaatgttttctctcttcaagattctcttttgaaag

SEQ ID NO: 421443 - DNA, 120 bp, Artificial Sequence
  ENSG00000150722_26 (sequence is synthesized)
atctctgcaccccacactcatacagtagctatgcacatcctggaagtctccttgactgaactttagaactaagtacacattgttccacatcacttataattaaagaataagcatttattt

SEQ ID NO: 421444 - DNA, 120 bp, Artificial Sequence
  ENSG00000150722_27 (sequence is synthesized)
agagagtaaaactgcctgtgaacaagaatgcttaagtgaacaatggtaaatctgatagaaaagcagggtcagagcaaaacagttgcaaagctcagagtgtaaactgcatgtcctcaggtc

SEQ ID NO: 421445 - DNA, 120 bp, Artificial Sequence
  ENSG00000150722_28 (sequence is synthesized)
aagcagaggatgaaaagcagaacaatctcctcattcaagaaacttcctggcggccagcaagctgagtaatgagaaacaaactgagtggaggccttccacagagggttaagcatctgaaag

SEQ ID NO: 421446 - DNA, 120 bp, Artificial Sequence
  ENSG00000150722_29 (sequence is synthesized)
atgtgactgttctaactttaatactgccagagcttaatccttgatgtcctactgataaggtttgcattctaacaacacatgtaaataacatcactttaagagtaaaaaataaatagtaaa

SEQ ID NO: 421447 - DNA, 120 bp, Artificial Sequence
  ENSG00000150722_30 (sequence is synthesized)
cacatttagacatgagtgtgtgtgtgtgtgtgtgtgggtttagcttaaagagaaatatctaataaagcttttagcttgagatttgcattgatcatatttctgtattcagaacagaacaca

SEQ ID NO: 421448 - DNA, 120 bp, Artificial Sequence
  ENSG00000150722_31 (sequence is synthesized)
atgttcatttttaaatgatgaagaaatgccagttttcttgattcaatacaccacaatattagatactaaacatctttttcccaccaacaacacattaatggttgattatacaactacaga

SEQ ID NO: 421449 - DNA, 120 bp, Artificial Sequence
  ENSG00000150722_32 (sequence is synthesized)
acacacacacacacacacacacaccccgcgcgcgcgcacacacacacaccccaccccaccaccccgacctccacatacattcccccgaccccctccagcagtgaagtctaagagcaccgc

SEQ ID NO: 421450 - DNA, 120 bp, Artificial Sequence
  ENSG00000150722_33 (sequence is synthesized)
ccccctccagcagtgaagtctaagagcaccgcgaagtaatttaaattttcgagggaaagcacagcgccatctgtcggacatcatgccaattactcttgttaagttcctacctgacggtta

SEQ ID NO: 421451 - DNA, 120 bp, Artificial Sequence
  ENSG00000150722_34 (sequence is synthesized)
ccaacacacaaggggaattacagaatgcatcccctaagcaaaggaagcagagtgtgtacacaccacccaccataaaaggtactgttcaggtactgtttcgggttgtcatgagtggtgaat

SEQ ID NO: 421452 - DNA, 120 bp, Artificial Sequence
  ENSG00000150722_35 (sequence is synthesized)
tagatctagtctcagctctacaacttaacagtgttatgttcagtaagatatcttatctacttaaaacttagtttcatcaagagtaaaatatggggttgaaaaagaaatagctagtgatct

SEQ ID NO: 421453 - DNA, 120 bp, Artificial Sequence
  ENSG00000150722_36 (sequence is synthesized)
cagaatttcagtctagaaattcagtttccaaaataatgacaaagatttttttttaccgttattcgcatacttccttaaagagattttcccagaagccctaattactcttgccagtgttgg

SEQ ID NO: 421454 - DNA, 120 bp, Artificial Sequence
  ENSG00000150750_0 (sequence is synthesized)
cagaaggctttcccaccagggtcaggctgagctttctagcagaccaggaccccttaccaaggagtgaacaccattcacaagaaattctgcactgctgttaagaaggaaatccaccagaaa

SEQ ID NO: 421455 - DNA, 120 bp, Artificial Sequence
  ENSG00000150750_1 (sequence is synthesized)
catccagaatggaaagtgtcccaggagactacagcaaacgagtgtatcaaggagtgagagtgaagcatacagtcaaagatctcctggcagaaaaacgatccgggcagacaagtaactcaa

SEQ ID NO: 421456 - DNA, 120 bp, Artificial Sequence
  ENSG00000150750_2 (sequence is synthesized)
gacttaatggcagcgtcagttcctctcagtctccatttgtgcagatgccaggttcgccggtcacgtcaggttactacggtgtcagaagatctttcttatctgactcagacttccacaaca

SEQ ID NO: 421457 - DNA, 120 bp, Artificial Sequence
  ENSG00000150750_3 (sequence is synthesized)
gtaaacagttttcaaatgacgtctacacctccagcgtggggaagccgtttccctgtgagtcctccgcagggcagagccatgcggctctcctggagccctacttcccccaggagccctacg

SEQ ID NO: 421458 - DNA, 120 bp, Artificial Sequence
  ENSG00000150750_4 (sequence is synthesized)
gagactaccggcctccggcgctgacgcccaacgcgggctctctgttcagcgcctcgcccctaccgccgctcctgccaccgcccttccccggagacccagctcacttcctatttagggact

SEQ ID NO: 421459 - DNA, 120 bp, Artificial Sequence
  ENSG00000150750_5 (sequence is synthesized)
cggtctcagccagcctgaccctgtgtctgccgatgccctgctgaccttgccacccagcacgagttgcctctcccagcttgagtccgggagcatcgcccagcacaggggctcaagctgggg

SEQ ID NO: 421460 - DNA, 120 bp, Artificial Sequence
  ENSG00000150750_6 (sequence is synthesized)
gtcatccctggctggggctcagtcatactcgctgcatgctctggaagatctgcaccacactccggggtaccctaccccgcctccttaccccttcacccctttcatgacggtgtcaaatga

SEQ ID NO: 421461 - DNA, 120 bp, Artificial Sequence
  ENSG00000150750_7 (sequence is synthesized)
cctaccgcccaaggtggggccactctccccagatgaggaagcagacaccggttccctccatgacccttccccttgggtgaaagaagatgggagtattgcctgggggtcatatgaatgccg

SEQ ID NO: 421462 - DNA, 120 bp, Artificial Sequence
  ENSG00000150750_8 (sequence is synthesized)
cagagcttattgaggggagggccaaatgacttctgggtttttctttaacttgaggtgtattccaaagattgttttaggtgtgtcagcccattcaggactggattttcagaataagcctca

SEQ ID NO: 421463 - DNA, 120 bp, Artificial Sequence
  ENSG00000150750_9 (sequence is synthesized)
atgctgctctttgttagtggacgagggcatttatttgtaatcctctccactgtaaccccactgaaataaaacagaatgttaattaaatgtgtcagagaccgtattctagtaagataacct

SEQ ID NO: 421464 - DNA, 120 bp, Artificial Sequence
  ENSG00000150750_10 (sequence is synthesized)
tacaatgtggtctttttggaactgttgtaacccattacgttctgaatcttctgttatctttgaagtatcatttttggcactgatttttcttaaattacattaaaaagtttatgcagatca

SEQ ID NO: 421465 - DNA, 120 bp, Artificial Sequence
  ENSG00000150753_0 (sequence is synthesized)
gcattctcgcttccgtagcggtctccgccggttggggggaagtaattccggttgttgcaccatggcgtccatggggaccctcgccttcgatgaatatgggcgccctttcctcatcatcaa

SEQ ID NO: 421466 - DNA, 120 bp, Artificial Sequence
  ENSG00000150753_1 (sequence is synthesized)
ggatcaggaccgcaagtcccgtcttatgggacttgaggccctcaagtctcatataatggcagcaaaggctgtagcaaatacaatgagaacatcacttggaccaaatgggcttgataagat

SEQ ID NO: 421467 - DNA, 120 bp, Artificial Sequence
  ENSG00000150753_2 (sequence is synthesized)
gatggtggataaggatggagatgtgactgtaactaatgatggggccaccatcttaagcatgatggatgttgatcatcagattgccaagctgatggtggaactgtccaagtctcaggatga

SEQ ID NO: 421468 - DNA, 120 bp, Artificial Sequence
  ENSG00000150753_3 (sequence is synthesized)
tgaaattggagatggaaccacaggagtggttgtcctggctggtgccttgttagaagaagcggagcaattgctagaccgaggcattcacccaatcagaatagccgatggctatgagcaggc

SEQ ID NO: 421469 - DNA, 120 bp, Artificial Sequence
  ENSG00000150753_4 (sequence is synthesized)
tgctcgtgttgctattgaacacctggacaagatcagcgatagcgtccttgttgacataaaggacaccgaacccctgattcagacagcaaaaaccacgctgggctccaaagtggtcaacag

SEQ ID NO: 421470 - DNA, 120 bp, Artificial Sequence
  ENSG00000150753_5 (sequence is synthesized)
ttgtcaccgacagatggctgagattgctgtgaatgccgtcctcactgtagcagatatggagcggagagacgttgactttgagcttatcaaagtagaaggcaaagtgggcggcaggctgga

SEQ ID NO: 421471 - DNA, 120 bp, Artificial Sequence
  ENSG00000150753_6 (sequence is synthesized)
ggacactaaactgattaagggcgtgattgtggacaaggatttcagtcacccacagatgccaaaaaaagtggaagatgcgaagattgcaattctcacatgtccatttgaaccacccaaacc

SEQ ID NO: 421472 - DNA, 120 bp, Artificial Sequence
  ENSG00000150753_7 (sequence is synthesized)
aaaaacaaagcataagctggatgtgacctctgtcgaagattataaagcccttcagaaatacgaaaaggagaaatttgaagagatgattcaacaaattaaagagactggtgctaacctagc

SEQ ID NO: 421473 - DNA, 120 bp, Artificial Sequence
  ENSG00000150753_8 (sequence is synthesized)
aatttgtcagtggggctttgatgatgaagcaaatcacttacttcttcagaacaacttgcctgcggttcgctgggtaggaggacctgaaattgagctgattgccatcgcaacaggagggcg

SEQ ID NO: 421474 - DNA, 120 bp, Artificial Sequence
  ENSG00000150753_9 (sequence is synthesized)
gatcgtccccaggttctcagagctcacagccgagaagctgggctttgctggtcttgtacaggagatctcatttgggacaactaaggataaaatgctggtcatcgagcagtgtaagaactc

SEQ ID NO: 421475 - DNA, 120 bp, Artificial Sequence
  ENSG00000150753_10 (sequence is synthesized)
cagagctgtaaccatttttattagaggaggaaataagatgatcattgaggaggcgaaacgatcccttcacgatgctttgtgtgtcatccggaacctcatccgcgataatcgtgtggtgta

SEQ ID NO: 421476 - DNA, 120 bp, Artificial Sequence
  ENSG00000150753_11 (sequence is synthesized)
tggaggaggggctgctgagatatcctgtgccctggcagttagccaagaggcggataagtgccccaccttagaacagtatgccatgagagcgtttgccgacgcactggaggtcatccccat

SEQ ID NO: 421477 - DNA, 120 bp, Artificial Sequence
  ENSG00000150753_12 (sequence is synthesized)
ggccctctctgaaaacagtggcatgaatcccatccagactatgaccgaagtccgagccagacaggtgaaggagatgaaccctgctcttggcatcgactgtttgcacaaggggacaaatga

SEQ ID NO: 421478 - DNA, 120 bp, Artificial Sequence
  ENSG00000150753_13 (sequence is synthesized)
ctcttgcaacacaaatggttagaatgattttgaagattgatgacattcgtaagcctggagaatctgaagaatgaagacattgagaaaactatgtagcaagatccacttctgtgattaagt

SEQ ID NO: 421479 - DNA, 120 bp, Artificial Sequence
  ENSG00000150753_14 (sequence is synthesized)
aaatggatgtctcgtgatgcatctacagttatttattgttacatccttttccagacactgtagatgctataataaaaatagctgtttggtaaccatagtttcacttgttcaaagctgtgt

SEQ ID NO: 421480 - DNA, 120 bp, Artificial Sequence
  ENSG00000150753_15 (sequence is synthesized)
aatcgtgggggtaccatctcaactgcttttgtattcattgtattaaaagaatctgtttaaacaacctttatcttctcttcgggtttaagaaacgtttattgtaacagtaattaaatgctg

SEQ ID NO: 421481 - DNA, 120 bp, Artificial Sequence
  ENSG00000150753_16 (sequence is synthesized)
ccttaattgaaggggtttgggtggatttttttttctcaaaataagctgtagggactattttaacagcttaaacaggagctctcaagatgcactttcatattgagaggaatatgggcttga

SEQ ID NO: 421482 - DNA, 120 bp, Artificial Sequence
  ENSG00000150753_17 (sequence is synthesized)
tcctcttcctatctaaatgggtgggccatttgattgtagagggtccaccacagaattatgggatgccttaagtgctgttactaggttgctcacagcctaacctggcgtgttgtttagggc

SEQ ID NO: 421483 - DNA, 120 bp, Artificial Sequence
  ENSG00000150753_18 (sequence is synthesized)
tgatggagacccatgtgagcctttgctttcctctggccccggccccaccctgaacacagctcatacacagaatcaggaccagcatgtgcagagctggccaccagcacaggcttagggcag

SEQ ID NO: 421484 - DNA, 120 bp, Artificial Sequence
  ENSG00000150753_19 (sequence is synthesized)
ttcagaacccacttgtttccctatcagagggacacagtgaagtggaggttaaagtaaattacaggaaataagggagaaatcttgcagttaccatgttcagatagagtgactgaaattaat

SEQ ID NO: 421485 - DNA, 120 bp, Artificial Sequence
  ENSG00000150753_20 (sequence is synthesized)
tgtacttactaaagtattaactagctaacagtgatgggccaagacgctccgagaactctaccgggattgtctgttctgacaacccagtgaggcagatacactttcttactgctcacatct

SEQ ID NO: 421486 - DNA, 120 bp, Artificial Sequence
  ENSG00000150753_21 (sequence is synthesized)
tacaggtgagtactcataattggccagcatctcaccaccagcaagtagtagggccaggtcaatcccaggcagtctgaccccagagtggcccagctcatcccctactctgttatttgcttg

SEQ ID NO: 421487 - DNA, 120 bp, Artificial Sequence
  ENSG00000150753_22 (sequence is synthesized)
ttaatgattctctagattttctaaaataatgtttcttagcattgtgatgataaagctcatgatgaactttatcactagttatgccaccttaactagtcagatttcctagaattaggaaat

SEQ ID NO: 421488 - DNA, 120 bp, Artificial Sequence
  ENSG00000150753_23 (sequence is synthesized)
ggtgactcttgtctaaatttggttaagtgatgaatttgggttaccgtctcatgtgaacctggagattcaccagtcttaacttttgggtcattgtgttttctctacattcatgcattggat

SEQ ID NO: 421489 - DNA, 120 bp, Artificial Sequence
  ENSG00000150753_24 (sequence is synthesized)
gttttgctaaataactcctgtggatttaggaatgtgtgctaatagcaatcttcctaattttcatgtttatatggaactatgcagttgagtattgaaagctttaaactgagtttatttaca

SEQ ID NO: 421490 - DNA, 120 bp, Artificial Sequence
  ENSG00000150753_25 (sequence is synthesized)
aggactgagtctagcctacagagaacatacagcagccttctttggaccacagtcttatccgaggggtctgtggttgtatcagaagagccactaaaccaatccccctttccaaaattgaac

SEQ ID NO: 421491 - DNA, 120 bp, Artificial Sequence
  ENSG00000150753_26 (sequence is synthesized)
ctcacagacgttcctgttttttgtgattgagaaactggtcaatgaacaggaagacttagagatgtttcacaagcctttgatttttgtttcatttatttgtaataaacctcttccacgtga

SEQ ID NO: 421492 - DNA, 120 bp, Artificial Sequence
  ENSG00000150753_27 (sequence is synthesized)
atgtgctccccggaaaggtcgagaatctccgtctccctgcggtctccggccgctcagcccgcttactgagctcgggagacgccggcgcctaatcctgggctcggaatgtgggggccagcc

SEQ ID NO: 421493 - DNA, 120 bp, Artificial Sequence
  ENSG00000150753_28 (sequence is synthesized)
ccgccagcgcccttcggagctgggtggggccgctcagtccggtcgcccgcgggagcaaagcgggaccgcctccccgcccggctcctccagcctgacggccgcgtgggactgcgctccagt

SEQ ID NO: 421494 - DNA, 120 bp, Artificial Sequence
  ENSG00000150753_29 (sequence is synthesized)
gctccagtgggagggcgccggggagatgctctgtcacctgtcggttaaggcgctgctgcttaacctttcgctggtccacccgcaacggcccttccgttttctttgtcactcgtaaagtct

SEQ ID NO: 421495 - DNA, 120 bp, Artificial Sequence
  ENSG00000150753_30 (sequence is synthesized)
caggtttcttaaacatggttataatcgtgtgcaatattaggtcggacctttttttttttttttttagcatgtaacatcatttcattagcattttccaaatcatagttgtcttttgagatt

SEQ ID NO: 421496 - DNA, 120 bp, Artificial Sequence
  ENSG00000150753_31 (sequence is synthesized)
aacattatacttaatgatgctccataatgttttgccaattatgttagccaatctaaaaatgccttcatgcagctactattttgtgtatgttgcattatttgtatataataaattgcacag

SEQ ID NO: 421497 - DNA, 120 bp, Artificial Sequence
  ENSG00000150753_32 (sequence is synthesized)
tttattagaggaggaaataagatggtgagaattcaactatttgtcctatactgttgcttattttgcttcatggtctggcttttttgcctgtgtgtatttaacagagacacagtcaccata

SEQ ID NO: 421498 - DNA, 120 bp, Artificial Sequence
  ENSG00000150753_33 (sequence is synthesized)
agaaaaataatcgtggttctcaaacaatgacgtatcatggtgtaaaattactgaagaccatgttaaattgttaatttcacaaggcacatttgcctttctgctgtcccttagagtatacaa

SEQ ID NO: 421499 - DNA, 120 bp, Artificial Sequence
  ENSG00000150753_34 (sequence is synthesized)
tatacactatgagatttttatatctttttaaatacttaaacacagtttaaatattcaagtcctggattttagaatgtttgatacagttacattaggggttggttaaactgctagccctag

SEQ ID NO: 421500 - DNA, 120 bp, Artificial Sequence
  ENSG00000150753_35 (sequence is synthesized)
caacataagactcattttaattacaatatggtattattaccaaggatgacttacatctgtcccttaggtagaaaaagggaacccaagtgaataaccattgacgatctctgttctttgaga

SEQ ID NO: 421501 - DNA, 120 bp, Artificial Sequence
  ENSG00000150753_36 (sequence is synthesized)
acattgtgataaatctttgcgagttttgtcagtttttgactcttgcttgaccgtgtatcctagaatgagtcactggccgcctctgcctcttgaattttgttaactacattgcaggaagga

SEQ ID NO: 421502 - DNA, 120 bp, Artificial Sequence
  ENSG00000150753_37 (sequence is synthesized)
aagctagaaagataaatattatccgatagtggaggccatctaaatattagagcacagcctctctgtctttaaaaaggtgccagatacttggctctaaattgactagatcttgatcacatt

SEQ ID NO: 421503 - DNA, 120 bp, Artificial Sequence
  ENSG00000150753_38 (sequence is synthesized)
atgtaattttttcctatctaagtatacagtcccctttagggcccatggatcacaggttaagaatctgccccagactgttgaaaatgcaggttgagatggcattcccctctagaagactca

SEQ ID NO: 421504 - DNA, 120 bp, Artificial Sequence
  ENSG00000150753_39 (sequence is synthesized)
gggttcatcttatgtgttgaggggtgttttgatagccctgccttaaataactgcatcacaccaaggctggcagatgaggggagggtgagctgggagagaggaaagcgctggaatctttgt

SEQ ID NO: 421505 - DNA, 120 bp, Artificial Sequence
  ENSG00000150753_40 (sequence is synthesized)
tactgtttggataacagtgctgtgtgtttctggtgttccctggcattttgaaattctctccctgtgttgtctcacttggccctgtcgttgacttactaaggctggaagacctggtctcat

SEQ ID NO: 421506 - DNA, 120 bp, Artificial Sequence
  ENSG00000150753_41 (sequence is synthesized)
aaaaaaccggaaatgggtcctaccatcttctcggagccggagtgcgaagaaataaagaaatagtgctttaagtcaatgaattcctccttgggacccactatcgagaaactatcagtgtct

SEQ ID NO: 421507 - DNA, 120 bp, Artificial Sequence
  ENSG00000150753_42 (sequence is synthesized)
agattgttgtctctgaatcagagcatgaggagacagacaaatccaagttgaaaacatgctacaaaacaaatgtcggactttcaaaactgacagtgttacaaaagaacagaaagagggctg

SEQ ID NO: 421508 - DNA, 120 bp, Artificial Sequence
  ENSG00000150756_0 (sequence is synthesized)
gttggaaatctcgcgatggagggaggaggaggtatacccctagaaacacttaaagaagaaagtcagtcaagacatgttctacctgcaagttttgaagtcaacagtttgcagaaaagcaac

SEQ ID NO: 421509 - DNA, 120 bp, Artificial Sequence
  ENSG00000150756_1 (sequence is synthesized)
tgggggttcttacttactgggcttgtgggtggcaccctggtggctgtgtacgctgtagccacgccgtttgtaacgccagcccttcgaaaagtctgtttgccgtttgtacctgcaactacg

SEQ ID NO: 421510 - DNA, 120 bp, Artificial Sequence
  ENSG00000150756_2 (sequence is synthesized)
aagcagattgaaaatgttgtgaaaatgttgcgatgccgaagaggatcccttgtggacatcggtagtggggacggacgcattgtcatagcggctgcgaagaaagggttcacagcagttggt

SEQ ID NO: 421511 - DNA, 120 bp, Artificial Sequence
  ENSG00000150756_3 (sequence is synthesized)
tatgaattaaacccatggctagtttggtattccagataccgcgcttggcgagaaggtgtgcatggatctgccaaattttatatttcagatttgtggaaggttactttttcgcagtactcg

SEQ ID NO: 421512 - DNA, 120 bp, Artificial Sequence
  ENSG00000150756_4 (sequence is synthesized)
aacgttgttattttcggtgtgcctcagatgatgctgcagttggagaagaaacttgaacgtgaacttgaggatgatgcacgagttattgcttgccggttccctttcccacattggactcca

SEQ ID NO: 421513 - DNA, 120 bp, Artificial Sequence
  ENSG00000150756_5 (sequence is synthesized)
gaccacgtcacgggggaggggatagacacagtgtgggcatatgatgcaagcacttttagaggccgtgaaaagaggccctgtacatcgatgcatttccagctgcccattcaagcataaact

SEQ ID NO: 421514 - DNA, 120 bp, Artificial Sequence
  ENSG00000150756_6 (sequence is synthesized)
tgactgggagtgtttttctgaaatattgtagtcttccctgatcttgtagagacttacagctgtgtccttagcaaaggagcataattgtctttggtttggaatgagaaattactattactt

SEQ ID NO: 421515 - DNA, 120 bp, Artificial Sequence
  ENSG00000150756_7 (sequence is synthesized)
tccttaactgttggagaaaacaaacgaagaaaaacaggtagatttaaaatctgcttttgatgctattttcttaaaaattgtacttactgcctttccatgcacctggatgcatgaaaagat

SEQ ID NO: 421516 - DNA, 120 bp, Artificial Sequence
  ENSG00000150756_8 (sequence is synthesized)
gaataagtgatggtcatggttatgggtaggaaaataagatgccaatagctcttcacattataaacaatatggcttaatgcctcgataaggagaaatgatttttaaagacagtatatatta

SEQ ID NO: 421517 - DNA, 120 bp, Artificial Sequence
  ENSG00000150756_9 (sequence is synthesized)
ccaactgtttgtagtatcctataactttgttcatacttaagttgtatctctttcctttttgtacttcatggcaaaattaattttctaaaggattcagagaggcgtttatattttataaca

SEQ ID NO: 421518 - DNA, 120 bp, Artificial Sequence
  ENSG00000150756_10 (sequence is synthesized)
tttattagaaataatttgttccaccactagattactgtattttatggaatctaagctgtatatgtgtacatttgtatacatgtatgtgtaaatgtaagcctgacgtgggttcagattcca

SEQ ID NO: 421519 - DNA, 120 bp, Artificial Sequence
  ENSG00000150756_11 (sequence is synthesized)
agcaagaggcctcggacccatgacttactgcctctgagccttggctttctgtgtatctctgccactgggataatggtacacataacagtggagtggggaccaatttctaaaactcatggc

SEQ ID NO: 421520 - DNA, 120 bp, Artificial Sequence
  ENSG00000150756_12 (sequence is synthesized)
acctagtctttggtccataaatggtgtttgttattttagacactgagaaaaatcttattcacagaagttgcagattatttctgctagtcacttttttatttcttgagagctgccactcat

SEQ ID NO: 421521 - DNA, 120 bp, Artificial Sequence
  ENSG00000150756_13 (sequence is synthesized)
ttaatatttctcatttatgagaagagacttgactgatttagataaaagacgaattaaggaaaacctttgaacgtgagtagacaagcttcatatatctgtaaagtgaatattgaatggtag

SEQ ID NO: 421522 - DNA, 120 bp, Artificial Sequence
  ENSG00000150756_14 (sequence is synthesized)
cttgagtcattcgtacttatcacagaaaagaattgaactcccagtcatacacctgtaactgaaataccaaactgtcttaatggagatgtaatgaagtaagatggtcacatctttaactaa

SEQ ID NO: 421523 - DNA, 120 bp, Artificial Sequence
  ENSG00000150756_15 (sequence is synthesized)
acttataaaaattggtcagtttgatcattttcatttaaatgagaaacatctggggacacattcattcattcaacaaatatgtattcagtatctactgtagaagaagctctgagattctgc

SEQ ID NO: 421524 - DNA, 120 bp, Artificial Sequence
  ENSG00000150756_16 (sequence is synthesized)
ggtaaatagacatgcaaagcccctggcctcatggaattcctattctggaaaggagagacaaacaaataagcaagggaatcttagtgtgtgtggagttctctgaagtaaacagtgtgatgg

SEQ ID NO: 421525 - DNA, 120 bp, Artificial Sequence
  ENSG00000150756_17 (sequence is synthesized)
tgtagagagcacctgtgtgagtctgagatgaggggatgtgatgttgtggacttcagccaggtttttggcagctagtgtctgtccctttttcagtagctccagtcttcttatgaagaatga

SEQ ID NO: 421526 - DNA, 120 bp, Artificial Sequence
  ENSG00000150756_18 (sequence is synthesized)
gttctttctgtggtgtgtgactttagtgggagggcagctcttgctctatgcctctcagttgccttccactgtaaccagtcctgtaactggtctgggcacactcggagggggatccatggt

SEQ ID NO: 421527 - DNA, 120 bp, Artificial Sequence
  ENSG00000150756_19 (sequence is synthesized)
agctccttgccatgaagatgtgggtagaggagggttctgtggggcctcggaggtgttcaacattttctagaagtgttcctggtgggtttatagaggcattgatatggtttggctgtgtcc

SEQ ID NO: 421528 - DNA, 120 bp, Artificial Sequence
  ENSG00000150756_20 (sequence is synthesized)
agtgagtaagtttaatgagatctgatggttattttaggggggagttttcctgcacaagctctttttgcctactaccattcacgtaagatattccagccacatggaactgtaagtccaatt

SEQ ID NO: 421529 - DNA, 84 bp, Artificial Sequence
  ENSG00000150756_21 (sequence is synthesized)
aaaacgctgttggaaatctcgcgatggagggaggaggaggctggtctcaaattcccgggctcaagcgatcttctacccctagaa

SEQ ID NO: 421530 - DNA, 120 bp, Artificial Sequence
  ENSG00000150756_22 (sequence is synthesized)
aagaaaaataattaaaatccaagtgaatattctggcataatgaaatatgtaaaattgatacgttttacaaatagtctcctttagagagaagcttaaagtttttatatgataggtcttgtg

SEQ ID NO: 421531 - DNA, 120 bp, Artificial Sequence
  ENSG00000150756_23 (sequence is synthesized)
ataggtcttgtgaattccaagaatttatttactaaattaaaatgttgtcatttctgtttcttacaaaataatgagatttttcatctcatttggaaatcctataaattattattgataaat

SEQ ID NO: 421532 - DNA, 120 bp, Artificial Sequence
  ENSG00000150756_24 (sequence is synthesized)
gtgctagcccactgatggagagatgcagtggattttcagcaatgttttgttcgacctccccgggggttggctgacctagaatcaattatggaggtgttccaagtgaacctgaatgtctat

SEQ ID NO: 421533 - DNA, 120 bp, Artificial Sequence
  ENSG00000150760_0 (sequence is synthesized)
ctccgccgcaaactttttcctccccatcctgtcgcggctcgaaaggaatggaaaatggcggcctagacgcggagtttcctgcccgacccgcggcggctccggcggcgccatgacgcgctg

SEQ ID NO: 421534 - DNA, 120 bp, Artificial Sequence
  ENSG00000150760_1 (sequence is synthesized)
ggtgcccaccaagcgcgaggagaagtacggcgtggctttttataactatgatgccagaggagcggatgaactttctttacagatcggagacactgtgcacatcttagaaacatatgaagg

SEQ ID NO: 421535 - DNA, 120 bp, Artificial Sequence
  ENSG00000150760_2 (sequence is synthesized)
gtggtaccgaggttacacgttacgaaaaaagtctaagaagggtatatttcctgcttcatatattcatcttaaagaagcgatagttgaaggaaaagggcaacatgaaacagtcatcccggg

SEQ ID NO: 421536 - DNA, 120 bp, Artificial Sequence
  ENSG00000150760_3 (sequence is synthesized)
tgacctccccctcatccaggaagtcaccacgacactccgagagtggtccaccatctggaggcagctctacgtgcaagataacagggagatgtttcgaagtgtgcggcacatgatctatga

SEQ ID NO: 421537 - DNA, 120 bp, Artificial Sequence
  ENSG00000150760_4 (sequence is synthesized)
ccttattgaatggcgatcacaaattctttctggaactctgcctcaggatgaactcaaagaactgaagaagaaggtcacagccaaaattgattatggaaacagaattctagatttggacct

SEQ ID NO: 421538 - DNA, 120 bp, Artificial Sequence
  ENSG00000150760_5 (sequence is synthesized)
ggtggttagagatgaagatgggaatattttggatccagaattaactagcacgattagtctcttcagagctcatgaaatagcttctaaacaagtggaggaaaggttacaagaggaaaaatc

SEQ ID NO: 421539 - DNA, 120 bp, Artificial Sequence
  ENSG00000150760_6 (sequence is synthesized)
tcaaaagcagaacatagatattaacagacaagccaagtttgctgcaaccccttctctggccttgtttgtgaacctcaaaaatgtggtttgtaaaataggagaagatgctgaagtcctcat

SEQ ID NO: 421540 - DNA, 120 bp, Artificial Sequence
  ENSG00000150760_7 (sequence is synthesized)
gtctctatatgaccctgtggagtccaaattcatcagtgagaactacctggttcgctggtccagttcaggattacctaaagacatagacagattacataatttgcgagccgtgtttactga

SEQ ID NO: 421541 - DNA, 120 bp, Artificial Sequence
  ENSG00000150760_8 (sequence is synthesized)
cctcggaagcaaagacctgaaaagggagaaaatcagttttgtctgtcagattgttcgcgtgggtcgcatggagctgagggacaacaacaccaggaaactgacctcggggttgcggcgacc

SEQ ID NO: 421542 - DNA, 120 bp, Artificial Sequence
  ENSG00000150760_9 (sequence is synthesized)
ttttggagtggctgtgatggatgtaacagatataataaatggaaaagtagatgatgaagataagcagcatttcattccctttcagccggtggcaggggagaatgacttccttcagactgt

SEQ ID NO: 421543 - DNA, 120 bp, Artificial Sequence
  ENSG00000150760_10 (sequence is synthesized)
tataaacaaagtcatcgctgccaaagaagtcaaccacaaggggcagggtttgtgggtaacattgaaattacttcctggagatatccatcagatccgaaaagagtttccgcatttagtgga

SEQ ID NO: 421544 - DNA, 120 bp, Artificial Sequence
  ENSG00000150760_11 (sequence is synthesized)
caggaccacagctgtggctcgaaaaacagggtttccggagataatcatgcctggtgatgttcgaaatgatatctatgtaacattagttcaaggagattttgataaaggaagcaaaacaac

SEQ ID NO: 421545 - DNA, 120 bp, Artificial Sequence
  ENSG00000150760_12 (sequence is synthesized)
agcgaagaacgtggaggtcacggtgtctgtgtacgatgaggatgggaaacgattagagcatgtgattttcccgggtgctggtgatgaagcgatttcagagtacaaatctgtgatttacta

SEQ ID NO: 421546 - DNA, 120 bp, Artificial Sequence
  ENSG00000150760_13 (sequence is synthesized)
ccaagtaaagcagccacgctggtttgagactgttaaggtggccattcccatcgaggacgttaaccgcagtcaccttcggtttaccttccgccacaggtcatcacaggactctaaggataa

SEQ ID NO: 421547 - DNA, 120 bp, Artificial Sequence
  ENSG00000150760_14 (sequence is synthesized)
atctgagaaaatatttgcactagcatttgtcaagctgatgagatacgatggtaccaccctgcgagacggagagcacgatcttatcgtctataaggccgaagcaaagaagctggaagatgc

SEQ ID NO: 421548 - DNA, 120 bp, Artificial Sequence
  ENSG00000150760_15 (sequence is synthesized)
tgccacgtacttgagtctgccctccacgaaggcagagttggaagaaaagggccactcggccaccggcaagagcatgcagagccttgggagctgcaccattagcaaggactccttccagat

SEQ ID NO: 421549 - DNA, 120 bp, Artificial Sequence
  ENSG00000150760_16 (sequence is synthesized)
ctccacgctcgtgtgctccaccaaactgactcagaacgtggaccttctggggctcttgaaatggcgctccaacaccagcctgctgcagcagaacttgaggcagctgatgaaagtcgatgg

SEQ ID NO: 421550 - DNA, 120 bp, Artificial Sequence
  ENSG00000150760_17 (sequence is synthesized)
tggtgaagtagtgaagtttcttcaggacacgttggatgccctcttcaacatcatgatggagaactcagagagtgagacttttgacacgttagtctttgatgctctggtatttatcattgg

SEQ ID NO: 421551 - DNA, 120 bp, Artificial Sequence
  ENSG00000150760_18 (sequence is synthesized)
actgattgctgatagaaaatttcagcattttaatcctgttttggaaacttacattaagaaacactttagtgcaacgttagcctacacgaagttgacaaaagtgttgaagaactacgtgga

SEQ ID NO: 421552 - DNA, 120 bp, Artificial Sequence
  ENSG00000150760_19 (sequence is synthesized)
cggtgctgagaagccgggagtaaatgagcagctgtacaaagccatgaaagcgctagaatccatcttcaagttcatcgtgcgctccaggatcctgttcaatcaactgtatgaaaacaaggg

SEQ ID NO: 421553 - DNA, 120 bp, Artificial Sequence
  ENSG00000150760_20 (sequence is synthesized)
agaggctgacttcgtggaatctttgctgcagctcttcaggtccatcaatgacatgatgagcagcatgtcagaccagaccgtccgggtgaagggggcagcactgaaatacttaccaacgat

SEQ ID NO: 421554 - DNA, 120 bp, Artificial Sequence
  ENSG00000150760_21 (sequence is synthesized)
cgtcaacgatgtgaaattggtgtttgatcccaaagagctcagcaaaatgtttactgaattcatcctcaatgttcccatgggcttgctgaccatccagaaactctactgcttgatcgaaat

SEQ ID NO: 421555 - DNA, 120 bp, Artificial Sequence
  ENSG00000150760_22 (sequence is synthesized)
cgtccacagtgacctcttcacacagcatgactgcagagagatcctgcttcccatgatgaccgatcagctcaagtaccatctggagagacaggaggacctggaggcctgctgtcagctgct

SEQ ID NO: 421556 - DNA, 120 bp, Artificial Sequence
  ENSG00000150760_23 (sequence is synthesized)
cagccacatcctggaggtgctgtacaggaaggacgtggggccaacccagaggcacgtccagattatcatggagaaacttctccggaccgtgaaccgaaccgtcatttccatgggacgaga

SEQ ID NO: 421557 - DNA, 120 bp, Artificial Sequence
  ENSG00000150760_24 (sequence is synthesized)
ttctgaactcattggaaacttcgtggcttgcatgacagctattttacgacaaatggaagattaccattatgcccacttgatcaagacttttgggaaaatgaggactgatgtggtagattt

SEQ ID NO: 421558 - DNA, 120 bp, Artificial Sequence
  ENSG00000150760_25 (sequence is synthesized)
cctaatggaaacattcatcatgtttaagaacctcattggaaagaacgtttaccccttcgactgggtgatcatgaacatggtgcaaaataaagtcttcctgcgagcaattaatcagtatgc

SEQ ID NO: 421559 - DNA, 120 bp, Artificial Sequence
  ENSG00000150760_26 (sequence is synthesized)
agatatgctgaacaaaaaatttctggatcaagccaactttgagctacagctgtggaacaactactttcacctggctgttgctttccttactcaagagtccctgcaactggagaatttttc

SEQ ID NO: 421560 - DNA, 120 bp, Artificial Sequence
  ENSG00000150760_27 (sequence is synthesized)
aagtgccaagagagccaaaatccttaacaagtacggagatatgaggagacagattggctttgaaatcagagacatgtggtacaaccttggtcaacacaagataaagttcattccagaaat

SEQ ID NO: 421561 - DNA, 120 bp, Artificial Sequence
  ENSG00000150760_28 (sequence is synthesized)
tgatgcagtgtgaattccattcgacccgaagcttccaaatgtttgaaaatgagatcatcaccaagctggatcatgaagtcgaaggaggcagaggagacgaacagtacaaagtgttatttg

SEQ ID NO: 421562 - DNA, 120 bp, Artificial Sequence
  ENSG00000150760_29 (sequence is synthesized)
ataaaatccttctggaacactgcaggaagcacaaatacctcgccaaaacaggagaaacttttgtaaaactcgttgtgcgcttaatggaaaggcttttggattatagaaccatcatgcacg

SEQ ID NO: 421563 - DNA, 120 bp, Artificial Sequence
  ENSG00000150760_30 (sequence is synthesized)
acgagaacaaagaaaaccgcatgagctgcaccgtcaatgtgctgaatttctacaaagaaattgaaagagaagaaatgtatataaggtatttgtacaagctctgtgacctgcacaaggagt

SEQ ID NO: 421564 - DNA, 120 bp, Artificial Sequence
  ENSG00000150760_31 (sequence is synthesized)
gtgataactacaccgaagcggcttacaccttgcttctccatgcaaagcttcttaagtggtcggaggatgtgtgtgtggcccacctcacccagcgggacgggtaccaggccaccacgcagg

SEQ ID NO: 421565 - DNA, 120 bp, Artificial Sequence
  ENSG00000150760_32 (sequence is synthesized)
gacagctgaaggagcagctctaccaggaaatcatccactacttcgacaaaggcaagatgtgggaggaggccattgccttgggcaaggagctagccgagcagtatgagaacgaaatgtttg

SEQ ID NO: 421566 - DNA, 120 bp, Artificial Sequence
  ENSG00000150760_33 (sequence is synthesized)
attatgagcaactcagcgaattgctgaaaaaacaggctcagttttatgaaaacatcgtcaaagtgatcaggcccaagcctgactattttgctgttggctactacggacaagggttcccca

SEQ ID NO: 421567 - DNA, 120 bp, Artificial Sequence
  ENSG00000150760_34 (sequence is synthesized)
cattcctgcggggaaaagttttcatttaccgagggaaagagtatgagcgccgggaagattttgaggctcggctcttaactcagtttccaaacgccgagaaaatgaagacaacatctccac

SEQ ID NO: 421568 - DNA, 120 bp, Artificial Sequence
  ENSG00000150760_35 (sequence is synthesized)
caggcgacgatattaaaaactctcctggccagtatattcagtgcttcacagtgaagcccaaactcgatctgcctcctaagtttcacaggccagtgtcagagcagattgtaagtttttaca

SEQ ID NO: 421569 - DNA, 120 bp, Artificial Sequence
  ENSG00000150760_36 (sequence is synthesized)
gggtgaacgaggtccagcgatttgaatattctcggccaatccggaagggagagaaaaacccagacaatgaatttgcgaatatgtggatcgagagaaccatatatacaactgcatataaat

SEQ ID NO: 421570 - DNA, 120 bp, Artificial Sequence
  ENSG00000150760_37 (sequence is synthesized)
tacctggaattttaaggtggtttgaggtcaagtctgttttcatggtggaaatcagccccctggagaatgccattgagaccatgcagctgacgaacgacaagatcaacagcatggtgcagc

SEQ ID NO: 421571 - DNA, 120 bp, Artificial Sequence
  ENSG00000150760_38 (sequence is synthesized)
agcacctggatgaccccagcctgcccatcaacccgctctccatgctcctgaacggcatcgtggacccagctgtcatggggggcttcgcaaactacgaaaaggccttctttacagaccggt

SEQ ID NO: 421572 - DNA, 120 bp, Artificial Sequence
  ENSG00000150760_39 (sequence is synthesized)
acctgcaggagcaccctgaggcccatgaaaagatcgagaagctcaaggacctgattgcttggcagattccttttctggccgaagggatcagaatccatggagacaaagtcacggaggcac

SEQ ID NO: 421573 - DNA, 120 bp, Artificial Sequence
  ENSG00000150760_40 (sequence is synthesized)
tgaggccgttccacgagaggatggaggcctgtttcaaacagctgaaggaaaaggtggagaaagagtacggcgtccgaatcatgccctcaagtctggatgatagaagaggcagccgccccc

SEQ ID NO: 421574 - DNA, 120 bp, Artificial Sequence
  ENSG00000150760_41 (sequence is synthesized)
ggtccatggtgcggtccttcacgatgccttcctcatcccgccctctgtctgtggcctctgtctcttccctctcatcggacagcaccccttccagaccaggctccgacgggtttgccctgg

SEQ ID NO: 421575 - DNA, 120 bp, Artificial Sequence
  ENSG00000150760_42 (sequence is synthesized)
agcctctcctgccaaagaaaatgcactccaggtcccaggacaagctggacaaggatgacctggagaaggagaagaaggacaagaagaaggaaaaaaggaacagcaaacatcaagagatat

SEQ ID NO: 421576 - DNA, 120 bp, Artificial Sequence
  ENSG00000150760_43 (sequence is synthesized)
ttgagaaagaatttaaacccaccgacatttccctgcagcagtctgaggctgtgatcctttcggaaacgataagtcccctgcggccccagagaccgaagagccaggtgatgaacgtcattg

SEQ ID NO: 421577 - DNA, 120 bp, Artificial Sequence
  ENSG00000150760_44 (sequence is synthesized)
gaagcgaaaggcgcttctcggtgtccccctcgtcaccgtcctcccagcaaacaccccctccagttacaccaagggccaagctcagcttcagcatgcagtcgagcttggagctgaacggca

SEQ ID NO: 421578 - DNA, 120 bp, Artificial Sequence
  ENSG00000150760_45 (sequence is synthesized)
tgacgggggcggacgtggccgatgtcccaccccctctgcctctcaaaggcagcgtggcagattacgggaatttgatggaaaaccaggacttgctgggctcgccaacacctccacctcccc

SEQ ID NO: 421579 - DNA, 120 bp, Artificial Sequence
  ENSG00000150760_46 (sequence is synthesized)
ctccacaccagaggcatctgccacctccactgcccagcaaaactccgcctcctccccctccaaagacaactcgcaagcaggcatcggtggactccgggatcgtgcagtgacgtcgcaagc

SEQ ID NO: 421580 - DNA, 120 bp, Artificial Sequence
  ENSG00000150760_47 (sequence is synthesized)
ctctctggaaagagtgtgctgcccctccccatctccatgccctctccttctgtgtcccctgagtctgctgtttacctcattgggcctgtgatgttaacatttcgtgcgactgctttttct

SEQ ID NO: 421581 - DNA, 120 bp, Artificial Sequence
  ENSG00000150760_48 (sequence is synthesized)
tcaaaggagttcagttctcaccatggagtgagtggcctttagcgtcatggagcaaggtgggtctgggaggtagatatgggtccgggatgtgctatcgtagttatcagagttgggggcctc

SEQ ID NO: 421582 - DNA, 120 bp, Artificial Sequence
  ENSG00000150760_49 (sequence is synthesized)
tgagtgtgtctggctctgagagagtctgagtcttgcccaaacattctttctttttgtgccaaatgacttgcatttgcaaagagctcaattgctctgagctcagccaagtaggagaggcta

SEQ ID NO: 421583 - DNA, 120 bp, Artificial Sequence
  ENSG00000150760_50 (sequence is synthesized)
ggccatcactcttaggaagctgtgtagtgatgatgtataagaatcctcctcactgtcatgggatgttgtatccagcccctccttgttccagccggtggtgtgacttcgttggttgaggtg

SEQ ID NO: 421584 - DNA, 120 bp, Artificial Sequence
  ENSG00000150760_51 (sequence is synthesized)
tgtctccaacctacatcagaccatgaagttcaacccctccagggaagctcctgatttcccctgcataattgaaaataggatatttctcagctattgaacagttactaatttatggggtgg

SEQ ID NO: 421585 - DNA, 120 bp, Artificial Sequence
  ENSG00000150760_52 (sequence is synthesized)
aaacagcattaagaatactgaatcaaatggaaaaacaaatgaatacaggaagataagtgttcgttcttttctgaaaaagagtatgtgtaccacaagagctggttttaattgggtgaattg

SEQ ID NO: 421586 - DNA, 120 bp, Artificial Sequence
  ENSG00000150760_53 (sequence is synthesized)
tttttgtcctcattctgtacagaaatttgtatatatgatggttcttagaacttgttttaatttttgtggtccttccgtttattataataggcgtccaccaatgattatccatatgtgttc

SEQ ID NO: 421587 - DNA, 120 bp, Artificial Sequence
  ENSG00000150760_54 (sequence is synthesized)
taaaacacacacacacacacacacacattttttttttgagaactccaaagtcctgaaaattttggtggacaatgatttttaaaaaactaactttgtataacctaatatttgtattctctc

SEQ ID NO: 421588 - DNA, 120 bp, Artificial Sequence
  ENSG00000150760_55 (sequence is synthesized)
cttgctgttttgtggtcaacctttcccataagacttcagagaaggtttttacttaatactgtacctgtcaaattcccagagctgcaagtaaattgaagatacaaattatgttgtaaagtg

SEQ ID NO: 421589 - DNA, 120 bp, Artificial Sequence
  ENSG00000150760_56 (sequence is synthesized)
taaacctctccaaagctccatgaaagccgagatccttgccggcccctccagctctgtaaccccagtttgcatcatgcaccgctcatgactcagtatcaagaagcaccattgttgcatggg

SEQ ID NO: 421590 - DNA, 120 bp, Artificial Sequence
  ENSG00000150760_57 (sequence is synthesized)
tttccttcccctgtttggacacccggagggtcttgcttcgtctctttctgcctccgtttcactaatttctcactgctgtcggtgttcctttcataagtccttttgagaagagttctgaaa

SEQ ID NO: 421591 - DNA, 120 bp, Artificial Sequence
  ENSG00000150760_58 (sequence is synthesized)
ttgcattggtgttgccacgtcatcagtctctgtttgtcattttataaatacctctgcaatatctcgactgttctaaggcttggccaactccatgctgctagctgaggttagagattccag

SEQ ID NO: 421592 - DNA, 120 bp, Artificial Sequence
  ENSG00000150760_59 (sequence is synthesized)
ctaattctgtgctgcagacagttctagggagacagggactctgagtttgtggtgacttccttatgacaacacagggctctggctctaagaacttgagctccgtcccctggagaaaaacag

SEQ ID NO: 421593 - DNA, 120 bp, Artificial Sequence
  ENSG00000150760_60 (sequence is synthesized)
cctgaagctggatctcccctagctgtcatcatgggcacaggggttctgctcgacgtcgctctgcgctctcatgttacccacatatttgtatcagccctaggcactgtcagctccatgcaa

SEQ ID NO: 421594 - DNA, 120 bp, Artificial Sequence
  ENSG00000150760_61 (sequence is synthesized)
tgtagtgagcagttgagatacagcttggtatataaaatgtcctcattttccaaatgaatgtcaaagttgaagggtaagcaaaccaactttaaagatggaaacatttggctcttgttttct

SEQ ID NO: 421595 - DNA, 120 bp, Artificial Sequence
  ENSG00000150760_62 (sequence is synthesized)
cattacttacttatagcaaaagacatgtattttctgctgagtcgtcattcttctggcagtttctccatagtgtttacacttaaggtgccattaataaaattttatgaaggaccctaaaaa

SEQ ID NO: 421596 - DNA, 120 bp, Artificial Sequence
  ENSG00000150764_0 (sequence is synthesized)
agtttggctccagtctaggtttccagtaagtggcatgcgggactccggagggatcccaatgagctgagccgagagcctttgtgtgcagagggaggaggaggaggcggcggcggccgccgg

SEQ ID NO: 421597 - DNA, 120 bp, Artificial Sequence
  ENSG00000150764_1 (sequence is synthesized)
gctggagaccccgcccggggagcccccagcaggaacaatgctagcctgcctgacccgagggaacttactggacgtcctgcaggagggcttcaatgagcaacagctgcaggcctatgtggc

SEQ ID NO: 421598 - DNA, 120 bp, Artificial Sequence
  ENSG00000150764_2 (sequence is synthesized)
ctgggtgaatgcacagctgaagaagaggccagcagtgaagcctgtgcaggacctgcgacaagatctccgggatggggtgatcctggcatatctcatcgagattgttgcaggagaaaagct

SEQ ID NO: 421599 - DNA, 120 bp, Artificial Sequence
  ENSG00000150764_3 (sequence is synthesized)
gagtggggtacagctgagtcccggtaaccaacaggagatgaagaataatgtggagaaagtgctacagtttgtggcctctaaaaagattcgtatgcaccagacttcggctaaagatattgt

SEQ ID NO: 421600 - DNA, 120 bp, Artificial Sequence
  ENSG00000150764_4 (sequence is synthesized)
ggatggaaacctgaagtctatcatgaggctggtccttgccttggcagctcatttcaaacctggctccagcaggacggtgaaccaaggacgggactccagagcccctctgcaaagtcaccg

SEQ ID NO: 421601 - DNA, 120 bp, Artificial Sequence
  ENSG00000150764_5 (sequence is synthesized)
accacactgtgccactgctgttgcccagggagcagctgctgctctggccgatgtgtgtcatgacatgtcccgatcaggacgggatgtctttcgatatagacagaggaacagcagcatgga

SEQ ID NO: 421602 - DNA, 120 bp, Artificial Sequence
  ENSG00000150764_6 (sequence is synthesized)
tgaggaaattgagaatccatactggagtgtgcgggccctagtgcagcagtacgaagggcaacaaaggtccccgtctgaatccagctgctccagcctgacttcacccagtccaatccacag

SEQ ID NO: 421603 - DNA, 120 bp, Artificial Sequence
  ENSG00000150764_7 (sequence is synthesized)
tgcaaagagcgagtccattataacccagtcagaagagaaggcagattttgtgattattcccgctgaaggaatagagaacagaacagaagggacagattctccattatctcgagactggcg

SEQ ID NO: 421604 - DNA, 120 bp, Artificial Sequence
  ENSG00000150764_8 (sequence is synthesized)
gccagggagccctggaacctatctggagacctcatgggaagaacagctgttggaacaacaagaatatttagaaaaagaaatggaggaagcaaagaaaatgatatcaggactacaggcctt

SEQ ID NO: 421605 - DNA, 120 bp, Artificial Sequence
  ENSG00000150764_9 (sequence is synthesized)
actgctcaatggatccttacctgaagatgaacaggagaggcccttggccctctgtgaaccaggtgtcaatcccgaggaacaactgattataatccaaagtcgtctggatcagagtatgga

SEQ ID NO: 421606 - DNA, 120 bp, Artificial Sequence
  ENSG00000150764_10 (sequence is synthesized)
ggagaatcaggacttaaagaaggaactgctgaaatgtaaacaagaagccagaaacttacaggggataaaggatgccttgcagcagagattgactcagcaggacacatctgttcttcagct

SEQ ID NO: 421607 - DNA, 120 bp, Artificial Sequence
  ENSG00000150764_11 (sequence is synthesized)
caaacaagagctactgagggcaaatatggacaaagatgagctgcacaaccagaatgtggatctgcagaggaagctagatgagaggaaccggctcttgggagaatataaaaaagagctggg

SEQ ID NO: 421608 - DNA, 120 bp, Artificial Sequence
  ENSG00000150764_12 (sequence is synthesized)
gcagaaggatcgccttcttcagcagcaccaggccaagttagaagaagcactccggaaactctctgatgtcagttaccaccaggtggatctagagcgagagctagaacacaaagatgtcct

SEQ ID NO: 421609 - DNA, 120 bp, Artificial Sequence
  ENSG00000150764_13 (sequence is synthesized)
cttggctcactgtatgaaaagagaggcagatgaggcgaccaactacaacagtcacaactctcaaagcaatggttttctccttccaacggcaggaaaaggagctacttcagtcagcaacag

SEQ ID NO: 421610 - DNA, 120 bp, Artificial Sequence
  ENSG00000150764_14 (sequence is synthesized)
agggaccagcgacctgcagcttgttcgagatgctctccgcagcctgcgcaacagcttcagtggccacgatcctcagcaccacactattgacagcttggagcagggcatttctagcctcat

SEQ ID NO: 421611 - DNA, 120 bp, Artificial Sequence
  ENSG00000150764_15 (sequence is synthesized)
ggagcgcctgcatgttatggagacgcagaagaaacaagaaagaaaggttcgggtcaagtcacccagaactcaagtaggtagtgaataccgggagtcctggccccctaactcaaagttgcc

SEQ ID NO: 421612 - DNA, 120 bp, Artificial Sequence
  ENSG00000150764_16 (sequence is synthesized)
tcactcacagagctctccaactgtcagcagcacctgtactaaagtgctctatttcactgaccggtcacttacgcccttcatggtcaatataccaaagaggttggaggaggtgacgttaaa

SEQ ID NO: 421613 - DNA, 120 bp, Artificial Sequence
  ENSG00000150764_17 (sequence is synthesized)
ggattttaaagcagctattgatcgggaaggaaatcaccggtatcacttcaaagcactggatcctgagtttggcactgtcaaagaggagattttccatgatgatgatgccatccctggatg

SEQ ID NO: 421614 - DNA, 120 bp, Artificial Sequence
  ENSG00000150764_18 (sequence is synthesized)
ggaagggaaaattgtagcttgggtggaagaagaccatggagagaattaatgccaagtatcagattgagggcttatggaacctggtcactccctggctgcttcactcaggaaagggaacta

SEQ ID NO: 421615 - DNA, 120 bp, Artificial Sequence
  ENSG00000150764_19 (sequence is synthesized)
aaaccagaatacactaagaagtttctagtttgtgtgccaaaacagaagcttctccaagcatgatggccacaggtcagtcctctttctgtgcctggcatatctggtacttaaaattctgtc

SEQ ID NO: 421616 - DNA, 120 bp, Artificial Sequence
  ENSG00000150764_20 (sequence is synthesized)
caaatgtagaccatgggttcatctggagttccttgtccgtgggaacacagtgttctattctactctgaggacaacaaaccgaaggccttaaacgatggggatggatgatcccgcctctgt

SEQ ID NO: 421617 - DNA, 120 bp, Artificial Sequence
  ENSG00000150764_21 (sequence is synthesized)
aggggcatggctgctattatctggaaattaggaattggatgcatcattcctgtgtgttacagtattattttaattggcctcaatggttgcagcaatcagagtcccagcgtttgtactcac

SEQ ID NO: 421618 - DNA, 120 bp, Artificial Sequence
  ENSG00000150764_22 (sequence is synthesized)
agacaaggcaaaggtaccagcttttctgtttctttgaacctactgcaaaccaagaataactcatgaggtggtaccaaagatgaaagcccagacttcagtaatcttttgaaccagacgtgg

SEQ ID NO: 421619 - DNA, 120 bp, Artificial Sequence
  ENSG00000150764_23 (sequence is synthesized)
atggtgctgaattgttgcttggatggaaaaagggctgcccatgttgtgctacactatgctaaaactgtaatttagtaagaccttgggctgcctcttctgtcttaactggttctgcagctt

SEQ ID NO: 421620 - DNA, 120 bp, Artificial Sequence
  ENSG00000150764_24 (sequence is synthesized)
gagccatttctttttcttcaaactgatgaacttttgtttgaaaggcataaggagtgaaaagctccttgaaaatccaggcgggtatggaaaggtgctgctacccatatctttttgactttc

SEQ ID NO: 421621 - DNA, 120 bp, Artificial Sequence
  ENSG00000150764_25 (sequence is synthesized)
tttgtttcatgactttaactcatggcatctcctttgtagtaaaaggagacagaccattaatttcagcatttctttgtgatttataagtactgagcatgaagtacttgtctgcccctcatt

SEQ ID NO: 421622 - DNA, 120 bp, Artificial Sequence
  ENSG00000150764_26 (sequence is synthesized)
tcaaggccagagttattttctatttatgtattagtctaggctgatcttttagggcacaatagaaaccatggggcgtggagcatgagttgtgaatggcagggatcattctgggtaaaaaaa

SEQ ID NO: 421623 - DNA, 120 bp, Artificial Sequence
  ENSG00000150764_27 (sequence is synthesized)
acctagaatcatttctgatgtgcaacattgtcaagtgaagaagctaacagttcaactaccgagattatttgataacctgggttttctcattcatccatcaagcaccatcaaccagtcagc

SEQ ID NO: 421624 - DNA, 120 bp, Artificial Sequence
  ENSG00000150764_28 (sequence is synthesized)
cattattatttatatatgtattaccaaaagcagtctatctgcctgtgacctccaatgtacactgccaaacacaagagtaggacacatctgttctgggttcttgacctatctgtctccaat

SEQ ID NO: 421625 - DNA, 120 bp, Artificial Sequence
  ENSG00000150764_29 (sequence is synthesized)
tcatctccccttttcagccatttcaacaaactactctttggagctctgagatgacatcttgttgttttatatagatgtatcttttaaaaatagttcacgtttggagaattcttttgtact

SEQ ID NO: 421626 - DNA, 120 bp, Artificial Sequence
  ENSG00000150764_30 (sequence is synthesized)
catttgctttttgtctgagaaccatgtctatttttataactggagtgtgagttctgtatcttctcacattctgtatactgtatccattttctagagaacccagtagcttttatacagtct

SEQ ID NO: 421627 - DNA, 120 bp, Artificial Sequence
  ENSG00000150764_31 (sequence is synthesized)
cttcttaccaccccttgtggtttcagaacaagctttattttattacgagtatattaatgacaactaattcctgttccaattctacctgttttagttgtgaaggtagttttgtgtaatcca

SEQ ID NO: 421628 - DNA, 120 bp, Artificial Sequence
  ENSG00000150764_32 (sequence is synthesized)
gttgattgctcctctggcagagagaaggagctcaaaagatacttgatgtctttcatgtaagtttacctggtcttttcctattgaagaatttttcatcagaaacgactgggaaagtttggg

SEQ ID NO: 421629 - DNA, 120 bp, Artificial Sequence
  ENSG00000150764_33 (sequence is synthesized)
aaagtcagcaaaagaaagaatgcatttcgaaagcaaacagaagaaaaaagtatattctcacagtttttccccaggaagtctggagaaaaagtcctcatgtcaccaatttctctgttgcat

SEQ ID NO: 421630 - DNA, 120 bp, Artificial Sequence
  ENSG00000150764_34 (sequence is synthesized)
gaattttagtgttttgctataagacagcatgagggctatcaggccaaaattcattattgtatttccaatacagtttgtcttgaatgtctgtctcttaaaccagtttttacttgtcagttt

SEQ ID NO: 421631 - DNA, 120 bp, Artificial Sequence
  ENSG00000150764_35 (sequence is synthesized)
tctctcagcaaacagtcttactattatgtggaatttaacttttcagagaaaatttccaaagtcctctaccttatttggcttttatctgtgtcttttggaaaaggagctgcatggcctcag

SEQ ID NO: 421632 - DNA, 120 bp, Artificial Sequence
  ENSG00000150764_36 (sequence is synthesized)
tgcctccataaaaagcttaagttgagttcatgggagaacattaagatcgttttttttcccttttagctcggtaatctcatgtaccacaggtaatgaccaagcatctctgctagaggatgt

SEQ ID NO: 421633 - DNA, 120 bp, Artificial Sequence
  ENSG00000150764_37 (sequence is synthesized)
aactctcataactcctgtgtaaaatgaggatcctgttggtgatcctcattccagtttccaaagcgagaggagccttctgagcagaagtatgcaagactgattctgtttggaacagtttcc

SEQ ID NO: 421634 - DNA, 120 bp, Artificial Sequence
  ENSG00000150764_38 (sequence is synthesized)
tatttggctgcattctaggaggcctcctgacttattcatagtattgtcgcctggtggcattggtgtggggtagcttgtcctgctacttgctaaagttctctttctttgagaaaactgagg

SEQ ID NO: 421635 - DNA, 120 bp, Artificial Sequence
  ENSG00000150764_39 (sequence is synthesized)
aaccagaatgcttagagttcataaaataatctctaaaccatgttaggttaaaacaaaatgaccatctcacaaaaacgagtttagttgaatgctcaattccttacaaaatcttcatttaag

SEQ ID NO: 421636 - DNA, 66 bp, Artificial Sequence
  ENSG00000150764_40 (sequence is synthesized)
ggaggccgaagactccgtctctacatagaaattttattataaaagtagctggggatggtggcacac

SEQ ID NO: 421637 - DNA, 71 bp, Artificial Sequence
  ENSG00000150764_41 (sequence is synthesized)
agaccagcctgggcaacgtaggaagactccgtctctacatagaaattttattataaaagtagctggggaga

SEQ ID NO: 421638 - DNA, 120 bp, Artificial Sequence
  ENSG00000150764_42 (sequence is synthesized)
atgccactgcactctagcctaggctacagagcaggaccccatctccaaaaaaaaaaaaaaaaaagtcatttaaaaactgaagaatgttctcttcttgctcagttccctaaattagctggg

SEQ ID NO: 421639 - DNA, 120 bp, Artificial Sequence
  ENSG00000150764_43 (sequence is synthesized)
gggattgggatactttacaatttttacatttttaaatttgaagaatttgttttaaacttacttggtaatggcacttctacttactgaccaacttttcagctctttttgaccaggatggtt

SEQ ID NO: 421640 - DNA, 120 bp, Artificial Sequence
  ENSG00000150764_44 (sequence is synthesized)
gcaaattagggaaaatatctttatactatacatccaattcaagaggactttaattacttaaaagcatttaggtcataattaaaattattttcactgtttccataaaataagcattatgat

SEQ ID NO: 421641 - DNA, 120 bp, Artificial Sequence
  ENSG00000150764_45 (sequence is synthesized)
tgcacactccttctactgtctgaatttatgtaagaggtatagcttgcttaaaatacatatatatgtaaagttatattttcttagaaacatggatgtttacagccattgctttcaaagaga

SEQ ID NO: 421642 - DNA, 120 bp, Artificial Sequence
  ENSG00000150764_46 (sequence is synthesized)
ttattactgtgtattctccctgttttacaatatgttttcatgaagactatgttacaccagaggcttctgattatcaaagtgataaccagttttaactgccggtatgtaccagatttgtga

SEQ ID NO: 421643 - DNA, 120 bp, Artificial Sequence
  ENSG00000150764_47 (sequence is synthesized)
actaatttaaaaaaccacaaactatgaataaaatggggtttgcaaactaaatatcattaatgattttcacttgcgtttactgatgagattaatcaataaagccatttacatttagtgaaa

SEQ ID NO: 421644 - DNA, 120 bp, Artificial Sequence
  ENSG00000150764_48 (sequence is synthesized)
gtgctatgagaacaggttcagaacgcaggtgacctgaacctgtgaacgctaccctgtgaacgctgtctgctggaaatcagttttcttcaacatgaactgtactccctcttttcatttttt

SEQ ID NO: 421645 - DNA, 120 bp, Artificial Sequence
  ENSG00000150764_49 (sequence is synthesized)
atccggaaggtggcacggagtgggatcgccgctggggactcgaggcgcagcctgcgccgccgggagcctccctcccagtgggagatgggttgagatgcccccgccaggggggatgcccgg

SEQ ID NO: 421646 - DNA, 120 bp, Artificial Sequence
  ENSG00000150764_50 (sequence is synthesized)
caccgtgcgtccgcggaggccaagatgcagcggccaggggccggcagcctgcgaggggaggcagcttccgccggggccgggctgctgcacagtctgagcggccgggactgcgcgcttcag

SEQ ID NO: 421647 - DNA, 120 bp, Artificial Sequence
  ENSG00000150764_51 (sequence is synthesized)
agcctggagcatcccagtcgctggggccgagacgccgccgccgccgccgttcccgctttctcccgcgagccgggccagtagctttgctagctggccttcccgtggaggcgttttccagcc

SEQ ID NO: 421648 - DNA, 120 bp, Artificial Sequence
  ENSG00000150764_52 (sequence is synthesized)
ccagcgcggggagacatgcctgaatttgggagcgatgtgactctcagcctcccacttcacccggggacgcaggcttgctgaagcccgagacaggagggggaccatgggagggacgcaagt

SEQ ID NO: 421649 - DNA, 120 bp, Artificial Sequence
  ENSG00000150764_53 (sequence is synthesized)
ttttcacactacattttggggatgtaatttttcttgtagtacttcacttttatactattttgtttctgtagcaatactgcaattgagttagttctaagactatgaagacatatgccatca

SEQ ID NO: 421650 - DNA, 120 bp, Artificial Sequence
  ENSG00000150764_54 (sequence is synthesized)
atatttaatactgttttcattccctagtgatgactggttctccagcctctgctgttttagtcatctgggttatcggggcagtgacctaacaaggggctatttctgcttattgactttggc

SEQ ID NO: 421651 - DNA, 120 bp, Artificial Sequence
  ENSG00000150764_55 (sequence is synthesized)
ggatctgggtccagggggcgcggtctgggcctgcaggaggcgggatccggcgggccagaggcgggaccaaggccggcaggggctggctctggctggctggagtcgggcggggcttgtggc

SEQ ID NO: 421652 - DNA, 120 bp, Artificial Sequence
  ENSG00000150764_56 (sequence is synthesized)
cttgtggccggcccccgcatcaccatggcagcgggaaaccgcggcaaagccagagcactggcaggccgagctcaggagggctggggacagagatgctgaaccagacggacccatcattta

SEQ ID NO: 421653 - DNA, 120 bp, Artificial Sequence
  ENSG00000150764_57 (sequence is synthesized)
agagatggccctgattcgtctcttctagggactcttgaagatggggacccaagtggttatgagattcaataactccttgctgccaacagagccttctcaacagctgcaggcctatgtggc

SEQ ID NO: 421654 - DNA, 120 bp, Artificial Sequence
  ENSG00000150764_58 (sequence is synthesized)
ttcaagtaacaatacaacaagcaaaaaggcacctaagccctttttctcccctcagtttatgtttggctttaaagggataccccttagcagtgctttgtgggtttgtgctagtaggagggt

SEQ ID NO: 421655 - DNA, 120 bp, Artificial Sequence
  ENSG00000150764_59 (sequence is synthesized)
aggaaggtagggtggggtgctggtttatttcccacaaatggaatctgtgcagtcccagtgccagtgcttaactgtgaccacatgggggcatggctggaacctgtcagggcccagtccagt

SEQ ID NO: 421656 - DNA, 120 bp, Artificial Sequence
  ENSG00000150764_60 (sequence is synthesized)
ggttctgacatttgcatatgaggtgccagtgtttatgatagccagttccattgtgctgtccttgagcctaagtgtaactcttaaggccggaaaagtctgtgtaaagctcatagaagagaa

SEQ ID NO: 421657 - DNA, 120 bp, Artificial Sequence
  ENSG00000150764_61 (sequence is synthesized)
gaaattgagcagagttgtcttagagcattagaatgtttccaactttcctctacaggaactgtggctgattagtatgtgtttgagcaaactaatgatgtttgcgactctagctaaaagttg

SEQ ID NO: 421658 - DNA, 120 bp, Artificial Sequence
  ENSG00000150764_62 (sequence is synthesized)
tgtgtatcctttagagccaagtacagagaccaaaacaggatacagtgccctaataaaaaccttatcagtggcagaaaaaagattactttactggctcatgtaaattgtgcttctataaac

SEQ ID NO: 421659 - DNA, 120 bp, Artificial Sequence
  ENSG00000150764_63 (sequence is synthesized)
actccccagatcatgtttttactaacttcattttgttgctgaatcataatttatgctctaatgaccttttctttcctatcccaaccctgtgtaatctgctctatttagggctaattgttc

SEQ ID NO: 421660 - DNA, 120 bp, Artificial Sequence
  ENSG00000150764_64 (sequence is synthesized)
cttgtcttgtatgtatgttatgtgtccttgttttcttcctcctatttttttctcataaaactccatcctattttaatgcacatttcctaatttattgaggtcatatggaactctttctag

SEQ ID NO: 421661 - DNA, 120 bp, Artificial Sequence
  ENSG00000150764_65 (sequence is synthesized)
tattttaatatactggtaaacttgctaactttttaccttttttacatttaatagctgtgctctttcttacttataaaattcacataacataaaattaaccattaaacattataaagtgta

SEQ ID NO: 421662 - DNA, 120 bp, Artificial Sequence
  ENSG00000150764_66 (sequence is synthesized)
gagcgtcagagtctccaccccgaggagcggccagagccccatgcgggcctgacctgtccgaccgacccctcgtccaccaagggagggctcagagtggagaagcctgacttcacccagtcc

SEQ ID NO: 421663 - DNA, 120 bp, Artificial Sequence
  ENSG00000150764_67 (sequence is synthesized)
gacagaggtaagggtagaaatctgggggtgggaactgatccctctctctgatacttcttctgttagatgatacagtgcagtagatagaaacgtcacccaaacagccccagattgcagaaa

SEQ ID NO: 421664 - DNA, 120 bp, Artificial Sequence
  ENSG00000150768_0 (sequence is synthesized)
acaaacctgaaacgaaatctttgcaaccagtacagcctgcgcggggcgcggcccagtccatcccccttcggatgcgcagaagcagaggtcaccacgccggacccctcgattccctcgcgg

SEQ ID NO: 421665 - DNA, 120 bp, Artificial Sequence
  ENSG00000150768_1 (sequence is synthesized)
gcgattcctggctccttcaccaccccagcactccaagacccccgccctttggcctgaggctcccactgccctagccagttcccgggctcacttccagcttttccagaaagcttggccacg

SEQ ID NO: 421666 - DNA, 120 bp, Artificial Sequence
  ENSG00000150768_2 (sequence is synthesized)
cccctcggcccagactctcaggccactcggccgcaattaacccgcgtctctgcgcctttttaggcccctccccctcggtcgtgcccttgtcatctcttaggccccgtctcaccctttcgg

SEQ ID NO: 421667 - DNA, 120 bp, Artificial Sequence
  ENSG00000150768_3 (sequence is synthesized)
atgcctcccctagaaccctaccactttccacccctttccgtctgttatttctcccaaacttgcgcccgcacaggcccctctggaacactcctgccccgtagtgcccctcgtccccgctcc

SEQ ID NO: 421668 - DNA, 120 bp, Artificial Sequence
  ENSG00000150768_4 (sequence is synthesized)
gtagagaaagagcgtgcgtgccgcgcatttctggcctggggagcgggtggagtaaacctgcgggaaccattttacgacaacgtgcggctgtgcggtgtggctgacggcaacgccgctgct

SEQ ID NO: 421669 - DNA, 120 bp, Artificial Sequence
  ENSG00000150768_5 (sequence is synthesized)
cttggagaggtcactccggagacggcgttggttttggggtgtggggggttggtggcactatgtggcgcgtctgtgcgcgacgggctcagaatgtagccccatgggcgggactcgaggctc

SEQ ID NO: 421670 - DNA, 120 bp, Artificial Sequence
  ENSG00000150768_6 (sequence is synthesized)
ggtggacggccttgcaggaggtacccggaactccacgagtgacctcgcgatctggcccggctcccgctcgtcgcaacagcgtgactacagggtatggcggggtccgggcactgtgcggct

SEQ ID NO: 421671 - DNA, 120 bp, Artificial Sequence
  ENSG00000150768_7 (sequence is synthesized)
ggacccccagttctggggccacgccgcggaaccgcttactgctgcagcttttggggtcgcccggccgccgctattacagtcttcccccgcatcagaaggttccattgccttctctttccc

SEQ ID NO: 421672 - DNA, 120 bp, Artificial Sequence
  ENSG00000150768_8 (sequence is synthesized)
ccacaatgcaggcaggcaccatagcccgttgggaaaaaaaagagggggacaaaatcaatgaaggtgacctaattgcagaggttgaaactgataaagccactgttggatttgagagcctgg

SEQ ID NO: 421673 - DNA, 120 bp, Artificial Sequence
  ENSG00000150768_9 (sequence is synthesized)
aggagtgttatatggcaaagatacttgttgctgaaggtaccagggatgttcccatcggagcgatcatctgtatcacagttggcaagcctgaggatattgaggcctttaaaaattatacac

SEQ ID NO: 421674 - DNA, 120 bp, Artificial Sequence
  ENSG00000150768_10 (sequence is synthesized)
tggattcctcagcagcacctaccccacaagcggccccagcaccaacccctgctgccactgcttcgccacctacaccttctgctcaggctcctggtagctcatatccccctcacatgcagg

SEQ ID NO: 421675 - DNA, 120 bp, Artificial Sequence
  ENSG00000150768_11 (sequence is synthesized)
tacttcttcctgccctctctcccaccatgaccatgggcacagttcagagatgggaaaaaaaagtgggtgagaagctaagtgaaggagacttactggcagagatagaaactgacaaagcca

SEQ ID NO: 421676 - DNA, 120 bp, Artificial Sequence
  ENSG00000150768_12 (sequence is synthesized)
ctataggttttgaagtacaggaagaaggttatctggcaaaaatcctggtccctgaaggcacaagagatgtccctctaggaaccccactctgtatcattgtagaaaaagaggcagatatat

SEQ ID NO: 421677 - DNA, 120 bp, Artificial Sequence
  ENSG00000150768_13 (sequence is synthesized)
cagcatttgctgactataggccaaccgaagtaacagatttaaaaccacaagtgccaccacctaccccacccccggtggccgctgttcctccaactccccagcctttagctcctacacctt

SEQ ID NO: 421678 - DNA, 120 bp, Artificial Sequence
  ENSG00000150768_14 (sequence is synthesized)
cagcaccctgcccagctactcctgctggaccaaagggaagggtgtttgttagccctcttgcaaagaagttggcagtagagaaagggattgatcttacacaagtaaaagggacaggaccag

SEQ ID NO: 421679 - DNA, 120 bp, Artificial Sequence
  ENSG00000150768_15 (sequence is synthesized)
atggtagaatcaccaagaaggatatcgactcttttgtgcctagtaaagttgctcctgctccggcagctgttgtgcctcccacaggtcctggaatggcaccagttcctacaggtgtcttca

SEQ ID NO: 421680 - DNA, 120 bp, Artificial Sequence
  ENSG00000150768_16 (sequence is synthesized)
cagatatcccaatcagcaacattcgtcgggttattgcacagcgattaatgcaatcaaagcaaaccatacctcattattacctttctatcgatgtaaatatgggagaagttttgttggtac

SEQ ID NO: 421681 - DNA, 120 bp, Artificial Sequence
  ENSG00000150768_17 (sequence is synthesized)
ggaaagaacttaataagatattagaagggagaagcaaaatttctgtcaatgacttcatcataaaagcttcagctttggcatgtttaaaagttcccgaagcaaattcttcttggatggaca

SEQ ID NO: 421682 - DNA, 120 bp, Artificial Sequence
  ENSG00000150768_18 (sequence is synthesized)
atgttgttgatgtcagtgttgcggtcagtactcctgcaggactcatcacacctattgtgtttaatgcacatataaaaggagtggaaaccattgctaatgatgttgtttctttagcaacca

SEQ ID NO: 421683 - DNA, 120 bp, Artificial Sequence
  ENSG00000150768_19 (sequence is synthesized)
aagcaagagagggtaaactacagccacatgaattccagggtggcacttttacgatctccaatttaggaatgtttggaattaagaatttctctgctattattaacccacctcaagcatgta

SEQ ID NO: 421684 - DNA, 120 bp, Artificial Sequence
  ENSG00000150768_20 (sequence is synthesized)
ttttggcaattggtgcttcagaggataaactggtccctgcagataatgaaaaagggtttgatgtggctagcatgatgtctgttacactcagttgtgatcaccgggtggtggatggagcag

SEQ ID NO: 421685 - DNA, 120 bp, Artificial Sequence
  ENSG00000150768_21 (sequence is synthesized)
ttggagcccagtggcttgctgagtttagaaagtaccttgaaaaacctatcactatgttgttgtaactaactcaagaatttctaaactctcccaggtcacactgattcattcttaacaaga

SEQ ID NO: 421686 - DNA, 120 bp, Artificial Sequence
  ENSG00000150768_22 (sequence is synthesized)
tatttatatgttattaaacaggtggttctttttattttaaccagttatttttattattgagtctgtccagataagttatttataatgggcattactgaatttttaaaatgccgattacac

SEQ ID NO: 421687 - DNA, 120 bp, Artificial Sequence
  ENSG00000150768_23 (sequence is synthesized)
ccaaatattgtgcacatttaataatcagacaccagatttttagctctgtactcctaattaagggacatgtatgtggccttgcctagccctttggtgataagtacttcctctaggaaatgt

SEQ ID NO: 421688 - DNA, 120 bp, Artificial Sequence
  ENSG00000150768_24 (sequence is synthesized)
acgataggtagaattgtggttccctaaagacaagtacataaaggtgaccctgatgaaaccttgaagttctgaaatttaactgcctaaaatgttctccttagatgtgagagaaagagaaat

SEQ ID NO: 421689 - DNA, 120 bp, Artificial Sequence
  ENSG00000150768_25 (sequence is synthesized)
cagaaaaattaattctcttgggggaagggcttgaattgaagctttactttagaatttagccctggtttgaaattttccattacatgatcttggtttatcatcgatgggaagggtagaaaa

SEQ ID NO: 421690 - DNA, 120 bp, Artificial Sequence
  ENSG00000150768_26 (sequence is synthesized)
cttcaaggaaaataagtgaaattttaaaagtcagcattttcttagacctcttcagctgattgtttatttttctatgaattcctacacatggttattcccccctacttgagataatctaaa

SEQ ID NO: 421691 - DNA, 120 bp, Artificial Sequence
  ENSG00000150768_27 (sequence is synthesized)
tataaaccagctacttgatgtaactgagaatttgtgtggatatttatttaaacaaatgtgtaattttgagtacagaattcaacagttacctccaaaaaagaaacattgttaatataattt

SEQ ID NO: 421692 - DNA, 120 bp, Artificial Sequence
  ENSG00000150768_28 (sequence is synthesized)
aacagaagttgtgaaactaaaattttctaagattaactggtagttcattgtaaatgaacataatgaacagaatttatgactccactgtggaaaatgctatcaaataactaaggaatatat

SEQ ID NO: 421693 - DNA, 120 bp, Artificial Sequence
  ENSG00000150768_29 (sequence is synthesized)
atggaataagtgtacatatgtaaaatattgttactagagttagatatgtgccaaagtccatttatcccaaatcctgtctgaaaaggaggggtacattggtaaacattttggagtgcttaa

SEQ ID NO: 421694 - DNA, 120 bp, Artificial Sequence
  ENSG00000150768_30 (sequence is synthesized)
aaatgccaaaaacaaaatggtaatttctactttgataaagtaaaaaagttaaatgtgtgtaaaaaagtgttctgtgtccttctactccagcatcgtctcatgtaaaataagaaagcccta

SEQ ID NO: 421695 - DNA, 120 bp, Artificial Sequence
  ENSG00000150768_31 (sequence is synthesized)
aaatactattggagagaaaaaattaactaggttgctactttatttgcctaaatacttttttctattttgttagattttgcctttcttttggaaggaaggaggcgatattctggattataa

SEQ ID NO: 421696 - DNA, 120 bp, Artificial Sequence
  ENSG00000150768_32 (sequence is synthesized)
aaatgaattgggaacattatcacaattccagactttctattaatatttatgtgttttaataaacgtttgaaattatttatgactacttaaaatgaatctgaccagtgcttcctggtatat

SEQ ID NO: 421697 - DNA, 120 bp, Artificial Sequence
  ENSG00000150768_33 (sequence is synthesized)
gtaatatgtggagttagcccctgaaatttgctttaagtgtttcagtgttgaatctgtttctaaatattcattattacatggtacacaagtgacactccatatattccacacagactttta

SEQ ID NO: 421698 - DNA, 120 bp, Artificial Sequence
  ENSG00000150768_34 (sequence is synthesized)
ccttgctgtattattatgaaaacaatacattaatttgatttttcagtaattagtaattttaggttgaagattatccaaaagaaacaagcttatcacaagggaccatcatcaatatgatcc

SEQ ID NO: 421699 - DNA, 120 bp, Artificial Sequence
  ENSG00000150768_35 (sequence is synthesized)
aaatctggttcaaacattcaaaacttcaaagataattcatctttcgctaatgcttgtggttctgttgttcccttgaaaaaaaataaaaacagttgccttctaataaacattgttgagtta

SEQ ID NO: 421700 - DNA, 120 bp, Artificial Sequence
  ENSG00000150768_36 (sequence is synthesized)
aaaattaatctgagctataatctaaatcgattcagtctcttaccagaactgaaagaaaaaagttagaaatagtgtttttggttcatatgattatttaaaaattaaagtataaatcttcaa

SEQ ID NO: 421701 - DNA, 120 bp, Artificial Sequence
  ENSG00000150768_37 (sequence is synthesized)
tgatatgatgtaatatttgcatataacctacacacattattctgtatactttattcttgacttataataatacaatacctaaacagcacttcattcacatggatccagtgtagtgcccgg

SEQ ID NO: 421702 - DNA, 120 bp, Artificial Sequence
  ENSG00000150768_38 (sequence is synthesized)
tgtgcagcaaattcaagttgtgcttactggaaatttgtggaattgtttactttctggatattttgatccatggttggttgaatctatggattcggaacccatggatatatggagggtcaa

SEQ ID NO: 421703 - DNA, 120 bp, Artificial Sequence
  ENSG00000150773_0 (sequence is synthesized)
cgggcgctttcctggaagagaagtgggtcaggcccaactgaaaagcaagcctggcaccagaagggggacattccggaactagatatgaagagacttttctccctgaagttccccggaccc

SEQ ID NO: 421704 - DNA, 120 bp, Artificial Sequence
  ENSG00000150773_1 (sequence is synthesized)
aattagatgttgtacccaggctggttaccctggtaacaggcgtcgcggtttgtcaaggaactgagagaagaggcttaagaaaattattcaccactcataagtcatggagacatcctcaaa

SEQ ID NO: 421705 - DNA, 120 bp, Artificial Sequence
  ENSG00000150773_2 (sequence is synthesized)
aggtctgcttacccaagttactcagttttggaacctcctagatgatctagctcagagtgaccctgagggctatgagaagtttattcagcagcagctgaaagaagggaaacagctctgtgc

SEQ ID NO: 421706 - DNA, 120 bp, Artificial Sequence
  ENSG00000150773_3 (sequence is synthesized)
tgccccagaaccacagctttgtctacagaccaggattctgaaaccaaaagaaaaaatactttttatcaacctgtgtcagtggacaaggatcccagctccccaatcaaccactcatccagt

SEQ ID NO: 421707 - DNA, 120 bp, Artificial Sequence
  ENSG00000150773_4 (sequence is synthesized)
acctctaactgttggcaaaccagaagatacaactgagatatcagatgcttacacagtcattgatgttgcctacaatcctgatgttcttcatgcagcagaaaaggaccaagtgaaaaaaaa

SEQ ID NO: 421708 - DNA, 120 bp, Artificial Sequence
  ENSG00000150773_5 (sequence is synthesized)
tccagttcaccctctcacactcttaccatattaccaaatttagaataaaaggaagcattcaaagaatgaaacaaaatctgatgggaatccaaactgattccatagatttaagagaaaaaa

SEQ ID NO: 421709 - DNA, 120 bp, Artificial Sequence
  ENSG00000150773_6 (sequence is synthesized)
tgagaagggaactaactcttggacagatacgaagcagtactatgagcaatccagatcactttcctcaactgttactgccaaaagaccaagtttcaggcaaagcagtgtgtctgatagaag

SEQ ID NO: 421710 - DNA, 120 bp, Artificial Sequence
  ENSG00000150773_7 (sequence is synthesized)
agatttccagtactgaaatccaggtggagatgaagatgccagcctatgaactaaaaattgtgcatgatcacagtgagaaacctctgaaaattgagttgaaagttgaattacctggtatta

SEQ ID NO: 421711 - DNA, 120 bp, Artificial Sequence
  ENSG00000150773_8 (sequence is synthesized)
attctgtctctctctgtgaccttagtgtttctgaggatgatttattgattgaagtatctgagaagtacagattacatctgaatcttccaaaacttattgatactgaaatgaccacagcaa

SEQ ID NO: 421712 - DNA, 120 bp, Artificial Sequence
  ENSG00000150773_9 (sequence is synthesized)
aatttatcaaagaaaaatccacgctaatcatcacaatgcctttggtgtgaaagaagagcatcatatgttttgggttttcagtgctaaagtcatgtgaattaaaggaccttcattttggct

SEQ ID NO: 421713 - DNA, 120 bp, Artificial Sequence
  ENSG00000150773_10 (sequence is synthesized)
tgagggctatgagaagtttattcagcagcagctgaaagaagggaaacagctctgtgctgccccagaaccacagctttgtctacagaccaggattctgacagagtcttactttgtcaccag

SEQ ID NO: 421714 - DNA, 60 bp, Artificial Sequence
  ENSG00000150773_11 (sequence is synthesized)
accaaaagaaaaaatactttttatcaacctgtgtcagtggacaaggatcccagctcccca

SEQ ID NO: 421715 - DNA, 120 bp, Artificial Sequence
  ENSG00000150773_12 (sequence is synthesized)
tgtgaccttagtgtttctgaggtaagttgaatagataacactgtaaatttgtattggccagcattcactaacatatattatgccacagtaacaaactacataatttcaggggcttacaat

SEQ ID NO: 421716 - DNA, 120 bp, Artificial Sequence
  ENSG00000150773_13 (sequence is synthesized)
gatttgctcaggttacccggtgaaggagcaattcccttctgagatgtgccattcacatctcagcaaagggaaaatagaatgatcaaaccatgcagtggatcgtaatacttctactcagac

SEQ ID NO: 421717 - DNA, 120 bp, Artificial Sequence
  ENSG00000150773_14 (sequence is synthesized)
atgacacttcatgatatcacttctactcacgctccactggccaaagtaagtcacaaggccagttctacatcagtaggactgagaagtgtattctcacagtcacaggaagtcatatggcag

SEQ ID NO: 421718 - DNA, 120 bp, Artificial Sequence
  ENSG00000150773_15 (sequence is synthesized)
ggtaaacgtactatcctcttacagaagagcaaatagttagagtcagtcctacagtctaccagtctacactcttggttgcaaatatttgcttctttctggaaggaaaacacctccaatccc

SEQ ID NO: 421719 - DNA, 120 bp, Artificial Sequence
  ENSG00000150773_16 (sequence is synthesized)
agtatcagactccaaaggacagaattttgctttctcttcctcttgaaccatggactaagacatgtaaaaaaagttatgtactccctcagtcccatctgtcatgcaatgtggaatggggag

SEQ ID NO: 421720 - DNA, 120 bp, Artificial Sequence
  ENSG00000150773_17 (sequence is synthesized)
aagataaccgtaattaaccatctcaattcagaaatgggaaaaataagaggcacactgcagttactggtgcacagcaattctgaaatcctagtaggcagacattgtgagggctccttttct

SEQ ID NO: 421721 - DNA, 120 bp, Artificial Sequence
  ENSG00000150773_18 (sequence is synthesized)
tgtctctctctgtgaccttagtgtttctgagggaacaacagaaccacaagcattagcgaaagatgaattatctttgaagttttgaatgtttgaaccagatttggatcatattgatgatgg

SEQ ID NO: 421722 - DNA, 120 bp, Artificial Sequence
  ENSG00000150773_19 (sequence is synthesized)
tcccttgtgataagcttgtttcttttggataatcttcaacctaaaattactaattactgaaaaatcaaattaatgtattgttttcataataatacagcaaggtaaaagtctgtgtggaat

SEQ ID NO: 421723 - DNA, 120 bp, Artificial Sequence
  ENSG00000150776_0 (sequence is synthesized)
ctttttctcccaaaccacttcttcccccctaccccccgccacgcgaggctgcggcgcacggtatgggtgtgtttgtgtgtatttgtgtggggagggcgtttggagggaaggttaccggga

SEQ ID NO: 421724 - DNA, 120 bp, Artificial Sequence
  ENSG00000150776_1 (sequence is synthesized)
gctccgaggccgctggggaacagggatcccggtgacaaagatggggatatttcctctgtcttccacttggaaacctcaacccccgcttcaggctccctagatactttctggggcccaacc

SEQ ID NO: 421725 - DNA, 120 bp, Artificial Sequence
  ENSG00000150776_2 (sequence is synthesized)
gaaggccgtagccatccaaagcgttcccagcctttctggggagtgaaacttacccccggggttcgtcctagaggagcgtgagcggggaatgcccaggtcaaccgggctgtccgaattccg

SEQ ID NO: 421726 - DNA, 120 bp, Artificial Sequence
  ENSG00000150776_3 (sequence is synthesized)
ccccggctcagcctccggcctcagtccgggagagagatctgcctgtcggtctgggctgggggaaacgcggcagtggcctgggccacaggtgagggcagagtaaccagtgggaaggctgcg

SEQ ID NO: 421727 - DNA, 120 bp, Artificial Sequence
  ENSG00000150776_4 (sequence is synthesized)
ttttcacgaaggactcgggtgaagctgcagagctgcctttgagccctgactccttggcttcctgggtcggaggagatcttgtaatggagtggttcttcgtctcactagcaagatgcctga

SEQ ID NO: 421728 - DNA, 120 bp, Artificial Sequence
  ENSG00000150776_5 (sequence is synthesized)
tttcctcaggatcaagggattgaagaatgtcccggattccactggggaaggtcctcctgaggaatgtcatccggcacacagatgctcacaataagattcaggaggaatcagatatgtgga

SEQ ID NO: 421729 - DNA, 120 bp, Artificial Sequence
  ENSG00000150776_6 (sequence is synthesized)
aaataagagaactggaaaaacagatggaagatgcttaccgggggaccaaaaggaaaatgctacccagcagttcaagccggatgcgcagtgatggttttgatgaagaaagtcaaagatact

SEQ ID NO: 421730 - DNA, 120 bp, Artificial Sequence
  ENSG00000150776_7 (sequence is synthesized)
attggaggccaaagaatgaaatttctgggacactggaagatgattttcttaaggctaaatcctggaataaaaagttctatgattatgaagcaaacatgccagacagatggggtcacagtg

SEQ ID NO: 421731 - DNA, 120 bp, Artificial Sequence
  ENSG00000150776_8 (sequence is synthesized)
gttataaagagttataccctgaagaatttgaaacagacagtagtgatcagcaagatattaccaacgggaagaaaacatctccccaggtaaagtcatctacccatgaatcccgcaaacaca

SEQ ID NO: 421732 - DNA, 120 bp, Artificial Sequence
  ENSG00000150776_9 (sequence is synthesized)
agaagtcaaagaaatcccacaaaaaaaagcagaaaaaaaggtcacacaaaaaacagaagaaaagcaaaaaggaagccacagatataacagcagattcctcgagtgagttctcagaagaaa

SEQ ID NO: 421733 - DNA, 120 bp, Artificial Sequence
  ENSG00000150776_10 (sequence is synthesized)
ctggggcttctggtacaaggaaagggaaacaaccacataaacgcaagaaaaaatccaggaaaaagtctctcaaaaaacctgctttattcttagaggcagaaagtaacacttcacattcag

SEQ ID NO: 421734 - DNA, 120 bp, Artificial Sequence
  ENSG00000150776_11 (sequence is synthesized)
atgattcagcatccagcagttctgaggaaagtgaggaaagagacactaagaaaaccaaaaggaaaaagagagagaaaaaagcccatacctctgtagccaacaatgaaatacaggagagga

SEQ ID NO: 421735 - DNA, 120 bp, Artificial Sequence
  ENSG00000150776_12 (sequence is synthesized)
caaacaaacgcacaaattggaaagtagctacagatgaaaggtctgctgagagctcagaggatgactaaatgggaaacacttttgttttccacatgactgtggatatttacagttcttact

SEQ ID NO: 421736 - DNA, 120 bp, Artificial Sequence
  ENSG00000150776_13 (sequence is synthesized)
ccttgtggttttgccagtgactcttgttcagcacggggcctgaggtcagagctgtcttgtgccatctgtatgttctgacagacgtcttgtcttctattttggcgttaagcttgatcccct

SEQ ID NO: 421737 - DNA, 120 bp, Artificial Sequence
  ENSG00000150776_14 (sequence is synthesized)
tttcttgttaaaagggaatctggtattttgttatgaaggtttcttgaagagattatttttttttgcaattaattacgtttagtgtagagtgcatatacagcaaattaaaggacccagaaa

SEQ ID NO: 421738 - DNA, 120 bp, Artificial Sequence
  ENSG00000150776_15 (sequence is synthesized)
taatgccatgtaggatggtatgacaaggcaacactgtattgctctctgtttatatagcaggtgtcacaactaacttgtctttagccttggtgctttgatccttctatattttgaccccac

SEQ ID NO: 421739 - DNA, 120 bp, Artificial Sequence
  ENSG00000150776_16 (sequence is synthesized)
aggtgtggtccggtttacttaatcaggacatgggcctaagaacaaaccttttcccttcatgataacatccatagacaacttattagaagggactagagtttttgcaaatttccctgctgg

SEQ ID NO: 421740 - DNA, 120 bp, Artificial Sequence
  ENSG00000150776_17 (sequence is synthesized)
atggggcctatagctatacttagtatatgcctaaacatggtaattggatagtaaatggttttctagttccattgctgtatatttgcctaaatggacttgtgttcaaattatttcttcaat

SEQ ID NO: 421741 - DNA, 120 bp, Artificial Sequence
  ENSG00000150776_18 (sequence is synthesized)
tgtcatagataatcctgtaccaaatggggaagaattaggaaataatcatgttgtctaatggtactctggattcagggcagcaactgccatttaaatgttgtcttgttcatttctaaatct

SEQ ID NO: 421742 - DNA, 120 bp, Artificial Sequence
  ENSG00000150776_19 (sequence is synthesized)
gttcatgaagtttaggttttccctgaaactaagttgaattatttccaaaatgaaacaggcttctcagggacatatccacttcttcccagtctgcctttggattaaagcaccaagcagaga

SEQ ID NO: 421743 - DNA, 120 bp, Artificial Sequence
  ENSG00000150776_20 (sequence is synthesized)
ccacattaattccctttgctatactgtgatccttagtatgttaattcttaagaaaccaacatatcactgaaagaaggctggcagaacgcaagtgcattttttcactgtgggaagaaagat

SEQ ID NO: 421744 - DNA, 120 bp, Artificial Sequence
  ENSG00000150776_21 (sequence is synthesized)
caagtgacgtattattttttcctggttgtcacttaatgggctgagtaaaaagcttgaaaactcagactttcggtcttggttctgccactcattggttatgaggaggcccagagcaggtaa

SEQ ID NO: 421745 - DNA, 120 bp, Artificial Sequence
  ENSG00000150776_22 (sequence is synthesized)
gttcaccttcctggccttactttcctgatgtgtaatacggaattacttcacagtagcatgacagtataagacaccagcagtagatacaactatgatgacattccatgagttggtattttt

SEQ ID NO: 421746 - DNA, 120 bp, Artificial Sequence
  ENSG00000150776_23 (sequence is synthesized)
agttctaactgctaaatttgttctctttacgggacagatttctaataaagtgcttggtcttaaaatacatggttggacagaggtgccctatcccttaactatgagcaggtgctacctttt

SEQ ID NO: 421747 - DNA, 120 bp, Artificial Sequence
  ENSG00000150776_24 (sequence is synthesized)
gggatatttattttaaattttaatactttggtactcaattgtcagtgttccatggtgtgtatttttatttttgggattagtgggggtctaaagggagaagaatagtctctaattactacc

SEQ ID NO: 421748 - DNA, 120 bp, Artificial Sequence
  ENSG00000150776_25 (sequence is synthesized)
tcttaacctaaagcaattattttgttcctggagcaagttaaatctttgttggaaggagctttggccatatattttttagcatgcattgtttctgtgccctgaaagtacctgaaaggtttt

SEQ ID NO: 421749 - DNA, 120 bp, Artificial Sequence
  ENSG00000150776_26 (sequence is synthesized)
aagcacagactcaggaaaatgtgccagtagaacaggccatctccaggaaattggctctatttgggtcctgaccttcccttcctcccaagttagcaggcttgttctttcgcaaggaataca

SEQ ID NO: 421750 - DNA, 120 bp, Artificial Sequence
  ENSG00000150776_27 (sequence is synthesized)
catcttgcctttttttttttttttttgccatgttttccttttcttggtcatgtataagcaataaagctgttttttgttcttcatctttcttaaccccaaattttcttctatgccttaggc

SEQ ID NO: 421751 - DNA, 120 bp, Artificial Sequence
  ENSG00000150776_28 (sequence is synthesized)
ttcgatggttcttccaacccccttaatatggcttagggtggtttttcaaaacctacaatcccccatttgcactactggccatggaacatttatttctagtgttcctgccaatcagagatc

SEQ ID NO: 421752 - DNA, 120 bp, Artificial Sequence
  ENSG00000150776_29 (sequence is synthesized)
tctatattaaattctaaaatgggattaaaagaagagttggagaattcacacttattgagtaactgatgtcatacaacctggaatttctgaattccaaataaataaatttcactctttgaa

SEQ ID NO: 421753 - DNA, 120 bp, Artificial Sequence
  ENSG00000150776_30 (sequence is synthesized)
cattattaataatggccccaaaaaataatggccaagtaatccaaatgtctgtcaactgatgaatgggtaaacaaaatgcgatatatccatacaatggaatattatttggcagtaaaagaa

SEQ ID NO: 421754 - DNA, 120 bp, Artificial Sequence
  ENSG00000150776_31 (sequence is synthesized)
atgaagtacagatacatgttacaacgtggccttgaaaacatcatgctaagtgagaaggaagaagccaagtcacgaaagaccgcatattgtatgattctatttatgtactatgtccataca

SEQ ID NO: 421755 - DNA, 120 bp, Artificial Sequence
  ENSG00000150776_32 (sequence is synthesized)
taactgtatgattccatttatgtggtaggcaattccatagagacagaaggcagattagtgattgccctgggctggaggcactacactttgaatgccatgatatgtgaattatacttcaat

SEQ ID NO: 421756 - DNA, 120 bp, Artificial Sequence
  ENSG00000150776_33 (sequence is synthesized)
ccatctcaaaaaaaaaaaaaaaaattgtccccatgtagacagcatgatattatgaagtgtttttggaaaagtgcttcatagctaaagagcagagtgtaagagttcgttagtgtttcttaa

SEQ ID NO: 421757 - DNA, 120 bp, Artificial Sequence
  ENSG00000150776_34 (sequence is synthesized)
aagagcagagtgtaagagttcgttagtgtttcttaaggaaagcaatggcaagttctcttacaaatggacaaaataatcttgtatgtctgaagtgatagtgtacagtacaggaaatgtagc

SEQ ID NO: 421758 - DNA, 120 bp, Artificial Sequence
  ENSG00000150776_35 (sequence is synthesized)
tgttactgagctataatgggggcttggttctaccatatctctactttgtgtttatgtttgtgtatgcatgtactccaaagtctttctaatgttgctttaatttccaaaaatgtatgcatt

SEQ ID NO: 421759 - DNA, 120 bp, Artificial Sequence
  ENSG00000150776_36 (sequence is synthesized)
gctttaacaatacatgtgatgtgtcatattacagatggggtcacagtggttataaagagttataccctgaagaatttgaaacagacaggtaaggaaaataggcttactgaaagaaactaa

SEQ ID NO: 421760 - DNA, 120 bp, Artificial Sequence
  ENSG00000150776_37 (sequence is synthesized)
gatggtacaaaatctgtattataaattgatttcttaacttttacgaagaatatacttgccatcaaaaatgtagctagagaaacaataggtgatttagttaggaggtgatccctgttttcc

SEQ ID NO: 421761 - DNA, 120 bp, Artificial Sequence
  ENSG00000150776_38 (sequence is synthesized)
cattctctggttgatgtttggcatgtctgtaagcattttggtttttatatatagtattccatacagtaactcagtatggcagcttagaatttttaccttcattttaaagatgaggaaaca

SEQ ID NO: 421762 - DNA, 120 bp, Artificial Sequence
  ENSG00000150776_39 (sequence is synthesized)
aacaaaaactcaatgagaatattaaagtgttaaagtatacattaaagtgcttatttaaaattcagatgttaacctcaattttttaatctagaatgcaaaatattaaaataatacgctttt

SEQ ID NO: 421763 - DNA, 120 bp, Artificial Sequence
  ENSG00000150776_40 (sequence is synthesized)
atatctagttccggaatgtcccccttctggtgccaggcttgcttttcagttgggcctgacccacttctcttccaggaaagcgcccgccttccttctgcacccgtcaacctctggagtgtc

SEQ ID NO: 421764 - DNA, 120 bp, Artificial Sequence
  ENSG00000150776_41 (sequence is synthesized)
ctgaaaaccctcccttgtgggagtctctgggctgcctgttggtgggacgatttctcaggagcacgacttccggcctgaaaaggaagtctcctcctttttctcccaaaccacttcttcccc

SEQ ID NO: 421765 - DNA, 120 bp, Artificial Sequence
  ENSG00000150779_0 (sequence is synthesized)
aagtcgagaggcggtgcacacccgtcgcgcatgcgcaaacacagctgtcggaaggtggcgagcctgaggcgaacaatggcggagctgggcgaagccgatgaagcggagttgcagcgcctg

SEQ ID NO: 421766 - DNA, 120 bp, Artificial Sequence
  ENSG00000150779_1 (sequence is synthesized)
gtggccgccgagcagcagaaggcgcagtttactgcacaggtgcatcacttcatggagttatgttgggataaatgtgtggagaagccagggaatcgcctagactctcgcactgaaaattgt

SEQ ID NO: 421767 - DNA, 120 bp, Artificial Sequence
  ENSG00000150779_2 (sequence is synthesized)
ctctccagctgtgtagaccgcttcattgacaccactcttgccatcaccagtcggtttgcccagattgtacagaaaggagggcagtaggccatcccccaggagaatgacagaagcaaagga

SEQ ID NO: 421768 - DNA, 120 bp, Artificial Sequence
  ENSG00000150779_3 (sequence is synthesized)
ggtgctaaaaagtaaaagatgaaatgttcaaagagtgaaatttatttatttggaattcagaaattccaggttgtatgacatcagttactcaataagtgtgaattctccaactcttctttt

SEQ ID NO: 421769 - DNA, 120 bp, Artificial Sequence
  ENSG00000150779_4 (sequence is synthesized)
aatcccattttagaatttaatatagagatctctgattggcaggaacactagaaataaatgttccatggccagtagtgcaaatgggggattgtaggttttgaaaaaccaccctaagccata

SEQ ID NO: 421770 - DNA, 120 bp, Artificial Sequence
  ENSG00000150779_5 (sequence is synthesized)
ttaagggggttggaagaaccatcgaagcctaaggcatagaagaaaatttggggttaagaaagatgaagaacaaaaaacagctttattgcttatacatgaccaagaaaaggaaaacatggc

SEQ ID NO: 421771 - DNA, 120 bp, Artificial Sequence
  ENSG00000150779_6 (sequence is synthesized)
gtggccgccgagcagcagaaggcgcagtttactgcacaggccacgtgcccgtagaaaagatactcatccactgtgggttttggtgtcgccgtcaccccactgcctcactggattgtgagg

SEQ ID NO: 421772 - DNA, 120 bp, Artificial Sequence
  ENSG00000150779_7 (sequence is synthesized)
atcatatgcgacaatgtatttgaaaacgactagaacattatcggaggaaggtggactctgaagtagtcgctgtagactatggatgtagaacaagggtttggagcccttcggacatggttc

SEQ ID NO: 421773 - DNA, 120 bp, Artificial Sequence
  ENSG00000150779_8 (sequence is synthesized)
taacgcggcctgacttcttgctggctacatgaccttggactacataatcacgcctcttaaatgggaggtgatgacagctatccttgaggaccttagagagaactgatttcttagtaccca

SEQ ID NO: 421774 - DNA, 120 bp, Artificial Sequence
  ENSG00000150782_0 (sequence is synthesized)
cctttgctcccctggcgactgcctggacagtcagcaaggaattgtctcccagtgcattttgccctcctggctgccaactctggctgctaaagcggctgccacctgctgcagtctacacag

SEQ ID NO: 421775 - DNA, 120 bp, Artificial Sequence
  ENSG00000150782_1 (sequence is synthesized)
cttcgggaagaggaaaggaacctcagaccttccagatcgcttcctctcgcaacaaactatttgtcgcaggaataaagatggctgctgaaccagtagaagacaattgcatcaactttgtgg

SEQ ID NO: 421776 - DNA, 120 bp, Artificial Sequence
  ENSG00000150782_2 (sequence is synthesized)
caatgaaatttattgacaatacgctttactttatagctgaagatgatgaaaacctggaatcagattactttggcaagcttgaatctaaattatcagtcataagaaatttgaatgaccaag

SEQ ID NO: 421777 - DNA, 120 bp, Artificial Sequence
  ENSG00000150782_3 (sequence is synthesized)
ttctcttcattgaccaaggaaatcggcctctatttgaagatatgactgattctgactgtagagataatgcaccccggaccatatttattataagtatgtataaagatagccagcctagag

SEQ ID NO: 421778 - DNA, 120 bp, Artificial Sequence
  ENSG00000150782_4 (sequence is synthesized)
atttcaactctctcctgtgagaacaaaattatttcctttaaggaaatgaatcctcctgataacatcaaggatacaaaaagtgacatcatattctttcagagaagtgtcccaggacatgat

SEQ ID NO: 421779 - DNA, 120 bp, Artificial Sequence
  ENSG00000150782_5 (sequence is synthesized)
aataagatgcaatttgaatcttcatcatacgaaggatactttctagcttgtgaaaaagagagagacctttttaaactcattttgaaaaaagaggatgaattgggggatagatctataatg

SEQ ID NO: 421780 - DNA, 76 bp, Artificial Sequence
  ENSG00000150782_6 (sequence is synthesized)
tttgaaaaaagaggatgaattgggggatagatctataatgttcactgttcaaaacgaagactagctattaaaattt

SEQ ID NO: 421781 - DNA, 79 bp, Artificial Sequence
  ENSG00000150782_7 (sequence is synthesized)
ctaaaaatacaaaaaattagctgagtgtagtgacgcatgccctccactccggaggtagaggttgtggtgagccgagatt

SEQ ID NO: 421782 - DNA, 120 bp, Artificial Sequence
  ENSG00000150782_8 (sequence is synthesized)
aatgaaatttattgacaatacgctttactttatagctgaagatgatggtaaagtagaaatgaatttatttttctttgcaaactaagtatctgcttgagacacatctatctcaccattgtc

SEQ ID NO: 421783 - DNA, 120 bp, Artificial Sequence
  ENSG00000150782_9 (sequence is synthesized)
gccttcaaagaaatgtggactcagtagcacagctttggaatgaagatgatcataagagatacaaagaagaacctctagcaaaagatgcttctctatgccttaaaaaattctccagctctt

SEQ ID NO: 421784 - DNA, 120 bp, Artificial Sequence
  ENSG00000150782_10 (sequence is synthesized)
agaatctacaaaatagactttgcctgtttcataggtcctaagattagcatgaagtcatggattctgttgtagggggagcgttgcataggaaaaagggattgaagcattagaattgtccaa

SEQ ID NO: 421785 - DNA, 120 bp, Artificial Sequence
  ENSG00000150782_11 (sequence is synthesized)
aatcagtaacacctcctctcagaaatgctttgggaagaagcctggaaggttcccgggttggtggtggggtggggcagaaaattctggaagtagaggagataggaatgggtggggcaagaa

SEQ ID NO: 421786 - DNA, 120 bp, Artificial Sequence
  ENSG00000150782_12 (sequence is synthesized)
gaccacattcagaggccaaaagctgaaagaaaccatggcatttatgatgaattcagggtaattcagaatggaagtagagtaggagtaggagactggtgagagaagctagagtgataaaca

SEQ ID NO: 421787 - DNA, 120 bp, Artificial Sequence
  ENSG00000150782_13 (sequence is synthesized)
ggataaaacccaggaggtagaattgctgggttgatagaagagaaaggatgattggcaaattaaagcttcagtagagggtacatgccgagcacaaatgggatcagccctagataccagaaa

SEQ ID NO: 421788 - DNA, 120 bp, Artificial Sequence
  ENSG00000150782_14 (sequence is synthesized)
tggcactttctcatttccccttgggacaaaagggagagaggcaataactggtgctgccagagttaaatttgtacgtggagtagcaggaaatcatttgctgaaaatgaaaacagagatgat

SEQ ID NO: 421789 - DNA, 120 bp, Artificial Sequence
  ENSG00000150782_15 (sequence is synthesized)
ggtgtagaggtcctgaagagagcaaagaaaatttgaaattgcggctatcagctatggaagagagtgctgaactggaaaacaaaagaagtattgacaattggtatgcttgtaatggcaccg

SEQ ID NO: 421790 - DNA, 120 bp, Artificial Sequence
  ENSG00000150782_16 (sequence is synthesized)
atttgaacgcttgtgccattgttcaccagcagcactcagcagccaagtttggagttttgtagcagaaagacaaataagttagggatttaatatcctggcaaaatggtagacaaaatgaac

SEQ ID NO: 421791 - DNA, 120 bp, Artificial Sequence
  ENSG00000150782_17 (sequence is synthesized)
tctgagatccagctgcacagggaaggaagggaagacgggaagaggttagataggaaatacaagagtcaggagactggaagatgttgtgaaatttaagaacacatagagttggagtaaaag

SEQ ID NO: 421792 - DNA, 120 bp, Artificial Sequence
  ENSG00000150782_18 (sequence is synthesized)
tgtaagaaaactagaagggtaagagaccggtcagaaagtaggctatttgaagttaacacttcagaggcagagtagttctgaatggtaacaagaaattgagtgtgcctttgagagtaggtt

SEQ ID NO: 421793 - DNA, 120 bp, Artificial Sequence
  ENSG00000150782_19 (sequence is synthesized)
aaaaaacaataggcaactttattgtagctacttctggaacagaagattgtcattaatagttttagaaaactaaaatatatagcatacttatttgtcaattaacaaagaaactatgtattt

SEQ ID NO: 421794 - DNA, 120 bp, Artificial Sequence
  ENSG00000150783_0 (sequence is synthesized)
actccctcgcgttcgctgacgaggaaggtccccataccgcgaagtacattggccttggggtggggctggagggatgggcgcctgtgagaatgtgacggactgtgacacaaggaaggctgg

SEQ ID NO: 421795 - DNA, 120 bp, Artificial Sequence
  ENSG00000150783_1 (sequence is synthesized)
tgccttcggaatatgatggcaaatcaccttgtaaagcctgataatagaaattgcaagaggccaagagaattggagtctccagtgccagatagtccacagctgtcctctcttggaaaatca

SEQ ID NO: 421796 - DNA, 120 bp, Artificial Sequence
  ENSG00000150783_2 (sequence is synthesized)
gattcatctttctctgaaatttccggactattttataaagatgaagccttggagaaagatttaaatgatgtgagcaaggaaattaatctaatgttgtctacctatgcaaagcttttaagt

SEQ ID NO: 421797 - DNA, 120 bp, Artificial Sequence
  ENSG00000150783_3 (sequence is synthesized)
gagagagcagcagtagatgcatcttacattgatgagatagatgaactcttcaaagaagccaatgctattgaaaactttctaatacaaaaaagagagttcctgcgacagaggtttacagtg

SEQ ID NO: 421798 - DNA, 120 bp, Artificial Sequence
  ENSG00000150783_4 (sequence is synthesized)
tgttataatgaaagaatgacatttatgctttgaaagctctcgagttgttaaagaaaatgtatatctcgaatagagaaggggaaactccttgaatttctaggtttaaaaaggaacttttaa

SEQ ID NO: 421799 - DNA, 120 bp, Artificial Sequence
  ENSG00000150783_5 (sequence is synthesized)
attccttaatgttaatattaatgttcatgttaatgtcctaagctggccattaacatgaactacgtcacttttcttttgagggtcaaatatttagtgcattttatagaagtgtaaattatt

SEQ ID NO: 421800 - DNA, 120 bp, Artificial Sequence
  ENSG00000150783_6 (sequence is synthesized)
agtgcattttatagaagtgtaaattatttaaatcttatgtggattcttttattttttccttaaacttcttagtgtttctgaaacttctaaaaaaggattcagttaatttataatgtttaa

SEQ ID NO: 421801 - DNA, 120 bp, Artificial Sequence
  ENSG00000150783_7 (sequence is synthesized)
taaatatcagatagttttggagataattttgaaattttttttatggtcaggattataaaagaagattaaaaccttagaggtgatttttccagtttcttagaatataatgacataactgtg

SEQ ID NO: 421802 - DNA, 120 bp, Artificial Sequence
  ENSG00000150783_8 (sequence is synthesized)
tgctatttccatttgattattttcactattagttattatgtatgactaataaaagctctcggcttaaaattattttcttgtggtaaaagtagtaaaataaaaaccagaaattactcacca

SEQ ID NO: 421803 - DNA, 120 bp, Artificial Sequence
  ENSG00000150787_0 (sequence is synthesized)
agacagcgccgggaagatgagcacggaaggtggtggccgtcgctgccaggcacaagtgtcccgccgcatctccttcagcgcgagccaccgattgtacagtaaatttctaagtgatgaaga

SEQ ID NO: 421804 - DNA, 120 bp, Artificial Sequence
  ENSG00000150787_1 (sequence is synthesized)
aaacttgaaactgtttgggaaatgcaacaatccaaatggccatgggcacaattataaagttgtggtgacagtacatggagagattgaccctgctacgggaatggttatgaatctggctga

SEQ ID NO: 421805 - DNA, 120 bp, Artificial Sequence
  ENSG00000150787_2 (sequence is synthesized)
tctcaaaaaatatatggaggaggcgattatgcagccccttgatcataagaatctggatatggatgtgccatactttgcagatgtggtgagcacgactgaaaatgtagctgtttatatctg

SEQ ID NO: 421806 - DNA, 120 bp, Artificial Sequence
  ENSG00000150787_3 (sequence is synthesized)
ttctttataaagtaaaagtatacgaaactgacaataatattgtggtttataaaggagaatagctattggggttagcattgcacaaagcccagtttctttctgtgtttgaaaaagattttg

SEQ ID NO: 421807 - DNA, 120 bp, Artificial Sequence
  ENSG00000150787_4 (sequence is synthesized)
atccccttggaatattaagaggtcaacacgtgattgttgtacgtacacattgtgctctggagtgcctatttattgaaatcattgtaagacctgttataaatttaagtctatttaaaacta

SEQ ID NO: 421808 - DNA, 120 bp, Artificial Sequence
  ENSG00000150787_5 (sequence is synthesized)
aacttgtaatatacatcctgaaaatcatttagagagtcttttatttataaattaaaaatcacttcattttcacaaaatgttttggtgtgggattatttgaaagcaaaagaaatctaattt

SEQ ID NO: 421809 - DNA, 120 bp, Artificial Sequence
  ENSG00000150787_6 (sequence is synthesized)
tgttttctccattacctcattttagtattaatttttacttggtataatatacatggttaaaatgcttatgtgacttcgagtaggtgaatcttaaagaaataaaattcaagtgaccacaaa

SEQ ID NO: 421810 - DNA, 120 bp, Artificial Sequence
  ENSG00000150787_7 (sequence is synthesized)
ataacaggaatgccccttacccagcagcaggcagatatggccatgggtcaagacatcctgcttcatgaggaaaccttgttcccaccactgattcagactgcgtaacccttccagtgttta

SEQ ID NO: 421811 - DNA, 120 bp, Artificial Sequence
  ENSG00000150787_8 (sequence is synthesized)
ggccatacacttctcataaacagcaaggcctcttcacagagcatctcccaacatgacggcctgcttcagcagagtgagcaggtactgggaggaggagatgaaccctgctcctgtggaggc

SEQ ID NO: 421812 - DNA, 120 bp, Artificial Sequence
  ENSG00000150787_9 (sequence is synthesized)
tatgaggtattgatgtcgtgtacacatccaaggggtggtctaattatttacaactaggctcctgaaaatcagccctgaatccagctttctaccttctcttttcaatatcatttaattaat

SEQ ID NO: 421813 - DNA, 120 bp, Artificial Sequence
  ENSG00000150787_10 (sequence is synthesized)
tgagtcacagaaacagcctttaattcatttaattcccttacattcttctaacttctgccatatatctcgtgatctgtgatttttccttttgcactgatttgatactatgtagtagcaact

SEQ ID NO: 421814 - DNA, 120 bp, Artificial Sequence
  ENSG00000150787_11 (sequence is synthesized)
aaatatcgttacttataccatagcagctaatctttcttatcaacaaaaacaaataatgtccacattcctgaaaacaattaggctctatttctagccttgtgaacaaatgcaattttgtca

SEQ ID NO: 421815 - DNA, 120 bp, Artificial Sequence
  ENSG00000150787_12 (sequence is synthesized)
gtgttgtctttaatatgctgtatgtggacaggtagaagggctatacaatgaaaaggatgcttgaagtacatggtgcttccatgctgaggtcaatgattatctctgggatgaaggcaaatg

SEQ ID NO: 421816 - DNA, 120 bp, Artificial Sequence
  ENSG00000150787_13 (sequence is synthesized)
tgcaaatgtgggcacagtctctgcacattgtactgcctttaataatttgccagccgtttaatatggagagcctatcacagtaatattcacctttgtttattctttagattgaccctgcta

SEQ ID NO: 421817 - DNA, 120 bp, Artificial Sequence
  ENSG00000150787_14 (sequence is synthesized)
gagagaaaaactgatgacatttcagcccttcaataaggatgaaagagtattcagcaaatgtagacataaagaatgggaaaacttacggacacagtgtgaatgctttgagccttgaatgag

SEQ ID NO: 421818 - DNA, 120 bp, Artificial Sequence
  ENSG00000150787_15 (sequence is synthesized)
aaattaaatgggagttcagaatgaaaggatctgttgtcttggttgggtgtgtgttaagttttaccttgcaatgtcaactcttacaaacagtccaaaacaatgaatggtttaaagcatttt

SEQ ID NO: 421819 - DNA, 120 bp, Artificial Sequence
  ENSG00000150787_16 (sequence is synthesized)
gttgcctaggaatgtaatgtatggcagaaaaataggtttggtctaaagctttgccagcagtgttcgaagaaagtaggtaatttgttcaaggataagagacttgattctttgaggtacagc

SEQ ID NO: 421820 - DNA, 120 bp, Artificial Sequence
  ENSG00000150787_17 (sequence is synthesized)
ctgccttaaaaaacaggtacataagtcgtagagtataaaacagtatgtggtgtggtggcataaaaaaaaacagacaaggtgtcaggagattaggattactggtttagctacagcctcttc

SEQ ID NO: 421821 - DNA, 120 bp, Artificial Sequence
  ENSG00000150787_18 (sequence is synthesized)
cttaatctatggtatctcagtctcagtgtactcacttacatgtaatatctaatggtatttgtacagaactaaaatacataaattcataaaagttattaatgtgtaaagcactgataaagt

SEQ ID NO: 421822 - DNA, 88 bp, Artificial Sequence
  ENSG00000150787_19 (sequence is synthesized)
gataaaagatggagttccactctttttgcccaggctggaatggtgtgatctcccgtcactacaacctccacctcccaggttcgagcga

SEQ ID NO: 421823 - DNA, 120 bp, Artificial Sequence
  ENSG00000150787_20 (sequence is synthesized)
acagatctaataatttatgttgccaacttgtgcttgtatgttgctaacttgtgcttggatgttgatctgttgaaagtcatgctgttttttttgtattttgttttctttccatagttgtgg

SEQ ID NO: 421824 - DNA, 120 bp, Artificial Sequence
  ENSG00000150787_21 (sequence is synthesized)
ttgatttgaatactttgattgttgtgtgatttctgaagttttaatttaatgaaatctttcgaaactagaatttctattttctgtaaatattaaacatgaaattttattgtttgcattttg

SEQ ID NO: 421825 - DNA, 120 bp, Artificial Sequence
  ENSG00000150787_22 (sequence is synthesized)
ttgctgggctctctttcagccagtgtggtggattctgtgttgaaaactgttccagtcagtattgcttcattgttggcccttgtatatgtgtgtgtggtgagctgccgccattccaggcct

SEQ ID NO: 421826 - DNA, 80 bp, Artificial Sequence
  ENSG00000150867_0 (sequence is synthesized)
agccgcgggctgagcgcggatccgcggcgggcgcaggatacgggccggggcgcgagccgagcgcagtctgccgggccgag

SEQ ID NO: 421827 - DNA, 120 bp, Artificial Sequence
  ENSG00000150867_1 (sequence is synthesized)
gccggggggatgcggctgcctccccgggccggggtgtagagagggcgggtccccggcctcgggagcacggcggtggaggggacataggaggcggccatggcgacccccggcaacctaggg

SEQ ID NO: 421828 - DNA, 120 bp, Artificial Sequence
  ENSG00000150867_2 (sequence is synthesized)
taggaggcggccatggcgacccccggcaacctagggtcctctgtcctggcgagcaagaccaagaccaagaagaagcacttcgtagcgcagaaagtgaagctgtttcgggccagcgacccg

SEQ ID NO: 421829 - DNA, 120 bp, Artificial Sequence
  ENSG00000150867_3 (sequence is synthesized)
ctgctcagcgtcctcatgtggggggtaaaccactcgatcaatgaactgagccatgttcaaatccctgttatgttgatgccagatgacttcaaagcctattcaaaaataaaggtggacaat

SEQ ID NO: 421830 - DNA, 120 bp, Artificial Sequence
  ENSG00000150867_4 (sequence is synthesized)
cacctttttaacaaagaaaacatgccgagccatttcaagtttaaggaatactgcccgatggtcttccgtaacctgcgggagaggtttggaattgatgatcaagatttccagaattccctg

SEQ ID NO: 421831 - DNA, 120 bp, Artificial Sequence
  ENSG00000150867_5 (sequence is synthesized)
accaggagcgcacccctccccaacgactcccaggcccgcagtggagctcgttttcacacttcctacgacaaaagatacatcatcaagactattaccagtgaagacgtggccgaaatgcac

SEQ ID NO: 421832 - DNA, 120 bp, Artificial Sequence
  ENSG00000150867_6 (sequence is synthesized)
aacatcctgaagaaataccaccagtacatagtggaatgtcatgggatcacccttcttccccagttcttgggcatgtaccggcttaatgttgatggagttgaaatatatgtgatagttaca

SEQ ID NO: 421833 - DNA, 120 bp, Artificial Sequence
  ENSG00000150867_7 (sequence is synthesized)
agaaatgtattcagccaccgtttgtctgtgtataggaaatacgacttaaagggctctacagtggctagagaagctagtgacaaagaaaaggccaaagaactgccaactctgaaagataat

SEQ ID NO: 421834 - DNA, 120 bp, Artificial Sequence
  ENSG00000150867_8 (sequence is synthesized)
gatttcattaatgagggccaaaagatttatattgatgacaacaacaagaaggtcttcctggaaaaactaaaaaaggatgttgagtttctggcccagctgaagctcatggactacagtctg

SEQ ID NO: 421835 - DNA, 120 bp, Artificial Sequence
  ENSG00000150867_9 (sequence is synthesized)
ctggtgggaattcatgatgtggagagagccgaacaggaggaagtggagtgtgaggagaacgatggggaggaggagggcgagagcgatggcacccacccggtgggaacccccccagatagc

SEQ ID NO: 421836 - DNA, 120 bp, Artificial Sequence
  ENSG00000150867_10 (sequence is synthesized)
cccgggaatacactgaacagctcaccacccctggctcccggggagttcgatccgaacatcgacgtctatggaattaagtgccatgaaaactcgcctaggaaggaggtgtacttcatggca

SEQ ID NO: 421837 - DNA, 120 bp, Artificial Sequence
  ENSG00000150867_11 (sequence is synthesized)
attattgacatccttactcattatgatgcaaaaaagaaagctgcccatgctgcaaaaactgttaaacatggcgctggcgcggagatctccaccgtgaacccagaacagtattcaaagcgc

SEQ ID NO: 421838 - DNA, 120 bp, Artificial Sequence
  ENSG00000150867_12 (sequence is synthesized)
tttttggactttattggccacatcttgacgtaacctcctgcgcagcctcggacagacatgaacattggatggacagaggtggcttcggtgtaggaaaaatgaaaaccaaactcagtgaag

SEQ ID NO: 421839 - DNA, 120 bp, Artificial Sequence
  ENSG00000150867_13 (sequence is synthesized)
tactcatcttgcaggaagcaaacctccttgtttacatcttcaggccaagatgactgatttgggggctactcgctttacagctacctgattttcccagcatcgttctagctatttctgact

SEQ ID NO: 421840 - DNA, 120 bp, Artificial Sequence
  ENSG00000150867_14 (sequence is synthesized)
ttgtgtatatgtgtgtgtgtgtgtgttgggggggggtgagtgtgtgcgcgcgtgtgcattttaaaagtcataaattaattaaaacagatccacttcggtcagtatgtgtcccaacaaaga

SEQ ID NO: 421841 - DNA, 120 bp, Artificial Sequence
  ENSG00000150867_15 (sequence is synthesized)
tttttttttttttttttttggagttgaaagatgtgagacagtattcagaataatgaagataataatgatgattattataataatgatgatgattccaaggaaaaaacctacagcgaatgt

SEQ ID NO: 421842 - DNA, 120 bp, Artificial Sequence
  ENSG00000150867_16 (sequence is synthesized)
taatgatgatgattccaaggaaaaaacctacagcgaatgttccatttctaccccgcacgcagacactctccctaacactgataacctgagcccccagcactggacggaagaatgctggcg

SEQ ID NO: 421843 - DNA, 120 bp, Artificial Sequence
  ENSG00000150867_17 (sequence is synthesized)
tctccgtgtgtactggttcagggttctggccccagccttgtcaggaccccctggtgtccagagcccccacccctcccgcaacaagcagctgatgccccagtgattctctatacatttttc

SEQ ID NO: 421844 - DNA, 120 bp, Artificial Sequence
  ENSG00000150867_18 (sequence is synthesized)
acctcggccaatatgtccaggaaaactgcttacttctcttttcttgcctggagccttcattgttcacccttacgttgcaatataggaattaatgctacaaaataaaagtaaagcttacct

SEQ ID NO: 421845 - DNA, 120 bp, Artificial Sequence
  ENSG00000150867_19 (sequence is synthesized)
gaaaagtgcatagtttggggcaatggtatctacatctcccactgtgggaaaaccagcaaagcatcaaaactctcaattctcctgttaccaaatgcagatctgaattataagatgtttatg

SEQ ID NO: 421846 - DNA, 120 bp, Artificial Sequence
  ENSG00000150867_20 (sequence is synthesized)
tttgaccattgtttcaacaatgggattttgttacgaattatccctttaactgaaaccctcagttttactgtttacattattaggaaaacagggatatcttttgaatctaaaaatttgatg

SEQ ID NO: 421847 - DNA, 120 bp, Artificial Sequence
  ENSG00000150867_21 (sequence is synthesized)
tacagcatgtgatttttgaagtttacatgtaaagtcacagtataggtgaaataacgtttgtcatattttgagacgtatcctgcagccatgtttttacgtgagtgttttagtcaaagtaca

SEQ ID NO: 421848 - DNA, 120 bp, Artificial Sequence
  ENSG00000150867_22 (sequence is synthesized)
tggtagacagtctttcacaataaaaggaaaaggatttttttttcctccaaatgtacatttatcaacctaatgattgatttttttaaaaagagatttcgccccagtctggtttatgaaagt

SEQ ID NO: 421849 - DNA, 120 bp, Artificial Sequence
  ENSG00000150867_23 (sequence is synthesized)
tcattgccctaaactgtgctgattgtttttaatcaagttataaatttccaacctagatcatgtatctaccaactctcctgcattttccaaaaggcattgagcttaaatattagtcttgct

SEQ ID NO: 421850 - DNA, 120 bp, Artificial Sequence
  ENSG00000150867_24 (sequence is synthesized)
tagagtaggttatccacttacatgctgcgctaaagccatgcctttgaaactccttgtttaaaacatgatatgatttttgtgggcagtttcagaaaagaaaacaaacaaacaaaaatcgac

SEQ ID NO: 421851 - DNA, 120 bp, Artificial Sequence
  ENSG00000150867_25 (sequence is synthesized)
cctttaattattacttgcaactcaacagatctccctgccgtactgccttttccaggaactttacttcagggctgtccagattgcagctgtgccccgtgtatgtggatctagttcacagag

SEQ ID NO: 421852 - DNA, 120 bp, Artificial Sequence
  ENSG00000150867_26 (sequence is synthesized)
tctttggaagccagcagtcgtgccctccgtatactgtccactcattttatgtagatttggtatcctcagcagccagtgttaacaccactgtcacgtagtgtacagattcatcttttatgt

SEQ ID NO: 421853 - DNA, 120 bp, Artificial Sequence
  ENSG00000150867_27 (sequence is synthesized)
atttaaagtaatccatactatgatttggtttttccctgcaccattaattctggcatcagatcagtttttgtgttgtgaagttctactgtggtttgacccaagaccacaaccatgagaccc

SEQ ID NO: 421854 - DNA, 120 bp, Artificial Sequence
  ENSG00000150867_28 (sequence is synthesized)
tgaagtaaagataaggtacacatacattatttgagtaactgtttccttgggggccaatctgtgtatgcttttagaagtttacagaatgcttttatttttgtctataacaaacagtctgtc

SEQ ID NO: 421855 - DNA, 120 bp, Artificial Sequence
  ENSG00000150867_29 (sequence is synthesized)
atttatttctgttgataaaccatttggacagagtgaggacgtttgccctgttatctcctagtgctaacaatacactccagtcatgagccgggctttacaaataaagcacttttgatgact

SEQ ID NO: 421856 - DNA, 120 bp, Artificial Sequence
  ENSG00000150867_30 (sequence is synthesized)
cacaagatgaatccttttttcctctgtcccaattgtgtgtctctgttccaaacacattttaaatactcggtcctgacagtgtctttagctaatccttgaagaaatgaaagtggaattgaa

SEQ ID NO: 421857 - DNA, 120 bp, Artificial Sequence
  ENSG00000150867_31 (sequence is synthesized)
gcgcatcactaggatgttacacaaattcttttttgtttgaaaaatgttccagagataaaagtgcaaaagaagataatgaagtgttctaatatgaaatattcaaaactgaagcatgattgt

SEQ ID NO: 421858 - DNA, 120 bp, Artificial Sequence
  ENSG00000150867_32 (sequence is synthesized)
gaaaagtctcccacccctgctattgtggttcttcctgttccccattctgctgccaccagcgagaaacactgtattgacccgatgagagttctacttcatttctcttcatcaaattgttga

SEQ ID NO: 421859 - DNA, 120 bp, Artificial Sequence
  ENSG00000150867_33 (sequence is synthesized)
atagtgaaacagttatttgttgcaagcatggttggaaggaacattccacatgcaacttgctcttgaaaaacacagccacctgtgcagtaaacctataatcgaaaatggcactgacagctg

SEQ ID NO: 421860 - DNA, 120 bp, Artificial Sequence
  ENSG00000150867_34 (sequence is synthesized)
ggggagccggagtcagccctggacctccggctgctcgcccgcctcgaagcccccagccccgcggcgcgtgcccccagccctctgggccgcccaggcaccaccacttgcgtcccctttaga

SEQ ID NO: 421861 - DNA, 120 bp, Artificial Sequence
  ENSG00000150867_35 (sequence is synthesized)
ttgattaactatgagaaacatatttttaagaaggcttatttttgggaagttagagttgtgttgtttgaggtgtgctcctgaaagctgtttactcaaacctttatgggtcaagttttgtgc

SEQ ID NO: 421862 - DNA, 120 bp, Artificial Sequence
  ENSG00000150867_36 (sequence is synthesized)
tgggagcagggtttcccttgtagtgaggagcttacacctggaaacatagcaaatgacgcaatgggagagccacctcactgtggaatcagcctcttctctctggtccttcatcctagaatt

SEQ ID NO: 421863 - DNA, 67 bp, Artificial Sequence
  ENSG00000150867_37 (sequence is synthesized)
ccccattagcatcttgggggaatcaaaccaagaatctaccaacccttaagagccaactttagggaca

SEQ ID NO: 421864 - DNA, 120 bp, Artificial Sequence
  ENSG00000150867_38 (sequence is synthesized)
ccaagaatctaccaacccttaagagccaactttagggacaagcaatgtcttcatcgagaggcacatcacatccccaaaggccaaattttggtgaacagtgactgtgtccattctttatat

SEQ ID NO: 421865 - DNA, 120 bp, Artificial Sequence
  ENSG00000150873_0 (sequence is synthesized)
cctttcctaggagctgtccgttcccaggacaacagtcaacacagcacaggcgggagttcaaaacgaaactgggctcaaatgctctccccagcccggagagccctgtccccatcggccact

SEQ ID NO: 421866 - DNA, 120 bp, Artificial Sequence
  ENSG00000150873_1 (sequence is synthesized)
ctgagctcgaggcctaaagggacagtgaggaggaccctgcccaggctctcccggggttaggagggacagagtgttccaggaggaggtttgagctgagctcaggcacaggtctctctctct

SEQ ID NO: 421867 - DNA, 120 bp, Artificial Sequence
  ENSG00000150873_2 (sequence is synthesized)
ctctctctgacacaagcgcacacacacacacacacttgcaccatggggagccaccccacccctgggctccagagaaccacatcagctgggtaccgattgccccccaccaggccaccagcc

SEQ ID NO: 421868 - DNA, 120 bp, Artificial Sequence
  ENSG00000150873_3 (sequence is synthesized)
tcggtctccccagctgcccggggtggccctatggccagcaggggtcttgctggtggctgccaggccccccaggctctgaaggcgcagcgggtggctcagggagctgcctgcgatggcgtg

SEQ ID NO: 421869 - DNA, 120 bp, Artificial Sequence
  ENSG00000150873_4 (sequence is synthesized)
cagcaggaccagctgtggcgggagctcctggaggccgagcggcggggccagcagcgctggattcagaactggagtttcctgaaagactatgacccaatgggcaacaagaaggagcctgag

SEQ ID NO: 421870 - DNA, 120 bp, Artificial Sequence
  ENSG00000150873_5 (sequence is synthesized)
aagttgccagaccatgtgcctctcttttcggacacagttcccagttccacgaaccaggttgtgggcagcaggctggacacacccctgggacagactctcatccgcatggacttcttcttc

SEQ ID NO: 421871 - DNA, 120 bp, Artificial Sequence
  ENSG00000150873_6 (sequence is synthesized)
acagaaggggcccggaagaagaagctggaggaccagatgcagcccatctaggagcaaggagggctgggctggccttccccaggtgggtgtgggtggggacaagagacccagcccacaaca

SEQ ID NO: 421872 - DNA, 120 bp, Artificial Sequence
  ENSG00000150873_7 (sequence is synthesized)
gcaccagtcagctccccacacaaggcagcttgggtctgcactgtctgtaagctgcaggacactcttccaggggacccaaggggtcactcttacacactttttacacgtaagattcagagg

SEQ ID NO: 421873 - DNA, 120 bp, Artificial Sequence
  ENSG00000150873_8 (sequence is synthesized)
agtcagtaactggtccacggccgtacaatccccagcccttccagcttgggaactcatgggtgccccatgaaagggaccctgcattgtggtcaggagcactgaatgcctgggttcaaatcc

SEQ ID NO: 421874 - DNA, 120 bp, Artificial Sequence
  ENSG00000150873_9 (sequence is synthesized)
agcttgtgaccctgatgagctgtgggaccttgagctggctgctgcaacactctgtgcctccgtctcccctcctgcgattcagtgtgttcactccttgcagctgctgtgacaagtgagcac

SEQ ID NO: 421875 - DNA, 120 bp, Artificial Sequence
  ENSG00000150873_10 (sequence is synthesized)
aaactgcatagcttaaaacaacacaaacgtatcatcttacagctctgaagatcacaactctgacatgggtgacatgttgcagagctgtgctcttttaggagtatctggggaagaatctat

SEQ ID NO: 421876 - DNA, 120 bp, Artificial Sequence
  ENSG00000150873_11 (sequence is synthesized)
ttggcagctccttactccgtctttgaagccagcatcctagcatcttcaaatcagtctctatcgcttgctctctcctgcctcactccttcatcttttctttctttctctctctctctcttt

SEQ ID NO: 421877 - DNA, 120 bp, Artificial Sequence
  ENSG00000150873_12 (sequence is synthesized)
ctctctctctctcttttttttttagagacagtgtcttactctgtcacctaggctagagggcagtgatgcaattataaatcattgtagccttgaactcccgggctcaagcaatcctcccac

SEQ ID NO: 421878 - DNA, 120 bp, Artificial Sequence
  ENSG00000150873_13 (sequence is synthesized)
gctagggatacagacacatggcaacatgcctggctaattttttttttatttttattccagacagagtctcgcactgtcgcctaggctggagtgcaacagtgtgatcttggctcaccgcaa

SEQ ID NO: 421879 - DNA, 84 bp, Artificial Sequence
  ENSG00000150873_14 (sequence is synthesized)
gtgagccactgcgcccggccatgcctggctaatttttaaaattttatgtagagattttgggctcaaatgatcctcccaccttgg

SEQ ID NO: 421880 - DNA, 120 bp, Artificial Sequence
  ENSG00000150873_15 (sequence is synthesized)
cctccaccttttaaggacccttgtgattatatcacaacctttatatttaagcaaaaaaatgcagaaaaggcttagttcctctttgttggttaaaacacaaatggattcattctttcaaac

SEQ ID NO: 421881 - DNA, 120 bp, Artificial Sequence
  ENSG00000150873_16 (sequence is synthesized)
atccgcattctcctcttcttcctgggtgctctgccaggctgtggtttcccttggtttgggtggagcatgtgacagagccatggccagtggaatgggagcaaaaaccctaggtctcccttc

SEQ ID NO: 421882 - DNA, 120 bp, Artificial Sequence
  ENSG00000150873_17 (sequence is synthesized)
caggcctggtccatgagacactccaggtattggcttgttctcctttccccatcagctgaagaagggagaggacttggaggatgcagggaagagaggggcacaagatggagggagcatgtc

SEQ ID NO: 421883 - DNA, 120 bp, Artificial Sequence
  ENSG00000150873_18 (sequence is synthesized)
aggaccaagcctggagccctgagtgagctcgtggagcagaatctcccgacacccacactgacacacaaacaaaataaacaaaaactggccaaaacaaaaacaatagcccacacttctagg

SEQ ID NO: 421884 - DNA, 120 bp, Artificial Sequence
  ENSG00000150873_19 (sequence is synthesized)
gtaaagcattttaaatttattttctcaacaacccaagagaatcaacaggcagggatttcgtattcatttaatacaggcaaaacctgagattcagagaggtgaaataaaatcccgaacata

SEQ ID NO: 421885 - DNA, 120 bp, Artificial Sequence
  ENSG00000150873_20 (sequence is synthesized)
aggacacgttatttccatgcaacagcccctgtgtttcatgccataccctggccctgagcgactgtgtgatggagcagaccaggcccagtgtgacttggccaggaagaggcccaacccttc

SEQ ID NO: 421886 - DNA, 120 bp, Artificial Sequence
  ENSG00000150873_21 (sequence is synthesized)
ctacttggatctggaggccaccgccttctttctcagtgtctgacatggaagctgggctccctctccactctgagatcatcagctgggtaaaggtcagtggccaggacagccaggggtcct

SEQ ID NO: 421887 - DNA, 120 bp, Artificial Sequence
  ENSG00000150893_0 (sequence is synthesized)
agaagtggagggattcaattctccgcgcgattgaggcgctagcggcggagctggacggcctgggaaggcttcggctcctcggctgcggctccagcccggacggcgccgcgcaactttgcc

SEQ ID NO: 421888 - DNA, 120 bp, Artificial Sequence
  ENSG00000150893_1 (sequence is synthesized)
atccttctggcccagccccggctacaggaggaccccgcgggcaacgcgcggagttcctggcacttcccggcggtgtctcttgttgtctgcccggggaccgacttcgcatgctctcaggct

SEQ ID NO: 421889 - DNA, 120 bp, Artificial Sequence
  ENSG00000150893_2 (sequence is synthesized)
gacctgtccaagcccgaacaccgggaccatgcactcagccgggactcccgggttatcctcgcgccggacaggcaactccaccagctttcaaccaggaccgccaccgccgccccggctgct

SEQ ID NO: 421890 - DNA, 120 bp, Artificial Sequence
  ENSG00000150893_3 (sequence is synthesized)
gctgctgctgctgcttctcctgtcactggtaagccgcgtcccggcacagcccgctgccttcggcagggcgttgctgtcccctggtctcgcgggggctgcaggggtccctgctgaggaggc

SEQ ID NO: 421891 - DNA, 120 bp, Artificial Sequence
  ENSG00000150893_4 (sequence is synthesized)
catagtgctggcgaaccgcggactccgggtgcctttcggccgtgaagtctggctggatcccctgcatgacctggtgttgcaggtgcagcccggggaccgctgcgcggtttcggtactaga

SEQ ID NO: 421892 - DNA, 120 bp, Artificial Sequence
  ENSG00000150893_5 (sequence is synthesized)
caacgacgcactggcccagcgaccgggccgcctgagtcccaagcgcttcccgtgcgactttggccctggcgaggtgcgctactctcacctgggcgcgcgcagcccgtctcgggaccgcgt

SEQ ID NO: 421893 - DNA, 120 bp, Artificial Sequence
  ENSG00000150893_6 (sequence is synthesized)
ccggctgcagctgcgctatgacgcgcccggaggggcagtagtgctaccactggtactggaggtggaggtggtcttcacccagctggaggttgtgactcggaacttgcctctggtcgtgga

SEQ ID NO: 421894 - DNA, 120 bp, Artificial Sequence
  ENSG00000150893_7 (sequence is synthesized)
agagctgctggggaccagcaatgccctggacgcgcggagcctggagttcgccttccagcccgagacagaggagtgccgcgtgggcatcctgtccggcttgggcgcgctgcctcgctatgg

SEQ ID NO: 421895 - DNA, 120 bp, Artificial Sequence
  ENSG00000150893_8 (sequence is synthesized)
agaactcctccactacccgcaggtccctggaggagccagagagggaggcgccccggagactctcctgatggactgcaaagctttccaggaactaggcgtgcgctatcgccacacagccgc

SEQ ID NO: 421896 - DNA, 120 bp, Artificial Sequence
  ENSG00000150893_9 (sequence is synthesized)
cagtcgctcaccaaacagggactggatacccatggtggtggagctgcgttcacgaggggctcctgtgggcagccctgctttgaaacgcgagcacttccaggttctggtgaggatccgagg

SEQ ID NO: 421897 - DNA, 120 bp, Artificial Sequence
  ENSG00000150893_10 (sequence is synthesized)
aggggccgagaacactgcacccaagcccagtttcgtggccatgatgatgatggaggtggaccagtttgtactgacggccctgaccccagacatgctggcagccgaggatgctgagtctcc

SEQ ID NO: 421898 - DNA, 120 bp, Artificial Sequence
  ENSG00000150893_11 (sequence is synthesized)
ctctgacctgttgatcttcaaccttacttctccattccagcctggccagggctacttggtgagcaccgatgatcgcagcctgcccctttcctccttcactcagagggatctgcggctcct

SEQ ID NO: 421899 - DNA, 120 bp, Artificial Sequence
  ENSG00000150893_12 (sequence is synthesized)
gaagattgcctaccagcccccttctgaagactctgaccaggagcgcctctttgaactggaattggaggtagtggatctagaaggagcagcttcagacccttttgccttcatggtagtggt

SEQ ID NO: 421900 - DNA, 120 bp, Artificial Sequence
  ENSG00000150893_13 (sequence is synthesized)
gaagcccatgaacacaatggctccggtggtcacccggaataccggtcttattctctatgagggtcagtctcggcccctcacaggccctgcaggcagtggtccgcaaaacttggtcatcag

SEQ ID NO: 421901 - DNA, 120 bp, Artificial Sequence
  ENSG00000150893_14 (sequence is synthesized)
cgatgaggatgacctagaagcagtgcggctagaggtggtggctgggctccggcatggtcaccttgtcattctgggtgcttccagtggcagctctgctcccaagagctttacagtggctga

SEQ ID NO: 421902 - DNA, 120 bp, Artificial Sequence
  ENSG00000150893_15 (sequence is synthesized)
gctggcagccggccaggtggtctaccagcatgatgacagagacggctcgctgagcgacaacctggtgcttcgcatggtggatggaggaggcaggcaccaggtacagtttctgttccccat

SEQ ID NO: 421903 - DNA, 120 bp, Artificial Sequence
  ENSG00000150893_16 (sequence is synthesized)
caccttagtgcctgtggatgaccagccacctgttctcaatgccaacacggggctgacactggcagagggtgaaacagtgcccatcctgcccctttccctgagtgcaactgacatggattc

SEQ ID NO: 421904 - DNA, 120 bp, Artificial Sequence
  ENSG00000150893_17 (sequence is synthesized)
agatgattctctgctgctttttgtgctggagtcacccttcttaactacggggcatctgcttctccgccaaactcaccctccccatgagaagcaggaacttctcagaggcctttggaggaa

SEQ ID NO: 421905 - DNA, 120 bp, Artificial Sequence
  ENSG00000150893_18 (sequence is synthesized)
ggagggggcattttatgagcgaacagtgacagagtggcagcagcaggacataacagagggcaggctgttctatagacactctgggccccatagtcctgggccagtcacagaccagttcac

SEQ ID NO: 421906 - DNA, 120 bp, Artificial Sequence
  ENSG00000150893_19 (sequence is synthesized)
atttagagtccaggataaccatgaccctcctaatcagtccgggctacagcggtttgtgattcgtatccatcctgtggatcgcctccctccggagctgggcagtggctgtccccttcgtat

SEQ ID NO: 421907 - DNA, 120 bp, Artificial Sequence
  ENSG00000150893_20 (sequence is synthesized)
ggtggtacaggaatcccagctcacaccactgaggaagaagtggctgcgctacactgacctggacacagatgaccgagaactacgttacacagtgactcagccccccacagacacagacga

SEQ ID NO: 421908 - DNA, 120 bp, Artificial Sequence
  ENSG00000150893_21 (sequence is synthesized)
aaatcacctgccagccccactgggtaccttggtcttgactgacaacccctcagtcgtggtgacccattttacccaagcccagatcaaccatcataaaattgcttacagacccccgggtca

SEQ ID NO: 421909 - DNA, 120 bp, Artificial Sequence
  ENSG00000150893_22 (sequence is synthesized)
agaactgggcgtggctactcgagtggcccagttccagttccaggtggaagaccgagctgggaatgtggctccaggtacctttaccctttacttgcatcccgtggacaaccagccacctga

SEQ ID NO: 421910 - DNA, 120 bp, Artificial Sequence
  ENSG00000150893_23 (sequence is synthesized)
gatcctcaacaccggcttcactattcaggagaagggtcaccacatcctgagtgagacagagttgcacgtgaatgatgtagacactgatgttgcccatatctctttcactctcactcaggc

SEQ ID NO: 421911 - DNA, 120 bp, Artificial Sequence
  ENSG00000150893_24 (sequence is synthesized)
acccaaacatggccacatgagagtgtctggacagatcctgcatgtagggggtctcttccacttggaggacataaaacagggccgagtttcctatgcccataatggggacaagtccctgac

SEQ ID NO: 421912 - DNA, 120 bp, Artificial Sequence
  ENSG00000150893_25 (sequence is synthesized)
tgatagctgctccttggaagtcagtgacagacatcatgtggtgcccatcactctcagagtaaatgtccggccagtggatgatgaagtgcccatactgagccatcctactggcactctgga

SEQ ID NO: 421913 - DNA, 120 bp, Artificial Sequence
  ENSG00000150893_26 (sequence is synthesized)
gtcctatctagatgtcttagaaaatggggctactgaaatcactgccaatgttattaaggggaccaatgaggaaactgatgacttgatgttgactttcctcttggaagatccacctttgta

SEQ ID NO: 421914 - DNA, 120 bp, Artificial Sequence
  ENSG00000150893_27 (sequence is synthesized)
tggggaaatcttggtcaatggcattccagcagagcagtttactcaaagggacatcttggagggctctgttgtatatacccacaccagtggtgagataggcctattgcctaaagcggattc

SEQ ID NO: 421915 - DNA, 120 bp, Artificial Sequence
  ENSG00000150893_28 (sequence is synthesized)
ttttaacctgagtctgtcagatatgtctcaagaatggagaattggtggcaatactatccaaggagttactatatgggtgaccatcctgcctgttgatagccaggccccagaaatctttgt

SEQ ID NO: 421916 - DNA, 120 bp, Artificial Sequence
  ENSG00000150893_29 (sequence is synthesized)
aggtgaacagttgatagtaatggaaggtgataaaagtgttataacatcagtgcatataagtgctgaagatgtcgactccctgaatgatgacatcttgtgcactatagttattcagcctac

SEQ ID NO: 421917 - DNA, 120 bp, Artificial Sequence
  ENSG00000150893_30 (sequence is synthesized)
ttcaggttatgttgaaaacatttctccagcaccaggctctgagaaatcaagagcagggattgccataagtgctttcaacttgaaagatctcaggcagggccacataaactatgtccagag

SEQ ID NO: 421918 - DNA, 120 bp, Artificial Sequence
  ENSG00000150893_31 (sequence is synthesized)
tgtccataaaggggtggaacctgtggaggaccgatttgtatttcgttgttctgatggcattaacttttcagagagacagttcttccccattgtaatcattcccaccaatgatgaacagcc

SEQ ID NO: 421919 - DNA, 120 bp, Artificial Sequence
  ENSG00000150893_32 (sequence is synthesized)
agagatgtttatgagagaatttatggtgatggaaggcatgagtctggtaattgatacacccattctcaatgctgctgatgctgatgttcccctggatgatttaactttcactattaccca

SEQ ID NO: 421920 - DNA, 120 bp, Artificial Sequence
  ENSG00000150893_33 (sequence is synthesized)
attccccactcatggtcacatcatgaatcagctgataaatggcacggttttggtcgaaagcttcaccttggatcagatcatagagagttccagcattatttatgagcatgatgactccga

SEQ ID NO: 421921 - DNA, 120 bp, Artificial Sequence
  ENSG00000150893_34 (sequence is synthesized)
gacccaggaagacagttttgtgattaaactaacagatgggaagcactctgtggaaaagacggtcctcattatagttatccctgttgatgatgagacgcccagaatgactatcaataatgg

SEQ ID NO: 421922 - DNA, 120 bp, Artificial Sequence
  ENSG00000150893_35 (sequence is synthesized)
actagaaatagaaattggggataccaagattatcaacaacaaaatattaatggcaacagatttagattcagaagacaaatctttggtttatattattcgttatgggccaggacatggctt

SEQ ID NO: 421923 - DNA, 120 bp, Artificial Sequence
  ENSG00000150893_36 (sequence is synthesized)
attacagagacgaaaacctactggtgcctttgaaaatatcacactgggcatgaattttacccaggatgaagtagacagaaacttaattcagtatgtccatttggggcaagagggcattcg

SEQ ID NO: 421924 - DNA, 120 bp, Artificial Sequence
  ENSG00000150893_37 (sequence is synthesized)
ggacctaattaaatttgatgtgactgatggaataaatcccctcatagatcgttacttttatgtgtccatcgggagcattgacattgtcttccctgatgtgataagtaagggagtgtcctt

SEQ ID NO: 421925 - DNA, 120 bp, Artificial Sequence
  ENSG00000150893_38 (sequence is synthesized)
gaaagaaggtggcaaagtcactcttacaacagacctactaagcactagtgacttgaacagtcctgatgaaaacttggtttttaccatcaccagggctcccatgcgaggtcacctggaatg

SEQ ID NO: 421926 - DNA, 120 bp, Artificial Sequence
  ENSG00000150893_39 (sequence is synthesized)
cacggatcagcctggtgtgtccatcacgtctttcactcagctgcaactggctggaaacaaaatctactacatccacacagctgatgatgaagtgaaaatggacagttttgagtttcaagt

SEQ ID NO: 421927 - DNA, 120 bp, Artificial Sequence
  ENSG00000150893_40 (sequence is synthesized)
caccgatggacgtaaccctgtctttcggacattccgtatctccattagcgatgtggacaataaaaagccagtggtcaccatccacaagctggttgtcagtgaaagtgaaaacaagctgat

SEQ ID NO: 421928 - DNA, 120 bp, Artificial Sequence
  ENSG00000150893_41 (sequence is synthesized)
tactccttttgagctcactgtcgaagacagagatactcctgacaagctcctgaaattcactatcacccaggtgcctattcatggccatctcctattcaacaataccagacctgtcatggt

SEQ ID NO: 421929 - DNA, 120 bp, Artificial Sequence
  ENSG00000150893_42 (sequence is synthesized)
ttttaccaagcaagacttgaatgaaaacttaatcagctacaaacatgatggcactgagtcaagtgaagatagcttctccttcacagtgactgatggcacccatacagacttctatgtttt

SEQ ID NO: 421930 - DNA, 120 bp, Artificial Sequence
  ENSG00000150893_43 (sequence is synthesized)
tcctgatacggtgtttgaaacaaggagaccccaagtgatgaagatccaggtcttggctgttgacaacagtgtcccccaaatcgcagtgaataagggggcctctacacttcgcactctagc

SEQ ID NO: 421931 - DNA, 120 bp, Artificial Sequence
  ENSG00000150893_44 (sequence is synthesized)
cactggccacttggggttcatgatcacaagcaaaatattgaaagtggaggacagagacagcttacacatttctcttagatttatcgtgacagaggcccctcaacatggatatcttctcaa

SEQ ID NO: 421932 - DNA, 120 bp, Artificial Sequence
  ENSG00000150893_45 (sequence is synthesized)
cctggacaaaggcaaccacagcatcactcagttcacacaagctgacattgatgacatgaaaatatgctatgtcttaagagaaggggctaatgccacaagtgatatgttctattttgcagt

SEQ ID NO: 421933 - DNA, 120 bp, Artificial Sequence
  ENSG00000150893_46 (sequence is synthesized)
tgaagatggtggtggaaacaagttaacgtaccagaattttcgtctgaattgggcatggatctcctttgaaaaggaatattacctggtcaatgaggactccaaatttctagatgttgttct

SEQ ID NO: 421934 - DNA, 120 bp, Artificial Sequence
  ENSG00000150893_47 (sequence is synthesized)
taaacgtagaggttacttgggagaaacttcttttataagtattggcacaagagacagaactgcagaaaaagacaaagacttcaagggcaaagcacagaaacaagtgcagttcaacccagg

SEQ ID NO: 421935 - DNA, 120 bp, Artificial Sequence
  ENSG00000150893_48 (sequence is synthesized)
ccagaccagggccacatggcgagtgcggatcctgagtgatggggagcatgagcagtctgaaacctttcaggtggtactctcagagcccgtgctggctgccttggaattccccacagtcgc

SEQ ID NO: 421936 - DNA, 120 bp, Artificial Sequence
  ENSG00000150893_49 (sequence is synthesized)
cactgttgagatcgttgatccaggagatgagccaactgtgtttattccccagtccaaatactccgttgaagaagatgttggtgagctgttcattcccatcaggaggagcggagatgtgag

SEQ ID NO: 421937 - DNA, 120 bp, Artificial Sequence
  ENSG00000150893_50 (sequence is synthesized)
ccaggagttgatggtggtctgttatacccaacaaggaacagcaactggaactgtgccgacttccgtgttgtcttactctgattacatatccaggcctgaggaccacaccagtgttgtccg

SEQ ID NO: 421938 - DNA, 120 bp, Artificial Sequence
  ENSG00000150893_51 (sequence is synthesized)
ctttgacaaagatgaacgggagaaactgtgtcggatagtcataattgatgactctttgtacgaggaggaggaaaccttccatgtccttctgagcatgcccatggggggaagaatcggatc

SEQ ID NO: 421939 - DNA, 120 bp, Artificial Sequence
  ENSG00000150893_52 (sequence is synthesized)
agagttcccaggggctcaagttacaatcgttcctgacaaagatgatgaacccatcttttacttcggtgatgtggaatactctgtggatgagagtgctggctatgtggaagtgcaggtgtg

SEQ ID NO: 421940 - DNA, 120 bp, Artificial Sequence
  ENSG00000150893_53 (sequence is synthesized)
gagaacgggcactgacctgtccaagtcttctagtgtcacagtgaggtctcggaaaacagatcctccctctgcagatgctggaacagactatgtgggcatcagccgtaatttagattttgc

SEQ ID NO: 421941 - DNA, 120 bp, Artificial Sequence
  ENSG00000150893_54 (sequence is synthesized)
acctggagtcaacatgcagcctgttcgtgttgtcattctggatgaccttggacaaccagcgctggagggaattgagaaatttgaactggtgcttcgcatgcctatgaacgcagcccttgg

SEQ ID NO: 421942 - DNA, 120 bp, Artificial Sequence
  ENSG00000150893_55 (sequence is synthesized)
cgagcccagcaaagccacagtgtccataaatgactctgtctccgatttgcctaagatgcaattcaaagaacgaatatatactggcagcgaaagtgatgggcagatagttacaatgatcca

SEQ ID NO: 421943 - DNA, 120 bp, Artificial Sequence
  ENSG00000150893_56 (sequence is synthesized)
taggactggggatgtccagtacagatcttcagtgagatgctacacccggcaggggtctgcacaggtgatgatggactttgaagaacgcccaaacactgatacctccatcatcacattcct

SEQ ID NO: 421944 - DNA, 120 bp, Artificial Sequence
  ENSG00000150893_57 (sequence is synthesized)
ccctggtgagacagaaaagccctgcattcttgagctgatggacgatgtgctctatgaggaggtagaggagctccgcctggtactcggcactccacaaagcaactctccctttggggctgc

SEQ ID NO: 421945 - DNA, 120 bp, Artificial Sequence
  ENSG00000150893_58 (sequence is synthesized)
agttggtgaacaaaatgaaactctcataaggatccgagatgatgctgataagactgttattaaatttggagaaaccaaatttagtgtcactgaacccaaagaacctggagagtcggtggt

SEQ ID NO: 421946 - DNA, 120 bp, Artificial Sequence
  ENSG00000150893_59 (sequence is synthesized)
tataagaattccagtgattcgccaaggagacacttcaaaggtttccattgtgagagtccacaccaaggatggctcggccacctctggagaagactaccaccctgtgtcagaagaaattga

SEQ ID NO: 421947 - DNA, 120 bp, Artificial Sequence
  ENSG00000150893_60 (sequence is synthesized)
gtttaaggaaggggaaacccagcacgtggttgaaatcgaagttacctttgacggggtgagagagatgagagaggccttcactgttcacctaaaacctgatgaaaatatgatagcagagat

SEQ ID NO: 421948 - DNA, 120 bp, Artificial Sequence
  ENSG00000150893_61 (sequence is synthesized)
gcagttgacgaaagccattgtgtacatagaagaaatgagcagcatggcagatgtcacttttccttctgtccctcaaattgtatccctgttgatgtatgacgacacttccaaagctaagga

SEQ ID NO: 421949 - DNA, 120 bp, Artificial Sequence
  ENSG00000150893_62 (sequence is synthesized)
gagtgctgaacccatgtctggctatcctgtcatctgtatcacagcttgcaaccccaaatattcagactacgataaaacaggctctatctgtgcaagtgagaacatcaatgacactttgac

SEQ ID NO: 421950 - DNA, 120 bp, Artificial Sequence
  ENSG00000150893_63 (sequence is synthesized)
gcggtaccggtggctgattagtgcacctgcgggccctgacggtgtgaccagccctatgagagaagtggacttcgacaccttttttacgtcatccaagatggtcacactggactccatata

SEQ ID NO: 421951 - DNA, 120 bp, Artificial Sequence
  ENSG00000150893_64 (sequence is synthesized)
ctttcagcctggctcccgggtacagtgcgcagctcgtgctgtgaacaccaatggggatgaaggcctggagctcatgagccctattgtaaccatcagcagagaagaaggtctttgtcagcc

SEQ ID NO: 421952 - DNA, 120 bp, Artificial Sequence
  ENSG00000150893_65 (sequence is synthesized)
ccgtgtacctggggttgttggagcagagccgttctcagctaaattgcgctacacaggccctgaggatgcagactacacaaaccttatcaagctcactgtcacaatgccacacatagatgg

SEQ ID NO: 421953 - DNA, 120 bp, Artificial Sequence
  ENSG00000150893_66 (sequence is synthesized)
catgctccccgtgatctccactagagagctttccaactttgagctcaccctcagccctgatggcacaagagttggaaaccacaagtgctccaacctcctggattatactgaagtgaagac

SEQ ID NO: 421954 - DNA, 120 bp, Artificial Sequence
  ENSG00000150893_67 (sequence is synthesized)
aattggagagacatatccttaccagtacagcttgtccatcagaggttccactaccttgcgcttctaccggaacctgaacctagaggcctgtttatgggagttcgttagctactatgacat

SEQ ID NO: 421955 - DNA, 120 bp, Artificial Sequence
  ENSG00000150893_68 (sequence is synthesized)
gtcagaactccttgctgactgtggtggcaccattggaacagatggacaggtcctaaacctagtgcagtcctatgtgacccttcgagtccctctgtatgtttcctacgtgttccattcccc

SEQ ID NO: 421956 - DNA, 120 bp, Artificial Sequence
  ENSG00000150893_69 (sequence is synthesized)
cgtgggggtaggaggctggcagcattttgacttgaagtcagagcttcgtctaacttttgtgtacgacaccgccatcttgtggaatgatggaattggcagccccccagaggctgaacttca

SEQ ID NO: 421957 - DNA, 120 bp, Artificial Sequence
  ENSG00000150893_70 (sequence is synthesized)
aggttctctctatccaaccagcatgcgcatcggtgatgaggggcgcttggccgtgcacttcaagacagaggctcagttccatggcttatttgtgctgtcacatcccgcatcctttacaag

SEQ ID NO: 421958 - DNA, 120 bp, Artificial Sequence
  ENSG00000150893_71 (sequence is synthesized)
ctcagtgatcatgtcagctgatcatccaggcctgacattttccctccgcctcataaggagtgaaccaacctataaccagccagtacagcagtggagctttgtctctgactttgccgtacg

SEQ ID NO: 421959 - DNA, 120 bp, Artificial Sequence
  ENSG00000150893_72 (sequence is synthesized)
tgactactcagggacctatactgtgaagctggtgccatgcactgccccatcacatcaggaataccgcctgccagtcacctgcaaccccagagaacctgtcacctttgaccttgacatccg

SEQ ID NO: 421960 - DNA, 120 bp, Artificial Sequence
  ENSG00000150893_73 (sequence is synthesized)
attccaacaggtcagtgatccagtggctgctgagtttagcttgaacacccaaatgtacctgctctctaagaagagtctctggttgtctgatggatccatgggattcgggcaagagagtga

SEQ ID NO: 421961 - DNA, 120 bp, Artificial Sequence
  ENSG00000150893_74 (sequence is synthesized)
tgttgcttttgcagaaggtgatataatttatggtcgtgtcatggtggatcctgtccagaatctgggtgactccttttactgcagcattgagaaggtgtttctatgcactggagctgatgg

SEQ ID NO: 421962 - DNA, 120 bp, Artificial Sequence
  ENSG00000150893_75 (sequence is synthesized)
ctatgttcccaagtatagtccaatgaatgcagaatatggctgcttagccgactctccttcactcttatatagatttaaaattgtggacaaagctcagccagagacacaagcgaccagttt

SEQ ID NO: 421963 - DNA, 120 bp, Artificial Sequence
  ENSG00000150893_76 (sequence is synthesized)
tggaaatgtcctatttaatgccaaactagcagtggatgaccctgaagccattctcttagtgaatcagcctggatctgatggatttaaagtcgactcaacaccactctttcaggtcgctct

SEQ ID NO: 421964 - DNA, 120 bp, Artificial Sequence
  ENSG00000150893_77 (sequence is synthesized)
aggccgagaatggtatatacatacgatctatacagtgagatcgaaagacaatgccaatcgaggtattggcaaaagaagtgtggagtaccattctctggtgagtcaaggaaagccccaatc

SEQ ID NO: 421965 - DNA, 120 bp, Artificial Sequence
  ENSG00000150893_78 (sequence is synthesized)
caccaccaagagccggaagaagagagagatcaggagcacaccctcactggcatgggagattggtgctgaaaacagtcgaggaacaaacatccagcacattgccctggaccgcaccaagag

SEQ ID NO: 421966 - DNA, 120 bp, Artificial Sequence
  ENSG00000150893_79 (sequence is synthesized)
gcagatcccccatgggagagcacctccagatggcatcctcccctgggagctcaacagccccagctctgcagtcagcctggtcactgtggtgggaggcaccacggtagggttactcaccat

SEQ ID NO: 421967 - DNA, 120 bp, Artificial Sequence
  ENSG00000150893_80 (sequence is synthesized)
ctgcctcactgtcattgcagtgctgatgtgcaggggcaaggaaagtttcagggggaaggatgccccgaaaggctccagcagcagtgagcccatggtgcccccacagagccatcacaatga

SEQ ID NO: 421968 - DNA, 120 bp, Artificial Sequence
  ENSG00000150893_81 (sequence is synthesized)
cagctcagaagtttgatgactgcaggtagaattcaaccttttccgtaagtgcctcggaaaagatcacaatggaaccttaaatacttctggtaaaccatagagaatggaggatggctgtga

SEQ ID NO: 421969 - DNA, 120 bp, Artificial Sequence
  ENSG00000150893_82 (sequence is synthesized)
tgaagctgcttagagaatatgactgtactaatggagtttgatttgaattctccatactcttttttgcatcaaaggacaaattaaggcatctttcctcttgccccaaaggcagcaacaacg

SEQ ID NO: 421970 - DNA, 120 bp, Artificial Sequence
  ENSG00000150893_83 (sequence is synthesized)
tactcatatgtacacagagccatgatgtgaggaatgtactcctcattttagacatattctctatgcagtggagataaatctattaaaaggtgctaacagactctcttacaagtgtaagag

SEQ ID NO: 421971 - DNA, 120 bp, Artificial Sequence
  ENSG00000150893_84 (sequence is synthesized)
gaatctactgttgctatgttagtgtgaatgttgaaggtgcaattatcacattgtttattaattgtataacagattattactagaaaggtttttgttgctagtctggaaaactggtgaaca

SEQ ID NO: 421972 - DNA, 120 bp, Artificial Sequence
  ENSG00000150893_85 (sequence is synthesized)
cactgtttattatgacaagttttcaaataggtgaagacagcatagaattatgaccagggtggctcaacccacaaatcaactgatctactacttgggagacagtggaaggaaagatagagg

SEQ ID NO: 421973 - DNA, 120 bp, Artificial Sequence
  ENSG00000150893_86 (sequence is synthesized)
gaaggaagttcactcacttgaatttgaattgcttctcattctcatcagactctccttgttttgtttgcatatttaattttaaattaaaccaaagaatatgttaattctgaaagagatttt

SEQ ID NO: 421974 - DNA, 120 bp, Artificial Sequence
  ENSG00000150893_87 (sequence is synthesized)
taagagatgctgctctgttttggcatatagtgagtaatggtagagctcttgcatggtaatataccttattggtgctcaacatttgtgggaaattagagggttggtgagattttggtgatg

SEQ ID NO: 421975 - DNA, 120 bp, Artificial Sequence
  ENSG00000150893_88 (sequence is synthesized)
aataaatgccatagagttagagtcactacaagacaatgttctctaagaactgagcctagatgtttgcagtattgaacccataaatgataataagaaacattgttacagatggtgaaggga

SEQ ID NO: 421976 - DNA, 120 bp, Artificial Sequence
  ENSG00000150893_89 (sequence is synthesized)
gaaagtggtatttattaatataatgtgtataatcagagtgcctcttatacatactttatagaataaaggaacattttgacagatgaggttatccctcggagtagcgtaatcacacaataa

SEQ ID NO: 421977 - DNA, 120 bp, Artificial Sequence
  ENSG00000150893_90 (sequence is synthesized)
catttagaacttaaattggctacaggacattttattagctttctatccagcatctggtccaaacgatgggactctctgcaactatcattccagaaatggtcttggaggtggccagaatca

SEQ ID NO: 421978 - DNA, 120 bp, Artificial Sequence
  ENSG00000150893_91 (sequence is synthesized)
ttgaccatatttttatttggttcaagaagacatcgctctggcatccccagttcagtgaactggtacaatgtggtccctctcaatatttaaaaatataatttgtaacagtgcttaccattc

SEQ ID NO: 421979 - DNA, 120 bp, Artificial Sequence
  ENSG00000150893_92 (sequence is synthesized)
acctcccaaagccaaggaacttgagtgagcttccttggcaagcctcccattgcctttctgcatcaatgtgtttgttaccaaatagcagaaatttcgcttagaaggggaaaacttcagctt

SEQ ID NO: 421980 - DNA, 120 bp, Artificial Sequence
  ENSG00000150893_93 (sequence is synthesized)
tccaaaagctagtaaacatgtttcaaagaaaaataaggtcaggagaaaaagaataatgcctacagattatccttcagatgctggctagaatcccctttgacttctagccataagctggcc

SEQ ID NO: 421981 - DNA, 120 bp, Artificial Sequence
  ENSG00000150893_94 (sequence is synthesized)
acattggacatcttggtcactgcagaattttaaaaggcaaacttctcagaacagatgtgcacatcttaatttggtgtctgtaagtatcaaccatttcttgatcaagataaggaagcaaca

SEQ ID NO: 421982 - DNA, 120 bp, Artificial Sequence
  ENSG00000150893_95 (sequence is synthesized)
ctgatactgagagagaggtcatatgtccaatagttgcctttcttctcttaggcagctctgcacttcatgttcagttttttaaaaatagactgtagtatcctttcattggagaatttacaa

SEQ ID NO: 421983 - DNA, 120 bp, Artificial Sequence
  ENSG00000150893_96 (sequence is synthesized)
aaatatcatctacagctcaaaagtcccactaacggcttatatgaacagaaagtactgtgtagcccaggagtttatttagcaagataaatagtggtaatttcttaatcattcccctttcct

SEQ ID NO: 421984 - DNA, 120 bp, Artificial Sequence
  ENSG00000150893_97 (sequence is synthesized)
ttgctttaccttctggcagatgcttagctacttctttggctacctcataatttgtatgggaatgaacatgaattagggaacttcaaatagtgcgtagacttttccctacttaccattggg

SEQ ID NO: 421985 - DNA, 120 bp, Artificial Sequence
  ENSG00000150893_98 (sequence is synthesized)
ttcaattgatgtagactgttagagcaagtatactcaatcaacttgctgatattttagtagttaacagcttccgagcctatcatgcaatttggagtctgtcaatgaatatagcaatcggtg

SEQ ID NO: 421986 - DNA, 120 bp, Artificial Sequence
  ENSG00000150893_99 (sequence is synthesized)
aagcattactgtacgaagtctgttttcaggctttgggtcaagctggttttataccaaatttcactctacaatgcatattctaatgaagctactttatataaattggagagcttataaaat

SEQ ID NO: 421987 - DNA, 120 bp, Artificial Sequence
  ENSG00000150893_100 (sequence is synthesized)
gcagaacatttctatcctatcctaccaaatatttatccttctctgtcctctattctcttactctcctctctccctttttccttccctttattcccttgaaaaaagagaatctgtgggaaa

SEQ ID NO: 421988 - DNA, 120 bp, Artificial Sequence
  ENSG00000150893_101 (sequence is synthesized)
tgaaaaaagagaatctgtgggaaataggcagatatagctttttaaaatataaagtacttgggattttgcattatttttcttaatatctatttactaagtatgtaatttaatatacattaa

SEQ ID NO: 421989 - DNA, 120 bp, Artificial Sequence
  ENSG00000150893_102 (sequence is synthesized)
gggaagaatatggtaaattttttgttaaataaaatagacccttatgtttagcattttgtttttagagaactattctggtactatcagaacaaatacataaaataacttcccatagagaac

SEQ ID NO: 421990 - DNA, 120 bp, Artificial Sequence
  ENSG00000150893_103 (sequence is synthesized)
aggatatagcaataatagctccttagatactcagtggcttctgactccaatcaaggtcttgttgatattatatagtaaaaataaaaccaaaaataaatattattcaagtggctcttctaa

SEQ ID NO: 421991 - DNA, 120 bp, Artificial Sequence
  ENSG00000150893_104 (sequence is synthesized)
gcatgtgaatcatgaagcactgaaatatgtattttaatgatgatcttatttattcccatttttgcccttagttaacatttactggtgctcacctaggattggctattctgagggattgca

SEQ ID NO: 421992 - DNA, 120 bp, Artificial Sequence
  ENSG00000150893_105 (sequence is synthesized)
tagaaaccaagctccacttgctgtccttgggaaggttataactgaatgcagctctttatttggactaaagtgtcaggatatgcattagattctctcctgaaccaaaaacacaacagtcat

SEQ ID NO: 421993 - DNA, 120 bp, Artificial Sequence
  ENSG00000150893_106 (sequence is synthesized)
tatctgtgaaccataatttaaaaatctttctagaataacaacagcagactccactcttgtttgtctaaaagagccctactgggtatggatcattctgatgacagatttatacaaaatgat

SEQ ID NO: 421994 - DNA, 120 bp, Artificial Sequence
  ENSG00000150893_107 (sequence is synthesized)
tcaaaccagtaacttagtaaaattgaccttcgcaaaacctcactgggggagtgccttgtagagctgtgggtgggactgcacattcttttcctcttagtaaaagataggcccactttattc

SEQ ID NO: 421995 - DNA, 120 bp, Artificial Sequence
  ENSG00000150893_108 (sequence is synthesized)
caagaataacacttagcacataaactcttcttccagctcgttagcagcattagcaccttctgaattccaccctctcagaagaatccacagtgtttgaacaatttgcataaaggtcagcta

SEQ ID NO: 421996 - DNA, 120 bp, Artificial Sequence
  ENSG00000150893_109 (sequence is synthesized)
gcatcctgctgccaagccactgcatagcatttgtgataagaaggaccaactctaggctcaatatgaagggatttagttctgtaagcagcaaaaaagcttctttatcaagtcatcttacct

SEQ ID NO: 421997 - DNA, 120 bp, Artificial Sequence
  ENSG00000150893_110 (sequence is synthesized)
ctaattcttttccagtgtgccaactccaaagtcaacattaaaaatgtaaatggacctgtgtaaatatcacagagagcttttccttatacatctcaatgctgagagttaaaatattcccag

SEQ ID NO: 421998 - DNA, 120 bp, Artificial Sequence
  ENSG00000150893_111 (sequence is synthesized)
gttaaaatttttttaaagtaccaataatagagctaaatacaatgacatttgcttttaaaaggtggatattttatttctgctttttgaaaatacttatttagtattgacttggaagccaat

SEQ ID NO: 421999 - DNA, 120 bp, Artificial Sequence
  ENSG00000150893_112 (sequence is synthesized)
ttggtcctttaataagtaaagaaaataatatgtttaaaaatgtaaatgttttacaaatttgaaactttcataattgtattaatcagaaaacaagcacattgccattctttgaaactcatg

SEQ ID NO: 422000 - DNA, 120 bp, Artificial Sequence
  ENSG00000150893_113 (sequence is synthesized)
tttctagacatgacagcagtaataaaaggatgaaaacaagtgtcttcactaagcgtatggccaataaatgggacccaaacgttcaatctgttcagtttaccaaggttcagaaatacgtaa

SEQ ID NO: 422001 - DNA, 120 bp, Artificial Sequence
  ENSG00000150893_114 (sequence is synthesized)
tttagcaggaaactataaataccagtgctatcacagccacacatacacacacacagacataaaataaccaaacatctcatttctaggaaagagataacactaaaggcatcataggtttaa

SEQ ID NO: 422002 - DNA, 120 bp, Artificial Sequence
  ENSG00000150893_115 (sequence is synthesized)
ctgaaatacgttatatgaagttttacaaaaaggtcaacagaaagctcatttgtgaaaacatactctcatgggagcttctttaacattagttcagaggttaatatatttcctggaggtgtt

SEQ ID NO: 422003 - DNA, 120 bp, Artificial Sequence
  ENSG00000150893_116 (sequence is synthesized)
ttcctagaattgattgcactattgcatggtaataacatttaattgttaaggaaacattatatataggttcaaattatcccttaatgttgatttctccccttttccatggattttgatact

SEQ ID NO: 422004 - DNA, 120 bp, Artificial Sequence
  ENSG00000150893_117 (sequence is synthesized)
aagaaacaaaatgctttgagattttggtaactattttgattttgataaaacatgttaaaatagaaggacatgatatttttctatagtttccatcaggaagagtacatcagaaacttctcc

SEQ ID NO: 422005 - DNA, 120 bp, Artificial Sequence
  ENSG00000150893_118 (sequence is synthesized)
ataaggaaagaaaactgactctctcttgaactagtgttgacaaaatacactaatgtctttcttaattttattttattaggagaaaaatcagaatattaaatttgcaaacttttgaacagc

SEQ ID NO: 422006 - DNA, 120 bp, Artificial Sequence
  ENSG00000150893_119 (sequence is synthesized)
agtaatagctccttagacactcagtatctttcttccctatctttcaagcacatttaatttctttcccctggtatttgtttgctttgtgttttttcaatattttgtttgctaaagaacaat

SEQ ID NO: 422007 - DNA, 120 bp, Artificial Sequence
  ENSG00000150893_120 (sequence is synthesized)
aacaacaacaaagctggtccagccctgacacctacttttgctttttttctttctttcttttaatttgttgaactataggtttctttctgagatgtatttttcattcttccaataatgctc

SEQ ID NO: 422008 - DNA, 120 bp, Artificial Sequence
  ENSG00000150893_121 (sequence is synthesized)
tctttttcatttcaaaaccattaccactttcaatatgtaattaacatcctcattcatcagaaagctggtaagtccacacagcatttgtgcagtatcccttctgtgtaaaatgttaaggct

SEQ ID NO: 422009 - DNA, 120 bp, Artificial Sequence
  ENSG00000150893_122 (sequence is synthesized)
ttcagatgaaagaaaaaagaacttcctgcaaaagatcaaaagcatcatactaaataaaatgatgacaatatgtgccttgatttttctctcaatggaggttcaacattgacatttaagatg

SEQ ID NO: 422010 - DNA, 120 bp, Artificial Sequence
  ENSG00000150893_123 (sequence is synthesized)
taaaaaaaattactttgatggtttaattaagaataataagtcaaatatcacatgtatgtagttcttttggatgaccgaataccttaaaatgaactaaataactgaaataaagtgttaaaa

SEQ ID NO: 422011 - DNA, 120 bp, Artificial Sequence
  ENSG00000150893_124 (sequence is synthesized)
tgttaacagcgttgaagtttttaaaattataattatcaaatgcacaatgttcttttactatgccaaatgttgcctacactgattacatgattgtcacagtttaagtgaatttctactatg

SEQ ID NO: 422012 - DNA, 120 bp, Artificial Sequence
  ENSG00000150893_125 (sequence is synthesized)
gatctttattttccccaatgtttggatcatcctctcagataagaattgtcagtattgcacctcaagaaagaagaaaaaataagaatgtaaatttttaaaagctagcattaaaagtaaaga

SEQ ID NO: 422013 - DNA, 120 bp, Artificial Sequence
  ENSG00000150893_126 (sequence is synthesized)
gcagtacaataaaaatcacttaaaatagagaaaggcaactactgagtaagaagaaaagataatttctgtaaaagctaaatttatgcacattacaaaaagtagtcaagtcagtcttccatt

SEQ ID NO: 422014 - DNA, 89 bp, Artificial Sequence
  ENSG00000150893_127 (sequence is synthesized)
ttatgcacattacaaaaagtagtcaagtcagtcttccattgtgacttcaggaattcaaatgcaagttgttggcaaacacatatatgtac

SEQ ID NO: 422015 - DNA, 120 bp, Artificial Sequence
  ENSG00000150893_128 (sequence is synthesized)
cctcccaaagtactggaattacaatggcgtgagccaccacaagatatttttaaagcccatttgtctataaaagaaaactcttggacaaggagctttgtgttttataattgtattacgtgc

SEQ ID NO: 422016 - DNA, 120 bp, Artificial Sequence
  ENSG00000150893_129 (sequence is synthesized)
ctgcttccttaccaagtgccctccataacactaagtaaatttatatttatctagcctctgagtgacatatctgtgtgtaatggaattatttgcagaatttaatagccttttttattttcg

SEQ ID NO: 422017 - DNA, 120 bp, Artificial Sequence
  ENSG00000150893_130 (sequence is synthesized)
catgagaatttttcaaaaactatcagggtctagttttatcatacatttactaagttactacatattggtggatattgacgtttattcctgggaatctaattttgcaaacaatttggagcc

SEQ ID NO: 422018 - DNA, 120 bp, Artificial Sequence
  ENSG00000150893_131 (sequence is synthesized)
attcagtcataaattcatgtcaacaataagtcttgctgccgcttgtgtttcataactacgcttgctttccttcaaaatataccaagtgtgtaatataaataaagcccatatcaatataaa

SEQ ID NO: 422019 - DNA, 120 bp, Artificial Sequence
  ENSG00000150893_132 (sequence is synthesized)
ggatttgtcctggcctcacttcacgtgcttataggcccctgctaagtggcgggcagtctccaggacattaaggacacagtggtgaaagacactagcccaatctatagagaacttcgagac

SEQ ID NO: 422020 - DNA, 120 bp, Artificial Sequence
  ENSG00000150907_0 (sequence is synthesized)
gatcccgtaagtcgggcggcctggtagtcgcagcagccgctgccgcagccgccacattcaacaggcagcagcgcagcgggcgcgccgctggggagagcaagcggcccgcggcgtccgtcc

SEQ ID NO: 422021 - DNA, 120 bp, Artificial Sequence
  ENSG00000150907_1 (sequence is synthesized)
gtccttccgtccgcggccctgtcagctggagcgcggcgcaggctctgccccggcccggcggctctggccggccgtccagtccgtgcggcggaccccgaggagcctcgatgtggatggccc

SEQ ID NO: 422022 - DNA, 120 bp, Artificial Sequence
  ENSG00000150907_2 (sequence is synthesized)
cgcgaagttaagttctgggctcgcgcttccactccgccgcgccttcctcccagtttccgtccgctcgccgcaccggcttcgttcccccaaatctcggaccgtcccttcgcgccccctccc

SEQ ID NO: 422023 - DNA, 120 bp, Artificial Sequence
  ENSG00000150907_3 (sequence is synthesized)
cgtccgcccccagtgctgcgttctccccctcttggctctcctgcggctgggggaggggcgggggtcaccatggccgaggcgcctcaggtggtggagatcgacccggacttcgagccgctg

SEQ ID NO: 422024 - DNA, 120 bp, Artificial Sequence
  ENSG00000150907_4 (sequence is synthesized)
gcgctcgtgcacctggccgctgcccaggccggagtttagccagtccaactcggccacctccagcccggcgccgtcgggcagcgcggctgccaaccccgacgccgcggcgggcctgccctc

SEQ ID NO: 422025 - DNA, 120 bp, Artificial Sequence
  ENSG00000150907_5 (sequence is synthesized)
ctgccctcggcctcggctgccgctgtcagcgccgacttcatgagcaacctgagcttgctggaggagagcgaggacttcccgcaggcgcccggctccgtggcggcggcggtggcggcggcg

SEQ ID NO: 422026 - DNA, 120 bp, Artificial Sequence
  ENSG00000150907_6 (sequence is synthesized)
ccccccgccgccgctgggccgctcgcggggcagccgcgcaagagcagctcgtcccgccgcaacgcgtggggcaacctgtcctacgccgacctcatcaccaaggccatcgagagctcggcg

SEQ ID NO: 422027 - DNA, 120 bp, Artificial Sequence
  ENSG00000150907_7 (sequence is synthesized)
gagaagcggctcacgctgtcgcagatctacgagtggatggtcaagagcgtgccctacttcaaggataagggtgacagcaacagctcggcgggctggaagaattcaattcgtcataatctg

SEQ ID NO: 422028 - DNA, 120 bp, Artificial Sequence
  ENSG00000150907_8 (sequence is synthesized)
tccctacacagcaagttcattcgtgtgcagaatgaaggaactggaaaaagttcttggtggatgctcaatccagagggtggcaagagcgggaaatctcctaggagaagagctgcatccatg

SEQ ID NO: 422029 - DNA, 120 bp, Artificial Sequence
  ENSG00000150907_9 (sequence is synthesized)
gacaacaacagtaaatttgctaagagccgaagccgagctgccaagaagaaagcatctctccagtctggccaggagggtgctggggacagccctggatcacagttttccaaatggcctgca

SEQ ID NO: 422030 - DNA, 120 bp, Artificial Sequence
  ENSG00000150907_10 (sequence is synthesized)
agccctggctctcacagcaatgatgactttgataactggagtacatttcgccctcgaactagctcaaatgctagtactattagtgggagactctcacccattatgaccgaacaggatgat

SEQ ID NO: 422031 - DNA, 120 bp, Artificial Sequence
  ENSG00000150907_11 (sequence is synthesized)
cttggagaaggggatgtgcattctatggtgtacccgccatctgccgcaaagatggcctctactttacccagtctgtctgagataagcaatcccgaaaacatggaaaatcttttggataat

SEQ ID NO: 422032 - DNA, 120 bp, Artificial Sequence
  ENSG00000150907_12 (sequence is synthesized)
ctcaaccttctctcatcaccaacatcattaactgtttcgacccagtcctcacctggcaccatgatgcagcagacgccgtgctactcgtttgcgccaccaaacaccagtttgaattcaccc

SEQ ID NO: 422033 - DNA, 120 bp, Artificial Sequence
  ENSG00000150907_13 (sequence is synthesized)
agcccaaactaccaaaaatatacatatggccaatccagcatgagccctttgccccagatgcctatacaaacacttcaggacaataagtcgagttatggaggtatgagtcagtataactgt

SEQ ID NO: 422034 - DNA, 120 bp, Artificial Sequence
  ENSG00000150907_14 (sequence is synthesized)
gcgcctggactcttgaaggagttgctgacttctgactctcctccccataatgacattatgacaccagttgatcctggggtagcccagcccaacagccgggttctgggccagaacgtcatg

SEQ ID NO: 422035 - DNA, 120 bp, Artificial Sequence
  ENSG00000150907_15 (sequence is synthesized)
atgggccctaattcggtcatgtcaacctatggcagccaggcatctcataacaaaatgatgaatcccagctcccatacccaccctggacatgctcagcagacatctgcagttaacgggcgt

SEQ ID NO: 422036 - DNA, 120 bp, Artificial Sequence
  ENSG00000150907_16 (sequence is synthesized)
cccctgccccacacggtaagcaccatgccccacacctcgggtatgaaccgcctgacccaagtgaagacacctgtacaagtgcctctgccccaccccatgcagatgagtgccctggggggc

SEQ ID NO: 422037 - DNA, 120 bp, Artificial Sequence
  ENSG00000150907_17 (sequence is synthesized)
tactcctccgtgagcagctgcaatggctatggcagaatgggccttctccaccaggagaagctcccaagtgacttggatggcatgttcattgagcgcttagactgtgacatggaatccatc

SEQ ID NO: 422038 - DNA, 120 bp, Artificial Sequence
  ENSG00000150907_18 (sequence is synthesized)
attcggaatgacctcatggatggagatacattggattttaactttgacaatgtgttgcccaaccaaagcttcccacacagtgtcaagacaacgacacatagctgggtgtcaggctgaggg

SEQ ID NO: 422039 - DNA, 120 bp, Artificial Sequence
  ENSG00000150907_19 (sequence is synthesized)
ttagtgagcaggttacacttaaaagtacttcagattgtctgacagcaggaactgagagaagcagtccaaagatgtctttcaccaactcccttttagttttcttggttaaaaaaaaaaaca

SEQ ID NO: 422040 - DNA, 120 bp, Artificial Sequence
  ENSG00000150907_20 (sequence is synthesized)
aaaaaaaaaaccctccttttttcctttcgtcagacttggcagcaaagacatttttcctgtacaggatgtttgcccaatgtgtgcaggttatgtgctgctgtagataaggactgtgccatt

SEQ ID NO: 422041 - DNA, 120 bp, Artificial Sequence
  ENSG00000150907_21 (sequence is synthesized)
ggaaatttcattacaatgaagtgccaaactcactacaccatataattgcagaaaagattttcagatcctggtgtgctttcaagttttgtatataagcagtagatacagattgtatttgtg

SEQ ID NO: 422042 - DNA, 120 bp, Artificial Sequence
  ENSG00000150907_22 (sequence is synthesized)
tgtgtttttggtttttctaaatatccaattggtccaaggaaagtttatactctttttgtaatactgtgatgggcctcatgtcttgataagttaaacttttgtttgtactacctgttttct

SEQ ID NO: 422043 - DNA, 120 bp, Artificial Sequence
  ENSG00000150907_23 (sequence is synthesized)
aagaactgaatctccattctgcatctccattgaacagccttggacctgttcacgttgccacagaattcacatgagaaccaagtagcctgttatcaatctgctaaattaatggacttgtta

SEQ ID NO: 422044 - DNA, 120 bp, Artificial Sequence
  ENSG00000150907_24 (sequence is synthesized)
aacttttggaaaaaaaaagattaaatgccagctttgtacaggtcttttctatttttttttgtttattttgttatttgcaaatttgtacaaacatttaaatggttctaatttccagataaa

SEQ ID NO: 422045 - DNA, 120 bp, Artificial Sequence
  ENSG00000150907_25 (sequence is synthesized)
tgatttttgatgttattgttgggacttaagaacatttttggaatagatattgaactgtaataatgttttcttaaaactagagtctactttgttacatagtcagcttgtaaattttgtgga

SEQ ID NO: 422046 - DNA, 120 bp, Artificial Sequence
  ENSG00000150907_26 (sequence is synthesized)
accacaggtatttggggcagcattcataattttcattttgtattctaactggattagtactaattttatacatgcttaactggtttgtacactttgggatgctacttagtgatgtttctg

SEQ ID NO: 422047 - DNA, 120 bp, Artificial Sequence
  ENSG00000150907_27 (sequence is synthesized)
actaatcttaaatcattgtaattagtacttgcatattcaacgtttcaggccctggttgggcaggaaagtgatgtatagttatggacactttgcgtttcttatttaggataacttaatatg

SEQ ID NO: 422048 - DNA, 120 bp, Artificial Sequence
  ENSG00000150907_28 (sequence is synthesized)
tttttatgtatgtattttaaagaaatttcatctgcttctactgaactatgcgtactgcatagcatcaagtcttctctagagacctctgtagtcctgggaggcctcataatgtttgtagat

SEQ ID NO: 422049 - DNA, 120 bp, Artificial Sequence
  ENSG00000150907_29 (sequence is synthesized)
cagaaaagggagatctgcatctaaagcaatggtcctttgtcaaacgagggattttgatccacttcaccattttgagttgagctttagcaaaagtttcccctcataattctttgctcttgt

SEQ ID NO: 422050 - DNA, 120 bp, Artificial Sequence
  ENSG00000150907_30 (sequence is synthesized)
ttcagtccaggtggaggttggttttgtagttctgccttgaggaattatgtcaacactcatacttcatctcattctcccttctgccctgcagattagattacttagcacactgtggaagtt

SEQ ID NO: 422051 - DNA, 120 bp, Artificial Sequence
  ENSG00000150907_31 (sequence is synthesized)
taagtggaaggagggaatttaaaaatgggacttgagtggtttgtagaatttgtgttcataagttcagatgggtagcaaatggaatagaacttacttaaaaattggggagatttatttgaa

SEQ ID NO: 422052 - DNA, 120 bp, Artificial Sequence
  ENSG00000150907_32 (sequence is synthesized)
aaccagctgtaagttgtgcattgagattatgttaaaagccttggcttaagaatttgaaaatttctttagcctgtagcaacctaaactgtaattcctatcattatgttttattactttcca

SEQ ID NO: 422053 - DNA, 120 bp, Artificial Sequence
  ENSG00000150907_33 (sequence is synthesized)
attacctgtaactgacagaccaaattaattggctttgtgtcctatttagtccatcagtattttcaagtcatgtggaaagcccaaagtcatcacaatgaagagaacaggtgcacagcactg

SEQ ID NO: 422054 - DNA, 120 bp, Artificial Sequence
  ENSG00000150907_34 (sequence is synthesized)
ttcctcttgtgttcttgagaaggatctaatttttctgtatatagcccacatcacacttgctttgtcttgtatgttaattgcatcttcattggcttggtatttcctaaatgtttaacaaga

SEQ ID NO: 422055 - DNA, 120 bp, Artificial Sequence
  ENSG00000150907_35 (sequence is synthesized)
acacaagtgttcctgataagatttcctacagtaagccagctctattgtaagcttcccactgtgatgatcatttttttgaagattcattgaacagccaccactctatcatcctcattttgg

SEQ ID NO: 422056 - DNA, 120 bp, Artificial Sequence
  ENSG00000150907_36 (sequence is synthesized)
ggcagtccaagacatagctggttttagaaacccaagttcctctaagcacagcctcccgggtatgtaactgaacttggtgccaaagtacttgtgtactaatttctattactacgtactgtc

SEQ ID NO: 422057 - DNA, 120 bp, Artificial Sequence
  ENSG00000150907_37 (sequence is synthesized)
actttcctcccgtgccattactgcatcataatacaaggaacctcagagcccccatttgttcattaaagaggcaactacagccaaaatcactgttaaaatcttactacttcatggagtagc

SEQ ID NO: 422058 - DNA, 120 bp, Artificial Sequence
  ENSG00000150907_38 (sequence is synthesized)
tcttaggaaaatatatcttcctcctgagtctgggtaattatacctctcccaagcccccattgtgtgttgaaatcctgtcatgaatccttggtagctctctgagaacagtgaagtccaggg

SEQ ID NO: 422059 - DNA, 120 bp, Artificial Sequence
  ENSG00000150907_39 (sequence is synthesized)
aaaggcatctggtctgtctggaaagcaaacattatgtggcctctggtagtttttttcctgtaagaatactgactttctggagtaatgagtatatatcagttattgtacatgattgctttg

SEQ ID NO: 422060 - DNA, 120 bp, Artificial Sequence
  ENSG00000150907_40 (sequence is synthesized)
tgaaatgtgcaaatgatatcacctatgcagccttgtttgatttattttctctggtttgtactgttattaaaagcatattgtattatagagctattcagatattttaaatataaagatgta

SEQ ID NO: 422061 - DNA, 120 bp, Artificial Sequence
  ENSG00000150907_41 (sequence is synthesized)
ttgtttccgtaatatagacgtatggaatatatttaggtaatagatgtattacttggaaagttctgctttgacaaactgacaaagtctaaatgagcacatgtatcccagtgagcagtaaat

SEQ ID NO: 422062 - DNA, 120 bp, Artificial Sequence
  ENSG00000150907_42 (sequence is synthesized)
caatggaacatcccaagaagaggataaggatgcttaaaatggaaatcattctccaacgatatacaaattggacttgttcaactgctggatatatgctaccaataaccccagccccaactt

SEQ ID NO: 422063 - DNA, 120 bp, Artificial Sequence
  ENSG00000150907_43 (sequence is synthesized)
aaaattcttacattcaagctcctaagagttcttaatttataactaattttaaaagagaagtttcttttctggttttagtttgggaataatcattcattaaaaaaaatgtattgtggttta

SEQ ID NO: 422064 - DNA, 120 bp, Artificial Sequence
  ENSG00000150907_44 (sequence is synthesized)
tgcgaacagaccaacctggcattacagttggcctctccttgaggtgggcacagcctggcagtgtggccaggggtggccatgtaagtcccatcaggacgtagtcatgcctcctgcatttcg

SEQ ID NO: 422065 - DNA, 120 bp, Artificial Sequence
  ENSG00000150907_45 (sequence is synthesized)
ctacccgagtttagtaacagtgcagattccacgttcttgttccgatactctgagaagtgcctgatgttgatgtacttacagacacaagaacaatctttgctataattgtataaagccata

SEQ ID NO: 422066 - DNA, 120 bp, Artificial Sequence
  ENSG00000150907_46 (sequence is synthesized)
aatgtacataaattatgtttaaatggcttggtgtctttcttttctaattatgcagaataagctctttattaggaattttttgtgaagctattaaatacttgagttaagtcttgtcagcca

SEQ ID NO: 422067 - DNA, 120 bp, Artificial Sequence
  ENSG00000150907_47 (sequence is synthesized)
tcacgatgagttttacagcctatgtgcagtattgatgccactgaataagcatttatttttgatgaagatacaacttttctcctcacgttcagttgagagtttgcaacaaaattcaattcg

SEQ ID NO: 422068 - DNA, 120 bp, Artificial Sequence
  ENSG00000150907_48 (sequence is synthesized)
agcctcccaagtagctgggattacagcaaacaatggactattgactaagctttcagagctgtgggtgttctcagagggaggccagccagaacaccagcatctccggcttttcttccaact

SEQ ID NO: 422069 - DNA, 120 bp, Artificial Sequence
  ENSG00000150907_49 (sequence is synthesized)
aactcccaagttggagctccatctatcagaaatatgaaaccctggaatcttcctcctcctcacttctctgccttaaggtgcgggcagctggggaagagaacattgtgcccagggagagta

SEQ ID NO: 422070 - DNA, 120 bp, Artificial Sequence
  ENSG00000150907_50 (sequence is synthesized)
atatatttgcagttgtggaattcaattcgtcataatctgtccctacacagcaagttcattcgtgtgcagaatgaaggaactggaaaaagttcttggtggatgctcaatccagagggtggc

SEQ ID NO: 422071 - DNA, 120 bp, Artificial Sequence
  ENSG00000150907_51 (sequence is synthesized)
accattttacattcctaccatgaaagaattcaattcgtcataatctgtccctacacagcaagttcattcgtgtgcagaatgaaggaactggaaaaagttcttggtggatgctcaatccag

SEQ ID NO: 422072 - DNA, 80 bp, Artificial Sequence
  ENSG00000150938_0 (sequence is synthesized)
aggagtgaggcgagcggggcgcgcggagcggacgccgcggatcttgtgctgcgccaccgcgcccactcggcagctcggga

SEQ ID NO: 422073 - DNA, 120 bp, Artificial Sequence
  ENSG00000150938_1 (sequence is synthesized)
ccgactcggaggaggagagggaggaggcgccgccggcccgggctggagccgagcgcagcagccaccgccgccgccgcgccagaagtttgggttgaaccggagctgccgggaggaaacttt

SEQ ID NO: 422074 - DNA, 120 bp, Artificial Sequence
  ENSG00000150938_2 (sequence is synthesized)
tttcttttttccccctccctcccgggaggaggaggaggaggaggaggggaagctgccgccggcgccaaggctcgtgggctcggggtcggcgcggcccgcagaaggggcgggggcctcgcc

SEQ ID NO: 422075 - DNA, 120 bp, Artificial Sequence
  ENSG00000150938_3 (sequence is synthesized)
cggctgcgaggaggaggcggcggcggcgcaggaggatgtacttggtggcgggggacagggggttggccggctgcgggcacctcctggtctcgctgctggggctgctgctgctgctggcgc

SEQ ID NO: 422076 - DNA, 120 bp, Artificial Sequence
  ENSG00000150938_4 (sequence is synthesized)
gctccggcacccgggcgctggtctgcctgccctgtgacgagtccaagtgcgaggagcccaggaactgcccggggagcatcgtgcagggcgtctgcggctgctgctacacgtgcgccagcc

SEQ ID NO: 422077 - DNA, 120 bp, Artificial Sequence
  ENSG00000150938_5 (sequence is synthesized)
agaggaacgagagctgcggcggcaccttcgggatttacggaacctgcgaccgggggctgcgttgtgtcatccgccccccgctcaatggcgactccctcaccgagtacgaagcgggcgttt

SEQ ID NO: 422078 - DNA, 120 bp, Artificial Sequence
  ENSG00000150938_6 (sequence is synthesized)
gcgaagatgagaactggactgatgaccaactgcttggttttaaaccatgcaatgaaaaccttattgctggctgcaatataatcaatgggaaatgtgaatgtaacaccattcgaacctgca

SEQ ID NO: 422079 - DNA, 120 bp, Artificial Sequence
  ENSG00000150938_7 (sequence is synthesized)
gcaatccctttgagtttccaagtcaggatatgtgcctttcagctttaaagagaattgaagaagagaagccagattgctccaaggcccgctgtgaagtccagttctctccacgttgtcctg

SEQ ID NO: 422080 - DNA, 120 bp, Artificial Sequence
  ENSG00000150938_8 (sequence is synthesized)
aagattctgttctgatcgagggttatgctcctcctggggagtgctgtcccttacccagccgctgcgtgtgcaaccccgcaggctgtctgcgcaaagtctgccagccgggaaacctgaaca

SEQ ID NO: 422081 - DNA, 120 bp, Artificial Sequence
  ENSG00000150938_9 (sequence is synthesized)
tactagtgtcaaaagcctcagggaagccgggagagtgctgtgacctctatgagtgcaaaccagttttcggcgtggactgcaggactgtggaatgccctcctgttcagcagaccgcgtgtc

SEQ ID NO: 422082 - DNA, 120 bp, Artificial Sequence
  ENSG00000150938_10 (sequence is synthesized)
ccccggacagctatgaaactcaagtcagactaactgcagatggttgctgtactttgccaacaagatgcgagtgtctctctggcttatgtggtttccccgtgtgtgaggtgggatccactc

SEQ ID NO: 422083 - DNA, 120 bp, Artificial Sequence
  ENSG00000150938_11 (sequence is synthesized)
cccgcatagtctctcgtggcgatgggacacctggaaagtgctgtgatgtctttgaatgtgttaatgatacaaagccagcctgcgtatttaacaatgtggaatattatgatggagacatgt

SEQ ID NO: 422084 - DNA, 120 bp, Artificial Sequence
  ENSG00000150938_12 (sequence is synthesized)
ttcgaatggacaactgtcggttctgtcgatgccaagggggcgttgccatctgcttcaccgcccagtgtggtgagataaactgcgagaggtactacgtgcccgaaggagagtgctgcccag

SEQ ID NO: 422085 - DNA, 120 bp, Artificial Sequence
  ENSG00000150938_13 (sequence is synthesized)
tgtgtgaagatccagtgtatccttttaataatcccgctggctgctatgccaatggcctgatccttgcccacggagaccggtggcgggaagacgactgcacattctgccagtgcgtcaacg

SEQ ID NO: 422086 - DNA, 120 bp, Artificial Sequence
  ENSG00000150938_14 (sequence is synthesized)
gtgaacgccactgcgttgcgaccgtctgcggacagacctgcacaaaccctgtgaaagtgcctggggagtgttgccctgtgtgcgaagaaccaaccatcatcacagttgatccacctgcat

SEQ ID NO: 422087 - DNA, 120 bp, Artificial Sequence
  ENSG00000150938_15 (sequence is synthesized)
gtggggagttatcaaactgcactctgacagggaaggactgcattaatggtttcaaacgcgatcacaatggttgtcggacctgtcagtgcataaacaccgaggaactatgttcagaacgta

SEQ ID NO: 422088 - DNA, 120 bp, Artificial Sequence
  ENSG00000150938_16 (sequence is synthesized)
aacaaggctgcaccttgaactgtcccttcggtttccttactgatgcccaaaactgtgagatctgtgagtgccgcccaaggcccaagaagtgcagacccataatctgtgacaagtattgtc

SEQ ID NO: 422089 - DNA, 120 bp, Artificial Sequence
  ENSG00000150938_17 (sequence is synthesized)
cacttggattgctgaagaataagcacggctgtgacatctgtcgctgtaagaaatgtccagagctctcatgcagtaagatctgccccttgggtttccagcaggacagtcacggctgtctta

SEQ ID NO: 422090 - DNA, 120 bp, Artificial Sequence
  ENSG00000150938_18 (sequence is synthesized)
tctgcaagtgcagagaggcctctgcttcagctgggccacccatcctgtcgggcacttgtctcaccgtggatggtcatcatcataaaaatgaggagagctggcacgatgggtgccgggaat

SEQ ID NO: 422091 - DNA, 120 bp, Artificial Sequence
  ENSG00000150938_19 (sequence is synthesized)
gctactgtctcaatggacgggaaatgtgtgccctgatcacctgcccggtgcctgcctgtggcaaccccaccattcaccctggacagtgctgcccatcatgtgcagatgactttgtggtgc

SEQ ID NO: 422092 - DNA, 120 bp, Artificial Sequence
  ENSG00000150938_20 (sequence is synthesized)
agaagccagagctcagtactccctccatttgccacgcccctggaggagaatactttgtggaaggagaaacgtggaacattgactcctgtactcagtgcacctgccacagcggacgggtgc

SEQ ID NO: 422093 - DNA, 120 bp, Artificial Sequence
  ENSG00000150938_21 (sequence is synthesized)
tgtgtgagacagaggtgtgcccaccgctgctctgccagaacccctcacgcacccaggattcctgctgcccacagtgtacagatcaaccttttcggccttccttgtcccgcaataacagcg

SEQ ID NO: 422094 - DNA, 120 bp, Artificial Sequence
  ENSG00000150938_22 (sequence is synthesized)
tacctaattactgcaaaaatgatgaaggggatatattcctggcagctgagtcctggaagcctgacgtttgtaccagctgcatctgcattgatagcgtaattagctgtttctctgagtcct

SEQ ID NO: 422095 - DNA, 120 bp, Artificial Sequence
  ENSG00000150938_23 (sequence is synthesized)
gcccttctgtatcctgtgaaagacctgtcttgagaaaaggccagtgttgtccctactgcatagaagacacaattccaaagaaggtggtgtgccacttcagtgggaaggcctatgccgacg

SEQ ID NO: 422096 - DNA, 120 bp, Artificial Sequence
  ENSG00000150938_24 (sequence is synthesized)
gctcgaccgtcagctgcccccctctgccctgtgttgagcccatcaacgtggaaggaagttgctgcccaatgtgtccagaaatgtatgtcccagaaccaaccaatatacccattgagaaga

SEQ ID NO: 422097 - DNA, 120 bp, Artificial Sequence
  ENSG00000150938_25 (sequence is synthesized)
caaaccatcgaggagaggttgacctggaggttcccctgtggcccacgcctagtgaaaatgatatcgtccatctccctagagatatgggtcacctccaggtagattacagagataacaggc

SEQ ID NO: 422098 - DNA, 120 bp, Artificial Sequence
  ENSG00000150938_26 (sequence is synthesized)
tgcacccaagtgaagattcttcactggactccattgcctcagttgtggttcccataattatatgcctctctattataatagcattcctattcatcaatcagaagaaacagtggataccac

SEQ ID NO: 422099 - DNA, 120 bp, Artificial Sequence
  ENSG00000150938_27 (sequence is synthesized)
tgctttgctggtatcgaacaccaactaagccttcttccttaaataatcagctagtatctgtggactgcaagaaaggaaccagagtccaggtggacagttcccagagaatgctaagaattg

SEQ ID NO: 422100 - DNA, 120 bp, Artificial Sequence
  ENSG00000150938_28 (sequence is synthesized)
cagaaccagatgcaagattcagtggcttctacagcatgcaaaaacagaaccatctacaggcagacaatttctaccaaacagtgtgaagaaaggcaactaggatgaggtttcaaaagacgg

SEQ ID NO: 422101 - DNA, 120 bp, Artificial Sequence
  ENSG00000150938_29 (sequence is synthesized)
aagacgactaaatctgctctaaaaagtaaactagaatttgtgcacttgcttagtggattgtattggattgtgacttgatgtacagcgctaagaccttactgggatgggctctgtctacag

SEQ ID NO: 422102 - DNA, 120 bp, Artificial Sequence
  ENSG00000150938_30 (sequence is synthesized)
caatgtgcagaacaagcattcccacttttcctcaagataactgaccaagtgttttcttagaaccaaagtttttaaagttgctaagatatatttgcctgtaagatagctgtagagatattt

SEQ ID NO: 422103 - DNA, 120 bp, Artificial Sequence
  ENSG00000150938_31 (sequence is synthesized)
ggggtggggacagtgagtttggatggggaaatgggtgggagggtggtgttgggaagaaaaattggtcagcttggctcggggagaaacctggtaacataaaagcagttcagtggcccagag

SEQ ID NO: 422104 - DNA, 120 bp, Artificial Sequence
  ENSG00000150938_32 (sequence is synthesized)
gttatttttttcctattgctctgaagactgcactggttgctgcaaagctcaggcctgaatgagcaggaaacaaaaaaggccttgcgacccagctgccataaccaccttagaactaccaga

SEQ ID NO: 422105 - DNA, 120 bp, Artificial Sequence
  ENSG00000150938_33 (sequence is synthesized)
cgagcacatcagaaccctttgacagccatcccaggtctaaagccacaagtttcttttctatacagtcacaactgcagtaggcagtgaggaagccagagaaatgcgatagcggcatttctc

SEQ ID NO: 422106 - DNA, 120 bp, Artificial Sequence
  ENSG00000150938_34 (sequence is synthesized)
taaagcgggttattaaggatatatacagttacactttttgctgcttttattttcttccaagccaatcaatcagccagttcctagcagagtcagcacatgaacaagatctaagtcatttct

SEQ ID NO: 422107 - DNA, 120 bp, Artificial Sequence
  ENSG00000150938_35 (sequence is synthesized)
tgatgtgagcactggagcttttttttttttacaacgtgacaggaagaggagggagagggtgacgaacaccaggcatttccaggggctatatttcactgtttgttgttgctttgttctgtt

SEQ ID NO: 422108 - DNA, 120 bp, Artificial Sequence
  ENSG00000150938_36 (sequence is synthesized)
atattgttggttgttcatagtttttgttgaagctctagcttaagaagaaactttttttaaaaagactgtttggggattctttttccttattatatactgattctacaaaatagaaactac

SEQ ID NO: 422109 - DNA, 120 bp, Artificial Sequence
  ENSG00000150938_37 (sequence is synthesized)
ttcattttaattgtatattattcaagcacctttgttgaagctcaaaaaaaatgatgcctctttaaactttagcaattataggagtatttatgtaactatcttatgcttcaaaaaacaaaa

SEQ ID NO: 422110 - DNA, 120 bp, Artificial Sequence
  ENSG00000150938_38 (sequence is synthesized)
aaaagtatttgtgtgcatgtgtatataatatatatatatacatatatatttatacacatacaatttatgttttcctgttgaatgtatttttatgagattttaaccagaacaaaggcagat

SEQ ID NO: 422111 - DNA, 120 bp, Artificial Sequence
  ENSG00000150938_39 (sequence is synthesized)
aggcattccatagcagtgcttttgatcacttacaaattttttgaataacacaaaatctcattctacctgcagtttaattggaaagatgtgtgtgtgagagtatgtatgtgtgtgtgtgtg

SEQ ID NO: 422112 - DNA, 120 bp, Artificial Sequence
  ENSG00000150938_40 (sequence is synthesized)
tgtgtgtgtgtgcgcgcgcacgcacgccttgagcagtcagcattgcacctgctatggagaagggtattcctttattaaaatcttcctcatttggatttgctttcagttggttttcaattt

SEQ ID NO: 422113 - DNA, 120 bp, Artificial Sequence
  ENSG00000150938_41 (sequence is synthesized)
gctcactggccagagacattgatggcagttcttatctgcatcactaatcagctcctggattttttttttttttttttcaaacaatggtttgaaacaactactggaatattgtccacaata

SEQ ID NO: 422114 - DNA, 120 bp, Artificial Sequence
  ENSG00000150938_42 (sequence is synthesized)
agctggaagtttgttgtagtatgcctcaaatataactgactgtatactatagtggtaacttttcaaacagcccttagcacttttatactaattaacccatttgtgcattgagttttcttt

SEQ ID NO: 422115 - DNA, 120 bp, Artificial Sequence
  ENSG00000150938_43 (sequence is synthesized)
taaaaatgcttgttgtgaaagacacagatacccagtatgcttaacgtgaaaagaaaatgtgttctgttttgtaaaggaactttcaagtattgttgtaaatacttggacagaggttgctga

SEQ ID NO: 422116 - DNA, 120 bp, Artificial Sequence
  ENSG00000150938_44 (sequence is synthesized)
actttaaaaaaaattaatttattattataatgacctaatttattaatctgaagattaaccatttttttgtcttagaatatcaaaaagaaaaagaaaaaggtgttctagctgtttgcatca

SEQ ID NO: 422117 - DNA, 120 bp, Artificial Sequence
  ENSG00000150938_45 (sequence is synthesized)
aaggaaaaaaagatttattatcaaggggcaatatttttatcttttccaaaataaatttgttaatgatacattacaaaaatagattgacatcagcctgattagtataaattttgttggtaa

SEQ ID NO: 422118 - DNA, 120 bp, Artificial Sequence
  ENSG00000150938_46 (sequence is synthesized)
ttaatccattcctggcataaaaagtctttatcaaaaaaaattgtagatgcttgctttttgttttttcaatcatggccatattatgaaaatactaacaggatataggacaaggtgtaaatt

SEQ ID NO: 422119 - DNA, 120 bp, Artificial Sequence
  ENSG00000150938_47 (sequence is synthesized)
tttttattattattttaaagatatgatttatcctgagtgctgtatctattactcttttactttggttcctgttgtgctcttgtaaaagaaaaatataatttcctgaagaataaaatagat

SEQ ID NO: 422120 - DNA, 120 bp, Artificial Sequence
  ENSG00000150938_48 (sequence is synthesized)
atatggcacttggagtgcatcatagttctacagtttgtttttgttttcttcaaaaaagctgtaagagaattatctgcaacttgattcttggcaggaaataaacattttgagttgaaatca

SEQ ID NO: 422121 - DNA, 120 bp, Artificial Sequence
  ENSG00000150938_49 (sequence is synthesized)
ctgcggggtattgaatttgaggctgctctcagcattactgctcatctcaaagaggaacaaatggtcccccaaatggtccagatgcaacagtagggaaaggagtgccaccattcattctga

SEQ ID NO: 422122 - DNA, 120 bp, Artificial Sequence
  ENSG00000150938_50 (sequence is synthesized)
ctacaaaggtgacaagaacatgaacctgcagtcctgttatcagcattttgtctctgtgttccagatttttttttgtaactatgaaatccttgccttgtagtcaacttaaaatgaaataaa

SEQ ID NO: 422123 - DNA, 120 bp, Artificial Sequence
  ENSG00000150938_51 (sequence is synthesized)
ggtgcatattagcttaagaacttttaaacctctgcggcagtaatgagaatctgcatgccaagggcccagcatttctctacaaagcagcccatgagtgcatgtgtgtttgctgtagtgaag

SEQ ID NO: 422124 - DNA, 120 bp, Artificial Sequence
  ENSG00000150938_52 (sequence is synthesized)
catactctggatgaagctcacagctctaacgtaaggcggtctctgtgttccagatttttttttgtaactatgaaatccttgccttgtagtcaacttaaaatgaaataaatttatcagtgc

SEQ ID NO: 422125 - DNA, 120 bp, Artificial Sequence
  ENSG00000150938_53 (sequence is synthesized)
gaggccaaacctgattttgtaccctctagtggtcaaggatatgggggaagaccccatcacaagagggcccacctgataagaaccctctggagactgctggcagagtcttcttaacaggac

SEQ ID NO: 422126 - DNA, 120 bp, Artificial Sequence
  ENSG00000150938_54 (sequence is synthesized)
ttggactgtgaccagataaaacatcttctataggtgcagaaactggccaatctggaaggtccaatggcttctacgttaaggttttcttaacaagatggtataccccgacttttacatgga

SEQ ID NO: 422127 - DNA, 120 bp, Artificial Sequence
  ENSG00000150938_55 (sequence is synthesized)
ttgcttcttttaagtcctaaaagaagttgtatttcttcctccttatttgggccaccttgatctttagttgtttctgcctgccttttaaaatgacatttttatatttccaaaatgatttat

SEQ ID NO: 422128 - DNA, 120 bp, Artificial Sequence
  ENSG00000150938_56 (sequence is synthesized)
aaacttaaggaagttaatttgaaagtttatgctgatgccatttcatatgacagagactaaagggtatacgtccttgtgttctcttggtggggactgctgtcctaaaggtaaaagattttg

SEQ ID NO: 422129 - DNA, 120 bp, Artificial Sequence
  ENSG00000150938_57 (sequence is synthesized)
atccagaggttggattgttcctcgtgtggcaacagtcctctgacctcagtcattttcaaagtctaatgtctttttggctaacaaaagacatcaagctagagattaaaatttgcagaagat

SEQ ID NO: 422130 - DNA, 120 bp, Artificial Sequence
  ENSG00000150961_0 (sequence is synthesized)
gtttgacgtggcagttcccagcccagctgcaactccgagcgtgagtccaggctaaggggacgccggccggggaagaggcgcggcgggagaagcgaccgcagcgggagcccggccaccgag

SEQ ID NO: 422131 - DNA, 120 bp, Artificial Sequence
  ENSG00000150961_1 (sequence is synthesized)
ggctgccggcactaggcgcagagccgccagcgctcggaagcccgcggggtgcgggagcgggaacagacttcttttgtagaattatcctatggaatgatattttcataatgagtcaacaag

SEQ ID NO: 422132 - DNA, 120 bp, Artificial Sequence
  ENSG00000150961_2 (sequence is synthesized)
gttacgtggctacacctccgtattctcagcctcagcctggaataggcctttctccacctcattatgggcactatggggatccgtcgcacacagcatctccaacaggtatgatgaagccag

SEQ ID NO: 422133 - DNA, 120 bp, Artificial Sequence
  ENSG00000150961_3 (sequence is synthesized)
cagggcctttgggggccaccgccactaggggaatgttgcctccgggtcccccacctcctggaccccatcagtttggtcagaatggagctcatgccactggtcaccctccccaaagatttc

SEQ ID NO: 422134 - DNA, 120 bp, Artificial Sequence
  ENSG00000150961_4 (sequence is synthesized)
caggccctccacctgtcaacaatgtggcatcctcacatgcaccataccaaccctctgcacaatcttcttatccaggtcctatatccacttcatctgtcacccagctgggcagccagctca

SEQ ID NO: 422135 - DNA, 120 bp, Artificial Sequence
  ENSG00000150961_5 (sequence is synthesized)
gtgctatgcaaatcaacagctatggttcaggcatggctcctccaagccagggaccccctggccctctgtcagccacatcattgcagactcctccacgacctccacagccttccattttgc

SEQ ID NO: 422136 - DNA, 120 bp, Artificial Sequence
  ENSG00000150961_6 (sequence is synthesized)
agcctggatctcaagttcttccaccaccacccaccacactcaatggtcctggtgcctcacctttgcctctaccaatgtacagaccagatgggctctctgggcctcctcctccaaatgccc

SEQ ID NO: 422137 - DNA, 120 bp, Artificial Sequence
  ENSG00000150961_7 (sequence is synthesized)
agtaccagcccccacctcttccaggccagaccttgggtgctggatatcctccgcagcaggccaactctggtccccagatggcaggcgcacaactgtcttacccaggaggcttccctggag

SEQ ID NO: 422138 - DNA, 120 bp, Artificial Sequence
  ENSG00000150961_8 (sequence is synthesized)
gtcctgcacagatggctggtccgccacagccccagaagaagctggatcctgactctatccctagcccaatccaggtgattgagaatgatagagccagcagaggaggacaagtttatgcca

SEQ ID NO: 422139 - DNA, 120 bp, Artificial Sequence
  ENSG00000150961_9 (sequence is synthesized)
ccaacaccagaggccagatccctcccctggtcactacagattgcatgatacaagaccaaggaaatgccagtcctcgattcatccgttgtacaacatactgttttccatgcacgtcagata

SEQ ID NO: 422140 - DNA, 120 bp, Artificial Sequence
  ENSG00000150961_10 (sequence is synthesized)
tggctaagcaagctcagattccattagctgctgtcatcaagccctttgccaccattccttcaaatgagagtcccctttacttggtaaatcacggcgagagtggaccagtcagatgcaaca

SEQ ID NO: 422141 - DNA, 120 bp, Artificial Sequence
  ENSG00000150961_11 (sequence is synthesized)
ggtgcaaggcctacatgtgcccatttatgcagttcatcgaaggaggaaggagatatcagtgtggattttgcaactgtgtgaatgatgttccaccattctatttccaacatctggaccaca

SEQ ID NO: 422142 - DNA, 120 bp, Artificial Sequence
  ENSG00000150961_12 (sequence is synthesized)
ttggaagaagactggaccactatgagaaaccagagttatctctaggatcttatgaatatgttgccactttggattattgcagaaagagtaagcctcccaacccaccagcctttatcttca

SEQ ID NO: 422143 - DNA, 120 bp, Artificial Sequence
  ENSG00000150961_13 (sequence is synthesized)
tgattgatgtttcatatagtaacataaagaatggacttgtcaagctcatatgtgaagaactgaagaccatgctggaaaaaattccaaaggaagagcaagaagagacgtctgcaattcgag

SEQ ID NO: 422144 - DNA, 120 bp, Artificial Sequence
  ENSG00000150961_14 (sequence is synthesized)
tgggttttatcacatataacaaagttctccatttctttaatgtgaagagtaatctggcccagcctcagatgatggtggtgactgatgttggagaagtctttgttcctttgttggatggtt

SEQ ID NO: 422145 - DNA, 120 bp, Artificial Sequence
  ENSG00000150961_15 (sequence is synthesized)
tccttgtcaactatcaagaatcccaatctgtgattcataatttgttggaccagattccagacatgtttgcagactctaatgaaaatgagactgtctttgctcctgtcatccaggctggca

SEQ ID NO: 422146 - DNA, 120 bp, Artificial Sequence
  ENSG00000150961_16 (sequence is synthesized)
gccaactgctgaagcaccagggaagctcaaaaacagagatgacaaaaaactggttaatacagacaaagagaagatacttttccagccccaaacaaatgtctatgactcattggccaagga

SEQ ID NO: 422147 - DNA, 120 bp, Artificial Sequence
  ENSG00000150961_17 (sequence is synthesized)
ctgcgtggctcacggctgctctgtgacactcttcctctttcctagtcagtatgtggacgtggcctcgctggggctggttcctcagctcactggaggaaccctttacaaatacaacaattt

SEQ ID NO: 422148 - DNA, 120 bp, Artificial Sequence
  ENSG00000150961_18 (sequence is synthesized)
ccagatgcacttggatagacaacaatttttgaacgacctcagaaatgatattgaaaagaaaataggctttgatgctattatgagggttcgtaccagcacaggtttcagagccactgattt

SEQ ID NO: 422149 - DNA, 120 bp, Artificial Sequence
  ENSG00000150961_19 (sequence is synthesized)
ctttggtggaatcttgatgaacaacaccaccgatgtagaaatggctgccatcgattgtgacaaggcagtgaccgtggagttcaagcacgatgacaaactcagtgaagacagtggagcctt

SEQ ID NO: 422150 - DNA, 120 bp, Artificial Sequence
  ENSG00000150961_20 (sequence is synthesized)
aatccagtgtgctgtgctttacacgacaatcagtggtcaaagaagacttcggattcacaatcttggcttaaactgcagctctcagctagctgatctttataagagctgtgagacagatgc

SEQ ID NO: 422151 - DNA, 120 bp, Artificial Sequence
  ENSG00000150961_21 (sequence is synthesized)
tcttatcaacttctttgccaagtcagcttttaaagcagttctccaccagcctttgaaggtcatccgggaaattctagttaatcagactgcccatatgttggcatgttaccggaagaattg

SEQ ID NO: 422152 - DNA, 120 bp, Artificial Sequence
  ENSG00000150961_22 (sequence is synthesized)
tgcaagtccttctgcagcaagccagcttattctaccagattccatgaaagtattgccagtgtacatgaattgcttgttgaaaaactgtgtactactcagcagaccagagatctcaactga

SEQ ID NO: 422153 - DNA, 120 bp, Artificial Sequence
  ENSG00000150961_23 (sequence is synthesized)
tgaacgagcataccagagacagctggtcatgaccatgggtgtggctgactctcagcttttcttctacccacaacttctgcccatacacacgttagatgtcaagagtacaatgttacctgc

SEQ ID NO: 422154 - DNA, 120 bp, Artificial Sequence
  ENSG00000150961_24 (sequence is synthesized)
tgccgttcgttgctctgagtcccgtctttcagaagaaggaatattcttactggctaatggtctacacatgttcctgtggttgggagtaagcagcccaccagaactgatccaaggaatatt

SEQ ID NO: 422155 - DNA, 120 bp, Artificial Sequence
  ENSG00000150961_25 (sequence is synthesized)
taatgtgccatcttttgcacatatcaacacagatatgacattgctgcctgaagtgggaaacccatactctcaacaactcagaatgataatgggtattatccaacaaaagaggccatattc

SEQ ID NO: 422156 - DNA, 120 bp, Artificial Sequence
  ENSG00000150961_26 (sequence is synthesized)
aatgaagctcacaattgtaaagcagcgagaacaaccagaaatggttttccgacagttcctggtagaagacaaaggactttacggaggctcttcttatgtggatttcctttgttgtgttca

SEQ ID NO: 422157 - DNA, 120 bp, Artificial Sequence
  ENSG00000150961_27 (sequence is synthesized)
caaggagatctgtcagctgcttaattaattgaaacttctctgtcattgatgttgcatttccaaggagataatctccttcttggtgcctaattttctagatgataataggctagttttgat

SEQ ID NO: 422158 - DNA, 120 bp, Artificial Sequence
  ENSG00000150961_28 (sequence is synthesized)
ttcttgctcattttcagaataactttccaggaagagatggcatttagaacttcagctttggtgctcaggtataaagccaattaaggtacaattgtaccataaagggaacaatctgtttct

SEQ ID NO: 422159 - DNA, 120 bp, Artificial Sequence
  ENSG00000150961_29 (sequence is synthesized)
gattgcacagtttctaatttttaaaactgatgtggtttgcatttcataaaaggcaaagtttacagaaccataaacattctcaattttctttatgctagacatataaattatttttcaaac

SEQ ID NO: 422160 - DNA, 120 bp, Artificial Sequence
  ENSG00000150961_30 (sequence is synthesized)
tgtatagatttggggtaaaaagttgtctcagttcctctcccaattgcaatgagaaaaaaaagcttaatttttacattatacttaattttctaaaaccatgtaactccattgaacacattt

SEQ ID NO: 422161 - DNA, 120 bp, Artificial Sequence
  ENSG00000150961_31 (sequence is synthesized)
ttcaacttaaggtctgcatagcagacttttaataaccttgggatttatctggtagaacaatatgtgttctacatttttttcataattatatattgtgtatgttaaaactattttccagtt

SEQ ID NO: 422162 - DNA, 120 bp, Artificial Sequence
  ENSG00000150961_32 (sequence is synthesized)
gttttgtctgtaaaactgtctttatcaatatgcttaatggttctttgtacaattttgaaagtttctacctgtatataatggatgttaaccagtatcaataaatcacttcgtataatctta

SEQ ID NO: 422163 - DNA, 120 bp, Artificial Sequence
  ENSG00000150961_33 (sequence is synthesized)
ctcctaggttgttaacatgattcaactgccaaaccatctactggaggaattatttttaaaaactgaaatgtggtgtcagaaatagaaaacaataattttttatgtccttgccagacagaa

SEQ ID NO: 422164 - DNA, 120 bp, Artificial Sequence
  ENSG00000150961_34 (sequence is synthesized)
tatacctggttcttaatgcagtagttccgtacagtgcctctgcctcccttattttgtaaagagtctcagaaaaacttcccttccaagagaaaagctcaaccaaaatggttagtaggacta

SEQ ID NO: 422165 - DNA, 120 bp, Artificial Sequence
  ENSG00000150961_35 (sequence is synthesized)
tgaatatgttgccactttggattattgcagacagtattcacaatagccaaaaggaggaagcaaccaggtgtctatggaagaagaatggataagcaaaatgtggtatatacgtacaatgga

SEQ ID NO: 422166 - DNA, 120 bp, Artificial Sequence
  ENSG00000150961_36 (sequence is synthesized)
atatcattcagcctcaaaaaggaagaaaagtctgacccatgctacaacatggatgaatgttgaggatgttatgctaagtaaaataagccagccacaaaaaggataaatatggaatgattc

SEQ ID NO: 422167 - DNA, 120 bp, Artificial Sequence
  ENSG00000150961_37 (sequence is synthesized)
tatatgaggtcactaaagttgtttgcctgtggctctcttttctaaatattttgtaagatgcaactgaaggatcacttcctaaaagctgtttgaacaccagccagtaaagggaccaacaac

SEQ ID NO: 422168 - DNA, 120 bp, Artificial Sequence
  ENSG00000150961_38 (sequence is synthesized)
taaaaaacatgttcgtagcagctgctttatgtcacagtgattattttaaacagataaagaaaacgcctgacgttctatgttaccgcaaatatgtaaaaaactagaagagtaagcctccca

SEQ ID NO: 422169 - DNA, 120 bp, Artificial Sequence
  ENSG00000150961_39 (sequence is synthesized)
aatatctatgaagatggagagattcctaaaggaattccactattttaccatagagcccaaagtttccttgacccaagcaagaccatcaaggagctatctggattgtatgatactggacct

SEQ ID NO: 422170 - DNA, 90 bp, Artificial Sequence
  ENSG00000150961_40 (sequence is synthesized)
aactaggctgcagcaagagaaggcaattagggtacaaaatctaaggaagctgtcattctgaggatcatatgatagatgctgggttaagac

SEQ ID NO: 422171 - DNA, 73 bp, Artificial Sequence
  ENSG00000150961_41 (sequence is synthesized)
atctactaaaaatacaaaaacagctgggcgtggtggcatggacctctaatcccagttacttaggaggctgagg

SEQ ID NO: 422172 - DNA, 84 bp, Artificial Sequence
  ENSG00000150961_42 (sequence is synthesized)
ggtggacgttgcagtgagccgagatcatgccactcgactccagcgtgtagaaacaagataaattaggctgggtgcagtggctca

SEQ ID NO: 422173 - DNA, 81 bp, Artificial Sequence
  ENSG00000150961_43 (sequence is synthesized)
cagttgaaggccagcctgggcaacatatcgaaacctccacctctactaaaaataaaaacttagccaggtgtagtggtacat

SEQ ID NO: 422174 - DNA, 120 bp, Artificial Sequence
  ENSG00000150961_44 (sequence is synthesized)
tctactaaaaataaaaacttagccaggtgtagtggtacatgcctatagtcccagccactcaggaggctgaggcaagaggatccctggaacccaggagcttgaggatgcagcgagctatga

SEQ ID NO: 422175 - DNA, 120 bp, Artificial Sequence
  ENSG00000150961_45 (sequence is synthesized)
ctcagttagtgaaggaagtagagaagaaaacacagttcagagtcagtaccttatcagcctgtactctgttgacatatcaaagaaattgggaagagcaagaagagacgtctgcaattcgag

SEQ ID NO: 422176 - DNA, 120 bp, Artificial Sequence
  ENSG00000150961_46 (sequence is synthesized)
atatggaacatcagaggctaagctcaggtggcaacaggatgggtcagatcaaggaagactgagactccggaccaagcctcacggctggtgagggccagggactcaatcacaggaacaaga

SEQ ID NO: 422177 - DNA, 120 bp, Artificial Sequence
  ENSG00000150961_47 (sequence is synthesized)
ctcctcagatgtcttcacccaagcccccagctttcttagaaaggtgaccaaaatcatacccaccatgaagagcagcaaggatcttcagtttgctgtgactctttggcctcctacccaaag

SEQ ID NO: 422178 - DNA, 120 bp, Artificial Sequence
  ENSG00000150961_48 (sequence is synthesized)
tgtcggctcagggccttaaaaggcccagccacttccaggaagagaaaaacgactcagaattcttgtgtctcaacacagcagattatgttccctcagttccaccattctatttccaacatc

SEQ ID NO: 422179 - DNA, 120 bp, Artificial Sequence
  ENSG00000150961_49 (sequence is synthesized)
accagagccaggcccatgctgtggatcagaagcgaccataaacaagaaaatccaatctgtcttctggctttcttgagagtcccctttacttggtaaatcacggcgagagtggaccagtca

SEQ ID NO: 422180 - DNA, 120 bp, Artificial Sequence
  ENSG00000150961_50 (sequence is synthesized)
gttctgaaagaggagatttgaaagcattgaatgatcattatataatgaaatggcttgagattacaggatcatttggaaaaggctctcatagcagaactctacatcactagtttggttatt

SEQ ID NO: 422181 - DNA, 120 bp, Artificial Sequence
  ENSG00000150961_51 (sequence is synthesized)
gcatgcaatacaagtttggtttttaaatatagactaaaacaaacacttcctgttttatttttactgtgagtcttgttcttgctgttaattagtggtgtaaggctattgtaaacattgaat

SEQ ID NO: 422182 - DNA, 120 bp, Artificial Sequence
  ENSG00000150961_52 (sequence is synthesized)
attgtcttctgtcaattatgggaatgggtgccaataatttttagtgcattttccccacagttttggttttcaggtaatgaactacaccaatgttcaagtacatggttttatgtttttaac

SEQ ID NO: 422183 - DNA, 120 bp, Artificial Sequence
  ENSG00000150961_53 (sequence is synthesized)
aaacgactactcatttcttcagcacatagctatagaaggcttatgatgttgcaggcacttagatgctgttacagtaaacagtgtagctgagaagattaagaatgcaatttgggggggctg

SEQ ID NO: 422184 - DNA, 120 bp, Artificial Sequence
  ENSG00000150961_54 (sequence is synthesized)
atcatttaattatcataacccaattatgaagtagatatactattattccatattcagctaaaaaaaaaaaacactgagaaaaagacagggtaagtaatttgcccagggtcacacacctgc

SEQ ID NO: 422185 - DNA, 120 bp, Artificial Sequence
  ENSG00000150961_55 (sequence is synthesized)
taaaagacagagctgggattgcatcctaagcagtgagtgggtagtgctgataacagctacaccagactgctgtagcactagataaaataaaaacaactgctgctctttgaatgcctactc

SEQ ID NO: 422186 - DNA, 120 bp, Artificial Sequence
  ENSG00000150961_56 (sequence is synthesized)
tgtgccagttactgtgtgctctaggtgttttacatgggttaccagttaatccttacatccttacaagttcagaagcaaataatgtttcagtcttacagatgaagctcagggaattgttct

SEQ ID NO: 422187 - DNA, 120 bp, Artificial Sequence
  ENSG00000150961_57 (sequence is synthesized)
atgtgcagtcaaatattacagaaagaaaaataataaggcatatatttctgtatatgaaagaaataatttcatgttttgatcaatatcaattagctggtataaagttatttgtatagagta

SEQ ID NO: 422188 - DNA, 120 bp, Artificial Sequence
  ENSG00000150961_58 (sequence is synthesized)
ctttcaaacaactaaaatatgtgactttaatagaaaatgctaacacttccagatcattaactatgtgccagtctctgtactctaaatacttaaatataccatttcagttaattgtcataa

SEQ ID NO: 422189 - DNA, 120 bp, Artificial Sequence
  ENSG00000150961_59 (sequence is synthesized)
caaatcagtgagatggatatggtctcaacattttacagaggaatcagttgaggcttggagacaagttccttcaggtagtaaagtggcagagatgggaactgaattcagttcttatgctct

SEQ ID NO: 422190 - DNA, 120 bp, Artificial Sequence
  ENSG00000150961_60 (sequence is synthesized)
ggactcatccctggtgctgaactgcatactcagaagaatgtagaaatctttcataagtgtttggctacagactaaatcagattactgagttaacaaataataattccataaaaagagact

SEQ ID NO: 422191 - DNA, 120 bp, Artificial Sequence
  ENSG00000150961_61 (sequence is synthesized)
atacacccctctgttgcaataacaacaaaagaaattgtgagtttgatgttaaattaatacaaatgactattttaaagtatcttaggaaaacccagcttataatttgtacaagagtcaaca

SEQ ID NO: 422192 - DNA, 120 bp, Artificial Sequence
  ENSG00000150961_62 (sequence is synthesized)
ctcagcagatagttagtttcctgaaggctcacttacattgtggcaagatggcttaagtctagttgttgaacccaattgtatgaagtacagtttatcaatatatatagcatcttgcagaaa

SEQ ID NO: 422193 - DNA, 120 bp, Artificial Sequence
  ENSG00000150961_63 (sequence is synthesized)
gaggcaagattaaaattcaaggccatgacaggtgatcagtttagagagctgcatattcatgaggaatgtcaaaagtgtatttttaagagaattcaggggcatcaatattccagttagaga

SEQ ID NO: 422194 - DNA, 120 bp, Artificial Sequence
  ENSG00000150961_64 (sequence is synthesized)
ttggttttaagatgaagatttagaaattgatatctgcatatgtttgaaattaagaaatgattataaatgcaatttaaaaaaataaaattcagtaggcaaagaactatgagtctgaagaat

SEQ ID NO: 422195 - DNA, 120 bp, Artificial Sequence
  ENSG00000150961_65 (sequence is synthesized)
gtttatataaaagttaaggaagcttcctcttgtaatatattgacatagtaaatgctgaatgcatagttgctgaactgaacatccacaggaaatagccagtgtctctaccacaaggcagca

SEQ ID NO: 422196 - DNA, 120 bp, Artificial Sequence
  ENSG00000150961_66 (sequence is synthesized)
gattggtaggtctgtgcttatatcagcatactggtatttccttgactttcatcaacaaaatgaaacaaagttaaaaaccaaatgtaagctactttctttttagaggcagctggcacttta

SEQ ID NO: 422197 - DNA, 120 bp, Artificial Sequence
  ENSG00000150961_67 (sequence is synthesized)
aaacacatacatgaagaatacttacgttgtttgttgaataaatagatctaccataatatgccacataatgcatataggggatgggagtgtgaatgtaaataatgaattttttgctttcct

SEQ ID NO: 422198 - DNA, 120 bp, Artificial Sequence
  ENSG00000150961_68 (sequence is synthesized)
tactcctgtgaaaaacattgaccataaacttttcctgacacttgaggtttatggtgaaacattctaactcacatgttctctggccaactcacagtgatgcattggctgttggcatcttct

SEQ ID NO: 422199 - DNA, 120 bp, Artificial Sequence
  ENSG00000150961_69 (sequence is synthesized)
tgctgagaagcaaacattagcattttactctgtcttaacggaagaaatgtaagtcaaaatccttcatatcacctggatgccacgtgcagctggattggcctgtagaccactaaccagatt

SEQ ID NO: 422200 - DNA, 120 bp, Artificial Sequence
  ENSG00000150961_70 (sequence is synthesized)
tctgggctatctaagacgctgcattccctttgagaaatcaacatttggtagtttgttttaatgccggaacagtagtacttggatggaattttccatccactgaaggaacaaagtacattc

SEQ ID NO: 422201 - DNA, 120 bp, Artificial Sequence
  ENSG00000150961_71 (sequence is synthesized)
ttttctctcgcaacatagccttgaatcttgaaaagggatcaaactttcacaggaagttgtttgcataaaacatatactattgtctcttggtatccatggggaattggttccagaatactc

SEQ ID NO: 422202 - DNA, 120 bp, Artificial Sequence
  ENSG00000150961_72 (sequence is synthesized)
tataaattaacagatgctgaagtccctcatataaaatggcatggtatttgcatataacttgtacatatacccccatatattttaaatcatctctagattacttataacaccagctgggca

SEQ ID NO: 422203 - DNA, 64 bp, Artificial Sequence
  ENSG00000150961_73 (sequence is synthesized)
attacttataacaccaggattgcttgagtgcaggcgttcaagaccagcctgggcaacatagtga

SEQ ID NO: 422204 - DNA, 120 bp, Artificial Sequence
  ENSG00000150967_0 (sequence is synthesized)
agtctcagctccgaccttgcagcggcgcagcgcgggtgggaggcggggaggagcagcgggaagagcggagcgaggaccgcgtccggcgcagtcttcaatgagcagcgcggaaactgcacc

SEQ ID NO: 422205 - DNA, 120 bp, Artificial Sequence
  ENSG00000150967_1 (sequence is synthesized)
ccagacccgagcctgctgcgcgccccctcccagagctcacctggtgccaggtaacaggcctggcctcgccctgtggatgatgatggccttgcccccgtgagctacaacctggccttcagc

SEQ ID NO: 422206 - DNA, 120 bp, Artificial Sequence
  ENSG00000150967_2 (sequence is synthesized)
acccgcccacctccaaccagcaggatgcggctgtggaaggcggtggtggtgactttggccttcatgagtgtggacatctgcgtgaccacggccatctatgtcttcagccacctggaccgc

SEQ ID NO: 422207 - DNA, 120 bp, Artificial Sequence
  ENSG00000150967_3 (sequence is synthesized)
agcctcctggaggacatccgccacttcaacatctttgactcggtgctggatctctgggcagcctgcctgtaccgcagctgcctgctgctgggagccaccattggtgtggccaagaacagt

SEQ ID NO: 422208 - DNA, 120 bp, Artificial Sequence
  ENSG00000150967_4 (sequence is synthesized)
gcgctggggccccggcggctgcgggcctcgtggctggtcatcaccctcgtgtgcctcttcgtgggcatctatgccatggtgaagctgctgctcttctcagaggtgcgcaggcccatccgg

SEQ ID NO: 422209 - DNA, 120 bp, Artificial Sequence
  ENSG00000150967_5 (sequence is synthesized)
gacccctggttttgggccctgttcgtgtggacgtacatttcactcggcgcatccttcctgctctggtggctgctgtccaccgtgcggccaggcacccaggccctggagccaggggcggcc

SEQ ID NO: 422210 - DNA, 120 bp, Artificial Sequence
  ENSG00000150967_6 (sequence is synthesized)
accgaggctgagggcttccctgggagcggccggccaccgcccgagcaggcgtctggggccacgctgcagaagctgctctcctacaccaagcccgacgtggccttcctcgtggccgcctcc

SEQ ID NO: 422211 - DNA, 120 bp, Artificial Sequence
  ENSG00000150967_7 (sequence is synthesized)
ttcttcctcatcgtggcagctctgggagagaccttcctgccctactacacgggccgcgccattgatggcatcgtcatccagaaaagcatggatcagttcagcacggctgtcgtcatcgtg

SEQ ID NO: 422212 - DNA, 120 bp, Artificial Sequence
  ENSG00000150967_8 (sequence is synthesized)
tgcctgctggccattggcagctcatttgccgcaggtattcggggcggcatttttaccctcatatttgccagactgaacattcgccttcgaaactgtctcttccgctcactggtgtcccag

SEQ ID NO: 422213 - DNA, 120 bp, Artificial Sequence
  ENSG00000150967_9 (sequence is synthesized)
gagacaagcttctttgatgagaaccgcacaggggacctcatctcccgcctgacctcggacaccaccatggtcagcgacctggtctcccagaacatcaatgtcttcctgcggaacacagtc

SEQ ID NO: 422214 - DNA, 120 bp, Artificial Sequence
  ENSG00000150967_10 (sequence is synthesized)
aaggtcacgggcgtggtggtcttcatgttcagcctctcatggcagctctccttggtcaccttcatgggcttccccatcatcatgatggtgtccaacatctacggcaagtactacaagagg

SEQ ID NO: 422215 - DNA, 120 bp, Artificial Sequence
  ENSG00000150967_11 (sequence is synthesized)
ctctccaaagaggtccagaatgccctggccagagcgagcaacacggcggaggagaccatcagtgccatgaagactgtccggagcttcgccaatgaggaggaggaggcagaggtgtacctg

SEQ ID NO: 422216 - DNA, 120 bp, Artificial Sequence
  ENSG00000150967_12 (sequence is synthesized)
cggaagctgcagcaggtgtacaagctgaacaggaaggaggcagctgcctacatgtactacgtctggggcagcgggctcacactgctggtggtccaggtcagcatcctctactacgggggc

SEQ ID NO: 422217 - DNA, 120 bp, Artificial Sequence
  ENSG00000150967_13 (sequence is synthesized)
caccttgtcatctcaggccagatgaccagcggcaacctcatcgccttcatcatctacgagtttgtcctgggagattgtatggagtccgtgggctccgtctacagtggcctgatgcaggga

SEQ ID NO: 422218 - DNA, 120 bp, Artificial Sequence
  ENSG00000150967_14 (sequence is synthesized)
gggctgctgagaaggtgttcgagttcatcgaccggcagccgaccatggtgcacgatggcagcttggcccccgaccacctggagggccgggtggactttgagaatgtgaccttcacctacc

SEQ ID NO: 422219 - DNA, 120 bp, Artificial Sequence
  ENSG00000150967_15 (sequence is synthesized)
gcactcggccccacacccaggtcctgcagaatgtctccttcagcctgtcccccggcaaggtgacggccctggtggggccctcgggcagtgggaagagctcctgtgtcaacatcctggaga

SEQ ID NO: 422220 - DNA, 120 bp, Artificial Sequence
  ENSG00000150967_16 (sequence is synthesized)
acttctaccccctggaggggggccgggtgctgctggacggcaagcccatcagcgcctacgaccacaagtacttgcaccgtgtgatctccctggtgagccaggagcccgtgctgttcgccc

SEQ ID NO: 422221 - DNA, 120 bp, Artificial Sequence
  ENSG00000150967_17 (sequence is synthesized)
gctccatcacggataacatctcctacggcctgcccactgtgcctttcgagatggtggtggaggccgcacagaaggccaatgcccacggcttcatcatggaactccaggacggctacagca

SEQ ID NO: 422222 - DNA, 120 bp, Artificial Sequence
  ENSG00000150967_18 (sequence is synthesized)
cagagacaggggagaagggcgcccagctgtcaggtggccagaagcagcgggtggccatggcccgggctctggtgcggaaccccccagtcctcatcctggatgaagccaccagcgctttgg

SEQ ID NO: 422223 - DNA, 120 bp, Artificial Sequence
  ENSG00000150967_19 (sequence is synthesized)
atgccgagagcgagtatctgatccagcaggccatccatggcaacctgcagaagcacacggtactcatcatcgcgcaccggctgagcaccgtggagcacgcgcacctcattgtggtgctgg

SEQ ID NO: 422224 - DNA, 120 bp, Artificial Sequence
  ENSG00000150967_20 (sequence is synthesized)
acaagggccgcgtagtgcagcagggcacccaccagcagctgctggcccagggcggcctctacgccaagctggtgcagcggcagatgctggggcttcagcccgccgcagacttcacagctg

SEQ ID NO: 422225 - DNA, 120 bp, Artificial Sequence
  ENSG00000150967_21 (sequence is synthesized)
gccacaacgagcctgtagccaacggcagtcacaaggcctgatggggggcccctgcttctcccggtggggcagaggacccggtgcctgcctggcagatgtgcccacggaggcccccagctg

SEQ ID NO: 422226 - DNA, 120 bp, Artificial Sequence
  ENSG00000150967_22 (sequence is synthesized)
ccctccgagcccaggcctgcagcactgaaagacgacctgccatgtcccatggatcaccgcttcctgcatcttgcccctggtccctgccccattcccagggcactccttacccctgctgcc

SEQ ID NO: 422227 - DNA, 120 bp, Artificial Sequence
  ENSG00000150967_23 (sequence is synthesized)
ctgagccaacgccttcacggacctccctagcctcctaagcaaaggtagagctgcctttttaaacctaggtcttaccagggtttttactgtttggtttgaggcaccccagtcaactcctag

SEQ ID NO: 422228 - DNA, 120 bp, Artificial Sequence
  ENSG00000150967_24 (sequence is synthesized)
atttcaaaaacctttttctaattgggagtaatggcgggcactttcaccaagatgttctagaaacttctgagccaggagtgaatggcccttccttagtagcctgggggatgtccagagact

SEQ ID NO: 422229 - DNA, 120 bp, Artificial Sequence
  ENSG00000150967_25 (sequence is synthesized)
aggcctctcccctttacccctccagagaaggggcttccctgtcccggagggagacacggggaacgggattttccgtctctccctcttgccagctctgtgagtctggccagggcgggtagg

SEQ ID NO: 422230 - DNA, 120 bp, Artificial Sequence
  ENSG00000150967_26 (sequence is synthesized)
gagcgtggagggcatctgtctgccatcgcccgctgccaatctaagccagtctcactgtgaaccacacgaaacctcaactgggggagtgaggggctggccaggtctggaggggcctcaggg

SEQ ID NO: 422231 - DNA, 120 bp, Artificial Sequence
  ENSG00000150967_27 (sequence is synthesized)
gtgcccccagcccggcacccagcgctttcgcccctcgtccacccacccctggctggcagcctccctccccacacccgcccctgtgctctgctgtctggaggccacgtggatgttcatgag

SEQ ID NO: 422232 - DNA, 120 bp, Artificial Sequence
  ENSG00000150967_28 (sequence is synthesized)
atgcattctcttctgtctttggtggatgggatggtggcaaagcccaggatctggctttgccagaggttgcaacatgttgagagaacccggtcaataaagtgtactacctcttacccctaa

SEQ ID NO: 422233 - DNA, 120 bp, Artificial Sequence
  ENSG00000150967_29 (sequence is synthesized)
cacgcccccaaccgcgggaggcgcggaaccagcggccaaggggccgctctaagttcccaagggcggaaaaggacgaagacgcacctcgccaggaaacggtctgcggagaaagatgctcct

SEQ ID NO: 422234 - DNA, 120 bp, Artificial Sequence
  ENSG00000150967_30 (sequence is synthesized)
gggccgggttgggaccggcggcctcctcgttccgcctcccagttttcccactacgaggcagggactaatggctccactttacagacagctgaactgggtcgtgccttcacaggacgggga

SEQ ID NO: 422235 - DNA, 120 bp, Artificial Sequence
  ENSG00000150967_31 (sequence is synthesized)
gaggaagggactcggagccccaaggcctttgacttaaacgccgacccaccccccgccgtctgcccggagctcgtggagaaccagccgagctgaggacagtttaaagagctcggaggtccg

SEQ ID NO: 422236 - DNA, 120 bp, Artificial Sequence
  ENSG00000150967_32 (sequence is synthesized)
actagttcccgctggtgcttcaatcatccagccctgtacgtttcagtttggatttagcatctaccccgggtccctgcctggcgcttccggtccctccgccacagtctgttggattacctc

SEQ ID NO: 422237 - DNA, 120 bp, Artificial Sequence
  ENSG00000150967_33 (sequence is synthesized)
gaagaggaggaggagctggatcttgttctcctccgggccttctgcttgcttctctctgtgatgcagggagaaggtgaggctggaaggccaggaggggaagaggtaaaccttcgtcccctg

SEQ ID NO: 422238 - DNA, 120 bp, Artificial Sequence
  ENSG00000150967_34 (sequence is synthesized)
ctctggcctggggcaggcacagaccggctacagggtgagcgcttcctgaggggctttccagaacagagatggagcttcccagaggagccccttcctggctcctgcggcgcctggccctca

SEQ ID NO: 422239 - DNA, 120 bp, Artificial Sequence
  ENSG00000150967_35 (sequence is synthesized)
catctcaggcccggctgcacagaggcatgactgagcgtccccgaccactgctcgcccgacttccccgggtagtaactgcgcctcctctccccgatgcctgtggtcctcaccctccgcccc

SEQ ID NO: 422240 - DNA, 120 bp, Artificial Sequence
  ENSG00000150967_36 (sequence is synthesized)
aggggccgtgctggccttgcgaccttgggatgtggaggccgagcagttcctcgaggtgtctttcctgctcttcttctttctcttttccgacccccgtccccgggaccggctgcgactcct

SEQ ID NO: 422241 - DNA, 120 bp, Artificial Sequence
  ENSG00000150967_37 (sequence is synthesized)
cgagcgcttgcgggagccgacgtgagccatggcgccgcgggctggcgacgaagaagacgcgcttgagccgaagcccccaaggccggccgcgggcgggctccaagggtggctctagcgggg

SEQ ID NO: 422242 - DNA, 120 bp, Artificial Sequence
  ENSG00000150967_38 (sequence is synthesized)
ccggggcctggcgacgcccagtacccgtcaccgtcccgggaaaatgagcgaccctcacccacccccagcgctggggaccccggttttctccgccgactccagtccccgcagcggtgcctg

SEQ ID NO: 422243 - DNA, 120 bp, Artificial Sequence
  ENSG00000150967_39 (sequence is synthesized)
ttaagggcccgccccgtgcccggaggccccacgcctgcgcacccggctccaaacccctgggaactggccgccgtccgccgcgagtggcgtctggggcgctttcccgcgctctcctaccct

SEQ ID NO: 422244 - DNA, 120 bp, Artificial Sequence
  ENSG00000150967_40 (sequence is synthesized)
cgagtggcgtctggggcgctttcccgcgctctcctaccctccagccccgcgcccttcgcggcctcgccgcctcaagggggcccccggggctgctccgttcccacctcgaccgccctgcgg

SEQ ID NO: 422245 - DNA, 120 bp, Artificial Sequence
  ENSG00000150967_41 (sequence is synthesized)
ggcttccggccggggcgctgcgcgggaggctggccggctgggaagcgcggcgccgctgcctttcgttctgacgccccaggttccgtcccgggcgcgcccacctcccgcagaggcaagcag

SEQ ID NO: 422246 - DNA, 120 bp, Artificial Sequence
  ENSG00000150967_42 (sequence is synthesized)
gcaagcaggggcgccggccctcgagctccgcagcccctcacgcctgtgtctgccgaagctgcgcccacttccaaggctgccctctcggcgcacgcccgcagcacccacgcccccggtgcc

SEQ ID NO: 422247 - DNA, 120 bp, Artificial Sequence
  ENSG00000150967_43 (sequence is synthesized)
ctgggaagaaggcgaccctcgcgcgcgccgccctcctccccggctggtcctgccctctccatacgactgcgagctccagactgaggcgccctggtctttccgacgcgcccacccagtgac

SEQ ID NO: 422248 - DNA, 120 bp, Artificial Sequence
  ENSG00000150967_44 (sequence is synthesized)
tcagaggtcgcaaactcgtgtccgtaggggccagaaagatcttggcagtgagcgcgggcatggaccccaggcccatccggaaggaagccaggattctgctccagctgatacgtgcaacgt

SEQ ID NO: 422249 - DNA, 120 bp, Artificial Sequence
  ENSG00000150967_45 (sequence is synthesized)
ggcatggggctggtgccccaccttcccagggagaccaaactcaagactgcaatatggaagccccctgagtttcaaatgtgtaacccaaagcgtggctgtgcgcttcatccaatctcgggc

SEQ ID NO: 422250 - DNA, 120 bp, Artificial Sequence
  ENSG00000150967_46 (sequence is synthesized)
ccccaagttgcaactcttccacaatgacagccgcaaacacaaagggatcttgcaaagcactttatatacgtcagcgcatttgactcccaaaacagctctaggaggtaggtgctaaatgag

SEQ ID NO: 422251 - DNA, 120 bp, Artificial Sequence
  ENSG00000150967_47 (sequence is synthesized)
gaaacgaaggcaccaaaaggtgaaggctcacctaaagccacacagctggaagtggcagaagcagaatgggaacccgggcagcctggttcctggccctgccattcacccctctgccatcta

SEQ ID NO: 422252 - DNA, 120 bp, Artificial Sequence
  ENSG00000150967_48 (sequence is synthesized)
gaagatgctactggtggcccacccgagtccactggggggtgatgcctgctgctgagggttcacatctgtgctctctggaggcttcccttggctactggaaggcaccctgccctggagata

SEQ ID NO: 422253 - DNA, 120 bp, Artificial Sequence
  ENSG00000150967_49 (sequence is synthesized)
agtgtctgggaagttattcactcctctctggccccctcatccaggagccagtaaccggtggtgtgggcacactgtggtactgtgggctctgcctggagctctccgtggggccagctgagg

SEQ ID NO: 422254 - DNA, 120 bp, Artificial Sequence
  ENSG00000150967_50 (sequence is synthesized)
ctggacgtcctctgaagccacttccttgcccagctgctccctcccctcccctgcttccctgactccctcgctgaagccccattccagaccctgcttctgacaaacctgaactaaggcagc

SEQ ID NO: 422255 - DNA, 120 bp, Artificial Sequence
  ENSG00000150967_51 (sequence is synthesized)
atctttgcccatagaatgacccagaagctggcacaccgttgagccaagaagtgcagtaggctgcggggattttatttctgcccccagaccaaggcaacggagccctcacctgcctgccac

SEQ ID NO: 422256 - DNA, 120 bp, Artificial Sequence
  ENSG00000150967_52 (sequence is synthesized)
ccccacactgggcccaagcaagctcaggtgagcgcacatacatccaccgtggcgggctcctctcgggtgaagccatcaccgaagccctcatcgtccaccaggtcgggctcacggcagcac

SEQ ID NO: 422257 - DNA, 120 bp, Artificial Sequence
  ENSG00000150967_53 (sequence is synthesized)
atgggacagaggctgttgcgcacagcagaggctcggagccagacgacaaggttccaacgctcaccagtgcccaagggccgggctccatgcagctggccgccacggtggaggacaccctgg

SEQ ID NO: 422258 - DNA, 120 bp, Artificial Sequence
  ENSG00000150967_54 (sequence is synthesized)
cccaccacgtgctccacctccaggggctccgtcagggctgtgggtgcctgcagatggcacgactcaggcctgggcactcacagctgccccaggccctgccgcatgggtcacacactcacc

SEQ ID NO: 422259 - DNA, 120 bp, Artificial Sequence
  ENSG00000150967_55 (sequence is synthesized)
tggaagaggcccccaaaatacagggcgccccctgtgaagaccttgcccaaggccacattgagggtgagctcggcattatcatagtggcagcccagctccaggtcctggcccggcctggcc

SEQ ID NO: 422260 - DNA, 120 bp, Artificial Sequence
  ENSG00000150967_56 (sequence is synthesized)
cagcaccgtgccctatccttcaggagctgaaaccattgccccaagagcctctctggagttgactacctgagtgtgtcaaattgagccagaaggggatgggggagaaagggctagatcttg

SEQ ID NO: 422261 - DNA, 120 bp, Artificial Sequence
  ENSG00000150967_57 (sequence is synthesized)
tctttttgtcctaggaacctcttgcatatagctggtgccagcgaagggtggaaaaacccagagaggcctgggggctccagtacatagtgaggctgttttggggtcttctccttcttgtcc

SEQ ID NO: 422262 - DNA, 120 bp, Artificial Sequence
  ENSG00000150967_58 (sequence is synthesized)
aagccttggaagacacccctgccaacggccggcatttcagtttgtggctgggtctgccctcacctccccctgcagcctgggatgggtcagggaatggggatggtgggggatctaaggtcc

SEQ ID NO: 422263 - DNA, 120 bp, Artificial Sequence
  ENSG00000150967_59 (sequence is synthesized)
atccccttaggaggggctcagggggccactaagggctagtgaaggacaggtcttgaggctgtgtttgcattcattcattcatttcttcgctcattcaataaataattattgaccacctgc

SEQ ID NO: 422264 - DNA, 120 bp, Artificial Sequence
  ENSG00000150967_60 (sequence is synthesized)
tatgtcccaggcactgggatacatcagtgaaaaagacaaggcccctgccttcctggaacttgtatctagtgtcagagacagatactaggtaccaacagcataaagaatgagaatccacaa

SEQ ID NO: 422265 - DNA, 120 bp, Artificial Sequence
  ENSG00000150967_61 (sequence is synthesized)
tacagtaaaagatggtcagtgctaaggagaaacatgaagtgagcagagggattgggagcattgggtgtagctgcaattttaaattggatttactggctgggcccggtggctcatgcctgt

SEQ ID NO: 422266 - DNA, 86 bp, Artificial Sequence
  ENSG00000150967_62 (sequence is synthesized)
atgcctgtaatcccagaactttgggaggcacaggcaggaggaccacttgagcctaggagttcgagacaagattggattttttttag

SEQ ID NO: 422267 - DNA, 120 bp, Artificial Sequence
  ENSG00000150967_63 (sequence is synthesized)
gcttggtggcgcatgcctgtggtcccagctacctgggatgctgaggtggaggatcgcctgagcccaggaggtcgaggctgtagtgagcaatgatcgtgccactatactctagcctgggtg

SEQ ID NO: 422268 - DNA, 120 bp, Artificial Sequence
  ENSG00000150967_64 (sequence is synthesized)
atcttgggaggtatgtgctgagcagagggcacagccagtgaaaaggccctgggttggaacgtgcctggtgtgtatgtgggggtggtgcgggcccgctgtgatgccatcgcgggcccgctg

SEQ ID NO: 422269 - DNA, 120 bp, Artificial Sequence
  ENSG00000150967_65 (sequence is synthesized)
tgatgccatcatgggcaggctgctgtcccctctggccaccccacggcactgcttctgcttccgagctagggccgtgagccaggtttgacctcaccctcctcctgcttcctgaatgggcgg

SEQ ID NO: 422270 - DNA, 120 bp, Artificial Sequence
  ENSG00000150967_66 (sequence is synthesized)
gtgcccccgagccctaagggacagacaggctgggttcagacaggcagggctgtgaccctgtgacaggtacaggcaaccccctcacagtcacccaggcccacgtggggtacttctagagca

SEQ ID NO: 422271 - DNA, 120 bp, Artificial Sequence
  ENSG00000150967_67 (sequence is synthesized)
agctgtaacaggtgcggaagagggcactagagataaatggacagttcaaagaattatcaccaattacaatgccctcctagagaaacagaacattcttgtccagacgtggtggctcacacc

SEQ ID NO: 422272 - DNA, 120 bp, Artificial Sequence
  ENSG00000150967_68 (sequence is synthesized)
atcccagcattttgggaagctgaggctggaggatcccttgaggccagcctggacaacatagtgagactccgtctctattaaaaaagaaaaaaagggcagatgtgatggcccacacctgta

SEQ ID NO: 422273 - DNA, 68 bp, Artificial Sequence
  ENSG00000150967_69 (sequence is synthesized)
ctgggccactgcactgcagcctgggcaacagaataagactctgtctcatgaaaaaaaagaaatagaac

SEQ ID NO: 422274 - DNA, 120 bp, Artificial Sequence
  ENSG00000150967_70 (sequence is synthesized)
cagaataagactctgtctcatgaaaaaaaagaaatagaacattctggcactccagaagcctcctaccccccgccatgtgtcccttctctttccccaagaagtaatgtgttgacttttaga

SEQ ID NO: 422275 - DNA, 120 bp, Artificial Sequence
  ENSG00000150967_71 (sequence is synthesized)
gggggcaggagcggctccaggtggccagagcccccatcgcccagcagatggatgctgagaagagacgggccccaggagctctcccagactatcagcctcctgggctggtgaattcctggt

SEQ ID NO: 422276 - DNA, 120 bp, Artificial Sequence
  ENSG00000150967_72 (sequence is synthesized)
gttgagagtggggagccaggagccactctggacccagcctccaggctccaggcagagctgtatggtgtggggcaagagaaggcatcagaatggggagacctgggtcatgagtggtggctt

SEQ ID NO: 422277 - DNA, 73 bp, Artificial Sequence
  ENSG00000150967_73 (sequence is synthesized)
ggctcaaacaaacagacaaaacaaaacaaaataaaataggcccagtatgatggctcatgcctataatcccagc

SEQ ID NO: 422278 - DNA, 120 bp, Artificial Sequence
  ENSG00000150967_74 (sequence is synthesized)
cttgtctgtaaaatgggaacacggatagtagccaccccatggggtccttacacagctcttagcacaatgtccaacttaggtaagaagtgtctgcgctttcctgcccgccaccagccaggt

SEQ ID NO: 422279 - DNA, 120 bp, Artificial Sequence
  ENSG00000150967_75 (sequence is synthesized)
tgttatttccctagaagggaagaggagttaccccctctgccagtgacagggaggagacatgggtttgaagtctggctcagtcacggacaggctgtgtgactctacgggggccttcctgtt

SEQ ID NO: 422280 - DNA, 120 bp, Artificial Sequence
  ENSG00000150967_76 (sequence is synthesized)
ctgagccccagcctcctccgctgtacagcgggatgtcatgaagcttaagcaagatgctgatgactgggattggctcagagtagccctcgaggggtatctgctcttctcccccacccccca

SEQ ID NO: 422281 - DNA, 120 bp, Artificial Sequence
  ENSG00000150967_77 (sequence is synthesized)
accccgcccacaggtagggaggcccggcttcccagtgtctgtctcagaggccccttagcatcccccaccgccacccccaaggcccgggttgctgtggtgagagctgagccgcgtgtgttc

SEQ ID NO: 422282 - DNA, 120 bp, Artificial Sequence
  ENSG00000150967_78 (sequence is synthesized)
agaactgagaccactgcgcctggcctgcttatcagtttagattggccctctccatggaccctctcctccttccagacactctgggctcagtcaccgaagggagcagcagcaagaagaata

SEQ ID NO: 422283 - DNA, 120 bp, Artificial Sequence
  ENSG00000150967_79 (sequence is synthesized)
caagtactgaatcaacatgtgctgccagccagcgctgacatgtatctttgttgactgcttaaggtattattacccccattttacagataaggaaagtgaggtgggtacaggaatctgtct

SEQ ID NO: 422284 - DNA, 120 bp, Artificial Sequence
  ENSG00000150967_80 (sequence is synthesized)
agagtcataaacctagtgagtagcagaccagaattagaacgctccagaattagagtatcttgattccagagtcgtatgtatatgtgtatgtgaatatatgtatatgaatgtgcaatcata

SEQ ID NO: 422285 - DNA, 120 bp, Artificial Sequence
  ENSG00000150967_81 (sequence is synthesized)
gaacagcacagttggccagagagacagatgaggaaaacaagcagggatgagagagaatgaagaggagcacggcaccccagggctggcttagtcctggcgccaggacttagtttactctgt

SEQ ID NO: 422286 - DNA, 120 bp, Artificial Sequence
  ENSG00000150967_82 (sequence is synthesized)
cattgtttctttcccacattagagtttgtcttcatcactgctgtattccccagtgcctagaacagtggctgacacatagtatgtgctcagtaaacagccattaaagaaatgtttgagctg

SEQ ID NO: 422287 - DNA, 120 bp, Artificial Sequence
  ENSG00000150967_83 (sequence is synthesized)
acaaaggtctctgctagcggctcaatcatgcaggtccttgtgggctattgtaaagactttggcttttaccatctcactggatgagaagggggatttggactgttttgagccaaggagcaa

SEQ ID NO: 422288 - DNA, 120 bp, Artificial Sequence
  ENSG00000150967_84 (sequence is synthesized)
caagatctgaagttagttccaacaggatcctgccttctactgtgtggacaggctgatgtgagcaaagttgagagcaggctactgagatagtcccagtgaggttaatgacttggaccaggg

SEQ ID NO: 422289 - DNA, 120 bp, Artificial Sequence
  ENSG00000150967_85 (sequence is synthesized)
ttggggcagtagaggcagtgaaagtggtcaggttctggaaatggtctgagtatttgctggtgcattggagagtttcacgtaattcttgtgcagattcagcaagagagtttgccggcatgc

SEQ ID NO: 422290 - DNA, 120 bp, Artificial Sequence
  ENSG00000150967_86 (sequence is synthesized)
tttgcacagcccctggtacccagtaaggcgattattagcattggtgcttgctggaatcagatattccagaatattctgtcacagctcatcgttgccctcttcttttctgtgggtaaactg

SEQ ID NO: 422291 - DNA, 120 bp, Artificial Sequence
  ENSG00000150967_87 (sequence is synthesized)
aggcagaaactcaggctgggtggaactctgcagcctcagctggagacctcgtctggccaaggactgtggggacacaggccctctaggctgccacctcatggtcccagcagagggcaccag

SEQ ID NO: 422292 - DNA, 120 bp, Artificial Sequence
  ENSG00000150967_88 (sequence is synthesized)
aactgcacagaaagtctcactacccaagtgtctgagccaggccagactgtgctagccagacctgcccggggttcattcactgacctttattgagcacctactgtatgcccagccccaaac

SEQ ID NO: 422293 - DNA, 120 bp, Artificial Sequence
  ENSG00000150967_89 (sequence is synthesized)
ctggctctgctcatggaaagaacttcagtggaaacaggtcctgggatgaacaagggcctggcctggcctggtgatgccactatttccttaagaggagagtggacattccggattattgtc

SEQ ID NO: 422294 - DNA, 120 bp, Artificial Sequence
  ENSG00000150967_90 (sequence is synthesized)
gggggagtctcatttctgctgctgtaacaaaataccacagactgggtcatttagaaaccatagaaactgatttcgtactgttctagaggctgggaagtcccagatcaaggtgccagcagg

SEQ ID NO: 422295 - DNA, 120 bp, Artificial Sequence
  ENSG00000150967_91 (sequence is synthesized)
gactgctgtgtcctcacgctgcagaaggtggaagggcgagagatggcaaaccaggcttacaagccctttgaaaagggccctcatcccatcctggagagctctgccctatcacattggcga

SEQ ID NO: 422296 - DNA, 120 bp, Artificial Sequence
  ENSG00000150967_92 (sequence is synthesized)
ttatgtttcaatatgtaaattttgggagatgcattcagaccacaggaggaagggaaaagaaagagcccccaggttgaaagccagtttaggtttgagtcccagcctttccccttgctgtgt

SEQ ID NO: 422297 - DNA, 120 bp, Artificial Sequence
  ENSG00000150967_93 (sequence is synthesized)
gacctggagtaaattcctcagcctctgtgagtctcccattccaccccaggattgttgtgaaaacacagtaaggcaagcgggtaagaaagcacccagcaaggtgtcaagtgccccaccagg

SEQ ID NO: 422298 - DNA, 120 bp, Artificial Sequence
  ENSG00000150967_94 (sequence is synthesized)
aggggtggggtggcaatttccagcattgcttggaaccagaatagcaacgtcttctgaggttccagaatttggactctgaacccattgagaagaatgaaatcaactttggcgtcaatcagc

SEQ ID NO: 422299 - DNA, 120 bp, Artificial Sequence
  ENSG00000150967_95 (sequence is synthesized)
cactgattgccatgtggcctggacgagtcatctcattcaacttcactttcagccggacgctgtgactcaggcctgtaaccccagcactttgggaagctgaggagagaccttcctgcccta

SEQ ID NO: 422300 - DNA, 120 bp, Artificial Sequence
  ENSG00000150967_96 (sequence is synthesized)
gggacacagcgagaccctgtctcaaaaaacaagagaatgaagcatcctgcaggagccctggctcgatgcctggtagccactataaataaagaagaaccagcaggctgtgtggatgcaagg

SEQ ID NO: 422301 - DNA, 120 bp, Artificial Sequence
  ENSG00000150967_97 (sequence is synthesized)
cccagtgctcccctgttctctgaggaggggggcattaagcaccctggggccccacgatgggcagcaagagtttgccgagggaggaaagcccaccggtggagtgggcagaggggttggtgt

SEQ ID NO: 422302 - DNA, 120 bp, Artificial Sequence
  ENSG00000150967_98 (sequence is synthesized)
gtggacttctggagcctcaggaggaagggtgcgggttcccctggctgcagacgtccctgaggctgccctgcctcccccaggagagaccttcctgccctactacacgggccgcgccattga

SEQ ID NO: 422303 - DNA, 120 bp, Artificial Sequence
  ENSG00000150967_99 (sequence is synthesized)
attacttccggtggcgttcccaatggacgcgggagggcggggtcaggtgtgggagggcgacggggcgtggtctcaccgcagccaacaaatgacaactcttgcagaccgagcctcttctct

SEQ ID NO: 422304 - DNA, 120 bp, Artificial Sequence
  ENSG00000150967_100 (sequence is synthesized)
ccccggacctttgctcaggaatctaccagcattaaacctttgagctagacactctgggctcagtcaccgaagggagcagcagcaagaagaatatttaccagcaagtactgaatcaacatg

SEQ ID NO: 422305 - DNA, 120 bp, Artificial Sequence
  ENSG00000150977_0 (sequence is synthesized)
ctgaacttccccgttcctcttctcggctgcctccttttccgttgtcccttcgcgccccaaaccacatcctggagcgcactctccagcgtggctggcagcggggacggtgcgccggggcgc

SEQ ID NO: 422306 - DNA, 120 bp, Artificial Sequence
  ENSG00000150977_1 (sequence is synthesized)
aggcccaagagtcgcgtgcgcggccccttgcaccatccccccgggcccacccccgggccgcgctgattgggcaggtagggactctgcccagcggaaagttttgggtgccgggaggaagtc

SEQ ID NO: 422307 - DNA, 120 bp, Artificial Sequence
  ENSG00000150977_2 (sequence is synthesized)
taacctttgggagactccaagacagcagctccgaggtcggcgggggtctgggtggccatggaggagccccctgtgcgagaagaggaagaggaggagggagaggaggacgaggagagggac

SEQ ID NO: 422308 - DNA, 120 bp, Artificial Sequence
  ENSG00000150977_3 (sequence is synthesized)
gaggttgggcccgagggggcgctgggcaagagccccttccagctgaccgccgaggacgtgtatgacatctcctacctgttgggccgcgagcttatggccctgggcagcgacccccgggtg

SEQ ID NO: 422309 - DNA, 120 bp, Artificial Sequence
  ENSG00000150977_4 (sequence is synthesized)
acgcagctgcagttcaaagtcgtccgcgtcctggagatgctggaggcgctggtgaatgagggcagcctggcgctggaggagctgaagatggagagggaccacctcaggaaggaggtggag

SEQ ID NO: 422310 - DNA, 120 bp, Artificial Sequence
  ENSG00000150977_5 (sequence is synthesized)
gggctgcggagacagagccctccggccagcggggaggtgaacctgggcccaaacaaaatggtggttgacctgacagatcccaaccgaccccgcttcactctgcaggagctaagggatgtg

SEQ ID NO: 422311 - DNA, 120 bp, Artificial Sequence
  ENSG00000150977_6 (sequence is synthesized)
ctgcaggaacgcaacaaactcaagtcgcagctcctggtggtgcaggaagagctgcagtgctacaagagtggcctgattccaccaagagaaggcccaggaggaagaagagaaaaagatgct

SEQ ID NO: 422312 - DNA, 120 bp, Artificial Sequence
  ENSG00000150977_7 (sequence is synthesized)
gtggttactagtgccaaaaatgctggcaggaacaaggaggagaagacaatcataaaaaagctgttcttttttcgatcggggaaacagacctagatccaaggccacaagtaaggctatggc

SEQ ID NO: 422313 - DNA, 120 bp, Artificial Sequence
  ENSG00000150977_8 (sequence is synthesized)
tctgattctagaagacaaccttccaagatgcctggcaaaaccacctccctgtgccacacagacacactaggcctgtgtatttatttccccttcaaagcagactgaggagggaggagacga

SEQ ID NO: 422314 - DNA, 120 bp, Artificial Sequence
  ENSG00000150977_9 (sequence is synthesized)
ggttctcttggcatcactttctccctggctgcagaactagacacccttgaagatttggcctgggccagtgagactgaaatcaagaaaaacagaagggatgtgcagggtgggggggtccac

SEQ ID NO: 422315 - DNA, 120 bp, Artificial Sequence
  ENSG00000150977_10 (sequence is synthesized)
ttcctgctcccatgtcaacccccagggcctccagcgtgcagacgcgtgtcctactcatctgctcccacggatgaccctggtcttcaatggttagcagaagggagaaaagaaagcaggaaa

SEQ ID NO: 422316 - DNA, 120 bp, Artificial Sequence
  ENSG00000150977_11 (sequence is synthesized)
atgtgctattgagattccagtggtgacttcactgatatttagtgaatatttgatttagccaacatgcctttctttatgtgattttgtattaaagtaaaatgatttttatactttctatag

SEQ ID NO: 422317 - DNA, 120 bp, Artificial Sequence
  ENSG00000150977_12 (sequence is synthesized)
cttatctagagtggtctcttagttacgatggtacacatggtatatgtgtgtatatgtcatatatctacatttcattgtataatgaatcaattgcattcattcagtctaagcgatgcacga

SEQ ID NO: 422318 - DNA, 120 bp, Artificial Sequence
  ENSG00000150977_13 (sequence is synthesized)
ttatctggtgtcactatgaagggaaagattgctgcaaactaaaatgttaagaagctatcgattttaggactcatcctgatttcagaggtgttaagatgtgaacaaaatgcatttaggaat

SEQ ID NO: 422319 - DNA, 120 bp, Artificial Sequence
  ENSG00000150977_14 (sequence is synthesized)
caatgaaacagagagcgggtgtctgcacttcgcaaaggaactaatgaggctgccgcaaccattccgtgagcctgtcttcttagtaaataacagtggcttactcaatgtgtttcgcctgct

SEQ ID NO: 422320 - DNA, 120 bp, Artificial Sequence
  ENSG00000150977_15 (sequence is synthesized)
cttactcaatgtgtttcgcctgctctgtggattatctcatttgttcctcataacctggggagatggggaccggtaccggtgcaccagtttatagattttttttttttttttttttgagac

SEQ ID NO: 422321 - DNA, 80 bp, Artificial Sequence
  ENSG00000150977_16 (sequence is synthesized)
ttggtgggccccgcactcggagcagctggcgggccctgccggctgagggtgtgctgggtcccccagcagtgccagcccac

SEQ ID NO: 422322 - DNA, 120 bp, Artificial Sequence
  ENSG00000150977_17 (sequence is synthesized)
cctcctccacgagccccaccccctgctccatggtgtccagtcccatcaacgacccaagggttgaggagtgcaggcacagggcacgggactggcaggcagctccatctgcagccccggtgc

SEQ ID NO: 422323 - DNA, 120 bp, Artificial Sequence
  ENSG00000150977_18 (sequence is synthesized)
gctgccccaggcagcagtggcaacccgctcgggttcctttccgcattgtggaagctttgttcttttgttctttgcaataaatcttactactgcttactctttgggtccacactgctttta

SEQ ID NO: 422324 - DNA, 120 bp, Artificial Sequence
  ENSG00000150977_19 (sequence is synthesized)
acactgcttttatgagctgtaatactcaccccgaaggtctgcagcttcactcctgaagctagggagaccaggagcccaccaggaggaacgagcaactccagacgcgccgccttaagagct

SEQ ID NO: 422325 - DNA, 68 bp, Artificial Sequence
  ENSG00000150977_20 (sequence is synthesized)
cgtgagccaccgcacccggcttttttttggggggtggtggttcactgcaatctctgcctcccagattc

SEQ ID NO: 422326 - DNA, 120 bp, Artificial Sequence
  ENSG00000150977_21 (sequence is synthesized)
acaggcgtgagtcaccgtgcccggccagtttataggtttagaaactgaaactctggctgtggagctaggaagcagcttgcccaggaggcaaatgcaggcctgattccaaggcccgggcgc

SEQ ID NO: 422327 - DNA, 120 bp, Artificial Sequence
  ENSG00000150977_22 (sequence is synthesized)
tgattccaaggcccgggcgcggagctgccaagctttatgggtccagagtcactggcaagtcctaataatagtaataatttactgtatgcctcgcctgcatcattctaagtacctttccga

SEQ ID NO: 422328 - DNA, 120 bp, Artificial Sequence
  ENSG00000150977_23 (sequence is synthesized)
tgctgtctcacatacttttgtgggatgggtatcactattgtccttggggtcctcccaaggaggttaaggcataatgggtgaaaagtcttgtctaaggtcctcagctagaaagtggtagaa

SEQ ID NO: 422329 - DNA, 120 bp, Artificial Sequence
  ENSG00000150977_24 (sequence is synthesized)
gcaggacttgagcccagatacaaagtccacacacaggcttcaaccactctgccttccaggaagagctggtagtgtttaagagtctagtccagaacactgtctcaacagcatcattagatc

SEQ ID NO: 422330 - DNA, 120 bp, Artificial Sequence
  ENSG00000150977_25 (sequence is synthesized)
attagatcagggctcctaatccctagaaccctgtgtaacactgcaaccctggccaggcatagtggttcaagcctgtaattccagcacttttggaggccaaggtgagaggattgcttgagc

SEQ ID NO: 422331 - DNA, 73 bp, Artificial Sequence
  ENSG00000150977_26 (sequence is synthesized)
tatataaatgctcccctgcctccctgtggggatagatagggtaagagaacccactcagaaagaaaggttaaga

SEQ ID NO: 422332 - DNA, 120 bp, Artificial Sequence
  ENSG00000150977_27 (sequence is synthesized)
agatagggtaagagaacccactcagaaagaaaggttaagatggcctgggtggctgtggtaccccaggagactaaaaaaagttacggtgagaaatgcttggactgcaactcttggtaaaat

SEQ ID NO: 422333 - DNA, 120 bp, Artificial Sequence
  ENSG00000150977_28 (sequence is synthesized)
ctgatgctggcaggtgggcattttggaaaataagtccttggggtgattctcctagagatgggcctagcttgacaacaggtaacagagctgtgacgtcagctgagctctggcggttctcac

SEQ ID NO: 422334 - DNA, 120 bp, Artificial Sequence
  ENSG00000150977_29 (sequence is synthesized)
tgtgacgtcagctgagctctggcggttctcacactgcaggattccaactacaaacctagaccggggaggaacaggctcagaagtaggttttcgccgggtgcagtggctcatgcttgtaat

SEQ ID NO: 422335 - DNA, 71 bp, Artificial Sequence
  ENSG00000150977_30 (sequence is synthesized)
ttcaggaggccaaggcaggggaattgcttgaacctggatggcagaggttgcagtgagctgagttcatgcca

SEQ ID NO: 422336 - DNA, 67 bp, Artificial Sequence
  ENSG00000150977_31 (sequence is synthesized)
tttcaagccaagtctcagaaggcacaggaggtggttgctgtagcaatcatcttttattttatttatt

SEQ ID NO: 422337 - DNA, 77 bp, Artificial Sequence
  ENSG00000150977_32 (sequence is synthesized)
caggatctcagctcctgacctcataatccgcctgcctcgccctcccaaagtggtgggattacagggattaccgtgcc

SEQ ID NO: 422338 - DNA, 120 bp, Artificial Sequence
  ENSG00000150977_33 (sequence is synthesized)
acctcataatccgcctgcctcgccctcccaaagtggtgggattacagggattaccgtgcctggccagcagtcatcttttacaatgaacaaatagggctgggcgcggtggctcacatctgt

SEQ ID NO: 422339 - DNA, 120 bp, Artificial Sequence
  ENSG00000150977_34 (sequence is synthesized)
taaataaataaaaataagtcaggcacagtggctcacgcatgcctgtaatcacagccctgtgggagggtgaggcatgaggatcgcttgaggccaggggtttgagactagcttgggcaacat

SEQ ID NO: 422340 - DNA, 120 bp, Artificial Sequence
  ENSG00000150977_35 (sequence is synthesized)
agtgagaccctatctctacaaaaagtaaaatgaacaaataaatatagcaactacatatcagaacttggaggcacttattagctattagtcctgagtacttgtaaacactgaatagaagct

SEQ ID NO: 422341 - DNA, 120 bp, Artificial Sequence
  ENSG00000150977_36 (sequence is synthesized)
agccaaatttttaattctaataatagctaatactgattactgaaggctatgtgcaaggcactgttccaagtgttgttttttttttttttgtattaactcattaaatcctcacaatcaccc

SEQ ID NO: 422342 - DNA, 120 bp, Artificial Sequence
  ENSG00000150990_0 (sequence is synthesized)
aacccggaagtctcacggccggagttggtggtctgggaacccacgtgggctgggtttcggattgctctgctggtccggccgctggagcgcccaccctggcctagtcgccatggggaagct

SEQ ID NO: 422343 - DNA, 120 bp, Artificial Sequence
  ENSG00000150990_1 (sequence is synthesized)
gcgccggcgctacaacatcaaggggcgccagcaggcgggccccggaccctcgaagggcccccccgagccgccccccgtgcagctggaactggaggacaaggacacgttgaagggagttga

SEQ ID NO: 422344 - DNA, 120 bp, Artificial Sequence
  ENSG00000150990_2 (sequence is synthesized)
tgcaagcaacgcgctcgttctaccggggaagaagaaaaagaagaccaaagcccctcccctgtcgaagaaggagaagaagcctctgaccaagaaggagaagaaagtgctgcagaaaatctt

SEQ ID NO: 422345 - DNA, 120 bp, Artificial Sequence
  ENSG00000150990_3 (sequence is synthesized)
agaacagaaggagaaaaagagccagcgagcagagatgctacagaagctgagtgaagtccaggcttccgaagctgagatgagactcttttataccacttccaagctaggcactgggaaccg

SEQ ID NO: 422346 - DNA, 120 bp, Artificial Sequence
  ENSG00000150990_4 (sequence is synthesized)
catgtatcacaccaaagagaaggctgacgaggtggtagccccgggccaggagaagatcagtagcctcagcggtgcccaccggaagcgtcgccgctggccctcagctgaggaggaggagga

SEQ ID NO: 422347 - DNA, 120 bp, Artificial Sequence
  ENSG00000150990_5 (sequence is synthesized)
ggaggaggaggagtcggaatcggagctggaggaggagtcggagctggacgaggacccagctgctgagccggctgaggctggtgtggggaccaccgtggcacctctgccgccagctccagc

SEQ ID NO: 422348 - DNA, 120 bp, Artificial Sequence
  ENSG00000150990_6 (sequence is synthesized)
acccagcagtcagcccgtgccggctgggatgactgttcctcctcctccagctgcagccccaccactgcccagggccctggctaagcccgccgtcttcatccccgtgaaccgctccccgga

SEQ ID NO: 422349 - DNA, 120 bp, Artificial Sequence
  ENSG00000150990_7 (sequence is synthesized)
aatgcaggaggaacggctgaagctcccaattctctccgaagaacaagtaatcatggaggctgtggccgagcaccccatcgtcatcgtgtgtggtgagaccggcagcgggaagaccacaca

SEQ ID NO: 422350 - DNA, 120 bp, Artificial Sequence
  ENSG00000150990_8 (sequence is synthesized)
ggtgcctcagtttctctatgaagcaggcttcagcagtgaagacagcatcatcggtgtcacggagccccgccgagtggccgccgtggccatgtcccagcgagtggccaaggagatgaatct

SEQ ID NO: 422351 - DNA, 120 bp, Artificial Sequence
  ENSG00000150990_9 (sequence is synthesized)
gtcccagcgggtcgtctcctaccagatccggtatgaaggaaacgtgacagaggagaccagaatcaagttcatgacggatggtgtgctgcttaaagaaatccagaaggacttcctgctgct

SEQ ID NO: 422352 - DNA, 120 bp, Artificial Sequence
  ENSG00000150990_10 (sequence is synthesized)
gcggtacaaggtggtgatcatcgacgaggcccacgagaggagcgtgtacacggacatcctcatcggcctcctgtcccgcattgtgactctccgggctaagaggaacctgccactcaagct

SEQ ID NO: 422353 - DNA, 120 bp, Artificial Sequence
  ENSG00000150990_11 (sequence is synthesized)
gctcatcatgtcggccacgctgcgggtggaggacttcacccagaacccacggctcttcgccaagccgccgccggtcatcaaggtggaatccaggcagttcccagtgactgtgcatttcaa

SEQ ID NO: 422354 - DNA, 120 bp, Artificial Sequence
  ENSG00000150990_12 (sequence is synthesized)
caagcggacaccgctggaagactacagtggcgagtgcttccggaaggtctgcaagatccaccggatgctgcccgcaggtggcatcctggtgttcctgacggggcaggctgaggtgcatgc

SEQ ID NO: 422355 - DNA, 120 bp, Artificial Sequence
  ENSG00000150990_13 (sequence is synthesized)
gctgtgccgcaggctcaggaaggctttcccaccctccagagcccggccacaagaaaaggacgacgatcagaaagactcggtggaggaaatgcggaagtttaagaagtcaagggccagggc

SEQ ID NO: 422356 - DNA, 120 bp, Artificial Sequence
  ENSG00000150990_14 (sequence is synthesized)
caagaaggcgcgggctgaggtgctgccccagatcaacttggatcattactcggtgttaccggcaggcgaaggcgatgaggacagggaggcagaagtggatgaggaagagggggccctgga

SEQ ID NO: 422357 - DNA, 120 bp, Artificial Sequence
  ENSG00000150990_15 (sequence is synthesized)
ctccgacctcgatctggacctgggggatggcgggcaagatggaggtgagcagccggatgcctccctcccgctccacgtgctcccgctgtactctctgctggccccagagaagcaagcaca

SEQ ID NO: 422358 - DNA, 120 bp, Artificial Sequence
  ENSG00000150990_16 (sequence is synthesized)
ggtctttaagcctccaccggaggggactcggttgtgtgttgtggccaccaatgtggccgagacgtcgcttaccatccctggcatcaagtacgtggtggactgtgggaaggtcaagaaacg

SEQ ID NO: 422359 - DNA, 120 bp, Artificial Sequence
  ENSG00000150990_17 (sequence is synthesized)
ctactacgaccgcgtcactggcgtatcctccttccgtgtcacctgggtctcccaggcatcagctgaccagcgagcgggcagagcaggacggacggagcccggccactgctacaggctgta

SEQ ID NO: 422360 - DNA, 120 bp, Artificial Sequence
  ENSG00000150990_18 (sequence is synthesized)
ccttcccgacgcccccctccgtggaagcccttcttgccgccgaggagctgttgatcgcactgggtgccctgcaaccgccccagaaagcagaaagggtgaagcaactgcaggagaaccggc

SEQ ID NO: 422361 - DNA, 120 bp, Artificial Sequence
  ENSG00000150990_19 (sequence is synthesized)
tgagctgccccatcactgcgctgggccggacaatggccacattccccgtggcaccccgctacgctaagatgctggcactgagccgacaacacggctgcctgccctatgccatcaccatcg

SEQ ID NO: 422362 - DNA, 120 bp, Artificial Sequence
  ENSG00000150990_20 (sequence is synthesized)
tggccagcatgacggtgcgggagctgtttgaggagctggacagaccagcggccagtgacgaggagctcaccaggctgaagagcaagcgggcccgggtggcccagatgaagaggacctggg

SEQ ID NO: 422363 - DNA, 120 bp, Artificial Sequence
  ENSG00000150990_21 (sequence is synthesized)
cagggcagggggcttctctgaagctcggcgacctcatggtgctgctgggcgccgtgggagcctgtgagtatgccagctgcacaccccagttttgcgaagccaacgggctgcggtacaaag

SEQ ID NO: 422364 - DNA, 120 bp, Artificial Sequence
  ENSG00000150990_22 (sequence is synthesized)
ccatgatggagatccggcgcctgcggggccagctgaccaccgcagtcaatgccgtgtgccccgaggctgagctcttcgtggatcccaagatgcagccgcccaccgagagccaggtgacct

SEQ ID NO: 422365 - DNA, 120 bp, Artificial Sequence
  ENSG00000150990_23 (sequence is synthesized)
acctgcgacagatcgtgacggcaggcctgggggaccacttggcccgcagggtccagagcgaggagatgctggaggacaagtggaggaacgcctacaagacccctctcctcgacgaccctg

SEQ ID NO: 422366 - DNA, 120 bp, Artificial Sequence
  ENSG00000150990_24 (sequence is synthesized)
tcttcatccaccccagctccgtccttttcaaagagctccccgagtttgtggtctaccaggaaatcgtggagaccactaagatgtacatgaaaggcgtctctagcgtggaggtccagtgga

SEQ ID NO: 422367 - DNA, 120 bp, Artificial Sequence
  ENSG00000150990_25 (sequence is synthesized)
tcccggccctgctgccctcttactgccagtttgacaagcccctggaggaaccagcccctacatactgccccgagcgggggcgggtgctgtgtcaccgggccagcgtgttctatcgcgtgg

SEQ ID NO: 422368 - DNA, 120 bp, Artificial Sequence
  ENSG00000150990_26 (sequence is synthesized)
gctggccgctccccgccatcgaggtggattttccagaggggattgaccgctacaagcactttgcccggttcctgctggaagggcaggtcttccgcaagctggcctcataccggagctgtc

SEQ ID NO: 422369 - DNA, 120 bp, Artificial Sequence
  ENSG00000150990_27 (sequence is synthesized)
tgctgtccagccccggcaccatgctgaagacgtgggccaggctgcagccccgtacggagagccttctgcgagccctggttgcagagaaggctgactgccatgaagccttgctggctgctt

SEQ ID NO: 422370 - DNA, 120 bp, Artificial Sequence
  ENSG00000150990_28 (sequence is synthesized)
ggaagaaaaaccccaaatacctgctggctgagtactgtgagtggcttccacaggccatgcaccccgatatcgagaaagcctggccccccaccactgtccactgaccagaaacctggctgc

SEQ ID NO: 422371 - DNA, 120 bp, Artificial Sequence
  ENSG00000150990_29 (sequence is synthesized)
agggccgaggactggtttggggactggagggctggcagcagcctgtcaccgtgcgaccgtgaccacctggcatgggcttcgtggcctgctctcaggaagtgggtcaagccctgggaaccc

SEQ ID NO: 422372 - DNA, 120 bp, Artificial Sequence
  ENSG00000150990_30 (sequence is synthesized)
tcatccatgagagctcgatcccgtatgaagggtgctgccgcccgtgccatctggcccgggggtgactttttgaactgtttattatatggtggatgatgatttcatctcacgtgctggacg

SEQ ID NO: 422373 - DNA, 120 bp, Artificial Sequence
  ENSG00000150990_31 (sequence is synthesized)
ctgttctgttcagtgtgctctttggactacattagtcccctgtggagcagcagggctggagatctctgcagtcccttccccgcccgccctgccagaaggccgaggaggcacgtggagggc

SEQ ID NO: 422374 - DNA, 120 bp, Artificial Sequence
  ENSG00000150990_32 (sequence is synthesized)
ctccttcctgcaattcttccctctccagagtcagggagggctgcccagccctggcctcacagccgtcccagatgttaggtgagccactgagctctgtgttgaccttgaggggcctggctg

SEQ ID NO: 422375 - DNA, 120 bp, Artificial Sequence
  ENSG00000150990_33 (sequence is synthesized)
ggggcccccaggctccatgccttcttgggagggtggccgccaacgcctttcctgtgttatggcaacagggagtgggcatctcatctgcctgtggtcagctctcagacggcagggagcgga

SEQ ID NO: 422376 - DNA, 120 bp, Artificial Sequence
  ENSG00000150990_34 (sequence is synthesized)
gctgacgttggctgtgcttggtcaccgctgccatgccgcagaggatgcgcctagctgggctggggccacacgactattatgttggccttgaacggggactgcagagccctcagtttgtct

SEQ ID NO: 422377 - DNA, 120 bp, Artificial Sequence
  ENSG00000150990_35 (sequence is synthesized)
cccttgttcctctgtggctgaggtgggagggggagggtggggtaggtcccccagcaagaaagagggacaggagcaccccaggcaggaccaaggagtcgggaggcccctgccttctgtcct

SEQ ID NO: 422378 - DNA, 120 bp, Artificial Sequence
  ENSG00000150990_36 (sequence is synthesized)
ccatggtgagggcacagatgtctccccagagcccagcgctggcagaatggattctgctcctggctttgcttctgcggcttcggtggagacagttatggaataaaatgttccttgcaccca

SEQ ID NO: 422379 - DNA, 120 bp, Artificial Sequence
  ENSG00000150990_37 (sequence is synthesized)
ccatcccccacctcacccccgaataaatggccaccactgagtggccatgccttgaacaacaaagggcagtgtgctggcgaccacgccggccacagacgcctttctccccaacctgcccct

SEQ ID NO: 422380 - DNA, 76 bp, Artificial Sequence
  ENSG00000150990_38 (sequence is synthesized)
gtttttgagacaagtttcactgcagcctccaactcccaggctcaagggatcctcctacttcagccccctgagtaac

SEQ ID NO: 422381 - DNA, 120 bp, Artificial Sequence
  ENSG00000150990_39 (sequence is synthesized)
caggctcaagggatcctcctacttcagccccctgagtaactggggctacaggtgcatgtcaccatgcccagccagctcttcaccctcctgggtggggctggtggggtggtgatgcctgcc

SEQ ID NO: 422382 - DNA, 120 bp, Artificial Sequence
  ENSG00000150990_40 (sequence is synthesized)
acttggggagcttttccaggaacaagggaatgtgcacatgagcagggcactaacagattcgagctgccagcctgcaccctcccccaccaggtcgtcgctcggtttcaccttttccctggc

SEQ ID NO: 422383 - DNA, 120 bp, Artificial Sequence
  ENSG00000150990_41 (sequence is synthesized)
gataccccctgccattttccatcaccgctgtggcctggacccctcttccctcccacatgtcccccagacccttctcatgcagaaggatgaggccttgccctggactctacctcagctcag

SEQ ID NO: 422384 - DNA, 120 bp, Artificial Sequence
  ENSG00000150990_42 (sequence is synthesized)
cagcacaaatacttcctgccaccaacacccagggaagcttgagaggaaggaaatgtcctccaacatatggcaagaggacgatgcgtagagagggcagcgtggacactgggtctcttctgg

SEQ ID NO: 422385 - DNA, 120 bp, Artificial Sequence
  ENSG00000150990_43 (sequence is synthesized)
gcaggccacgttcttgcacccaaggctagtggagaatttgccttccatttaagcagatcccaaggtttgatgccagaattgatggctctcttccggccgatccttctcccagcgccaggt

SEQ ID NO: 422386 - DNA, 120 bp, Artificial Sequence
  ENSG00000150990_44 (sequence is synthesized)
gcatggtggtggccctgtcaccatgctctgtgtccttctggctgtggctttccagagcagccccattccaggtgcagcagcttagaattgcagtcagcctccagacagtgctggttacag

SEQ ID NO: 422387 - DNA, 120 bp, Artificial Sequence
  ENSG00000150990_45 (sequence is synthesized)
tggcttggtgacattagacctttattgttgcaaggaagagaagtcacttgagtcagcagcccagggcgtttctctgctgccatcctcctgccattcgctgtgccttccatcctaaggtca

SEQ ID NO: 422388 - DNA, 120 bp, Artificial Sequence
  ENSG00000150990_46 (sequence is synthesized)
cctcttgggctgaggaggtagttggaggcttagtcacctctgccttccaggcaagagaagggaaggatgaggccagggcacccgccggctgtcctgttcccgtattgaacgttcccagga

SEQ ID NO: 422389 - DNA, 120 bp, Artificial Sequence
  ENSG00000150990_47 (sequence is synthesized)
attccagccgcaacttccttcttcacatcatggaccagaactgagtctgaggccacctgggtgttaggggagggctgtctcctcgaagaatgctctgctgcccaggcaggatgtggggct

SEQ ID NO: 422390 - DNA, 120 bp, Artificial Sequence
  ENSG00000150990_48 (sequence is synthesized)
ttgtcccaagggagaaggagggaatgggggggcggctgcaatcctgcctgctgggggctttgggtcctgctggtggcctctggggaggggttgagacaagcaggtggctgaggctagagc

SEQ ID NO: 422391 - DNA, 120 bp, Artificial Sequence
  ENSG00000150990_49 (sequence is synthesized)
actgagcatggttgggactttctaggaggtcagggcagagctggctccgggccttgccaccaccgacctcactcttggttctcccctcagtcaatgccgtgtgccccgaggctgagctct

SEQ ID NO: 422392 - DNA, 120 bp, Artificial Sequence
  ENSG00000150990_50 (sequence is synthesized)
caggggctttgtgctttgtgcacggtcagccctggcttggcagaaggatctggccccacggctgctggccagctttttgccacctgaggagagtccctgggcccagggtcaccctgacac

SEQ ID NO: 422393 - DNA, 120 bp, Artificial Sequence
  ENSG00000150991_0 (sequence is synthesized)
agttccgtcgcagccgggatttgggtcgcagttcttgtttgtggatcgctgtgatcgtcacttgacaatgcagatcttcgtgaagactctgactggtaagaccatcaccctcgaggttga

SEQ ID NO: 422394 - DNA, 120 bp, Artificial Sequence
  ENSG00000150991_1 (sequence is synthesized)
gcccagtgacaccatcgagaatgtcaaggcaaagatccaagataaggaaggcatccctcctgaccagcagaggctgatctttgctggaaaacagctggaagatgggcgcaccctgtctga

SEQ ID NO: 422395 - DNA, 120 bp, Artificial Sequence
  ENSG00000150991_2 (sequence is synthesized)
ctacaacatccagaaagagtccaccctgcacctggtgctccgtctcagaggtgggatgcaaatcttcgtgaagacactcactggcaagaccatcacccttgaggtcgagcccagtgacac

SEQ ID NO: 422396 - DNA, 120 bp, Artificial Sequence
  ENSG00000150991_3 (sequence is synthesized)
catcgagaacgtcaaagcaaagatccaggacaaggaaggcattcctcctgaccagcagaggttgatctttgccggaaagcagctggaagatgggcgcaccctgtctgactacaacatcca

SEQ ID NO: 422397 - DNA, 120 bp, Artificial Sequence
  ENSG00000150991_4 (sequence is synthesized)
gaaagagtctaccctgcacctggtgctccgtctcagaggtgggatgcagatcttcgtgaagaccctgactggtaagaccatcaccctcgaggtggagcccagtgacaccatcgagaatgt

SEQ ID NO: 422398 - DNA, 120 bp, Artificial Sequence
  ENSG00000150991_5 (sequence is synthesized)
caaggcaaagatccaagataaggaaggcattcctcctgatcagcagaggttgatctttgccggaaaacagctggaagatggtcgtaccctgtctgactacaacatccagaaagagtccac

SEQ ID NO: 422399 - DNA, 120 bp, Artificial Sequence
  ENSG00000150991_6 (sequence is synthesized)
cttgcacctggtactccgtctcagaggtgggatgcaaatcttcgtgaagacactcactggcaagaccatcacccttgaggtcgagcccagtgacactatcgagaacgtcaaagcaaagat

SEQ ID NO: 422400 - DNA, 120 bp, Artificial Sequence
  ENSG00000150991_7 (sequence is synthesized)
ccaagacaaggaaggcattcctcctgaccagcagaggttgatctttgccggaaagcagctggaagatgggcgcaccctgtctgactacaacatccagaaagagtctaccctgcacctggt

SEQ ID NO: 422401 - DNA, 120 bp, Artificial Sequence
  ENSG00000150991_8 (sequence is synthesized)
gctccgtctcagaggtgggatgcagatcttcgtgaagaccctgactggtaagaccatcactctcgaagtggagccgagtgacaccattgagaatgtcaaggcaaagatccaagacaagga

SEQ ID NO: 422402 - DNA, 120 bp, Artificial Sequence
  ENSG00000150991_9 (sequence is synthesized)
tgccggaaaacagctggaagatggtcgtaccctgtctgactacaacatccagaaagagtccaccttgcacctggtgctccgtctcagaggtgggatgcagatcttcgtgaagaccctgac

SEQ ID NO: 422403 - DNA, 120 bp, Artificial Sequence
  ENSG00000150991_10 (sequence is synthesized)
tggtaagaccatcactctcgaggtggagccgagtgacaccattgagaatgtcaaggcaaagatccaagacaaggaaggcatccctcctgaccagcagaggttgatctttgctgggaaaca

SEQ ID NO: 422404 - DNA, 120 bp, Artificial Sequence
  ENSG00000150991_11 (sequence is synthesized)
gctggaagatggacgcaccctgtctgactacaacatccagaaagagtccaccctgcacctggtgctccgtcttagaggtgggatgcagatcttcgtgaagaccctgactggtaagaccat

SEQ ID NO: 422405 - DNA, 120 bp, Artificial Sequence
  ENSG00000150991_12 (sequence is synthesized)
cactctcgaagtggagccgagtgacaccattgagaatgtcaaggcaaagatccaagacaaggaaggcatccctcctgaccagcagaggttgatctttgctgggaaacagctggaagatgg

SEQ ID NO: 422406 - DNA, 120 bp, Artificial Sequence
  ENSG00000150991_13 (sequence is synthesized)
acgcaccctgtctgactacaacatccagaaagagtccaccctgcacctggtgctccgtcttagaggtgggatgcagatcttcgtgaagaccctgactggtaagaccatcactctcgaagt

SEQ ID NO: 422407 - DNA, 120 bp, Artificial Sequence
  ENSG00000150991_14 (sequence is synthesized)
ggagccgagtgacaccattgagaatgtcaaggcaaagatccaagacaaggaaggcatccctcctgaccagcagaggttgatctttgctgggaaacagctggaagatggacgcaccctgtc

SEQ ID NO: 422408 - DNA, 120 bp, Artificial Sequence
  ENSG00000150991_15 (sequence is synthesized)
tgactacaacatccagaaagagtccaccctgcacctggtgctccgtctcagaggtgggatgcaaatcttcgtgaagaccctgactggtaagaccatcaccctcgaggtggagcccagtga

SEQ ID NO: 422409 - DNA, 120 bp, Artificial Sequence
  ENSG00000150991_16 (sequence is synthesized)
caccatcgagaatgtcaaggcaaagatccaagataaggaaggcatccctcctgatcagcagaggttgatctttgctgggaaacagctggaagatggacgcaccctgtctgactacaacat

SEQ ID NO: 422410 - DNA, 120 bp, Artificial Sequence
  ENSG00000150991_17 (sequence is synthesized)
ccagaaagagtccactctgcacttggtcctgcgcttgagggggggtgtctaagtttccccttttaaggtttcaacaaatttcattgcactttcctttcaataaagttgttgcattcccaa

SEQ ID NO: 422411 - DNA, 120 bp, Artificial Sequence
  ENSG00000150991_18 (sequence is synthesized)
gttccccagctttagggccacgcccgccctgagatctgccgagtcattgtccttgtcccgcggccccgggagccccccgcgaccggcctgggaggctcagggaggttgaagggggctgag

SEQ ID NO: 422412 - DNA, 120 bp, Artificial Sequence
  ENSG00000150991_19 (sequence is synthesized)
caaaggaagccccgtcattacctcaaatgtgacccaaaaataaagacccgtccatctcgcagggtgggccagggcgggtcaggagggaggggagggagaccccgactctgcagaaggcgc

SEQ ID NO: 422413 - DNA, 120 bp, Artificial Sequence
  ENSG00000150991_20 (sequence is synthesized)
actctgcagaaggcgctcgctgcgtgccccacgtccgccgaacgcggggttcgcgacccgaggggaccgcgggggctgaggggaggggccgcggagccgcggctaaggaacgcgggccgc

SEQ ID NO: 422414 - DNA, 120 bp, Artificial Sequence
  ENSG00000150991_21 (sequence is synthesized)
cagcggcctccgcgccgggttttggcgcctcccgcgggcgcccccctcctcacggcgagcgctgccacgtcagacgaagggcgcagcgagcgtcctgatccttccgcccggacgctcagg

SEQ ID NO: 422415 - DNA, 120 bp, Artificial Sequence
  ENSG00000150991_22 (sequence is synthesized)
acagcggcccgctgctcataagactcggccttagaaccccagtatcagcagaaggacattttaggacgggacttgggtgactctagggcactggttttctttccagagagcggaacaggc

SEQ ID NO: 422416 - DNA, 120 bp, Artificial Sequence
  ENSG00000150991_23 (sequence is synthesized)
gggtcgcagttcttgtttgtggatcgctgtgatcgtcacttggtgagtagcgggctgctgggctggccggggctttcgtggccgccgggccgctcggtgggacggaggcgtgtggagaga

SEQ ID NO: 422417 - DNA, 120 bp, Artificial Sequence
  ENSG00000150991_24 (sequence is synthesized)
ccgccaagggctgtagtctgggtccgcgagcaaggttgccctgaactgggggttggggggagcgcagcaaaatggcggctgttcccgagtcttgaatggaagacgcttgtgaggcgggct

SEQ ID NO: 422418 - DNA, 120 bp, Artificial Sequence
  ENSG00000150991_25 (sequence is synthesized)
gtgaggtcgttgaaacaaggtggggggcatggtgggcggcaagaacccaaggtcttgaggccttcgctaatgcgggaaagctcttattcgggtgagatgggctggggcaccatctgggga

SEQ ID NO: 422419 - DNA, 120 bp, Artificial Sequence
  ENSG00000150991_26 (sequence is synthesized)
ccctgacgtgaagtttgtcactgactggagaactcggtttgtcgtctgttgcgggggcggcagttatggcggtgccgttgggcagtgcacccgtacctttgggagcgcgcgccctcgtcg

SEQ ID NO: 422420 - DNA, 120 bp, Artificial Sequence
  ENSG00000150991_27 (sequence is synthesized)
tgtcgtgacgtcacccgttctgttggcttataatgcagggtggggccacctgccggtaggtgtgcggtaggcttttctccgtcgcaggacgcagggttcgggcctagggtaggctctcct

SEQ ID NO: 422421 - DNA, 120 bp, Artificial Sequence
  ENSG00000150991_28 (sequence is synthesized)
gaatcgacaggcgccggacctctggtgaggggagggataagtgaggcgtcagtttctctggtcggttttatgtacctatcttcttaagtagctgaagctccggttttgaactatgcgctc

SEQ ID NO: 422422 - DNA, 120 bp, Artificial Sequence
  ENSG00000150991_29 (sequence is synthesized)
ggggttggcgagtgtgttttgtgaagttttttaggcaccttttgaaatgtaatcatttgggtcaatatgtaattttcagtgttagactagtaaattgtccgctaaattctggccgttttt

SEQ ID NO: 422423 - DNA, 120 bp, Artificial Sequence
  ENSG00000150991_30 (sequence is synthesized)
ataatgcagggtggggccacctgccggtaggtgtgcggtaggcttttctccgtcgcaggacgcagggttcgggcctaggacaatgcagatcttcgtgaagactctgactggtaagaccat

SEQ ID NO: 422424 - DNA, 120 bp, Artificial Sequence
  ENSG00000150991_31 (sequence is synthesized)
ggcttttctccgtcgcaggacgcagggttcgggcctagggtaggctctcctgaatcgacaggcgccggacctctggtgaggggagggataagtgaggcgtcagtttctctgacaatgcag

SEQ ID NO: 422425 - DNA, 120 bp, Artificial Sequence
  ENSG00000150991_32 (sequence is synthesized)
acccgtccatctcgcaggagagcggaacaggcgaggaaaagtagtcccttctcggcgattctgcggagggatctccgtggggcggtgaacgccgatgattatataaggacgcgccgggtg

SEQ ID NO: 422426 - DNA, 120 bp, Artificial Sequence
  ENSG00000150991_33 (sequence is synthesized)
gttgctgggcctctgtcccttctccattggtgccagctctgaagcaatcttttctggggcgcctgcaaaggacggatctgtgggtggaacgaactgaaaacggatccagtgactcatccc

SEQ ID NO: 422427 - DNA, 120 bp, Artificial Sequence
  ENSG00000150995_0 (sequence is synthesized)
agtgcagtaaccatgtggatgtgctgctgaagcgtttcctcaagctcgctggggtgggaggagaggaggaggaggaggtggtggtggaggaggaggcagggggtggagagagagaaagcg

SEQ ID NO: 422428 - DNA, 120 bp, Artificial Sequence
  ENSG00000150995_1 (sequence is synthesized)
cacgccgagaggaggtgtgggtgttccgcttccatcctaacggaacgagctccctcttcgcggacatgggattacccagcggctgctaacccctctcctcgccctgctcccccaaaccgg

SEQ ID NO: 422429 - DNA, 120 bp, Artificial Sequence
  ENSG00000150995_2 (sequence is synthesized)
cgtggctccccgggcaccaaggagctgactacagaggagcaggatttgcacccctcgctgggcttgctttggcaacagagtgcctgacccaggtcaggattttcaagaaagacatgtctg

SEQ ID NO: 422430 - DNA, 120 bp, Artificial Sequence
  ENSG00000150995_3 (sequence is synthesized)
acaaaatgtctagcttcctacatattggagacatttgttctctgtacgcggagggatcgacaaatggatttattagcaccttgggcctggttgatgatcgttgtgttgtacagccagaaa

SEQ ID NO: 422431 - DNA, 120 bp, Artificial Sequence
  ENSG00000150995_4 (sequence is synthesized)
ccggggaccttaacaatccacctaagaaattcagagactgcctctttaagctatgtcccatgaaccgctactctgcccaaaagcagttctggaaagccgctaagcctggggccaacagca

SEQ ID NO: 422432 - DNA, 120 bp, Artificial Sequence
  ENSG00000150995_5 (sequence is synthesized)
ccacagacgcagtgctactcaacaaactgcaccacgctgcagacttggaaaagaagcagaatgagacagaaaacaggaaattgctggggaccgtaatccagtatggcaatgtgatccagc

SEQ ID NO: 422433 - DNA, 120 bp, Artificial Sequence
  ENSG00000150995_6 (sequence is synthesized)
tcctgcatttgaaaagtaataaatacctaacagtgaataagaggcttcctgctctgttggagaagaatgccatgagagtcacattggacgaggctggaaatgaagggtcctggttttata

SEQ ID NO: 422434 - DNA, 120 bp, Artificial Sequence
  ENSG00000150995_7 (sequence is synthesized)
ttcagccattctacaagctgcgatccattggagacagcgtggtcataggtgacaaggtggttctgaaccccgtcaatgctggtcagcccctacatgctagcagccatcaactggtagata

SEQ ID NO: 422435 - DNA, 120 bp, Artificial Sequence
  ENSG00000150995_8 (sequence is synthesized)
acccaggctgcaatgaggtcaattccgtcaactgcaatacaagctggaaaatagtccttttcatgaaatggagtgataacaaagacgacatattaaaggggggtgacgtggtgaggctgt

SEQ ID NO: 422436 - DNA, 120 bp, Artificial Sequence
  ENSG00000150995_9 (sequence is synthesized)
ttcatgctgagcaggagaagtttctcacctgtgacgaacacaggaagaagcagcacgtcttcctgagaaccacgggccggcagtcggccacatctgccaccagttcaaaagccctgtggg

SEQ ID NO: 422437 - DNA, 120 bp, Artificial Sequence
  ENSG00000150995_10 (sequence is synthesized)
aggtggaggtggtccagcatgacccatgtcggggcggagcagggtattggaacagccttttccgtttcaagcatctggccacggggcattacttggcagcagaggtagaccctgactttg

SEQ ID NO: 422438 - DNA, 120 bp, Artificial Sequence
  ENSG00000150995_11 (sequence is synthesized)
aggaagaatgcctggagtttcagccctcagtggaccctgatcaggacgcctctcgaagtaggttgcggaatgcccaagaaaagatggtatactccctggtctctgtgcctgaaggcaatg

SEQ ID NO: 422439 - DNA, 120 bp, Artificial Sequence
  ENSG00000150995_12 (sequence is synthesized)
acatctcctccattttcgagctagatcccaccactctgcgtggaggtgacagccttgtcccaaggaactcttatgttcggctcagacacctatgtactaatacctgggttcacagcacaa

SEQ ID NO: 422440 - DNA, 120 bp, Artificial Sequence
  ENSG00000150995_13 (sequence is synthesized)
atattcctattgacaaggaagaagaaaagcccgtgatgctgaaaattggcacctctcctgtgaaggaggataaggaagcatttgccatagttccggtttctcctgctgaagttcgggacc

SEQ ID NO: 422441 - DNA, 120 bp, Artificial Sequence
  ENSG00000150995_14 (sequence is synthesized)
tggactttgccaatgatgccagcaaggtgctgggctccattgctgggaagctagagaagggcaccatcacccagaatgaaaggaggtctgtaaccaagctgctagaagatttggtttact

SEQ ID NO: 422442 - DNA, 120 bp, Artificial Sequence
  ENSG00000150995_15 (sequence is synthesized)
tcgtcactggtggaactaattctggtcaagatgttctcgaagttgtcttctccaagcccaacagagaacggcagaaactgatgagagaacagaatattctcaagcagatcttcaagttgt

SEQ ID NO: 422443 - DNA, 120 bp, Artificial Sequence
  ENSG00000150995_16 (sequence is synthesized)
tacaagccccattcacagactgcggtgatggcccaatgcttcggctggaagagctcggggaccagcggcacgctcctttcagacacatctgccggctctgctacagggtgctgagacact

SEQ ID NO: 422444 - DNA, 120 bp, Artificial Sequence
  ENSG00000150995_17 (sequence is synthesized)
cgcagcaagactacaggaagaaccaggagtatatagccaagcagtttggcttcatgcagaagcagattggctatgatgtgttggctgaagacactatcactgccctgctccacaataatc

SEQ ID NO: 422445 - DNA, 120 bp, Artificial Sequence
  ENSG00000150995_18 (sequence is synthesized)
ggaaactcctggaaaaacacattaccgcggcagagattgacacatttgtcagcctggtgcgaaagaacagggagcccagattcttagattacctctccgacctctgtgtctccatgaaca

SEQ ID NO: 422446 - DNA, 120 bp, Artificial Sequence
  ENSG00000150995_19 (sequence is synthesized)
aatcaattccagtgacccaggaactgatatgtaaagctgtgctgaaccccaccaacgctgacatcctgattgagaccaagttggttctttctcgttttgaatttgaaggtgtctcttcca

SEQ ID NO: 422447 - DNA, 120 bp, Artificial Sequence
  ENSG00000150995_20 (sequence is synthesized)
ctggagagaatgctctggaggcaggagaagacgaggaagaggtgtggctgttttggagggacagcaacaaagagattcgcagcaagagtgtgagggaattggctcaggatgctaaagaag

SEQ ID NO: 422448 - DNA, 120 bp, Artificial Sequence
  ENSG00000150995_21 (sequence is synthesized)
ggcagaaggaggaccgagacgttctcagctactacagatatcagctgaacctctttgcgaggatgtgtctggaccgccaatacctggccatcaacgaaatctcaggccagctggatgtcg

SEQ ID NO: 422449 - DNA, 120 bp, Artificial Sequence
  ENSG00000150995_22 (sequence is synthesized)
atctcattctccgctgcatgtctgacgagaacctgccctatgacctcagggcgtccttctgccgcctcatgcttcacatgcatgtggaccgagatccccaggaacaagtcacccccgtga

SEQ ID NO: 422450 - DNA, 120 bp, Artificial Sequence
  ENSG00000150995_23 (sequence is synthesized)
aatatgcccgcctctggtcggagattccctcggagatcgccattgacgactatgatagtagtggagcttccaaagatgaaattaaggagagatttgctcagaccatggagtttgtggagg

SEQ ID NO: 422451 - DNA, 120 bp, Artificial Sequence
  ENSG00000150995_24 (sequence is synthesized)
agtatttaagagatgtggtttgtcagaggttccctttctctgataaagagaagaataagcttacgtttgaggttgtaaatttagctaggaatctcatatactttggtttctacaacttct

SEQ ID NO: 422452 - DNA, 120 bp, Artificial Sequence
  ENSG00000150995_25 (sequence is synthesized)
ctgaccttctacgattaactaagatccttctggccatattggactgtgtacatgtgacaacaatcttccccattagcaagatggcgaaaggagaagagaataaaggcagtaacgtgatga

SEQ ID NO: 422453 - DNA, 120 bp, Artificial Sequence
  ENSG00000150995_26 (sequence is synthesized)
gatctattcatggcgtgggagagctgatgacccaggtggtgctccggggaggaggctttttgcccatgactcccatggctgctgcccctgaaggcaatgtgaagcaggcagagcctgaga

SEQ ID NO: 422454 - DNA, 120 bp, Artificial Sequence
  ENSG00000150995_27 (sequence is synthesized)
aggaggacatcatggtcatggacaccaagctgaagatcattgagatactccagtttattttgaatgtgaggttggattataggatctcctgcctcctgtgtatatttaagcgagagtttg

SEQ ID NO: 422455 - DNA, 120 bp, Artificial Sequence
  ENSG00000150995_28 (sequence is synthesized)
atgaaagcaattcccagacttcagaaacatcctccggaaacagcagccaagaagggccaagtaatgtaccaggtgctcttgactttgaacacattgaagaacaagcagaaggcatctttg

SEQ ID NO: 422456 - DNA, 120 bp, Artificial Sequence
  ENSG00000150995_29 (sequence is synthesized)
gaggaagtgaggagaacaccccactggacttggatgaccacggcggcagaacctttctccgtgtcctgctccacttgacgatgcatgactacccacccctggtgtcaggggccctgcagc

SEQ ID NO: 422457 - DNA, 120 bp, Artificial Sequence
  ENSG00000150995_30 (sequence is synthesized)
tcctcttccggcacttcagccagaggcaggaggtgctccaggccttcaaacaggttcaactgctggttaccagccaagatgtggacaactacaaacagatcaaacaagacttggatcaac

SEQ ID NO: 422458 - DNA, 120 bp, Artificial Sequence
  ENSG00000150995_31 (sequence is synthesized)
tgaggtccatcgtggaaaagtcagagctttgggtgtacaaagggcagggccccgatgagactatggatggtgcatctggagaaaatgaacataagaaaacggaggagggaaataacaagc

SEQ ID NO: 422459 - DNA, 120 bp, Artificial Sequence
  ENSG00000150995_32 (sequence is synthesized)
cacaaaagcatgaaagcaccagcagctacaactacagagtggtcaaagagattttgattcggcttagcaaactctgtgttcaagagagtgcctcagtgagaaagagcaggaagcagcaac

SEQ ID NO: 422460 - DNA, 120 bp, Artificial Sequence
  ENSG00000150995_33 (sequence is synthesized)
agcgtctgctccggaacatgggcgcgcacgccgtggtgctggagctgctgcagattccctatgagaaggccgaagataccaagatgcaagagataatgaggttggctcatgaatttttgc

SEQ ID NO: 422461 - DNA, 120 bp, Artificial Sequence
  ENSG00000150995_34 (sequence is synthesized)
agaatttctgcgcaggcaaccagcagaatcaagctttgctacataaacacataaacctgtttctcaacccagggatcctggaggcagtaaccatgcagcacatcttcatgaacaatttcc

SEQ ID NO: 422462 - DNA, 120 bp, Artificial Sequence
  ENSG00000150995_35 (sequence is synthesized)
agctttgcagtgagatcaacgagagagttgttcagcacttcgttcactgcatagagactcacggtcggaatgtccagtatataaagttcttacagacaattgtcaaggcagaagggaaat

SEQ ID NO: 422463 - DNA, 120 bp, Artificial Sequence
  ENSG00000150995_36 (sequence is synthesized)
ttattaaaaaatgccaagacatggttatggccgagctggtcaattcgggagaggatgtcctcgtgttctacaacgacagagcctctttccagactctgatccagatgatgcggtcagaac

SEQ ID NO: 422464 - DNA, 120 bp, Artificial Sequence
  ENSG00000150995_37 (sequence is synthesized)
gggatcggatggatgagaacagccctctcatgtaccacatccacttggtcgagctcctggctgtgtgcacggagggtaagaatgtctacacagagatcaagtgcaactccctgctcccgc

SEQ ID NO: 422465 - DNA, 120 bp, Artificial Sequence
  ENSG00000150995_38 (sequence is synthesized)
tggatgacatcgttcgcgtggtgacccacgaggactgcatccctgaggttaaaattgcatacattaacttcctgaatcactgctatgtggatacagaggtggaaatgaaggagatttata

SEQ ID NO: 422466 - DNA, 120 bp, Artificial Sequence
  ENSG00000150995_39 (sequence is synthesized)
ccagcaatcacatgtggaaattgtttgagaatttccttgtagacatctgcagggcctgtaacaacactagtgacaggaaacatgcagactcgattttggagaagtatgtcaccgaaatcg

SEQ ID NO: 422467 - DNA, 120 bp, Artificial Sequence
  ENSG00000150995_40 (sequence is synthesized)
agtacgactttgcagactcgccagcctgtctttgtgcaactgctgcaaggcgtgttcagggtttaccactgcaactggttaatgccaagccaaaaagcctccgtggagagctgtattcgg

SEQ ID NO: 422468 - DNA, 120 bp, Artificial Sequence
  ENSG00000150995_41 (sequence is synthesized)
gtgctgtctgatgtagccaagagccgggccattgccattcccgtggacctggacagccaagtcaacaacctctttctcaagtcccacagcattgtgcagaaaacagccatgaactggcgg

SEQ ID NO: 422469 - DNA, 120 bp, Artificial Sequence
  ENSG00000150995_42 (sequence is synthesized)
ctctcagcccgcaatgccgcacgcagggactctgttctggcagcttccagagactaccggaatatcattgagagattgcaggacatcgtctccgcgctggaggaccgtctcaggcccctg

SEQ ID NO: 422470 - DNA, 120 bp, Artificial Sequence
  ENSG00000150995_43 (sequence is synthesized)
gtgcaggcagagttatctgtgctcgtggatgttctccacagacccgagctgcttttcccagagaacacagacgccagaaggaaatgtgaaagtggcggtttcatttgcaagttaataaag

SEQ ID NO: 422471 - DNA, 120 bp, Artificial Sequence
  ENSG00000150995_44 (sequence is synthesized)
catacaaaacagctgctagaagaaaatgaagagaagctctgcattaaggtcctacagaccctgagggaaatgatgaccaaagatagaggctatggagaaaagggtgaggcgctcaggcaa

SEQ ID NO: 422472 - DNA, 120 bp, Artificial Sequence
  ENSG00000150995_45 (sequence is synthesized)
gttctggtcaaccgttactatggaaacgtcagaccttcgggacgaagagagagccttaccagctttggcaatggcccactgtcagcaggaggacccggcaagcccgggggaggaggggga

SEQ ID NO: 422473 - DNA, 120 bp, Artificial Sequence
  ENSG00000150995_46 (sequence is synthesized)
ggttccggatccagctctatgagcaggggtgagatgagtctggccgaggttcagtgtcaccttgacaaggagggggcttccaatctagttatcgacctcatcatgaacgcatccagtgac

SEQ ID NO: 422474 - DNA, 120 bp, Artificial Sequence
  ENSG00000150995_47 (sequence is synthesized)
cgagtgttccatgaaagcattctcctggccattgcccttctggaaggaggcaacaccaccatccagcactcctttttctgtcgcttgacagaagataagaagtcagagaaattctttaag

SEQ ID NO: 422475 - DNA, 120 bp, Artificial Sequence
  ENSG00000150995_48 (sequence is synthesized)
gtgttttatgaccggatgaaggtggcccagcaagaaatcaaagcaacagtgacagtgaacaccagtgacttgggaaataaaaagaaagacgatgaggtagacagggatgccccatcacgg

SEQ ID NO: 422476 - DNA, 120 bp, Artificial Sequence
  ENSG00000150995_49 (sequence is synthesized)
aaaaaagctaaagagcccacaacacagataacagaagaggtccgggatcagctcctggaggcctccgctgccaccaggaaagccttcaccactttcaggagggaggctgatcccgacgac

SEQ ID NO: 422477 - DNA, 120 bp, Artificial Sequence
  ENSG00000150995_50 (sequence is synthesized)
cactaccagcctggagagggcacccaggccactgccgacaaggccaaggacgacctggagatgagcgcggtcatcaccatcatgcagcccatcctccgcttccttcagctcctgtgtgaa

SEQ ID NO: 422478 - DNA, 120 bp, Artificial Sequence
  ENSG00000150995_51 (sequence is synthesized)
aaccacaaccgagacctgcagaacttcctccgttgccaaaataacaagaccaactacaatttggtatgtgagaccctgcagtttctggactgtatttgtggaagcacaactggaggcctt

SEQ ID NO: 422479 - DNA, 120 bp, Artificial Sequence
  ENSG00000150995_52 (sequence is synthesized)
ggtcttctgggcttgtatataaatgaaaagaatgtagcgcttatcaaccaaaccctggaaagtctgaccgaatactgtcaaggaccttgccatgagaaccagaactgcatagccacccat

SEQ ID NO: 422480 - DNA, 120 bp, Artificial Sequence
  ENSG00000150995_53 (sequence is synthesized)
gaatccaatggcattgacatcatcacagccctgatcctcaatgatatcaatcctttgggaaagaagaggatggaccttgtgttagaactgaagaacaatgcctcgaagttgctcctggcc

SEQ ID NO: 422481 - DNA, 120 bp, Artificial Sequence
  ENSG00000150995_54 (sequence is synthesized)
atcatggaaagcaggcacgacagtgaaaacgcagagaggatactttataacatgaggcccaaggaactggtggaagtgatcaagaaagcctacatgcaaggtgaagtggaatttgaggat

SEQ ID NO: 422482 - DNA, 120 bp, Artificial Sequence
  ENSG00000150995_55 (sequence is synthesized)
ggagaaaacggtgaggatggggcggcgtcccccaggaacgtggggcacaacatctacatattagcccatcagttggctcggcataacaaagaacttcagagcatgctgaaacctggtggc

SEQ ID NO: 422483 - DNA, 120 bp, Artificial Sequence
  ENSG00000150995_56 (sequence is synthesized)
caagtggacggagatgaagccctggagttttatgccaagcacacggcgcagatagagattgtcagattagaccgaacaatggaacagatagtctttcccgtgcccagcatatgtgaattc

SEQ ID NO: 422484 - DNA, 120 bp, Artificial Sequence
  ENSG00000150995_57 (sequence is synthesized)
ctaaccaaggagtcaaaactacgaatttactatactacagagagagacgaacaaggcagcaaaatcaatgatttctttctgcggtctgaagacctcttcaatgaaatgaattggcagaag

SEQ ID NO: 422485 - DNA, 120 bp, Artificial Sequence
  ENSG00000150995_58 (sequence is synthesized)
aaactgagagcccagcccgtgttgtactggtgtgcccgcaacatgtctttctggagcagcatttcgtttaacctggccgtcctgatgaacctgctggtggcgtttttctacccgtttaag

SEQ ID NO: 422486 - DNA, 120 bp, Artificial Sequence
  ENSG00000150995_59 (sequence is synthesized)
ggagtccgaggaggaaccctggagccccactggtcgggactcctgtggacagccatgctcatctctctggccatcgtcattgccctccccaagccccatggcatccgggccttaattgcc

SEQ ID NO: 422487 - DNA, 120 bp, Artificial Sequence
  ENSG00000150995_60 (sequence is synthesized)
tccacaattctacgactgatattttcagtcgggttacaacccacgttgtttcttctgggcgctttcaatgtatgcaataaaatcatctttctaatgagctttgtgggcaactgtgggaca

SEQ ID NO: 422488 - DNA, 120 bp, Artificial Sequence
  ENSG00000150995_61 (sequence is synthesized)
ttcacaagaggctaccgagccatggttctggatgttgagttcctctatcatttgttgtatctggtgatctgtgccatggggctctttgtccatgaattcttctacagtctgctgcttttt

SEQ ID NO: 422489 - DNA, 120 bp, Artificial Sequence
  ENSG00000150995_62 (sequence is synthesized)
gatttagtgtacagagaagagactttgcttaatgtcattaaaagtgtcactcgcaatggacggtccatcatcctgacagcagttctggctctgatcctcgtttacctgttctcaatagtg

SEQ ID NO: 422490 - DNA, 120 bp, Artificial Sequence
  ENSG00000150995_63 (sequence is synthesized)
ggctatcttttcttcaaggatgactttatcttggaagtagataggctgcccaatgaaacagctgttccagaaaccggcgagagtttggcaagcgagttcctgttctccgatgtgtgtagg

SEQ ID NO: 422491 - DNA, 120 bp, Artificial Sequence
  ENSG00000150995_64 (sequence is synthesized)
gtggagagtggggagaactgctcctctcctgcacccagagaagagctggtccctgcagaagagacggaacaggataaagagcacacatgtgagacgctgctgatgtgcattgtcactgtg

SEQ ID NO: 422492 - DNA, 120 bp, Artificial Sequence
  ENSG00000150995_65 (sequence is synthesized)
ctgagtcacgggctgcggagcgggggtggagtaggagatgtactcaggaagccgtccaaagaggaacccctgtttgctgctagagttatttatgacctcttgttcttcttcatggtcatc

SEQ ID NO: 422493 - DNA, 120 bp, Artificial Sequence
  ENSG00000150995_66 (sequence is synthesized)
atcattgttcttaacctgatttttggggttatcattgacacttttgctgacctgaggagtgagaagcagaagaaggaagagatcttgaagaccacgtgctttatctgtggcttggaaaga

SEQ ID NO: 422494 - DNA, 120 bp, Artificial Sequence
  ENSG00000150995_67 (sequence is synthesized)
gacaagtttgacaacaagactgtcacctttgaagagcacatcaaggaagaacacaacatgtggcactatctgtgcttcatcgtcctggtgaaagtaaaggactccaccgaatatactggg

SEQ ID NO: 422495 - DNA, 120 bp, Artificial Sequence
  ENSG00000150995_68 (sequence is synthesized)
cctgagagttacgtggcagaaatgatcaaggaaagaaaccttgactggttccccaggatgagagccatgtcattggtcagcagtgattctgaaggagaacagaatgagctgagaaacctg

SEQ ID NO: 422496 - DNA, 120 bp, Artificial Sequence
  ENSG00000150995_69 (sequence is synthesized)
caggagaagctggagtccaccatgaaacttgtcacgaacctttctggccagctgtcggaattaaaggatcagatgacagaacaaaggaagcagaaacaaagaattggtcttctaggacat

SEQ ID NO: 422497 - DNA, 120 bp, Artificial Sequence
  ENSG00000150995_70 (sequence is synthesized)
cctcctcacatgaatgtcaacccacaacaaccagcataagcaaatgaaagaaaggaattgtatttaccttttataattattattagtgtgggtatggctaatgagttctgattcacccac

SEQ ID NO: 422498 - DNA, 120 bp, Artificial Sequence
  ENSG00000150995_71 (sequence is synthesized)
gaaggttacatttatgctgaatacatttgtaaatactcagttttatactgtatgtatatgattgctactctaaaggtttggatatatgtattgtaattagaattgttggcatgatgacat

SEQ ID NO: 422499 - DNA, 120 bp, Artificial Sequence
  ENSG00000150995_72 (sequence is synthesized)
ttcatttgtgccaaaaatattaaaaatgccttttttggaaggactaacagaaagcacctgatttgcacttgaaccagattatagatttaaaagtatatgacatgtattttgtatttaaaa

SEQ ID NO: 422500 - DNA, 120 bp, Artificial Sequence
  ENSG00000150995_73 (sequence is synthesized)
ctagaatagccagtatttatgttttttataaaactgtgcaatacgaattatgcaatcacaatacatttgtagctcccgagtgtcctaaagggagtgcacttctttgaagctggtgtgtta

SEQ ID NO: 422501 - DNA, 120 bp, Artificial Sequence
  ENSG00000150995_74 (sequence is synthesized)
atactatgtaataaatggttaactttcaaatgatgctgctgccaaaattatattaatagtgagtttcaggcccctgggcattttgtaccatgtaattatcctctggtgatgctgtttctc

SEQ ID NO: 422502 - DNA, 120 bp, Artificial Sequence
  ENSG00000150995_75 (sequence is synthesized)
gttagtggcagtagtgcctccgtctcctagtgataatgctccaagtctatgaactgttaaatcagcattcattttaagaaaagcaactttagtttcaaagatacttttaagcttctaaat

SEQ ID NO: 422503 - DNA, 120 bp, Artificial Sequence
  ENSG00000150995_76 (sequence is synthesized)
tgatcatttaaactatttctttaaataagagagccaaattagaggctcatactttagcttgtgaagaagataatgaattttttaaagggaactttctatgcaatgttcaggataaatgca

SEQ ID NO: 422504 - DNA, 120 bp, Artificial Sequence
  ENSG00000150995_77 (sequence is synthesized)
tactgctggccaatcagtgtcatctcctgggtaaattttgatgtcgcattataaagacatgcataattgatggtttctagattatctagtccaaacaatagagtttattttttcttcatc

SEQ ID NO: 422505 - DNA, 120 bp, Artificial Sequence
  ENSG00000150995_78 (sequence is synthesized)
tgaaccaacatgctacagtagctaagaagtattaaaactatatacatccatataaagatgaaatatgaactatctcattagaagtcatagttgaccacagacatgttattcttctgaaag

SEQ ID NO: 422506 - DNA, 120 bp, Artificial Sequence
  ENSG00000150995_79 (sequence is synthesized)
agccacattttggttttatttcttgtcacatgatttcttttcttgatggatgaaaaatatgaaaggaaacttttatatctgttgcctagttttgtacatggatctcattttacaagagaa

SEQ ID NO: 422507 - DNA, 120 bp, Artificial Sequence
  ENSG00000150995_80 (sequence is synthesized)
tctctctgcaaaaaaaaaaaaaacagtttaaaaatgcattgaaagcagagttctgaaatgagtaaagtttgtaaatgcatatataaaaatatttaataaatgatgcagaatatacagtga

SEQ ID NO: 422508 - DNA, 120 bp, Artificial Sequence
  ENSG00000150995_81 (sequence is synthesized)
attgatgaattggataatgctgagcttcctccagctccggattctgagaacgccactgagcaggagcttgaaccaagtccacccctgcggcagctggaagaccataaaaggggtgaggcg

SEQ ID NO: 422509 - DNA, 120 bp, Artificial Sequence
  ENSG00000150995_82 (sequence is synthesized)
atgggagagggaaagtacctgtggacggagacagagagagaatattggagttctgagagctggaggaggagaaggtggggtcctaaagcccagctgggagagtggtgagcagggtgcgct

SEQ ID NO: 422510 - DNA, 120 bp, Artificial Sequence
  ENSG00000150995_83 (sequence is synthesized)
gggagacttgtcacgccgcagggagctgggaaagatgctaagagcagacgggaagactgctgggtgcgcagaatccttggagacttcacatgagctgtctctgttgagaggtggggatgg

SEQ ID NO: 422511 - DNA, 120 bp, Artificial Sequence
  ENSG00000150995_84 (sequence is synthesized)
aagccagatctaagactaacaagcagagtccagccgcaggctgagaccacaaatagcagctatttcctggggaagcaatggagaaaactagggcagaagttagaggggagaatggactca

SEQ ID NO: 422512 - DNA, 120 bp, Artificial Sequence
  ENSG00000150995_85 (sequence is synthesized)
ggtgaagtggatcaccctgttgttaagttggcaggatctggggtgtgtttgaggtgctgtaatgtgtgatgtcacccagggcaccatctgcctctccctgaaaccacatcatcatggatc

SEQ ID NO: 422513 - DNA, 120 bp, Artificial Sequence
  ENSG00000150995_86 (sequence is synthesized)
ggctatggagaaaaggtactgcattttattttcatggtcaaaccaggttttactatgaaactgaagggagggacctttcaaaacccaccttagctcaggcattactgactgaggggctag

SEQ ID NO: 422514 - DNA, 120 bp, Artificial Sequence
  ENSG00000150995_87 (sequence is synthesized)
ctttttttaaaagaaagaaagaaagaaagaaaaagctgtttatcctgccgttaaagggagctaaatcatatgactgtcttttttaaaagtcaaatatacttagtcgtctcttataggctg

SEQ ID NO: 422515 - DNA, 120 bp, Artificial Sequence
  ENSG00000150995_88 (sequence is synthesized)
attgccacataatctaatgtcagagaagtggtaataacaagattttccatctatttaaattcccagtgaggagcaaatgcctcttttgtatcaaagtatgcgtttctgatttttaggttt

SEQ ID NO: 422516 - DNA, 120 bp, Artificial Sequence
  ENSG00000150995_89 (sequence is synthesized)
ttcagtgcatcaagaaacgccctccacttctaactgcaattaaggcaggcatacacgtcaccacttctgagggagattgggaaatggacagtcccgtgacctgattgttcttagtatatg

SEQ ID NO: 422517 - DNA, 120 bp, Artificial Sequence
  ENSG00000150995_90 (sequence is synthesized)
cagtgaacaaggatataccagatccattccttacacctctgatgttgggtagagcaggacagaaacaatgtcattccctttcctttcagcccccagcaacaaatgatgggcgtgaattga

SEQ ID NO: 422518 - DNA, 120 bp, Artificial Sequence
  ENSG00000150995_91 (sequence is synthesized)
aatctcactcattttcatttgaaggtaataatgttcagtaacggtcagctagctacatttagcaacaatttctgagtaggtgaatatgctgatatcactgacttatcaaaatacccagta

SEQ ID NO: 422519 - DNA, 120 bp, Artificial Sequence
  ENSG00000150995_92 (sequence is synthesized)
agtcatttttcagctctaggaagaagccttgataattaaatcagcctgccttgtcaaaatcgatggtggcaaccagattgtcacaagtataaatgtctgcaggaatgttgctttctaacc

SEQ ID NO: 422520 - DNA, 120 bp, Artificial Sequence
  ENSG00000150995_93 (sequence is synthesized)
tatctgtcattaatattagagcaatgttactagtgagactccttggataagaaaacagaaaacggattttgcagtttcttagtttataccacggggcataatctgtaagcaacaagagtt

SEQ ID NO: 422521 - DNA, 120 bp, Artificial Sequence
  ENSG00000150995_94 (sequence is synthesized)
ccatgactagaaatgtccattacattttttagaaactaattagaacataggtttctgtaactcagtaggaattttgcagagaaaacctgccagacaagagtttataaatataaatgatgg

SEQ ID NO: 422522 - DNA, 120 bp, Artificial Sequence
  ENSG00000150995_95 (sequence is synthesized)
aagtgaagacccctggcaaggtgagaagtgctgggatggcctgttcatacctgtataggcacctagtagatctcttaaaaacaagaaaagaaaaaaggtggggggtacgggggaaggctg

SEQ ID NO: 422523 - DNA, 120 bp, Artificial Sequence
  ENSG00000150995_96 (sequence is synthesized)
atggcagagaatacacttaccagacaaataaatattaaccatttatttcacaagatcttcatttctcttaaagtgagttttcagaaacatttataaaatatgaatctagttacagaaact

SEQ ID NO: 422524 - DNA, 120 bp, Artificial Sequence
  ENSG00000150995_97 (sequence is synthesized)
tgctctccataaaaaaggttaaatccaccaaagctgagtgaatatttttgcatccatgggcataaaacctgatttttcaaatctggagaccacaattttctcttatttggaatatctatt

SEQ ID NO: 422525 - DNA, 120 bp, Artificial Sequence
  ENSG00000150995_98 (sequence is synthesized)
tctttccataaccgaggtatttaaagtaaacttcggtgcctctattctagtgacttacaagttgtgattatacatgcagttccctgcagttgtctttttataacctggaacgtagaagca

SEQ ID NO: 422526 - DNA, 120 bp, Artificial Sequence
  ENSG00000150995_99 (sequence is synthesized)
ttgtcctggagtttcctgagtctctattgcctggcggacaagtatgtcagggtctttgaggctatgtggaaggtgtgctgccctgctccctgcccctacccattagtgccaactgggaga

SEQ ID NO: 422527 - DNA, 120 bp, Artificial Sequence
  ENSG00000150995_100 (sequence is synthesized)
gcatcccagaccccaggggatgccgcatgagaaatgtcgtaatgcatgttataaagctcatggagaaagaaagggcatagggttgagaggaccctcaaaggagatcacttggaaagagta

SEQ ID NO: 422528 - DNA, 120 bp, Artificial Sequence
  ENSG00000150995_101 (sequence is synthesized)
aattatatcacagttttgtagaggttcctggggtctagcttaaatccttttcagctggtgaagaaatcagtcacacctaagcagagaggcttggagaagagatggcctttctttccagtc

SEQ ID NO: 422529 - DNA, 120 bp, Artificial Sequence
  ENSG00000150995_102 (sequence is synthesized)
gaggtaagggtagggtggagaaagggctcctgggtttagaggatatcagcctgtatataggctctctctctctctatcctacaaatattcatacatacatatacctatatgtgtctatac

SEQ ID NO: 422530 - DNA, 120 bp, Artificial Sequence
  ENSG00000150995_103 (sequence is synthesized)
attccaaaaatgggttggggatggcatagtgaagtaagtgcatcatggcatatcatggtgctgcatatttgtgcagaaggaaagaataagtactttggaaacaaattcaaaaacgaaatt

SEQ ID NO: 422531 - DNA, 120 bp, Artificial Sequence
  ENSG00000150995_104 (sequence is synthesized)
agaaatagctttctctgagccatctaatcccttctattgttttctttcccttgctcatttatctatcacaacaatatttaaccaggtgtctacctgacacaatacataggtgatgcccac

SEQ ID NO: 422532 - DNA, 120 bp, Artificial Sequence
  ENSG00000150995_105 (sequence is synthesized)
attggtgatggggcagaaatgagaagatatacacccagataactggaacacacaaggggatggtgaaggtggtaagaggcatattccacatgctctggaggtttcagtgagagagggtga

SEQ ID NO: 422533 - DNA, 120 bp, Artificial Sequence
  ENSG00000150995_106 (sequence is synthesized)
atgtctgggtgggtgaagaattaaggaagacttcctgaaggagatagcatctgatctggtacctgcaggatgatttgtatttcagaaggaagagatgaatggagtaggttacttcatgta

SEQ ID NO: 422534 - DNA, 120 bp, Artificial Sequence
  ENSG00000150995_107 (sequence is synthesized)
agagaatggtgcagaatgtggaaacgtgaagcagcgtgggataaaactcagtaacttgtttggtgaagggcacgggataggcatgggaaattaaacagaactgtttttggagaccagagg

SEQ ID NO: 422535 - DNA, 120 bp, Artificial Sequence
  ENSG00000150995_108 (sequence is synthesized)
ctgaagggccatatatccaggctatagggagttgggatttaatttatgggcaggggagaaatttggaaagttgtttgaggaagggaataacataatcagtgtgcaacttaaagaagctag

SEQ ID NO: 422536 - DNA, 120 bp, Artificial Sequence
  ENSG00000150995_109 (sequence is synthesized)
aagattctgcccacagcatgtaatttgttgtaaggagagtctagaattgcaggacaaagaaggaaatgttctgaatgcttggtgaaagaggcaatgagagcttcaactaacatggagctc

SEQ ID NO: 422537 - DNA, 120 bp, Artificial Sequence
  ENSG00000150995_110 (sequence is synthesized)
tttcttcacctcaagccttcctttctgtgtaattgcagcatgaattagaattctaattcaaatttctaatttgaatagataaatttttctgtctctgcttgcgttctcttttcctcctcc

SEQ ID NO: 422538 - DNA, 120 bp, Artificial Sequence
  ENSG00000150995_111 (sequence is synthesized)
ctagcttcaattgtttcatgttgctactgaggtctagcctatgtatagtatagtaaagtgcccaagtcaagagtatacaactcaatgaatttttacgtatacgttcagccatgtaaccag

SEQ ID NO: 422539 - DNA, 120 bp, Artificial Sequence
  ENSG00000150995_112 (sequence is synthesized)
cacctagaacaagaaatagaatgatagcagcacccagaaggtcccttgagcctctctttctaggcaatgtttcctttttcctcctggagacttctattgcctgttcttgaactttgtata

SEQ ID NO: 422540 - DNA, 120 bp, Artificial Sequence
  ENSG00000150995_113 (sequence is synthesized)
aatggagtcatacagtatacagtctttatgttctgtttttttttcactcagtataattattttgagattcgtatatattcttgcatgtatcagattaatttgttcctttatattactgca

SEQ ID NO: 422541 - DNA, 120 bp, Artificial Sequence
  ENSG00000150995_114 (sequence is synthesized)
taatactccatcatatggatacaccacaatttgctaatctattcacctgctgatggacatttgagttgttcccaacttctggctatttcaaataaagcttctagggatatttgtacacaa

SEQ ID NO: 422542 - DNA, 120 bp, Artificial Sequence
  ENSG00000150995_115 (sequence is synthesized)
tggttggtgggagcaccatgcagcggtgttgagtgtaaactgaagacgcagaggaagagctgggagtagggctgagtagctgcggaactagctcatcaggctcctttcctctctatcacg

SEQ ID NO: 422543 - DNA, 120 bp, Artificial Sequence
  ENSG00000150995_116 (sequence is synthesized)
tgaggtggtgccgcaaagtcagctgcgtggaaagggttggctttggctctctgttcagtagacttagggactgtttccatcagggttaggcctgatccacctgaacgcacagtgaatatc

SEQ ID NO: 422544 - DNA, 120 bp, Artificial Sequence
  ENSG00000150995_117 (sequence is synthesized)
cctcctggctgtgtcacaccacacttggagaagtcgcaattgagacaggggacatgaaaagagatgcagttttcagtttaaaagttgaatgcccaatttaatttctacccaagtagatga

SEQ ID NO: 422545 - DNA, 120 bp, Artificial Sequence
  ENSG00000150995_118 (sequence is synthesized)
ggtctcacttgagctgtgccccaggctccgcagaccaaagggtcgcaagggacccagactgatccagacacctctcttttccaggaacccctgtttgctgctagagttatttatgacctc

SEQ ID NO: 422546 - DNA, 120 bp, Artificial Sequence
  ENSG00000150995_119 (sequence is synthesized)
atcagcagccctgcaagagtgatagcttgcttttggcaatacatctacttctcctctaaattagcaattataggatgcaaggatgttacttccttgtgacataaatatttgtctgatggg

SEQ ID NO: 422547 - DNA, 120 bp, Artificial Sequence
  ENSG00000150995_120 (sequence is synthesized)
taaagacataaactcttcagtgggatagatgtgggttcacatcctgtctgcctttccaagctctgtgacggcaggttggttacccggtctccctgcatatcagtttccttatctctgaaa

SEQ ID NO: 422548 - DNA, 120 bp, Artificial Sequence
  ENSG00000150995_121 (sequence is synthesized)
tgggggcggcggtcggacctatttttcagggtgttgccaagaattaaaggagattgtgcgtgttagcacctaaacctagtgcctggcacagatttagtgcacaaacaatggctgctgttg

SEQ ID NO: 422549 - DNA, 120 bp, Artificial Sequence
  ENSG00000150995_122 (sequence is synthesized)
ttaacaatgatcattaacattttcgagtgtatacactggactcattttttttccctttatggctcatcccattttataagtacttattttcatcaggcctttactttctggctacagaac

SEQ ID NO: 422550 - DNA, 120 bp, Artificial Sequence
  ENSG00000150995_123 (sequence is synthesized)
aagagacttggaggaaaatgaaaatatcattccagaaaggcaggaggcttggttccattagtcatggttggaatgtgcatagtgattggtgcaaatgaaccatttatttccaaactctgc

SEQ ID NO: 422551 - DNA, 120 bp, Artificial Sequence
  ENSG00000150995_124 (sequence is synthesized)
cagcaggccagttgattttgcaggtgctgtgattttagtggcgtcaatctttagagtttttagtctcaagtacagccttgcttcctaggctgcggtgagaagtctgggggctggatgaca

SEQ ID NO: 422552 - DNA, 120 bp, Artificial Sequence
  ENSG00000150995_125 (sequence is synthesized)
tggctggatcatatggtagccatggtatggtatggtatggcatggtatggtatggcatggtatatattcaactttataagaaattgctaaactgttctccaaagtgattggaccatttta

SEQ ID NO: 422553 - DNA, 120 bp, Artificial Sequence
  ENSG00000150995_126 (sequence is synthesized)
cattcccacaagtaatgtgtgagagttctagttcttccatatccttaccaacacttggtatagtcagtcttttcaatgttactcgttctagtaggtacatagtgaaatttcaatgtgggt

SEQ ID NO: 422554 - DNA, 120 bp, Artificial Sequence
  ENSG00000150995_127 (sequence is synthesized)
tggatttgcatcccctgtttgatttagtaggtgtgtagtgaaatttcattgtgggtttggttaacgatgttgagcatttttctcatgtgcttatttggcatctgtgtagcttctctggtg

SEQ ID NO: 422555 - DNA, 120 bp, Artificial Sequence
  ENSG00000150995_128 (sequence is synthesized)
gcttctctggtgaaatgtttgttcagatagtttgcccatttaaaaaaattgtcttaccactcttttaacatggatgttgtaagaatcaagttcagccggacatggtggctcatgcctgta

SEQ ID NO: 422556 - DNA, 61 bp, Artificial Sequence
  ENSG00000150995_129 (sequence is synthesized)
ttgaatccaggaggcggaggttgtggtaagccgagaggatcaagttcatcttgggcattgt

SEQ ID NO: 422557 - DNA, 120 bp, Artificial Sequence
  ENSG00000150995_130 (sequence is synthesized)
tctcaaaaaaaaaaaggatcaagttcatcttgggcattgtatagaaaagtttccacagttatgataaaaaggaatctatataaagtttttgttaattcccaccctctatccattttcccc

SEQ ID NO: 422558 - DNA, 120 bp, Artificial Sequence
  ENSG00000150995_131 (sequence is synthesized)
tttcttcctcctctctacatgcatttgccctttagttactctatgtgtctacacagggacctgtcaatcctactagattataaactccttgagagacgtcagaatgaaatatcagttgtc

SEQ ID NO: 422559 - DNA, 120 bp, Artificial Sequence
  ENSG00000150995_132 (sequence is synthesized)
agattcttttaacaattatgtcttcagagtttttgctttaacatctataaaaaggttcattttctcattttaagctaattaaatacgctgggtaaaacagatcactcatttgcctatgac

SEQ ID NO: 422560 - DNA, 120 bp, Artificial Sequence
  ENSG00000150995_133 (sequence is synthesized)
gcttgggtgacagagcgagaccctgtctccgaaaagaaaagttgttttgttacaatactgtacatatgcttactctaaatttgcattgactgtgctttagtgtatttgtaaatggtgaac

SEQ ID NO: 422561 - DNA, 120 bp, Artificial Sequence
  ENSG00000150995_134 (sequence is synthesized)
actgtgctttagtgtatttgtaaatggtgaactcagtttctgaaataaaacttgttgtttgcaaaagaaaaacctgcaaaaaacaaaattgcttgagaggcagaatttggtcttgaactt

SEQ ID NO: 422562 - DNA, 120 bp, Artificial Sequence
  ENSG00000150995_135 (sequence is synthesized)
tgtcattgaagattgatgccccatggtccccaccacagagttttttacattcagaacagtctctcagaaccacttctcatgtgtaatttggatactggtacaaaaaaaaatggagacttt

SEQ ID NO: 422563 - DNA, 120 bp, Artificial Sequence
  ENSG00000150995_136 (sequence is synthesized)
ctcatctttcagagttagtttaaagtaataatgcaaactaaggaaacatagaaaatcaagaaaacaagggaagaagtgaagtgttgtttcactgatttaatgtgcctacttccattgagc

SEQ ID NO: 422564 - DNA, 120 bp, Artificial Sequence
  ENSG00000150995_137 (sequence is synthesized)
tgtttttctatgaacaggatatttttgcatagttgataccattttataaacaattttccaccttgttctcctgaatttcataggaagacgttgaatagttctttctctcattttttaaaa

SEQ ID NO: 422565 - DNA, 120 bp, Artificial Sequence
  ENSG00000150995_138 (sequence is synthesized)
tggattctggaaagtcaagtgcccctcaaaataaaagagggaagacaacaccatgtattttatatttgtagtaatgagccagggtttacattatatgtctgtagcttattgatcaccccc

SEQ ID NO: 422566 - DNA, 120 bp, Artificial Sequence
  ENSG00000150995_139 (sequence is synthesized)
gatgtgcacatacgatgctatgtctcaaggatgacatttagtgccctccaagaagtagaagtgatgccggggaaccaccaaggaagaaggaccagcatctctctggggagcctgcagacg

SEQ ID NO: 422567 - DNA, 120 bp, Artificial Sequence
  ENSG00000150995_140 (sequence is synthesized)
gtctgtggatgaaatgggctttcaaggatggacatgggactgaaagggggaaattgggcatggacctggggcataaggaatctttgtcatattccatggtagagagggcccagaggtgtg

SEQ ID NO: 422568 - DNA, 120 bp, Artificial Sequence
  ENSG00000150995_141 (sequence is synthesized)
agagcagcagttgggtttccagaacagcggttgggtctttcagaccgaggagtgctatgtagaagtgaagggccttggatgggggttggggttcatatataggagcagtgcagccctcca

SEQ ID NO: 422569 - DNA, 120 bp, Artificial Sequence
  ENSG00000150995_142 (sequence is synthesized)
aggggctttggagctgtaacggaggactatacacctggcagtagaggacaggtaaactgaggaaagcagggtcccaaggaggcagtctaagaattaaaaagttaatgggcagtaatttgt

SEQ ID NO: 422570 - DNA, 120 bp, Artificial Sequence
  ENSG00000150995_143 (sequence is synthesized)
ggaagagctgatgagaacctgaacttaaatctctgataaaagagttcatatcttgggagaggatattttctcataatggcacaagagagctctctgggtgctggaaacatattcgacctc

SEQ ID NO: 422571 - DNA, 120 bp, Artificial Sequence
  ENSG00000150995_144 (sequence is synthesized)
tttgtttgggtggtggttacatgactgtgcacatgtttaaaactccgtgatcgtatcctttgctgggacacggatggagctggagaccattatccttagcaaaataacacaggaacagaa

SEQ ID NO: 422572 - DNA, 120 bp, Artificial Sequence
  ENSG00000150995_145 (sequence is synthesized)
aatcaaataccgcatgttctcagttataagtgggagctaagtgacaggaacacatggacacttatagggggaacgacgcccactggggcttttcggaaggtggaggtcggaaggagggag

SEQ ID NO: 422573 - DNA, 120 bp, Artificial Sequence
  ENSG00000150995_146 (sequence is synthesized)
aggatggaaaaataactaatgggtactaggtttaataccagagtggtgaagcaatctatgtgataaaccccagtgacacaagcttacctatgtaacctgcaattgcaaccctgaatttaa

SEQ ID NO: 422574 - DNA, 120 bp, Artificial Sequence
  ENSG00000150995_147 (sequence is synthesized)
aataaaagtttaaaaaagaaaaaaaacaacaactcagtaagccatatgcttaaaattagtgtgctttactgtacctatgttatatgtcaatcaacaaataaaagaaatgagggcagggaa

SEQ ID NO: 422575 - DNA, 120 bp, Artificial Sequence
  ENSG00000150995_148 (sequence is synthesized)
gtgtgcctggtgagatggcattcaggaaacaggatttcaaaatcccggtctctcttttctcctcacgttttctctctgttgttacttgccgtgttcacagagctggtccctgcagaagag

SEQ ID NO: 422576 - DNA, 120 bp, Artificial Sequence
  ENSG00000150995_149 (sequence is synthesized)
agtagcaagagatgacaaaaattggtataagctctttgactgcagggataatctaattgtagcatgatgctcatgacacggaagttgcctttctccttcccttggagaaatctgattcag

SEQ ID NO: 422577 - DNA, 120 bp, Artificial Sequence
  ENSG00000150995_150 (sequence is synthesized)
gcaggggacctgcagttttcctttgcatacttttaatagaaattaagtttaggcttccacgtcgccttctttgagtgaagtgtgacacatgcatgagttttatttctcgaacgagctttt

SEQ ID NO: 422578 - DNA, 120 bp, Artificial Sequence
  ENSG00000150995_151 (sequence is synthesized)
accaggttaattcagaaaatgtttacctgattatttaaaaaaacacttgctgttgttatgacagctctgaggagaattattagaacaaacattggggagtatttagtacaacattcattc

SEQ ID NO: 422579 - DNA, 120 bp, Artificial Sequence
  ENSG00000150995_152 (sequence is synthesized)
attcttctggattagtgactgccagccaggctgtcgggagcgccctactaaatctcctgtctcttctgcttttactgggggatctttaatttgctgtgtgccatgtggaagtatcgggaa

SEQ ID NO: 422580 - DNA, 120 bp, Artificial Sequence
  ENSG00000150995_153 (sequence is synthesized)
gttctcagtgcagggaatgccctgaagtatctttaacctgagagctcttaataaatatttgttcattaacggactagttaaaataaattgcttgtgaagtctttttaatttaaaattagc

SEQ ID NO: 422581 - DNA, 120 bp, Artificial Sequence
  ENSG00000150995_154 (sequence is synthesized)
gtcataccctatatgtgatgccacatcctttctttgttcattccttcccaacttttcatcgtgaacattttcaaatactgtgtaaagaaaagcggaaagaacagtacgatggagtcccac

SEQ ID NO: 422582 - DNA, 120 bp, Artificial Sequence
  ENSG00000150995_155 (sequence is synthesized)
tttattttgtatttatgtgtatttatgtgtattttattttgtatttatgtgtttatgtatgagtcgtgtgtatattttgttgaacaatttgaaagttacttaacactttgaatgtttata

SEQ ID NO: 422583 - DNA, 120 bp, Artificial Sequence
  ENSG00000150995_156 (sequence is synthesized)
taacaaatacatgtcctatcattgttcttgacattcgtgagacccttgataataatatttgtttaggatgtaagaaaatccaggcttctatcttggtggctatttccactttgtgagaag

SEQ ID NO: 422584 - DNA, 120 bp, Artificial Sequence
  ENSG00000150995_157 (sequence is synthesized)
gacaatctgcctttgcatgtttatttcttcctcgttttagggtcagagtaggcagatattggtatcatgtatcaattattgttaactggtcttctgcagctagaacagaaagaaatacat

SEQ ID NO: 422585 - DNA, 120 bp, Artificial Sequence
  ENSG00000150995_158 (sequence is synthesized)
tgacttatctctatttgctaggtcttgtgctgagtcatgttgcattataccatttagttcttttgttgagctcctttatttccattttgtagatgaggagactgaggcttagaggtagta

SEQ ID NO: 422586 - DNA, 120 bp, Artificial Sequence
  ENSG00000150995_159 (sequence is synthesized)
tggtgcacctaaggtcaagcagcatcaggatttgtaccttgttaactttatgtacctagttctgtgctcataacaagcacatagttgatgatcaataaaatttgggcagggcatagtgat

SEQ ID NO: 422587 - DNA, 83 bp, Artificial Sequence
  ENSG00000150995_160 (sequence is synthesized)
atagttgatgatcaataaaatttgggcagggcatagtgattcatacctgtaatactaacattttgggaggctgtagctgggca

SEQ ID NO: 422588 - DNA, 120 bp, Artificial Sequence
  ENSG00000150995_161 (sequence is synthesized)
ctccagctccggattctgagaacgccactgaggtgtgttgcccgcctatatttgtagcgccagcgccagcaaatatggatgcctctcagttgtcctggttgggtgtctgaattgttgtaa

SEQ ID NO: 422589 - DNA, 120 bp, Artificial Sequence
  ENSG00000150995_162 (sequence is synthesized)
caaaaagtctctcccggtggtagatgtaggagggaggtctctaggctggctgggaacagatcattgctgacgtggatgtggctctcagtgtagaaagttctgaggagctggatccaaact

SEQ ID NO: 422590 - DNA, 120 bp, Artificial Sequence
  ENSG00000150995_163 (sequence is synthesized)
gagcatcctccaggtgccaggacatggttctttgaaagttctcactcagaaccatcttaatcctgagacatttagctgagacatgtgaggatgttaagacctttctgctgttatacaaaa

SEQ ID NO: 422591 - DNA, 120 bp, Artificial Sequence
  ENSG00000150995_164 (sequence is synthesized)
ttgactttgggtcctgtgcagagatgatgcacttttgaagttattataaatcaataataaagaatatttataattgtagaaaaagctactaataaacttgtaattttgcaatgcactttt

SEQ ID NO: 422592 - DNA, 120 bp, Artificial Sequence
  ENSG00000150995_165 (sequence is synthesized)
tctgaaagtgctgggattacaggcatgaggctctgcgcccagcctatgatgcagttaaaaaaaaaaaaaaaatctatcctccttgctgctaactaaactcactaaatgaaggactaacgt

SEQ ID NO: 422593 - DNA, 120 bp, Artificial Sequence
  ENSG00000150995_166 (sequence is synthesized)
aatgaaggactaacgtttactaaggtctgtaagatcatagagaagctttttggggagacatatttccaagtatcaaaatttaatttcagaaactattccaaaatcacagtagttcaagct

SEQ ID NO: 422594 - DNA, 120 bp, Artificial Sequence
  ENSG00000150995_167 (sequence is synthesized)
agaatgaagtgtactttatttgaaagaagacttaaaaatgaaacatgaacaaatgattgaatagctaagttgcagtgtctatgttttctaatgatcagtgtttaatatcctaatcagagc

SEQ ID NO: 422595 - DNA, 120 bp, Artificial Sequence
  ENSG00000150995_168 (sequence is synthesized)
tcctcattctgttaacggttttgttacaagacttgtgtacttgtggggtggggaaagccgtggtcccatatctgtgtctgctcagaggcgtgtgtcttgatgtccttatgcatgtgctgt

SEQ ID NO: 422596 - DNA, 120 bp, Artificial Sequence
  ENSG00000150995_169 (sequence is synthesized)
gcaatgatgcatgtatgaatcataaggacctgcccgattgagtcttgcattacaaccccttttgggttaatgtcacagcatataatatagaacttctttttcatgatctttgcaataaat

SEQ ID NO: 422597 - DNA, 120 bp, Artificial Sequence
  ENSG00000150995_170 (sequence is synthesized)
agagtagcagaagatggttttaccaagtgcatccagagaggtccctctctggcctcctcctgagccaagtttttctgtcaacatattgctagagatggacttccaggcattggggtttct

SEQ ID NO: 422598 - DNA, 120 bp, Artificial Sequence
  ENSG00000150995_171 (sequence is synthesized)
acatttagaactcacctggagaacacctgctcaggcacatgcacacaagcacacacacatttactcactgtcactccttcctttaatcgtggaaatggccaaacaagtaatccaggctcc

SEQ ID NO: 422599 - DNA, 120 bp, Artificial Sequence
  ENSG00000150995_172 (sequence is synthesized)
tgccacatggcactgggagtaagccagctgatcacacccccattttatggtgaactgtccctagtgctgggctccgggcattcagcactcagatcaaaccatcatctttaaacaaaacca

SEQ ID NO: 422600 - DNA, 120 bp, Artificial Sequence
  ENSG00000150995_173 (sequence is synthesized)
ccgcccttggaaatgtcagatgcctctgaactcaacacctgatggaagctggggtgggcaggagagaggaagggttaagaagtgaatggagaaatgaggactcaaaaagattataggagt

SEQ ID NO: 422601 - DNA, 120 bp, Artificial Sequence
  ENSG00000150995_174 (sequence is synthesized)
caactgcactgcattccatatacttacaccttggagagcaggttgcattgttgagggccattgccatacaccaagtccatgggtttatcatcatggtggtggggggcatactgactcttc

SEQ ID NO: 422602 - DNA, 120 bp, Artificial Sequence
  ENSG00000150995_175 (sequence is synthesized)
catgctctcccacgtggcatctctctgtataattaccaacctattagaggctatcagaatggcaggatgaataacgtttccctcttccctctgcctttgctcaccgaacctggggactac

SEQ ID NO: 422603 - DNA, 120 bp, Artificial Sequence
  ENSG00000150995_176 (sequence is synthesized)
ggcaattagtcatgagagtaaatattaaagatagttctttaaatgaatgacccaggttgctagtgctgactacgatgcagaactccaacctttctcttccacgtaaggtatctcatgagg

SEQ ID NO: 422604 - DNA, 120 bp, Artificial Sequence
  ENSG00000150995_177 (sequence is synthesized)
ggataggagcttctgaactgttaggtcacacagaatgaagattccttgctccaagctaagaagtgaatcccaacagcatcgagtactaaataccttggttctgaaagtcacaaagagaga

SEQ ID NO: 422605 - DNA, 120 bp, Artificial Sequence
  ENSG00000150995_178 (sequence is synthesized)
aacagtggaaacgccattccctctctggtttctgatttttccccatttgagggaaaagggccggttgaagaatagtacaactaagcctatctaggaccaaaaaaaaaaaacccaaaaaaa

SEQ ID NO: 422606 - DNA, 120 bp, Artificial Sequence
  ENSG00000150995_179 (sequence is synthesized)
ggtgggtaggggcaggctgtaaccctgctggagccttgtgtttcctgtcccgtccacctcttttaaactcagttggctcggcataacaaagaacttcagagcatgctgaaacctggtggc

SEQ ID NO: 422607 - DNA, 120 bp, Artificial Sequence
  ENSG00000150995_180 (sequence is synthesized)
caaacttgggcttgatggtgcgttcatttccaagcaggagcaaagctagtatcatttatgatactttgcacctctgaccaccaggaagtcataaccagttttgcagctgatcagtgggct

SEQ ID NO: 422608 - DNA, 120 bp, Artificial Sequence
  ENSG00000150995_181 (sequence is synthesized)
caagccaaagtatgataactcccctgaaaaggcttccttcatcagaatttgacttgatttgattggaaagctccatggaagactttttgaatgcctcttttgatatctctatctagaaaa

SEQ ID NO: 422609 - DNA, 120 bp, Artificial Sequence
  ENSG00000150995_182 (sequence is synthesized)
aaatggtctgcagccatttgctgcatcactttgggcaagaaatgtaacctgagactcagtttcctttagagtagaccggggacagtaggatgaataaatgatcatcaacatcaagggctt

SEQ ID NO: 422610 - DNA, 120 bp, Artificial Sequence
  ENSG00000150995_183 (sequence is synthesized)
gacacgatgtctaacaattgttaaatgcgtagaaagcggcacatgtgcctcaatgtgcacttcttgaatttctgagaaacctctgcctctttgtccccattcccaatcagctttgccttt

SEQ ID NO: 422611 - DNA, 120 bp, Artificial Sequence
  ENSG00000150995_184 (sequence is synthesized)
tactataatatagtcagcaataaaaagtacaaagtatcaatacatacatggtaacctggatgcatcttaaaaacttgctcagtgaaagaagtcaagcacaaaggactacctgataggatt

SEQ ID NO: 422612 - DNA, 120 bp, Artificial Sequence
  ENSG00000150995_185 (sequence is synthesized)
attttcccatttttatgaaattctagaaagtgcaaagctatagggactgacactattagatcagtggtagctgggggtagggatggggcaaggcatcacctgcaaagaggcacaaggaga

SEQ ID NO: 422613 - DNA, 120 bp, Artificial Sequence
  ENSG00000150995_186 (sequence is synthesized)
cttttagagtgataaaaatgttctgtatcttgactgtggtgacaattacatgcggtggtcacatgactatataaactgccaagattcaccaaattttacacttaaaatgcatggattttt

SEQ ID NO: 422614 - DNA, 120 bp, Artificial Sequence
  ENSG00000150995_187 (sequence is synthesized)
tcaatgaactagggcagccagcagctggtggaagagctgtgccctgcaaaggtgtctcctccccagtggtgccacaatccaagcatctctgaagaagtgaagctcctttatataagtggc

SEQ ID NO: 422615 - DNA, 120 bp, Artificial Sequence
  ENSG00000150995_188 (sequence is synthesized)
cttaatcatgtagtgctgcttgtttacatctgaaggagactcaaaatgtgacagcatttgaaataggggtgttttttttttaatgagtgttttacagaactatatttttagccgtgttgg

SEQ ID NO: 422616 - DNA, 120 bp, Artificial Sequence
  ENSG00000150995_189 (sequence is synthesized)
aactgaccattaggaaatagtgtcctgtagggatgactggaagcagggagtacggaggaggagggaactcctgacatgtttttgtggggaggaaggggattgggggaggcttcctggaag

SEQ ID NO: 422617 - DNA, 120 bp, Artificial Sequence
  ENSG00000150995_190 (sequence is synthesized)
aagtaatgtcaaagctaagacctgagatgaatgagaagggaagaacttcccagcagaaggagcatgtgtggaggcttggaggtcaaaaaatgctgatgggactggttatggatggggcag

SEQ ID NO: 422618 - DNA, 120 bp, Artificial Sequence
  ENSG00000150995_191 (sequence is synthesized)
agaatttgaggtgagagttgggactggtaagccaaaaaagttattgaggaatctgtaacagtgcatgttttaggtctgtcccctgtactcagtgaaggcacagatttgtgagagaaccct

SEQ ID NO: 422619 - DNA, 120 bp, Artificial Sequence
  ENSG00000150995_192 (sequence is synthesized)
gtgtgtgtgtgtgtgtgtgtgtttcccccagaatgagcacatttcatgatattctcttatgggggaaaatgtaccatttgatgcatcagttgctatggtaactgctagggtttttctgtt

SEQ ID NO: 422620 - DNA, 120 bp, Artificial Sequence
  ENSG00000150995_193 (sequence is synthesized)
ctagggtttttctgttgaaggagagacaaaatggtaatgtgagatccctttgtaacttgagtttggcatccagtctgcataaatgtggagttcctgttcctggcgtccacgtgctccttt

SEQ ID NO: 422621 - DNA, 120 bp, Artificial Sequence
  ENSG00000150995_194 (sequence is synthesized)
cattacctcctgcttgcttgattgcagactgaccagggtcttgctgttcaccctcaaaaacacgaaggggggaagaaaaaagccaccactagaaactgaaaatctaagcaagtcactcta

SEQ ID NO: 422622 - DNA, 120 bp, Artificial Sequence
  ENSG00000150995_195 (sequence is synthesized)
gctccaagtggaatcgtggtacacaggctccagttgagacccccttaagagatgtgtgtttgttgactggtcacaaccatactgcctttcacttgaccactcaaccctatgctctttcag

SEQ ID NO: 422623 - DNA, 120 bp, Artificial Sequence
  ENSG00000150995_196 (sequence is synthesized)
attcccgttgcgatggctacgttggctgtcttccctggctgcggcttacgggtctcagcccagccatctagcgctcaaacaatgttctcacagtgccaaaggggatccagtcagagactc

SEQ ID NO: 422624 - DNA, 120 bp, Artificial Sequence
  ENSG00000150995_197 (sequence is synthesized)
aggatggtcagctgccaatcactcctgttgctggaactcaaagtctgtgtcatactgaaagaaaatcaaatagatgcattatgatatttaaaaagggaaatcatatttaatctatcatat

SEQ ID NO: 422625 - DNA, 120 bp, Artificial Sequence
  ENSG00000150995_198 (sequence is synthesized)
tcaacatggagacaaccttttctttctctcaattctttcttcataggctttcttgaatgtagctttcaaacttgtacttctcttatgaagtcagccttttaaatcactgcgttcccagtg

SEQ ID NO: 422626 - DNA, 120 bp, Artificial Sequence
  ENSG00000150995_199 (sequence is synthesized)
acttcttcagagagtgctgatgtgtttatactggtgcctgagactggaataccagtaaagttgtatcttgtttccagaatggggtattccaagtcattaaagcatcttgcaccgaaactt

SEQ ID NO: 422627 - DNA, 120 bp, Artificial Sequence
  ENSG00000150995_200 (sequence is synthesized)
tcttccccacctgtgagcagtttatttaaaaagtacttaaaatatcaccagtaacttacccatttgaagcactcttggaattttgaatttacagtcagtccagtgggaaatgagtttcat

SEQ ID NO: 422628 - DNA, 120 bp, Artificial Sequence
  ENSG00000150995_201 (sequence is synthesized)
gagctgatagaagttaccctcctttgctgaactatgaagagaggcatatttgtgggtggaatggagagaggaaatttgggatttttttgttttctgcacattcatttaaaaatcagtccc

SEQ ID NO: 422629 - DNA, 120 bp, Artificial Sequence
  ENSG00000150995_202 (sequence is synthesized)
ctcccgtctcccctgtttatcccatcccaatctgtccctggaatctttaattagcagcatgaattaacagagtagataaaccctttctgggactttccatggttttgatgattgacagga

SEQ ID NO: 422630 - DNA, 120 bp, Artificial Sequence
  ENSG00000150995_203 (sequence is synthesized)
gccaagagtttcctgcctatctcctttcctccttggtcccccacttctcccagggtgcctcacgtttcccagggtccctgcttcagtctgctccctcccatcttgttttgcaaatgcctc

SEQ ID NO: 422631 - DNA, 120 bp, Artificial Sequence
  ENSG00000150995_204 (sequence is synthesized)
acttgaaatctccagacctattctcagagcttattaacaaatcattttaaattcttctgactcatggttcagttgcaggtctcttcaaaagaactctggagtctctgttttagagacctg

SEQ ID NO: 422632 - DNA, 120 bp, Artificial Sequence
  ENSG00000150995_205 (sequence is synthesized)
ctagatttcaacacctttcctctcggccagacttcttctccctcacctctcttcatgacgtaccagaggaactccgtgacttgctactttgattccggaaaggagtccagggaaaattta

SEQ ID NO: 422633 - DNA, 120 bp, Artificial Sequence
  ENSG00000150995_206 (sequence is synthesized)
tacagcctttgacttttagaaccttcagattaggaggtggtcttggggccccttaggagtgcgggtgaaagtgtagagctgagaatgcagaacgcatgctgcctctggttactggcttgc

SEQ ID NO: 422634 - DNA, 120 bp, Artificial Sequence
  ENSG00000150995_207 (sequence is synthesized)
cagtatcccccagtattactgaacaatggaggtttttttggttagagtaataacaaagagttactatatccctgttcaggactctttgatatttatatttttaaaaaattttattacaga

SEQ ID NO: 422635 - DNA, 120 bp, Artificial Sequence
  ENSG00000150995_208 (sequence is synthesized)
aaggttgaaatgtatataaaaggagtcagaaaggttttgaaacccctcattcataactctgcttcaacagcaactgtcagctcatgcccactcttgtctcacttatatccctcgctgctt

SEQ ID NO: 422636 - DNA, 120 bp, Artificial Sequence
  ENSG00000150995_209 (sequence is synthesized)
ccccttctctcctgtattgttttaaagaagattccagacaaaatgccattttacctatgttgggtttttttttatatatttgatatctgccactcatgccactaatttatttcctatagc

SEQ ID NO: 422637 - DNA, 120 bp, Artificial Sequence
  ENSG00000150995_210 (sequence is synthesized)
attatgaggtttttgttgttgttttggtttgtcttttgtttttttaaccatttggcccatcgactatttttgtaagaaaggcttactcttggcttattgtatcatcttattctattaccc

SEQ ID NO: 422638 - DNA, 120 bp, Artificial Sequence
  ENSG00000150995_211 (sequence is synthesized)
tgatatcttaatattttttcggaccttgggaataaaccttgtggttgaaataacatttttatattgctatgtggaagctgacctgtaagccttttcaatttgtcttaattttatcaactt

SEQ ID NO: 422639 - DNA, 120 bp, Artificial Sequence
  ENSG00000150995_212 (sequence is synthesized)
accccaaagagatttttgtttgttattgttagttgtccttcaaaattactgttctgtcttatcattgtgtgagagggaacttcagtcaatattttagattgctaccgttttttaaaaaac

SEQ ID NO: 422640 - DNA, 120 bp, Artificial Sequence
  ENSG00000150995_213 (sequence is synthesized)
atctggttttctgagaaaatattgaagttaacttcagagtttctaaatgcttccatgaataatttattctttcgccaagtgaaactgggccaattataactgagtacccctgtgtgtttt
